United States Patent Application Publication US 2025/0084491 A1 - sequence listing, part 12

SEQ ID NO: 215151 - DNA, 75 bp, synthetic construct
  source 1..75: mol_type = other DNA
gcagtttctccactaatgccgatggcaaatgggatgacaactggggcacctgtacattacgggactgtagcggca

SEQ ID NO: 215152 - DNA, 75 bp, synthetic construct
  source 1..75: mol_type = other DNA
ggaccgagcaccctatgacgtttgggtgagggaggggctgctgcgcaccacgccaggagcttcggtggattactc

SEQ ID NO: 215153 - DNA, 75 bp, synthetic construct
  source 1..75: mol_type = other DNA
ttccgatggaagcataataagctttttctgcttctgccggaggaatatggcccagcctttccagcaatcgtcgat

SEQ ID NO: 215154 - DNA, 75 bp, synthetic construct
  source 1..75: mol_type = other DNA
tgactgctatcacaagattaggtcaggtcgctgataccacagcggataacgtgaatagaaagaatgggaaaccat

SEQ ID NO: 215155 - DNA, 75 bp, synthetic construct
  source 1..75: mol_type = other DNA
cgatctgttcaaaagcactaccgttaccagtagcaatgaagaccttaaagtttccaccgaagcaggtgctgcccc

SEQ ID NO: 215156 - DNA, 75 bp, synthetic construct
  source 1..75: mol_type = other DNA
cacgcttgaatgttccgcatcactcactgcccgcaatttttcggtgagtgattacactgattgcacaggccgcaa

SEQ ID NO: 215157 - DNA, 75 bp, synthetic construct
  source 1..75: mol_type = other DNA
aaagccgagaaacaaacgatgcaggtagcatcacgaattgagaagcgactaaataaaacattcagagttaatcct

SEQ ID NO: 215158 - DNA, 75 bp, synthetic construct
  source 1..75: mol_type = other DNA
gctgttcggcaggatctctcgcccacgatacccgaggctgtatcgccgccacttgccggtctggcccacctggtg

SEQ ID NO: 215159 - DNA, 75 bp, synthetic construct
  source 1..75: mol_type = other DNA
atattggtgcgtacatttacatgctggcgatcatactaataatagatagatacagaaagaaaaatgatttaaaat

SEQ ID NO: 215160 - DNA, 75 bp, synthetic construct
  source 1..75: mol_type = other DNA
tatattagtaacactatcgctatatatctctcatactaaaagtagggcatcgttatggcctgttctttctgtatt

SEQ ID NO: 215161 - DNA, 75 bp, synthetic construct
  source 1..75: mol_type = other DNA
ctcagtgggtgggatttatcaactgtatcattctatttcacagaaataataccatatgctatagcgataaaaata

SEQ ID NO: 215162 - DNA, 75 bp, synthetic construct
  source 1..75: mol_type = other DNA
cccagcaagctccgtggacgacatctacgagcaatgccgcaaagaatcaattcgacgcgcgattgctgcttttat

SEQ ID NO: 215163 - DNA, 75 bp, synthetic construct
  source 1..75: mol_type = other DNA
acttccagttcctgattgaagagttagctgttggcgcgcagttcaacattccgtacatccatgtgctggtcaaca

SEQ ID NO: 215164 - DNA, 75 bp, synthetic construct
  source 1..75: mol_type = other DNA
tgggcagcctgatagcactcataaaatacaagacaaaaaagttcttatttggaaaaatggaatagattcacttta

SEQ ID NO: 215165 - DNA, 75 bp, synthetic construct
  source 1..75: mol_type = other DNA
gtttgcgatgtccctgatgaacttattgatttcacgtttgaatggaaaggactgaaaattcacaatgtgtgttaa

SEQ ID NO: 215166 - DNA, 75 bp, synthetic construct
  source 1..75: mol_type = other DNA
atttactacagctggggggctatctccccgatgggcgggtacatcttcggtaaaaacgataaaggcggttataac

SEQ ID NO: 215167 - DNA, 75 bp, synthetic construct
  source 1..75: mol_type = other DNA
cgttcgacaatgttattttacgtaatgcatcagagaaatgcgggtttgccgatccactttggtactactggaatg

SEQ ID NO: 215168 - DNA, 75 bp, synthetic construct
  source 1..75: mol_type = other DNA
tgatcttattggtggtatctctgcgaaattagccggcgttaaaaaaataatttggtgtgttagaagtactgacat

SEQ ID NO: 215169 - DNA, 75 bp, synthetic construct
  source 1..75: mol_type = other DNA
aagggtgtgctatccggtgaattttcagaaactacgtttataagctgcccggaatgctttggtgatgatgattgc

SEQ ID NO: 215170 - DNA, 75 bp, synthetic construct
  source 1..75: mol_type = other DNA
cagcgtcgcatcagacatcagcacggtgcctgtgccggatgcggcgtggacgccttatccggcctacatagtgca

SEQ ID NO: 215171 - DNA, 75 bp, synthetic construct
  source 1..75: mol_type = other DNA
tccagccgtatgaagcggcgggcattaactacggcgttgcgccgctgccgacgctgccggacggtaagccaatga

SEQ ID NO: 215172 - DNA, 75 bp, synthetic construct
  source 1..75: mol_type = other DNA
taagtgggataaaaacaacttaccgcgagagattgatgtgagtatcgatggttttaaatatcgtgtaacgcttaa

SEQ ID NO: 215173 - DNA, 75 bp, synthetic construct
  source 1..75: mol_type = other DNA
taggtttttttattcccatatctcttacttcattttccttttcttcttcagctaataacaatcaaacgaaggttc

SEQ ID NO: 215174 - DNA, 75 bp, synthetic construct
  source 1..75: mol_type = other DNA
acagcaaactctgatggtattagagttcaaagggtgagagactctgcatcaaaatggcaatatgggcaaagaata

SEQ ID NO: 215175 - DNA, 75 bp, synthetic construct
  source 1..75: mol_type = other DNA
gctgcgcaggcaaatgaacaagcggtgccggggatcattctgcaggaactgagccgcctgttaccctctccctga

SEQ ID NO: 215176 - DNA, 75 bp, synthetic construct
  source 1..75: mol_type = other DNA
gtgaaaacattctctataggatttgatgataaaaaatatgatgaggctatctttgctgttgaagttgcccgtcat

SEQ ID NO: 215177 - DNA, 75 bp, synthetic construct
  source 1..75: mol_type = other DNA
caacgctgaatcagtcatcagaccgcgaccttaaagacgatattctcgttatcagcgacgcgacgaaagcaatcc

SEQ ID NO: 215178 - DNA, 75 bp, synthetic construct
  source 1..75: mol_type = other DNA
gacctgtatacccgttttgaaaattggctcagagagcaggggattctctggcgggataaagtcaatctggacagc

SEQ ID NO: 215179 - DNA, 75 bp, synthetic construct
  source 1..75: mol_type = other DNA
cgcccgccgtgcgtactacccggctggattataccgctacgcgaatcggtttccggctggttaagggccgctcgc

SEQ ID NO: 215180 - DNA, 75 bp, synthetic construct
  source 1..75: mol_type = other DNA
ggcaaacaatggcggcatctgcccgtcagttacctgtcggggccagagtgctgtctggaacttcgcgcgaacagc

SEQ ID NO: 215181 - DNA, 75 bp, synthetic construct
  source 1..75: mol_type = other DNA
ggtattgcttatgtgcttgatgtgctggcaaggcgtcacaatattcttattgtagtttccgcaggtaattttaat

SEQ ID NO: 215182 - DNA, 75 bp, synthetic construct
  source 1..75: mol_type = other DNA
accgggttgtatctgctcaacagcgggaacgcggtacggtacaatcatcagtatggacttttcgtcagcgtaacc

SEQ ID NO: 215183 - DNA, 75 bp, synthetic construct
  source 1..75: mol_type = other DNA
cggatgaaaaatggtttatcgttgtaacccgtcaagacagagattggggcgaagcattcagcagcgagcaggagc

SEQ ID NO: 215184 - DNA, 75 bp, synthetic construct
  source 1..75: mol_type = other DNA
tgacagcaacggtatcaccggacggtaaacgcagcaccatcgaatatgataaacgcgggcgtccggtgagtgtga

SEQ ID NO: 215185 - DNA, 75 bp, synthetic construct
  source 1..75: mol_type = other DNA
attggtgcatcattgttgaatttatatgatttgactaaaactgttcaaacagtaaccacggttaaccaagtggtt

SEQ ID NO: 215186 - DNA, 75 bp, synthetic construct
  source 1..75: mol_type = other DNA
cgagtgggcaactttttcaaagcaaattacatcgaaacatagtgttgacctgacgcctgaacttgaaaaatatat

SEQ ID NO: 215187 - DNA, 75 bp, synthetic construct
  source 1..75: mol_type = other DNA
gaagagctcaaaaagctactaacagaaattgatgtacctagtcagtcagtagagataaccgggtatctatacgag

SEQ ID NO: 215188 - DNA, 75 bp, synthetic construct
  source 1..75: mol_type = other DNA
cctgcaatagttgagaaaccacaaaaagttactttttacttcacaaaaaatcaggacttcgaaaaaactttttat

SEQ ID NO: 215189 - DNA, 75 bp, synthetic construct
  source 1..75: mol_type = other DNA
acacgcctacaacgaacaggggctggcaaaccgcgtcacgccggacagcctgccgccggtggagtggctgaccta

SEQ ID NO: 215190 - DNA, 75 bp, synthetic construct
  source 1..75: mol_type = other DNA
aaggtgaagcaattgttagaccggatgaaccagctttctttactttcaatcaatcagctaatgaccagttcacgc

SEQ ID NO: 215191 - DNA, 75 bp, synthetic construct
  source 1..75: mol_type = other DNA
aaacccgtaaagggcttgacatattcctccgcgcattaagaaaaatatctgacgaagataaagagaccgtctctg

SEQ ID NO: 215192 - DNA, 75 bp, synthetic construct
  source 1..75: mol_type = other DNA
cgagaagtgatgttatagttaaaacaaatgaaaagccagcttctggcgttgagcttgtatttttcggtcgacttg

SEQ ID NO: 215193 - DNA, 75 bp, synthetic construct
  source 1..75: mol_type = other DNA
gcatcaatggcggtcattctgtcagtaacgagttacaacttttaaataataagattgatggtcttatttctcagc

SEQ ID NO: 215194 - DNA, 75 bp, synthetic construct
  source 1..75: mol_type = other DNA
cttaaatttaaagaaattgattttattgaccaggttcttattgtatcatcattagtcatgttgattgcctatgtt

SEQ ID NO: 215195 - DNA, 75 bp, synthetic construct
  source 1..75: mol_type = other DNA
gttcaagacaaattgtaaagttagggtttcagagttgtttgaggaaaatgttgtgaaaaataaactattcaaagt

SEQ ID NO: 215196 - DNA, 75 bp, synthetic construct
  source 1..75: mol_type = other DNA
atatcgttacagggatataaattgcaagtcgtcccagaacctctattttggtatagagttgcaaactccggcatg

SEQ ID NO: 215197 - DNA, 75 bp, synthetic construct
  source 1..75: mol_type = other DNA
atggcaaaccgtaaacaacagcgcgcccgcactgagcgccgtcacatccagaccgaaatcaaccgcagactgtac

SEQ ID NO: 215198 - DNA, 75 bp, synthetic construct
  source 1..75: mol_type = other DNA
gaccctgttttgcagaaatacatcaaatctcagttttacgggctatctgctaaagctggtcagatggataattca

SEQ ID NO: 215199 - DNA, 75 bp, synthetic construct
  source 1..75: mol_type = other DNA
aacaacgcttttaaatagtttaggtggaagcggtaagagtcttggtgaaagtcttggtaatctcatgacttctat

SEQ ID NO: 215200 - DNA, 75 bp, synthetic construct
  source 1..75: mol_type = other DNA
taaaatctcagacgtaccaaaatattgaggtcatcttggttgatgatggaagtacgacagaagattctcatcgtt

SEQ ID NO: 215201 - DNA, 75 bp, synthetic construct
  source 1..75: mol_type = other DNA
agcaattcatgtccagggcgcaagacgaggcaccagtctggttcgccgggtggcccggaaagtgaagtcaatgtt

SEQ ID NO: 215202 - DNA, 75 bp, synthetic construct
  source 1..75: mol_type = other DNA
attgcctccacgttcagttacctggcagacgatctgcgggatatgcagcgcctggttaacgaaccggggaataac

SEQ ID NO: 215203 - DNA, 75 bp, synthetic construct
  source 1..75: mol_type = other DNA
cctgagctgaaaggggtggccatcgctgccatagaaagcactctggccagggacgctgataatctttctaagatc

SEQ ID NO: 215204 - DNA, 75 bp, synthetic construct
  source 1..75: mol_type = other DNA
aatggttaaccttcagaaatttgatccccatactatttggtggttaactatggcattattcggtgggttcattgg

SEQ ID NO: 215205 - DNA, 75 bp, synthetic construct
  source 1..75: mol_type = other DNA
cgtgcggaagcctccggcgcgggccggattattcagaggaggtcaggttcagggggaagctgtggccagccggct

SEQ ID NO: 215206 - DNA, 75 bp, synthetic construct
  source 1..75: mol_type = other DNA
ggacaaaaaactgaaaaattaatgcaacggataattagccttgcttccaaagaaaatgatatcgtcttggacttt

SEQ ID NO: 215207 - DNA, 75 bp, synthetic construct
  source 1..75: mol_type = other DNA
gcaacggttatctgcgcctcagtaactggcgtagtgcaccggaactcgacaatgactatgaagcacgtccggcga

SEQ ID NO: 215208 - DNA, 75 bp, synthetic construct
  source 1..75: mol_type = other DNA
tgctggaacgtgctgactatctggcgaaggaacataccaaagctcactgcaccggtgagcgcaattttggctgta

SEQ ID NO: 215209 - DNA, 75 bp, synthetic construct
  source 1..75: mol_type = other DNA
gaaacagatcactggttcacagacggtgagcggtacctggaaaaccaacctcacgccggacaaactgggcgtggt

SEQ ID NO: 215210 - DNA, 75 bp, synthetic construct
  source 1..75: mol_type = other DNA
acgtctgcgccagcgtcgcctgtccggtaggaatttcaccaatgcgcataaaccgcctgcttaagcaggaattac

SEQ ID NO: 215211 - DNA, 75 bp, synthetic construct
  source 1..75: mol_type = other DNA
ccctcgatgattggcttcaatgcaaatttagcctctgaggctgcgacagggaaagtccctgataatgtggcggtt

SEQ ID NO: 215212 - DNA, 75 bp, synthetic construct
  source 1..75: mol_type = other DNA
agtatctgaagtcgagcggtcaggatgccggacgttatcagctcaacatgtggagcaaaatcttccagccgctat

SEQ ID NO: 215213 - DNA, 75 bp, synthetic construct
  source 1..75: mol_type = other DNA
gctctggaaaatgtgctgtccgctgagtacgaagtggatgggatcctccataaggtagcattcagtgaactggaa

SEQ ID NO: 215214 - DNA, 75 bp, synthetic construct
  source 1..75: mol_type = other DNA
atatttgcagtgtaagcgacgtaaagatcaatctgttgagcccacccctttatattatctctggagtagggaagc

SEQ ID NO: 215215 - DNA, 75 bp, synthetic construct
  source 1..75: mol_type = other DNA
ggtacgcagaatacgatgaatggggtaaccagctgaatgaagagaacccgcaccagctgcagcagctcatccgcc

SEQ ID NO: 215216 - DNA, 75 bp, synthetic construct
  source 1..75: mol_type = other DNA
gttgaaaggcaagccgggtgaggttaaatcgctggtttcttccttgcaaaccaaatatgcgctgaaaggttatga

SEQ ID NO: 215217 - DNA, 75 bp, synthetic construct
  source 1..75: mol_type = other DNA
tatggcgcgtggctgggtggcttcttctgcatctgcgcaggcaacggactggctcagtcgttggggaactgcccg

SEQ ID NO: 215218 - DNA, 75 bp, synthetic construct
  source 1..75: mol_type = other DNA
cggcgcaacggttgccccgacggtgatcaccgagccggacggcacggtggaaatcagtgtcaccagccagacggc

SEQ ID NO: 215219 - DNA, 75 bp, synthetic construct
  source 1..75: mol_type = other DNA
agcacggcgcaggtcgcggagctggtggtcattaaggatggttcagaggcggacggttcgacggcgaacacgctg

SEQ ID NO: 215220 - DNA, 75 bp, synthetic construct
  source 1..75: mol_type = other DNA
ggtgtggctggaacgcgatgatgatgctggtttacgggatatgctgaagcgtgctgactatctcgcgaaagagta

SEQ ID NO: 215221 - DNA, 75 bp, synthetic construct
  source 1..75: mol_type = other DNA
aaaacacaggcaaaaggtttgcaggatttcgccttaagcgaatggaaagacaacggtaacggaacctatacccaa

SEQ ID NO: 215222 - DNA, 75 bp, synthetic construct
  source 1..75: mol_type = other DNA
ggaatgcgctgaatgggcagacggtcagcgtgttggcagacaacggtgccacgactgctccgatggtcaccacgc

SEQ ID NO: 215223 - DNA, 75 bp, synthetic construct
  source 1..75: mol_type = other DNA
tttacttcctggcaccggtttaaaagcacagctacagatgtccggctgggcgagcgccctgacttcaaatgttta

SEQ ID NO: 215224 - DNA, 75 bp, synthetic construct
  source 1..75: mol_type = other DNA
cagttatagcggaagattcgaaagggaatttctcccggcgtgaagaaagtatggtggttgtagaaaaacccacac

SEQ ID NO: 215225 - DNA, 75 bp, synthetic construct
  source 1..75: mol_type = other DNA
gcaaggatattcaggtcactattcctccctaccgattcacggcaatgcctgaaaccgacaacacttacccgatag

SEQ ID NO: 215226 - DNA, 75 bp, synthetic construct
  source 1..75: mol_type = other DNA
aggcagccgttatgagctggtggatcgcaacaacaacatcgttctggaatatcgcaaaaaagaactggttcgcct

SEQ ID NO: 215227 - DNA, 75 bp, synthetic construct
  source 1..75: mol_type = other DNA
cgggaataacggtgaacttcaccatgccacaggacgttgcggcaaactttaccctcgaaaataacggcattgcca

SEQ ID NO: 215228 - DNA, 75 bp, synthetic construct
  source 1..75: mol_type = other DNA
cgagcgccctgacttcaaatgtttacagtattagtggcgatgccgccagcgcacaaattgtctcgatgcaagtga

SEQ ID NO: 215229 - DNA, 75 bp, synthetic construct
  source 1..75: mol_type = other DNA
tgttttctaaatgcgttaaccactatgaggcggagagtgcatctccgcctttgtatgtgcgtcgggcatggcacg

SEQ ID NO: 215230 - DNA, 75 bp, synthetic construct
  source 1..75: mol_type = other DNA
gttggcgctgatttgcaggaaagcgaccgtttatatcgttactccataaccaatcgtcccgaccttaacaggatg

SEQ ID NO: 215231 - DNA, 75 bp, synthetic construct
  source 1..75: mol_type = other DNA
cttctgccgccgatccagagtttatcggtcagatactcctgaccatggtcgatgaagaggcgctccctttgacgt

SEQ ID NO: 215232 - DNA, 75 bp, synthetic construct
  source 1..75: mol_type = other DNA
acccggagacgggggaactgctgtggcagcatgagacaacacacgcctacaacgaacaggggctggcaaaccgcg

SEQ ID NO: 215233 - DNA, 75 bp, synthetic construct
  source 1..75: mol_type = other DNA
ttaactctattgaaatagatgctatcgttacaagatttaattctttcacagggaacgggcgacttcttgctgatg

SEQ ID NO: 215234 - DNA, 75 bp, synthetic construct
  source 1..75: mol_type = other DNA
cagcgccagcggcccgaaccagaagtgggcgggtgacatcacgtacttgcgtaccgatgagggctggttgtatct

SEQ ID NO: 215235 - DNA, 75 bp, synthetic construct
  source 1..75: mol_type = other DNA
tgatgtggtgcaaggaaataatatagtagatcttgatttactacgtaattttaatggggtgccaggtttaaatag

SEQ ID NO: 215236 - DNA, 75 bp, synthetic construct
  source 1..75: mol_type = other DNA
tcaatggggtgccaggtttaaacagagataactttatttatatcagcaatattttttcaaatataaaacaacgga

SEQ ID NO: 215237 - DNA, 75 bp, synthetic construct
  source 1..75: mol_type = other DNA
tttattaaagatctgggataaaccccgctgggcaagccatatccgcgtcaatatgtctgtattactgcaattgcc

SEQ ID NO: 215238 - DNA, 75 bp, synthetic construct
  source 1..75: mol_type = other DNA
acgttttggcgcaaccgaagtagcccccttaatggctcgcgcctttcgtcagcttaaatctgtacgtgatgttgc

SEQ ID NO: 215239 - DNA, 75 bp, synthetic construct
  source 1..75: mol_type = other DNA
gcgtattgatgaaaaaacatggcaacggtgcatgaaaaagcttactcaagcgttgccttccctgtctccacgtaa

SEQ ID NO: 215240 - DNA, 75 bp, synthetic construct
  source 1..75: mol_type = other DNA
atgataggtcatatcacaaattctggcggcaatgactctttgatgaaacatgatgtggtgcaaggaaataataaa

SEQ ID NO: 215241 - DNA, 75 bp, synthetic construct
  source 1..75: mol_type = other DNA
tgtttaccactatgatgaatacggcagactgacggagaagacggaccttatcccggcgggtgttatccggacgga

SEQ ID NO: 215242 - DNA, 75 bp, synthetic construct
  source 1..75: mol_type = other DNA
tggcggcagcaagttcagaggcaggaacaacctgttctccggcggcgacagcagtaagacttccttcctagtatt

SEQ ID NO: 215243 - DNA, 75 bp, synthetic construct
  source 1..75: mol_type = other DNA
attttgattctgatcgtggcggtatttggctttatcgcgccgaacttttttaccgaaagcaacctgctgaatatt

SEQ ID NO: 215244 - DNA, 75 bp, synthetic construct
  source 1..75: mol_type = other DNA
atgacgacctctgcaaagacctctgccaaaaaaatgctgatgagcgatctgatgcaaacggtcggcattttgccg

SEQ ID NO: 215245 - DNA, 75 bp, synthetic construct
  source 1..75: mol_type = other DNA
aaacaggaattgcgccggaaattcatactgacgatgatgacgcactgaaggagattttaactcatgtcaccgagg

SEQ ID NO: 215246 - DNA, 75 bp, synthetic construct
  source 1..75: mol_type = other DNA
gaggcgtgatgaactcaatgttgtcctagctttttccggcttttatgtccgcgaagatggtaaggtcacgaacgc

SEQ ID NO: 215247 - DNA, 75 bp, synthetic construct
  source 1..75: mol_type = other DNA
agaaaatcaggtgttgatttacgatcgtaaaacaaaaatcacaccaacactggatttgccgctcgtggttagcaa

SEQ ID NO: 215248 - DNA, 75 bp, synthetic construct
  source 1..75: mol_type = other DNA
aagatgcagggcgcaggcaatcccagagaacatagaccggccaaataccgcgatccccgaaacgcagaaaatacc

SEQ ID NO: 215249 - DNA, 75 bp, synthetic construct
  source 1..75: mol_type = other DNA
ggttttggtggagtgctcgtttcacacggtctgcgctctattgccagtacggcccttaatgagcaaggtttccct

SEQ ID NO: 215250 - DNA, 75 bp, synthetic construct
  source 1..75: mol_type = other DNA
ttcagaagtgatccagaaaaggccatgatacggtttttcgaagaaagaaacagtgacgtcactgctctgttaaaa

SEQ ID NO: 215251 - DNA, 75 bp, synthetic construct
  source 1..75: mol_type = other DNA
ttggctttatcgcgccaaacttttttaccgaaagtaacctgctgaatattacccgccaggcgtcaatcaacattg

SEQ ID NO: 215252 - DNA, 75 bp, synthetic construct
  source 1..75: mol_type = other DNA
ccggtggtacggatgctgcggccttacctgcagcgttagccagtgtgaaaggctgggtcagcgcgaaattgcaat

SEQ ID NO: 215253 - DNA, 75 bp, synthetic construct
  source 1..75: mol_type = other DNA
aggctttggtatcgctcgactgtccaaagaaaagcagcaacagctcatgatggaaaccataaatgaaagcaaata

SEQ ID NO: 215254 - DNA, 75 bp, synthetic construct
  source 1..75: mol_type = other DNA
gtgtccaataccgccggcggcgccggaggtacggcggcgaccggagatatcaggatcaacggtggtaccggctca

SEQ ID NO: 215255 - DNA, 75 bp, synthetic construct
  source 1..75: mol_type = other DNA
tttgtttggatagccagcaattggttccgggcagttggcaagaatattttcccaatctctacaggcaagagttat

SEQ ID NO: 215256 - DNA, 75 bp, synthetic construct
  source 1..75: mol_type = other DNA
taaagattacggccatgattattttcctgatcccaagactgaagatattaaggggttgggagagttgaaagaggg

SEQ ID NO: 215257 - DNA, 75 bp, synthetic construct
  source 1..75: mol_type = other DNA
tccagggataaggctgcgctttccggggcgatggagagccggaaacaaaaggagaaaaaagcgaaggatgcagaa

SEQ ID NO: 215258 - DNA, 75 bp, synthetic construct
  source 1..75: mol_type = other DNA
tgtccgcagccgagcaacagaaaacaaatctgctgaacgccgcaaattcaaaaatcagcctgtggcaaacggaac

SEQ ID NO: 215259 - DNA, 75 bp, synthetic construct
  source 1..75: mol_type = other DNA
ttactatattaatgattttgtcaaaggctaacgcagagttattaattactaaagaaagtcttccctatcctgagc

SEQ ID NO: 215260 - DNA, 75 bp, synthetic construct
  source 1..75: mol_type = other DNA
accagtagtcatctggcacagggaacagaactcaccgtcacacttaacggcaaaacctacacgaccagcgtaggc

SEQ ID NO: 215261 - DNA, 75 bp, synthetic construct
  source 1..75: mol_type = other DNA
aacgtagagccaggccaaaccgtcaccgttacctttggcggtaaaaattacactgccagcgtggcgagcgatggt

SEQ ID NO: 215262 - DNA, 75 bp, synthetic construct
  source 1..75: mol_type = other DNA
ccaaacatttatcttttaaccaatcattacccgcctttcactactcgaatactttgacggtctgggccgtcccct

SEQ ID NO: 215263 - DNA, 75 bp, synthetic construct
  source 1..75: mol_type = other DNA
ttatgcttacgcttataacttttatgaaaaaggaagacttgacgaagctgaactcttttttaaatttctctgtat

SEQ ID NO: 215264 - DNA, 75 bp, synthetic construct
  source 1..75: mol_type = other DNA
ctcaaccggatggttatgtgcgctttgaatttcacggtaagacgatggaaggcgagttcttccgctatgagtcat

SEQ ID NO: 215265 - DNA, 75 bp, synthetic construct
  source 1..75: mol_type = other DNA
gtgcgacggtaagctgcaccatgcaggataagatcaaagagcttactcgtaacttactgattgcgcacggctacc

SEQ ID NO: 215266 - DNA, 75 bp, synthetic construct
  source 1..75: mol_type = other DNA
gctgtttcctggcgtgcgccatatcaaacatcgtccggtttacgtaaaaagatcaatcagggcgcggtgagtttc

SEQ ID NO: 215267 - DNA, 75 bp, synthetic construct
  source 1..75: mol_type = other DNA
gtgattcctggcgcaccaccgcgacgcaatagcgtttcgatcttccatgcgatggatcgcgtcggtactcgttat

SEQ ID NO: 215268 - DNA, 75 bp, synthetic construct
  source 1..75: mol_type = other DNA
gcaatagcgtttcgatcttccatgcaatggatcgcgtcggtactcgttatgtgcacattgatccgaaaaagattg

SEQ ID NO: 215269 - DNA, 75 bp, synthetic construct
  source 1..75: mol_type = other DNA
cgggcatattcaccacgatcttagccacgttttcgatctgcatcgtaacttgatcgaaacgggttcaatgttggg

SEQ ID NO: 215270 - DNA, 75 bp, synthetic construct
  source 1..75: mol_type = other DNA
atgagtctgccaaatccactttgtgtcgataccgatgtgtccaaaacaacgctggatattgccgccagcaacact

SEQ ID NO: 215271 - DNA, 75 bp, synthetic construct
  source 1..75: mol_type = other DNA
cttggcgacatgaaaaaacttgccaaaaaagtcttggctggggaaatcgaattgaaccgccccggaaatcctgga

SEQ ID NO: 215272 - DNA, 75 bp, synthetic construct
  source 1..75: mol_type = other DNA
tgcaaacgcctataaatctacatttattgatgaattagagacagaccttcaacatttcgatttctttggtctgcg

SEQ ID NO: 215273 - DNA, 75 bp, synthetic construct
  source 1..75: mol_type = other DNA
ctatcacgatccgcgcgttgcagaactggcggatattgtgattcctggcgcgccaccgcggcgcaatagcgtgtc

SEQ ID NO: 215274 - DNA, 75 bp, synthetic construct
  source 1..75: mol_type = other DNA
agtttcgttgacctgcatttgagcgaagtggcgcaaatggtcaattacggtttcttcggcgacattgatgttgcc

SEQ ID NO: 215275 - DNA, 75 bp, synthetic construct
  source 1..75: mol_type = other DNA
atggaaactcagtggacaaggatgaccgccaatgaagcggcagaaattatccagcataacgacatggtggcattt

SEQ ID NO: 215276 - DNA, 75 bp, synthetic construct
  source 1..75: mol_type = other DNA
cattcttaatacccggtccggtagttgccggggtgcgcctgaactgggcattgatgaaccggaaggggctgaaaa

SEQ ID NO: 215277 - DNA, 75 bp, synthetic construct
  source 1..75: mol_type = other DNA
atgataccggatcgggaaagaaccacaggttctctttttgagcgtatggaagcctcttcggccagaaaccggcag

SEQ ID NO: 215278 - DNA, 75 bp, synthetic construct
  source 1..75: mol_type = other DNA
ttatttatggctctggtcggggcattgttaggcagcattgcctggtacacccgacctcgtcccgcacgtagcaga

SEQ ID NO: 215279 - DNA, 75 bp, synthetic construct
  source 1..75: mol_type = other DNA
ataatcggtggaaggacagcagttcacagctgaatacgcaaagtaaccgttatgttgtgcaactgggtggcagca

SEQ ID NO: 215280 - DNA, 75 bp, synthetic construct
  source 1..75: mol_type = other DNA
ttgtaacttttagaaatatgggggtctatgctggtgtgttagctactattttgagtaatttatttatttgcatcg

SEQ ID NO: 215281 - DNA, 75 bp, synthetic construct
  source 1..75: mol_type = other DNA
gcaggcggtgatttcatccacctccagcccgctggatatgacatttcatattacagcctgggtggcatttaacga

SEQ ID NO: 215282 - DNA, 75 bp, synthetic construct
  source 1..75: mol_type = other DNA
tccccatgtcccactgcgaccaccgcgccctgccgctgccgctcatcagcacggaaggggcaacagcgagaggcg

SEQ ID NO: 215283 - DNA, 75 bp, synthetic construct
  source 1..75: mol_type = other DNA
tggctgcggcggtggcgatcgcggcgctatatcttagcttatcgctttatattacggtggcgatcatcaagctga

SEQ ID NO: 215284 - DNA, 75 bp, synthetic construct
  source 1..75: mol_type = other DNA
cagtggctgacggcgcaatggcgaacacgctgcgggtgaaggtcaccgatgcgttcgggaatgcgctgaatggac

SEQ ID NO: 215285 - DNA, 75 bp, synthetic construct
  source 1..75: mol_type = other DNA
gcgtgctgactatctggcgaaggagagtaccaaagcttacggcaccggtgagcgcaactttggctgcagtcgtgg

SEQ ID NO: 215286 - DNA, 75 bp, synthetic construct
  source 1..75: mol_type = other DNA
gaattgtgctgctggaagcgattactgcaggattaccggtactaacaacagccgtttgtggctatgcgcattata

SEQ ID NO: 215287 - DNA, 75 bp, synthetic construct
  source 1..75: mol_type = other DNA
tgcttgcggctttatctatcgccgtgctgtatctcagtgtatctctttatatcacggtagcgatcattaaactca

SEQ ID NO: 215288 - DNA, 75 bp, synthetic construct
  source 1..75: mol_type = other DNA
aagccggcgaatttaccggtagccagggtagtcactatgactggtatattcagccgcagtcccagatcacgtgga

SEQ ID NO: 215289 - DNA, 75 bp, synthetic construct
  source 1..75: mol_type = other DNA
caatgacaaagcgggcaacccggcgagcaccacgcataatctggcggtggatctcaccgttccggtactcaccat

SEQ ID NO: 215290 - DNA, 75 bp, synthetic construct
  source 1..75: mol_type = other DNA
cgcagcgcagcgaactggtggtgatgcaggcttctggttttacccgtatgcaggtagcgttgtcggtaatgaaaa

SEQ ID NO: 215291 - DNA, 75 bp, synthetic construct
  source 1..75: mol_type = other DNA
gaaatagcagacagacttaacaataatgaacaagacatgtttaatattatttctgacaaaatacaagagttgttt

SEQ ID NO: 215292 - DNA, 75 bp, synthetic construct
  source 1..75: mol_type = other DNA
taccaagagcaactcttacagataaattagaaaatgaattaacaaaagaaatatataaaaactcatcgaaaatca

SEQ ID NO: 215293 - DNA, 75 bp, synthetic construct
  source 1..75: mol_type = other DNA
ggtaactggcctgcgggaacggtcaatattgctgtttcaggcactaatactgctggaaccacaaccagcattact

SEQ ID NO: 215294 - DNA, 75 bp, synthetic construct
  source 1..75: mol_type = other DNA
ttaccggcagtagcaccgggctggcggcgggcgcggcgttgacggtggttatcaacggcgtcacctacggcgcaa

SEQ ID NO: 215295 - DNA, 75 bp, synthetic construct
  source 1..75: mol_type = other DNA
gaccatcagcgccaccattaccgatagcgcaggcaacagcagcacgcagacgcacaacgtacaggtgaacacggc

SEQ ID NO: 215296 - DNA, 75 bp, synthetic construct
  source 1..75: mol_type = other DNA
ggcggggaagcgggcgatgtggtgagcgttgtgctcaacggcaaaacctacaccaccacgctggatgcctccggt

SEQ ID NO: 215297 - DNA, 75 bp, synthetic construct
  source 1..75: mol_type = other DNA
gataacctgaatgtctggggcaatgttggtgttcaggctggcgataaagggtacagtgatgcccaggcaatgctg

SEQ ID NO: 215298 - DNA, 75 bp, synthetic construct
  source 1..75: mol_type = other DNA
acgcaagcaattacaccgtcagcgccacggtcaatgacaaagcgggcaaccccggcagcgccagccataatctgg

SEQ ID NO: 215299 - DNA, 75 bp, synthetic construct
  source 1..75: mol_type = other DNA
gatacggtcaccgtgacgctgggcgggaacacttacaccgctacggtacagagcaacttaagctggagcgtcagc

SEQ ID NO: 215300 - DNA, 75 bp, synthetic construct
  source 1..75: mol_type = other DNA
agcagcaccgccgcgcaggccaccggttttaacacctcgacatttaccaatatcgaaggcatttccggctcgaac

SEQ ID NO: 215301 - DNA, 75 bp, synthetic construct
  source 1..75: mol_type = other DNA
gtatatgcgctgcaacactattacgtgagcaaggattaaaagcacttcctcgattaaaatattaccattcaaaac

SEQ ID NO: 215302 - DNA, 75 bp, synthetic construct
  source 1..75: mol_type = other DNA
atgggatggagattggggtggcgtgatgagagggaatgtgcgcgctggggccccccccccccccccccccccccc

SEQ ID NO: 215303 - DNA, 75 bp, synthetic construct
  source 1..75: mol_type = other DNA
agatatagctggttatatattaatggcagtgacatcagctattaccgctccattatcactgattttagtacgtaa

SEQ ID NO: 215304 - DNA, 75 bp, synthetic construct
  source 1..75: mol_type = other DNA
actgcgaagctttcgtggtcaagtcgaagtcgcgcagatccgacggttgtgcggggaaggatcgcgttcttacct

SEQ ID NO: 215305 - DNA, 72 bp, synthetic construct
  source 1..72: mol_type = other DNA
atgcgaaaaaaactcgtactttcgtacgagctcttctttgaagatggcggtgagggggggattcgaaccccc

SEQ ID NO: 215306 - DNA, 75 bp, synthetic construct
  source 1..75: mol_type = other DNA
tgaaggggcgaatgccatctttcagttttcatcatcaattgatatagaaaatgaaagaaaacaattaattgaagt

SEQ ID NO: 215307 - DNA, 75 bp, synthetic construct
  source 1..75: mol_type = other DNA
acgcaccaaatatacatgaaatcagctcaacattagaggatttaataaaggtttcatggctatcagtaaaccgag

SEQ ID NO: 215308 - DNA, 75 bp, synthetic construct
  source 1..75: mol_type = other DNA
taggaacaatttattcacctaggaaattttttggcgtccctgatggtggtattctgataactaatcagactataa

SEQ ID NO: 215309 - DNA, 75 bp, synthetic construct
  source 1..75: mol_type = other DNA
ttaccatattatatatgtgatgttgtcgttgatacaataaatgaaattgggattgaaatcttgtattatagtatt

SEQ ID NO: 215310 - DNA, 75 bp, synthetic construct
  source 1..75: mol_type = other DNA
gaggatatttttcactagaattgcaggcgcttaaaaataacactgcaaatgaaaaagtatatttacaatcagcga

SEQ ID NO: 215311 - DNA, 75 bp, synthetic construct
  source 1..75: mol_type = other DNA
tacaagaggctaaaactgatggtctgagccaggctaaagccgccgctgctttggggttagggattgccacagtaa

SEQ ID NO: 215312 - DNA, 75 bp, synthetic construct
  source 1..75: mol_type = other DNA
cataatattatttgacgatttttacagaagccaacatttacctacaccatcgccggctattcatgtttttttcaa

SEQ ID NO: 215313 - DNA, 75 bp, synthetic construct
  source 1..75: mol_type = other DNA
acaagacaaaatgagttagtaaaagtattttgcgagtataaaacagagttcttaattttgtttgatgacttttta

SEQ ID NO: 215314 - DNA, 75 bp, synthetic construct
  source 1..75: mol_type = other DNA
gagatagctgactctgaaatgttcattaatgagttagaatccagattgcgctctcttaatgaatcaagtattgcc

SEQ ID NO: 215315 - DNA, 75 bp, synthetic construct
  source 1..75: mol_type = other DNA
ctgcataaaagcatcggtattttgttaatgatgggctggttattcgcgttctgtggcgtgtcatatctccaccgc

SEQ ID NO: 215316 - DNA, 75 bp, synthetic construct
  source 1..75: mol_type = other DNA
taggccattcgaatcaaaaaatgaccgatatttacaacgatgtacgcggtaaggagtggaaaagactggtcattt

SEQ ID NO: 215317 - DNA, 75 bp, synthetic construct
  source 1..75: mol_type = other DNA
tgattataaaagcgaggagcacttcatagagtctaaaaatgaaagaattgatataataacttataaaaacaaaga

SEQ ID NO: 215318 - DNA, 75 bp, synthetic construct
  source 1..75: mol_type = other DNA
atgtttgcagcaaagcccgaattaagtcaaagatgtatttctggactcctcacaactgggccaaatgatgaaaac

SEQ ID NO: 215319 - DNA, 75 bp, synthetic construct
  source 1..75: mol_type = other DNA
tacccatccttgtttctgtcctggcattactggttaattttattcacggtagcgctaaaaacaaaacaggtatta

SEQ ID NO: 215320 - DNA, 75 bp, synthetic construct
  source 1..75: mol_type = other DNA
ctgaaatggtggctaatgacctcgaagcggcgaaaaaacactctctgctgaaatctcacggctacgacgtggcga

SEQ ID NO: 215321 - DNA, 75 bp, synthetic construct
  source 1..75: mol_type = other DNA
accctcgttatatgcgctgttcctgatttcgttacttgggccgttggtcatctttctgctgtttcggatgatccg

SEQ ID NO: 215322 - DNA, 75 bp, synthetic construct
  source 1..75: mol_type = other DNA
ttatttattttcttaaaaaatataataactgtatcatttgtatatttttcatataaggcaatatactatatattg

SEQ ID NO: 215323 - DNA, 75 bp, synthetic construct
  source 1..75: mol_type = other DNA
agaaactcaatcgtatcaatatgattttcaaataatttatgcgacatcggagattaatccagaatatgaaaatac

SEQ ID NO: 215324 - DNA, 75 bp, synthetic construct
  source 1..75: mol_type = other DNA
cccgttctgtagttgctcgacaatacccatgttacgtggattgttgtcagcgaaagccgggtttggtccaaccct

SEQ ID NO: 215325 - DNA, 75 bp, synthetic construct
  source 1..75: mol_type = other DNA
tattcatattgctggttattgaagtgatgtggattacgctggtgtcggtattggcaacgcttgtagaatggcgga

SEQ ID NO: 215326 - DNA, 75 bp, synthetic construct
  source 1..75: mol_type = other DNA
tacacaacctctggtggcaggatttctgtcgttaatcatgttgagtgcaatgagttgggggctataccagcttct

SEQ ID NO: 215327 - DNA, 75 bp, synthetic construct
  source 1..75: mol_type = other DNA
gactatgcctacaccatggttcataaagcgcctgaacgcgtgaaacacggtgaacgtatcggtccgaacccggct

SEQ ID NO: 215328 - DNA, 75 bp, synthetic construct
  source 1..75: mol_type = other DNA
tatttctggctgctcttttttggctataaatctggtgttgcggctctcggaaaattatccgagcaggcagataaa

SEQ ID NO: 215329 - DNA, 75 bp, synthetic construct
  source 1..75: mol_type = other DNA
ggtctggagcgtaaagatatttatattactcgcaagatatctgccgggtatttttcaaacgctcttggacgactc

SEQ ID NO: 215330 - DNA, 75 bp, synthetic construct
  source 1..75: mol_type = other DNA
ttctggttgtggagaaactaacgcatgaacagtttaacaacacactaccgtcgctcgcaactgtgtggagaaact

SEQ ID NO: 215331 - DNA, 75 bp, synthetic construct
  source 1..75: mol_type = other DNA
gcgttgccggggggttacgctgaagctgctgactggctggacgtaacagagaacgcattatttaaccgccttcgt

SEQ ID NO: 215332 - DNA, 75 bp, synthetic construct
  source 1..75: mol_type = other DNA
agcaactgctgaaagaagcgcaagaacgcgtgaaataccccctcgggccgatcagctggtcggccctctatttcc

SEQ ID NO: 215333 - DNA, 75 bp, synthetic construct
  source 1..75: mol_type = other DNA
gataaaaatgttaggatttatattattgatggtaaagacagatattatattgataaaaacggggtggtgtcatat

SEQ ID NO: 215334 - DNA, 75 bp, synthetic construct
  source 1..75: mol_type = other DNA
acactcttgataaacaagaattaaacctaaaatcagatagaaaagaaaaagaattcccaagaattaaacttaatg

SEQ ID NO: 215335 - DNA, 75 bp, synthetic construct
  source 1..75: mol_type = other DNA
gaaagttaagtatatatctatttgcgtaaaagaccttcttaataacaaagtttataagctatatgatacgcgagc

SEQ ID NO: 215336 - DNA, 75 bp, synthetic construct
  source 1..75: mol_type = other DNA
gccgagacagcagcaaaacgggcagaggatattgcatccgccgtggcgcttgaggatgcgagcacgacgagaaag

SEQ ID NO: 215337 - DNA, 75 bp, synthetic construct
  source 1..75: mol_type = other DNA
attcgtgagacggtgcggcacgcactgaatgttcatccccgcctgacggcattgcgggttgacctgcgtctcccg

SEQ ID NO: 215338 - DNA, 75 bp, synthetic construct
  source 1..75: mol_type = other DNA
ttaacgtaatcggtgtaactgaccagaaaggcgaaaaagttcctcctggataccacaggaccgattgcgcgcacg

SEQ ID NO: 215339 - DNA, 75 bp, synthetic construct
  source 1..75: mol_type = other DNA
tacaggattcgcaaactgacgccggtaacatcgagcaggaatataaggatgcggtagaggcggcagtagcggata

SEQ ID NO: 215340 - DNA, 75 bp, synthetic construct
  source 1..75: mol_type = other DNA
cagttcgccagtggctacaaaatcaaagcactgtcgtctaacccgtcgaacctgcgtggtatgcagggtaacgtc

SEQ ID NO: 215341 - DNA, 75 bp, synthetic construct
  source 1..75: mol_type = other DNA
aagacatggcccgtgagtttattgatgcctgtgccatgtgggcgaaagcctatgaccgcgccgcgtctggcattg

SEQ ID NO: 215342 - DNA, 75 bp, synthetic construct
  source 1..75: mol_type = other DNA
ttcagtacttgtgccatatgccaaaaagtcaaaactaactatcgatcgagttcgagttgcaattccggaagaact

SEQ ID NO: 215343 - DNA, 75 bp, synthetic construct
  source 1..75: mol_type = other DNA
ttactgcgtcccgaaaaacggcggcggcacgtatatcccccgctcactgcgtgaacgtgcggcccgtggcaccgg

SEQ ID NO: 215344 - DNA, 75 bp, synthetic construct
  source 1..75: mol_type = other DNA
caccgttacgagctgcaccgcctgaaccgcccggcgaaaccggaagaacgcaacgcgcgccgccagatgaagctg

SEQ ID NO: 215345 - DNA, 75 bp, synthetic construct
  source 1..75: mol_type = other DNA
ttgagcaggtgcagctttccgtcaaatactaccgggaaaacatgccccggttccgtgcggcattcgaagacaatg

SEQ ID NO: 215346 - DNA, 75 bp, synthetic construct
  source 1..75: mol_type = other DNA
ttgcatcatcggcggtgccctcggtggttattgcagtaaccgcttcggtcgtcgtgattcacttaagattgctgc

SEQ ID NO: 215347 - DNA, 75 bp, synthetic construct
  source 1..75: mol_type = other DNA
ctttaccgccacgttcacggccctgaaagggaataccacagcgttgctgacggcacctgcccgcatggcctcatc

SEQ ID NO: 215348 - DNA, 75 bp, synthetic construct
  source 1..75: mol_type = other DNA
cagtgaaaggtatggcgactaatgcagcaattggtatcagcgtaaactcagttgctcagcttgctggaaaagatc

SEQ ID NO: 215349 - DNA, 75 bp, synthetic construct
  source 1..75: mol_type = other DNA
gcgaaagccttattgaaaaaatgcaaatgctagttgcgaagactgagcgaaatcactcagacagcagtcagttct

SEQ ID NO: 215350 - DNA, 75 bp, synthetic construct
  source 1..75: mol_type = other DNA
attgaaaagcaccagtactgtcgccgtcccgcgccagggagccgtcgtctttgctgattttgaaacagttcaggg

SEQ ID NO: 215351 - DNA, 75 bp, synthetic construct
  source 1..75: mol_type = other DNA
tagcctcaatgctttcaccaatgtatattgcggaactggctccagctcatattcgcggaaaactggtttcattta

SEQ ID NO: 215352 - DNA, 75 bp, synthetic construct
  source 1..75: mol_type = other DNA
ggacgataaagaactctctgcctttggtgataaagcccgccgtctgaaccttgatattcatattgaaaccaggta

SEQ ID NO: 215353 - DNA, 75 bp, synthetic construct
  source 1..75: mol_type = other DNA
ccttgatgtgctggcactggaggccgatgttgccgggaggtacagtgtgcgtttcggcatggacagggaagaagc

SEQ ID NO: 215354 - DNA, 75 bp, synthetic construct
  source 1..75: mol_type = other DNA
atgatttcgcagcaagaaaagaagtgtttgatttgcttagatttacattgtcgcaggaaaaaaaggcatcttcga

SEQ ID NO: 215355 - DNA, 75 bp, synthetic construct
  source 1..75: mol_type = other DNA
cgctggagattaatacgcggtggacgtgaagttcgtgttcgcatggaaggtcagcttttactgaatacgatagac

SEQ ID NO: 215356 - DNA, 75 bp, synthetic construct
  source 1..75: mol_type = other DNA
aatcagatgattgcggttaccaacaatcagatacagacggtgggcgttaaccagatagagacggtgggcagtaac

SEQ ID NO: 215357 - DNA, 75 bp, synthetic construct
  source 1..75: mol_type = other DNA
tggttaaacaaggtattgatccgcgttatgcgcgaaaaacggaaaaacagcaaaatgaacaaatgccgatttttt

SEQ ID NO: 215358 - DNA, 75 bp, synthetic construct
  source 1..75: mol_type = other DNA
ggcaaagaagtcaagctgttgcagaacttattagcgactggctgaagtgtgttatccaagcttcgcagccatgga

SEQ ID NO: 215359 - DNA, 75 bp, synthetic construct
  source 1..75: mol_type = other DNA
ggcgcggctggcggtaccagcaccttcacggtgaatatcgcaccaaccggcgcaacaaatactggcttcaccgtc

SEQ ID NO: 215360 - DNA, 75 bp, synthetic construct
  source 1..75: mol_type = other DNA
agcgccttttcggcggtgcgatcgtgctggaggtcgctgacggttgccctgatgtaaaacctgaagaatcagagt

SEQ ID NO: 215361 - DNA, 75 bp, synthetic construct
  source 1..75: mol_type = other DNA
cttaagtgaaaagccagcattgcaagagcttgaggctgtatctgaagcactgaaacaagctgtaatcagagacct

SEQ ID NO: 215362 - DNA, 75 bp, synthetic construct
  source 1..75: mol_type = other DNA
tccgaagtcatgggcaccttacaaagtgatggaagagcgtactgaactgctgcgcgctaacgatcacgaaggctt

SEQ ID NO: 215363 - DNA, 75 bp, synthetic construct
  source 1..75: mol_type = other DNA
ttctggcgcacaatctgagcagttataacgctgactattctttgtatgtcgtcgattactgtccggacaaccata

SEQ ID NO: 215364 - DNA, 75 bp, synthetic construct
  source 1..75: mol_type = other DNA
tatgtggcttaagtattgggtaattgcatttcaggtttttgtcagaaaacgaggtgaagcaaaactctttgctga

SEQ ID NO: 215365 - DNA, 75 bp, synthetic construct
  source 1..75: mol_type = other DNA
atcgttgtctggctggtggcataggtggcgtcgttatcaccgagatctattgtgcagttattgtacatattaagg

SEQ ID NO: 215366 - DNA, 75 bp, synthetic construct
  source 1..75: mol_type = other DNA
tccgatggtgcttcctaacggggccacgctttacttcctaggcaccaatgcccgcacggcccagagttatcacgg

SEQ ID NO: 215367 - DNA, 75 bp, synthetic construct
  source 1..75: mol_type = other DNA
tcaaaaaattgaccgaacagtacaacgtgacctatatcggcatcgactcgaccggcgtcggtcacggggtttatg

SEQ ID NO: 215368 - DNA, 75 bp, synthetic construct
  source 1..75: mol_type = other DNA
cgtttaaatgcgaataaactggtaaatgattacgatatttactctatcgtcatgactacggacctctttcatgat

SEQ ID NO: 215369 - DNA, 75 bp, synthetic construct
  source 1..75: mol_type = other DNA
cactcatttcgtgtcaccgatgaaggggatttattagggatgctgggagcgtatggtattaatcaaacggggatt

SEQ ID NO: 215370 - DNA, 75 bp, synthetic construct
  source 1..75: mol_type = other DNA
gttgtccgcatcattcctgcattgctggcaggtgtggtgatgagcagaatcattacccgtctgcccggattggat

SEQ ID NO: 215371 - DNA, 75 bp, synthetic construct
  source 1..75: mol_type = other DNA
acaggaccggcaggcgaggaaatcttctgcgacgaacatggtcgcgtgcgggtgaagttcaactgggaccgttat

SEQ ID NO: 215372 - DNA, 75 bp, synthetic construct
  source 1..75: mol_type = other DNA
gcacaggcgtgggcaggcaccggttttggccacctggcgataccgcgtgtgggtcaggaggtgattgtagacttc

SEQ ID NO: 215373 - DNA, 75 bp, synthetic construct
  source 1..75: mol_type = other DNA
tgattgggaactgttcagcgattgctgctgatgtaactactgatacagtaaatatagttaaaaaaggcaatggta

SEQ ID NO: 215374 - DNA, 75 bp, synthetic construct
  source 1..75: mol_type = other DNA
acttcgccaaagaagtggatgtggaactgaaaggcgatccgatggtgcttcccaacggggccacgctttacttcc

SEQ ID NO: 215375 - DNA, 75 bp, synthetic construct
  source 1..75: mol_type = other DNA
gacctgggcctactccccaagctatggcaaaccgctctctgtaccacaaggcatcatcggtctgatgactcgctt

SEQ ID NO: 215376 - DNA, 75 bp, synthetic construct
  source 1..75: mol_type = other DNA
tcaacggcgatccggaccagccgatcattatggggcgcacctaccaccaggaaaaccgcacccccggcagcctgc

SEQ ID NO: 215377 - DNA, 75 bp, synthetic construct
  source 1..75: mol_type = other DNA
caggcattattcagcgtgtaagaagcgcaatatgggtgtcgaactcatgaccattaatcatgcgggtcagtatgt

SEQ ID NO: 215378 - DNA, 75 bp, synthetic construct
  source 1..75: mol_type = other DNA
gagatttcggcaaaaggggggcgtgatggtctgcctgatgggtttgttaactcaccgcatgggcttttttatgat

SEQ ID NO: 215379 - DNA, 75 bp, synthetic construct
  source 1..75: mol_type = other DNA
ccttaacgacaatggcgcgttttgcctgttcgaaactgaatggatttctggctcgtcgggctttgcatcaggcaa

SEQ ID NO: 215380 - DNA, 75 bp, synthetic construct
  source 1..75: mol_type = other DNA
agacaagttttggttcattactagtttgtcctggcggaaaaggctcacaacaacgtcagcaggttcctccgttct

SEQ ID NO: 215381 - DNA, 75 bp, synthetic construct
  source 1..75: mol_type = other DNA
ttcgctgcccgtattcgtcagggggtaagtcatgctcaagcgattccagataaccgcacgcgctgtaaatcatca

SEQ ID NO: 215382 - DNA, 75 bp, synthetic construct
  source 1..75: mol_type = other DNA
gctgcaggaagaaggttatgcacttagtgacattcagctgcgtgcattaaaacgattttccctatgtttgtgtgc

SEQ ID NO: 215383 - DNA, 75 bp, synthetic construct
  source 1..75: mol_type = other DNA
catttaaatcaaccttctcagtcaatgaaataaatgattttgttgaagatatcaacaaatttagtccagatgccg

SEQ ID NO: 215384 - DNA, 75 bp, synthetic construct
  source 1..75: mol_type = other DNA
tgctatcgaatgaaactcatggacgctgagctggaagaaggtcatctctacgacgtggaaattctggaacattac

SEQ ID NO: 215385 - DNA, 75 bp, synthetic construct
  source 1..75: mol_type = other DNA
ggaaaaacgtcgactgggtgaatgagaccggaaaggcggtgtcatctggcgatttggtgattcaggataatcttg

SEQ ID NO: 215386 - DNA, 75 bp, synthetic construct
  source 1..75: mol_type = other DNA
cgtcaggtcaccagcatggaagaagcattcaaagatgcagacatcgtttatccgaagtcatgggcaccttacaaa

SEQ ID NO: 215387 - DNA, 75 bp, synthetic construct
  source 1..75: mol_type = other DNA
gctactgccgcctttcgtctggaaggaactacgccagcgagttagaacgcaggcttgatattcagttagagcgta

SEQ ID NO: 215388 - DNA, 75 bp, synthetic construct
  source 1..75: mol_type = other DNA
agcaggcggctaacatagatattcgcggatctgatgttacgccaccagcgcccaccacacaagcgccacgccgca

SEQ ID NO: 215389 - DNA, 75 bp, synthetic construct
  source 1..75: mol_type = other DNA
tttctttattagctgtctttgcattaagtgggtgtcagtctactgcagaacatcttgctgcagatgtttatgaca

SEQ ID NO: 215390 - DNA, 75 bp, synthetic construct
  source 1..75: mol_type = other DNA
gccatcgcggcgttaaaggtcaggaagggttgctgacagggacgaaagtacagcttatcaccgacacgtcaggca

SEQ ID NO: 215391 - DNA, 75 bp, synthetic construct
  source 1..75: mol_type = other DNA
taaacatcatgagattcacagggttaagcctcttatgccagctttatgtcgtatccgtcagggaaaaaaagttat

SEQ ID NO: 215392 - DNA, 75 bp, synthetic construct
  source 1..75: mol_type = other DNA
gcttcaaattcggcccgctttgaacggttatggaagccgtcaaaaagggcgaaaaagcaactttttgacccaaac

SEQ ID NO: 215393 - DNA, 75 bp, synthetic construct
  source 1..75: mol_type = other DNA
ttaaaaattacatcgcgcaggccattatttataagaaagcctataagttgattaattcacttttccccgcattta

SEQ ID NO: 215394 - DNA, 75 bp, synthetic construct
  source 1..75: mol_type = other DNA
ttcggagtgggcgaagaaacctgaatgctgggagtatgtgcgcagtaaaatctatttctctgcacttgaaaaaat

SEQ ID NO: 215395 - DNA, 75 bp, synthetic construct
  source 1..75: mol_type = other DNA
ctgcataccatgaaattgaatctacttttgtttcacagttagatgagttattcgttgagattggtcgaaaagaag

SEQ ID NO: 215396 - DNA, 75 bp, synthetic construct
  source 1..75: mol_type = other DNA
atgagcgatttaccagtcagctatacgtcagcaggcccggttcctctgacgccggaagagctacgagcacagctc

SEQ ID NO: 215397 - DNA, 75 bp, synthetic construct
  source 1..75: mol_type = other DNA
ttcctacagggcaagggattctgttccattcagtttcacgatcaaatttatgtggggcacttggatttggtgatg

SEQ ID NO: 215398 - DNA, 75 bp, synthetic construct
  source 1..75: mol_type = other DNA
ggcaaccaccgcaggggctgtaggtggaaccgcacttggtgcagccgctggttcattagtcaaagataaaacaat

SEQ ID NO: 215399 - DNA, 75 bp, synthetic construct
  source 1..75: mol_type = other DNA
gattggttaccgttttatcaccaacaaccgcatccttccgctgctcctgaacgatcgcggtgagcagttgaccgt

SEQ ID NO: 215400 - DNA, 75 bp, synthetic construct
  source 1..75: mol_type = other DNA
tcttcagtcaagtcgcctcaggattgttcgtacgggaggggttttccctgaagatcgtgaaagtctacagtggct

SEQ ID NO: 215401 - DNA, 75 bp, synthetic construct
  source 1..75: mol_type = other DNA
gtgaccatcggcctgcaactggacgcagcacagattctttcggcaccgctggcggtgctggcgtggctggtggtg

SEQ ID NO: 215402 - DNA, 75 bp, synthetic construct
  source 1..75: mol_type = other DNA
taaactcagttcagtgacggaatcgcttaacacggcccgtaatgcattaaccagagctgaacaacagctgacgca

SEQ ID NO: 215403 - DNA, 75 bp, synthetic construct
  source 1..75: mol_type = other DNA
cgcagacggggagtagtgacccgacgctgttaggctgggtggtgcagttcttactgttgtgcttcttttttgccc

SEQ ID NO: 215404 - DNA, 75 bp, synthetic construct
  source 1..75: mol_type = other DNA
taaagcaacagacggatccggttattgagttttgccagttcctgaattttctagaggaagcgcgcggcctgatga

SEQ ID NO: 215405 - DNA, 75 bp, synthetic construct
  source 1..75: mol_type = other DNA
tgcgggatatccgggagtatgtggacagttttgattacccgcgacttcaggctctcgtcagcagcccagatgaaa

SEQ ID NO: 215406 - DNA, 75 bp, synthetic construct
  source 1..75: mol_type = other DNA
ccgtatgacaccgaagagatgcttgaggctatgcgtatttttctggaagaacaggaaggtgagcaaaaatggcga

SEQ ID NO: 215407 - DNA, 75 bp, synthetic construct
  source 1..75: mol_type = other DNA
aaataccccagccaccgatgctttcctggctgaaattgaacgcaaagcaatccgcaagttcattaacagcattga

SEQ ID NO: 215408 - DNA, 75 bp, synthetic construct
  source 1..75: mol_type = other DNA
ggtacggtgaaaggaattctctgggctggcgagatggtaggcagggtaatttaccgcctcatccagttgggtcag

SEQ ID NO: 215409 - DNA, 75 bp, synthetic construct
  source 1..75: mol_type = other DNA
tttagtggcgaatacaccgcgatggctaaggcgatcggctataacgctgatgtggccgccgtcagctccaataaa

SEQ ID NO: 215410 - DNA, 75 bp, synthetic construct
  source 1..75: mol_type = other DNA
actttaagagttcggcagctaatccacttagaattgaaagtgctaaccctactattatgtttgccgaaacagatg

SEQ ID NO: 215411 - DNA, 75 bp, synthetic construct
  source 1..75: mol_type = other DNA
atccccgttattatccgccgattgctggcgaactttaccgaccctgagaaggcacgggctttactactggaacag

SEQ ID NO: 215412 - DNA, 75 bp, synthetic construct
  source 1..75: mol_type = other DNA
tgagttttgccagttcctgaattttctggaggaagcacgtggcctgatgatgggtggcggtggcgattccgtgaa

SEQ ID NO: 215413 - DNA, 75 bp, synthetic construct
  source 1..75: mol_type = other DNA
acgaaaacacatctgctgcaacccggcggcctgaacaccacgtcggtgaaaagtgggcaacaatgggatgcgcca

SEQ ID NO: 215414 - DNA, 75 bp, synthetic construct
  source 1..75: mol_type = other DNA
gacggtttaacgtttagtctgaaagaaggtgataaactcggacttattggaaacaatggcgcgggaaaatctacg

SEQ ID NO: 215415 - DNA, 75 bp, synthetic construct
  source 1..75: mol_type = other DNA
tctatttcaaagcatagaaacagaagtgttaaaacaatatgggggcagaaaaaacagttgtatgaaaaattgaat

SEQ ID NO: 215416 - DNA, 75 bp, synthetic construct
  source 1..75: mol_type = other DNA
gtttatttttattacgcagtataagagttttagtgataatattaactcttattcttatgatgatttgaagtcaga

SEQ ID NO: 215417 - DNA, 75 bp, synthetic construct
  source 1..75: mol_type = other DNA
agttgagctggaagccgcagagaagcgcattgcagaactggaaagcaacgaagtccgtgaagtcggaaatcagtt

SEQ ID NO: 215418 - DNA, 75 bp, synthetic construct
  source 1..75: mol_type = other DNA
ctacctgaatgtcagaaattgtttgattcaggccgttcgtgatatacaccctgaatatgagcaagttagcgataa

SEQ ID NO: 215419 - DNA, 75 bp, synthetic construct
  source 1..75: mol_type = other DNA
gcatgtgcatttgtcccaaaaaatatacaatgcatattttgctgataaaattgatgagcaaaactggattgactt

SEQ ID NO: 215420 - DNA, 75 bp, synthetic construct
  source 1..75: mol_type = other DNA
ccagttataattgtgctcaatttattggtgatactttgcattctttatgttctcagactatgaataaggatgatt

SEQ ID NO: 215421 - DNA, 75 bp, synthetic construct
  source 1..75: mol_type = other DNA
ttatatatatcatcgatgttttaggtgatgaagatcttgactcctcgagtgacatcaaaattaacaccaatagac

SEQ ID NO: 215422 - DNA, 75 bp, synthetic construct
  source 1..75: mol_type = other DNA
ttattgtcggcttactcaatacgctactggtttctgcattgtgtattgtgttcgcttctgttttgggcttcttta

SEQ ID NO: 215423 - DNA, 75 bp, synthetic construct
  source 1..75: mol_type = other DNA
tggtcccggcgttattagttgctggcgcagcaaatgcggctgaagtctataataaagatggcaataaactggatt

SEQ ID NO: 215424 - DNA, 75 bp, synthetic construct
  source 1..75: mol_type = other DNA
gggagcgaaaagcattaagcaactttgaagagtgtgctgcgatggctgaacgtatcgaagagatgagtaagcaaa

SEQ ID NO: 215425 - DNA, 75 bp, synthetic construct
  source 1..75: mol_type = other DNA
gatttttaccgttatatctttatatataacgatttcgatggggcttgtgatcttttaggttccgatttttctatg

SEQ ID NO: 215426 - DNA, 75 bp, synthetic construct
  source 1..75: mol_type = other DNA
atctcaagcttaaaagtccccatccccattgtgtttgttaagatccataatatccccatgctaatatctttcttt

SEQ ID NO: 215427 - DNA, 75 bp, synthetic construct
  source 1..75: mol_type = other DNA
ggaaacatgcacaggcgcacaactggcctgacatgtgcaacagactgactgacttcgtgaacagcggcggcgaac

SEQ ID NO: 215428 - DNA, 75 bp, synthetic construct
  source 1..75: mol_type = other DNA
caacggcgaagcgatgccgcaaaaggtattcgaaagcatggttgatggtgggctgaatgtgggttgtacgggcct

SEQ ID NO: 215429 - DNA, 75 bp, synthetic construct
  source 1..75: mol_type = other DNA
ctatcgccgtgattgttgccctgggcttatcaatgtcgcccgatgcgctgagaacgtcgccggaagcacagcaaa

SEQ ID NO: 215430 - DNA, 75 bp, synthetic construct
  source 1..75: mol_type = other DNA
cgcaattctttcgattcccgttacggttttctggttctttggctgggtttcgacctctgtcaggtatcccagtta

SEQ ID NO: 215431 - DNA, 75 bp, synthetic construct
  source 1..75: mol_type = other DNA
cactatatgtgaatgaagaaggacaactgagagcaactactgatagttataatggtagtacatccattgactata

SEQ ID NO: 215432 - DNA, 75 bp, synthetic construct
  source 1..75: mol_type = other DNA
ttgtcactggtaaacaggatcgcgacgaaagtcaggattcgtttttccgtaaaatggcccaccgcctgcgtgagt

SEQ ID NO: 215433 - DNA, 75 bp, synthetic construct
  source 1..75: mol_type = other DNA
gttaatttctccagggagcctgaacgacgaaatgagtttatcatcagtgtttcatatgatgcagatattgaccgt

SEQ ID NO: 215434 - DNA, 75 bp, synthetic construct
  source 1..75: mol_type = other DNA
tattgagttaggtagtaagggtgaagtaaaaatagtagcagcagatcttgtaggaaaggatagtaactccattca

SEQ ID NO: 215435 - DNA, 75 bp, synthetic construct
  source 1..75: mol_type = other DNA
gttatgggggcaggaaatgatactgttctggctttagggtatgagggtaatagtgcggatgctattattaatacg

SEQ ID NO: 215436 - DNA, 75 bp, synthetic construct
  source 1..75: mol_type = other DNA
cggagccattaatccggatgagcataccgaactgacggcgaagaaccaggcggtgacggatgcgaagaacccggc

SEQ ID NO: 215437 - DNA, 75 bp, synthetic construct
  source 1..75: mol_type = other DNA
tacgcgctgaaatcagcggccagacttccagcacaatcattggcgctttcggcaatgcagccgttgccctggatg

SEQ ID NO: 215438 - DNA, 75 bp, synthetic construct
  source 1..75: mol_type = other DNA
ggcaggggccaactatatcgccggtgccggggcgtatacctataacgagccgggacgtacgtggtatatgagcgt

SEQ ID NO: 215439 - DNA, 75 bp, synthetic construct
  source 1..75: mol_type = other DNA
tgctgaagagtgaaaacaaaaccacgggcgaccgtttgtcgatcatcccggagtacacgttgaactcaacgctga

SEQ ID NO: 215440 - DNA, 75 bp, synthetic construct
  source 1..75: mol_type = other DNA
ctcgatgttgctggcgcgcgaacgcggtgaaaccttcgccgggttcaaacagtcacgctatgccagtggtgaata

SEQ ID NO: 215441 - DNA, 75 bp, synthetic construct
  source 1..75: mol_type = other DNA
tggctgttttacgcgtatgacaggatacggaggacggttgtggcgcacgtctgcactctggccacactggagcgt

SEQ ID NO: 215442 - DNA, 75 bp, synthetic construct
  source 1..75: mol_type = other DNA
ccaggacagttcatgctggatccgtgtggcacaggcgtgggcaggcaccggttttggccacctggcgataccgcg

SEQ ID NO: 215443 - DNA, 75 bp, synthetic construct
  source 1..75: mol_type = other DNA
gacgctacaccaaccgacaaaggacttcttataaaaccaagtgctcctcaagtacctcgaaggaaaaaatacaga

SEQ ID NO: 215444 - DNA, 75 bp, synthetic construct
  source 1..75: mol_type = other DNA
agcctgaaatgatggctaacggtgatatgttcaggtttaccgctatcaacgcagttcgtagggtgaacgacgcaa

SEQ ID NO: 215445 - DNA, 75 bp, synthetic construct
  source 1..75: mol_type = other DNA
tacaaatgcgatgacctatcggcttcaaagctccctgttcagtccgggaaccaaagtccgacaatacaatcccgt

SEQ ID NO: 215446 - DNA, 75 bp, synthetic construct
  source 1..75: mol_type = other DNA
tgacccagcatcgctatgttcaggaagaattacttaaaatcaccgggttaaaactctgggttgaaccctgcggcc

SEQ ID NO: 215447 - DNA, 75 bp, synthetic construct
  source 1..75: mol_type = other DNA
tatcaattattaagcatctgttttttagttggtgtaatataatttttattaaggtaagcggaaaaacaaccaaaa

SEQ ID NO: 215448 - DNA, 75 bp, synthetic construct
  source 1..75: mol_type = other DNA
gtactattacactcctcttgaaggcgttgcttcatactgggggctgtttacctcacaaagtgttccatttgaagt

SEQ ID NO: 215449 - DNA, 75 bp, synthetic construct
  source 1..75: mol_type = other DNA
tcgcactgggatctcagcgccagcaaatgagtcccagtagccaagggttgagcggagacgcacgtcaattcagcc

SEQ ID NO: 215450 - DNA, 75 bp, synthetic construct
  source 1..75: mol_type = other DNA
agcaataaatggcgcaaactggatggccctcagggcggctattttgtttgcccaggtgaataccgtagctattcg

SEQ ID NO: 215451 - DNA, 75 bp, synthetic construct
  source 1..75: mol_type = other DNA
gtagaaattggtttcagcgacctcgcacaacttccttacattatgggattaattcgtcaggcatttgaaaaacag

SEQ ID NO: 215452 - DNA, 75 bp, synthetic construct
  source 1..75: mol_type = other DNA
gaagttataggcccatccataccaggtaaaagcttgcctaataatcctgttaatcaagatacttatagcaacgat

SEQ ID NO: 215453 - DNA, 75 bp, synthetic construct
  source 1..75: mol_type = other DNA
tccgaagaaggatggcagtaaaaggcttttaggaataccgacagtaagcgatcgaatagcgcagatgacggtgct

SEQ ID NO: 215454 - DNA, 75 bp, synthetic construct
  source 1..75: mol_type = other DNA
gagatccaaatacaaatgtagatatactgaagaaacttaaaaatatgcatttcttaggtgcgaaagattataatt

SEQ ID NO: 215455 - DNA, 75 bp, synthetic construct
  source 1..75: mol_type = other DNA
gactacggaagaattagacaaggccatgaaagacggtaaagttctttctaaagatgttcttcctaaagtatccgc

SEQ ID NO: 215456 - DNA, 75 bp, synthetic construct
  source 1..75: mol_type = other DNA
atggcgaacccattagtaccgcagggcttccttaaccgcgtacgcggggctctttccgtcacggacacaccggcg

SEQ ID NO: 215457 - DNA, 75 bp, synthetic construct
  source 1..75: mol_type = other DNA
gtcatgaacgaaccctgtacgcatttctcgatcctgcctgtcctaactgcagacttctggagccggctttaaaac

SEQ ID NO: 215458 - DNA, 75 bp, synthetic construct
  source 1..75: mol_type = other DNA
acaccagatggcttgcatatcgcccagtcaggtcaaatccctaaactggttaccaaggtggaaaaaatcactttt

SEQ ID NO: 215459 - DNA, 75 bp, synthetic construct
  source 1..75: mol_type = other DNA
aagttacttttgagtcttttagtaattacttgacttcattcaaaaaaacttatgtatgcccaatatgcagcaata

SEQ ID NO: 215460 - DNA, 75 bp, synthetic construct
  source 1..75: mol_type = other DNA
cccgtgacgcgcactatctttaccggtatgaccgtcacggcaggctgacagagaaaaccgacctcatcccggaag

SEQ ID NO: 215461 - DNA, 75 bp, synthetic construct
  source 1..75: mol_type = other DNA
gttgccgccagaatggcggatgttcctcttgcaccaggtagtaatgaaaagaaaaaaatgtatctcctgacggat

SEQ ID NO: 215462 - DNA, 75 bp, synthetic construct
  source 1..75: mol_type = other DNA
caaaatttaaaccatcgcaggaggctttagataaacgcgcatttgacgaagaaatgaataaatcggcggagcaga

SEQ ID NO: 215463 - DNA, 75 bp, synthetic construct
  source 1..75: mol_type = other DNA
agtcgaatcatcctgattaccagcctggcgactgggtgctgggctacagtggatggcaggactatgacaatccag

SEQ ID NO: 215464 - DNA, 75 bp, synthetic construct
  source 1..75: mol_type = other DNA
ctatgggcttcaaatctgaaaaacaattctttgaagctatgaagaaaggtctaagttcaacaccatttctgttaa

SEQ ID NO: 215465 - DNA, 75 bp, synthetic construct
  source 1..75: mol_type = other DNA
tacggtctgaatgtggtgtccggcgatatcacggacatcaccacaccggacgggcgggagacgaaattttactat

SEQ ID NO: 215466 - DNA, 75 bp, synthetic construct
  source 1..75: mol_type = other DNA
cgcagtgggtgacgcgaacgaatcatgcggtgagcgacctgacgggccgtccgctgatgctctttaacagtgaag

SEQ ID NO: 215467 - DNA, 75 bp, synthetic construct
  source 1..75: mol_type = other DNA
ggataagtgaagagactgaccagtatgccggaggccaccggctgaaacaggccggaaacacgcagtatgactatg

SEQ ID NO: 215468 - DNA, 75 bp, synthetic construct
  source 1..75: mol_type = other DNA
gtgacagcctcaggcaccgggctgggctatggcgaaggcgacgagacttatggctatgacagctgtggctacctg

SEQ ID NO: 215469 - DNA, 75 bp, synthetic construct
  source 1..75: mol_type = other DNA
aacataacctattattaattaatgattttttaagccagtcacaatctaccaactttatagtatcacacaaacaac

SEQ ID NO: 215470 - DNA, 75 bp, synthetic construct
  source 1..75: mol_type = other DNA
ttattaattaatgattttttaagccagtcacaatctaccaactttatagtatcacacaaacaacacatccattat

SEQ ID NO: 215471 - DNA, 75 bp, synthetic construct
  source 1..75: mol_type = other DNA
aaatcagcctggtcattgccggaaggtcgcattctgactggagcagttatcgtattgacagcgatttcctgaaag

SEQ ID NO: 215472 - DNA, 75 bp, synthetic construct
  source 1..75: mol_type = other DNA
ttgaaactgccaccggtgaactggccagaacgcagcgccgcagcctggcggatgcgcttcagcagtccggcggcg

SEQ ID NO: 215473 - DNA, 75 bp, synthetic construct
  source 1..75: mol_type = other DNA
agaagaaatacaggtgaccgagcagtaagagcggcttatcaagctaatatgtctaagttaaaaagctttgaccct

SEQ ID NO: 215474 - DNA, 75 bp, synthetic construct
  source 1..75: mol_type = other DNA
gctattgtgcaaacagagtcaagcggaaatccttatatagttgcaaatatatctgatggcatatctaaatccttt

SEQ ID NO: 215475 - DNA, 75 bp, synthetic construct
  source 1..75: mol_type = other DNA
tcaccactcaggatttccttggtcagcaaccgcaaaatgattttgacaaaaccatagcctacacctctggtgagg

SEQ ID NO: 215476 - DNA, 75 bp, synthetic construct
  source 1..75: mol_type = other DNA
tttaatatcgaacctggaaagtacagtgtttatttgaaacaaaactggcgtgatgtgcgcgagtatggtgttggt

SEQ ID NO: 215477 - DNA, 75 bp, synthetic construct
  source 1..75: mol_type = other DNA
tctgtgccatttctatcaaaaattagccctaaatattatatccctttatatataccttggcagataataaaaatt

SEQ ID NO: 215478 - DNA, 75 bp, synthetic construct
  source 1..75: mol_type = other DNA
caatatgcttgcgttcaggcattaattgacgccggagcggatattaataaacaagatcatacctgtttaaatcct

SEQ ID NO: 215479 - DNA, 75 bp, synthetic construct
  source 1..75: mol_type = other DNA
cgccgggtgaaaggcgtggtgacctggtttgaactcggggagaacgacaaaaaccagatgctgtacagcatgaag

SEQ ID NO: 215480 - DNA, 75 bp, synthetic construct
  source 1..75: mol_type = other DNA
gattaccattccaagcgctaatatttttaacccatcgcaggggcctttagcaaactatctaattatgggggatag

SEQ ID NO: 215481 - DNA, 75 bp, synthetic construct
  source 1..75: mol_type = other DNA
caccagcacaaacgcacgtcaaaactcaggatctgggggtggtcaagcaggatggtgaaacgcagaaggctgcca

SEQ ID NO: 215482 - DNA, 75 bp, synthetic construct
  source 1..75: mol_type = other DNA
ttatcaaaatggctcgcgaagccgggttacgtatacaggagctaactggtggcactgacagcaattcgaattcct

SEQ ID NO: 215483 - DNA, 75 bp, synthetic construct
  source 1..75: mol_type = other DNA
acttttagagagcgtactaacaccttggttttctacccgcatggaagcttggccctgtgcagaaatgttgtggag

SEQ ID NO: 215484 - DNA, 75 bp, synthetic construct
  source 1..75: mol_type = other DNA
gtactgcactctgtctctgcgctcctgtcttccacccggcttatgctgcccgttctccggctcccgagtcggcgt

SEQ ID NO: 215485 - DNA, 75 bp, synthetic construct
  source 1..75: mol_type = other DNA
ggcactttcggggattttgtaggaggtgtgcttaatcctatcttgaccttcattacaattgttatgctcattaat

SEQ ID NO: 215486 - DNA, 75 bp, synthetic construct
  source 1..75: mol_type = other DNA
ttcggacacctgaaaaagccgcagattatcgcagccctgaatgatgccggactgtccggtgccgcacgggacgca

SEQ ID NO: 215487 - DNA, 75 bp, synthetic construct
  source 1..75: mol_type = other DNA
tgttcgaaccagaacaatgggatatcaaggaagtaaatgaaggtctgtactgttcatttgtgtacttaattgaat

SEQ ID NO: 215488 - DNA, 75 bp, synthetic construct
  source 1..75: mol_type = other DNA
ggacactatcttgcatccgaagaacgtgctgcgaaaatctttaagtatgagcatcgatatgttagaggacagcgg

SEQ ID NO: 215489 - DNA, 75 bp, synthetic construct
  source 1..75: mol_type = other DNA
acactatcacaataaaatacctgacattcgctatcttattcgctttgatatcgaaagaaacctcccctattccag

SEQ ID NO: 215490 - DNA, 75 bp, synthetic construct
  source 1..75: mol_type = other DNA
cacctatctgaaatattatctcttcccggattatgtcgttcagcattccaaccctgaacatactcgcgcgaatga

SEQ ID NO: 215491 - DNA, 75 bp, synthetic construct
  source 1..75: mol_type = other DNA
atggcgctccgtctggaatccgcactcggaaccagcgccgaaatgtggactggtatgcaatcccagtatgagctt

SEQ ID NO: 215492 - DNA, 75 bp, synthetic construct
  source 1..75: mol_type = other DNA
cgtttatcgcgcagacaggcattgatctactggccgtctcggtaggcacggcgcacggcatgtacgcgcctggtg

SEQ ID NO: 215493 - DNA, 75 bp, synthetic construct
  source 1..75: mol_type = other DNA
accagaacagtaaaggtgttttacttaacgatttaaaagggtggcttggtaagcgttatctgctggaagattcac

SEQ ID NO: 215494 - DNA, 75 bp, synthetic construct
  source 1..75: mol_type = other DNA
aattcagcacacttgaaatgatcgaagaaagctacacatcatggtattttaaaaatgaaaacatgataaccaact

SEQ ID NO: 215495 - DNA, 75 bp, synthetic construct
  source 1..75: mol_type = other DNA
ccacttagagagaaagataaatatcaatctcattacagcttcacaattatcaaagattcgcagtgagccttatga

SEQ ID NO: 215496 - DNA, 75 bp, synthetic construct
  source 1..75: mol_type = other DNA
caggagacagccttacactggtaacaacgggcggtggtgatgcggcatttacgttgggcaataatggcggtgtcg

SEQ ID NO: 215497 - DNA, 75 bp, synthetic construct
  source 1..75: mol_type = other DNA
agcgccgcggtcgccaaagctattctggatgatttgctggaggccaacaaagcgtactggccagagttacgttaa

SEQ ID NO: 215498 - DNA, 75 bp, synthetic construct
  source 1..75: mol_type = other DNA
gatgatgaagcgatggtcgagatcccgtgtctggtcgggcacaacggaccagaaccactggtggtcggcgatatc

SEQ ID NO: 215499 - DNA, 75 bp, synthetic construct
  source 1..75: mol_type = other DNA
aatcggaataccaattatcacagataaaaaattagcacgaaaaatttatgctacccatcgtcgctacgattatgt

SEQ ID NO: 215500 - DNA, 75 bp, synthetic construct
  source 1..75: mol_type = other DNA
caagaggaaaacagcgaagcactggaagccctcaatcgcttccacgacgaacacggctgtttcagtgatgaatac

SEQ ID NO: 215501 - DNA, 75 bp, synthetic construct
  source 1..75: mol_type = other DNA
actcaggatgcatgcttccatttacatcttcgtttttggctgttttttatattagatctttgcagctattgttat

SEQ ID NO: 215502 - DNA, 75 bp, synthetic construct
  source 1..75: mol_type = other DNA
tctggaactgcatattcagttgtcataattctatatctttacgggtacatagacgattacctagccataatggta

SEQ ID NO: 215503 - DNA, 75 bp, synthetic construct
  source 1..75: mol_type = other DNA
tcgcgtcagaattatggcggggcgtacagggccgacttcggtcgggccggtttcttcgtttgccggttgtggaaa

SEQ ID NO: 215504 - DNA, 75 bp, synthetic construct
  source 1..75: mol_type = other DNA
attcaacgtttacggagcatggatgaaagataacaatatcgggcaaatagaactactcaataagcagttgacgga

SEQ ID NO: 215505 - DNA, 75 bp, synthetic construct
  source 1..75: mol_type = other DNA
tgtcttctacgtactggaccagatcttcggcccgctgacgttggtttacggcatcccgccgattatcggcgcact

SEQ ID NO: 215506 - DNA, 75 bp, synthetic construct
  source 1..75: mol_type = other DNA
gcgatccaaagcacttggtaagtaattatgaggagcaagattttttaagagaacttttaaaaacgcctcttgaat

SEQ ID NO: 215507 - DNA, 75 bp, synthetic construct
  source 1..75: mol_type = other DNA
ggtaacggccccgttcctgataatccttttgggcatgctgcggcggcaaatcgatatggattaatgagttcggga

SEQ ID NO: 215508 - DNA, 75 bp, synthetic construct
  source 1..75: mol_type = other DNA
ccgcaggccgaatggccgggcagggaaacacttcctcagccccggctgtatctggtggaggagcgcgctgaagaa

SEQ ID NO: 215509 - DNA, 75 bp, synthetic construct
  source 1..75: mol_type = other DNA
ccgaccaaggcgagctcaccccccgccacggacgcagtgccatcgccgtgctggtctttcaggacctggccagcg

SEQ ID NO: 215510 - DNA, 75 bp, synthetic construct
  source 1..75: mol_type = other DNA
ccacccacagtttcgcagctctggatggtgagttttcaaaacttacaaccaaagaggccacaccatggcaaaccg

SEQ ID NO: 215511 - DNA, 75 bp, synthetic construct
  source 1..75: mol_type = other DNA
tctatacacgtatccactggtaccaatacgttacactgatccactggggttagaacgagttataagtgtatatgg

SEQ ID NO: 215512 - DNA, 75 bp, synthetic construct
  source 1..75: mol_type = other DNA
ggaggtaatacaccgtaatagctggaaaaaccggacagaagtggaactggccacactaacgtgggtggactggta

SEQ ID NO: 215513 - DNA, 75 bp, synthetic construct
  source 1..75: mol_type = other DNA
gacaacaatcacgaacagatagaactccttaacaaaagactatctgaaagtgtcccatgtatgccccataagaaa

SEQ ID NO: 215514 - DNA, 75 bp, synthetic construct
  source 1..75: mol_type = other DNA
atggatttgctgatccactacgactggccgggaaacattcgtgaactggaaaacgcggtggaaaggtcggtggtg

SEQ ID NO: 215515 - DNA, 75 bp, synthetic construct
  source 1..75: mol_type = other DNA
agcgaatgcctgaaattagacaaacagttattggatggaatggatatgcagttagacaatgcgtatatacaagga

SEQ ID NO: 215516 - DNA, 75 bp, synthetic construct
  source 1..75: mol_type = other DNA
gagaggggatgttgtttctgctcactcttgcaaaggtggaagccagacacatggagtttgtcgatttcgatgact

SEQ ID NO: 215517 - DNA, 75 bp, synthetic construct
  source 1..75: mol_type = other DNA
ttctggagctgattcgccgcacttccctttccacattgttaccagcagcgattgccacacaacatgacgggctta

SEQ ID NO: 215518 - DNA, 75 bp, synthetic construct
  source 1..75: mol_type = other DNA
gaatagctggctcggacaatatggacgttttctgagcggtgatgactctcaggccgacgaaattcgggattatgt

SEQ ID NO: 215519 - DNA, 75 bp, synthetic construct
  source 1..75: mol_type = other DNA
gatttagggttacccgacgaagatggactgcattttctcgcccgtatccggcagaaaaatataccctgccggtac

SEQ ID NO: 215520 - DNA, 75 bp, synthetic construct
  source 1..75: mol_type = other DNA
aacaaccggttgcgccacagccgcaatatcagcagccgcaacaaccagttgcgccgcagccgcagtatcaacagc

SEQ ID NO: 215521 - DNA, 75 bp, synthetic construct
  source 1..75: mol_type = other DNA
ttgcaccgcagcagcagtatcagcagccgcaacaaccagttccgccacagcagcaatatcagcagccgcaacaac

SEQ ID NO: 215522 - DNA, 75 bp, synthetic construct
  source 1..75: mol_type = other DNA
gcatcccgccgatcatcggcgcactgttgccaagcgcaagcttcttcttaatcagcctgtggctgttaatgagaa

SEQ ID NO: 215523 - DNA, 75 bp, synthetic construct
  source 1..75: mol_type = other DNA
caactgaccgatgagtggccgcaatatcccggtgacgagataaaacaaatcgttgaatatagcggcctgtttctt

SEQ ID NO: 215524 - DNA, 75 bp, synthetic construct
  source 1..75: mol_type = other DNA
gccagacaaaaatacggcgcagccagtgttgttgtggacgaacaatcatggttatcttcaggcgtgaaaaagtcg

SEQ ID NO: 215525 - DNA, 75 bp, synthetic construct
  source 1..75: mol_type = other DNA
ggcttatgggcgaaagatggcaacaacttcgtctacattgagcgggttaaaggtgacgaagagttaggtggcatc

SEQ ID NO: 215526 - DNA, 75 bp, synthetic construct
  source 1..75: mol_type = other DNA
tccgcgcaccgactgcggatatctgccgctctcgatgcacgctgaagcgccacaggtgctggccgcggtggttgc

SEQ ID NO: 215527 - DNA, 75 bp, synthetic construct
  source 1..75: mol_type = other DNA
gccgaccttacgcctggtggtggaacgcgaccgggagatctcccgcttcacgccccgcccctggtggcgggtaga

SEQ ID NO: 215528 - DNA, 75 bp, synthetic construct
  source 1..75: mol_type = other DNA
atgcaactttacctgtgcgaaaaaccctctcaggcacgcgacatcgcccgaattcttgacgcccataaccgcagc

SEQ ID NO: 215529 - DNA, 75 bp, synthetic construct
  source 1..75: mol_type = other DNA
ctggctggaagattatgtcttgctaagtattgagctgcttaatacaggcgcatatgagattgtgaactggaaaga

SEQ ID NO: 215530 - DNA, 75 bp, synthetic construct
  source 1..75: mol_type = other DNA
gcagtggttggtgcggatgggatatggaactattcagatgaacaggtggagcgtgcacagcaaaacgggtggctt

SEQ ID NO: 215531 - DNA, 75 bp, synthetic construct
  source 1..75: mol_type = other DNA
ccgacccgtaaaacggtagatctgacacagatgaatgacagcgagcgcaaggtttacggcctggtacgcagccat

SEQ ID NO: 215532 - DNA, 75 bp, synthetic construct
  source 1..75: mol_type = other DNA
tggtacagcagcaagaaaccgttacagcgctcacggctcaaatagtcagaggccagaaaagcgcctcatcaggtt

SEQ ID NO: 215533 - DNA, 75 bp, synthetic construct
  source 1..75: mol_type = other DNA
atccgggcacaactgcgctgtgggagcaaatgctggatgacatggcgacggggaaaatggggctggaggcgttcc

SEQ ID NO: 215534 - DNA, 75 bp, synthetic construct
  source 1..75: mol_type = other DNA
gattacgatccggcgctgaaacactggcgggcagagcatctgccgtttattcccccggcatggcggctggtgatc

SEQ ID NO: 215535 - DNA, 75 bp, synthetic construct
  source 1..75: mol_type = other DNA
gtatgtcatgccatgcgtgtggggcatgatcgcctttcgctttccgtgaaaatcaccctgccggacggaagcaga

SEQ ID NO: 215536 - DNA, 75 bp, synthetic construct
  source 1..75: mol_type = other DNA
ttaatcgtcatgttgctatgcgcgggaatttcgttttcactggctgttatcgacccggcagcagtgcatctgttg

SEQ ID NO: 215537 - DNA, 75 bp, synthetic construct
  source 1..75: mol_type = other DNA
tacgtctgacgaaaacaaactcattatagatggttttcagagaatcatgactgtctatgattatgtgacaggtat

SEQ ID NO: 215538 - DNA, 75 bp, synthetic construct
  source 1..75: mol_type = other DNA
atggaaaaaaatggcggtggcgttattctgaccatcacttctatggcggcagaaaataaaaatataaacatgact

SEQ ID NO: 215539 - DNA, 75 bp, synthetic construct
  source 1..75: mol_type = other DNA
ccgaccaaggcgagctcaccacccgccacggccgcagtgccatcgccgtgctggtctttcaggacctggccagcg

SEQ ID NO: 215540 - DNA, 75 bp, synthetic construct
  source 1..75: mol_type = other DNA
ggagaggcgttgactttcatatccgaactgggtgtggccctgctgctgttcatggtcggactggaattctcgctg

SEQ ID NO: 215541 - DNA, 75 bp, synthetic construct
  source 1..75: mol_type = other DNA
tctattaatgaaaaaagcggaagaggtcgccctcttccgcttaataacttgctacttaagccttacaggctttca

SEQ ID NO: 215542 - DNA, 75 bp, synthetic construct
  source 1..75: mol_type = other DNA
ttgggtgttttttggataaatatcgtaaaaaaagtaatgttaagtcagagaggtttgtatgaaaataacaagcga

SEQ ID NO: 215543 - DNA, 75 bp, synthetic construct
  source 1..75: mol_type = other DNA
tatgctggagcgatggggtacggccaatttatgccatcgtcattcaaaagctatgctgttgattttaatggtaac

SEQ ID NO: 215544 - DNA, 75 bp, synthetic construct
  source 1..75: mol_type = other DNA
atttgcaaaacggtgattttgcttataacgccgacactgcccgatttgttgacaaaatggtgcgtgaacacggtt

SEQ ID NO: 215545 - DNA, 75 bp, synthetic construct
  source 1..75: mol_type = other DNA
gtatcgaaagctcactttgttggttggagcaacccaaccatcatttaatccctgcggacagcgaattttatcctc

SEQ ID NO: 215546 - DNA, 75 bp, synthetic construct
  source 1..75: mol_type = other DNA
tagcaataagaggcgacgatggtaatgtagaactaagtgaagcaataaaaaatatcataataaattctggttttg

SEQ ID NO: 215547 - DNA, 75 bp, synthetic construct
  source 1..75: mol_type = other DNA
accatttaataatgtcgattatggcggttttcatgaagttttcaaacaaatacttgaaatagcctctacgtataa

SEQ ID NO: 215548 - DNA, 75 bp, synthetic construct
  source 1..75: mol_type = other DNA
acttgttatgtcagtggacagtcatattcactttctctgcccggagcatacagagcgttatctggttcgggaagt

SEQ ID NO: 215549 - DNA, 75 bp, synthetic construct
  source 1..75: mol_type = other DNA
tacgctgaacgagctggcggtggcgctgggtaacgaccctcattttgcaacaacagtcactaatgcactgtcagg

SEQ ID NO: 215550 - DNA, 75 bp, synthetic construct
  source 1..75: mol_type = other DNA
gggcagtgcgacggcggcagcacagagcaagagtacggcagaatctgcagcaacgcgcgccgagacagcggcaaa

SEQ ID NO: 215551 - DNA, 75 bp, synthetic construct
  source 1..75: mol_type = other DNA
cgcgggcgatgatgtgatcaacgcgacggaaaaaggatcgaatctggcgctttccggcaccagcgatcagcctgc

SEQ ID NO: 215552 - DNA, 75 bp, synthetic construct
  source 1..75: mol_type = other DNA
gcgatgtaaccattaccgccacggtcaccgactccgcaggcaacagtggtacggcctcgcacactgtcaccgtgg

SEQ ID NO: 215553 - DNA, 75 bp, synthetic construct
  source 1..75: mol_type = other DNA
ggcagcaacgtattcgtgagacggtgcggcacgcactggcggtgcatccccgcctgacggcacttcgggtggatc

SEQ ID NO: 215554 - DNA, 75 bp, synthetic construct
  source 1..75: mol_type = other DNA
aaccagttgcgccgcagccgcagtatcaacagccgcaacaaccggttgcaccgcagccgcagtatcagcagccac

SEQ ID NO: 215555 - DNA, 75 bp, synthetic construct
  source 1..75: mol_type = other DNA
acaggacgtgccaaatacgatgatcgtcgccatgttactgctcgcggctttctgcgtattaattgcgcttagtgc

SEQ ID NO: 215556 - DNA, 75 bp, synthetic construct
  source 1..75: mol_type = other DNA
ctgtcgccagcggaatagcacttgtacccggcacgtttcatacacgggtcaccccctcattactgttgctgttac

SEQ ID NO: 215557 - DNA, 75 bp, synthetic construct
  source 1..75: mol_type = other DNA
gtggggcttgaggatgcgagtacaacgaaaaagggaatagtacagctcagcagtgctgccaacagcacatctgaa

SEQ ID NO: 215558 - DNA, 75 bp, synthetic construct
  source 1..75: mol_type = other DNA
gtactattcagaactctatttgcaaaggtttaataatataagtctgaacgtaactggtagtggattaggtgtatt

SEQ ID NO: 215559 - DNA, 75 bp, synthetic construct
  source 1..75: mol_type = other DNA
aaggatgaaaatgcgtaggccacatcttgtgcccttatcatctcaagcggtagatttactcaatgaactcaagat

SEQ ID NO: 215560 - DNA, 75 bp, synthetic construct
  source 1..75: mol_type = other DNA
cctatgccgccacggtacaggcagacgggagctggagcgttggcattccggcggcaagcgtcagtgcatggcctg

SEQ ID NO: 215561 - DNA, 75 bp, synthetic construct
  source 1..75: mol_type = other DNA
tgtttgcaatgtctttagtttatcttctggcattaagaaaatcattaactatatttttcattatagtattatgct

SEQ ID NO: 215562 - DNA, 75 bp, synthetic construct
  source 1..75: mol_type = other DNA
gtattagacggtaaaaataagacagaatgttttaaattagcatgcaagacactagtgtcatttgttgttgcattt

SEQ ID NO: 215563 - DNA, 75 bp, synthetic construct
  source 1..75: mol_type = other DNA
gatgcggtgcaggtgccgatcctcgccaacatcaccgaatttggtgccacgccgctgtttaccaccgacgaatta

SEQ ID NO: 215564 - DNA, 75 bp, synthetic construct
  source 1..75: mol_type = other DNA
ccgccattccgctggtcttgctgacgatggcgattggtgaatgggtcgcgccgcagggcgagcagatggcgcgta

SEQ ID NO: 215565 - DNA, 75 bp, synthetic construct
  source 1..75: mol_type = other DNA
gcggcgtgaccgccttatccgacctacggggtggagcacttcacagcggtgtaggcctgataagacgcgccagcg

SEQ ID NO: 215566 - DNA, 75 bp, synthetic construct
  source 1..75: mol_type = other DNA
ggctgtcgtggatcgtaaacaggtcgtctccatcctgtttatgaaacccgtttctgacaaagactgtctcccctc

SEQ ID NO: 215567 - DNA, 75 bp, synthetic construct
  source 1..75: mol_type = other DNA
actgataaaatcttggctggataaagggtttaaccttattatggagagatcccatattgaggattatatttttat

SEQ ID NO: 215568 - DNA, 75 bp, synthetic construct
  source 1..75: mol_type = other DNA
ctaccaccgacgcggcgggcaactggacgttaaccgtgccggtgagcgatctggcggctttaggccaggccaact

SEQ ID NO: 215569 - DNA, 75 bp, synthetic construct
  source 1..75: mol_type = other DNA
ggtggcaggcgatgatgtgatcaacgcgacggaacacgcacaggcgcagattatcagcggctccgccacgggtgc

SEQ ID NO: 215570 - DNA, 75 bp, synthetic construct
  source 1..75: mol_type = other DNA
tgcaggcggcaataaatatgattacaaacgctgggcgcttgaggtatcaggcgtatccgccgcatatgtttaccc

SEQ ID NO: 215571 - DNA, 75 bp, synthetic construct
  source 1..75: mol_type = other DNA
attcatctaataaatatattaggaagtatgttgaacggtttatatctcaactatgtaaacttaaagtattatcaa

SEQ ID NO: 215572 - DNA, 75 bp, synthetic construct
  source 1..75: mol_type = other DNA
gcgcgatgtcggcattgccagtgttaatggtgactgcagaagcgaagaaagagaacatcattgctgcggcgcaag

SEQ ID NO: 215573 - DNA, 75 bp, synthetic construct
  source 1..75: mol_type = other DNA
taatctgataatccgcaaattaaaagacccggagctgcaaattcaaagaattgcgctttcggggcaactggtagt

SEQ ID NO: 215574 - DNA, 75 bp, synthetic construct
  source 1..75: mol_type = other DNA
agacagtcagccagagcacggaggaaaacgccaggcagatagcgcaggtccgccagtacgtggatgacaaaggga

SEQ ID NO: 215575 - DNA, 75 bp, synthetic construct
  source 1..75: mol_type = other DNA
tatcgcgatgattaccccggagaacggcaacaccacgccgctgtttgtggcgcaggggaatcagctgtttatgaa

SEQ ID NO: 215576 - DNA, 75 bp, synthetic construct
  source 1..75: mol_type = other DNA
gctgaaagagaaaaccacgcagatggagattgcccaaaccgagcggcaggggctggaagaggcgctattgcacag

SEQ ID NO: 215577 - DNA, 75 bp, synthetic construct
  source 1..75: mol_type = other DNA
cgagccgttctttaccaccaaacagacgggcagtggcagcggactaggcttgtcgatggtctatggtttcgtgcg

SEQ ID NO: 215578 - DNA, 75 bp, synthetic construct
  source 1..75: mol_type = other DNA
ttgccgccgccaatttacgctccaacacttcaaatcttatcggtctgattttacgtgattttagcgatagctttt

SEQ ID NO: 215579 - DNA, 75 bp, synthetic construct
  source 1..75: mol_type = other DNA
gcgttacaaaatttacagcgtcaactgggattaatcgccggaggtgaggccggaaaacgggcagcaacggcagtg

SEQ ID NO: 215580 - DNA, 75 bp, synthetic construct
  source 1..75: mol_type = other DNA
atgcaccctggcgcaactgggcgcggcgagaatgtggcgtctgctgcatggcgagtcgaaaaaagctacatcaac

SEQ ID NO: 215581 - DNA, 75 bp, synthetic construct
  source 1..75: mol_type = other DNA
gaatggggccgtttggtcagcggatacatgatctgcatcactatctacaacggcaatatcccgctgtcttttctg

SEQ ID NO: 215582 - DNA, 75 bp, synthetic construct
  source 1..75: mol_type = other DNA
gtctaccggcgcgaacaactggacaccgacgacgtacatcagtgatttactggttgtggtgatgaaaaaatccac

SEQ ID NO: 215583 - DNA, 75 bp, synthetic construct
  source 1..75: mol_type = other DNA
ctatcacacgagaacaatcattaaatgataaatatccaactgatgttcaagctgaagttcttgtttttgatgaaa

SEQ ID NO: 215584 - DNA, 75 bp, synthetic construct
  source 1..75: mol_type = other DNA
ttttccggacgagagaagccgcaatatctacctcgctctgccggtcgccagtgatgtgagaaatgaaatcagcga

SEQ ID NO: 215585 - DNA, 75 bp, synthetic construct
  source 1..75: mol_type = other DNA
gtggcgcaaagttaccaggatttgcgctccggcgagaggctgatcatgattttcgccctgttagcggtggtgatc

SEQ ID NO: 215586 - DNA, 75 bp, synthetic construct
  source 1..75: mol_type = other DNA
aaaaagcaacaagttcagcctacaaggcaagatctataattggctcattaactcgttggaatataagcttaaaca

SEQ ID NO: 215587 - DNA, 75 bp, synthetic construct
  source 1..75: mol_type = other DNA
gacacctgttatcacttaacccatcactggcccactgccgcagatattcccgtggcgagcgataacccagcgcac

SEQ ID NO: 215588 - DNA, 75 bp, synthetic construct
  source 1..75: mol_type = other DNA
accgcgaaagcgaagcctgcagcgtgatgcggcattctgggtggaacagcgtcgccaactgccaccgcccgcgtc

SEQ ID NO: 215589 - DNA, 75 bp, synthetic construct
  source 1..75: mol_type = other DNA
ccggttgttgctcatcttcggcatgttgtcggttgccgtggcggcatttttcattctggtacagcgggacattaa

SEQ ID NO: 215590 - DNA, 75 bp, synthetic construct
  source 1..75: mol_type = other DNA
tcgaaaacgtcggcattattttgctggcagtcggtgtggcgatggtcggtctgtcactgcacgacccgctgctca

SEQ ID NO: 215591 - DNA, 75 bp, synthetic construct
  source 1..75: mol_type = other DNA
ggtctggacagactggctattaagctttccggcatcacatcgctggtgggcggcgtgattggcatcatcagcgga

SEQ ID NO: 215592 - DNA, 75 bp, synthetic construct
  source 1..75: mol_type = other DNA
gcaaaaattggtaacccggaatacttcactgatgtcgaatttcgtaagcccgccgatgaagcgaagctggtgatt

SEQ ID NO: 215593 - DNA, 75 bp, synthetic construct
  source 1..75: mol_type = other DNA
attttagcttgtgtaccgttattcagcttgttgtttattagtgtgtgtccattgaaagcgccaacaataacacag

SEQ ID NO: 215594 - DNA, 75 bp, synthetic construct
  source 1..75: mol_type = other DNA
atagtgatacgccgttagtaaatacgctacttactgattttaatcgtgaactgcgcaaactcgcgccgctttcgg

SEQ ID NO: 215595 - DNA, 75 bp, synthetic construct
  source 1..75: mol_type = other DNA
ccgcacagcccggcatctggatggcagaaaaactgtcagaattaccctccgcctggagcgtggcgcattacgttg

SEQ ID NO: 215596 - DNA, 75 bp, synthetic construct
  source 1..75: mol_type = other DNA
aaaaagtgaggaagcgtttgcttcagtttatcagttaattgagcaagccggcatgcgttgggttgataaattaag

SEQ ID NO: 215597 - DNA, 75 bp, synthetic construct
  source 1..75: mol_type = other DNA
tacagcatcaaaaacaggaaaaaaaatatacaaattcagttcgtttaataccaattttagttcaggaaaaaaaca

SEQ ID NO: 215598 - DNA, 75 bp, synthetic construct
  source 1..75: mol_type = other DNA
tgaaattcactgctacagaaatgcaatggttgacaaagataaatgaagtaggaattgttgaaaaacaaagccaac

SEQ ID NO: 215599 - DNA, 75 bp, synthetic construct
  source 1..75: mol_type = other DNA
atttcgtcatctgcgcattttaataatgacataacagactatgaagaattgcacaccatcacattaatggtgttc

SEQ ID NO: 215600 - DNA, 75 bp, synthetic construct
  source 1..75: mol_type = other DNA
ttcgtaacctgttgcagagttaccatgctcaggcaaacgctattgaaaaagaaacgttctctgtccatagcgatg

SEQ ID NO: 215601 - DNA, 75 bp, synthetic construct
  source 1..75: mol_type = other DNA
taggactgaaatcagccgaaaaggaaatgcaacttgccgagcgcatcgaaaaatcaggcgctacggaagtagaag

SEQ ID NO: 215602 - DNA, 75 bp, synthetic construct
  source 1..75: mol_type = other DNA
gggattgcgccattaacaggtagtgaagcggacatttgcgaactgcagaaaatgtactttcttcccgccattcgc

SEQ ID NO: 215603 - DNA, 75 bp, synthetic construct
  source 1..75: mol_type = other DNA
cataaatacccgggcttacgcggcacactacaaaccgcatccactgactgcgacacaattgtggaagctgcagca

SEQ ID NO: 215604 - DNA, 75 bp, synthetic construct
  source 1..75: mol_type = other DNA
ctggaaacaaccgcttttttgaaagaagcgattggtttgtatgaacatttaggttttcaacatatcgactatgcg

SEQ ID NO: 215605 - DNA, 75 bp, synthetic construct
  source 1..75: mol_type = other DNA
cacgtcatcttgttctgttggggggcaacatcgcttggtctgggatatgtcacgatcaaaacattctcaatctct

SEQ ID NO: 215606 - DNA, 75 bp, synthetic construct
  source 1..75: mol_type = other DNA
gccgctggaccagaaaatttacgcgttcaactatctgaacggtaaaaaggcctatcttgaatctgttgagttcca

SEQ ID NO: 215607 - DNA, 75 bp, synthetic construct
  source 1..75: mol_type = other DNA
agtttgatcgaaaactcacccgctggtacgtccgctgggggcgctgggtatggcggatactgatcgccgtgccag

SEQ ID NO: 215608 - DNA, 75 bp, synthetic construct
  source 1..75: mol_type = other DNA
tgtcaattgacgataaacccctatgggaaatcgacttgcttaacttcgtctacaaacgcaacggcgaaaatattt

SEQ ID NO: 215609 - DNA, 75 bp, synthetic construct
  source 1..75: mol_type = other DNA
acccgtggtttaatttactgaatgaaaaaggcatgaagggaatacgtgagtctcagggaagtcaaggtgagcctt

SEQ ID NO: 215610 - DNA, 75 bp, synthetic construct
  source 1..75: mol_type = other DNA
cttccacaattgggtggtggttctattggaatgtctcgctacagtaagaagaaaaaacaggttgagcagtttttt

SEQ ID NO: 215611 - DNA, 75 bp, synthetic construct
  source 1..75: mol_type = other DNA
ggccgtcaggagaagaaaatcgtcaccagcgtgcgcctggtctatcccggtccgcgttaccgcctggaagggagc

SEQ ID NO: 215612 - DNA, 75 bp, synthetic construct
  source 1..75: mol_type = other DNA
tctctgttcaaccatcctacaagccgttttagctctgagcataacgttactaagcgtgagaacggggaagaatat

SEQ ID NO: 215613 - DNA, 75 bp, synthetic construct
  source 1..75: mol_type = other DNA
cgccactgacacaatgaccgttttcaagcaatttgaccagcttgctacggatattatggagaaagcacaaagcca

SEQ ID NO: 215614 - DNA, 75 bp, synthetic construct
  source 1..75: mol_type = other DNA
agcggctttccgctatgtcagcccactggacgaagggaacgtagtattccagcgtcgtgacctcctgccaggcgt

SEQ ID NO: 215615 - DNA, 75 bp, synthetic construct
  source 1..75: mol_type = other DNA
gaagcgacaaaccgcctggacgaactgggaagcaggccactgctgttatggcatggccttgacgatgatgttgtg

SEQ ID NO: 215616 - DNA, 75 bp, synthetic construct
  source 1..75: mol_type = other DNA
aaatgtgagcagaccaactttgacacggtgctgacctacgcgaagctggacctgtgtacgagatccattgcatca

SEQ ID NO: 215617 - DNA, 75 bp, synthetic construct
  source 1..75: mol_type = other DNA
cggttaaatcaattctggcaaatcttgctacaaagtatgcaggaattcactacgttacgtgcggcaatagccgaa

SEQ ID NO: 215618 - DNA, 75 bp, synthetic construct
  source 1..75: mol_type = other DNA
gtgatggggatgatggttgcacatactggctaccgaatgatttatctgctgggtgcactattagtggtagtggct

SEQ ID NO: 215619 - DNA, 75 bp, synthetic construct
  source 1..75: mol_type = other DNA
ccgtgccgccggttatcagccatgccgacggttcaaagccaaagatgggcttcgccgccatgttcgatcgcgcgg

SEQ ID NO: 215620 - DNA, 75 bp, synthetic construct
  source 1..75: mol_type = other DNA
cctttaccggcaatgtctgcgacaaaaaaggaccgaaatatgtggtttacccttgccttgtgttctttacggttg

SEQ ID NO: 215621 - DNA, 75 bp, synthetic construct
  source 1..75: mol_type = other DNA
tcttctctggtcaggtgtatacgcctaagacagacgatctgttaatcgactttggcgacctgttcggcgtagcgc

SEQ ID NO: 215622 - DNA, 75 bp, synthetic construct
  source 1..75: mol_type = other DNA
gccgcaggtggcccgcacagcactgcatgcggtgacccacaccgtcgcccgcgcggcaggctccctgtggggatt

SEQ ID NO: 215623 - DNA, 75 bp, synthetic construct
  source 1..75: mol_type = other DNA
actattagtggtagtggctggggggggctatgcgctgcaaatgaaggggaaaagcggggttgcgctagtagtggc

SEQ ID NO: 215624 - DNA, 75 bp, synthetic construct
  source 1..75: mol_type = other DNA
ggttctgcgaaggtgtcatgcctggtgaagaagagtttaatactttccgtgaggcgctccgtgaacgaaactggt

SEQ ID NO: 215625 - DNA, 75 bp, synthetic construct
  source 1..75: mol_type = other DNA
attgaggaacaggtacggtttggcgtcctgggccttgcggaagaacgcacctgggatcgtgaatcccgctcctgg

SEQ ID NO: 215626 - DNA, 75 bp, synthetic construct
  source 1..75: mol_type = other DNA
gcgcatgcatgtttcgcgtcaccctctctatgtcgccggccgccgtaaggcgggacgtaaatatggcttccgtcc

SEQ ID NO: 215627 - DNA, 75 bp, synthetic construct
  source 1..75: mol_type = other DNA
ttcactggtctgcgcttgcgtttgatgagcaaatccggttctggcaggaggttgatgccggaaaacaggacagtt

SEQ ID NO: 215628 - DNA, 75 bp, synthetic construct
  source 1..75: mol_type = other DNA
gtacaacggagcggctgcagcagctggccattcagaacctgtatcagctggagctggccctggctccgccgtcct

SEQ ID NO: 215629 - DNA, 75 bp, synthetic construct
  source 1..75: mol_type = other DNA
atgagtaatgcgcacaatccgcaacactggagtcagctggatacggaagaacagatccgtttctggcagggagta

SEQ ID NO: 215630 - DNA, 75 bp, synthetic construct
  source 1..75: mol_type = other DNA
aaagagcaccagggtatacccctctgaaaaattatgtcgatgagatcaacaaagctttattacaatgtgatttac

SEQ ID NO: 215631 - DNA, 75 bp, synthetic construct
  source 1..75: mol_type = other DNA
aaaaatccttatgatgcaaaaataaaatcagaattaagagtaaatcaatacttacttaatcttttaggagcgaat

SEQ ID NO: 215632 - DNA, 75 bp, synthetic construct
  source 1..75: mol_type = other DNA
aacttaatcaacataacctgcaggttgttatcgggccacaagttcagtcagtaaaagatgaaatggccggtctga

SEQ ID NO: 215633 - DNA, 75 bp, synthetic construct
  source 1..75: mol_type = other DNA
gctttcaccatacgagaatgttattaattttttgaataatgttaaaccaaaatgtggctacttttggaacgaatt

SEQ ID NO: 215634 - DNA, 75 bp, synthetic construct
  source 1..75: mol_type = other DNA
tgtcacttatccggcaccgtcagaacctgtagaagcagatttagaacaaatcgactttgatgaattagcaatggt

SEQ ID NO: 215635 - DNA, 75 bp, synthetic construct
  source 1..75: mol_type = other DNA
acagccgcccgtttctggataaatacgctcgtgagttgaactatcgcatcaggcagcgggatgttgattctgcct

SEQ ID NO: 215636 - DNA, 75 bp, synthetic construct
  source 1..75: mol_type = other DNA
acaagaaggcagaagaagtcgagcgcaaaaacagaagtacttattacaaggattcaaacccattaggaaacaaaa

SEQ ID NO: 215637 - DNA, 75 bp, synthetic construct
  source 1..75: mol_type = other DNA
ggtgttccacaggttagggagcgagtgataattgtcgggatcaggtccgacttaaacaaaaagtggaccttccct

SEQ ID NO: 215638 - DNA, 75 bp, synthetic construct
  source 1..75: mol_type = other DNA
aaacatagatctaaaaacaatgcattacagtcgccacatttccgccacgcaaaaagagttggctggagggcaaat

SEQ ID NO: 215639 - DNA, 75 bp, synthetic construct
  source 1..75: mol_type = other DNA
aaaaacagtttaagttctttattttgatgttcattgcattaacttttatcgcttatactctaggtttaagcgacc

SEQ ID NO: 215640 - DNA, 75 bp, synthetic construct
  source 1..75: mol_type = other DNA
ttacggtgacagaatggcttgataaatatatttctatccaggaggacaggctgcaacataatgaactaaggaagg

SEQ ID NO: 215641 - DNA, 75 bp, synthetic construct
  source 1..75: mol_type = other DNA
cccggtaaaaaattttgcgttctgcccaggacaggtgcgtcaggccgtggcagtgatgccccttgcggcgaaggt

SEQ ID NO: 215642 - DNA, 75 bp, synthetic construct
  source 1..75: mol_type = other DNA
tggtgctgcgttttggcggggccttttgcggcgcgattctggcgctgttattcacgctactggtcatgccctggc

SEQ ID NO: 215643 - DNA, 75 bp, synthetic construct
  source 1..75: mol_type = other DNA
aagccacgcagtgaaatgggtgtgacttgtgttggtcgccagaaaatgaaattaggcagtaagctactgtatgag

SEQ ID NO: 215644 - DNA, 75 bp, synthetic construct
  source 1..75: mol_type = other DNA
tgctggcactcctgattggcatcccgctgggcatactctctgcagtctggcgaaatcgctggctggatcatctgg

SEQ ID NO: 215645 - DNA, 75 bp, synthetic construct
  source 1..75: mol_type = other DNA
ttaccgctacgtcagcgacctgtttcatggtgacctgggaacatccattcgtaccgggcgtccggtgctggaaga

SEQ ID NO: 215646 - DNA, 75 bp, synthetic construct
  source 1..75: mol_type = other DNA
atgaatgttgtcgcttctcccgcactccgtttgcgcaaacttaccgtcgccgatccgaaccttgacgagctgtat

SEQ ID NO: 215647 - DNA, 75 bp, synthetic construct
  source 1..75: mol_type = other DNA
gcttgctcagcctttgcgcgtttcgttggtgatggaggctccggtcaatgaaaacaccggggcgatgacaaagct

SEQ ID NO: 215648 - DNA, 75 bp, synthetic construct
  source 1..75: mol_type = other DNA
gcaagaaagttgatgaatgcagtggaagtgtttgcctgccaaacgtagccatttacgcggcaggctacaggaaat

SEQ ID NO: 215649 - DNA, 75 bp, synthetic construct
  source 1..75: mol_type = other DNA
gtgttaaccacaacggcgacgaaaaactggcttttaaacttgttgatgctgctcataaagcaggtgctgatatcg

SEQ ID NO: 215650 - DNA, 75 bp, synthetic construct
  source 1..75: mol_type = other DNA
tgatcctgctttcgataaaaataccgatctgattattttgcataaattaaggcaccgagctgattttaatggaat

SEQ ID NO: 215651 - DNA, 75 bp, synthetic construct
  source 1..75: mol_type = other DNA
acgacagagatgcagcaaagtacttatcttattgatataatgaaatattattatgcggccgcagataagtctggt

SEQ ID NO: 215652 - DNA, 75 bp, synthetic construct
  source 1..75: mol_type = other DNA
gaagcataccgagccgcgctggtggaacgttatggcgaagagctggtactagcgctcgagaacaataacgctccg

SEQ ID NO: 215653 - DNA, 75 bp, synthetic construct
  source 1..75: mol_type = other DNA
gaatcagaaagtactctggatgattataaaatatttacactcgctaaatgcattaccagtaattatgaaaaaatg

SEQ ID NO: 215654 - DNA, 75 bp, synthetic construct
  source 1..75: mol_type = other DNA
ctggttgcgacattattgtctcaacgggaatggcgacattggctgagattgaggccgcgttgggtgttattgctt

SEQ ID NO: 215655 - DNA, 75 bp, synthetic construct
  source 1..75: mol_type = other DNA
ttcttcaagctgtaattgtgcttccaattttatcaatcgtaatttgcatgttaggtatccctattgggattatag

SEQ ID NO: 215656 - DNA, 75 bp, synthetic construct
  source 1..75: mol_type = other DNA
gcctgccgccggtggagtggctgacgtatggcagcggttacctggcgggaatgaagctgggcgggacgccgctgc

SEQ ID NO: 215657 - DNA, 75 bp, synthetic construct
  source 1..75: mol_type = other DNA
acccgtattacctgcaccagccataccgtctgccggggcagcagtatgatgaggagtcggggctgtattataacc

SEQ ID NO: 215658 - DNA, 75 bp, synthetic construct
  source 1..75: mol_type = other DNA
ttattatgctgccgcagataagtcgggtttctttgaatttacattgaaacaagatgctcaggggtttgggagtct

SEQ ID NO: 215659 - DNA, 75 bp, synthetic construct
  source 1..75: mol_type = other DNA
agcataagtgcagcgaaagcgaaagttggggagaccattacgttgactctgacggtgaaagattgtgatggcaat

SEQ ID NO: 215660 - DNA, 75 bp, synthetic construct
  source 1..75: mol_type = other DNA
gccattgaacatggttacggacataaagaaatgggcgcggcacagcataccctcgacggtgagccgatggcgttt

SEQ ID NO: 215661 - DNA, 75 bp, synthetic construct
  source 1..75: mol_type = other DNA
gtctcatgaaaagaattacaccctgaatgtgattgtctgcgattttgtgggcgaccctgacctgattttcgtgcc

SEQ ID NO: 215662 - DNA, 75 bp, synthetic construct
  source 1..75: mol_type = other DNA
ggagttttctgagtggaatagaaaattcataggcaatattctaacgattggtagcggtcgagattataaacattt

SEQ ID NO: 215663 - DNA, 75 bp, synthetic construct
  source 1..75: mol_type = other DNA
tgccggatgcgcccgatcacggtagccgttttagtggcgacgcagcgcggcggttaaatcaattctggcaaatct

SEQ ID NO: 215664 - DNA, 75 bp, synthetic construct
  source 1..75: mol_type = other DNA
tcactccggcgagcagaagtccttattttaatatggtaaaatttcacgaaagtggttatgtgaggcttgtcaatg

SEQ ID NO: 215665 - DNA, 75 bp, synthetic construct
  source 1..75: mol_type = other DNA
tgtaattttacatacgcattctattgaagctgtacgaagtatggttgcgaatgatatgggtataaccattctttc

SEQ ID NO: 215666 - DNA, 75 bp, synthetic construct
  source 1..75: mol_type = other DNA
aatatttcgtatcaacagcggagtccggatcgttatcaactgcagccaaatcactcaatatttcacagtctgcga

SEQ ID NO: 215667 - DNA, 75 bp, synthetic construct
  source 1..75: mol_type = other DNA
ggatgggggaactgcgaaagcgcctgctgtggtccggtaccgagcaggcaatctggatcgatatcgattcggaca

SEQ ID NO: 215668 - DNA, 75 bp, synthetic construct
  source 1..75: mol_type = other DNA
gatgatattcttcgcatgagcgccagagagttgcagcgcgtaattcaatctggcgaagatattatttgcgaaaga

SEQ ID NO: 215669 - DNA, 75 bp, synthetic construct
  source 1..75: mol_type = other DNA
atgtcccagcccttcgatttcgacaaagcacttaaagccctccagtccggtcaggcattaacgggcaaagatggt

SEQ ID NO: 215670 - DNA, 75 bp, synthetic construct
  source 1..75: mol_type = other DNA
gtcccatgaaaagaaatacacgctgaatgtgatcgtgtgtgattttgtaggcgaccccgacctgatttttgtgcc

SEQ ID NO: 215671 - DNA, 75 bp, synthetic construct
  source 1..75: mol_type = other DNA
ctcgcggaggctctaaaggcctgccagggaagaacataaaagagttatgtggaaagcctttattacactatgcaa

SEQ ID NO: 215672 - DNA, 75 bp, synthetic construct
  source 1..75: mol_type = other DNA
tcggcaagccccgtatgacccgcgccgacaaatggaaaacacggcctgcggtcatgcgttaccgcgcattctgcg

SEQ ID NO: 215673 - DNA, 75 bp, synthetic construct
  source 1..75: mol_type = other DNA
aatttctgcattttcagaaaataaattcaggacaaatcacgatctgaatatggcgacatttcttgtcccatggta

SEQ ID NO: 215674 - DNA, 75 bp, synthetic construct
  source 1..75: mol_type = other DNA
ggataaactgctaacctgttcatggcagccaggcgtgcgtcaccgcattacgcctgaggcgttgatgctgccgtg

SEQ ID NO: 215675 - DNA, 75 bp, synthetic construct
  source 1..75: mol_type = other DNA
gcaagtgattacctgccacagacaaattggccaacaactcaattaccaccaggatatacttgtgcagaaccctat

SEQ ID NO: 215676 - DNA, 75 bp, synthetic construct
  source 1..75: mol_type = other DNA
caccgatcacgtctttgccctgatgcaccttgctaggcttccgcttcgcgccgcgcatccgcgacctcggcgaaa

SEQ ID NO: 215677 - DNA, 75 bp, synthetic construct
  source 1..75: mol_type = other DNA
actacacgcggacacaatatgaagagccgctggtcgaaagccgctatctttacgacccgctgggccgcagggtgg

SEQ ID NO: 215678 - DNA, 75 bp, synthetic construct
  source 1..75: mol_type = other DNA
tatgccacggacccggcaggtaaccgcctgcccgacccggagctgcacccggacagcaccctcagcatgtggccg

SEQ ID NO: 215679 - DNA, 75 bp, synthetic construct
  source 1..75: mol_type = other DNA
tgtcagcacggaaggggcaacagaatggtgcgcagaatacgatgaatggggcaacctgctgaatgaagagaaccc

SEQ ID NO: 215680 - DNA, 75 bp, synthetic construct
  source 1..75: mol_type = other DNA
gattcatatggaacatcatcaattgatattactggcagtggagatctaatatcattaggtggtcatgcaggactt

SEQ ID NO: 215681 - DNA, 75 bp, synthetic construct
  source 1..75: mol_type = other DNA
tctgtttgcgcttgcgcagaacaggacgctccgggagcgcacggaagcctctctttcatccgcgcttgatacggt

SEQ ID NO: 215682 - DNA, 75 bp, synthetic construct
  source 1..75: mol_type = other DNA
ccgttttagtggcgacacaccgcgacggttaaatcagttctggcaaatattgcggcaaaatatgcaagaatttac

SEQ ID NO: 215683 - DNA, 75 bp, synthetic construct
  source 1..75: mol_type = other DNA
ctttctcgccgagttcgccgaagtgcgtgaacaaggttcatcctctcttatggccatgacctttctttgccctaa

SEQ ID NO: 215684 - DNA, 75 bp, synthetic construct
  source 1..75: mol_type = other DNA
cccttcgagaattacgtaatcgtcgctttctcgccgagttcgccgaggtgcgtgagcagggttcgtcctctctta

SEQ ID NO: 215685 - DNA, 75 bp, synthetic construct
  source 1..75: mol_type = other DNA
gagttggggggcattttgcgtatacttatgtagtggatgtgatcttacccagcaatagtggacacgcggctaagt

SEQ ID NO: 215686 - DNA, 75 bp, synthetic construct
  source 1..75: mol_type = other DNA
gattccacaaggctctgtattaatggatttcattgctgaaatattacttggttatattgatgaaatcttaacaga

SEQ ID NO: 215687 - DNA, 75 bp, synthetic construct
  source 1..75: mol_type = other DNA
agaggaagatggtcgtgtgaataatttccaggtgtcggcagcatcaacgcccttcctgacgcgccaggggcaggc

SEQ ID NO: 215688 - DNA, 75 bp, synthetic construct
  source 1..75: mol_type = other DNA
accaatgccacggtgactatcagtcaatcaggccgcgttatttaccagaaaaaagtcccgccaggcccgtttatc

SEQ ID NO: 215689 - DNA, 75 bp, synthetic construct
  source 1..75: mol_type = other DNA
atgacctgcttattcgcaccttccttaaccctcggcgaaaccgatttcagttccaatattttcgatggtttttct

SEQ ID NO: 215690 - DNA, 75 bp, synthetic construct
  source 1..75: mol_type = other DNA
ttccgcattggcggtcgaattcaacctgaatgttctcgataaatcgatgcgcgatcgtattgatatatcattatt

SEQ ID NO: 215691 - DNA, 75 bp, synthetic construct
  source 1..75: mol_type = other DNA
aaacagtagcagcagcaccacacaccgcatgtcattgaatgatacgctggatgaacgtaatagctggggcatgtc

SEQ ID NO: 215692 - DNA, 75 bp, synthetic construct
  source 1..75: mol_type = other DNA
atggattacaacttgtttgccagcagctaccgcccacaggatggcagcagcactaatcttaacgcctatggaaca

SEQ ID NO: 215693 - DNA, 75 bp, synthetic construct
  source 1..75: mol_type = other DNA
tgagtgggatatttctggtacctatgccgccaatgattacagttccgtcagcagcagctggagcggttctttcac

SEQ ID NO: 215694 - DNA, 75 bp, synthetic construct
  source 1..75: mol_type = other DNA
actatcaacacctgagttcagccggcgaatgggatttgtctggcacttatgccgccaatgattacagctctgtca

SEQ ID NO: 215695 - DNA, 75 bp, synthetic construct
  source 1..75: mol_type = other DNA
aatacctcgttatatggcggtttgctactctccggagatgactaccattctggcgcaataggcatcgggcaaaat

SEQ ID NO: 215696 - DNA, 75 bp, synthetic construct
  source 1..75: mol_type = other DNA
cgtcatcattcgcaacgccagcggtcagttccctcccctcggtgcggatatccgtcaggatggcagcagcattag

SEQ ID NO: 215697 - DNA, 75 bp, synthetic construct
  source 1..75: mol_type = other DNA
gcgttgcggtaaataataaccaaatcagtaacgggcaaaagattaactggcacaaaaatgacgataaaaccattc

SEQ ID NO: 215698 - DNA, 75 bp, synthetic construct
  source 1..75: mol_type = other DNA
caaagaaacgtggattgaaggcgcgataggttacaaatcactggcatcccgttccggtaaagacgttaacgtcat

SEQ ID NO: 215699 - DNA, 75 bp, synthetic construct
  source 1..75: mol_type = other DNA
ggagatgtggcgttttatgatgatgtgccgatggtgccggtacttatcgtctttatcactctggcgttgttatac

SEQ ID NO: 215700 - DNA, 75 bp, synthetic construct
  source 1..75: mol_type = other DNA
cgacgtggctgcgcttgagatgctaggtgacctgatgcgccgtgaggatgacaaaggtcaggataagctcaacga

SEQ ID NO: 215701 - DNA, 75 bp, synthetic construct
  source 1..75: mol_type = other DNA
cccggcagcaggcctcttccggcggggcggaaccgtccgtttttcctgataccctgccgggttacaccgaatatg

SEQ ID NO: 215702 - DNA, 75 bp, synthetic construct
  source 1..75: mol_type = other DNA
gcacaagattttctcgcgttgttgagcgaagcattagcaggcgagacaactaccgacaaagcggccccccagttg

SEQ ID NO: 215703 - DNA, 75 bp, synthetic construct
  source 1..75: mol_type = other DNA
ggtcctggacgttcttgatggtgtcattgctgatattgggcgggaagcgaaaaaaattgggcagaaaaaacgact

SEQ ID NO: 215704 - DNA, 75 bp, synthetic construct
  source 1..75: mol_type = other DNA
accagttaagaaaagggccggttgccatcagcggcccggcatttaaccaggcagttgcgcgttatctgaaactta

SEQ ID NO: 215705 - DNA, 75 bp, synthetic construct
  source 1..75: mol_type = other DNA
cattaacacaggatccacataatttttacttatcaactattattgattccggtattttgatattagcaattgtaa

SEQ ID NO: 215706 - DNA, 75 bp, synthetic construct
  source 1..75: mol_type = other DNA
tgtcatcgagggatatttgggaaaaaactggggaatgctcctcggtctgctctactttctcatgctggtcatctg

SEQ ID NO: 215707 - DNA, 75 bp, synthetic construct
  source 1..75: mol_type = other DNA
ctttgccctgatgaccgccttcttcggtgtttacctcgggttcaaagaggccgtacaggggctggcgatgaacgt

SEQ ID NO: 215708 - DNA, 75 bp, synthetic construct
  source 1..75: mol_type = other DNA
aaattgctgggcttaaatcctctctaacgatgttgatgtctgcgttcaatcttatgtcttctcaggcgggttata

SEQ ID NO: 215709 - DNA, 75 bp, synthetic construct
  source 1..75: mol_type = other DNA
cggcgaagcgtatttggaagagaaagaacgcgccgacaaacttcaggcaactctggaaatggtaagcaagccgaa

SEQ ID NO: 215710 - DNA, 75 bp, synthetic construct
  source 1..75: mol_type = other DNA
acagggcctcattatcgccagaagagtggaaaaaactaacccgatttgacagtacagatgtaggatggattatca

SEQ ID NO: 215711 - DNA, 75 bp, synthetic construct
  source 1..75: mol_type = other DNA
ctggtttacaaggtaccctctcttcaccgatataaggggttttctctgtatctgatcatctttactggcatcctg

SEQ ID NO: 215712 - DNA, 75 bp, synthetic construct
  source 1..75: mol_type = other DNA
tgactacggggtccggttgccagagctcctggtccgtggtgatgaaagccagccagataatacggtgtcattact

SEQ ID NO: 215713 - DNA, 75 bp, synthetic construct
  source 1..75: mol_type = other DNA
atggccacctatgaaattaaaaatgcgaccagcacacataatattaacaatctcgataaaacaatctttgataga

SEQ ID NO: 215714 - DNA, 75 bp, synthetic construct
  source 1..75: mol_type = other DNA
aattgtttgtattggcctcagaaagtgagggcttacctatgtcagctcttgaggccggtactgctggattaccat

SEQ ID NO: 215715 - DNA, 75 bp, synthetic construct
  source 1..75: mol_type = other DNA
tagtttttataatcactaaatctgaggttggtggagctcaaaaatgggtaagtgagcaaaaattacttcttgaag

SEQ ID NO: 215716 - DNA, 75 bp, synthetic construct
  source 1..75: mol_type = other DNA
gtattagtataaaacataacagaaaatataataaatattttactataggtaaagcagatgtactttcacagcttg

SEQ ID NO: 215717 - DNA, 75 bp, synthetic construct
  source 1..75: mol_type = other DNA
cagtggaactgatgataaaacacagcgaggattaaaaagggaagttcaagatcaacaagcttatctcaagcaaat

SEQ ID NO: 215718 - DNA, 75 bp, synthetic construct
  source 1..75: mol_type = other DNA
tccggaactaagagtaaaactattggataatcttaattattcaaggaatacgctagataatttgaggggtgacct

SEQ ID NO: 215719 - DNA, 75 bp, synthetic construct
  source 1..75: mol_type = other DNA
acctataagggcagcgggtttaatgaactgaagtttgacgatgcgacagggaaagaacaggtctacatccacgcg

SEQ ID NO: 215720 - DNA, 75 bp, synthetic construct
  source 1..75: mol_type = other DNA
atggaagcattagcactatggagtccaagagagaaggatatcattaccctcgttgaacatgttcgaggggcactt

SEQ ID NO: 215721 - DNA, 75 bp, synthetic construct
  source 1..75: mol_type = other DNA
agtttatcgaaggaaaatttcccgatctggatgtgatgtcctatgaggaagtgatggacagtaacgcagtcaatg

SEQ ID NO: 215722 - DNA, 75 bp, synthetic construct
  source 1..75: mol_type = other DNA
gaattaagcgcacccaagcaaatgcatagccaaaaattaagtccagcagaacgcgttatatcgcttttaaatggc

SEQ ID NO: 215723 - DNA, 75 bp, synthetic construct
  source 1..75: mol_type = other DNA
gccgccagctggtgcacgttgagaacggtaaacactttattatccgcaatattaaggccaaaaatattacgcctg

SEQ ID NO: 215724 - DNA, 75 bp, synthetic construct
  source 1..75: mol_type = other DNA
atgttcggcaatgatattttcacccgggtaaaacgttcagaaaataaaaaaatggcggaaatcgcgcaatttcta

SEQ ID NO: 215725 - DNA, 75 bp, synthetic construct
  source 1..75: mol_type = other DNA
ggccgcattgcgtaaacagtgggcacaggagctggctgaaaaatttgcactacccagtactgtgctggacgcagc

SEQ ID NO: 215726 - DNA, 75 bp, synthetic construct
  source 1..75: mol_type = other DNA
agagggatgaactcatcagtgcccttgaagagcggatgaagcaaaagacggatatcaccgagctgtttaccatcc

SEQ ID NO: 215727 - DNA, 75 bp, synthetic construct
  source 1..75: mol_type = other DNA
gaagaacaaaagcaaaaccaggaaaagcttaagctactggaacggcagcagaagcgtcaacgtatggaaattttt

SEQ ID NO: 215728 - DNA, 75 bp, synthetic construct
  source 1..75: mol_type = other DNA
actaacttccaatatagtgtcgttatcttctggtgtttacgggtattttaacgctgttgaagatgcctgtcggaa

SEQ ID NO: 215729 - DNA, 75 bp, synthetic construct
  source 1..75: mol_type = other DNA
cgtttgtacccgcttgcgcttcagcgtcacggattggcattgccataactacccataaccggccagacgttttaa

SEQ ID NO: 215730 - DNA, 75 bp, synthetic construct
  source 1..75: mol_type = other DNA
tgccttacaccaaacgtcaagccgtcactcagccatttaaacctacagacgcagagcaagacctttatgaacgca

SEQ ID NO: 215731 - DNA, 75 bp, synthetic construct
  source 1..75: mol_type = other DNA
ttttgctggtttgcatgttcacaacaatacttgtctcctggtttcaaagtaaaatgcaattagcaactgaagctg

SEQ ID NO: 215732 - DNA, 75 bp, synthetic construct
  source 1..75: mol_type = other DNA
tgcggtggaattgccggaaatattattaagtgcgtggctatcagtgaatctgttcgcggtgaaggactggcgctg

SEQ ID NO: 215733 - DNA, 75 bp, synthetic construct
  source 1..75: mol_type = other DNA
gggctgctgcggccatagcgcggcttgggcatatgaatttattggcagaacacatttcccaactccctgtagaaa

SEQ ID NO: 215734 - DNA, 75 bp, synthetic construct
  source 1..75: mol_type = other DNA
atacaccgcaggcaaacaagatctaccagcaatggcgcgaggaatatcagggatcttctcgtattaccgggtcgg

SEQ ID NO: 215735 - DNA, 75 bp, synthetic construct
  source 1..75: mol_type = other DNA
agggtttaggaaaaaaatatcccatagccagtaacaagaccgcccagggccgcgccgagaaccgccgcgtcgcag

SEQ ID NO: 215736 - DNA, 75 bp, synthetic construct
  source 1..75: mol_type = other DNA
ttgttaaagcaattctttatattattttattttattttttttttttttttttttttttttttttttttgcattgg

SEQ ID NO: 215737 - DNA, 75 bp, synthetic construct
  source 1..75: mol_type = other DNA
gttactgtcacaaatgtattgttgaagatatacactctaaaggcattggttatctgcgtcatagatggttgtttg

SEQ ID NO: 215738 - DNA, 75 bp, synthetic construct
  source 1..75: mol_type = other DNA
aaagatttctttaccgcaccattccgcgacgatgtacagcagccagcagcaaccactgcctctggtgctgccctg

SEQ ID NO: 215739 - DNA, 75 bp, synthetic construct
  source 1..75: mol_type = other DNA
gcacagctacgcgggcagattatcgataccgttatggctggcgctgccgttgccgcacccatcaagattgctgcc

SEQ ID NO: 215740 - DNA, 75 bp, synthetic construct
  source 1..75: mol_type = other DNA
atgagcgaaatcaactatcaggcattacgtgaggcagcacaaaactatcaatcgacgctggcgtggtatgaggcc

SEQ ID NO: 215741 - DNA, 75 bp, synthetic construct
  source 1..75: mol_type = other DNA
aactgatgacggtaacaaaagtgagacgattattgccagcaaagatcgtgaaattgccgggcttaaatcctctct

SEQ ID NO: 215742 - DNA, 75 bp, synthetic construct
  source 1..75: mol_type = other DNA
gacgacgcggagctggctaatttccgcgagcagcttcagcaggccgggctcgcgctctcgcgcgcgctgggctac

SEQ ID NO: 215743 - DNA, 75 bp, synthetic construct
  source 1..75: mol_type = other DNA
cattagcccggaaggtgatacagcaactacgacagcaacaagcagtaaggcagcgaagcatgatgatagatggcg

SEQ ID NO: 215744 - DNA, 75 bp, synthetic construct
  source 1..75: mol_type = other DNA
tgagcgtggcaaattaacgataagcgccattgtgagtgactatttatccctgccgaacgttattaagctggttgc

SEQ ID NO: 215745 - DNA, 75 bp, synthetic construct
  source 1..75: mol_type = other DNA
ggaccgttccggcagcggtggcgaagacaagaagtgaaataaggcggggattatcagatttgtcgataaaaatgc

SEQ ID NO: 215746 - DNA, 75 bp, synthetic construct
  source 1..75: mol_type = other DNA
gtgttacagacggcattggctttacgcttacgaaatggttatatactaacttccaatatagtgtcgttatcttct

SEQ ID NO: 215747 - DNA, 75 bp, synthetic construct
  source 1..75: mol_type = other DNA
caaagcgttcatgaccggcacgttgcagggcatccagcaaggattgcagccagtaacggagaaattccaggcgct

SEQ ID NO: 215748 - DNA, 75 bp, synthetic construct
  source 1..75: mol_type = other DNA
aaataacactcaaagaagcccgcgcggcggtggcggagcataaggaggtcttaaactcaggacgagatccatcga

SEQ ID NO: 215749 - DNA, 75 bp, synthetic construct
  source 1..75: mol_type = other DNA
aaatggcgcggctgaaccagatattgatgaagctgattatattcaccggatgcagaacaagcgaactgacaaacg

SEQ ID NO: 215750 - DNA, 75 bp, synthetic construct
  source 1..75: mol_type = other DNA
cgcggcatccaaatctctgccgggaatgccgtctcctttgtggcactgactaacattgagatgaagcgtgcgtcg

SEQ ID NO: 215751 - DNA, 75 bp, synthetic construct
  source 1..75: mol_type = other DNA
gctcgcgcacttcccgcccgacaaagcgttaacattaacgactacaacccacacgactggatcgcctcatttaaa

SEQ ID NO: 215752 - DNA, 75 bp, synthetic construct
  source 1..75: mol_type = other DNA
gcaccttcctgacggcaagctcggcgcttgccttcctccatacccctttcgctcgcgcacttcccgcccgacaaa

SEQ ID NO: 215753 - DNA, 75 bp, synthetic construct
  source 1..75: mol_type = other DNA
tgacaatatcaacaccggcatcttcattcctcctggcaaaacgttacacatccttggaagcctgcgcggcaacgg

SEQ ID NO: 215754 - DNA, 75 bp, synthetic construct
  source 1..75: mol_type = other DNA
gcattgagcatgaacttcgacatgcgcaaagacgtacgaggtgtctttatggcgaaaaaagaaacactgctgtca

SEQ ID NO: 215755 - DNA, 75 bp, synthetic construct
  source 1..75: mol_type = other DNA
ctgtatcaaatgtatagtcagcctggccatgcgtattgggtggttgaataccatggcgaagtggtcggcggcggc

SEQ ID NO: 215756 - DNA, 75 bp, synthetic construct
  source 1..75: mol_type = other DNA
tgatgttactcactcgcacaccaaactggataaagacaccgcttatggcaaaggttcgctggacggtaactcctt

SEQ ID NO: 215757 - DNA, 75 bp, synthetic construct
  source 1..75: mol_type = other DNA
ggtggcagtgtcagcactgacgatcaaatgttgcctccaaatctgcgcggctacgcgccagacatttccggcgtg

SEQ ID NO: 215758 - DNA, 75 bp, synthetic construct
  source 1..75: mol_type = other DNA
acacacaaaaaaaatgggagtggagtcgctattatgcctggcgggcgttaccgtcattaaaagccaaactggcgc

SEQ ID NO: 215759 - DNA, 75 bp, synthetic construct
  source 1..75: mol_type = other DNA
cgtcaggcgctggtggaaatcgacgtactggtggcgcaggcgctggggttaaccctcgaagagctgcttaccatt

SEQ ID NO: 215760 - DNA, 75 bp, synthetic construct
  source 1..75: mol_type = other DNA
cagggcggcgactgggggatctgtgaaatcagcttgttcagcggtgatcaactgatgagccagctccgcgcacag

SEQ ID NO: 215761 - DNA, 75 bp, synthetic construct
  source 1..75: mol_type = other DNA
tactttttctggaatcaaacaaaattttgatcaaattgcttccgaccataaaaaacaactagagatactaactaa

SEQ ID NO: 215762 - DNA, 75 bp, synthetic construct
  source 1..75: mol_type = other DNA
aaaccgcaacatctttttatgcgaaatatcaaggtgatgcaggaatcctcagttggaccagcattgagcatgaac

SEQ ID NO: 215763 - DNA, 75 bp, synthetic construct
  source 1..75: mol_type = other DNA
cacgctttgtgctgcgctacggcagccaggtcgtggggattgaaaacggcagttacgggaaagtcaccgtggcga

SEQ ID NO: 215764 - DNA, 75 bp, synthetic construct
  source 1..75: mol_type = other DNA
tcctgctgaccgcagcgtcagcatggggggcggcgacaccgcgcggcagcgcctatgacagccgcatgcagaaca

SEQ ID NO: 215765 - DNA, 75 bp, synthetic construct
  source 1..75: mol_type = other DNA
ccaggtcgtggggattgaaaacggcagttacgggaaagtcaccgtggcgaacggcagcaccgtctcaccggatgt

SEQ ID NO: 215766 - DNA, 75 bp, synthetic construct
  source 1..75: mol_type = other DNA
cttcaacatcattgccagctacggagccaaacctgattcatactctttttctcgttcaggtacaaatcctttttc

SEQ ID NO: 215767 - DNA, 75 bp, synthetic construct
  source 1..75: mol_type = other DNA
tctacgctgagcgtgcagctgaaaagctgcgcggtgagcatcagttctgcaggcatattgccgtttttgtgaaga

SEQ ID NO: 215768 - DNA, 75 bp, synthetic construct
  source 1..75: mol_type = other DNA
cggtatcagagacggaatcatcagcgaccaggcagcattgagaatgcttcaggaatatatccgcactcagtgtat

SEQ ID NO: 215769 - DNA, 75 bp, synthetic construct
  source 1..75: mol_type = other DNA
ataataaattctaagattataacaaaatatatcattgagactgataatggtatatatgacgcaatgaataaagga

SEQ ID NO: 215770 - DNA, 75 bp, synthetic construct
  source 1..75: mol_type = other DNA
ggaagactgggccatactcctccggcagaagctgaaaaagcttattatgcttccatcggaaacaatgatctggca

SEQ ID NO: 215771 - DNA, 75 bp, synthetic construct
  source 1..75: mol_type = other DNA
ttgcgctttatgagcatttgggctttgagcatatcgactatgcgcttggctgcacgggtcatgtcgattgtgaag

SEQ ID NO: 215772 - DNA, 75 bp, synthetic construct
  source 1..75: mol_type = other DNA
gcagattactgtcagcagaaaatgcattactcaggaagaaatggatgagttatatgctttgtctgaaagactgaa

SEQ ID NO: 215773 - DNA, 75 bp, synthetic construct
  source 1..75: mol_type = other DNA
agataagtaataaagaaaaaggggtgtttatctatgagaagcagtggttctcactgctggaaaaggtgagtgctt

SEQ ID NO: 215774 - DNA, 75 bp, synthetic construct
  source 1..75: mol_type = other DNA
atctaaagacaggtgggagaaaaggttgtctgaatatccaccgggaaaaatataccaggtccggagagagggaga

SEQ ID NO: 215775 - DNA, 75 bp, synthetic construct
  source 1..75: mol_type = other DNA
tctctggcctgtcaggatatgtatgatgttgaaattgttgatggtgttatcgcacccgtgtcgcatttccacatt

SEQ ID NO: 215776 - DNA, 75 bp, synthetic construct
  source 1..75: mol_type = other DNA
gcagggattgaacgcagggaaaaaaatcacccccgtatctgtatgactttttcacctgatgcaaagaaacggcta

SEQ ID NO: 215777 - DNA, 75 bp, synthetic construct
  source 1..75: mol_type = other DNA
ggcgcaaattcatcaaattgagagagagctggctgatgtgttctcagttaggctgaaggagtatgagcggcaata

SEQ ID NO: 215778 - DNA, 75 bp, synthetic construct
  source 1..75: mol_type = other DNA
atactggatattgcacataactccgttcacagaggatatttaaatcaacatagtttaatcaggcatcgctgcgtc

SEQ ID NO: 215779 - DNA, 75 bp, synthetic construct
  source 1..75: mol_type = other DNA
atttctataataagttattggcaccactacgccatataaataacgacggaaataaaatattgatattaaattatc

SEQ ID NO: 215780 - DNA, 75 bp, synthetic construct
  source 1..75: mol_type = other DNA
gatcaaagaaataaaaaaacaattttatgtcatttccaaaatagagggaaataattcaattttatcaatctacaa

SEQ ID NO: 215781 - DNA, 75 bp, synthetic construct
  source 1..75: mol_type = other DNA
atgagcataaatgcgagtgaaggctatatttcatggatggcaggaaaattacaagaaaataaatgtgtcgaaaat

SEQ ID NO: 215782 - DNA, 75 bp, synthetic construct
  source 1..75: mol_type = other DNA
ggattgcactggcatcactggagcagaatgtactatcgggcaactctacggtaattcctggtgaggtgttgtccg

SEQ ID NO: 215783 - DNA, 75 bp, synthetic construct
  source 1..75: mol_type = other DNA
atgcgccagcatcgcatccggcgatgctggcgcgttgaattttacatcccgtacgttcccctcaccctaaccctc

SEQ ID NO: 215784 - DNA, 75 bp, synthetic construct
  source 1..75: mol_type = other DNA
aaaatcatgatgttaatctgagcgccagagcgattttgtatttttttcaaaaagttatattttgtatatatggca

SEQ ID NO: 215785 - DNA, 75 bp, synthetic construct
  source 1..75: mol_type = other DNA
tatggtgtggtgatgattatcgggtcagtcgtgcgtcaacgggtatcacagatattaaagatccccggcttggta

SEQ ID NO: 215786 - DNA, 75 bp, synthetic construct
  source 1..75: mol_type = other DNA
tgccaatctgctgttctgtgtgctggtgatatgcgcacgcggaaacgtctcgaaactcttttcattacgaaggca

SEQ ID NO: 215787 - DNA, 75 bp, synthetic construct
  source 1..75: mol_type = other DNA
aatacaactgcttttttaattagcagaattgaatcccggcatttgtatcaacctaaaattgccgctcaatctttg

SEQ ID NO: 215788 - DNA, 75 bp, synthetic construct
  source 1..75: mol_type = other DNA
aaattgcacatctacaattaatgcccttgttaagtggtgtccagcgagtatctttgcaggaaattgaaaatttac

SEQ ID NO: 215789 - DNA, 75 bp, synthetic construct
  source 1..75: mol_type = other DNA
taccagcctcagtggtgtagctgggaaccgtgatcagttcagctacggggctaactttagccatcaacaacagga

SEQ ID NO: 215790 - DNA, 75 bp, synthetic construct
  source 1..75: mol_type = other DNA
tgaattttcagccggacgtagtcatattgaaggagccagcaatcaatctgattttatccagggaagctatcagca

SEQ ID NO: 215791 - DNA, 75 bp, synthetic construct
  source 1..75: mol_type = other DNA
tgccgacggtgtggctggtgttccggtggaaggaaatggcgcggcggtttacaccaatatgttcggtaaggcagt

SEQ ID NO: 215792 - DNA, 75 bp, synthetic construct
  source 1..75: mol_type = other DNA
atggcagtaatatccgggcgctgaaatgtgccgccggtgctcaaaaaaacatcccgatatcgacggagataatgg

SEQ ID NO: 215793 - DNA, 75 bp, synthetic construct
  source 1..75: mol_type = other DNA
gacgccacaaatcccgcaaaacaagctgaacagacgcagttagcgtctgcagttgttacgccagaagaaaagacg

SEQ ID NO: 215794 - DNA, 75 bp, synthetic construct
  source 1..75: mol_type = other DNA
ttgcataattatatggagatgtgttatacactttttgatagctatccaaatttaataactgaatataatgactta

SEQ ID NO: 215795 - DNA, 75 bp, synthetic construct
  source 1..75: mol_type = other DNA
tatcatttagaaccgcaaaaaatttcgaatgagcaaatagccttaccaataattaatattttatatgataattct

SEQ ID NO: 215796 - DNA, 75 bp, synthetic construct
  source 1..75: mol_type = other DNA
atattattaacaataagtgaaattgcaagaagaaataatttcattgccattttagatacactagatagatcataa

SEQ ID NO: 215797 - DNA, 75 bp, synthetic construct
  source 1..75: mol_type = other DNA
ttcgtctgcatgggcggaagatgaaacatttgacacccattttatgattggcggattaaatggggaaaaaatttc

SEQ ID NO: 215798 - DNA, 75 bp, synthetic construct
  source 1..75: mol_type = other DNA
taaagctcgtttataaatggctggaaatatttgcagccaaatgcactacccgattaatttgtcttcataatgaag

SEQ ID NO: 215799 - DNA, 75 bp, synthetic construct
  source 1..75: mol_type = other DNA
gccgtaataaaattgttaatgaatttaatatagttaaaagagtggataaaattaaagatctatatattgatatgg

SEQ ID NO: 215800 - DNA, 75 bp, synthetic construct
  source 1..75: mol_type = other DNA
gctgatagccgcagttagcgccaatgttaaagctattgatgaacggcagccttttgccgcgcagtcagattatta

SEQ ID NO: 215801 - DNA, 75 bp, synthetic construct
  source 1..75: mol_type = other DNA
gtttatgatccgtagttgtattggtaagacaaacacatcaagcgaagcaaagcaagcaatatcaggtaatggtgc

SEQ ID NO: 215802 - DNA, 75 bp, synthetic construct
  source 1..75: mol_type = other DNA
ctgatgcgcaccatcctgaacaagccggcgtgcgaacctgctggctgaaaatgtcatcccctgattttgacggac

SEQ ID NO: 215803 - DNA, 75 bp, synthetic construct
  source 1..75: mol_type = other DNA
tcagcagtttctttcccttgaatttgcgcaggtgctggacaaaatggccatacctgacggtatggcagggcgatg

SEQ ID NO: 215804 - DNA, 75 bp, synthetic construct
  source 1..75: mol_type = other DNA
ttaagtcgccaaccagtactctcagcaccgcggaggcgatctccgttatcaacaacggtatggcgctggcgggcc

SEQ ID NO: 215805 - DNA, 75 bp, synthetic construct
  source 1..75: mol_type = other DNA
tgtcaattccatgtcttccgctgagcttgctgaaacaatcaaattccagtttgttgatggcgggcatggtgaaat

SEQ ID NO: 215806 - DNA, 75 bp, synthetic construct
  source 1..75: mol_type = other DNA
cggacagacttattgttgagggtaatacttcgggttcaactaccgtctatgtgaaaaatgatcttacccagcaat

SEQ ID NO: 215807 - DNA, 75 bp, synthetic construct
  source 1..75: mol_type = other DNA
gaagttatgcagttgctattcgacaaggtaacattgatataaaaatagttctattacaacaacaggcactaaagc

SEQ ID NO: 215808 - DNA, 75 bp, synthetic construct
  source 1..75: mol_type = other DNA
aataatccgataagtaatggagagtatctaaccactgaagacgaaagccatgctgtgaaagtggatgacggtgta

SEQ ID NO: 215809 - DNA, 75 bp, synthetic construct
  source 1..75: mol_type = other DNA
aacaagcaatatcagatgttagaaaaataatcgataaaaaagctctcataaaatataaaaggaataatagaacat

SEQ ID NO: 215810 - DNA, 75 bp, synthetic construct
  source 1..75: mol_type = other DNA
agcaagcaatatcagaagttagaaaaatgatagataaaaaaacactgattaaatataaaaggaataatagaatat

SEQ ID NO: 215811 - DNA, 75 bp, synthetic construct
  source 1..75: mol_type = other DNA
taaccctaacgctaatgctttgaacactgcacacattacaacacctctagcagcacccgtaaccattaataacac

SEQ ID NO: 215812 - DNA, 75 bp, synthetic construct
  source 1..75: mol_type = other DNA
tggaagataacgccgtattgtcgctggcggggaatcaggccgatttacgggcaatgcagagcgatccgcaatcga

SEQ ID NO: 215813 - DNA, 75 bp, synthetic construct
  source 1..75: mol_type = other DNA
ttcgatgtgtttgcgggaaaaaaatcggcccagatccgcgaaattttaatcagcgagtcagcttgggaagaaatg

SEQ ID NO: 215814 - DNA, 75 bp, synthetic construct
  source 1..75: mol_type = other DNA
atgctgtttaccttcgcattcatcacccaaaatgtatttaggtacatgcttttttacctttcttcctcatgggga

SEQ ID NO: 215815 - DNA, 75 bp, synthetic construct
  source 1..75: mol_type = other DNA
accggaacaagttcacattcctcattgccagtgaagaaaacgtcaccgacccgaactatgccgacgagtatactg

SEQ ID NO: 215816 - DNA, 75 bp, synthetic construct
  source 1..75: mol_type = other DNA
ctggtttggcttcattgccgggtgatctgtcatatttagatatagactttgttttctctggcaatgaagctcgta

SEQ ID NO: 215817 - DNA, 75 bp, synthetic construct
  source 1..75: mol_type = other DNA
ttcctcatggggaattgatgaccgtgaagacctgttgcggacaattcatcgaatgatggataacggtcatgctgc

SEQ ID NO: 215818 - DNA, 75 bp, synthetic construct
  source 1..75: mol_type = other DNA
atgaatgctgtttaccttcgcattcatcaccccaaaatgtatttaggtacatgcttttttgacctttcttcctca

SEQ ID NO: 215819 - DNA, 75 bp, synthetic construct
  source 1..75: mol_type = other DNA
tcgtgaagctgagaaccgcccgatttatgaaagttaaggcatccagtgagggggccgaggtgggttacagcggca

SEQ ID NO: 215820 - DNA, 75 bp, synthetic construct
  source 1..75: mol_type = other DNA
ctattcctgacgaactggcaacaagggaagaaggcgctgtggctgtagccacagccggtgatgctgccaacttac

SEQ ID NO: 215821 - DNA, 75 bp, synthetic construct
  source 1..75: mol_type = other DNA
ggcggggaatcaggccgatttacgggcaatgcagagcgatccgcaatcgatcgtgctaaatggcggagtattgga

SEQ ID NO: 215822 - DNA, 75 bp, synthetic construct
  source 1..75: mol_type = other DNA
tttgcggcacactatccgctatgataggtccagataaatttgattctatagatagcaccgcatatgacgccttaa

SEQ ID NO: 215823 - DNA, 75 bp, synthetic construct
  source 1..75: mol_type = other DNA
ctgggatggagaacagtattatggtggattaagcagtaacgatttgggaaaaaaaagagaaattgccaatgcaaa

SEQ ID NO: 215824 - DNA, 75 bp, synthetic construct
  source 1..75: mol_type = other DNA
gatttggggacgaaatacaccagctcttttgattatggttcaaaaccaacaaccagttttgactacggcaataaa

SEQ ID NO: 215825 - DNA, 75 bp, synthetic construct
  source 1..75: mol_type = other DNA
aggtggcgggcggattgatgtgcttggaagtacgtcagattatggcagcatgaattgtaccgtgcgcggtgttga

SEQ ID NO: 215826 - DNA, 75 bp, synthetic construct
  source 1..75: mol_type = other DNA
tgcggccacttctgcatccaccgcgaccacgaaagcgtcagaagctgccacctcagcccgggatgcgtcggcttc

SEQ ID NO: 215827 - DNA, 75 bp, synthetic construct
  source 1..75: mol_type = other DNA
gcatcagcaaaggccactgaagcatcaaaaagtgctgccgctgcagagtcttcaaaaagcgcggcagccaccagt

SEQ ID NO: 215828 - DNA, 75 bp, synthetic construct
  source 1..75: mol_type = other DNA
agaagcagcgctcaagtgctgttaaatggcgatgatggcgcggtgcaactactaagcggtactgtcaacggtgct

SEQ ID NO: 215829 - DNA, 75 bp, synthetic construct
  source 1..75: mol_type = other DNA
agtcaggtagttgtttcaggatggaatcaggatgtaaccgtcaggtcgttaacctcgacgactccatcaaaatta

SEQ ID NO: 215830 - DNA, 75 bp, synthetic construct
  source 1..75: mol_type = other DNA
aatactatcaatgcaaaactgtcgcaggtggtgcatatattaccaataagcctgacggcgtaagcggtaactttt

SEQ ID NO: 215831 - DNA, 75 bp, synthetic construct
  source 1..75: mol_type = other DNA
atggataattcagaacatctcaaaataaacacagaaaattttagcatcaatattttaaaaaatgttaatgatatt

SEQ ID NO: 215832 - DNA, 75 bp, synthetic construct
  source 1..75: mol_type = other DNA
tactgtagttaattcgccagtgtggatggtcgctacaggtactggtttttctggtttttcaagtgtggcaagtga

SEQ ID NO: 215833 - DNA, 75 bp, synthetic construct
  source 1..75: mol_type = other DNA
cggtagctgcgtctgcagttgtgtcatgctctgcaacggcagctctggggaattgggaggaaaatacccaagggg

SEQ ID NO: 215834 - DNA, 75 bp, synthetic construct
  source 1..75: mol_type = other DNA
aggtacatcgaaaaacacgggaaaaatgttgtgccttaaaaaccacagaagcagcgctcaagtgctgttaaatgg

SEQ ID NO: 215835 - DNA, 75 bp, synthetic construct
  source 1..75: mol_type = other DNA
tacgtcagattacagtagtatgaattgtgctgtgcgcggtgttgatagcactggaaccaattcggcgtggtcagt

SEQ ID NO: 215836 - DNA, 75 bp, synthetic construct
  source 1..75: mol_type = other DNA
cgctaatcgcttcgtttgcagcagccaatccagccgttacgcttgatattgttgtcacggatgaggaattcgata

SEQ ID NO: 215837 - DNA, 75 bp, synthetic construct
  source 1..75: mol_type = other DNA
tgaagagttgcaaggcccgaccgttgacggcaacgagctacgcgaagaaacgcgctatcttaatgttgactacgc

SEQ ID NO: 215838 - DNA, 75 bp, synthetic construct
  source 1..75: mol_type = other DNA
cacctggtaataatattctggttaataatactggaggtgacttaaacataatttcgtccgactctattctaaatg

SEQ ID NO: 215839 - DNA, 75 bp, synthetic construct
  source 1..75: mol_type = other DNA
agctggccgtaacggctcgcaaatagacctgaaaacttggatccagtaccgggcagacaaggcgccagtagtttt

SEQ ID NO: 215840 - DNA, 75 bp, synthetic construct
  source 1..75: mol_type = other DNA
gtaaaatagggctgggtgccgccatcgatcgttcgacattatttgaatgcatacaggcctgcgccgaacatactg

SEQ ID NO: 215841 - DNA, 75 bp, synthetic construct
  source 1..75: mol_type = other DNA
agaatcgccgattgaaatcaaagataataatccgataagtaatggagagtatctaaccactgaagacgaaagcca

SEQ ID NO: 215842 - DNA, 75 bp, synthetic construct
  source 1..75: mol_type = other DNA
atagttccccgctcgtctgttctcttgccgcctccccatatgtatcaatcggcacgaagagctttgcagtgaatg

SEQ ID NO: 215843 - DNA, 75 bp, synthetic construct
  source 1..75: mol_type = other DNA
gtgtaaaaaaccttgggaggtagtagttggacaagcaatcggggcattgaccagagaagaccttgaaaactcgaa

SEQ ID NO: 215844 - DNA, 75 bp, synthetic construct
  source 1..75: mol_type = other DNA
cggctgggatttgacggtttcagtgagcgggctgacaggctggcaaagagcatcatcagaggtctgtgggtggaa

SEQ ID NO: 215845 - DNA, 75 bp, synthetic construct
  source 1..75: mol_type = other DNA
tcaaccgggctgaccgataacaaccagatgcgttacggcctggttaaaggtgacggctttattgaggtttgggcc

SEQ ID NO: 215846 - DNA, 75 bp, synthetic construct
  source 1..75: mol_type = other DNA
gcgcaggcgctaaccatcaacaaagatgaggttaactcaactgccgatttagtaattagaaaacaaacagggact

SEQ ID NO: 215847 - DNA, 75 bp, synthetic construct
  source 1..75: mol_type = other DNA
gcagcaactgcaaaatttgctgacttctcaggtcattggtgccgcaacagcacattccttactgctggttgggcc

SEQ ID NO: 215848 - DNA, 75 bp, synthetic construct
  source 1..75: mol_type = other DNA
gtgatgaagatagtgaagcgtttaattttacagaagtcagtttactgcgcggaaacgaatgggaatacgactact

SEQ ID NO: 215849 - DNA, 75 bp, synthetic construct
  source 1..75: mol_type = other DNA
ggaatgatcgccacacagatgtacggtaagccggtgagtgaactgagcgagacagagaagcagacggtctcaaca

SEQ ID NO: 215850 - DNA, 75 bp, synthetic construct
  source 1..75: mol_type = other DNA
atgcctcaccacctgtccgtctgttcaacgttccccctcttgcctggctgacgctgctgctgtggttcaggtggc

SEQ ID NO: 215851 - DNA, 75 bp, synthetic construct
  source 1..75: mol_type = other DNA
ttcagcggacggacacaaacgtgatctgccaggagtgccgcaacagcgcggcgatgagaagggtattgatggttt

SEQ ID NO: 215852 - DNA, 75 bp, synthetic construct
  source 1..75: mol_type = other DNA
aaacgtcaacgttgatgtcgtatccaagttagcaagcctcctttcaacatcggttacaaaattagtctcaatgca

SEQ ID NO: 215853 - DNA, 75 bp, synthetic construct
  source 1..75: mol_type = other DNA
cgcggtcaaattattaaacggttccgtcaatcttatctctttggcagaagatattttccgctggtgtcaggagag

SEQ ID NO: 215854 - DNA, 75 bp, synthetic construct
  source 1..75: mol_type = other DNA
tacatggcttgtgcgtatcacttcccccgattttgttgaccttaaaaatatgcgtatctacgggcattctcatac

SEQ ID NO: 215855 - DNA, 75 bp, synthetic construct
  source 1..75: mol_type = other DNA
agcagagtgattttgggttgtgcgatggatctgggaaacctgactgggatgatgactcagatttagcttataact

SEQ ID NO: 215856 - DNA, 75 bp, synthetic construct
  source 1..75: mol_type = other DNA
gcgatggcggaaaatttcgacctgaatctgcatgtggtcgatgtcggctggccgggctcttcaccaatgacctag

SEQ ID NO: 215857 - DNA, 75 bp, synthetic construct
  source 1..75: mol_type = other DNA
aatcgcaatgtcaattccttgcatatgatgccagtcaaggccgtgcctgcctgagcaaagctgagcttactgctg

SEQ ID NO: 215858 - DNA, 75 bp, synthetic construct
  source 1..75: mol_type = other DNA
gagctgcattgaggcattccatgaagctgaaaccagcctgaatcatacagctttccgctgtaatcaatgggaggt

SEQ ID NO: 215859 - DNA, 75 bp, synthetic construct
  source 1..75: mol_type = other DNA
acttcatctttgattggtgcattgttttttttgggatacttttttttccagataccaggttctatatatgcagta

SEQ ID NO: 215860 - DNA, 75 bp, synthetic construct
  source 1..75: mol_type = other DNA
aggatgtgctgagacggttgccgacgcagcgagctagtgagattgcagagctgctgccgcataggtggcatccgg

SEQ ID NO: 215861 - DNA, 75 bp, synthetic construct
  source 1..75: mol_type = other DNA
gatccggcatttaccgctgactaccacgacccggaaaaacgcgccatcgccaatgccattacccttgagttcacc

SEQ ID NO: 215862 - DNA, 75 bp, synthetic construct
  source 1..75: mol_type = other DNA
cttttgccgcgcagctggcggcggtaatgtcaaagggggcgttttactcgtctgtcggcagtaaaaacaccggat

SEQ ID NO: 215863 - DNA, 75 bp, synthetic construct
  source 1..75: mol_type = other DNA
tagcaacgctgcagtgcaacccgatcgcacacgagttgtgtttaacgccaacgacaaagccaccagcctgcgcat

SEQ ID NO: 215864 - DNA, 75 bp, synthetic construct
  source 1..75: mol_type = other DNA
tacctggcgtattcctggattgaagatgagaaaggcaacaagaccgacgattatctcgttgccctaccaccgatt

SEQ ID NO: 215865 - DNA, 75 bp, synthetic construct
  source 1..75: mol_type = other DNA
cccgccacgccggtgccgcactatgtgcccagtgccgtcgtcaacgccttcgccaccgggatcgaagcaggaggc

SEQ ID NO: 215866 - DNA, 75 bp, synthetic construct
  source 1..75: mol_type = other DNA
attgatcaagaacatatgtatcttgaccccattaaagtaactttattgacgccgggtcttgataaatacgggaaa

SEQ ID NO: 215867 - DNA, 75 bp, synthetic construct
  source 1..75: mol_type = other DNA
gcaaacctccacctctcctcattacggtattgtcgcctccactgaaatggctgcggctatgatgaaaggcaatcc

SEQ ID NO: 215868 - DNA, 75 bp, synthetic construct
  source 1..75: mol_type = other DNA
taaaagcagcgaccatgcgatacttcaggtcgcgatccaaagccgtattaagttgttctggcgacctgcggcatt

SEQ ID NO: 215869 - DNA, 75 bp, synthetic construct
  source 1..75: mol_type = other DNA
aggggatatttatgtttcagtaaaagaaagtgacggaaccgttcatggtttccggcaggcatattccacgctgcc

SEQ ID NO: 215870 - DNA, 75 bp, synthetic construct
  source 1..75: mol_type = other DNA
ttgtcgatgtcagcgagaaagagagcgaagccttgttaggctttttattcgcccatatcactaaaccggagtttc

SEQ ID NO: 215871 - DNA, 75 bp, synthetic construct
  source 1..75: mol_type = other DNA
aaaaaaatgtatcgaaattgaataatgttgttatgtctctacaaaataaatacaaaggaagtattaagctggtga

SEQ ID NO: 215872 - DNA, 75 bp, synthetic construct
  source 1..75: mol_type = other DNA
attcggtttatggaaatagaatatcaaaagtaataaaaaaatattctaagaatagtttcgatgcgccaaaaaaac

SEQ ID NO: 215873 - DNA, 75 bp, synthetic construct
  source 1..75: mol_type = other DNA
aatggcgatgatgagtccgtttttgagcaatggttacaaggcatcaatgttgaaattttaccaaagaagattaaa

SEQ ID NO: 215874 - DNA, 75 bp, synthetic construct
  source 1..75: mol_type = other DNA
acaaacagagcggatattccacatatgagaacactccgttgttttctaacacctcatttctgtacgggttgcctc

SEQ ID NO: 215875 - DNA, 75 bp, synthetic construct
  source 1..75: mol_type = other DNA
ttgagctgagtcttgaacagctttcttctatatcagtagagttcaaatcatcaagttcaaaacgaaggaaaatgg

SEQ ID NO: 215876 - DNA, 75 bp, synthetic construct
  source 1..75: mol_type = other DNA
aatcccatcagcagttcaaaagctaacacatcagcgagatcaactggtaatctcgatttatttaacgaacgagtg

SEQ ID NO: 215877 - DNA, 75 bp, synthetic construct
  source 1..75: mol_type = other DNA
atcttatattagtggtgaacttccttcgataaatttcactcgcttcatggacgcgttaattcgcggtgattatga

SEQ ID NO: 215878 - DNA, 75 bp, synthetic construct
  source 1..75: mol_type = other DNA
cactgtaagacatttaaaaatatcaggttctgctttaaagaaatgcgagacaggaattaaccaggcatttagcta

SEQ ID NO: 215879 - DNA, 75 bp, synthetic construct
  source 1..75: mol_type = other DNA
aaagcatcacgtacatgatcgccgggttaaacaaagaatatggcgatgtggtggagtccgggctgctttttgcag

SEQ ID NO: 215880 - DNA, 75 bp, synthetic construct
  source 1..75: mol_type = other DNA
taccaactctgttgccgcaaatcgttgcgggagcttttactggaactgctcgccacgcaaaacaacctccaggaa

SEQ ID NO: 215881 - DNA, 75 bp, synthetic construct
  source 1..75: mol_type = other DNA
gaaatcccggctcagtctgtccgtctgctacctgcaggacacgctgcctcctgacgctctgttcgtcatccgccg

SEQ ID NO: 215882 - DNA, 75 bp, synthetic construct
  source 1..75: mol_type = other DNA
tttcgaatgctgggcgcgcgaggaaggtatgcacctgccgctgagccccgagacgttgaaaaccgcactccagcg

SEQ ID NO: 215883 - DNA, 75 bp, synthetic construct
  source 1..75: mol_type = other DNA
aacagagtcttgagcaactatctcgtatctcgtcagagttcgaaccatcaagccagaagagcaggaaaatgtcta

SEQ ID NO: 215884 - DNA, 75 bp, synthetic construct
  source 1..75: mol_type = other DNA
aacggcaaggaagaacataaggaaatttataaggctaatttttacgacactggcgttggcggatttggtccacac

SEQ ID NO: 215885 - DNA, 75 bp, synthetic construct
  source 1..75: mol_type = other DNA
atgcaattacgatttaattttggtttgctgctcattctttgttgttttcaggttgcagcgaaagacagtcttgat

SEQ ID NO: 215886 - DNA, 75 bp, synthetic construct
  source 1..75: mol_type = other DNA
ttataaaggtagagcacatttaaagctagcatctcgtaatagcgtttacttctatcaaatggcattaacaacagc

SEQ ID NO: 215887 - DNA, 75 bp, synthetic construct
  source 1..75: mol_type = other DNA
cagttcttgccgtgcaaattatcgacttccagaggagaaagaagcaactggtatttttctggtgcgcactgtgtg

SEQ ID NO: 215888 - DNA, 75 bp, synthetic construct
  source 1..75: mol_type = other DNA
gaacagcatcttcgcctgcctgagtttatgctaaaagctgtcggttttgagccgcaggatgccatgctgccctag

SEQ ID NO: 215889 - DNA, 75 bp, synthetic construct
  source 1..75: mol_type = other DNA
tggatttgattaaccatacatatgttcttgtgccatggacaacgccaccagtgattagcgccttcctggctacgg

SEQ ID NO: 215890 - DNA, 75 bp, synthetic construct
  source 1..75: mol_type = other DNA
agcaattgcgatactagagatgatgaagccgttaagtggaaatcgagaatttatctttcccagccgcatcaagcc

SEQ ID NO: 215891 - DNA, 75 bp, synthetic construct
  source 1..75: mol_type = other DNA
aattaggagagattcctgttggatggttttgtacggacttatcatatcttgcattacttaataactcttcctggt

SEQ ID NO: 215892 - DNA, 75 bp, synthetic construct
  source 1..75: mol_type = other DNA
gagttatttgcttataagcataacaatcttagacaaaataaatcactggaacaactccgcgacaccctcctcccc

SEQ ID NO: 215893 - DNA, 75 bp, synthetic construct
  source 1..75: mol_type = other DNA
gccgtttttgattccgtacatttcttcgttaacggaattgaaacggaattatctaggacgggtagattccgtgtg

SEQ ID NO: 215894 - DNA, 75 bp, synthetic construct
  source 1..75: mol_type = other DNA
catcgtgcggcctgaccgtggcgcagatgaaaaaccagatggacccggtgtacacgccggcgcgaaaaattcacc

SEQ ID NO: 215895 - DNA, 75 bp, synthetic construct
  source 1..75: mol_type = other DNA
aaggcaatcacatctctaaaatgtacaatattagaaatctatttctagagtatttaatatctgaagactccgttt

SEQ ID NO: 215896 - DNA, 75 bp, synthetic construct
  source 1..75: mol_type = other DNA
ggttgctttgatttattcaggaataagtgtgtcacaactggcgttatgcatgaaatattaagtgttgtatgtgaa

SEQ ID NO: 215897 - DNA, 75 bp, synthetic construct
  source 1..75: mol_type = other DNA
cgcgcagcgggaagccgccccgctgcgacatgcaactgtctatgagcagatgctggtcaagctggccgcagacca

SEQ ID NO: 215898 - DNA, 75 bp, synthetic construct
  source 1..75: mol_type = other DNA
aaaccgcgcacgcgcaaacctgccgccaaaccggcggcacggcgcgggcgtcccccgaaagcggcaaaagccgca

SEQ ID NO: 215899 - DNA, 75 bp, synthetic construct
  source 1..75: mol_type = other DNA
tcatattttgttaaaatatttaaagaacattatggtattactccaaagcaattttttatttattttaaagtcaat

SEQ ID NO: 215900 - DNA, 75 bp, synthetic construct
  source 1..75: mol_type = other DNA
tcgacgtcaggtatggttctctaaaccgctaacatcacagattcattatgtttcatataatggtggacttgcacc

SEQ ID NO: 215901 - DNA, 75 bp, synthetic construct
  source 1..75: mol_type = other DNA
tttaataatttagaaatatattttactggatgtggatggtttattagtaacttcaaggcgatactgtttctttgt

SEQ ID NO: 215902 - DNA, 75 bp, synthetic construct
  source 1..75: mol_type = other DNA
aacacaaattcattatgtagcatataatggtggacttgcaccagatggaaatagtgtggttggtgtaactggtaa

SEQ ID NO: 215903 - DNA, 75 bp, synthetic construct
  source 1..75: mol_type = other DNA
accctagttatcatcaaggcggaacagaagttcttttttcacgcttagtggatgttctaattaaatcagggaact

SEQ ID NO: 215904 - DNA, 75 bp, synthetic construct
  source 1..75: mol_type = other DNA
gtaaacaaggctggtaacgctgttcaaaagacaggcgataccttgtccggtggacttacttttgaaaacgactca

SEQ ID NO: 215905 - DNA, 75 bp, synthetic construct
  source 1..75: mol_type = other DNA
tgggtaataagcaatttggcatctacatgattaataattcaaggacagccaatggcaccgatggtcaggcgtaca

SEQ ID NO: 215906 - DNA, 75 bp, synthetic construct
  source 1..75: mol_type = other DNA
ggagccgccaatggcagttaccatagcaacgggctgggcggtcacattgaaaccgggatgcgatttaccgatggt

SEQ ID NO: 215907 - DNA, 75 bp, synthetic construct
  source 1..75: mol_type = other DNA
ggtcaaggtacgatgcgcaggcgctggctggatgcagtttattcagccgaaaaggtgacgttttcgcggtactgg

SEQ ID NO: 215908 - DNA, 75 bp, synthetic construct
  source 1..75: mol_type = other DNA
tcaacgggtgcatcgtaccactggattaccgatcgcggtgatgcaaaacgccttggcaattatcgcacaggcact

SEQ ID NO: 215909 - DNA, 75 bp, synthetic construct
  source 1..75: mol_type = other DNA
tgaaaactcagctattagatcaacaacgtcaaattgatgaactaattggcgtagtacaaagtctcttacctaaag

SEQ ID NO: 215910 - DNA, 75 bp, synthetic construct
  source 1..75: mol_type = other DNA
agattatatattgttgctcatggtaatccatggtgtattggtcagagccaaacttcagagcaaacattaagtact

SEQ ID NO: 215911 - DNA, 75 bp, synthetic construct
  source 1..75: mol_type = other DNA
ttaacgatcgggacgtagaggcattgtatgaacaggagcggaaacactatcatcgtaaaggtattgaattcataa

SEQ ID NO: 215912 - DNA, 75 bp, synthetic construct
  source 1..75: mol_type = other DNA
aacgataccggatttaaacaaaatggcgatggtaatctggatgtttatgctaataacgtccatgttatgcgcttt

SEQ ID NO: 215913 - DNA, 75 bp, synthetic construct
  source 1..75: mol_type = other DNA
ccgcaaaaaaccgtcgcactggctgctgaattgttggcacagcaacaaaatgcgccacaaaaccgcgaaatgttg

SEQ ID NO: 215914 - DNA, 75 bp, synthetic construct
  source 1..75: mol_type = other DNA
tgctattttagaacaagataatatatctttatctgtgcaaaataatagcattagtttagcttgttgtcagataca

SEQ ID NO: 215915 - DNA, 75 bp, synthetic construct
  source 1..75: mol_type = other DNA
ggaagaaaccatatctggaaaaatttttacggatagttgattttatgaatatgatgattaaaatttcacaattaa

SEQ ID NO: 215916 - DNA, 75 bp, synthetic construct
  source 1..75: mol_type = other DNA
ggattacttaaacaaaaatagtgatacattgtgtattgtcaagtgtgataattttaaaaacatatgcgaatatta

SEQ ID NO: 215917 - DNA, 75 bp, synthetic construct
  source 1..75: mol_type = other DNA
tttagttttgatattgatacagatcactcatatatatatacatacaaaaatgccatagaagaaggcataatatca

SEQ ID NO: 215918 - DNA, 75 bp, synthetic construct
  source 1..75: mol_type = other DNA
tgtcgattgccaatcacacacccgcagcatgattcaggcaacacagtctgttcgttctgattttgctgtactttc

SEQ ID NO: 215919 - DNA, 75 bp, synthetic construct
  source 1..75: mol_type = other DNA
atgctgtgcctgaaatatccggagccggaagaggtgtcacaggggcactctgccggaagtgtgtttgtgctgccg

SEQ ID NO: 215920 - DNA, 75 bp, synthetic construct
  source 1..75: mol_type = other DNA
acgaggcaagaagggcgctggtagagcgtcgtagggataagttcatttgtctgtccggcagtgcgtttcgttatg

SEQ ID NO: 215921 - DNA, 75 bp, synthetic construct
  source 1..75: mol_type = other DNA
ccaaaacctcggtttacaggaaacggtaaacagggctaggaacgccgtgcaaaagaatggcgataccttgtccgg

SEQ ID NO: 215922 - DNA, 75 bp, synthetic construct
  source 1..75: mol_type = other DNA
gatcgatctgcttcgtctggtcggcgagttatgggatcaccgtaagtttattatcagcgtaaccgcgttgttcac

SEQ ID NO: 215923 - DNA, 75 bp, synthetic construct
  source 1..75: mol_type = other DNA
gtatcgtcagttttccggaaatgaagaggaaacctcctccggaacaggccggcatcccgtgctcccgtataaata

SEQ ID NO: 215924 - DNA, 75 bp, synthetic construct
  source 1..75: mol_type = other DNA
gttggtcaatattcacaggcaaatgcagaaaaaagtatttctttaggtgcatcagcaagagctattgaaaataac

SEQ ID NO: 215925 - DNA, 75 bp, synthetic construct
  source 1..75: mol_type = other DNA
caggaaactgcgctgatcagtcctatccgtgaattgacctatcgccaactgtcgacggcggcggatcatgtggcc

SEQ ID NO: 215926 - DNA, 75 bp, synthetic construct
  source 1..75: mol_type = other DNA
aagtctttaaataatgtggcaataggaggaatacctgcaaagaaatatttagaacacggtttattttctgaatat

SEQ ID NO: 215927 - DNA, 75 bp, synthetic construct
  source 1..75: mol_type = other DNA
gctgcatcagatcaggtaagaatgaatatattgaaagagtatggagggatttataccgatacagatattcttcct

SEQ ID NO: 215928 - DNA, 75 bp, synthetic construct
  source 1..75: mol_type = other DNA
aggccatgccgcagctgtaccgcacactttcttccctgcgttacaccctcagcgaacaggatgatccgcagcgcc

SEQ ID NO: 215929 - DNA, 75 bp, synthetic construct
  source 1..75: mol_type = other DNA
ggcaattgctgtcgggcttggggcagatgcgtctacccggtctaccttttgccaagtatgcctatgcgtccgccg

SEQ ID NO: 215930 - DNA, 75 bp, synthetic construct
  source 1..75: mol_type = other DNA
ggtggaatcgacgtggaccagtattccctacggtcggggcctgcgcaaccagccagtatacgtgctaaatgcgca

SEQ ID NO: 215931 - DNA, 75 bp, synthetic construct
  source 1..75: mol_type = other DNA
acgcctgtcgtggtgtggcgtaaaccgcaaagcggccccatgagcgaacttatctgggcgccggagctgcatcat

SEQ ID NO: 215932 - DNA, 75 bp, synthetic construct
  source 1..75: mol_type = other DNA
accactcaccagtatcagtgataattcgtttattagtatcaattgtgaaaatggtaccacggggtcacttgatat

SEQ ID NO: 215933 - DNA, 75 bp, synthetic construct
  source 1..75: mol_type = other DNA
aaagatactcgcgaaattatcgatatcgctgagttgaatgcagaactgaaaaccacggtcagcaaaatcgaccag

SEQ ID NO: 215934 - DNA, 75 bp, synthetic construct
  source 1..75: mol_type = other DNA
gccgtccctggccgctcattgcactgctggcgcttagcttctggtggctgaatggcatcctgctgcgcgcattgg

SEQ ID NO: 215935 - DNA, 75 bp, synthetic construct
  source 1..75: mol_type = other DNA
ggatgattctgctcgcgctggcggcggagctattctggtttgcgcaagatctgccatggggcatggcggcgtggg

SEQ ID NO: 215936 - DNA, 75 bp, synthetic construct
  source 1..75: mol_type = other DNA
agccacgcaagcaccttaaaatcaccatcatacactaaatcagtaagttggcagcattaccctgaccatgcacgc

SEQ ID NO: 215937 - DNA, 75 bp, synthetic construct
  source 1..75: mol_type = other DNA
gtcatgcagagcgcaaccctggtgtcacaggcgcagacggtaggaaaactgctggatcaggtcgtccggcagagt

SEQ ID NO: 215938 - DNA, 75 bp, synthetic construct
  source 1..75: mol_type = other DNA
ggccactaacgttatggcgcttgaggttggccgcaattctccttatgactatcgcattaaaagcgttgtttataa

SEQ ID NO: 215939 - DNA, 75 bp, synthetic construct
  source 1..75: mol_type = other DNA
gccatcaataacatcgccagaaagctggcacaggatttacgtcgcgcccagcaggcacgtatccggtcacagaat

SEQ ID NO: 215940 - DNA, 75 bp, synthetic construct
  source 1..75: mol_type = other DNA
tgactacaccacgaaagacgcccagggtaacgttaaagccaactttatcaagacgccctggagcatgaaaaatgc

SEQ ID NO: 215941 - DNA, 75 bp, synthetic construct
  source 1..75: mol_type = other DNA
ccgtggagcagattgaggctgtagctatgggttgcgaatatgccactcggcgccgagtcacggtccaggatctgc

SEQ ID NO: 215942 - DNA, 75 bp, synthetic construct
  source 1..75: mol_type = other DNA
ttatcagcatacccgcagtaatgatgaagagacggaagacagcaccgaaagaaactgggactggagccgttacta

SEQ ID NO: 215943 - DNA, 75 bp, synthetic construct
  source 1..75: mol_type = other DNA
tcgttttgtcagtcttggggggcgcagctactaacgtgatggcgcttgaagttggccgtaattctccttacgact

SEQ ID NO: 215944 - DNA, 75 bp, synthetic construct
  source 1..75: mol_type = other DNA
gattcctgtaatgactacaccgatattatcagtcattacctggggaagaactggggaagaactggggaattttcc

SEQ ID NO: 215945 - DNA, 75 bp, synthetic construct
  source 1..75: mol_type = other DNA
ccccgctggtatattaccgtgacggatacggctgatatgctctatctggtgctttggttaggtgatatattaggc

SEQ ID NO: 215946 - DNA, 75 bp, synthetic construct
  source 1..75: mol_type = other DNA
ttatttatttaaatctttaggaataaaaaaagaatttttaccttttttttcaacatttttatcatatatttttta

SEQ ID NO: 215947 - DNA, 75 bp, synthetic construct
  source 1..75: mol_type = other DNA
ggggctatctggaattaactcaaatcagtggtacttcgacctatggaaaactcagtaatccaaatggtggaattg

SEQ ID NO: 215948 - DNA, 75 bp, synthetic construct
  source 1..75: mol_type = other DNA
atctacggagcttcaggatatagcccctgctttaataatgaaaaagcttacagatgctgatgaaaaattcaataa

SEQ ID NO: 215949 - DNA, 75 bp, synthetic construct
  source 1..75: mol_type = other DNA
agctcggattttgggccgttcttgcaatcgccgtcgggacaaccgtcggctccggtatttttgtatctgtgggtg

SEQ ID NO: 215950 - DNA, 75 bp, synthetic construct
  source 1..75: mol_type = other DNA
aattaattcagttgattcaaaatataacgatgaaaaagttcgatctgtggaggacctgataagaacattaccagt

SEQ ID NO: 215951 - DNA, 75 bp, synthetic construct
  source 1..75: mol_type = other DNA
cctgcgatgtttctgctcgtgatgtcaccgttactctgccggactaccctggttcagtgccgattcctcttaccg

SEQ ID NO: 215952 - DNA, 75 bp, synthetic construct
  source 1..75: mol_type = other DNA
ggccgggctttactgcagggaaggattgtcatgcggtaattgaaacaaatcgcgggcactggctcggtcaggtga

SEQ ID NO: 215953 - DNA, 75 bp, synthetic construct
  source 1..75: mol_type = other DNA
tctatattccgcaaggggcgaagcattgcttggaaaacccggggaaaataccgcttgagttaatagaagttcgct

SEQ ID NO: 215954 - DNA, 75 bp, synthetic construct
  source 1..75: mol_type = other DNA
cttccttgtagcttacctgttgttatatgtaatgaacagcatagatttattgttgctgaacagcttcgaatgatt

SEQ ID NO: 215955 - DNA, 75 bp, synthetic construct
  source 1..75: mol_type = other DNA
attatcgaaaaacaggatgctgaactaacggttctcagaacacaaccagtcaccggactggatttgtctaacacc

SEQ ID NO: 215956 - DNA, 75 bp, synthetic construct
  source 1..75: mol_type = other DNA
attttgcggcaaatttgtcaagcgcaggttattattatcccttttagtgggcgctggcaaaatattgatcacaat

SEQ ID NO: 215957 - DNA, 75 bp, synthetic construct
  source 1..75: mol_type = other DNA
ggctgatacaggaaaccggctttgacggccgcacacagcgttatcaccacgacctgaccggcaaacttatccgca

SEQ ID NO: 215958 - DNA, 75 bp, synthetic construct
  source 1..75: mol_type = other DNA
gctggtgacgctggtggaaatacgcggcggcgcggcgcgcccgctcggggcgcagatggtggtgcgcgaagatgg

SEQ ID NO: 215959 - DNA, 75 bp, synthetic construct
  source 1..75: mol_type = other DNA
attttacttttacattgcttatgttgggtggctatctactgactctgttcatcgttatcgtcctttcctttttta

SEQ ID NO: 215960 - DNA, 75 bp, synthetic construct
  source 1..75: mol_type = other DNA
cctggcgacaaaaatacgaggacgatcatggcaccttcgtattgattctaaaggatatgctggcaaaaaatacgc

SEQ ID NO: 215961 - DNA, 75 bp, synthetic construct
  source 1..75: mol_type = other DNA
tcttctagttttgaggtgataattggtcccgtagatttaaatatagcgcataaatttatgtcacagggtgagtat

SEQ ID NO: 215962 - DNA, 75 bp, synthetic construct
  source 1..75: mol_type = other DNA
caaacaacttgaaagtattgcccggagtcgtggtctcctcccaaaaaaactgctgaatgaaatgattgagcaggc

SEQ ID NO: 215963 - DNA, 75 bp, synthetic construct
  source 1..75: mol_type = other DNA
gtgacagccgagtgctcagccagcagagagagaacatcctcgtaccgcaaccggacaagtttgacagttcctcaa

SEQ ID NO: 215964 - DNA, 75 bp, synthetic construct
  source 1..75: mol_type = other DNA
gtgagctctccggtaagctggcatcgctgggggtggttggagcggcgggatatgggctaaaacagattgcctacg

SEQ ID NO: 215965 - DNA, 75 bp, synthetic construct
  source 1..75: mol_type = other DNA
tggtggccagcgaccaggttagcgaggctatagaccgcattaatgaggctgtccgtgacctggagccgaagctag

SEQ ID NO: 215966 - DNA, 75 bp, synthetic construct
  source 1..75: mol_type = other DNA
aggctgaaaaaaactcatttaaccaaatattgctaagctcaaaaatgaataaatcaatgcaactactcttaagag

SEQ ID NO: 215967 - DNA, 75 bp, synthetic construct
  source 1..75: mol_type = other DNA
atgaaaatagtacaggagtaaaaagaattgttggggtgaaatcagatgtgcaattggttaatacttttaataaaa

SEQ ID NO: 215968 - DNA, 75 bp, synthetic construct
  source 1..75: mol_type = other DNA
tcagttgggctttgcagggtgaagggatggcctgtgctgccctggtattttcgttcgccccttccatccgcttac

SEQ ID NO: 215969 - DNA, 75 bp, synthetic construct
  source 1..75: mol_type = other DNA
caaacagcttgaaagtattgcccgtagtcgtggtctccccccaaaaaaactgctgaatgaaatgattgagcaggc

SEQ ID NO: 215970 - DNA, 75 bp, synthetic construct
  source 1..75: mol_type = other DNA
caaacaccttgaaagtattgcccgtagtcgtggtctccgcccaaaaaaactgctgaatgaaatgattgagcaggc

SEQ ID NO: 215971 - DNA, 75 bp, synthetic construct
  source 1..75: mol_type = other DNA
caaacatcttgaaagtattgcccggagtcgtggtctccacccaaaaaaactgctgaatgaaatgattgagcaggc

SEQ ID NO: 215972 - DNA, 75 bp, synthetic construct
  source 1..75: mol_type = other DNA
gcggaaataaactgcaggttgcagagttgtgggatcgcccaatgagtcgcagccttcgcgttgaagtggtcaaca

SEQ ID NO: 215973 - DNA, 75 bp, synthetic construct
  source 1..75: mol_type = other DNA
attagaagacacagatggagcgaataaatacccaaaacttcagatagcaagatggagagacagttatgatgtaag

SEQ ID NO: 215974 - DNA, 75 bp, synthetic construct
  source 1..75: mol_type = other DNA
agtcgtggtatccacccaaaaaaactgctgaatgaaatgattgagcaggcgtaccaggactttgtggcaaatgag

SEQ ID NO: 215975 - DNA, 75 bp, synthetic construct
  source 1..75: mol_type = other DNA
ggtttttcgctggatagctacaaatgtgatctttcaacatgtgcatttagttttctgtctcaggatggaaaaata

SEQ ID NO: 215976 - DNA, 75 bp, synthetic construct
  source 1..75: mol_type = other DNA
gcaatcatacgctgtaataggcttgctgtcttttgctttacttagcatcggtgcaggcggggtatggttttatct

SEQ ID NO: 215977 - DNA, 75 bp, synthetic construct
  source 1..75: mol_type = other DNA
cagcaaagaaaagatagtactttctggttatcccgattcaagtatcagcgctatagaaaacattctacctgaagt

SEQ ID NO: 215978 - DNA, 75 bp, synthetic construct
  source 1..75: mol_type = other DNA
ccattgcatacgctgacggcacctgtgacgcgaaagaaatcgcggtactggaaaaaaaccattgcagcacttcct

SEQ ID NO: 215979 - DNA, 75 bp, synthetic construct
  source 1..75: mol_type = other DNA
caatatctgacgtgcacgactacttaaaagcacacccaatattgatagatagtgatgaatttgaagcagtgatct

SEQ ID NO: 215980 - DNA, 75 bp, synthetic construct
  source 1..75: mol_type = other DNA
ttcaatatccaggaagttaattttttaggtgaatactataaagctaatatttcagagaaagggctagaatatcag

SEQ ID NO: 215981 - DNA, 75 bp, synthetic construct
  source 1..75: mol_type = other DNA
aaaaaccagttgcttgtattattgatctaagcaactataacggtttgttgaaagtgtattgtaatggcaagcaca

SEQ ID NO: 215982 - DNA, 75 bp, synthetic construct
  source 1..75: mol_type = other DNA
actcaagccaatggaagctatgcagtatcaactacaataggttctaatcttcatgatgatctttcgattatgtcc

SEQ ID NO: 215983 - DNA, 75 bp, synthetic construct
  source 1..75: mol_type = other DNA
atattaacctatagtgttcggagtggtaaggaattagtacaaacaatggggcgtgttgtaaggtggtacaaagac

SEQ ID NO: 215984 - DNA, 75 bp, synthetic construct
  source 1..75: mol_type = other DNA
tatattttcctaaagttttattaattctgttttttttgtataatgtgaattataaatttataccaggcgacatac

SEQ ID NO: 215985 - DNA, 75 bp, synthetic construct
  source 1..75: mol_type = other DNA
tgcgtgcctatatcaaagaaaacaagattgatgaccgtgtagttgttccgaatgatggcgagaccgtaaaccttt

SEQ ID NO: 215986 - DNA, 75 bp, synthetic construct
  source 1..75: mol_type = other DNA
gcaccttgaccactgggatccggaagcccagaaaaagttgcctaaagatattctcatcatcgcccagcatgaaga

SEQ ID NO: 215987 - DNA, 75 bp, synthetic construct
  source 1..75: mol_type = other DNA
gcacaatacggcgacagattgcctgatgagcgtctcaccacttctgttgactgcgactacagtgcccggaaagat

SEQ ID NO: 215988 - DNA, 75 bp, synthetic construct
  source 1..75: mol_type = other DNA
aaagcttattcggttcttgactcaattttctgatcttccaaaatccgagcgagtaactatggtcgacaagttgaa

SEQ ID NO: 215989 - DNA, 75 bp, synthetic construct
  source 1..75: mol_type = other DNA
caaggtcgctattgctggaagtatgcctgtaggaataagtttagctaagagttttatcgaagagccatggttagg

SEQ ID NO: 215990 - DNA, 75 bp, synthetic construct
  source 1..75: mol_type = other DNA
aaacgtgctgtgctgaatctgatccgtaaagatggaacgcgtttaccattcggcacagtgataaccttggaggaa

SEQ ID NO: 215991 - DNA, 75 bp, synthetic construct
  source 1..75: mol_type = other DNA
caacactgaatgagctcggggataaatccgcatttgatagcttagtggaaaaaaataaattaggtgttttgatta

SEQ ID NO: 215992 - DNA, 75 bp, synthetic construct
  source 1..75: mol_type = other DNA
aaattgccactgcccgagaacagcagttgtttaatggcaaaaacttccatgtgtttatctataacaaaactgaga

SEQ ID NO: 215993 - DNA, 75 bp, synthetic construct
  source 1..75: mol_type = other DNA
gccagccttgggcgcctgggcgtggacgcgattgatatctactggatccataatcccctcgacgtcgaaaaatgg

SEQ ID NO: 215994 - DNA, 75 bp, synthetic construct
  source 1..75: mol_type = other DNA
tgctggcgtggcagtggagtttgctgttcggcatcaccggcgccatcgtctgcgcctccaaactggcctttatgg

SEQ ID NO: 215995 - DNA, 75 bp, synthetic construct
  source 1..75: mol_type = other DNA
atgatcactattaccaaagagcgactactgacaatcaagcagtgccgcgaaacatacggacctggtagcaacgtt

SEQ ID NO: 215996 - DNA, 75 bp, synthetic construct
  source 1..75: mol_type = other DNA
ctatgtttccacgtacaaattaaccgatagcgagcgcgatattgctgccgaaatatggaacgcctgccgcgccgc

SEQ ID NO: 215997 - DNA, 75 bp, synthetic construct
  source 1..75: mol_type = other DNA
aagagtatcaaaagcatatccattttcacgtgcgttgcatgaacttaaaatgaggaacaatcaactatatgataa

SEQ ID NO: 215998 - DNA, 75 bp, synthetic construct
  source 1..75: mol_type = other DNA
cggctcgatcgtttacctgcatgtgacgccattcccctatgaggtggtggaagaacactgcatcctgctggggaa

SEQ ID NO: 215999 - DNA, 75 bp, synthetic construct
  source 1..75: mol_type = other DNA
gctggtcatccatgcgcattccgacccggaagtgatcgctggcctgctgctcggcgttgctggcagcgctttgtt

SEQ ID NO: 216000 - DNA, 75 bp, synthetic construct
  source 1..75: mol_type = other DNA
ggcgaaggtagtcaggtaaatgcagggaccttctttatgggcgtttacggcggatatggcggtaatcagttcctg

SEQ ID NO: 216001 - DNA, 75 bp, synthetic construct
  source 1..75: mol_type = other DNA
agcggtaagctggcagccattagtccagctgttcccggcggagcttatcagtcgaccggcaccttacagacgtta

SEQ ID NO: 216002 - DNA, 75 bp, synthetic construct
  source 1..75: mol_type = other DNA
gagtcatatcctctgaaaagaaaatgtcccacaggtatagatagagttgctgcttatcatactcacggtgcagat

SEQ ID NO: 216003 - DNA, 75 bp, synthetic construct
  source 1..75: mol_type = other DNA
aacgatagccagctatcttctgccgcctgcgggactgctgggaaaactgaagaatctggcgagactcggcaaact

SEQ ID NO: 216004 - DNA, 75 bp, synthetic construct
  source 1..75: mol_type = other DNA
aaatattttcaggcaaagatgagaaaatagttaaaagtaaagataacaatatcaagtcattttatttaggtacgc

SEQ ID NO: 216005 - DNA, 75 bp, synthetic construct
  source 1..75: mol_type = other DNA
gataaatttgattctatagatagcaccgcatatgacgccttaaataaaataaatagccaatctatttgcgaagat

SEQ ID NO: 216006 - DNA, 75 bp, synthetic construct
  source 1..75: mol_type = other DNA
gatcatttcagccatgtctcggtgatgcgcaaagtgctgttacgcatgaccagttgggtgcattacctttatctc

SEQ ID NO: 216007 - DNA, 75 bp, synthetic construct
  source 1..75: mol_type = other DNA
aagcaggaagaaaatcccatctggagataaaaccggttcttgatgatctgggaagtgccactgcctatatcgcca

SEQ ID NO: 216008 - DNA, 75 bp, synthetic construct
  source 1..75: mol_type = other DNA
ctgaggcgccgcgggattgggttttttggtctgaggagcgccgaaccgcatcatgacggtacgccgcactggcat

SEQ ID NO: 216009 - DNA, 75 bp, synthetic construct
  source 1..75: mol_type = other DNA
agaagatcatcgcttttatttgcccggaagcatccttatcggtgggctggtgctatcgctggcctcggtagcgtc

SEQ ID NO: 216010 - DNA, 75 bp, synthetic construct
  source 1..75: mol_type = other DNA
gtgccactggccgctaatcctcgcgtttgtgccataccgctacgccaaccgaccgcagcgcaaccttatttttaa

SEQ ID NO: 216011 - DNA, 75 bp, synthetic construct
  source 1..75: mol_type = other DNA
acaggcaaagggtcacaattacatggccttagtttctgtaagttgattgacaaaagctccccgttacttattaac

SEQ ID NO: 216012 - DNA, 75 bp, synthetic construct
  source 1..75: mol_type = other DNA
atctgctgagtgcaaaacaagtaacgattccagaggaactaaatgatatacatgttaaagatatatccggcctgg

SEQ ID NO: 216013 - DNA, 75 bp, synthetic construct
  source 1..75: mol_type = other DNA
taacccgtataccggggaatttaaaaaaacttaaccaataccaaaaagacattgatcacctgtctaaactatttt

SEQ ID NO: 216014 - DNA, 75 bp, synthetic construct
  source 1..75: mol_type = other DNA
atgatggactagttataataaataaaggaaacgaagaagttgaaggtacctggcctaacaaattgcaacctggaa

SEQ ID NO: 216015 - DNA, 75 bp, synthetic construct
  source 1..75: mol_type = other DNA
ccccacctacgggcctgacggcacctcagacacgtttgataaagtgaaaaccgaaaaaacgacccagcttgatat

SEQ ID NO: 216016 - DNA, 75 bp, synthetic construct
  source 1..75: mol_type = other DNA
aaggggccgaaaaatgctggatcgtggtgaaggcactggtcgatgccgacagtcgggagtttccgtcagtcacac

SEQ ID NO: 216017 - DNA, 75 bp, synthetic construct
  source 1..75: mol_type = other DNA
ccttcggtgagtctgcaccggcagagcaactgtttgaagagttcggcttcaccgttgaaaacgttgttgcgaaag

SEQ ID NO: 216018 - DNA, 75 bp, synthetic construct
  source 1..75: mol_type = other DNA
gaaattaatgcgattagcgcaaccattatcggtcagctggatacgaactttaaaactggtcgtcgtgcggcgtta

SEQ ID NO: 216019 - DNA, 75 bp, synthetic construct
  source 1..75: mol_type = other DNA
ttacgcgatgaaagaaaacgatacgttacatgatgcgtataaagcttccgatgagcgtttatatgtcaataagca

SEQ ID NO: 216020 - DNA, 75 bp, synthetic construct
  source 1..75: mol_type = other DNA
tgctttgaaagaaacgcagaatagatctctatgtaatgatatggaatactctggtattgtctgtaaagatactaa

SEQ ID NO: 216021 - DNA, 75 bp, synthetic construct
  source 1..75: mol_type = other DNA
tcgcctttgccgggggagagatggtggctcacgtgcattttccctcgctaatctgccagtgactagtgaagaact

SEQ ID NO: 216022 - DNA, 75 bp, synthetic construct
  source 1..75: mol_type = other DNA
aatggttaaaaaggagtgcactgcctttaatttactggcagtatatttctattcacagcaatcccgtaaaaatgt

SEQ ID NO: 216023 - DNA, 75 bp, synthetic construct
  source 1..75: mol_type = other DNA
tgcggtttcttttgagtcaccggaatataccgctgacgtcgatgcgatgggtacgctgcgcctgctggaggcgat

SEQ ID NO: 216024 - DNA, 75 bp, synthetic construct
  source 1..75: mol_type = other DNA
caatcagactttggtcagtactcttgatggtgtgcattttcttgcatccgtgtatgcgctggagaaaaaaaatca

SEQ ID NO: 216025 - DNA, 75 bp, synthetic construct
  source 1..75: mol_type = other DNA
ccgctattatgacccgctgcaggggcgatatatcactcaggatccgattggactgaaggggggatggaacctgta

SEQ ID NO: 216026 - DNA, 75 bp, synthetic construct
  source 1..75: mol_type = other DNA
ttgcaccattcaggttattagtgaaactcacaaacggtgtcggggatgagtttccgttatattatgggaataact

SEQ ID NO: 216027 - DNA, 75 bp, synthetic construct
  source 1..75: mol_type = other DNA
ccatatatcggcggtgcgttctgtaccgacagaatgaagtctgttccattcaccaaatattgtcaggaaaagttt

SEQ ID NO: 216028 - DNA, 75 bp, synthetic construct
  source 1..75: mol_type = other DNA
gattagagctaaagcgggcatagatgcagtagagcgcgccgaagggattcaagagcatactgcaaaagcgtatac

SEQ ID NO: 216029 - DNA, 75 bp, synthetic construct
  source 1..75: mol_type = other DNA
ctgatgctgccggggaaaggcgtaacgaaaaaacagcctccgttaccggaaagcaagaaggctgaatgaagttta

SEQ ID NO: 216030 - DNA, 75 bp, synthetic construct
  source 1..75: mol_type = other DNA
catcgtctgaccaccgcgcaacgctgcgatctgattgccgttattgataagggattacttgcggaatacggaacc

SEQ ID NO: 216031 - DNA, 75 bp, synthetic construct
  source 1..75: mol_type = other DNA
taaagagatttgtggaactaataaagttacatattctgtcagagaagaactgacagatgaaaagcttgagctcat

SEQ ID NO: 216032 - DNA, 75 bp, synthetic construct
  source 1..75: mol_type = other DNA
gcaatatgttaaattgactgtagacgacatgcgaaaatgggcggctatgacccagaaggcgcgaaacgctctaca

SEQ ID NO: 216033 - DNA, 75 bp, synthetic construct
  source 1..75: mol_type = other DNA
aggaggagcgtaacagcgcagggggagccgaaaagtggagtaaaaaacgcggcttccagtggtctactgccagat

SEQ ID NO: 216034 - DNA, 75 bp, synthetic construct
  source 1..75: mol_type = other DNA
tgttgccggtttcaccatcaccttcacgaagacgcaagagcatgacaacacgggcactctcgtgaaaattgcagt

SEQ ID NO: 216035 - DNA, 75 bp, synthetic construct
  source 1..75: mol_type = other DNA
ctgcactgcgagcagcatccacggtgttcaggcccgtgagtatggtcacacgtcacgcagtccgctggattcgct

SEQ ID NO: 216036 - DNA, 75 bp, synthetic construct
  source 1..75: mol_type = other DNA
aagcgtcagtggaggaaatcagcctgccgttgctgacgaaaatgtcctcagagcgcacgctggcagtccaggcag

SEQ ID NO: 216037 - DNA, 75 bp, synthetic construct
  source 1..75: mol_type = other DNA
ctgttctgttttaacaaaagcctggatgtttaatatccgtctctatcgtgttaatttcgatgaggctagcgtcca

SEQ ID NO: 216038 - DNA, 75 bp, synthetic construct
  source 1..75: mol_type = other DNA
ctgatgctgccggggaaaggcgtaacgaaaaaacagcctccgttaccggaaagcaagtaggctgaatgtagttta

SEQ ID NO: 216039 - DNA, 75 bp, synthetic construct
  source 1..75: mol_type = other DNA
tggtttaagctcatccaatcaagagatgagatagaagccctagcaagaactattatatattataagtcgggaatg

SEQ ID NO: 216040 - DNA, 75 bp, synthetic construct
  source 1..75: mol_type = other DNA
atgactagtcaactcatccccgtattcaacggttctatctcaaaccaagcagcccttctatgcaatgctcgcaat

SEQ ID NO: 216041 - DNA, 75 bp, synthetic construct
  source 1..75: mol_type = other DNA
atgaactctcaactcatccccgtattcaacggcaccatcgccaacgaaactaccctgttctgtaatgcccgtgat

SEQ ID NO: 216042 - DNA, 75 bp, synthetic construct
  source 1..75: mol_type = other DNA
actccaggcacttcagtccgaaagcctgattaccacgggcgatccgctttcaggcattgcggctgtcccatcttg

SEQ ID NO: 216043 - DNA, 75 bp, synthetic construct
  source 1..75: mol_type = other DNA
aaccatagctatggtgttatctgccgacaacgccatccggagaagccgaatgacgttgtcggagtaagcgctggt

SEQ ID NO: 216044 - DNA, 75 bp, synthetic construct
  source 1..75: mol_type = other DNA
acacttacccgtagaaatgacgctatcttcggcaaccacgtatggcaaacatttgcgcaatacttcccgccagga

SEQ ID NO: 216045 - DNA, 75 bp, synthetic construct
  source 1..75: mol_type = other DNA
ctgatgctgccggggaaaggcgtaacgaaaaaacagcctccgttaccggacagcaagaaggctgaatgcagttta

SEQ ID NO: 216046 - DNA, 75 bp, synthetic construct
  source 1..75: mol_type = other DNA
ctgatgctgccggggaaaggcgtaacgaaaaaacagcctccgttaccggaaagcaaggaggctgaatggagttta

SEQ ID NO: 216047 - DNA, 75 bp, synthetic construct
  source 1..75: mol_type = other DNA
ctgatgctgccggggaaaggcgtaacgaaaaaacagcctccgttaccggaaagcaagcaggctgaatgcagttta

SEQ ID NO: 216048 - DNA, 75 bp, synthetic construct
  source 1..75: mol_type = other DNA
aagtgatggaagagatctgcgaatcggcgacccgccagtgcgcagtgtacctttgcggccacttcatccttcagg

SEQ ID NO: 216049 - DNA, 75 bp, synthetic construct
  source 1..75: mol_type = other DNA
acggtggtcacgcatcccttgaacccttcgcaacgcctgccgccggatcgctattttactgaaatcaccgttagc

SEQ ID NO: 216050 - DNA, 75 bp, synthetic construct
  source 1..75: mol_type = other DNA
ctgatgctgccggggaaaggcgtaacgaaaaaacagcctccgttaccggagagcaagaaggctgaatggagttta

SEQ ID NO: 216051 - DNA, 75 bp, synthetic construct
  source 1..75: mol_type = other DNA
gcgtgagactgaacagcagatttaccgtcagctgactgacgaggtactggccctgcgattgtctgaaaacggctc

SEQ ID NO: 216052 - DNA, 75 bp, synthetic construct
  source 1..75: mol_type = other DNA
tggtggaggagtggatgaggtggttttaaaaaataaatataataatgaaaagatttttttccatggtatgattca

SEQ ID NO: 216053 - DNA, 75 bp, synthetic construct
  source 1..75: mol_type = other DNA
actacggctatgacgataaaggccgtctgacgggcgaacggcagactgacggagaagacggaccgcatcccgacg

SEQ ID NO: 216054 - DNA, 75 bp, synthetic construct
  source 1..75: mol_type = other DNA
acggcaattaaggaaattatgctggccgtggaggaaagcaaaattgcgctgacgccggatggcattcagctacag

SEQ ID NO: 216055 - DNA, 75 bp, synthetic construct
  source 1..75: mol_type = other DNA
gcccccatgcaacttgctaaggcgttatctttccttgagaaaaaagatctcagctcacgaatgtgctttgaagaa

SEQ ID NO: 216056 - DNA, 75 bp, synthetic construct
  source 1..75: mol_type = other DNA
tcctgatgtcgctgttaaatcagagggggaagtcacctggcaagccgtgctggatatgctctgtgaggagaatga

SEQ ID NO: 216057 - DNA, 75 bp, synthetic construct
  source 1..75: mol_type = other DNA
tgtgctgtacaaccaggcggtaatgactccaacttattgatagtgttttatgttcagataatgcccgatgacttt

SEQ ID NO: 216058 - DNA, 75 bp, synthetic construct
  source 1..75: mol_type = other DNA
gattgtgtggatttccctaatttaaaaaatttgttctataagcaagaaataatccgtccagaacgtaatagtgaa

SEQ ID NO: 216059 - DNA, 75 bp, synthetic construct
  source 1..75: mol_type = other DNA
tggcgcatcactggttccgctggctcaggcgcaatttcccttttcgcctgaacgccacgaaggctcacaacagca

SEQ ID NO: 216060 - DNA, 75 bp, synthetic construct
  source 1..75: mol_type = other DNA
atgctgtgggagcatgagacggggcatgcgtacagcgaacaggggctggcgacccgtcaggagccggacggtctg

SEQ ID NO: 216061 - DNA, 75 bp, synthetic construct
  source 1..75: mol_type = other DNA
ctggccttcacggactgctcggggtacacgacgcggtatgagtacgaccggtacggtcaacaaatcgccgttcac

SEQ ID NO: 216062 - DNA, 75 bp, synthetic construct
  source 1..75: mol_type = other DNA
tgagcaatcgtgggctttatattccgtcaccgcagctgggagacggatttattgcgtttatcctggctgttgtta

SEQ ID NO: 216063 - DNA, 75 bp, synthetic construct
  source 1..75: mol_type = other DNA
gggttcaggtaccacgctgaataaccactttgcggtaataccggcagaccggacatggcgaccacagccgttgct

SEQ ID NO: 216064 - DNA, 75 bp, synthetic construct
  source 1..75: mol_type = other DNA
cacatacaaacagggatttactaaaaagcactcttccaacagaaagtaaatttaatattttcgtgtgggaggctc

SEQ ID NO: 216065 - DNA, 75 bp, synthetic construct
  source 1..75: mol_type = other DNA
atccaagtcataaacaggataaaatcacatacaaacagggatttactaaaaagcactcttccaacagaaagtaaa

SEQ ID NO: 216066 - DNA, 75 bp, synthetic construct
  source 1..75: mol_type = other DNA
catcacaactgatgcgatgagttgccagaaagatattgcagagaagatacaaaaacagggaggtgattatttatt

SEQ ID NO: 216067 - DNA, 75 bp, synthetic construct
  source 1..75: mol_type = other DNA
cgttacgcttaggggcagatgtagtgggggcgattccgcattttgaatttacccgtgaatacggcgtggagtcgc

SEQ ID NO: 216068 - DNA, 75 bp, synthetic construct
  source 1..75: mol_type = other DNA
acaaccggttaagctggcagcgcagcctgccaggtggcagccagaatccacagcaggcggtactcccccggcgca

SEQ ID NO: 216069 - DNA, 75 bp, synthetic construct
  source 1..75: mol_type = other DNA
ggctgaactgggagataaacctgcgtgaggatgaaacatatatcaccttcatcggtgtacagggtcgggaactga

SEQ ID NO: 216070 - DNA, 75 bp, synthetic construct
  source 1..75: mol_type = other DNA
atggtaactaatccgcaaattccattaattggtttatatgtatctaaagttaatccatctaatcgtatagttgtt

SEQ ID NO: 216071 - DNA, 75 bp, synthetic construct
  source 1..75: mol_type = other DNA
agttgaagaacagcgccagtcacggcgcacgcatataaagcccctctcggaggcgggttcaaactatgcagcaat

SEQ ID NO: 216072 - DNA, 75 bp, synthetic construct
  source 1..75: mol_type = other DNA
ggcaagtgaactgcacggcgagcagccgcaggcggtgccgggaaggcggggagcagggacggcgctggagaacca

SEQ ID NO: 216073 - DNA, 75 bp, synthetic construct
  source 1..75: mol_type = other DNA
gatgatataagagattatttttataaatcaaagtatccaacaagagaatttcttttgtgttatggtttagaatta

SEQ ID NO: 216074 - DNA, 75 bp, synthetic construct
  source 1..75: mol_type = other DNA
aaacgacagggaaaaaggagaaattctcaataaatgcggtaacttagagattaggattgcggagaataacaactg

SEQ ID NO: 216075 - DNA, 75 bp, synthetic construct
  source 1..75: mol_type = other DNA
caggctgtcacccaggctgatttacgtcatcttgataatcttaaccagcagggagttttcgccacattgtatacc

SEQ ID NO: 216076 - DNA, 75 bp, synthetic construct
  source 1..75: mol_type = other DNA
ccttcggtgaatctgcaccggcagagcaactgtttgaagagttcggcttcaccgttgaaaacgtggtagagaaag

SEQ ID NO: 216077 - DNA, 75 bp, synthetic construct
  source 1..75: mol_type = other DNA
ctcggatgacggacggcttgattccggcgagtcgctgctggaagagggcttcaacaaactgctggacctcgaaaa

SEQ ID NO: 216078 - DNA, 75 bp, synthetic construct
  source 1..75: mol_type = other DNA
gggcatgcagaccggcgaacgggccagcacggaagatgcgaaggactgggccaaaacccggatgagccgacgcaa

SEQ ID NO: 216079 - DNA, 75 bp, synthetic construct
  source 1..75: mol_type = other DNA
tcttggccttgatggttttagcgttaaaaataacgatacagttaccactagtgctccagtaactgcttttggtgc

SEQ ID NO: 216080 - DNA, 75 bp, synthetic construct
  source 1..75: mol_type = other DNA
cctctcccgtcagaacctggcgcagcaggaacgtacggaagagcaactggcaaacatcgcgcgcggtggttacgt

SEQ ID NO: 216081 - DNA, 75 bp, synthetic construct
  source 1..75: mol_type = other DNA
gcgtgaacgtactggctaaagacggcaagatgaacatccaggttggcgcgaatgatggtcagaccatcaccattg

SEQ ID NO: 216082 - DNA, 75 bp, synthetic construct
  source 1..75: mol_type = other DNA
aaaatcgaagctattgaattagtaagtgacgatgactcattaaaaaatgagctatattactcttttcactactca

SEQ ID NO: 216083 - DNA, 75 bp, synthetic construct
  source 1..75: mol_type = other DNA
gccgggcagttacagagccagcacctgaacagcctgctgtctgaccgcgattacacctggaacgacaacggcgaa

SEQ ID NO: 216084 - DNA, 75 bp, synthetic construct
  source 1..75: mol_type = other DNA
ccgctaccgttatgataatccacacagtgacttaccctgcgcaacggaagatgccaccggcagccggaaaaccat

SEQ ID NO: 216085 - DNA, 75 bp, synthetic construct
  source 1..75: mol_type = other DNA
tcaactactcgttcagtgagaagacgaacttctccgcacttgccaaagcccttggcgttgctgaggggcaacttg

SEQ ID NO: 216086 - DNA, 75 bp, synthetic construct
  source 1..75: mol_type = other DNA
caggatcagaagtcccctgattacgccatgccgaagttttattattttcaggagcaacctgtaggggacaacggc

SEQ ID NO: 216087 - DNA, 75 bp, synthetic construct
  source 1..75: mol_type = other DNA
agtttgccgatagtcgtgaatggtctgagccagttaatcgtgacgtaatgcgtaattcgcgcgagcgtggcctgg

SEQ ID NO: 216088 - DNA, 75 bp, synthetic construct
  source 1..75: mol_type = other DNA
cctgaataaatctcagtcttctctgagctccgccattgaacgtctctcttctagcctgcgtattaacagtgctaa

SEQ ID NO: 216089 - DNA, 75 bp, synthetic construct
  source 1..75: mol_type = other DNA
ggaatagcaatatatcgagatggttttcgcattggattttctggacaatcaaccggcgaagactggctgggacta

SEQ ID NO: 216090 - DNA, 75 bp, synthetic construct
  source 1..75: mol_type = other DNA
ccaggttataaaattgacggattagggcttacttttaaagtatcaactcttccggatgtcagccgatttaaaaat

SEQ ID NO: 216091 - DNA, 75 bp, synthetic construct
  source 1..75: mol_type = other DNA
gggcagtataccgaacgttccaggataaaatgcgtgatgctattagccccaaagattttggagctgttggtgatg

SEQ ID NO: 216092 - DNA, 75 bp, synthetic construct
  source 1..75: mol_type = other DNA
gagttttatgaggtagcagccagaatgagcgtccggcaagtcttcctggaagtagcagaaaaattgtcagaaaaa

SEQ ID NO: 216093 - DNA, 75 bp, synthetic construct
  source 1..75: mol_type = other DNA
tatggctatggttatcgctcagaaacctataacgaattcgatctccgactgcgtaaacacctctctctggcagag

SEQ ID NO: 216094 - DNA, 75 bp, synthetic construct
  source 1..75: mol_type = other DNA
tgaggatattcttgaacttgctggtgttggaaccgtaatgtctggtgtactacatgagctcactaggacaacagg

SEQ ID NO: 216095 - DNA, 75 bp, synthetic construct
  source 1..75: mol_type = other DNA
tcgacaaagcattggctaaagttgacaatctgcgttctgacctcggtgcagtacaaaaccgtttcgactctgcta

SEQ ID NO: 216096 - DNA, 75 bp, synthetic construct
  source 1..75: mol_type = other DNA
ttttgactgcaaatattgatggtcaagatgtaaaatttactattaacagtaaagccgccacgggtgccgacgcaa

SEQ ID NO: 216097 - DNA, 75 bp, synthetic construct
  source 1..75: mol_type = other DNA
caacagctgaaacaacctattttggatcgacagttaagcttgctgacgctaatacacttgatgcagatattacag

SEQ ID NO: 216098 - DNA, 75 bp, synthetic construct
  source 1..75: mol_type = other DNA
ggaaagtcagcattgatgacgtgattgcgcgtaacttcaatctggatattaaaaacccacatcaggcggaaaccg

SEQ ID NO: 216099 - DNA, 75 bp, synthetic construct
  source 1..75: mol_type = other DNA
gctatagttggcttattgtcattaattttacgcggcaacaaacaaaattatcgtctaaaggattctattcttccc

SEQ ID NO: 216100 - DNA, 75 bp, synthetic construct
  source 1..75: mol_type = other DNA
aaatatatcaatgagttgcaggcgaatccggcgaaaatcgccacccgtaaggcttcgcaaaatacgcttaacgct

SEQ ID NO: 216101 - DNA, 75 bp, synthetic construct
  source 1..75: mol_type = other DNA
cgggcaatctcgtgaaaattgcagtcagcaagagcggtgtgtgcaccagtacaaatattgctcttgagctgtttc

SEQ ID NO: 216102 - DNA, 75 bp, synthetic construct
  source 1..75: mol_type = other DNA
tttggtaactacagactatcaattgtgggatattctatcgtaatatcagaaattatttcattaatgatgtatata

SEQ ID NO: 216103 - DNA, 75 bp, synthetic construct
  source 1..75: mol_type = other DNA
ggcgctggcaacttcggtgtcggaggatgtttgtccggattacattcgcgaagcactggagcatatccgcgatgc

SEQ ID NO: 216104 - DNA, 75 bp, synthetic construct
  source 1..75: mol_type = other DNA
ccacccactccccacatattgccagcgtcacgcctgtcagatctatcgttctgctgcgttatgactcagaggacg

SEQ ID NO: 216105 - DNA, 75 bp, synthetic construct
  source 1..75: mol_type = other DNA
actgatggtgaaattatagcaatagatggaaagaccataagaggctcctttgataagggaaaaagaaaaggagca

SEQ ID NO: 216106 - DNA, 75 bp, synthetic construct
  source 1..75: mol_type = other DNA
atgaaacgaaccctgatgagttgtgccgttgcttcactgctggtttcaggttccgcgctggctgcatggccagaa

SEQ ID NO: 216107 - DNA, 75 bp, synthetic construct
  source 1..75: mol_type = other DNA
caataagcacttaggttacagatacacaggagtattcaaaaccctggcaagtattgatgacaaaccgtcccgttt

SEQ ID NO: 216108 - DNA, 75 bp, synthetic construct
  source 1..75: mol_type = other DNA
gcgcgatggcgcaaaatttgaggcgcaggcgggtgaaccgcaacaggcgctggaaacctacaaagatgcgatgat

SEQ ID NO: 216109 - DNA, 75 bp, synthetic construct
  source 1..75: mol_type = other DNA
gtggctgagcgggatgtgtcactggcggcgggtaatcatgttgatgttcttgctgccaccagtacagatacgtcc

SEQ ID NO: 216110 - DNA, 75 bp, synthetic construct
  source 1..75: mol_type = other DNA
aaggtgatttgctgattattgaaaacccagaatcacacttgcatcccgctgggcaatccttgatgggtaaattgt

SEQ ID NO: 216111 - DNA, 75 bp, synthetic construct
  source 1..75: mol_type = other DNA
tattattatggcctggcgtcgtgacagtatgggggaagcgaaatcctggtgtctgcgggaaattcccaaactttt

SEQ ID NO: 216112 - DNA, 75 bp, synthetic construct
  source 1..75: mol_type = other DNA
aagcgcagcgttcagcactaaaagcgttgcttatcacccatatcggttcgttggggttgtatcttgccgccgcca

SEQ ID NO: 216113 - DNA, 75 bp, synthetic construct
  source 1..75: mol_type = other DNA
tggaaacctacaaagacgcgatggtcgcatccggtgtgaccacgacgcgtccgcaggataacgacacctttaccc

SEQ ID NO: 216114 - DNA, 75 bp, synthetic construct
  source 1..75: mol_type = other DNA
aaagtatcggaaaaaaatggtatttccttagagggccataaagcgacccaattctcatctaagctagggagacaa

SEQ ID NO: 216115 - DNA, 75 bp, synthetic construct
  source 1..75: mol_type = other DNA
gtgttaacgggaaaatactgcgaacacctgccactgtatcgtcagagtgaaatctttgcccgccagggcatcgag

SEQ ID NO: 216116 - DNA, 75 bp, synthetic construct
  source 1..75: mol_type = other DNA
ggctgtatgaagcgttaatcctgcaatgcggtatcacgctaatcagcgattttgatcaatatgatggcgggaaga

SEQ ID NO: 216117 - DNA, 75 bp, synthetic construct
  source 1..75: mol_type = other DNA
cgcagaagaacatgaacaccgaggtgctgaataaccgcaccactgatgtgataaacaaccatgctgaaaccattg

SEQ ID NO: 216118 - DNA, 75 bp, synthetic construct
  source 1..75: mol_type = other DNA
gacggcaatacggcgtggcgcggggagtatgatgaatggggcaaccagcttaatgaggagaacccgcatcatgtg

SEQ ID NO: 216119 - DNA, 75 bp, synthetic construct
  source 1..75: mol_type = other DNA
gcggcccgcgacagacgcgggaatacggctacagcgccacgggcaggctggagagtgtgcgcaccctcgcaccag

SEQ ID NO: 216120 - DNA, 75 bp, synthetic construct
  source 1..75: mol_type = other DNA
tatattgaaggaaccaatgttagatttaattcgaataatatgacgatatattggaatagtagagcatctttattt

SEQ ID NO: 216121 - DNA, 75 bp, synthetic construct
  source 1..75: mol_type = other DNA
atccatgccgacgcctttaccagtcgtcagccgagcggttcctctgtgtttgcgctctcaaccaaaggtgcaacc

SEQ ID NO: 216122 - DNA, 75 bp, synthetic construct
  source 1..75: mol_type = other DNA
taagccgggcgggatggcgcgggtttcagagggcaaaatccggaaaatccttgacggttatactggcagaccact

SEQ ID NO: 216123 - DNA, 75 bp, synthetic construct
  source 1..75: mol_type = other DNA
tattgcgccagaagttcgtggaaagacaatgcttttagggcactggttaaaccagaaagaaattcctgaccccta

SEQ ID NO: 216124 - DNA, 75 bp, synthetic construct
  source 1..75: mol_type = other DNA
aaatttcgctttagctgatgcagtatttaatactgcatacgcggctggtattgttatgggggaaaacattactat

SEQ ID NO: 216125 - DNA, 75 bp, synthetic construct
  source 1..75: mol_type = other DNA
ggctaaggatttcagtgcaactggtaaagtgtttaatactgcatatgcagcaggtattgttgcaggtaatactat

SEQ ID NO: 216126 - DNA, 75 bp, synthetic construct
  source 1..75: mol_type = other DNA
ctcggtcggggcattttatgaccacggtaatggccagcagaacagggataatgccacaaaaaccggccttcgcct

SEQ ID NO: 216127 - DNA, 75 bp, synthetic construct
  source 1..75: mol_type = other DNA
gatgagtctgagcaagagcttatcgttaccattaacaaatatgccagtcagttggtagtggaaccggtagtacct

SEQ ID NO: 216128 - DNA, 75 bp, synthetic construct
  source 1..75: mol_type = other DNA
cttcccttgagcaggcagacattgatgcacagcatgatggcagcggcactattgagcatgccagactgaaagagg

SEQ ID NO: 216129 - DNA, 75 bp, synthetic construct
  source 1..75: mol_type = other DNA
aagactttaacgacttcaacctgctgaacgtcaacaagtcagacctgctggaagaaaaccccgtcctgctgaaca

SEQ ID NO: 216130 - DNA, 75 bp, synthetic construct
  source 1..75: mol_type = other DNA
ccactcaggtgggggtggatatcctcaaggagggcgggaatgccgttgatgccgccgtggctgtgggctacgcgc

SEQ ID NO: 216131 - DNA, 75 bp, synthetic construct
  source 1..75: mol_type = other DNA
agtatccgccagggactcgcttcatgcacacggcacatccggcgttgcgcggtggccgggtggtgaaaaccgttg

SEQ ID NO: 216132 - DNA, 75 bp, synthetic construct
  source 1..75: mol_type = other DNA
ttcaaggcagggttaagacgtaagatgcgaaaagcagccatggacagaaactatctcgcgtcagtccttgcgggg

SEQ ID NO: 216133 - DNA, 75 bp, synthetic construct
  source 1..75: mol_type = other DNA
gcctgccggggacgaagacgcagatgacgatccgctcgaaaacctataagggcagcgggtttaatgaactgaagt

SEQ ID NO: 216134 - DNA, 75 bp, synthetic construct
  source 1..75: mol_type = other DNA
atgaatatgatgaccgtgccgtttcacggcaactctctttatgtggttaaccataatggcgagccgtacgttccc

SEQ ID NO: 216135 - DNA, 75 bp, synthetic construct
  source 1..75: mol_type = other DNA
agcagatattacgcagtggattgacgggcaacagtttggtctgactcacatttcacccgccgtattcactgctgc

SEQ ID NO: 216136 - DNA, 75 bp, synthetic construct
  source 1..75: mol_type = other DNA
aggactttaacgactttaacctgctgaacgtcaacaagtcagacctgctggaggaaaaccccgtcctgctgaata

SEQ ID NO: 216137 - DNA, 75 bp, synthetic construct
  source 1..75: mol_type = other DNA
ctatctgtttaaagagtacgggtatcagaatttcatcttcttcgtgcataccgacgcgattatccagaaaacccg

SEQ ID NO: 216138 - DNA, 75 bp, synthetic construct
  source 1..75: mol_type = other DNA
gtcctttgagatcccctggaatccgaacacccgtaccgaggtaagcaccctctgcatcagccagtttcgctacag

SEQ ID NO: 216139 - DNA, 75 bp, synthetic construct
  source 1..75: mol_type = other DNA
aggaagttgttttagtacggtagccgcgccacctgcgccgtctcctgtttcttacggcgtggaggaagatgtctt

SEQ ID NO: 216140 - DNA, 75 bp, synthetic construct
  source 1..75: mol_type = other DNA
agttcaatagtcgccattttaggatatcaagcgaacagtaatggtaaggttatcgttgaaaagggtggcgagtgg

SEQ ID NO: 216141 - DNA, 75 bp, synthetic construct
  source 1..75: mol_type = other DNA
ttttctggaaaccaggaaaaaaaagaagtatcactctcgtgttgagcgttggggcgccatcctcaccttttgtta

SEQ ID NO: 216142 - DNA, 75 bp, synthetic construct
  source 1..75: mol_type = other DNA
ttatattcttaaaatggattttcagaacttctttaacaaaattaaacctgatatatttttctcgaaacttgagaa

SEQ ID NO: 216143 - DNA, 75 bp, synthetic construct
  source 1..75: mol_type = other DNA
aaagagggggggggcagtgagttttatttttaatgaggaaacattgtattttactgtttttggtggggattttat

SEQ ID NO: 216144 - DNA, 75 bp, synthetic construct
  source 1..75: mol_type = other DNA
aaatctgcattgttaggaatttcattgtgtcttttaaaaccttttctcaaaagtaagcctaaaaccgcgttaatt

SEQ ID NO: 216145 - DNA, 75 bp, synthetic construct
  source 1..75: mol_type = other DNA
gccgtgccggccgtctggccggtgccgtggggatgctgtttcttttgtcctttgcattacctgcgcaggctgccg

SEQ ID NO: 216146 - DNA, 75 bp, synthetic construct
  source 1..75: mol_type = other DNA
ttcttgttttattgacattttattctgcattacaattatatatgacatataatgtcgctcaagtaattatgccct

SEQ ID NO: 216147 - DNA, 75 bp, synthetic construct
  source 1..75: mol_type = other DNA
aataatattaactctatgtctttttcaatcattaatgattttggtggtaatagcgccagcagaaacatttcattt

SEQ ID NO: 216148 - DNA, 75 bp, synthetic construct
  source 1..75: mol_type = other DNA
aaggcataaaatacagcaatgcactttgcctgttgaacatccatcaactggagaaaagaaatgaaactatcattt

SEQ ID NO: 216149 - DNA, 75 bp, synthetic construct
  source 1..75: mol_type = other DNA
atggacggagaaagctttaactttgatgacaatgatattgaattcattgcttcaatgtatgcattatgtaaatca

SEQ ID NO: 216150 - DNA, 75 bp, synthetic construct
  source 1..75: mol_type = other DNA
gcctaatagcattgtttcatcgagttaatgggagaaataaattaagcctactttacattattataggttttttgt

SEQ ID NO: 216151 - DNA, 75 bp, synthetic construct
  source 1..75: mol_type = other DNA
gcctaatagcattgttctatcgaattaacgagaaaaacaaattaagtttattttacatttttgtaggttttttgt

SEQ ID NO: 216152 - DNA, 75 bp, synthetic construct
  source 1..75: mol_type = other DNA
gataaaggcggtcgcattgatgccacctatcagcctaatacggcccgtttaactgcctatgagccaggtgacatt

SEQ ID NO: 216153 - DNA, 75 bp, synthetic construct
  source 1..75: mol_type = other DNA
gatgtagtgaaacgctttgaggaaatggtggcgcaggcgcagcagagcgcggaagcagcagcggaaagcgagcga

SEQ ID NO: 216154 - DNA, 75 bp, synthetic construct
  source 1..75: mol_type = other DNA
gcccggcaaaatacatccgcagtggtcatgagaacggtggcaacagtggtgacagggccggcaggagaatatgca

SEQ ID NO: 216155 - DNA, 75 bp, synthetic construct
  source 1..75: mol_type = other DNA
atgttcgtacaccatttgctgacaattctttgtatccattaccggaagaacttgataccgatatcgcagtattat

SEQ ID NO: 216156 - DNA, 75 bp, synthetic construct
  source 1..75: mol_type = other DNA
ggtgtttatggcgactgaactggttctgctttcacccggcccaggccgcgtgctggagcggctgccgctcaactt

SEQ ID NO: 216157 - DNA, 75 bp, synthetic construct
  source 1..75: mol_type = other DNA
tcagcaggatatactacatttattctttcttacaggctgccagaatcgattaatggtagatattatgttctgaat

SEQ ID NO: 216158 - DNA, 75 bp, synthetic construct
  source 1..75: mol_type = other DNA
ccctgcgcgctccctgcaccattcaatttatatggcgaggcacattaagggagcgcaacccgctgctgaagccaa

SEQ ID NO: 216159 - DNA, 75 bp, synthetic construct
  source 1..75: mol_type = other DNA
tgataatgttgcatatgcaattaatcttttggcatcaccattaaaagaattgaatcaggagtatttggatgattt

SEQ ID NO: 216160 - DNA, 75 bp, synthetic construct
  source 1..75: mol_type = other DNA
gaaagagataataaggtatacagaaattcccgctgggagggaaaagatgaaatattctgggggatgatgaattca

SEQ ID NO: 216161 - DNA, 75 bp, synthetic construct
  source 1..75: mol_type = other DNA
tgacggatggcacgggactccccatgtccggataccatattattctgaaagcccgacagaatacacccgcagtgg

SEQ ID NO: 216162 - DNA, 75 bp, synthetic construct
  source 1..75: mol_type = other DNA
gaacccgcgtatattcactttctattggcgtcagcaatccgttgaatacgggcgtaattggcggatatggtatag

SEQ ID NO: 216163 - DNA, 75 bp, synthetic construct
  source 1..75: mol_type = other DNA
ggactgcctgtactggcagaacccgcacaaccaactcatgatgaattggttgcagcatctgaattaatgaaacag

SEQ ID NO: 216164 - DNA, 75 bp, synthetic construct
  source 1..75: mol_type = other DNA
attcaatggagcctgacttcaaagctggagatgtaattatcgttgatccagagatagagcctaccccgggcgaat

SEQ ID NO: 216165 - DNA, 75 bp, synthetic construct
  source 1..75: mol_type = other DNA
gtgaatatttatcgactctctgttctttcctgtctggcaatggtaacccctcctgcgctgacagctgaatttaac

SEQ ID NO: 216166 - DNA, 75 bp, synthetic construct
  source 1..75: mol_type = other DNA
aaatggaaagctgaaattatcggcaacagtacttaccagactatgagtaagcataaggaactttccctggaggca

SEQ ID NO: 216167 - DNA, 75 bp, synthetic construct
  source 1..75: mol_type = other DNA
tggcctttcacacaacatcaagcaggcggaagggatagcgatggatgacagcggcaacatctatatcgttggcga

SEQ ID NO: 216168 - DNA, 75 bp, synthetic construct
  source 1..75: mol_type = other DNA
cgcacaccaggcgtggtatctgcatcgcctgctggtgggggggggatgcgcgctggagtattgcagcgggcaata

SEQ ID NO: 216169 - DNA, 75 bp, synthetic construct
  source 1..75: mol_type = other DNA
atacttcccttaacggtaaagtggccgccattactggcgcggcatcaggaatcggcctgcaatgcgccaaaacgc

SEQ ID NO: 216170 - DNA, 75 bp, synthetic construct
  source 1..75: mol_type = other DNA
cagctaccagcctacgacggtggcggtcaatatgaacgacttgcctgacggcgttaccgtttccgaaaacgtggt

SEQ ID NO: 216171 - DNA, 75 bp, synthetic construct
  source 1..75: mol_type = other DNA
tgacccaggcggttatcgactggaaagcgagctgtgaacgccgttttgtgttcaggccgaatgaagcgataacgc

SEQ ID NO: 216172 - DNA, 75 bp, synthetic construct
  source 1..75: mol_type = other DNA
catcattctgattgagatcgcactgtcagcgttatcgctgttgctttgcggccttcaggcagaaccgcgttatat

SEQ ID NO: 216173 - DNA, 75 bp, synthetic construct
  source 1..75: mol_type = other DNA
cccgatagaggcgtttgatggcagtcttgaatacattcttactgatcttgatttatcagaacacagctttgcctt

SEQ ID NO: 216174 - DNA, 75 bp, synthetic construct
  source 1..75: mol_type = other DNA
tcagatgcgacgtaaagagctagggatcacagctcagcacctggccgaacttgtcgatatctctcatcagcaact

SEQ ID NO: 216175 - DNA, 75 bp, synthetic construct
  source 1..75: mol_type = other DNA
caaggatgctgatttgaaaaatcgttttgatcagatatggcctcgtttaacacatgaacagaggcgcatattaat

SEQ ID NO: 216176 - DNA, 75 bp, synthetic construct
  source 1..75: mol_type = other DNA
gccttcatgctccagcacggaccatgccgttgatggaaccgctacgtcaggcggcagaaaaactggctcaggcgc

SEQ ID NO: 216177 - DNA, 75 bp, synthetic construct
  source 1..75: mol_type = other DNA
aagggaaacttagaaaaagtcttgaataaaattcgttcgccgcttggtggttatattaatagtctatcaaagacg

SEQ ID NO: 216178 - DNA, 75 bp, synthetic construct
  source 1..75: mol_type = other DNA
ataactttatcattaatgtataatgcagtaaatgtaatggtggttccctcaaggcaagataatttgccacaaact

SEQ ID NO: 216179 - DNA, 75 bp, synthetic construct
  source 1..75: mol_type = other DNA
cctgctgatagctgctgatacaggaagtcaatatggcaccaatattactattaatgatggggtgatgctgccaac

SEQ ID NO: 216180 - DNA, 75 bp, synthetic construct
  source 1..75: mol_type = other DNA
aagccattgcgctttatgagcatttgggctttgagcatatcaactatgcgcttggctgcacgggccatgtcgatt

SEQ ID NO: 216181 - DNA, 75 bp, synthetic construct
  source 1..75: mol_type = other DNA
accaatgaaggtcgccaagaggcaatggcaaaaggagttgtttttggtagaaaaagaaaaatagatagagatgca

SEQ ID NO: 216182 - DNA, 75 bp, synthetic construct
  source 1..75: mol_type = other DNA
aaaatgcagttaagaaagctcaagataactggtctgaagaaaaagtcgcgtcagaatatataaagttatacgaaa

SEQ ID NO: 216183 - DNA, 75 bp, synthetic construct
  source 1..75: mol_type = other DNA
tttatgaccctataaaagcagagggagttgatggatggatgtattataaattcatattatccatattcccattaa

SEQ ID NO: 216184 - DNA, 75 bp, synthetic construct
  source 1..75: mol_type = other DNA
gctccagcaggaagggagtgagaacggccacggcgtggtgttcccggctgaactggtgcggctgctggacaggct

SEQ ID NO: 216185 - DNA, 75 bp, synthetic construct
  source 1..75: mol_type = other DNA
ccggacccggagctgcacccggacagtacactcacagtgtggccggataaccgcatcgcggaggatgcgcactat

SEQ ID NO: 216186 - DNA, 75 bp, synthetic construct
  source 1..75: mol_type = other DNA
caactgataaaatttggcgctattggtttgaatgcaattatcttttcccccctgctgatagctgctgatagctgc

SEQ ID NO: 216187 - DNA, 75 bp, synthetic construct
  source 1..75: mol_type = other DNA
ccattggttatgctggtttagcggctaccatctgggcggcaattgttccggcgctgttagcccgtgcatcgcgta

SEQ ID NO: 216188 - DNA, 75 bp, synthetic construct
  source 1..75: mol_type = other DNA
tcaacgggaattatcttttcttttcttaaagaaattaaaagatgcgggtctgttaggtgaacttatatgcgagga

SEQ ID NO: 216189 - DNA, 75 bp, synthetic construct
  source 1..75: mol_type = other DNA
gttactgccgcagcccgtgaactcagcctgtatgaatcacagctctacaactggcgcagtaaacagcaaaatcag

SEQ ID NO: 216190 - DNA, 75 bp, synthetic construct
  source 1..75: mol_type = other DNA
ggcaacttgctgaaggacgaaaacgcagcgaggagattaaccgcctgaatcatcaggtgcgggttgaaaaaatcc

SEQ ID NO: 216191 - DNA, 75 bp, synthetic construct
  source 1..75: mol_type = other DNA
gcgaaatcgctgcaggcgatggatttcagcaccatcactgataaaacctcatataacgccattgaatggcccgtc

SEQ ID NO: 216192 - DNA, 75 bp, synthetic construct
  source 1..75: mol_type = other DNA
tgtcagcatccggcagaggttattgccgggttaacaggatatgaggcatttatggagttacttcacaaggggtga

SEQ ID NO: 216193 - DNA, 75 bp, synthetic construct
  source 1..75: mol_type = other DNA
gtaaccgctggttcagcgtgatggtggggccgtctgtgcgcgtgaatgaatggttcagcgcgtatgcgatggcgg

SEQ ID NO: 216194 - DNA, 75 bp, synthetic construct
  source 1..75: mol_type = other DNA
cagcggggatgtgtatacagtctgcagaatgacttatccggcgtgccggattgtttcagctacagtcttgcgacg

SEQ ID NO: 216195 - DNA, 75 bp, synthetic construct
  source 1..75: mol_type = other DNA
atgaaaaacattgcggcagccggggttcttgaacgtattcgcagacttgcaccacaggcgtcggttccaccgtac

SEQ ID NO: 216196 - DNA, 75 bp, synthetic construct
  source 1..75: mol_type = other DNA
accaatatataaaaatcaatgaaaaactggacgaggaagggaaaggaatacatcttagtgatgcctggataggag

SEQ ID NO: 216197 - DNA, 75 bp, synthetic construct
  source 1..75: mol_type = other DNA
tttattatatttttcaaaaaacatgcatagttcgataaaggcgtttgcaattaacttccatccattattatctga

SEQ ID NO: 216198 - DNA, 75 bp, synthetic construct
  source 1..75: mol_type = other DNA
aatttgcattgaaatacgcgattacagagacagaatggaacgcccccaaatacatagtcgatggaatccgctggt

SEQ ID NO: 216199 - DNA, 75 bp, synthetic construct
  source 1..75: mol_type = other DNA
taaacaagtttcagctattcttcctgtgctgcaacgagaaggtcgcttaaaatatagcgcgtctttaggaaagta

SEQ ID NO: 216200 - DNA, 75 bp, synthetic construct
  source 1..75: mol_type = other DNA
ccttaatggcgatggagcaggcacgagagatgggcttcaaacgctgctatctggaaacgaccgcttttttaaagg

SEQ ID NO: 216201 - DNA, 75 bp, synthetic construct
  source 1..75: mol_type = other DNA
tttcggaaagagataagggtatctatgatgcgcttaataaaggtgtacatttagcaacaggtgatattattggat

SEQ ID NO: 216202 - DNA, 75 bp, synthetic construct
  source 1..75: mol_type = other DNA
tccatcacttcaaactggtagagcgcaaagaaggctatataccgggatcggcagaaagggagtgtaacgagtatc

SEQ ID NO: 216203 - DNA, 75 bp, synthetic construct
  source 1..75: mol_type = other DNA
tcgcatctcgcggattttccggctctgctggataaccccttaattcgtaatgggatcatgcagtctcagcacttt

SEQ ID NO: 216204 - DNA, 75 bp, synthetic construct
  source 1..75: mol_type = other DNA
cgcaagcggggcaatcgcggcagttaatctgcgtgccaattattggcggaccgtccggtaaactcgaaagccgct

SEQ ID NO: 216205 - DNA, 75 bp, synthetic construct
  source 1..75: mol_type = other DNA
aaacacgcgatgatgatcatcaatttttaagtaaaattaaagagttgcgacagaagacaccgaaaaaagaagatt

SEQ ID NO: 216206 - DNA, 75 bp, synthetic construct
  source 1..75: mol_type = other DNA
gcgtactgaaggctatatacccggatcggcagaaagggaatgcaacgagtaccagctattattcaagccgtacaa

SEQ ID NO: 216207 - DNA, 75 bp, synthetic construct
  source 1..75: mol_type = other DNA
ggcaaaaactcacagttgggatggtgcagggttggcaggggaacaatcgacaagcgagccaggctatcaaaaaac

SEQ ID NO: 216208 - DNA, 75 bp, synthetic construct
  source 1..75: mol_type = other DNA
cattgggggagtttataactcttaaacgtgggtatgaccttccaaaatcaaaacgtaatgatggcaatattccgg

SEQ ID NO: 216209 - DNA, 75 bp, synthetic construct
  source 1..75: mol_type = other DNA
ctcacctcgcaagtcacgaaacacgaggctcactcatggaagtattgctgagttcgacaataacaatcgggcagg

SEQ ID NO: 216210 - DNA, 75 bp, synthetic construct
  source 1..75: mol_type = other DNA
tgccgggtatatttcaccgcaacaagggtatacaccacttgaaaacataaaatgcgacatcacaagttctgagtt

SEQ ID NO: 216211 - DNA, 75 bp, synthetic construct
  source 1..75: mol_type = other DNA
ttgattccgtgaaaggagggatgaatcttaatggattacctggttctactaatgtaatagatctacgtggaaaag

SEQ ID NO: 216212 - DNA, 75 bp, synthetic construct
  source 1..75: mol_type = other DNA
atatgaattactcaatcacctgcatcagcacaatattccgctggcggtggcgtcatcttcgccgcagcggcagat

SEQ ID NO: 216213 - DNA, 75 bp, synthetic construct
  source 1..75: mol_type = other DNA
ccggcaggtgcatgatacgatagtggaagaagtcgcccggcgaatcaggctcaaacctgcgccattgccgggggt

SEQ ID NO: 216214 - DNA, 75 bp, synthetic construct
  source 1..75: mol_type = other DNA
accactgcgaccatcgcggcctgccgctggcgcttgtcagcacggaaggggcgaacagaatggtgcgcagaatac

SEQ ID NO: 216215 - DNA, 75 bp, synthetic construct
  source 1..75: mol_type = other DNA
ggcagcttcgctggtgccgtcgtcgactggtatgatttttactctatggcatcaccgccgcactggtgtttaatc

SEQ ID NO: 216216 - DNA, 75 bp, synthetic construct
  source 1..75: mol_type = other DNA
gtattgcatttagttactacgattataaagcttataacttcaatattgaaaaaacagactttgttgtcatccata

SEQ ID NO: 216217 - DNA, 75 bp, synthetic construct
  source 1..75: mol_type = other DNA
cacagtgtggatgtgtaaaaacagcagtctctgcagcgaagacttttgatccgttcagcggtggggatgttaagt

SEQ ID NO: 216218 - DNA, 75 bp, synthetic construct
  source 1..75: mol_type = other DNA
gttgttgctgattattgctgcattttacacgaatctctatcttccaagaacaatcccgtttatctacttctcttt

SEQ ID NO: 216219 - DNA, 75 bp, synthetic construct
  source 1..75: mol_type = other DNA
cttgagtccaacccggaaagacacaacaaaacgccactggctgcggccattggtaagagggtgtacaagagatta

SEQ ID NO: 216220 - DNA, 75 bp, synthetic construct
  source 1..75: mol_type = other DNA
tcctggaggatgccaggaagaagcttaacagggaagcgagaaggccacggcaaagccgtttttccataggctccg

SEQ ID NO: 216221 - DNA, 75 bp, synthetic construct
  source 1..75: mol_type = other DNA
agactattatcaaatacactcaggaaaaaatctctattttacaggaaaaaatggacatgtagatattcagagctc

SEQ ID NO: 216222 - DNA, 75 bp, synthetic construct
  source 1..75: mol_type = other DNA
cactgattggtcgtaccggtgttgatgtgggtaaatccttctccggtaaggactggaaagtcacagcccgtgctg

SEQ ID NO: 216223 - DNA, 75 bp, synthetic construct
  source 1..75: mol_type = other DNA
aaatcaaaaaagctctgcaagaggcacctcgcaatcaatacaccgctgagctgcatctgcaaatgatcaaatatg

SEQ ID NO: 216224 - DNA, 75 bp, synthetic construct
  source 1..75: mol_type = other DNA
ataacaatcttgttgcatctgacactaggtggtctgcaaaactggatctgattgatggtgcgtatatcttgtatg

SEQ ID NO: 216225 - DNA, 75 bp, synthetic construct
  source 1..75: mol_type = other DNA
caatgttacattaacaggtgaaggggcaacgttgtccgcaggtaattataccatgtttaatggtataataaatgc

SEQ ID NO: 216226 - DNA, 75 bp, synthetic construct
  source 1..75: mol_type = other DNA
tgataacaatgatggaacaggtaataccattgaatctgtagcaggagaaagcactcctgataatgataaggatat

SEQ ID NO: 216227 - DNA, 75 bp, synthetic construct
  source 1..75: mol_type = other DNA
ccgcagtcagcatcgacaacgtgaaacctggtgtcactacagactggaaagaaaccgcagatggcgtctataagg

SEQ ID NO: 216228 - DNA, 75 bp, synthetic construct
  source 1..75: mol_type = other DNA
ctctttttcagccagcatactctccaccgtactgacgagcgtacgcagattaacaacggcttgggttggcgtcat

SEQ ID NO: 216229 - DNA, 75 bp, synthetic construct
  source 1..75: mol_type = other DNA
cggctatttatacgcaagcatgaccgctacaaaagccggggtttatcaagtgacggcaaccctcgacaatggcga

SEQ ID NO: 216230 - DNA, 75 bp, synthetic construct
  source 1..75: mol_type = other DNA
accggaaaggtaacgggcgaatctgccggggtaaataatccgtttcagactatcgagcgtcatgatgttggcgtt

SEQ ID NO: 216231 - DNA, 75 bp, synthetic construct
  source 1..75: mol_type = other DNA
ttgctgaccaacttgtgacattcagtgcagagccatcaagttttaacatggtcattagtcaggatacggtttcta

SEQ ID NO: 216232 - DNA, 75 bp, synthetic construct
  source 1..75: mol_type = other DNA
ggccaatggcgaagcgcatgtcacgctcaaaggtaaaaaagcgggcacgcatacggttaccgcaacgctgggtaa

SEQ ID NO: 216233 - DNA, 75 bp, synthetic construct
  source 1..75: mol_type = other DNA
atccggcaacagcatgtgagggaatggaaacgagaggttctgaaaaaacagaatcgctccacgcacacatggaat

SEQ ID NO: 216234 - DNA, 75 bp, synthetic construct
  source 1..75: mol_type = other DNA
gctattcataatatttccagaaaaggtacattacggagaaaacttggaatacctaatcccatcaacttctttaga

SEQ ID NO: 216235 - DNA, 75 bp, synthetic construct
  source 1..75: mol_type = other DNA
tgatttttttgtcagttttaaccttgattccagcgcgtgcacgcttgagctacagaagttcatttttgatgagat

SEQ ID NO: 216236 - DNA, 75 bp, synthetic construct
  source 1..75: mol_type = other DNA
ctggctaataatggtgccagcgacaacaaaactgtgcattttattggcgacacagcggcggcaaaaattatcgag

SEQ ID NO: 216237 - DNA, 75 bp, synthetic construct
  source 1..75: mol_type = other DNA
gcctccctgaccggtacgttagcgggcacgcatatgatcacggctcgtctggctaacagcaatgtcagcgatgct

SEQ ID NO: 216238 - DNA, 75 bp, synthetic construct
  source 1..75: mol_type = other DNA
ataccgtcacgtttgcggtattaagcggatcggcaacttcctttaacaatcaaaacaccgcaaaaacggatgtta

SEQ ID NO: 216239 - DNA, 75 bp, synthetic construct
  source 1..75: mol_type = other DNA
taagggcacggttttgggtgttcatacagccgaagccatactgcttaacggcaacagagatacgaaaatcgtcaa

SEQ ID NO: 216240 - DNA, 75 bp, synthetic construct
  source 1..75: mol_type = other DNA
cgagcattaccgggtgatctggccgcgggacaagaagaaaccgcttatcgccaactcatgggttgcggtagtgac

SEQ ID NO: 216241 - DNA, 75 bp, synthetic construct
  source 1..75: mol_type = other DNA
ccgcttatcgccaactcatgggttgcggtgtataccgtacaaggatgtgggaaaattcttttaaagaatggcgaa

SEQ ID NO: 216242 - DNA, 75 bp, synthetic construct
  source 1..75: mol_type = other DNA
ctgaagtttggacctgattcgccggtaaagggaaatgaaaaccagtggcagttatcaacaggaacggaaacgtca

SEQ ID NO: 216243 - DNA, 75 bp, synthetic construct
  source 1..75: mol_type = other DNA
gggtgatcgctgagatatttcagggaggctttgtagtcttccagcaacagttcagcaaagtccatttcgaagccg

SEQ ID NO: 216244 - DNA, 75 bp, synthetic construct
  source 1..75: mol_type = other DNA
atgccccggttttcaaaccggggcaaagattattataacaccctgttatcaggtatgtttaaagctgttctgctg

SEQ ID NO: 216245 - DNA, 75 bp, synthetic construct
  source 1..75: mol_type = other DNA
ttttacgaaaaccgctcttcggttacggaagtggagaaactcgacatgccgcagagttttggctggcttgtcggc

SEQ ID NO: 216246 - DNA, 75 bp, synthetic construct
  source 1..75: mol_type = other DNA
atgaccaggctacaggcaacagtgactgatggaaacggcaacccagtagaaggtataaaagttaatttccgtgga

SEQ ID NO: 216247 - DNA, 75 bp, synthetic construct
  source 1..75: mol_type = other DNA
cgatcccggagaggcattctggcaatggctggtcacaggatgccgctcaggaagtctgattccgaacaaacctga

SEQ ID NO: 216248 - DNA, 75 bp, synthetic construct
  source 1..75: mol_type = other DNA
aaaatgacacccgttttgccgtcgattttacctggcaacctggaagcgcgatgcagaaacagcttgacccgaatg

SEQ ID NO: 216249 - DNA, 75 bp, synthetic construct
  source 1..75: mol_type = other DNA
tttattggcagtacggaaaacgatgtgggaccatctccaggctcttattccagaactcatgcaatggataacctg

SEQ ID NO: 216250 - DNA, 75 bp, synthetic construct
  source 1..75: mol_type = other DNA
tacggaataagaaaaagcatctaaataaatttaggctatttattaaaagcaaaatatttcaaacatccttaataa

SEQ ID NO: 216251 - DNA, 75 bp, synthetic construct
  source 1..75: mol_type = other DNA
tgtggcgattaatcagggatatattgccatgaagtgtaataaagagttaagccctgaattcgtgttacagtggtg

SEQ ID NO: 216252 - DNA, 75 bp, synthetic construct
  source 1..75: mol_type = other DNA
cgtcatcaccgccacagtcgttgataataatggctttccggtgaaaggtgtgactgtgaacttcaccagcaacgc

SEQ ID NO: 216253 - DNA, 75 bp, synthetic construct
  source 1..75: mol_type = other DNA
gcacgttagcgggcacgcatatgatcacggctcgtctggctaacagcaatgtcagcgatacacagccaatgacgt

SEQ ID NO: 216254 - DNA, 75 bp, synthetic construct
  source 1..75: mol_type = other DNA
gtcgctgacggcaatgacagtgccacaatgaccgcgacagttcgggatgcaaaaggcaacctgctcaatgacgtc

SEQ ID NO: 216255 - DNA, 75 bp, synthetic construct
  source 1..75: mol_type = other DNA
gttagcgtgaacaattatggtgtcagtgatacgaaacaggtgactttgattgccgatgctggtaccgcaaaacta

SEQ ID NO: 216256 - DNA, 75 bp, synthetic construct
  source 1..75: mol_type = other DNA
aactaactcttcaggtcaggctccagtcgttctgaccagcaataaagtcggtacatatacggtgactgcatcgtt

SEQ ID NO: 216257 - DNA, 75 bp, synthetic construct
  source 1..75: mol_type = other DNA
gtaaggctaccgtcacttataccaatacccgctcctcgatagaatcaggagcgagaccggataccgttgaggcca

SEQ ID NO: 216258 - DNA, 75 bp, synthetic construct
  source 1..75: mol_type = other DNA
tgttgataattctgcgcagccggaacagccggaacagccggaacagccggaaactgtgacagagaagaaggctaa

SEQ ID NO: 216259 - DNA, 75 bp, synthetic construct
  source 1..75: mol_type = other DNA
ggcacgcatcatgagcggtaccggctctgccagtggtggtttcagtgacaactacacgcacgttcaggtcggggt

SEQ ID NO: 216260 - DNA, 75 bp, synthetic construct
  source 1..75: mol_type = other DNA
tggtgacactacagcatatattgatttgcatgctggtaaaaatattaccggtgatggttttggcttccgccagaa

SEQ ID NO: 216261 - DNA, 75 bp, synthetic construct
  source 1..75: mol_type = other DNA
tctgacggcaacagtgaaagatccttttgataacgcagtaaaagatctaccggtcaccttcagtaccaacccggc

SEQ ID NO: 216262 - DNA, 75 bp, synthetic construct
  source 1..75: mol_type = other DNA
agacgtagcagttaaagctcacgttaacgaccagtttggcaacccggttgcgcatcaacccgtgacattcagtgc

SEQ ID NO: 216263 - DNA, 75 bp, synthetic construct
  source 1..75: mol_type = other DNA
ggatgaagattttagcctgaagaactcccagttcgattttctccatccgtggtatgaaacgcctgataatctctt

SEQ ID NO: 216264 - DNA, 75 bp, synthetic construct
  source 1..75: mol_type = other DNA
gcaattgactacagtaaaaatttctcaggcgagtacaaagccactgttacaggcggcggagagggtatcgcaacg

SEQ ID NO: 216265 - DNA, 75 bp, synthetic construct
  source 1..75: mol_type = other DNA
ttactgggtcgtgcatattccctatttggcacaaaaaccacaggctattctgattgcgctgggttgggcggtgaa

SEQ ID NO: 216266 - DNA, 75 bp, synthetic construct
  source 1..75: mol_type = other DNA
agtgctattaggtgatgctgacagcaaatatattccagccagtttattgtcgtaccaacgcttctggtacgcccg

SEQ ID NO: 216267 - DNA, 75 bp, synthetic construct
  source 1..75: mol_type = other DNA
acccggactggcttatctcgccgcgtggacctactgggtggtgcatattccctatctggcacaaaaaccccaggc

SEQ ID NO: 216268 - DNA, 75 bp, synthetic construct
  source 1..75: mol_type = other DNA
taatatgttgaaagagttcaattttttaatgaatgccttgagtatcgtctctaacgagaaaaaggaacttattga

SEQ ID NO: 216269 - DNA, 75 bp, synthetic construct
  source 1..75: mol_type = other DNA
gatcaaacgactggcatcttctctgaaagcggtgaaaccggacagtagcgtggtgcgtgcggcgcaggactggct

SEQ ID NO: 216270 - DNA, 75 bp, synthetic construct
  source 1..75: mol_type = other DNA
tgacgctggtgctgttcattttctttatgtgggttgcttcccgcggtatgaaatcgttaaaggttgttggttcgg

SEQ ID NO: 216271 - DNA, 75 bp, synthetic construct
  source 1..75: mol_type = other DNA
tgatatatatgatcgttgctcctcacgagcccaagatattaaagaactcaaaacccatattcttaaaatttttga

SEQ ID NO: 216272 - DNA, 75 bp, synthetic construct
  source 1..75: mol_type = other DNA
gaactttaagaaattgcaaagaattgattgtagtatcagatagtagattaaatggtggtatgaaaatggattgtg

SEQ ID NO: 216273 - DNA, 75 bp, synthetic construct
  source 1..75: mol_type = other DNA
ctgaatcgctgaaaaaatttcgtcatgaagggaagaagattggctgcatagtgatgaacgccaatccctttacta

SEQ ID NO: 216274 - DNA, 75 bp, synthetic construct
  source 1..75: mol_type = other DNA
ggttgttttttcatgggtgtttatctttgcgctctatttcacaccttatgcgctaattgttggtcagttaggctc

SEQ ID NO: 216275 - DNA, 75 bp, synthetic construct
  source 1..75: mol_type = other DNA
tgatattcccgctgctggcgcgtaaagcgaatagtgtcaacgccaagattattggccgtttttcgccatttttaa

SEQ ID NO: 216276 - DNA, 75 bp, synthetic construct
  source 1..75: mol_type = other DNA
gttatttgtgggtgttcgtggcgttcattgcagtagttcgtctggcgcaaaaatataaaccggaatatgttttta

SEQ ID NO: 216277 - DNA, 75 bp, synthetic construct
  source 1..75: mol_type = other DNA
accattgaaaatggaaaactgacaggcactggctcagacaccaccgatataaaaaataaggacttaatatttact

SEQ ID NO: 216278 - DNA, 75 bp, synthetic construct
  source 1..75: mol_type = other DNA
gccggtctgggctaccagttcgacctgctggctaatggcgaaaccgtattgcgggatgcatctggtgaaaaacgc

SEQ ID NO: 216279 - DNA, 75 bp, synthetic construct
  source 1..75: mol_type = other DNA
ttccactacgcctgccagcgaattactggaccaactttcacacatcgacatgaataacgcaccgttgctgattgc

SEQ ID NO: 216280 - DNA, 75 bp, synthetic construct
  source 1..75: mol_type = other DNA
tgtggaggaattgccgggaatattattaagtgcgtcgctatcagtaaatcagttcgcggagaaggactggcactg

SEQ ID NO: 216281 - DNA, 75 bp, synthetic construct
  source 1..75: mol_type = other DNA
catctgtttttagtcaaagaagattcttcgcgctttccctatgaagaccggctggatctggtgttgaaaggcacc

SEQ ID NO: 216282 - DNA, 75 bp, synthetic construct
  source 1..75: mol_type = other DNA
gctatcctgacaaagacaatgaattcgaaccctcaatatatctgaatgatgcatcttatctactgactgacgatt

SEQ ID NO: 216283 - DNA, 75 bp, synthetic construct
  source 1..75: mol_type = other DNA
gactgttaatgcgcagagtacagctaggaatgtcacaagatgacctggcaaaattgactggtgtctcgcgtgtaa

SEQ ID NO: 216284 - DNA, 75 bp, synthetic construct
  source 1..75: mol_type = other DNA
tcaactcaaaacaggtgctgttaacggggctacagcgcagacgctcactatcaacaagaatgaggttaactcaac

SEQ ID NO: 216285 - DNA, 75 bp, synthetic construct
  source 1..75: mol_type = other DNA
ctaatacttcaggctctcgcatcagagtcaagtaaaacctgtttcagcatggtccggtttggaaatgtgctaggt

SEQ ID NO: 216286 - DNA, 75 bp, synthetic construct
  source 1..75: mol_type = other DNA
tcggggcgaatccgcatgatctggcacgtcccaatatcactgccgccaccacacttgccagcgccgccgacatcg

SEQ ID NO: 216287 - DNA, 75 bp, synthetic construct
  source 1..75: mol_type = other DNA
tgctaccaacagagcggccagcccgttattaatagcccatgtttgtggaacacagagcgatccacaacagcgtag

SEQ ID NO: 216288 - DNA, 75 bp, synthetic construct
  source 1..75: mol_type = other DNA
aaacgaaaggaattctcttttttgatgtgaatgaaacccttctggatactgcttcgctcaaagagtatgcaggaa

SEQ ID NO: 216289 - DNA, 75 bp, synthetic construct
  source 1..75: mol_type = other DNA
aggcacttgaacgttacggggttaattataaaggagaaaagaaacttatcgcattcagagccggctctggtgtgg

SEQ ID NO: 216290 - DNA, 75 bp, synthetic construct
  source 1..75: mol_type = other DNA
tgcctgaaggtcaggtaataatcagagaacccatagcggttaaagcacacgtcgacgaccagtttggcaatccag

SEQ ID NO: 216291 - DNA, 75 bp, synthetic construct
  source 1..75: mol_type = other DNA
tgatcaaagtactgctgccctgaccctcagtgtgccttcaggtgatatcaccgtcaccaacacagctccgcaaca

SEQ ID NO: 216292 - DNA, 75 bp, synthetic construct
  source 1..75: mol_type = other DNA
catcgaaagcggaaatcattgggaatggcgtggatgagacgactctgacagcaacagtgaaagatccttttgata

SEQ ID NO: 216293 - DNA, 75 bp, synthetic construct
  source 1..75: mol_type = other DNA
ataaccaatacgtcaaccaaaaaatccattttatccctgaataatactgctgactatatctatcacggcaacata

SEQ ID NO: 216294 - DNA, 75 bp, synthetic construct
  source 1..75: mol_type = other DNA
caaaaaccacgcagcatacagtaaatggaaccagacaaccattgacaacctgaagaacaagtattcttacaacgt

SEQ ID NO: 216295 - DNA, 75 bp, synthetic construct
  source 1..75: mol_type = other DNA
caacaaacagtgacctatgtgccgaacgtcgcgaatgctgaaatcacgctggcagcctcgaaggatccggtgatt

SEQ ID NO: 216296 - DNA, 75 bp, synthetic construct
  source 1..75: mol_type = other DNA
ggtaactcaacttgtgttccctatgactgtggcagcacaaggtgtggtaaacgccgcaacccaacaaccagttcc

SEQ ID NO: 216297 - DNA, 75 bp, synthetic construct
  source 1..75: mol_type = other DNA
gcgggtacgcatacggttaccgcaacgctgggtaataacaataccagtgattcgcagccggtaacgtttgtggcg

SEQ ID NO: 216298 - DNA, 75 bp, synthetic construct
  source 1..75: mol_type = other DNA
gcccgataccagcaacgcgcaggtcacgctgaatatcccggctcaacaggtggtgacgaataacagcgacagcgt

SEQ ID NO: 216299 - DNA, 75 bp, synthetic construct
  source 1..75: mol_type = other DNA
tgcgtctacggcacatctcacctcgctttataccctttatgacacacaattggcaggcgaggataccgctctgta

SEQ ID NO: 216300 - DNA, 75 bp, synthetic construct
  source 1..75: mol_type = other DNA
ctctttttcagtcagcatactctccatcgtactgacgagcgtacgcagattaacaacggcttgggttggcgtcat

SEQ ID NO: 216301 - DNA, 75 bp, synthetic construct
  source 1..75: mol_type = other DNA
ggagatatgggaaattacatgaacgaagctgatttttattcaatggtatattggtcatctaattctgcaggcgca

SEQ ID NO: 216302 - DNA, 75 bp, synthetic construct
  source 1..75: mol_type = other DNA
gctctttatgtggcgttgaaatattatcccgatggatccattctgtttataatattatttcgccttcactctata

SEQ ID NO: 216303 - DNA, 75 bp, synthetic construct
  source 1..75: mol_type = other DNA
aatgaaacctaaagccaccggtaaaaatgcaatcgctttaggaggtaacgccagagcagaaaaagataatgccat

SEQ ID NO: 216304 - DNA, 75 bp, synthetic construct
  source 1..75: mol_type = other DNA
gacatttatgacactgagcttgaaatcaaaaggagtgagaatgaacttatgtattatgaactttatctttatttt

SEQ ID NO: 216305 - DNA, 75 bp, synthetic construct
  source 1..75: mol_type = other DNA
catcggcctataactccaggaagtacaaccagaaggacacggcttttgtgatcaccgaggatttcgagttcgcca

SEQ ID NO: 216306 - DNA, 75 bp, synthetic construct
  source 1..75: mol_type = other DNA
gagccaccgactgaacccgctgcgcccggcgagccaaagccctcaccgctggtgcatacggcaaggtcgctatgt

SEQ ID NO: 216307 - DNA, 75 bp, synthetic construct
  source 1..75: mol_type = other DNA
tccaacttttaacgatcgcttcatcgtggaagatggaaatacaggattcttctataagatgcgaaactgcgagaa

SEQ ID NO: 216308 - DNA, 75 bp, synthetic construct
  source 1..75: mol_type = other DNA
ttgcattattttccttacctgtatttgcagaagaagatctggggccaggcaaatatgtttgtgacattaggattt

SEQ ID NO: 216309 - DNA, 75 bp, synthetic construct
  source 1..75: mol_type = other DNA
cagcggcccggatcagaagtggcggcctgctgctgccggtattgctgcatatggaagcaactgtgctgggcttac

SEQ ID NO: 216310 - DNA, 75 bp, synthetic construct
  source 1..75: mol_type = other DNA
cgctatcattctactaattaccatattggctagtgttgtaattatattaaataaaccaattcaatatcgttataa

SEQ ID NO: 216311 - DNA, 75 bp, synthetic construct
  source 1..75: mol_type = other DNA
aacggcaacaggagcagcatattcaacaatgctaatagggatagttagtggcgttgcgattctttatactaagaa

SEQ ID NO: 216312 - DNA, 75 bp, synthetic construct
  source 1..75: mol_type = other DNA
ggcgtattctgcggttcctgttgggagtgaatggcacagacatcctcaacgaccagcgatggagtatctcgatcc

SEQ ID NO: 216313 - DNA, 75 bp, synthetic construct
  source 1..75: mol_type = other DNA
agaacttcaccatgggcaatcatgaagtggatacccggggtctaccgtacggtatttacgatgtggaagttgagg

SEQ ID NO: 216314 - DNA, 75 bp, synthetic construct
  source 1..75: mol_type = other DNA
atgaaatgtatttctgtgccactcacgaaacaggcaatggaacgtcttgattatgattgctgcaagccaggcgat

SEQ ID NO: 216315 - DNA, 75 bp, synthetic construct
  source 1..75: mol_type = other DNA
ctttggttggtaatgtttataatatcagaatgaatctttatcaggttaagtctgggttattaaaattaatggaga

SEQ ID NO: 216316 - DNA, 75 bp, synthetic construct
  source 1..75: mol_type = other DNA
gccagcggcatgcagcccgatatgttgctaaacgtccctgaatatccgtcagataatcgtattcgcttacagcaa

SEQ ID NO: 216317 - DNA, 75 bp, synthetic construct
  source 1..75: mol_type = other DNA
agacccgacagttgactatcgccgtagaccatctcgaccgtccggtgattgtgctcgacccacaacgtcatatcg

SEQ ID NO: 216318 - DNA, 75 bp, synthetic construct
  source 1..75: mol_type = other DNA
ggctggcagttcttcagcccggcgatgaacgaaatggtaaaagagcgtttggttttaggcgcagcgctgaaagaa

SEQ ID NO: 216319 - DNA, 75 bp, synthetic construct
  source 1..75: mol_type = other DNA
ccactgcattgggcgtcgtcctctcatgggacagaagtaaagaatgcacaaagctgggctgttaccattcgccag

SEQ ID NO: 216320 - DNA, 75 bp, synthetic construct
  source 1..75: mol_type = other DNA
aatgtttggctactgcatcagcgaagccagcggtatgcaacccgatacgctacttaacattcctgattacccgac

SEQ ID NO: 216321 - DNA, 75 bp, synthetic construct
  source 1..75: mol_type = other DNA
agcgttgaaatggcgcagaaagaacagacccggcagttgctcattgccgtagaccacctcgaccgacctgtgatt

SEQ ID NO: 216322 - DNA, 75 bp, synthetic construct
  source 1..75: mol_type = other DNA
ggttgtgtttaaggacggggagagtcggggagacccgcacgcagaatcaggacacacaggcgctagcaaaagaga

SEQ ID NO: 216323 - DNA, 75 bp, synthetic construct
  source 1..75: mol_type = other DNA
ttccattgatctgtttactcagtggttgtcacttttatcgagaaaggtttgcagaacgcgggtttttttataagg

SEQ ID NO: 216324 - DNA, 75 bp, synthetic construct
  source 1..75: mol_type = other DNA
atgaatcttgccctaagaaagattatatatgatccaattagttatattcatcctcaacgagtaagcttgaatatt

SEQ ID NO: 216325 - DNA, 75 bp, synthetic construct
  source 1..75: mol_type = other DNA
atccgcccaccttgccgggcgccggtgctgtgtggaaatccgcccaccttaccgggcgccggtgctgtgtggaaa

SEQ ID NO: 216326 - DNA, 75 bp, synthetic construct
  source 1..75: mol_type = other DNA
caggtttctccggtgggggagcccgggaaaattcctggatacactctgtcctcaccgtcattgcagtcggtgaca

SEQ ID NO: 216327 - DNA, 75 bp, synthetic construct
  source 1..75: mol_type = other DNA
atggaaaaaacagaaaacaaaccgattgtaattggtgctgatgctgctccgtttaagtttgagttgtctcaactg

SEQ ID NO: 216328 - DNA, 75 bp, synthetic construct
  source 1..75: mol_type = other DNA
gaggatgaggggcaggtcacgcagtggtactacgatgaagcagaccgcatcacgcaccggacggtgaacggcgac

SEQ ID NO: 216329 - DNA, 75 bp, synthetic construct
  source 1..75: mol_type = other DNA
gaagaagaggttgattattatgcgccggcgttccgctttgaagacgaagatgataatccgtggatcccttatcgc

SEQ ID NO: 216330 - DNA, 75 bp, synthetic construct
  source 1..75: mol_type = other DNA
tgtaacactggataatggtaattatcagctgtcaggctataaatggccccagtcatttggtgtcctgtttgctgt

SEQ ID NO: 216331 - DNA, 75 bp, synthetic construct
  source 1..75: mol_type = other DNA
ttatcctgatgcaagtgtacttgatatgggctgcggagcagggcatgccagctttgtcgcttgcgcagaacgtga

SEQ ID NO: 216332 - DNA, 75 bp, synthetic construct
  source 1..75: mol_type = other DNA
aagattcattacacattattccggttattcgtttttgtccaaaaaaacaattcttgttttgtttttcagtctaat

SEQ ID NO: 216333 - DNA, 75 bp, synthetic construct
  source 1..75: mol_type = other DNA
agcgcaccaccttcacgttctgcactgaacagcctgtcgtaacctgtgaacgcatccgcctgcaggataccccgg

SEQ ID NO: 216334 - DNA, 75 bp, synthetic construct
  source 1..75: mol_type = other DNA
ctcaatatatctaatacacccaataattatcgaattattaagccaaaaatattttgttgttttttggcaggatgg

SEQ ID NO: 216335 - DNA, 75 bp, synthetic construct
  source 1..75: mol_type = other DNA
tgacatggggacaatttaaccattatctggagttgcagggaaaaccaagaacaaaaatatatatgtggtacaaat

SEQ ID NO: 216336 - DNA, 75 bp, synthetic construct
  source 1..75: mol_type = other DNA
tccctcatctgaccgttttacagaactgtaccctggcaccgatttgggtacgcaagatgcctaagaaagaggctg

SEQ ID NO: 216337 - DNA, 75 bp, synthetic construct
  source 1..75: mol_type = other DNA
attaaacatcaatagtggaaaatgggaatgttcaacacatagctcacatgattttcatagagtaattggaagatt

SEQ ID NO: 216338 - DNA, 75 bp, synthetic construct
  source 1..75: mol_type = other DNA
aagatattttgccatcaattctaaacacttagcctttccaggcccaggagaatctcacgccttctgttgcatcaa

SEQ ID NO: 216339 - DNA, 75 bp, synthetic construct
  source 1..75: mol_type = other DNA
taatacttataccattaaactcgcacgccgcaggtccatattacgggtatagtatactcttagttgcgtggacac

SEQ ID NO: 216340 - DNA, 75 bp, synthetic construct
  source 1..75: mol_type = other DNA
atgacaagccgcagccgtcaggcttcctacacggaacatatttgcgcattcctgcgtgagcttgttaagcattct

SEQ ID NO: 216341 - DNA, 75 bp, synthetic construct
  source 1..75: mol_type = other DNA
atgatactttggtctatgaaaaaagaaaccgatatccgtcggggaaggcattgtgttttcctgaggcatgttcac

SEQ ID NO: 216342 - DNA, 75 bp, synthetic construct
  source 1..75: mol_type = other DNA
tatcggcctcaattccagagtgattgcggtcgcatctacaatccaatctaccagatggacgatggcagtactaca

SEQ ID NO: 216343 - DNA, 75 bp, synthetic construct
  source 1..75: mol_type = other DNA
gccgatgctgtttcctggcgtgcgccatatcaaacatcgtccggtttacgtaaaaagatcaatcagggcgcggtg

SEQ ID NO: 216344 - DNA, 75 bp, synthetic construct
  source 1..75: mol_type = other DNA
aataaaatttactcactaaaatatagtagccttactggtgggcttatagctgtatcagagttaagtaaaaaagtt

SEQ ID NO: 216345 - DNA, 75 bp, synthetic construct
  source 1..75: mol_type = other DNA
atgatactttggtctctgaaaaaagaaaccgatatccgacgtggaaggcattgtgttttcctgaggcatgttcac

SEQ ID NO: 216346 - DNA, 75 bp, synthetic construct
  source 1..75: mol_type = other DNA
atgatactttggtctttgaaaaaagaaaccgatatccggcggggaaggcattgtgttttcctgaggcatgttcac

SEQ ID NO: 216347 - DNA, 75 bp, synthetic construct
  source 1..75: mol_type = other DNA
tggccgtggcggcaaacgtgccggtcgatcagatccagcgtcagtttatccagcagtcgaaaatttcctcgccgg

SEQ ID NO: 216348 - DNA, 75 bp, synthetic construct
  source 1..75: mol_type = other DNA
ttaaagagattggtaatccatcaaaggttattgacgtcggagataagaagatttttgtttacgataaaaacatta

SEQ ID NO: 216349 - DNA, 75 bp, synthetic construct
  source 1..75: mol_type = other DNA
agcactggcgaaatgccgtgcggaaaaccccgtgttttacgaagatgaagtggatattcatctcaacccgaaaat

SEQ ID NO: 216350 - DNA, 75 bp, synthetic construct
  source 1..75: mol_type = other DNA
atgttcactaacattgaaaatatttcaaaatcgaaacgcatctctggcgaagctttttttgtcactgatattcaa

SEQ ID NO: 216351 - DNA, 75 bp, synthetic construct
  source 1..75: mol_type = other DNA
tggagcaggcatttcgacgcgaacatgtcaaaaccggcataaagcttcaggactggtgccgtcagaacaatagta

SEQ ID NO: 216352 - DNA, 75 bp, synthetic construct
  source 1..75: mol_type = other DNA
ataaatcacccaagaaattcacttcctctattgttctactaattgctatattagctagcattgttattatattta

SEQ ID NO: 216353 - DNA, 75 bp, synthetic construct
  source 1..75: mol_type = other DNA
caattcgctggcgtatcgtgacaatcttccggtggctgaacaaggggtgcatttgtgggagatcgcccaggtgga

SEQ ID NO: 216354 - DNA, 75 bp, synthetic construct
  source 1..75: mol_type = other DNA
tcgatgaatgagcttatcgaagagtattacatcgagccaaaagagccgataacgggccaaattctgactatctat

SEQ ID NO: 216355 - DNA, 75 bp, synthetic construct
  source 1..75: mol_type = other DNA
acccactgcggcgcgtacggactcgctacagtgtaggggccaaaatatttctactgctctgggctgcaggagtgg

SEQ ID NO: 216356 - DNA, 75 bp, synthetic construct
  source 1..75: mol_type = other DNA
acaactgaccataaattacatttcattgctcaagatattcatcatgtttatcatgatggctccactatgaaagca

SEQ ID NO: 216357 - DNA, 75 bp, synthetic construct
  source 1..75: mol_type = other DNA
aaaaaagacggaagaaaacgctgacaaaagcgcagatcacgcgggttgtgcttatcctgcaacaattttcggaag

SEQ ID NO: 216358 - DNA, 75 bp, synthetic construct
  source 1..75: mol_type = other DNA
atcgggcggccctatctgccccgttcagccacggaacagcgtaaaagtgaactgcttgaacagcgtgccgagccg

SEQ ID NO: 216359 - DNA, 75 bp, synthetic construct
  source 1..75: mol_type = other DNA
cgcggcgtctggttgcgtgaaggtgagcagattgacagagaagggaatgttaccggaacgccacgtcattcaagg

SEQ ID NO: 216360 - DNA, 75 bp, synthetic construct
  source 1..75: mol_type = other DNA
agcgccgcgcagatgtgctgatgcagcgggccgaggattacgggaaacggctggttccgccaaaagtgcgttttc

SEQ ID NO: 216361 - DNA, 75 bp, synthetic construct
  source 1..75: mol_type = other DNA
aagaaatgataaaaattaataatattatgattcatatatacactgtattatatacatcaaattgtattatggata

SEQ ID NO: 216362 - DNA, 75 bp, synthetic construct
  source 1..75: mol_type = other DNA
caggagacgcgtttcagttggctggcgaaaggaggttactatagttatgataatggtgccgacactggagatatt

SEQ ID NO: 216363 - DNA, 75 bp, synthetic construct
  source 1..75: mol_type = other DNA
taaagcatacgaagatgttgtagttatgtacaaatcattatcagataatgaaaagcatgatataattaataagag

SEQ ID NO: 216364 - DNA, 75 bp, synthetic construct
  source 1..75: mol_type = other DNA
aacagcaggacaagagcatcacttagtgacctctagctctcgtgcagagattgcattagctgtgcgtgatgtctt

SEQ ID NO: 216365 - DNA, 75 bp, synthetic construct
  source 1..75: mol_type = other DNA
ttcaataaatgaatatcaagcctgtctggggtgtataaattcgcgcagatttagatattcattaggcactaaggt

SEQ ID NO: 216366 - DNA, 75 bp, synthetic construct
  source 1..75: mol_type = other DNA
tgcatttaacaatataagattttattttggcaaggttagcccattagactatacccatactgaatctatgaaata

SEQ ID NO: 216367 - DNA, 75 bp, synthetic construct
  source 1..75: mol_type = other DNA
agcccagatgggttatagcccatcattgatagctaatattcttgatcatagctcaaccagttctgtaatgagtta

SEQ ID NO: 216368 - DNA, 75 bp, synthetic construct
  source 1..75: mol_type = other DNA
gtatgctgcacaggattttacgtcggccatgcaggcgctggaaaccagctggaaaaaattctcccaccatcaact

SEQ ID NO: 216369 - DNA, 75 bp, synthetic construct
  source 1..75: mol_type = other DNA
aggatcgtgccaaacgcaaagcaaatgagaaaccggttattgacccacgcccgtgggcatcaatgacaccggcaa

SEQ ID NO: 216370 - DNA, 75 bp, synthetic construct
  source 1..75: mol_type = other DNA
ttctgattaaccttgccgggaacctgacagccaaagcccgccagtacggcgctaacatgagcgagtttgccagcc

SEQ ID NO: 216371 - DNA, 75 bp, synthetic construct
  source 1..75: mol_type = other DNA
aacagaagaaaaaaaataaaagattcccctacagcaaagatcgacatgcgatccaacctttatggagcaaatgtt

SEQ ID NO: 216372 - DNA, 75 bp, synthetic construct
  source 1..75: mol_type = other DNA
gaataagcaaaatattccagaatggctttcctgttttgagaataagaacaaatggccctgggactgcaggaagtc

SEQ ID NO: 216373 - DNA, 75 bp, synthetic construct
  source 1..75: mol_type = other DNA
atggttggtctgccttagaaagtatatttgaacattatcttgattatattattgataataataaaaccttatccc

SEQ ID NO: 216374 - DNA, 75 bp, synthetic construct
  source 1..75: mol_type = other DNA
aattttatacatgttaaaacgaccttggcttattttgctatgaattatagtgcaagctatacaaagaaaatgttt

SEQ ID NO: 216375 - DNA, 75 bp, synthetic construct
  source 1..75: mol_type = other DNA
cgacagcgagctgcccgagccggtcatcctgtgggtggcgaagcaagtccaggccgagccggcgagctgggcaaa

SEQ ID NO: 216376 - DNA, 75 bp, synthetic construct
  source 1..75: mol_type = other DNA
cgtccctggtttgatgaacaacatcggattctctcggcattacgcgctaacacaaaactacaaaatattttagag

SEQ ID NO: 216377 - DNA, 75 bp, synthetic construct
  source 1..75: mol_type = other DNA
atataagttatatttaaatagcctcggcacacccatatatgaatttgctccagttgaggaattaacgcaagatga

SEQ ID NO: 216378 - DNA, 75 bp, synthetic construct
  source 1..75: mol_type = other DNA
cccaccttgccgggcgccggtgctgtgtggaaattcgcccatcttcatgacaaaaatttgtcaaatgacaggctc

SEQ ID NO: 216379 - DNA, 75 bp, synthetic construct
  source 1..75: mol_type = other DNA
aatccgcccaccctttccgggcgccggagccgtgtgggaatccgcccaccttgccgggcgccggtgccgtgtggg

SEQ ID NO: 216380 - DNA, 75 bp, synthetic construct
  source 1..75: mol_type = other DNA
ctggtgatgaagctggcgcttgaaaaccgtgaatcttttggtgtgataatgctttcacagcaacatcatattctc

SEQ ID NO: 216381 - DNA, 75 bp, synthetic construct
  source 1..75: mol_type = other DNA
tatgcctgtaaggtggctgtaacttacaagggggagcgttctaactatatgggggattccggaacatgggatcgt

SEQ ID NO: 216382 - DNA, 75 bp, synthetic construct
  source 1..75: mol_type = other DNA
ttaaatagcctcggcacacccatatatgaatttgctccagttgaggaattaacgcaagatgacgtaagtgcatct

SEQ ID NO: 216383 - DNA, 75 bp, synthetic construct
  source 1..75: mol_type = other DNA
gtgctgtgtggaaatcggcccaccttgccgcgcaccggtgctgtgtgggaatcagcccaccttgccgggcgccgg

SEQ ID NO: 216384 - DNA, 75 bp, synthetic construct
  source 1..75: mol_type = other DNA
tcgaatctgttctcaacgaatcgcatgtttcgctgttcgcactgcgcaacgggatgccgatacactgggcgtcat

SEQ ID NO: 216385 - DNA, 75 bp, synthetic construct
  source 1..75: mol_type = other DNA
tagtcagcctgccggtaacggaaattaaaatcgataaaagttttgtcgatcgttgcctgagcgaaaaacgcatcc

SEQ ID NO: 216386 - DNA, 75 bp, synthetic construct
  source 1..75: mol_type = other DNA
agtgcaggatcaaggaaagatcgtttcaactctgccaagttcttctgttgggattccggcaaaaggaaacggtca

SEQ ID NO: 216387 - DNA, 75 bp, synthetic construct
  source 1..75: mol_type = other DNA
gccggtgccgtgtgggaatccgcccaccttgccgggcgccggtgctgtgtggaaattcgcccatcttcatgacaa

SEQ ID NO: 216388 - DNA, 75 bp, synthetic construct
  source 1..75: mol_type = other DNA
ccgtgtggaaatccgcccaccttgccgggcgccggtgccgtgtggaatccgcccaccttgccgggcgccggtgcc

SEQ ID NO: 216389 - DNA, 75 bp, synthetic construct
  source 1..75: mol_type = other DNA
ttttttaccgatcaatttattgctgaatttagtccgcaggaatttgtggatgattgtgagcaatatttaattaat

SEQ ID NO: 216390 - DNA, 75 bp, synthetic construct
  source 1..75: mol_type = other DNA
tgctgacagttctcgtccaggcgtaggtgatgagttggtcacccgaatcgtaccgcttgagaacgttcctgctcg

SEQ ID NO: 216391 - DNA, 75 bp, synthetic construct
  source 1..75: mol_type = other DNA
tctgcttcgccaaatgatggatggcggcagcgtcggcaatgtcgtgcattatgaaccctccaacgttcttattct

SEQ ID NO: 216392 - DNA, 75 bp, synthetic construct
  source 1..75: mol_type = other DNA
gcgcgctaaacgcaacctgatggtatttatccgtccgacgattatccgtgacgatgatgtttatcgctcactgtc

SEQ ID NO: 216393 - DNA, 75 bp, synthetic construct
  source 1..75: mol_type = other DNA
gaactgacgtatgaagagcggagcagtgacgggaaatggagtaagccgggtcgcggtgccaacgaagcttttgac

SEQ ID NO: 216394 - DNA, 75 bp, synthetic construct
  source 1..75: mol_type = other DNA
agaattacccgcctattattatattcctggcgcgaaacagttgatggattacgacattaagcttggatataaatc

SEQ ID NO: 216395 - DNA, 75 bp, synthetic construct
  source 1..75: mol_type = other DNA
atgttgaagagagcgaggaaggaaatacccgggtctattacctgaaatatgccaaggccacgaatctggtggaag

SEQ ID NO: 216396 - DNA, 75 bp, synthetic construct
  source 1..75: mol_type = other DNA
tcaggccctttaaatctctatatacctaccagtttcaaagataagtatcttgaagtagagtcatattttgtcgac

SEQ ID NO: 216397 - DNA, 75 bp, synthetic construct
  source 1..75: mol_type = other DNA
atgagcttgataaactctcctgcaaatggtgttgtgatcaaaagaataatttctgatggattgaaagaaatagtt

SEQ ID NO: 216398 - DNA, 75 bp, synthetic construct
  source 1..75: mol_type = other DNA
tgttttttaccgatcaatttattgctgaatttagtccgcaggaatttgtggataattgtgagcaatatttaatta

SEQ ID NO: 216399 - DNA, 75 bp, synthetic construct
  source 1..75: mol_type = other DNA
tacccgggtttattacctgaaatatgctaaagccacgaatctggtggaagtgctaaccggtgtttccgaaaagct

SEQ ID NO: 216400 - DNA, 75 bp, synthetic construct
  source 1..75: mol_type = other DNA
ctctgattttatcatgaagggtggaaaaacctataaagggcataaaaaagtatctgcaggtggtgatacccctta

SEQ ID NO: 216401 - DNA, 75 bp, synthetic construct
  source 1..75: mol_type = other DNA
tagaagttaataacttaggtatcgctggtataaactcgaaggagtactatgaatatattattgagaaagagctga

SEQ ID NO: 216402 - DNA, 75 bp, synthetic construct
  source 1..75: mol_type = other DNA
aaccgtataaagttactttggcgtccaagcggaatagctccggtagataaaaaaagcctttctcaattaaatatc

SEQ ID NO: 216403 - DNA, 75 bp, synthetic construct
  source 1..75: mol_type = other DNA
cgtgaattataagaacggcggtatttattatcgttcagcgcgtgatggttatggatttgaggctgactggtcaga

SEQ ID NO: 216404 - DNA, 75 bp, synthetic construct
  source 1..75: mol_type = other DNA
agagcatcttgaaacagaagccttgatgaaccgcatcttagacaacgggatagagattcacacattgcaagatgg

SEQ ID NO: 216405 - DNA, 75 bp, synthetic construct
  source 1..75: mol_type = other DNA
aacaatgacaaatgcgctggcaggcaaacagcctctggatgcaactttaaccgcgctcgctgcccttgcgactgg

SEQ ID NO: 216406 - DNA, 75 bp, synthetic construct
  source 1..75: mol_type = other DNA
tttttgcgctggacgtggcgccacagctgggtgtcacattttcgctggctcaccgcgattacagccatcttctga

SEQ ID NO: 216407 - DNA, 75 bp, synthetic construct
  source 1..75: mol_type = other DNA
acagacactgtttctcagactgacttaacgtcagtcggtcgcgatattctgtccaaaacaagcgtccttgctgtt

SEQ ID NO: 216408 - DNA, 75 bp, synthetic construct
  source 1..75: mol_type = other DNA
ggctgcgcagggcacaaataatacgcagattgctacgactgcttatgtaagagctgccatatccgcattggttgg

SEQ ID NO: 216409 - DNA, 75 bp, synthetic construct
  source 1..75: mol_type = other DNA
cctgcccgccagccatcaggcgatatttttcccggtatccggtttgaaaaaatggcgttatgacctggaatataa

SEQ ID NO: 216410 - DNA, 75 bp, synthetic construct
  source 1..75: mol_type = other DNA
cggggtgccggtatctatgttcttgatagctcaggcagccacaacacagacagtccggatgccaacgtctgcaac

SEQ ID NO: 216411 - DNA, 75 bp, synthetic construct
  source 1..75: mol_type = other DNA
ttctgggctgaattatcctggcatttacgccagcgcacgacgggtaagaccaaagccttatataacaaagtctga

SEQ ID NO: 216412 - DNA, 75 bp, synthetic construct
  source 1..75: mol_type = other DNA
acgcagattgctacgaccgcttatgtaagagctgctatctctgcattggtcggctcatcacctgaagctcttgat

SEQ ID NO: 216413 - DNA, 75 bp, synthetic construct
  source 1..75: mol_type = other DNA
agctcaggcagccacaacacagacagtccggatgccaacgtctgcaatgatgcgggtccttttgagctgttacag

SEQ ID NO: 216414 - DNA, 75 bp, synthetic construct
  source 1..75: mol_type = other DNA
tcgaatttatcgccacaggcgcaggcagtgaaagagcttctgttgtcagtgattagtaatccagccatggaaaaa

SEQ ID NO: 216415 - DNA, 75 bp, synthetic construct
  source 1..75: mol_type = other DNA
gaatttatattcccaaggcaaacgggaaattccgggcactgggaattccgacgatgctggacagggcaatgcagg

SEQ ID NO: 216416 - DNA, 75 bp, synthetic construct
  source 1..75: mol_type = other DNA
caggtaaattctaaaaccttctttatgggcgtttacggcagttacggtggtaatcagtacctgtcagttaataac

SEQ ID NO: 216417 - DNA, 75 bp, synthetic construct
  source 1..75: mol_type = other DNA
taaaaatgggcaaatcctctccagcagctcacagcgtgatattcagcagaatgggcaaaaagcggccgtcggcac

SEQ ID NO: 216418 - DNA, 75 bp, synthetic construct
  source 1..75: mol_type = other DNA
aaagattgggtatttgataacgatcttgaaggtagaggtattgttgaaataaacatggggaatcacgaattctcc

SEQ ID NO: 216419 - DNA, 75 bp, synthetic construct
  source 1..75: mol_type = other DNA
cttgccgtgcgctgcgaagtgcagggcgcggcctgccattccgcctacgcgccgcagggcgttaacgccatccaa

SEQ ID NO: 216420 - DNA, 75 bp, synthetic construct
  source 1..75: mol_type = other DNA
agcgcctagtggcgtttgacaccaccagtcgcgaatccaacctggcgctgatcgattttgtctggcactacctga

SEQ ID NO: 216421 - DNA, 75 bp, synthetic construct
  source 1..75: mol_type = other DNA
cactctcgcacgtggtcagggggcaaacagcggtaactggtatctgaccagcggtggtgagtcagttgaaccgca

SEQ ID NO: 216422 - DNA, 75 bp, synthetic construct
  source 1..75: mol_type = other DNA
tttgcctccacatctgattgaatttaactgcagtagaaacgtgttgactgaaccgccccgggaatcctggagact

SEQ ID NO: 216423 - DNA, 75 bp, synthetic construct
  source 1..75: mol_type = other DNA
gaataagtatttcacaaccatcggaatgcgaaactgggttttcaacggcaatgatggtatgaatcgcaaatacac

SEQ ID NO: 216424 - DNA, 75 bp, synthetic construct
  source 1..75: mol_type = other DNA
tgggtaaattatcatcgtcatgtagtagcaaagaaaatgttccgctatattgatcatcagatatggttaaaagtg

SEQ ID NO: 216425 - DNA, 75 bp, synthetic construct
  source 1..75: mol_type = other DNA
cttctttatgggcgtttacggcagttacggtggtaatcagtacctgtcagttaataacggcggtgaagttaatgc

SEQ ID NO: 216426 - DNA, 75 bp, synthetic construct
  source 1..75: mol_type = other DNA
atgcggagtttctgcagaaaggcgggatcactgcgggtgggtaagggcgctcactccattagcactttgggattc

SEQ ID NO: 216427 - DNA, 75 bp, synthetic construct
  source 1..75: mol_type = other DNA
gtggtaactggtatctgaccagcggcagtgattctcctgaactgcagccggagccagacccgatgccgaatccgg

SEQ ID NO: 216428 - DNA, 75 bp, synthetic construct
  source 1..75: mol_type = other DNA
acgcgggactggcggcagcgctggagctggcacggctgatggggttgcgctctcaggaggcggttcgctgttcac

SEQ ID NO: 216429 - DNA, 75 bp, synthetic construct
  source 1..75: mol_type = other DNA
ttgcctaaagtcctcgcagaccgtagcggcttagcgtttcactcgtttagacatacagttgcgacccagttaaaa

SEQ ID NO: 216430 - DNA, 75 bp, synthetic construct
  source 1..75: mol_type = other DNA
gtgataaaggcacgaccgcgctatttggcggcagccgtatcgacaaagacgacatccgcgttaacgcctatggta

SEQ ID NO: 216431 - DNA, 75 bp, synthetic construct
  source 1..75: mol_type = other DNA
gatgcgcggcgacgaagcctacagcggcagtcgtagctactatgcgttagccgagtcagtgaaaaatatctttgg

SEQ ID NO: 216432 - DNA, 75 bp, synthetic construct
  source 1..75: mol_type = other DNA
gttctgctgacgactatgattctcgcggtgtgacggcctctgttgagggtgggtatacctttgaagcgggaacat

SEQ ID NO: 216433 - DNA, 75 bp, synthetic construct
  source 1..75: mol_type = other DNA
ttccatctcgccattgccgaagcgacgcataacagcatgctggtggagctgttccgtcagtcctggcagtggcgg

SEQ ID NO: 216434 - DNA, 75 bp, synthetic construct
  source 1..75: mol_type = other DNA
ctggctacaaaatatcagtgatgaatatttggatgctatatatgctaatgcctgcgctctaatttttgcatccaa

SEQ ID NO: 216435 - DNA, 75 bp, synthetic construct
  source 1..75: mol_type = other DNA
ggttgcaatccgaaagtaaagtacgtggtattggtagatacacgcttgagttaactagagcaattattaataact

SEQ ID NO: 216436 - DNA, 75 bp, synthetic construct
  source 1..75: mol_type = other DNA
actgcaatttgccgatctccagtctcgtctggaaaaaggcgaggatctggaagccaccatacgtctgcgtgagga

SEQ ID NO: 216437 - DNA, 75 bp, synthetic construct
  source 1..75: mol_type = other DNA
cgccctggagcggcttatcgaccgcaatatggccgagagcggcccgttaaaacagttcgtgatcccggggaggaa

SEQ ID NO: 216438 - DNA, 75 bp, synthetic construct
  source 1..75: mol_type = other DNA
tgggggccgaccttgatgccagcgtaccgtccaccggcatgccggataatgcacaggcgcttttagccacgatgg

SEQ ID NO: 216439 - DNA, 75 bp, synthetic construct
  source 1..75: mol_type = other DNA
accaatatctgtccagtaatttccctggtgaatatggtgccgacgagccggtcctgttcagcaaagacgatattc

SEQ ID NO: 216440 - DNA, 75 bp, synthetic construct
  source 1..75: mol_type = other DNA
gttcagtatttacgctgaatatggatattgtcggcgttgcgctgctgccgctacttgtatttatcgtacttaaaa

SEQ ID NO: 216441 - DNA, 75 bp, synthetic construct
  source 1..75: mol_type = other DNA
cagacgatggcctatgcgcaccttgcgcctgactacctgcaaaatgccgtcgctctgaatccactaaaaggcgga

SEQ ID NO: 216442 - DNA, 75 bp, synthetic construct
  source 1..75: mol_type = other DNA
gaagttttgcgggattttacgcagagtgaaacctgatataccacccaatcaggcaacccacatcctgcggcatac

SEQ ID NO: 216443 - DNA, 75 bp, synthetic construct
  source 1..75: mol_type = other DNA
gattaatgcctattacagccatcgtagtccgctggcaaatttgtccgcgaatattgcatccctgcagaaagggta

SEQ ID NO: 216444 - DNA, 75 bp, synthetic construct
  source 1..75: mol_type = other DNA
ttgtccgacggatgcgctgaaatttggtcgtcgcgatgacccggaaattcagcactggattaatcaaaaagaggt

SEQ ID NO: 216445 - DNA, 75 bp, synthetic construct
  source 1..75: mol_type = other DNA
aaattttgcgggattttacgcagagtgaaacctgatataccacccaatcaggcaacccacatcctgcggcataca

SEQ ID NO: 216446 - DNA, 75 bp, synthetic construct
  source 1..75: mol_type = other DNA
ggtctggtagtcagcgtattgcggaagatattctgtgtcgttacggggaagtcatcttcacagcgattttcagtc

SEQ ID NO: 216447 - DNA, 75 bp, synthetic construct
  source 1..75: mol_type = other DNA
tcgccggagatatggccgggacgacgaattgtgctgacggggcatccgcaggcgaacctgaaccgggaatggcag

SEQ ID NO: 216448 - DNA, 75 bp, synthetic construct
  source 1..75: mol_type = other DNA
agccagttccgctacagcgcacaaatccgcccttcttccgtggtgaccaaagactacacctttaaacgccccggc

SEQ ID NO: 216449 - DNA, 75 bp, synthetic construct
  source 1..75: mol_type = other DNA
cctcagatcgccgtctgcctgcaaatcctgaagcaggcgcggaagaaagcgaagcaggcacgagtggttaagacg

SEQ ID NO: 216450 - DNA, 75 bp, synthetic construct
  source 1..75: mol_type = other DNA
attaataaaattcttgagagactgccagctaatttcaaagtattacttattgggccaaaatcaaatttatttaaa

SEQ ID NO: 216451 - DNA, 75 bp, synthetic construct
  source 1..75: mol_type = other DNA
tatcggcctaactttattctttttcacaatggatcgcatccaatttaccgaaaagttttagaacaagtgaaggaa

SEQ ID NO: 216452 - DNA, 75 bp, synthetic construct
  source 1..75: mol_type = other DNA
tgctgcatttgtaggattactggcgagcagagaaaatctggtcggtgtcatgccttttaacctcgggactttaat

SEQ ID NO: 216453 - DNA, 75 bp, synthetic construct
  source 1..75: mol_type = other DNA
tctcgatacaccggaactggcccacggcggttgccgggtggccgaatcgacccaggcgcgcatcgatcaggctat

SEQ ID NO: 216454 - DNA, 75 bp, synthetic construct
  source 1..75: mol_type = other DNA
tcagcgttctgacaacgatgcgcaaagcctgattactggtgcttttccccctacagcgacggtaatgttgtcaga

SEQ ID NO: 216455 - DNA, 75 bp, synthetic construct
  source 1..75: mol_type = other DNA
gcagaagacacaacgataacttatgcccgtgcaggtctgagttattgcggcgatccattacgctcctggggtaat

SEQ ID NO: 216456 - DNA, 75 bp, synthetic construct
  source 1..75: mol_type = other DNA
agcacgacgccagcttaacgcccttaatcagttacaacgcacgggtagtaagcgtcgtctcagcaccgtctggca

SEQ ID NO: 216457 - DNA, 75 bp, synthetic construct
  source 1..75: mol_type = other DNA
tgatgaacacggcggacctgtatccgtactggcagtatgtcgccgttatggacagcagaacgcgcccggaacatg

SEQ ID NO: 216458 - DNA, 75 bp, synthetic construct
  source 1..75: mol_type = other DNA
aaaacaaatcatcgtggatgcagagggaaacgcaaaggtaatcgagctgggcagtccgcgtcgtctggcaaccat

SEQ ID NO: 216459 - DNA, 75 bp, synthetic construct
  source 1..75: mol_type = other DNA
tgtgaagataacggggtgacattcagtctgtcaaaagacaatcatggaattgattctgctctgggatatgccaga

SEQ ID NO: 216460 - DNA, 75 bp, synthetic construct
  source 1..75: mol_type = other DNA
gctgattcctagtaaggaagatgctgtccgaaggtggctcatgcaggccgaagcattcatcgctgctcatctgga

SEQ ID NO: 216461 - DNA, 75 bp, synthetic construct
  source 1..75: mol_type = other DNA
caggcttccagatctattatccaaaccgccagtatatgtcctgcggcttgcgcgcatttctcgattatgtaaaaa

SEQ ID NO: 216462 - DNA, 75 bp, synthetic construct
  source 1..75: mol_type = other DNA
gatccattaggattagaaacactaaaatgcattaagccactgcattcaatgggcggaactggtgaaagaagcggt

SEQ ID NO: 216463 - DNA, 75 bp, synthetic construct
  source 1..75: mol_type = other DNA
tgatggtgaaaatataaaacttgctgatataataattaatgaaggttacaggggttttggagtagggagcgttct

SEQ ID NO: 216464 - DNA, 75 bp, synthetic construct
  source 1..75: mol_type = other DNA
aaaaacaaagacttctctcctgatgaaatagaaaaatccgcaaatatgaataacggctggttggccagggcatta

SEQ ID NO: 216465 - DNA, 75 bp, synthetic construct
  source 1..75: mol_type = other DNA
gacgctggaggtcatggtgccgcaggggcatttcggctatcagccacaggccgaacgccagggccgctatctggc

SEQ ID NO: 216466 - DNA, 75 bp, synthetic construct
  source 1..75: mol_type = other DNA
atgccgggcaactgcccgcattatgggcgttggcctccacacgattttacgtcccttaaaaaactcaggccgcag

SEQ ID NO: 216467 - DNA, 75 bp, synthetic construct
  source 1..75: mol_type = other DNA
tatgacgtctccttttggttctaatcaatttattactattccggttgaagaaacattacctgtggcacaatatgc

SEQ ID NO: 216468 - DNA, 75 bp, synthetic construct
  source 1..75: mol_type = other DNA
gtgtacgctggtagctgcgacgaaagattccgtggtgactttgccagatgttagtgctacgaagttgcaaagtaa

SEQ ID NO: 216469 - DNA, 75 bp, synthetic construct
  source 1..75: mol_type = other DNA
aacggtctggtggcaccgggaatctggaacggcggtgacgtcggacagctgacatcaggcgatatgctgaccaaa

SEQ ID NO: 216470 - DNA, 75 bp, synthetic construct
  source 1..75: mol_type = other DNA
attctcgcgtgtacggcgtgacttcagctgatgccacggtgcttgatggtacgaacgccatggacattgccagca

SEQ ID NO: 216471 - DNA, 75 bp, synthetic construct
  source 1..75: mol_type = other DNA
gcgtcgtacgcgtgcaggtttcgctcgcgctacgagccgcgcagggccgggacttcggcgctttgctggctctcg

SEQ ID NO: 216472 - DNA, 75 bp, synthetic construct
  source 1..75: mol_type = other DNA
taaaggaacgtggagggattttttacgattgcctaagtatctgtatttaacattgttacctgctcatggtcttgc

SEQ ID NO: 216473 - DNA, 75 bp, synthetic construct
  source 1..75: mol_type = other DNA
tggcactggttgcctgtatgcgtaagttgctgaccattatgaacgcaatgctcagaaaaaacgaagaatggaatg

SEQ ID NO: 216474 - DNA, 75 bp, synthetic construct
  source 1..75: mol_type = other DNA
attacgccaatgctggcgattatcgccaccactttacaaaccgagcctgaaagtcagttcaccctgatctacggt

SEQ ID NO: 216475 - DNA, 75 bp, synthetic construct
  source 1..75: mol_type = other DNA
ctggatgtcagactaaccacggctgaaggtgaaatagtcaccttgcaggctgatgtcagtgctcttgatggtaga

SEQ ID NO: 216476 - DNA, 75 bp, synthetic construct
  source 1..75: mol_type = other DNA
ctacaggattgcagcaggcgcggcagcgtatcaaagctatggaagatgcattacggactcatgggttgattgact

SEQ ID NO: 216477 - DNA, 75 bp, synthetic construct
  source 1..75: mol_type = other DNA
ctactcgcgagcgtgccagtttaatcctgactaaaagtgctaatcatgcagtagaagaggtcagactacgcaaat

SEQ ID NO: 216478 - DNA, 75 bp, synthetic construct
  source 1..75: mol_type = other DNA
gcaatagagatacgaagacagtcaatattgcgcccgataccagcaacgcgcaggtcaccctgaacatccctgctc

SEQ ID NO: 216479 - DNA, 75 bp, synthetic construct
  source 1..75: mol_type = other DNA
aacggcattgccattacccaggccaatggggaagcgcatgtcacgctcaaaggtaaaaaagcgggcacgcatacg

SEQ ID NO: 216480 - DNA, 75 bp, synthetic construct
  source 1..75: mol_type = other DNA
cgcatcatcaagctcattcaccgcgagcacaaccgagggcgcgaccctgacggcaagcgtcactgacgcttacgg

SEQ ID NO: 216481 - DNA, 75 bp, synthetic construct
  source 1..75: mol_type = other DNA
ctcctgatggtggcgtagaaaaactatcaaaacccaacttacatggagtaattaaaaaagttgatttgaacacaa

SEQ ID NO: 216482 - DNA, 75 bp, synthetic construct
  source 1..75: mol_type = other DNA
acagatgtttcttcttttgtgaaaaatgtaccattgcaaagaggaatttctagggaaaaaccaactagccttaag

SEQ ID NO: 216483 - DNA, 75 bp, synthetic construct
  source 1..75: mol_type = other DNA
cctgaaaggctataacgtcgaagccaccgctctggaagctgccggtggtaaagtggtcacaacgggtaaagatat

SEQ ID NO: 216484 - DNA, 75 bp, synthetic construct
  source 1..75: mol_type = other DNA
actgtacagtgaatggggagatatggggcattacacgactgacgctggttttcaatcgaatatgtattggtcatc

SEQ ID NO: 216485 - DNA, 75 bp, synthetic construct
  source 1..75: mol_type = other DNA
gaacttaaagcaaaatattctacctactcgcgagcgtgccagtttgatcctgacgaaaagtgctaatcatgcagt

SEQ ID NO: 216486 - DNA, 75 bp, synthetic construct
  source 1..75: mol_type = other DNA
cgcgccggaacgccaggatacgcgttttgatccgccgttcaccacagtgcaaaccggcctgattcagggcgggcg

SEQ ID NO: 216487 - DNA, 75 bp, synthetic construct
  source 1..75: mol_type = other DNA
tttcaatcaaatatgtattggtcatctagtcccgcaaactcaagcgaacaatacgtaatttctctggcaacaggt

SEQ ID NO: 216488 - DNA, 75 bp, synthetic construct
  source 1..75: mol_type = other DNA
aaaaagcgggcacgcatacggttaccgcaacgctgggtaataacaataccagtgattcgcagccggtaacgtttg

SEQ ID NO: 216489 - DNA, 75 bp, synthetic construct
  source 1..75: mol_type = other DNA
ccggcagcgtcatcacggccacagtcgttgataataatggctttccggtgaaaggtgtgactgtgaacttcacca

SEQ ID NO: 216490 - DNA, 75 bp, synthetic construct
  source 1..75: mol_type = other DNA
ttggttgaataagaatgatcgtgacattttttcaacatttattgaaaaaaaagtttcaatgttcttttttggtca

SEQ ID NO: 216491 - DNA, 75 bp, synthetic construct
  source 1..75: mol_type = other DNA
gactgcaacaaacttacagaaaaaatgaactccggtgacgttattgtgcgatatcttcaattgataatgcaggct

SEQ ID NO: 216492 - DNA, 75 bp, synthetic construct
  source 1..75: mol_type = other DNA
gactctccctgttatctcagtaattcagtcgattagtaaagaatatgagttaaaacaagaactaatccaaaaaaa

SEQ ID NO: 216493 - DNA, 75 bp, synthetic construct
  source 1..75: mol_type = other DNA
aatcttgggatttatttttctttttctatctttcgtttgtttttcattgaaaagttcaaagttgttttttatgcc

SEQ ID NO: 216494 - DNA, 75 bp, synthetic construct
  source 1..75: mol_type = other DNA
tgccaaaagagacttaaaagatatgattcgggatgcttggcattggcagtcaaaaaatcctcatggttatgatag

SEQ ID NO: 216495 - DNA, 75 bp, synthetic construct
  source 1..75: mol_type = other DNA
taatgttaaaattggagctaatagtgtagttatttctgacattgctccagattctgttgctgttggtatacctgc

SEQ ID NO: 216496 - DNA, 75 bp, synthetic construct
  source 1..75: mol_type = other DNA
atcatctaccacacgatgttcgacaacatgcaaaaagcaatcgacctgaatcgtcctgcctgtcaggacaccggc

SEQ ID NO: 216497 - DNA, 75 bp, synthetic construct
  source 1..75: mol_type = other DNA
ccggtggcggtgggggctacggcaaccacctacgccagccagtttagcgtggcggtggactggaaccacgacggc

SEQ ID NO: 216498 - DNA, 75 bp, synthetic construct
  source 1..75: mol_type = other DNA
gtagcgccacggtgggcggggcggtgacggggtatctttcgctcaacgaaggttctggcgtcgatctgaacaatg

SEQ ID NO: 216499 - DNA, 75 bp, synthetic construct
  source 1..75: mol_type = other DNA
aaaaatgttacatgagggaagatgtgttatatatattgataatctggacaatataaatacaaaagaacaatgtgt

SEQ ID NO: 216500 - DNA, 75 bp, synthetic construct
  source 1..75: mol_type = other DNA
ggaactggccgacacggtaacggacagcgccggatatagacgcgtatctgtccgcatcaatggcaaatctcaagc

SEQ ID NO: 216501 - DNA, 75 bp, synthetic construct
  source 1..75: mol_type = other DNA
agctgctgcgctctttatttcgatacgatgcggagactggccgcctgttccatgcagtagaccgaattggaatca

SEQ ID NO: 216502 - DNA, 75 bp, synthetic construct
  source 1..75: mol_type = other DNA
gcaagtttgtcggcacgggctataacgacaccttctttgccaccgcaggcaccgacacttacgacggctccggcg

SEQ ID NO: 216503 - DNA, 75 bp, synthetic construct
  source 1..75: mol_type = other DNA
ttcgctaccattattgaggacagaaaaaaccatccaagagatatcttatttgctaggttatagtaacacatcatc

SEQ ID NO: 216504 - DNA, 75 bp, synthetic construct
  source 1..75: mol_type = other DNA
tggggaaaatttgatgcgatagatcagggggaacgatataaagtcaaaaagatagttgtgaaacccggcgaagga

SEQ ID NO: 216505 - DNA, 75 bp, synthetic construct
  source 1..75: mol_type = other DNA
tcgggcatggcgttttggcgaatcaccaaatccacaagaaaaacgtgaattcccctgggggatcatgaaattacc

SEQ ID NO: 216506 - DNA, 75 bp, synthetic construct
  source 1..75: mol_type = other DNA
acgattcaaacgcttgcagagcaatacgacatagtcagtgcagaagcaaagatgctcatcaactttttgcacatt

SEQ ID NO: 216507 - DNA, 75 bp, synthetic construct
  source 1..75: mol_type = other DNA
ttcgcattcctgccagttacaccattcacggaatagatgtttctcgctggcaggagcggatcgactggcagcggg

SEQ ID NO: 216508 - DNA, 75 bp, synthetic construct
  source 1..75: mol_type = other DNA
aagtatgaattcgaagcccagtttgtggatccggataaatgtaagctgttttcttatctcgttcgtggatgttat

SEQ ID NO: 216509 - DNA, 75 bp, synthetic construct
  source 1..75: mol_type = other DNA
gccggcgaaggtggcgattttatcgaaacccttaccgctggcggagcaacgtcagtggcaaagtcagttgccggg

SEQ ID NO: 216510 - DNA, 75 bp, synthetic construct
  source 1..75: mol_type = other DNA
cctgtagcatcagcggcgggcaaaccatcgaagtgcaatttcgcgatctcattatcgacagcattgatggcaatt

SEQ ID NO: 216511 - DNA, 75 bp, synthetic construct
  source 1..75: mol_type = other DNA
aaaacgtggaagaaacgttccgccatcggagcatttatcggtaagccaggagaagactatcaatgccggtgcctg

SEQ ID NO: 216512 - DNA, 75 bp, synthetic construct
  source 1..75: mol_type = other DNA
cgatagcatgcttcagacactcctggacgagctggacaagcccacactcaccgatgcgcccgataccactccttt

SEQ ID NO: 216513 - DNA, 75 bp, synthetic construct
  source 1..75: mol_type = other DNA
accaacgttgctaagggcgtggcgtggattgataagcgtctggtgggagaggagcttgctgagcctgaggagata

SEQ ID NO: 216514 - DNA, 75 bp, synthetic construct
  source 1..75: mol_type = other DNA
caaatcgacggggtcacgcagggccaactcaacattgtgccgggaatttgctcggaggttattcctggcccagct

SEQ ID NO: 216515 - DNA, 75 bp, synthetic construct
  source 1..75: mol_type = other DNA
cctgtagcatcagcggcgggcaaaccattgaagtggaatttcgcgatgtcattatcgacagcattgacggcaatt

SEQ ID NO: 216516 - DNA, 75 bp, synthetic construct
  source 1..75: mol_type = other DNA
acaaatccttatttgctgaagtttgattatatgtggttgatttttattcctttaggtatagctaattcaatttta

SEQ ID NO: 216517 - DNA, 75 bp, synthetic construct
  source 1..75: mol_type = other DNA
atacagcgctttcagacagaccggggaagagaattttttgccgttaaagtgcaggaaagattaaaagaatacggc

SEQ ID NO: 216518 - DNA, 75 bp, synthetic construct
  source 1..75: mol_type = other DNA
ttcacgatgggattgtttttgcagagattctgcatgagttttatcagaggatggaaatcttaaatgaggtcttat

SEQ ID NO: 216519 - DNA, 75 bp, synthetic construct
  source 1..75: mol_type = other DNA
ggtttcgaaaagcggaagcatcactaagacttgagggaatggatcctagtggagtacctcgttatgaatgtttga

SEQ ID NO: 216520 - DNA, 75 bp, synthetic construct
  source 1..75: mol_type = other DNA
acgaagaactccagcacgcttacgatttttttgatgaacggctttttaataacgagctgccgccatgcctgatca

SEQ ID NO: 216521 - DNA, 75 bp, synthetic construct
  source 1..75: mol_type = other DNA
acagtacgctaccgctacgatgacgcgcacagtgagttaccggcgacgacaacggatgcgacgggcagcacccgg

SEQ ID NO: 216522 - DNA, 75 bp, synthetic construct
  source 1..75: mol_type = other DNA
gaccacagcattaatatattcactgccagaaaatacatgacagagaatgggcttaccgaaaggggcaagagcagg

SEQ ID NO: 216523 - DNA, 75 bp, synthetic construct
  source 1..75: mol_type = other DNA
gacaaaactcaggctgacgcgtgggatatcaaccagggccatcagtccgcgcgtgccggaacgtatgccacgacg

SEQ ID NO: 216524 - DNA, 75 bp, synthetic construct
  source 1..75: mol_type = other DNA
gtcaagcacatgctgaagaaaatgaagctcaagtctcgcgtggaagcagcggtatgggtgcatcaggagcgcatt

SEQ ID NO: 216525 - DNA, 75 bp, synthetic construct
  source 1..75: mol_type = other DNA
caccgaaagcacagtaaaagtgcacgtcaagcacatgctgaagaaaatgaagctcaagtctcgcgtggaagcagc

SEQ ID NO: 216526 - DNA, 75 bp, synthetic construct
  source 1..75: mol_type = other DNA
agcggtaaaacgctggtcaatgacggcctcctgaccattgcgtctcatacggcagatggggtaacgggcatgggg

SEQ ID NO: 216527 - DNA, 75 bp, synthetic construct
  source 1..75: mol_type = other DNA
tcggcgttcaactggtgaaggcgcaaacggttattgggtcgggtggctcattaacgttacgtgatttacagggcg

SEQ ID NO: 216528 - DNA, 75 bp, synthetic construct
  source 1..75: mol_type = other DNA
aggccgtaactatcaggtaaacgggacgggcgacgtgcttatcgacgtgcctaaaccgtggaatgatcccatggc

SEQ ID NO: 216529 - DNA, 75 bp, synthetic construct
  source 1..75: mol_type = other DNA
atgaagtgttcctgaaatatctgacggctcccaccatcacctcgtccggcaatcccccgacgttttccctgacgc

SEQ ID NO: 216530 - DNA, 75 bp, synthetic construct
  source 1..75: mol_type = other DNA
atgttcaattgcccagaatatctattgacatgtccgataactctatgcataccagagtcagcagtttttatgaga

SEQ ID NO: 216531 - DNA, 75 bp, synthetic construct
  source 1..75: mol_type = other DNA
agtttcagcacaactgcctgacggcgcatctgacggtaataaggcaatcagtgaaacagagcatgatgcagtgaa

SEQ ID NO: 216532 - DNA, 75 bp, synthetic construct
  source 1..75: mol_type = other DNA
atttactcggtaaagaacattattactcacgtaaggtttatgaattcttaattgaaaagttaaatattcatgttt

SEQ ID NO: 216533 - DNA, 75 bp, synthetic construct
  source 1..75: mol_type = other DNA
aacagccagcttgcagatgagatggcggagatgaagaccagcatcacggaaacccgcaatgaaatcacacagacg

SEQ ID NO: 216534 - DNA, 75 bp, synthetic construct
  source 1..75: mol_type = other DNA
ataacattgcacgtcacctacaggctaataacattagttcattctcacggcgtaaagatgctaacgggtttagtg

SEQ ID NO: 216535 - DNA, 75 bp, synthetic construct
  source 1..75: mol_type = other DNA
tgtgctacagctgagatgtaaggctccgtctgtgacgttttgtgatggttgtcctgtctggcaacaatcgcgtcc

SEQ ID NO: 216536 - DNA, 75 bp, synthetic construct
  source 1..75: mol_type = other DNA
cagataatccggaattgatcctgcgtgtgctacagctgagatgtaaggctccgtctgtgacgttttgtgatggtt

SEQ ID NO: 216537 - DNA, 75 bp, synthetic construct
  source 1..75: mol_type = other DNA
ttccacattgcagaacagaaagttgacggcacaagtgactacctcaaggatggagaatggcctattgataatggg

SEQ ID NO: 216538 - DNA, 75 bp, synthetic construct
  source 1..75: mol_type = other DNA
gtgcggacctggatgttgatggcaaactgcaaatcaatgccaataaagattgggtatttgataacgatcttcaag

SEQ ID NO: 216539 - DNA, 75 bp, synthetic construct
  source 1..75: mol_type = other DNA
tacaggtgaaatatacactggttggcgtttatgtcgcaaaacatgtcattcaggttcatctcaccaataaggata

SEQ ID NO: 216540 - DNA, 75 bp, synthetic construct
  source 1..75: mol_type = other DNA
tgagatggatgacattacagagttgaaaacacaggtgaaggaacttaaccagaagcgcacagcattgcagactac

SEQ ID NO: 216541 - DNA, 75 bp, synthetic construct
  source 1..75: mol_type = other DNA
tcaataagcaacaccagaaaataagtggtaaatataatgtcttgtatatgccaaccttaagggctggttatggag

SEQ ID NO: 216542 - DNA, 75 bp, synthetic construct
  source 1..75: mol_type = other DNA
taatcaggcatttataggaaaacccggaattagtccgcagattaactatggtggaaaaattaatctggactcttt

SEQ ID NO: 216543 - DNA, 75 bp, synthetic construct
  source 1..75: mol_type = other DNA
tgagtgtggctgcctctgctgtagtatccggttcctcaatggcagctgtaggagaatggacgccagggagtgaag

SEQ ID NO: 216544 - DNA, 75 bp, synthetic construct
  source 1..75: mol_type = other DNA
atgaaatcttctccgcattttgatcccgatgcaccggcaccggaagcgctctcacaggatgatcagataacctgt

SEQ ID NO: 216545 - DNA, 75 bp, synthetic construct
  source 1..75: mol_type = other DNA
cctggactggtacacaaaccagttttaatgatgcagcaattgaaactgatgtacccggttttggtatcgagcttc

SEQ ID NO: 216546 - DNA, 75 bp, synthetic construct
  source 1..75: mol_type = other DNA
tctgcgcgtatggcggcatggctctggccgctaatgaagacatcaccttccacggtacgctggtggcaccgcctg

SEQ ID NO: 216547 - DNA, 75 bp, synthetic construct
  source 1..75: mol_type = other DNA
ataaagcccgacctccacgagtacaaataacgtacgatattgaaaccggagatgccgaaacagcgaaagagctac

SEQ ID NO: 216548 - DNA, 75 bp, synthetic construct
  source 1..75: mol_type = other DNA
accttccaataaaccaacaaatagagtctttcgtaagagaaaaatgtgtcagttggaaacctctaatcgatttgg

SEQ ID NO: 216549 - DNA, 75 bp, synthetic construct
  source 1..75: mol_type = other DNA
ggtatcccggtggaccgtatcatcaaactggcgcgtgaaattggcacagcaaaacccgcttatacctgccagggc

SEQ ID NO: 216550 - DNA, 75 bp, synthetic construct
  source 1..75: mol_type = other DNA
ccaacaaagatctggttaaatatgttgatattggtatgacctactacttcaacaaaaacatgtccacttatgttg

SEQ ID NO: 216551 - DNA, 75 bp, synthetic construct
  source 1..75: mol_type = other DNA
ccggcaccaccattctgagcatcgatgagcagaaacgggaaatcgtgaccagtgccggtgtgatccgtcagggag

SEQ ID NO: 216552 - DNA, 75 bp, synthetic construct
  source 1..75: mol_type = other DNA
acagtctctatccgggactggcctgggtgacctggcagggcagcagctgggcattgcgccccggtgaccagttcg

SEQ ID NO: 216553 - DNA, 75 bp, synthetic construct
  source 1..75: mol_type = other DNA
ccattatttgcctgctgattaccgtccgcctgttcctctatcgccgcattcacggtactacctatcgcccgctgt

SEQ ID NO: 216554 - DNA, 75 bp, synthetic construct
  source 1..75: mol_type = other DNA
accaggagtgaagcattcgcaccgtggttctaaaatgcgaactccacacctagttcctttgagttgtcaggcatt

SEQ ID NO: 216555 - DNA, 75 bp, synthetic construct
  source 1..75: mol_type = other DNA
gtgaagccctgaagcttgctgaacgcatcggtgttactgccgcagcccgtgaactcagcctgtatgaatcacagc

SEQ ID NO: 216556 - DNA, 75 bp, synthetic construct
  source 1..75: mol_type = other DNA
ctactgtgacgcttgctcaggcaagagcaaagcgcgatgaggccaaaaagctattagtgcagggcattgatccaa

SEQ ID NO: 216557 - DNA, 75 bp, synthetic construct
  source 1..75: mol_type = other DNA
accgggatatcacaacactcaataccccggacctgcttatccctgttcgtgctgcagaagctaaacaaatttatg

SEQ ID NO: 216558 - DNA, 75 bp, synthetic construct
  source 1..75: mol_type = other DNA
caccaccttaaacgaaacaagcgataatctcgttagttatttaaatttatctacaagcgatcaagaaacacttca

SEQ ID NO: 216559 - DNA, 75 bp, synthetic construct
  source 1..75: mol_type = other DNA
taccagagatcttcttgcacctatcaaggctgttgaagcttccgggcgattggaagttgcttcccgcctacagca

SEQ ID NO: 216560 - DNA, 75 bp, synthetic construct
  source 1..75: mol_type = other DNA
tgccggttatagctgaaggtgttgaaaccgaaagccaggccagagaattacaaaagttaggattctctcatgtcc

SEQ ID NO: 216561 - DNA, 75 bp, synthetic construct
  source 1..75: mol_type = other DNA
actcaagatttaacactgcgcttatattcgctgtcactgtctatattattttatcatttattacagccattgatt

SEQ ID NO: 216562 - DNA, 75 bp, synthetic construct
  source 1..75: mol_type = other DNA
gtgatatcgtaaaaatctcaactgaaacatacttgttgctatgtcacactgattgcgaagagttcatcgaaaaat

SEQ ID NO: 216563 - DNA, 75 bp, synthetic construct
  source 1..75: mol_type = other DNA
tagaggagctgaaagccagaatactggctgactcggaatggctgacggcgtctgaattatccgcaaaagcgggct

SEQ ID NO: 216564 - DNA, 75 bp, synthetic construct
  source 1..75: mol_type = other DNA
caaaaattaggcttctcccatgttcagggatatttataccagaaaccattaccgttttcagagtggcatatagac

SEQ ID NO: 216565 - DNA, 75 bp, synthetic construct
  source 1..75: mol_type = other DNA
agaaatggcattaaaatttcccttgatgattttggcagtgggttagctgacttgaaaaaattatacaaagttaga

SEQ ID NO: 216566 - DNA, 75 bp, synthetic construct
  source 1..75: mol_type = other DNA
ttgcctggggctggcatcacgaagcggggatccatttgttgcggctgatgttatcgggcgcatttgataaatatc

SEQ ID NO: 216567 - DNA, 75 bp, synthetic construct
  source 1..75: mol_type = other DNA
atcaaaagagaatccaaatgtcgggaaggatttgacggatgaagagaagaactgtttgggcagtggcagtacagg

SEQ ID NO: 216568 - DNA, 75 bp, synthetic construct
  source 1..75: mol_type = other DNA
gcgaggtcatttgataagccaggaagatggctcactccttgaaaccagcattcctctgcaccttgatttcatcaa

SEQ ID NO: 216569 - DNA, 75 bp, synthetic construct
  source 1..75: mol_type = other DNA
tcgttaaacgatattgatgtggctgtgtatatcagcggctctgatgcaccacaggatttacgtgggttgcttgac

SEQ ID NO: 216570 - DNA, 75 bp, synthetic construct
  source 1..75: mol_type = other DNA
gccgatttaacactgaaaacgaggcattcaacttcacatacgaatacgcgtttctcccggaaaaccgctacaaat

SEQ ID NO: 216571 - DNA, 75 bp, synthetic construct
  source 1..75: mol_type = other DNA
tatacccagagcttaatgcaataggaatacccgctccgaagataaacgttccatttgcaagttatttaatgctct

SEQ ID NO: 216572 - DNA, 75 bp, synthetic construct
  source 1..75: mol_type = other DNA
ggcatcgcaaggtgctgtgcaactttgataatgcctggtcagcaacgaaggatatgcgtgagcagattattgagg

SEQ ID NO: 216573 - DNA, 75 bp, synthetic construct
  source 1..75: mol_type = other DNA
ccgttaccgcaaccggcaatatcagtgtgaatgccggtcgtgatgtcgccctgaccacggcgacagaaagtgact

SEQ ID NO: 216574 - DNA, 75 bp, synthetic construct
  source 1..75: mol_type = other DNA
agggagagctgaatgcgctgaaagtagcgcaggataaatacggacctcttcaggcggatgcgacggaagaacagc

SEQ ID NO: 216575 - DNA, 75 bp, synthetic construct
  source 1..75: mol_type = other DNA
tgactccgttgctgaacaaaccggaatgtttgccggtgacggtggtttcgacatcacagtgggtaaacataccca

SEQ ID NO: 216576 - DNA, 75 bp, synthetic construct
  source 1..75: mol_type = other DNA
cgaggtttaacagataagcatttagacaatttagattacttcaagggcttaggagcttatcacattgtatctaaa

SEQ ID NO: 216577 - DNA, 75 bp, synthetic construct
  source 1..75: mol_type = other DNA
gtgaatttgcctacgcccgaaacctacgatgaacttcagagagcctacgatttttttaatgagaagctattcagc

SEQ ID NO: 216578 - DNA, 75 bp, synthetic construct
  source 1..75: mol_type = other DNA
ttacacctgccctcaggcagaccatcagtcataccgggattaaaaaatggctgtggagaatcagaaaaattctcc

SEQ ID NO: 216579 - DNA, 75 bp, synthetic construct
  source 1..75: mol_type = other DNA
ctgcgtgagattatcgacgtgaaaaaatgggaaattaatcaggctgccggtcgctacatccgctcacatgaggag

SEQ ID NO: 216580 - DNA, 75 bp, synthetic construct
  source 1..75: mol_type = other DNA
aaaaatgggagattaatcaggccgccggtcgttatatccgctcacatgaggaagtgcagcacatcagcatccgca

SEQ ID NO: 216581 - DNA, 75 bp, synthetic construct
  source 1..75: mol_type = other DNA
agaaccagcctgagatgataaaaaaccgtgcgcttgaccgttcagtagattacctgcgagaagctctttccgtct

SEQ ID NO: 216582 - DNA, 75 bp, synthetic construct
  source 1..75: mol_type = other DNA
tctgcttaggttttattatttataagataatcagcgcacaaaaaagtagaaatatatttaaaaaagttaacattc

SEQ ID NO: 216583 - DNA, 75 bp, synthetic construct
  source 1..75: mol_type = other DNA
caaatcaagaagtttctaaaactgattaattcttctgagttaactatcttattagataaaaaattggcatcgata

SEQ ID NO: 216584 - DNA, 75 bp, synthetic construct
  source 1..75: mol_type = other DNA
ttcaaatcaattcgataataaagatgcaaacaaagataaattagataatatagatgcaaccaaagataaattaga

SEQ ID NO: 216585 - DNA, 75 bp, synthetic construct
  source 1..75: mol_type = other DNA
tacctgacattaaatttaatttatacatgcgtcgcaacagcccgcagaaagcagcgaaagtgttgtttgaatcgc

SEQ ID NO: 216586 - DNA, 75 bp, synthetic construct
  source 1..75: mol_type = other DNA
caactatcgggcggtcaacaacagcgtgtcgccatcgccagggcactggcccacgaaccgatggtggtcattgcc

SEQ ID NO: 216587 - DNA, 75 bp, synthetic construct
  source 1..75: mol_type = other DNA
ttaaaaaccggattcaaagatgccagtatgggcacgctgatgacagtttcgaaggagctgtttaaccgagctcta

SEQ ID NO: 216588 - DNA, 75 bp, synthetic construct
  source 1..75: mol_type = other DNA
gtcggccgcgaaagtggggaaacagtagacgagatcgccatgaacccggtgtatttctcgatcagaacgataaag

SEQ ID NO: 216589 - DNA, 75 bp, synthetic construct
  source 1..75: mol_type = other DNA
ttgcccggggccttttcctccgaacggatttaccgtacttacagatgcagcatatggtaacggagactgggtgat

SEQ ID NO: 216590 - DNA, 75 bp, synthetic construct
  source 1..75: mol_type = other DNA
tattattgtttcatactcaagtgctttatttattaaattttatggctacaattcgtttgttagagggcgctcgtg

SEQ ID NO: 216591 - DNA, 75 bp, synthetic construct
  source 1..75: mol_type = other DNA
aatcggacaacccgaagcgtatcgttaacggaagcgggttctaaggaaggtgcgaataagcaggtcatttcttcc

SEQ ID NO: 216592 - DNA, 75 bp, synthetic construct
  source 1..75: mol_type = other DNA
cagtaaattggaatgatgctaaagctttctgtcaatggattgggaaagtctcaggaaaatctattactttaccta

SEQ ID NO: 216593 - DNA, 75 bp, synthetic construct
  source 1..75: mol_type = other DNA
aggcgcgacggtagtgctgattactaactcggagtccaacccgtacggcaaattttgtaatctgcagtttgtgtt

SEQ ID NO: 216594 - DNA, 75 bp, synthetic construct
  source 1..75: mol_type = other DNA
aatgccacggtcagcaaagcaacggtaggccgctttttaaataaactggggtttatcggttatgccgatttccgg

SEQ ID NO: 216595 - DNA, 75 bp, synthetic construct
  source 1..75: mol_type = other DNA
tcgttttcattacgtccatccgaagaagaaaaaaattcgtttgctctgaagttaatgcatttagatcttgatgaa

SEQ ID NO: 216596 - DNA, 75 bp, synthetic construct
  source 1..75: mol_type = other DNA
tgatgccagcatcattaagtgatgataaaattatcaaacatatggcgcgcaagaccctcaaactttttgtaaaaa

SEQ ID NO: 216597 - DNA, 75 bp, synthetic construct
  source 1..75: mol_type = other DNA
cgattggatcaatgactggtatgctgaggattattaccaacattctcctgaaaaagatccccaggggccagctaa

SEQ ID NO: 216598 - DNA, 75 bp, synthetic construct
  source 1..75: mol_type = other DNA
attagctcacattatgaggaaaggtatctttttgcgctatgtaaattcaaagggttagcctcattttcccgatgg

SEQ ID NO: 216599 - DNA, 75 bp, synthetic construct
  source 1..75: mol_type = other DNA
aaaatgcggtttctgaaactgacctgtcatcgaataaaaataatgttgatcagtttattgaatgcgctaagagaa

SEQ ID NO: 216600 - DNA, 75 bp, synthetic construct
  source 1..75: mol_type = other DNA
acaagcggctggcgcgattgctgattgcctggaagctggaacaacagcaacaggaaaatagcgcggtgctgaaat

SEQ ID NO: 216601 - DNA, 75 bp, synthetic construct
  source 1..75: mol_type = other DNA
aatgatggactcagacagatattgagcgcggaattggacgctcaggcagttgcatcctacggtgaatccatcaac

SEQ ID NO: 216602 - DNA, 75 bp, synthetic construct
  source 1..75: mol_type = other DNA
tagttgataaccatatctatgatattaaaaatgatatggagagtggttactgttttcctaacagtttattttcag

SEQ ID NO: 216603 - DNA, 75 bp, synthetic construct
  source 1..75: mol_type = other DNA
tgggttaaaaaaatgaacggagaatttcccgaagcgcaggatatcgatagttacgattataatgatcatgattca

SEQ ID NO: 216604 - DNA, 75 bp, synthetic construct
  source 1..75: mol_type = other DNA
aacaataccagtgattcacagccggtaacgtttgtggcggacaaaacctcggctctggttgttcttcagatatca

SEQ ID NO: 216605 - DNA, 75 bp, synthetic construct
  source 1..75: mol_type = other DNA
cagtagatataacgctggtggcaggcccggcagacgcttcgcagtccgtccttaagaacaaccggtcatcactga

SEQ ID NO: 216606 - DNA, 75 bp, synthetic construct
  source 1..75: mol_type = other DNA
atccggtggcggggataacggtaaacttcaccatgccacaggacgttgcggcaaactttaccctcgaaaataacg

SEQ ID NO: 216607 - DNA, 75 bp, synthetic construct
  source 1..75: mol_type = other DNA
ggcggaaaagtgagaactaactcttcaggtcaggctccagtcgttctgaccagcaataaagtcggtacatatacg

SEQ ID NO: 216608 - DNA, 75 bp, synthetic construct
  source 1..75: mol_type = other DNA
ggcggctgattatgcgttttcaagctctgcctcctgggttgatgttgatgcttcaggtaaagtgacattcaaaaa

SEQ ID NO: 216609 - DNA, 75 bp, synthetic construct
  source 1..75: mol_type = other DNA
accagttcgacaatgaggtgaacaatcttccggtaacattcagctcagcctcttcaggcctcaccctcaccccag

SEQ ID NO: 216610 - DNA, 75 bp, synthetic construct
  source 1..75: mol_type = other DNA
agtgactgatggaaacggcaacccgttagccaatgaggcggtgacattcacgctaccggcagatgtgagcgcaag

SEQ ID NO: 216611 - DNA, 75 bp, synthetic construct
  source 1..75: mol_type = other DNA
gatgcggctaaagcccccgccgtggtgaatatcatttctgtttcgtcatcccgaactcactcgtcaattaagatt

SEQ ID NO: 216612 - DNA, 75 bp, synthetic construct
  source 1..75: mol_type = other DNA
acttgcgttccctatggctgcggcagcacaaggtgtggtaaacgccgcaacccaacaaccagttcctgcacaaat

SEQ ID NO: 216613 - DNA, 75 bp, synthetic construct
  source 1..75: mol_type = other DNA
tcggcagcaattgggaaaggattacggcgacgccaaaatcaggaggccctagctatgtatacgaaatccgtgtga

SEQ ID NO: 216614 - DNA, 75 bp, synthetic construct
  source 1..75: mol_type = other DNA
aatgaccgcgacagtccgggatgcaaaaggcaacctgctcaatgacgtcaaggtcactttcaatgttaattcagc

SEQ ID NO: 216615 - DNA, 75 bp, synthetic construct
  source 1..75: mol_type = other DNA
gcatgatgcggcaggtaatcctgttatcgggctggagctctcgacgcgtcacgaaggtgttcaagacattaccct

SEQ ID NO: 216616 - DNA, 75 bp, synthetic construct
  source 1..75: mol_type = other DNA
aaattatcgagttgacggctgtgccagacctcataatcgccggtaccccgcagaacagctccggcagcgtcatca

SEQ ID NO: 216617 - DNA, 75 bp, synthetic construct
  source 1..75: mol_type = other DNA
ttttccagtcatgctgttaagtgtggccagaaaggaattgtttgatcttagtgcaatctatcgagcggaattcat

SEQ ID NO: 216618 - DNA, 75 bp, synthetic construct
  source 1..75: mol_type = other DNA
tgcttcgctgacgcgtatagcccggaccaacatttcatttattaagaaaatacccggtacagatgatcagataac

SEQ ID NO: 216619 - DNA, 75 bp, synthetic construct
  source 1..75: mol_type = other DNA
ttgaattactctggatgtgacttgtcaggtctaagtcttgtagggctgaatttatcatcagtaaatttttctgga

SEQ ID NO: 216620 - DNA, 75 bp, synthetic construct
  source 1..75: mol_type = other DNA
aaccctggggggcgggagtaatgcaattgcatccaagaataatccggcaaatggatttgttcttcccgcgggaag

SEQ ID NO: 216621 - DNA, 75 bp, synthetic construct
  source 1..75: mol_type = other DNA
cacataccattgatggtattgaactcatccaggtaaatggtacgtcaactgatactgcatttactcaggcaggac

SEQ ID NO: 216622 - DNA, 75 bp, synthetic construct
  source 1..75: mol_type = other DNA
ctttccagagtagctgattttgccttaaagaatgtgtcgaaagtgaaagttgtggctggaccaagacagggcttt

SEQ ID NO: 216623 - DNA, 75 bp, synthetic construct
  source 1..75: mol_type = other DNA
taaaggagtagatcttttcgaaaggaaaaggaaggaaatatacgataaatttacttctgagactggaggaaatca

SEQ ID NO: 216624 - DNA, 75 bp, synthetic construct
  source 1..75: mol_type = other DNA
aaggacagcgcgattgtcgccttgcaaacctcgaaagtggaaatcacgggtaatggagtggacgagacgttactc

SEQ ID NO: 216625 - DNA, 75 bp, synthetic construct
  source 1..75: mol_type = other DNA
ttacctttagcgtaacgccagaagatgcaacgttaagtagcggaacaatgaaaaccaatccttccggggaggcac

SEQ ID NO: 216626 - DNA, 75 bp, synthetic construct
  source 1..75: mol_type = other DNA
atgcgtgctcgtctgtctgccatctcactgacagatatccaaaaacacctggcgaaaatcatcattctggcaccg

SEQ ID NO: 216627 - DNA, 75 bp, synthetic construct
  source 1..75: mol_type = other DNA
gcctagcgcacacacaaacggcctttgtgtggcgtaatcgatttcatgatttcacttttcacaatcagccaggcg

SEQ ID NO: 216628 - DNA, 75 bp, synthetic construct
  source 1..75: mol_type = other DNA
gaaaagacgaaaccccgcactgtaggagcagtaacggggcttctaaccaacaacgtaaacgaggagccgttatgg

SEQ ID NO: 216629 - DNA, 75 bp, synthetic construct
  source 1..75: mol_type = other DNA
cctgtcgccccggacaaccgtggtcactacagccagccggtggtggatttgccggaaaccaaagcctgggctgaa

SEQ ID NO: 216630 - DNA, 75 bp, synthetic construct
  source 1..75: mol_type = other DNA
aaaacccaggtggctggagataaactggagatttcagcagagacagcttcgttgcctgtaaatggtggtaacggg

SEQ ID NO: 216631 - DNA, 75 bp, synthetic construct
  source 1..75: mol_type = other DNA
gctgactacaccgatcgaggactgctgacaaaagagtggatgaagggtaatcgtgtttcacacatcacttgcacg

SEQ ID NO: 216632 - DNA, 75 bp, synthetic construct
  source 1..75: mol_type = other DNA
gtaaagcggttactgccggatatgctaatttttatccatcagcaggtgtaatatcaataactgttggtgttaatg

SEQ ID NO: 216633 - DNA, 75 bp, synthetic construct
  source 1..75: mol_type = other DNA
gcgttcaaacatttatagataactatgcatttatttatgctgttgattatttgcctgaaatttacgttacagacg

SEQ ID NO: 216634 - DNA, 75 bp, synthetic construct
  source 1..75: mol_type = other DNA
tgattcatctggcaaatgcggcgctggagggcaccttaccaatgacaataccgggcgatgtggagcaggcgatga

SEQ ID NO: 216635 - DNA, 75 bp, synthetic construct
  source 1..75: mol_type = other DNA
agcgagtcgcttaaagcattttgccgaggggcactgcaatataaagataaagggttgtcactggttgacgatgac

SEQ ID NO: 216636 - DNA, 75 bp, synthetic construct
  source 1..75: mol_type = other DNA
aaaatgcctctggaagagtttgttggcatgtttgcgataccagcacttaccgttccggccgtaccggcaatccca

SEQ ID NO: 216637 - DNA, 75 bp, synthetic construct
  source 1..75: mol_type = other DNA
agttgtctcgggagttgttgggtgatggcgaggtgcaaaaggcccggcccatcgttgccaatctggccagcgaaa

SEQ ID NO: 216638 - DNA, 75 bp, synthetic construct
  source 1..75: mol_type = other DNA
aattcaaaccacgctggtcaataacgaagtaagcaagccactgtttgatatggcaaaaggtgaaacgccttttga

SEQ ID NO: 216639 - DNA, 75 bp, synthetic construct
  source 1..75: mol_type = other DNA
gcagggcgggctgacgcgcagtatggaatacgatgctgccggacgggtcatccgcctgaccagtgaaaacggcag

SEQ ID NO: 216640 - DNA, 75 bp, synthetic construct
  source 1..75: mol_type = other DNA
ttttcatacagggagagatatacatggaaaagattatctaaaggcctgtttgaccaaagaaatgttaatacgtta

SEQ ID NO: 216641 - DNA, 75 bp, synthetic construct
  source 1..75: mol_type = other DNA
cgctaaatatggcagatacaaacatcccaccagaaggtggtagatatgactgccaaatcaccattgacggagttt

SEQ ID NO: 216642 - DNA, 75 bp, synthetic construct
  source 1..75: mol_type = other DNA
cgaatgaagtcgctgcacggcgtagccttgcaggcagccgttatgatctggtggatcgcaacaacaacatcgttc

SEQ ID NO: 216643 - DNA, 75 bp, synthetic construct
  source 1..75: mol_type = other DNA
tccaacctcgaagtcagctatcaaaactatcatcgcggcgtattcagtagccagttgcagttagttgtgaaaccc

SEQ ID NO: 216644 - DNA, 75 bp, synthetic construct
  source 1..75: mol_type = other DNA
gggcgaacgccgctttagcctgcgtaacagcctgctaaaaagcggggaaccggtgtttgtactccgcatcgttca

SEQ ID NO: 216645 - DNA, 75 bp, synthetic construct
  source 1..75: mol_type = other DNA
gccgcttaactgcgggtatctgtctgataactcaacttgcgttccctatggctgcggcagcacaaggtgtggtaa

SEQ ID NO: 216646 - DNA, 75 bp, synthetic construct
  source 1..75: mol_type = other DNA
attgcgacattatctgccagcaataatggtgtgctcgccaatgagaatgcagcaaacaccgtctcggtcaatgtc

SEQ ID NO: 216647 - DNA, 75 bp, synthetic construct
  source 1..75: mol_type = other DNA
taagactaacactcacggcatcaagtccgcttatcggcgtcaatgacccatcgggagcaactctgactgtaaggt

SEQ ID NO: 216648 - DNA, 75 bp, synthetic construct
  source 1..75: mol_type = other DNA
cgccccattccgcgcgttactgcagatcgatggtcaacgtctgaagcaaaagcaaatcgctgaatggctggaaga

SEQ ID NO: 216649 - DNA, 75 bp, synthetic construct
  source 1..75: mol_type = other DNA
cacgcagcgagaatgtatctacattaaggaaggtgcgaataagcaggtcatttcttcccaagctgactcgctgat

SEQ ID NO: 216650 - DNA, 75 bp, synthetic construct
  source 1..75: mol_type = other DNA
cggttgttgcgctattaccagaaattacaggcattaagttgtgagccggataaaaagttcagtctggatgtgtgg

SEQ ID NO: 216651 - DNA, 75 bp, synthetic construct
  source 1..75: mol_type = other DNA
gagcgttttcgtttccgcggtgccatgactacaaccagcattcctgactttgtgcgttacgcagcaggctacgcc

SEQ ID NO: 216652 - DNA, 75 bp, synthetic construct
  source 1..75: mol_type = other DNA
ccctgcagcaggtgaaagacctggttctttccggttaccacctggatgcagcaaaagttacggcatgcccgactg

SEQ ID NO: 216653 - DNA, 75 bp, synthetic construct
  source 1..75: mol_type = other DNA
aagtggattgacgatcgggcgcaggaaattatcgacgccctgccgaaagagccgtcaggcctgttccgcttctct

SEQ ID NO: 216654 - DNA, 75 bp, synthetic construct
  source 1..75: mol_type = other DNA
aaagttggcgctgcagtacataacctggatgcaacaattaagagtgctgcgaacacggtttctgtcccagtaaat

SEQ ID NO: 216655 - DNA, 75 bp, synthetic construct
  source 1..75: mol_type = other DNA
gttgggatcatatggggatgttgggctacgagcgcgatactacgccgaagctggcaaaagagaaaaacctggtga

SEQ ID NO: 216656 - DNA, 75 bp, synthetic construct
  source 1..75: mol_type = other DNA
tggcttgctggtttgggggccgattcgtctgattgatgtagctcataagcgtgccgatcgtatagccggcgtgga

SEQ ID NO: 216657 - DNA, 75 bp, synthetic construct
  source 1..75: mol_type = other DNA
gatcggcaattgcatgatatggtgatacgcgtcgataccagtagccggcaacctatcgatgcgacctgccgtttc

SEQ ID NO: 216658 - DNA, 75 bp, synthetic construct
  source 1..75: mol_type = other DNA
ataaagatggtgttctgctgtctgctcgtgttctgctgatggttctgtttgtattgtttggttggcagaaaatta

SEQ ID NO: 216659 - DNA, 75 bp, synthetic construct
  source 1..75: mol_type = other DNA
atatagtgcagcgtacgtttctggtattgagtccggtaaaaacttggtaatcacttttaatgatgctgtaaaatc

SEQ ID NO: 216660 - DNA, 75 bp, synthetic construct
  source 1..75: mol_type = other DNA
gctaacaccccaggcgatggcagaaaaattaattcctgaaactgatgctgagttgttagtttggtctgatgccac

SEQ ID NO: 216661 - DNA, 75 bp, synthetic construct
  source 1..75: mol_type = other DNA
tcgataaaaaggcgtatgagacggagatctggttcagccgggatacgtggcagcagatgctgactgcctatcctg

SEQ ID NO: 216662 - DNA, 75 bp, synthetic construct
  source 1..75: mol_type = other DNA
ctacaacacctacaacacctacaacacctacaacacctacaacacctacaacacctacaacacctacagagtctc

SEQ ID NO: 216663 - DNA, 75 bp, synthetic construct
  source 1..75: mol_type = other DNA
aatgaaatcgagcgttctctggagaaaaagccagaaggcaagcatctgattgtgctgcataccaaagggtcgcac

SEQ ID NO: 216664 - DNA, 75 bp, synthetic construct
  source 1..75: mol_type = other DNA
ctgggcgcaagtggatgaatcttcagacaatcgttcgctgatgaatccggcgaaaaaattcacctataccccgac

SEQ ID NO: 216665 - DNA, 75 bp, synthetic construct
  source 1..75: mol_type = other DNA
aaactcggtctgaagaaaccgctcatctggtgtatgagtttcatcctggtcttgaccggaccgtttatgatttag

SEQ ID NO: 216666 - DNA, 75 bp, synthetic construct
  source 1..75: mol_type = other DNA
aactgcacgatatgttagtacgtgttgataccagtagcaggcagcccatagactccacctgccgattccagtatg

SEQ ID NO: 216667 - DNA, 75 bp, synthetic construct
  source 1..75: mol_type = other DNA
acgcggtaattaccgcagaagcccacacagaactggggcagctttgcgaaaccttcccaggaattgcggtttgcg

SEQ ID NO: 216668 - DNA, 75 bp, synthetic construct
  source 1..75: mol_type = other DNA
aacgtctccacgatttcgcgttcgatgatgaataaagccatcgaaaaaggcgtggcggcggaaaacgtcatcttc

SEQ ID NO: 216669 - DNA, 75 bp, synthetic construct
  source 1..75: mol_type = other DNA
aggtgcgggtcattaccgcgccgccttactacccgcagtggcaggtgggcgagaactattccgcctggcggtaca

SEQ ID NO: 216670 - DNA, 75 bp, synthetic construct
  source 1..75: mol_type = other DNA
ttcttgctgcatcattatcggcattatcaactgacatgattgtgcctgcgttaccagaactacagaaagcattta

SEQ ID NO: 216671 - DNA, 75 bp, synthetic construct
  source 1..75: mol_type = other DNA
aacctgcccttcattgcctatatcgataagggatacagtgctcagggactggttcagcttattcgcgacagtctt

SEQ ID NO: 216672 - DNA, 75 bp, synthetic construct
  source 1..75: mol_type = other DNA
gagtggacccgaccttatcagcaacagcgatcgtaccgcccatgatgagcttgtcagaagactggctgaacgggt

SEQ ID NO: 216673 - DNA, 75 bp, synthetic construct
  source 1..75: mol_type = other DNA
cggagaattactgccttttacccgcatacctgacgatgatgttcatcttattcgtgaattacgggatgctgaatc

SEQ ID NO: 216674 - DNA, 75 bp, synthetic construct
  source 1..75: mol_type = other DNA
gaagataaatttatccgaaaaaatgccagaacgatgaccggtaagcaaataggagaatatctggggcgagaccgg

SEQ ID NO: 216675 - DNA, 75 bp, synthetic construct
  source 1..75: mol_type = other DNA
atacttactgggacgccagcagtaatgtgaattattcattatcacttagccgcgattttgatatcgggccattaa

SEQ ID NO: 216676 - DNA, 75 bp, synthetic construct
  source 1..75: mol_type = other DNA
gttttcagcatgtcgcagacgccgatgttgatgcccttcgtaaccagcttggcctgccggataacaaaaaaatca

SEQ ID NO: 216677 - DNA, 75 bp, synthetic construct
  source 1..75: mol_type = other DNA
actacctatctaaaaacggcgatgattcaacaagccagtattggtactgcatatatcgcagatctagcagttact

SEQ ID NO: 216678 - DNA, 75 bp, synthetic construct
  source 1..75: mol_type = other DNA
gaaaaggtcgtgcacccgctcatgtccgtccgtggacacctgaagaagatgcactgctgattgcgctttatccat

SEQ ID NO: 216679 - DNA, 75 bp, synthetic construct
  source 1..75: mol_type = other DNA
agagctggcagccagagcgattgccggaatgctgtatccgggcgtgaagcagtctgacctcagtgaagagcagaa

SEQ ID NO: 216680 - DNA, 75 bp, synthetic construct
  source 1..75: mol_type = other DNA
atcggggttgaaggtgcagatggtgagccgctgaacggtggtggtgggatagctaaaggcggtaaatctaaagat

SEQ ID NO: 216681 - DNA, 75 bp, synthetic construct
  source 1..75: mol_type = other DNA
tttgagaaaaaacacggtactcagctggagctgctgttccggtttatgaatcgtgcgctggcgatcggcgtaata

SEQ ID NO: 216682 - DNA, 75 bp, synthetic construct
  source 1..75: mol_type = other DNA
atccgccaactggagcaggcattatctctggcccgaagtatggcgaaggccgcaactgctgcaaatgctactcag

SEQ ID NO: 216683 - DNA, 75 bp, synthetic construct
  source 1..75: mol_type = other DNA
aaatggggggagctagaaacggctcggcaggagaaagctatctcaggggtaaccagattgaagctccgcttggcg

SEQ ID NO: 216684 - DNA, 75 bp, synthetic construct
  source 1..75: mol_type = other DNA
atattcatgaagggacgcataacaataagatgttatattcctctaagttatttgtttatgttccgtatgatgcaa

SEQ ID NO: 216685 - DNA, 75 bp, synthetic construct
  source 1..75: mol_type = other DNA
agaggtcgatttactgcttcgcggcggcagtattccgtcaggagcaggcctacgtatcttctatcggaaccagcg

SEQ ID NO: 216686 - DNA, 75 bp, synthetic construct
  source 1..75: mol_type = other DNA
ttttacacggtgcttctggagggggaggatgaggtggatccgatggcggatgagatttgttcgatcctggatggt

SEQ ID NO: 216687 - DNA, 75 bp, synthetic construct
  source 1..75: mol_type = other DNA
cagaacaggcgcgggaaatgtgcgataccgcgcgcaaacagggcaaggtgctggcctacgactttcaccatcgtt

SEQ ID NO: 216688 - DNA, 75 bp, synthetic construct
  source 1..75: mol_type = other DNA
cgcgagcaaaccaccgcggcgctggcagaactggcccggcgtaatctcattaactggctgatcagttccatcctg

SEQ ID NO: 216689 - DNA, 75 bp, synthetic construct
  source 1..75: mol_type = other DNA
tagtagacagcatcgccgccgtggaaaccggatctaccggaatgcacagagatgtaccacgggaagacgtgacca

SEQ ID NO: 216690 - DNA, 75 bp, synthetic construct
  source 1..75: mol_type = other DNA
ggttgctctggctggggatgataacctgcatcatgacctggtatatggccatcatgtcggtttccactattttta

SEQ ID NO: 216691 - DNA, 75 bp, synthetic construct
  source 1..75: mol_type = other DNA
gattcggggcccgcgcgttagcgtgggaggtgctcctgttcttggtactgatggcactccagttatgcgcgatgc

SEQ ID NO: 216692 - DNA, 75 bp, synthetic construct
  source 1..75: mol_type = other DNA
tctggtgagtaccgatccggcttccaatgtcggccaggtatttagccagactatcggccaccgaatcacagatat

SEQ ID NO: 216693 - DNA, 75 bp, synthetic construct
  source 1..75: mol_type = other DNA
atgaatatgccatttttaaaagacattcccccgttcattttcttcaccggcaaaggtggcgtgggtaaaacatcc

SEQ ID NO: 216694 - DNA, 75 bp, synthetic construct
  source 1..75: mol_type = other DNA
atttacaagccgatcttgaacgtgccgggattcatccatggggctggattatcaataacagtctttccatcgctg

SEQ ID NO: 216695 - DNA, 75 bp, synthetic construct
  source 1..75: mol_type = other DNA
aggacacagaatcgggactgtactataaccggttccggtactatgattgcgggacggggcagtatatctcttcag

SEQ ID NO: 216696 - DNA, 75 bp, synthetic construct
  source 1..75: mol_type = other DNA
ttcacgcccgttggcgttttcgcccccatgtcagaaaaaacaaccggtaagcgaccggaagggcaaccccactca

SEQ ID NO: 216697 - DNA, 75 bp, synthetic construct
  source 1..75: mol_type = other DNA
acctgcagtccgatcttgaacgtgcggggattcatccctggggctggattatcaataacagcctttcgattgcac

SEQ ID NO: 216698 - DNA, 75 bp, synthetic construct
  source 1..75: mol_type = other DNA
ttctaagccagaggcgacgcctgtcacgtcctgtttgagtgggataaacgccacgatgagttcgatctcgccata

SEQ ID NO: 216699 - DNA, 75 bp, synthetic construct
  source 1..75: mol_type = other DNA
aatctaatacacttttcaataactggctgaaatatttgtataaacaagagtggacagcatattgcacgacccaag

SEQ ID NO: 216700 - DNA, 75 bp, synthetic construct
  source 1..75: mol_type = other DNA
gataaactcagccatacaatagtaacatcactgggacattttggttatcgggctaccgaacaaacaaaaaagaat

SEQ ID NO: 216701 - DNA, 75 bp, synthetic construct
  source 1..75: mol_type = other DNA
catggctgcggccattgcagtcagactggccgaaatgggatttgatgtgcatctcacgacgtcagatcctgctgc

SEQ ID NO: 216702 - DNA, 75 bp, synthetic construct
  source 1..75: mol_type = other DNA
ttttttgtttgcatggggggggtgtttttttatttttgtatatcgggtgcttggtggtcctcgagtaggtagaga

SEQ ID NO: 216703 - DNA, 75 bp, synthetic construct
  source 1..75: mol_type = other DNA
gaactatctctgccgagcatgctggacattgcgatgcatcccggctgggtgtggcgagccatcaggcccgcaggc

SEQ ID NO: 216704 - DNA, 75 bp, synthetic construct
  source 1..75: mol_type = other DNA
tgtagaaacatattatgctgctattaatgcaatcagccaaagcctgagttttagtgctgatgaactaaaaacgta

SEQ ID NO: 216705 - DNA, 75 bp, synthetic construct
  source 1..75: mol_type = other DNA
aatagatcttaagtcttataactcaaatcgtgccgctaaacagatagttactggcattcatttttgtaagtggct

SEQ ID NO: 216706 - DNA, 75 bp, synthetic construct
  source 1..75: mol_type = other DNA
ttagattctactagtgtatctaaaccagtttggaaatttttaaaatcttcaaccttaactgggctatcctctgtt

SEQ ID NO: 216707 - DNA, 75 bp, synthetic construct
  source 1..75: mol_type = other DNA
tgctcaagagaagatcgagtgctggcgacaggaatataaccagcaacgacctcattcatcattaaacaacctgac

SEQ ID NO: 216708 - DNA, 75 bp, synthetic construct
  source 1..75: mol_type = other DNA
gggtttcctacatctccattaattgcaaactttgtggcaagagaacttgatgaaaaactgacgcaaaaactaaat

SEQ ID NO: 216709 - DNA, 75 bp, synthetic construct
  source 1..75: mol_type = other DNA
atttttcataccaaatgataaggcgagaaacaagttaattagtacaatactgtttttgattggcgtagcattaat

SEQ ID NO: 216710 - DNA, 75 bp, synthetic construct
  source 1..75: mol_type = other DNA
tgatccgtgcgctaaccagcttgttccttctgccgctgctgacagcctgcgggaatacgcagacagtttacgttc

SEQ ID NO: 216711 - DNA, 75 bp, synthetic construct
  source 1..75: mol_type = other DNA
taatcatgatcataataaactactgggtgtagttctacgtacttctatcgatgccgaccgagtttgccgtgctga

SEQ ID NO: 216712 - DNA, 75 bp, synthetic construct
  source 1..75: mol_type = other DNA
gtgataacagatgtctggaaatataggggcaaatccacgcaggttgacctcagtgcgaactaccatgaagggcaa

SEQ ID NO: 216713 - DNA, 75 bp, synthetic construct
  source 1..75: mol_type = other DNA
aacggaataatttaaagattcaattggtaagagagtttgcagattggataatagacagtgtaatagagcacatca

SEQ ID NO: 216714 - DNA, 75 bp, synthetic construct
  source 1..75: mol_type = other DNA
atatagcgacaatgagtgagcactcatccctggaaggtttactgagtcttgataaagaacgcctgatggatgtgt

SEQ ID NO: 216715 - DNA, 75 bp, synthetic construct
  source 1..75: mol_type = other DNA
tttgattgcccgcactgcgccattgaggagatcagcttgctggtactcaaaatcagcgatagcgattacgccggc

SEQ ID NO: 216716 - DNA, 75 bp, synthetic construct
  source 1..75: mol_type = other DNA
ttcgccttgcacactggcagcggcatccgggatccctggcaataattggcgggggcgccgcgggtgtggagctgg

SEQ ID NO: 216717 - DNA, 75 bp, synthetic construct
  source 1..75: mol_type = other DNA
tgtctctacaaatatgaaaggggctagcaaattaattctggattgttttaaaagaacaatgaaagagattggtcc

SEQ ID NO: 216718 - DNA, 75 bp, synthetic construct
  source 1..75: mol_type = other DNA
gcttaaagaagaatttggaatagctgaggaacaaaaagttattctttactcaggcaatataggtgaaaagcaggg

SEQ ID NO: 216719 - DNA, 75 bp, synthetic construct
  source 1..75: mol_type = other DNA
ctgatggccaattacccgtcggcaaatattcactaagcactctgattaataataagaggacgccggtaatgactc

SEQ ID NO: 216720 - DNA, 75 bp, synthetic construct
  source 1..75: mol_type = other DNA
catcaccgatgttctactagaaaacgtagctgtttctctagaaaaagcagtagttgacgttgttgaagcacaagc

SEQ ID NO: 216721 - DNA, 75 bp, synthetic construct
  source 1..75: mol_type = other DNA
cttatgctaataaaatgcttgataaagaagtgatcctaaatgaataccttgaggtaatatctagtaaggttaact

SEQ ID NO: 216722 - DNA, 75 bp, synthetic construct
  source 1..75: mol_type = other DNA
agtatggctgattgccacttagttattcagaaaagaggcgcagctgatgcggtgttaccttcaaaacttacaaac

SEQ ID NO: 216723 - DNA, 75 bp, synthetic construct
  source 1..75: mol_type = other DNA
gagcgctactccagctggcgctatcgctgcgaagaaggcgctgcgaccgtctggcgttgcccgctgtacgtgccg

SEQ ID NO: 216724 - DNA, 75 bp, synthetic construct
  source 1..75: mol_type = other DNA
gcgccaatgtggatgccagagcggcgcgcgaagttagcgaacttaaagaactgcacaacaatacctttgaaaacg

SEQ ID NO: 216725 - DNA, 75 bp, synthetic construct
  source 1..75: mol_type = other DNA
tgccatccccagattactttggctggcgcaccatcgttccgatatctaccgacaggcgtcgaccatcaccatgat

SEQ ID NO: 216726 - DNA, 75 bp, synthetic construct
  source 1..75: mol_type = other DNA
cctgtaataccggaaagataccgtcagtaacacaggacagtgtggaaagtcttacggattttctgaagaaaaaaa

SEQ ID NO: 216727 - DNA, 75 bp, synthetic construct
  source 1..75: mol_type = other DNA
cactacttccagattcaatcctaggtcgtatgggtgttaaagtttattctggtatgaccaaccgtgaatttacta

SEQ ID NO: 216728 - DNA, 75 bp, synthetic construct
  source 1..75: mol_type = other DNA
gattgacggcgacaaggccatcgtcaataacgaaggcgagagcaccatcaccaacggtggcaccggcacacagat

SEQ ID NO: 216729 - DNA, 75 bp, synthetic construct
  source 1..75: mol_type = other DNA
attaagcgtggcaggctctgcgattgttgcgttagctcctgatacagcaatattaattattggacgcgggctaca

SEQ ID NO: 216730 - DNA, 75 bp, synthetic construct
  source 1..75: mol_type = other DNA
gccagcaacagcagggatagatgatttgggtgaaattttagctaaaatgaaacagagaacatcgagaggaataag

SEQ ID NO: 216731 - DNA, 75 bp, synthetic construct
  source 1..75: mol_type = other DNA
cggcccgctgccgttcatcctctcccgtacctacagcagttaccggacaaaaacgcccgcgccggtggggagcct

SEQ ID NO: 216732 - DNA, 75 bp, synthetic construct
  source 1..75: mol_type = other DNA
gtcacgagaaaagcgagcgcttatgctgcgccaagacataaagaaaggactcgtcggtgggcaaatagcagagca

SEQ ID NO: 216733 - DNA, 75 bp, synthetic construct
  source 1..75: mol_type = other DNA
aatacagatcctctggggttagaagtttttcctagaccattccccttgccaattccatggcccaaaagccctgca

SEQ ID NO: 216734 - DNA, 75 bp, synthetic construct
  source 1..75: mol_type = other DNA
ccgtaccgtctgccagggcagcaacacgatgaggagtcggggctgtattataaccgtcaccggtactacgatccg

SEQ ID NO: 216735 - DNA, 75 bp, synthetic construct
  source 1..75: mol_type = other DNA
acggggtggatgtcgctgtcgcgtaaaccggaggtgacgtggtacggctgggacggcgaccacctgacgacggtg

SEQ ID NO: 216736 - DNA, 75 bp, synthetic construct
  source 1..75: mol_type = other DNA
actgcaacgtatttgtgtactaccagaacgatacggccattctacagcagggcgtcatgtccagcggtgatttct

SEQ ID NO: 216737 - DNA, 75 bp, synthetic construct
  source 1..75: mol_type = other DNA
tctggtagcggctggcgtgtggaatggtggccctatcggacagctgaattccggcgatacgctgaccaaaggcta

SEQ ID NO: 216738 - DNA, 75 bp, synthetic construct
  source 1..75: mol_type = other DNA
atgacgcagggcttacctgtatccaacgttgtaaacgttgatgtgatcatctcgccgaaagcggctactggtcgt

SEQ ID NO: 216739 - DNA, 75 bp, synthetic construct
  source 1..75: mol_type = other DNA
gaataaggaaggtttgaaaaagtactgtgcccgtgatttttcgggtgcctgtctctcggccattcataccgatca

SEQ ID NO: 216740 - DNA, 75 bp, synthetic construct
  source 1..75: mol_type = other DNA
ctcacggcaattgctcgcaaaaacgctgagcagcaaatgagtagtcaaaagccaaagaaaagtgccgactggctt

SEQ ID NO: 216741 - DNA, 75 bp, synthetic construct
  source 1..75: mol_type = other DNA
taccaaatcagcaattgtcttctgatgaagaggggattgcctatatcgaatactttccgcggaaggcaagtcgtg

SEQ ID NO: 216742 - DNA, 75 bp, synthetic construct
  source 1..75: mol_type = other DNA
tggatgccggatacgcattgcgtatgcgggaatacctggcgacctggaaaaagcggatcaaacatcagccagtgt

SEQ ID NO: 216743 - DNA, 75 bp, synthetic construct
  source 1..75: mol_type = other DNA
gcaggttttgagctgctgagtatcccgggccgcgattttaaccatggaggaacgcggaatttggctgttgaaatg

SEQ ID NO: 216744 - DNA, 75 bp, synthetic construct
  source 1..75: mol_type = other DNA
caggggtttgagttaataagtattaattcaaaagatttcaatcatggagcgacaagaaatcttgcggtggatctg

SEQ ID NO: 216745 - DNA, 75 bp, synthetic construct
  source 1..75: mol_type = other DNA
acccttgttccggctcgatgggaagcagtctagtcgtctgcgtattgtccgtacgggaggtgatttccctatgga

SEQ ID NO: 216746 - DNA, 75 bp, synthetic construct
  source 1..75: mol_type = other DNA
taaaagatattttgatattggtgtttttcatactgatgaatcttggattagaaatagttttgggggggcgggagg

SEQ ID NO: 216747 - DNA, 75 bp, synthetic construct
  source 1..75: mol_type = other DNA
atgcctaatcgcattcctctcgatcctgtattgcccaaaaattttgactgcactcctaacgagaaacgctttaaa

SEQ ID NO: 216748 - DNA, 75 bp, synthetic construct
  source 1..75: mol_type = other DNA
tctaatacgatactatgtgaagatatgtactacacggcaaaggctattcttgcaggatataaagtagcatatgta

SEQ ID NO: 216749 - DNA, 75 bp, synthetic construct
  source 1..75: mol_type = other DNA
attgaggttgagcttcctaatgttgatgctgatcgtcgtttgttgcggcccgcaatgcttgaggctttgctggaa

SEQ ID NO: 216750 - DNA, 75 bp, synthetic construct
  source 1..75: mol_type = other DNA
ttcccttccccaaatgctgagtctccagagtatgggattaaatttacctatgtgtcaaaaggtcggttctccaat

SEQ ID NO: 216751 - DNA, 75 bp, synthetic construct
  source 1..75: mol_type = other DNA
agaacctggacgaatggaatttgatctggtggtgatggacgaagcgtctcaggtgaagccagaggatgcattggg

SEQ ID NO: 216752 - DNA, 75 bp, synthetic construct
  source 1..75: mol_type = other DNA
taaacgctattttgacataggtgtattccatacggatgaaccttggattaggaatagttttggaggtgcgggtgg

SEQ ID NO: 216753 - DNA, 75 bp, synthetic construct
  source 1..75: mol_type = other DNA
cttataatggtggggatttgtggcgtactaccgtcgataatattaaaaaaaacacgcctgcaaacacattgatac

SEQ ID NO: 216754 - DNA, 75 bp, synthetic construct
  source 1..75: mol_type = other DNA
gttaacccgacgccgttttacatcaacctgtccacgctgacggtggggggtaaggaagtgaaggagcgtgaatat

SEQ ID NO: 216755 - DNA, 75 bp, synthetic construct
  source 1..75: mol_type = other DNA
acgaagaatgtcgcgggcagcttatccacgcgctggcggcacggatccaaagcgaatttggcgtgaccgcggcta

SEQ ID NO: 216756 - DNA, 75 bp, synthetic construct
  source 1..75: mol_type = other DNA
ggaaaatcaggacagtatttatctgttcctcgatattatcggtgggatgctggggccggtaattggtgtcatgat

SEQ ID NO: 216757 - DNA, 75 bp, synthetic construct
  source 1..75: mol_type = other DNA
gggcaaattaatcttgatgaattgtataccgcatccggtgattttaaatactacgataacggctttaaccttacc

SEQ ID NO: 216758 - DNA, 75 bp, synthetic construct
  source 1..75: mol_type = other DNA
ccgggcgttattcagctgggagctgttaaaactggtgcgcttggtacagcagtagattttgcctttaaaccttct

SEQ ID NO: 216759 - DNA, 75 bp, synthetic construct
  source 1..75: mol_type = other DNA
ttcttggctcattcaacgctaaccagtcatacacggtcggcactacgtacacacaatccgaagtcgcagctctcg

SEQ ID NO: 216760 - DNA, 75 bp, synthetic construct
  source 1..75: mol_type = other DNA
ttgcctcagcggcgatcgtttctatgcacatatggataagattgctgctgccgaatctattttcggtgagcgggt

SEQ ID NO: 216761 - DNA, 75 bp, synthetic construct
  source 1..75: mol_type = other DNA
ctccaatctttgactacattccgagcggtattcagaaggcagaaaatagtggcttcctgttcctggtggtgatca

SEQ ID NO: 216762 - DNA, 75 bp, synthetic construct
  source 1..75: mol_type = other DNA
ttggtccggtaattggtgtcatgatggcgcattattttgtggtgatgcgtgggcaaattaatcttgatgaactgt

SEQ ID NO: 216763 - DNA, 75 bp, synthetic construct
  source 1..75: mol_type = other DNA
cctcgttctttgcggtactggttattctgatgacaactatctccactaacgccaccggtaatattattccggccg

SEQ ID NO: 216764 - DNA, 75 bp, synthetic construct
  source 1..75: mol_type = other DNA
ggcgcattattttgtggtgatgcgtgggcaaattaatcttgatgagctgtacaccgcagcaggcgattataaata

SEQ ID NO: 216765 - DNA, 75 bp, synthetic construct
  source 1..75: mol_type = other DNA
gtactgattgccagtattattagcctgctgatctgcccgtggaagttaatggaaaatcaggacagtatttatctg

SEQ ID NO: 216766 - DNA, 75 bp, synthetic construct
  source 1..75: mol_type = other DNA
taattactttcttactcttctggctggttaacgttggtattggttttggcggtggcaaagttttaaataaattca

SEQ ID NO: 216767 - DNA, 75 bp, synthetic construct
  source 1..75: mol_type = other DNA
gcgcactggctctggaagcggttcctgtcgtgcagagcggtgtatcgctaacggcggcggaatttagcgccagtg

SEQ ID NO: 216768 - DNA, 75 bp, synthetic construct
  source 1..75: mol_type = other DNA
ctgttcctgaaagatccggcaacgactaaagaagcgccgcaaacgctggcgcaggaagtagaccgctcggttaaa

SEQ ID NO: 216769 - DNA, 75 bp, synthetic construct
  source 1..75: mol_type = other DNA
atgtttatgatcccccggaacgttttatcgcttacataaaaaaaaaacagagaaaatctgaacatcacactttca

SEQ ID NO: 216770 - DNA, 75 bp, synthetic construct
  source 1..75: mol_type = other DNA
cgtaatatctccgtactgccccttaatgtttatgatcccccggaacgttttatcgcttacataaaaaaaaaacag

SEQ ID NO: 216771 - DNA, 75 bp, synthetic construct
  source 1..75: mol_type = other DNA
acatcgccatgagcaagggtaataaagacgtcgtgttatcttatatatcaacgctgggtacttttgcaaataaat

SEQ ID NO: 216772 - DNA, 75 bp, synthetic construct
  source 1..75: mol_type = other DNA
cgtttctcagtggtacccgtccgcgcctggtgctttctcttgatggtcgcccgctgacctacaacgaacaggcct

SEQ ID NO: 216773 - DNA, 75 bp, synthetic construct
  source 1..75: mol_type = other DNA
ggacgttcagggataagttttttacgcagatttttggaatggggaaaaatagggtatgttcagccttagtgaata

SEQ ID NO: 216774 - DNA, 75 bp, synthetic construct
  source 1..75: mol_type = other DNA
caatggatgtggcaaatgaagcgaaaacaaaggcagaagaggctgcagcaggaggtggtgttcccggtccgaaag

SEQ ID NO: 216775 - DNA, 75 bp, synthetic construct
  source 1..75: mol_type = other DNA
ttaagatgtataccctgtcgaatccgtcattagtgtctgtgactctgataacagtcaggggatgctacggcaagt

SEQ ID NO: 216776 - DNA, 75 bp, synthetic construct
  source 1..75: mol_type = other DNA
gtttacggagacacacaacgttttcactggcgggtggattacagcacaaaaaacaagcccacaacagcaagcctg

SEQ ID NO: 216777 - DNA, 75 bp, synthetic construct
  source 1..75: mol_type = other DNA
gaaaaatggcaacgaccgatgatgcgaattcgtttgaaatcggtgaaaaaactgtccgctggcgcaggcaactcg

SEQ ID NO: 216778 - DNA, 75 bp, synthetic construct
  source 1..75: mol_type = other DNA
aacaaaggcagaagaggctgcagcaggaggtggtgttcccggtccgaaaggagagaaaggcgaccccggagcaca

SEQ ID NO: 216779 - DNA, 75 bp, synthetic construct
  source 1..75: mol_type = other DNA
accgtggttgccagtaaaatggacaaaagagttaataaatgattatttgtatggctgtttactatctctgtactc

SEQ ID NO: 216780 - DNA, 75 bp, synthetic construct
  source 1..75: mol_type = other DNA
caaaaaatgttggcaaaagccatcagcgattttcaaaaggtgaaccaacttcagggaatcaacttctccaaacgt

SEQ ID NO: 216781 - DNA, 75 bp, synthetic construct
  source 1..75: mol_type = other DNA
ctgctctccaatcgcagcaatatcatctgtatttctgacgaagcccaccgaagccagatcaacctcgacctgaag

SEQ ID NO: 216782 - DNA, 75 bp, synthetic construct
  source 1..75: mol_type = other DNA
cgggcaatacgttggcagcctgacccgcgataacctcaatgccggggagctggtgcggatgatggtcggcaggcc

SEQ ID NO: 216783 - DNA, 75 bp, synthetic construct
  source 1..75: mol_type = other DNA
tgtcgataaaaaagcccccgtgcatatgcgtaccgccgcgcaggggctgatcacgctctgctgccagggcttcgg

SEQ ID NO: 216784 - DNA, 75 bp, synthetic construct
  source 1..75: mol_type = other DNA
tttactacgttaccgcttacatctatgtcgataaaaaagcccccgtgcatatgcgtaccgccgcgcaggggctga

SEQ ID NO: 216785 - DNA, 75 bp, synthetic construct
  source 1..75: mol_type = other DNA
gtattacggccttattgctgaagaggttggtgagattgccccgcaatatgtccattggcgtgaaccaacaaataa

SEQ ID NO: 216786 - DNA, 75 bp, synthetic construct
  source 1..75: mol_type = other DNA
cgctccggcagcgccgtctaacgagccgccgatggactttgatgatgacattccgttctgatttgtcattaaaac

SEQ ID NO: 216787 - DNA, 75 bp, synthetic construct
  source 1..75: mol_type = other DNA
ccatgcagatgctgggtggtcgtcagggtggtggcgctcctgcaggtggcaatatcggtggtggtcagccgcagg

SEQ ID NO: 216788 - DNA, 75 bp, synthetic construct
  source 1..75: mol_type = other DNA
taccatgcagttccttgcccggttgttgatgaagagcgtcgattttgccagtccgaccattgttctcattaccga

SEQ ID NO: 216789 - DNA, 75 bp, synthetic construct
  source 1..75: mol_type = other DNA
aaagtcgcgattattggcgcaggtcctgccggattgcaggccagtgtaacactgacaaaccagggttatgacgtc

SEQ ID NO: 216790 - DNA, 75 bp, synthetic construct
  source 1..75: mol_type = other DNA
actggtatctcgtggccgagttacggcattaagcggctctactcaaggcactgctggcattcaaatgtacgaggc

SEQ ID NO: 216791 - DNA, 75 bp, synthetic construct
  source 1..75: mol_type = other DNA
agatagtgggaatgagcgatcgcgtctatgtgatgcgcgaaggcagcattgccggtgagttaaacggcaaaaaca

SEQ ID NO: 216792 - DNA, 75 bp, synthetic construct
  source 1..75: mol_type = other DNA
ccgtgggagtttcccgattatgccgcgccgcgccttgaaattcaggcgttacgcgaatcacaaccacccgcgccg

SEQ ID NO: 216793 - DNA, 75 bp, synthetic construct
  source 1..75: mol_type = other DNA
tggcacttaccacttccgatgttgaacgcctcgaccctgtcagggtgatgattgaaaactacgagccagggaagg

SEQ ID NO: 216794 - DNA, 75 bp, synthetic construct
  source 1..75: mol_type = other DNA
gtggttgacaacacatcgaaatatcctgactggagtaaacgcgatgatattaaagcgaaactgaaagttgaactt

SEQ ID NO: 216795 - DNA, 75 bp, synthetic construct
  source 1..75: mol_type = other DNA
gatcgcctgttcagtggctgtcgcctcagcattgtggtggtggcaagtctatccggtgcagcagcaactgttaca

SEQ ID NO: 216796 - DNA, 75 bp, synthetic construct
  source 1..75: mol_type = other DNA
acgacaccgctcagggcgcagcaacggtgtggatggcctcacctgaactcgaaaactatgagcgcaggctgcaac

SEQ ID NO: 216797 - DNA, 75 bp, synthetic construct
  source 1..75: mol_type = other DNA
gccccagagctctggcaagggcaatgaaacgggctaacagaaacctagctaagagtgccggatacatgaatcgag

SEQ ID NO: 216798 - DNA, 75 bp, synthetic construct
  source 1..75: mol_type = other DNA
gccgaaaacatcaccatggcaaccctggagcgcgatgccagctggggaatgctcaatcgcaaaaaagcgcaaacc

SEQ ID NO: 216799 - DNA, 75 bp, synthetic construct
  source 1..75: mol_type = other DNA
gtcgaaatcgcccgcgcgctacatcgcaacagccgcattctggtgatggacgaacccaccgccgccctctcctcc

SEQ ID NO: 216800 - DNA, 75 bp, synthetic construct
  source 1..75: mol_type = other DNA
gccggtgagttaaacggcaaaaacatcacccaggaaaacattatgaccttagcgactggcgtcaacgacgcccat

SEQ ID NO: 216801 - DNA, 75 bp, synthetic construct
  source 1..75: mol_type = other DNA
aaggcaaagccatgtttgtttgtgccagccgtgaaattgcctgggatttctaccgccagcttaaagttattcgcc

SEQ ID NO: 216802 - DNA, 75 bp, synthetic construct
  source 1..75: mol_type = other DNA
gtgcgcaaaacgtatggctttgcgaaatacctgcacgattcactgccaaacgccacctatgttggctttaccggc

SEQ ID NO: 216803 - DNA, 75 bp, synthetic construct
  source 1..75: mol_type = other DNA
ttatgggactggttaaacgcatgaaagccgcctacgacgtctgctgcggcagcgaagcattatcacagacagaac

SEQ ID NO: 216804 - DNA, 75 bp, synthetic construct
  source 1..75: mol_type = other DNA
tgattttttacaggcgttacctcatttccggttcattggtgaagtgctgtccggcttcgtccctgaaccacatca

SEQ ID NO: 216805 - DNA, 75 bp, synthetic construct
  source 1..75: mol_type = other DNA
cgtaagccgatgagcgaaaacaccatcaacaaagcactgcgggttatgggctacaacacacaggcagatgtttgc

SEQ ID NO: 216806 - DNA, 75 bp, synthetic construct
  source 1..75: mol_type = other DNA
attactgatgactcacctgagttagaggaaacgttgcccgcgatatcagaggacttatatcctagcgaagaagaa

SEQ ID NO: 216807 - DNA, 75 bp, synthetic construct
  source 1..75: mol_type = other DNA
atgcccgcctgacgatgattttgggtaatctaacaggcattgccgatcaggatattacaacacgattgcataata

SEQ ID NO: 216808 - DNA, 75 bp, synthetic construct
  source 1..75: mol_type = other DNA
tgcccctcccaaaaaaggcgagctagttataacacaaccagaaaatcattatatgcaaactgtgaggcataagct

SEQ ID NO: 216809 - DNA, 75 bp, synthetic construct
  source 1..75: mol_type = other DNA
aaaatcataagaaacagtgatttttcaccgcacttgaaatcagtaatatcaagttcagatagacattatttcaat

SEQ ID NO: 216810 - DNA, 75 bp, synthetic construct
  source 1..75: mol_type = other DNA
atctcgacgcctgtcggcagaaatttatcccgccgtatcggtatgacaggcagattcaggcggcctgcgccagct

SEQ ID NO: 216811 - DNA, 75 bp, synthetic construct
  source 1..75: mol_type = other DNA
acctgatgcgttgtaccggaacctgggcttcgagcagtcatggcagcagtggtccaacagccaaaagccggagga

SEQ ID NO: 216812 - DNA, 75 bp, synthetic construct
  source 1..75: mol_type = other DNA
ctccgcgccacagaacgcaaatcaggtaacagaaataaccagcgcagcccctgacaagctgacacctgttctggg

SEQ ID NO: 216813 - DNA, 75 bp, synthetic construct
  source 1..75: mol_type = other DNA
acggagaaaaagagtatgcgcccggaaaagggcactgcttttttgtggagctcaccaaccgcagtggcaaacggg

SEQ ID NO: 216814 - DNA, 75 bp, synthetic construct
  source 1..75: mol_type = other DNA
aatgtgaaggtacgccattgccacttcttgaagcaatggcaaacagttgcgctattgtgtcaacagacgtcggca

SEQ ID NO: 216815 - DNA, 75 bp, synthetic construct
  source 1..75: mol_type = other DNA
ttcctcttatgaattttgtggatgggtattttgttacatccgcaaagttgaaagagctatattctgaactgtctg

SEQ ID NO: 216816 - DNA, 75 bp, synthetic construct
  source 1..75: mol_type = other DNA
ttttatagtaatgcaatatcagataaagaagtattagcattttactctgcatattggtctggtgttgccacatca

SEQ ID NO: 216817 - DNA, 75 bp, synthetic construct
  source 1..75: mol_type = other DNA
aggatatttatccacttgtcgcgcttactgatcacgccgtgttctcaacgccagggcggaaacgcatgactggcc

SEQ ID NO: 216818 - DNA, 75 bp, synthetic construct
  source 1..75: mol_type = other DNA
ggccgtgcgtcgcgggcagagccacccgccggtaaacggtgagccggatatcgcctgctatcatcttccggcccc

SEQ ID NO: 216819 - DNA, 75 bp, synthetic construct
  source 1..75: mol_type = other DNA
agatcgatctcgatgcaaagctctggacgattccagcagaacgtatgaaggccaagcgtgagcatattgttcctt

SEQ ID NO: 216820 - DNA, 75 bp, synthetic construct
  source 1..75: mol_type = other DNA
caacgcataaacgagataatgatttatgccgtaaacacgggtctgatcgatgcgaatccggcttcaggtgttggc

SEQ ID NO: 216821 - DNA, 75 bp, synthetic construct
  source 1..75: mol_type = other DNA
accaccgtgagcacgacgccgagctgctggcgcttgccgcggaagggcgaatgtacgcccgcagtctaagttcta

SEQ ID NO: 216822 - DNA, 75 bp, synthetic construct
  source 1..75: mol_type = other DNA
tacaatcgtgcagagtatctcacagaacgtgtggttctcatgcaatggtggagtgactatgtttcgtctcaaaaa

SEQ ID NO: 216823 - DNA, 75 bp, synthetic construct
  source 1..75: mol_type = other DNA
atttaggagagcgagaagtgcttatgcaatggtggggtgattacgttaaggcgcagaaatatagggctatggcag

SEQ ID NO: 216824 - DNA, 75 bp, synthetic construct
  source 1..75: mol_type = other DNA
aatgaaaagaatttatgatagtttaccatcaggaaaaatcacgaaggaaacggacaggaaaatacataaacattt

SEQ ID NO: 216825 - DNA, 75 bp, synthetic construct
  source 1..75: mol_type = other DNA
gggttttccccagcatcaaagctcccctcagtcatatgcatgagcaaacagcaaacgccgccataatcagaatgg

SEQ ID NO: 216826 - DNA, 75 bp, synthetic construct
  source 1..75: mol_type = other DNA
gcagccgaagaatacggtaagtttagaacggaggtgcttgaatccgctctggctcatactaaaaaagatgaaata

SEQ ID NO: 216827 - DNA, 75 bp, synthetic construct
  source 1..75: mol_type = other DNA
gcggattacctttccttgttagccaacggaattgacccgcaaattcaagctgaaattgcagaggaacagcagcaa

SEQ ID NO: 216828 - DNA, 75 bp, synthetic construct
  source 1..75: mol_type = other DNA
tggagaaagatgtattccctgccgtcggtgagctccccattcagcaaatcaaagcccgaacattggttgaagcgc

SEQ ID NO: 216829 - DNA, 75 bp, synthetic construct
  source 1..75: mol_type = other DNA
gaagagtttaccttaataaagataaggaagtgtcaattaaggtggtatattttataaataatgtcaccgtccata

SEQ ID NO: 216830 - DNA, 75 bp, synthetic construct
  source 1..75: mol_type = other DNA
cgtgatgatttgttacggctgcgcgttattgccgcaactgcatcagcactttcacgctgggagccgcgcattctt

SEQ ID NO: 216831 - DNA, 75 bp, synthetic construct
  source 1..75: mol_type = other DNA
taggaggtgaacaggagttaaaggaagatgggcttttttatggtgtaacgaatagtgggcgttcatcattacgat

SEQ ID NO: 216832 - DNA, 75 bp, synthetic construct
  source 1..75: mol_type = other DNA
tgatagcagcgctgagagaacaaacaacagcacagcgagagcagacggaagcgataaaccgcctggctgagtcta

SEQ ID NO: 216833 - DNA, 75 bp, synthetic construct
  source 1..75: mol_type = other DNA
tattgacgcctggcgccagcaacaaatgttatccccggcacaacttagcgatctccatgcagcattgggaataac

SEQ ID NO: 216834 - DNA, 75 bp, synthetic construct
  source 1..75: mol_type = other DNA
gcaaaatttaaccagaaaaaagccgctgaattactgggtctgacttaccatcagcttcgcgctttgctgaaaaaa

SEQ ID NO: 216835 - DNA, 75 bp, synthetic construct
  source 1..75: mol_type = other DNA
aaacattcgaagaaatcaatactttcagtgaaaagtttaataattcatccgagcataaatatgctctgctatggg

SEQ ID NO: 216836 - DNA, 75 bp, synthetic construct
  source 1..75: mol_type = other DNA
tcaagaattatgcaggatgggggtacgactcgtgtagctgatgtagctgaaattgaacatgataccctggggcgg

SEQ ID NO: 216837 - DNA, 75 bp, synthetic construct
  source 1..75: mol_type = other DNA
ctcctcacaattgattgatttttatgctcttccggcaatagaaataccgaggggaaaatacaaaataacaaatgg

SEQ ID NO: 216838 - DNA, 75 bp, synthetic construct
  source 1..75: mol_type = other DNA
tcaatactcacacagcccaacattcagaagaatggttaactattccatagataacctatctgatgctgatattaa

SEQ ID NO: 216839 - DNA, 75 bp, synthetic construct
  source 1..75: mol_type = other DNA
tcattaaaatcttatttgacagttggttggccttgatttgtgttgataatggcgtgaatgcttatgtaggcgtac

SEQ ID NO: 216840 - DNA, 75 bp, synthetic construct
  source 1..75: mol_type = other DNA
aacgaattcggtaaaaccggtaacgatcctaaagctctaggcatcgcttcatctgaagcgaagaaagggctagag

SEQ ID NO: 216841 - DNA, 75 bp, synthetic construct
  source 1..75: mol_type = other DNA
tggcttcattaaaagaacgagcagagttagatgctatactgccagatttgttgagcagtatggggatgaatgtgt

SEQ ID NO: 216842 - DNA, 75 bp, synthetic construct
  source 1..75: mol_type = other DNA
tcaccatcaaccgcatcctcaacgttcatgattcgggccatattcttaatccgctactggcagaaggtcaggtac

SEQ ID NO: 216843 - DNA, 75 bp, synthetic construct
  source 1..75: mol_type = other DNA
aaagtcgcacttgagaacaaaattaatcttattcatctgacagcagccccagtttcggtggcggaaattgctctc

SEQ ID NO: 216844 - DNA, 75 bp, synthetic construct
  source 1..75: mol_type = other DNA
gtttggtcggtccagggctacgtaagaatattatttttgattttcttaatgacaataatgtagagaaaatcgaaa

SEQ ID NO: 216845 - DNA, 75 bp, synthetic construct
  source 1..75: mol_type = other DNA
ataatggtcaagttactttaaccgcgagtagcctattaaatacttgttcaaacgcaacaaactcaatcattctgg

SEQ ID NO: 216846 - DNA, 75 bp, synthetic construct
  source 1..75: mol_type = other DNA
agaaattaaaagaagaggcgagaaaaaaaatcgccaaataccatgaattacgtaaacaacgtggtatgagcctgc

SEQ ID NO: 216847 - DNA, 75 bp, synthetic construct
  source 1..75: mol_type = other DNA
gaagttggaacttctggctcaggaagttattctataaatgctcaagttgatatgactaaggagtctggtaataat

SEQ ID NO: 216848 - DNA, 75 bp, synthetic construct
  source 1..75: mol_type = other DNA
atggtcaataaaaactttgtttctctcgggctgggactgatggaaacaggaatggcctggttctggagcgatgcg

SEQ ID NO: 216849 - DNA, 75 bp, synthetic construct
  source 1..75: mol_type = other DNA
gctttacttgaagaaccagagacttctagcaattacttctttctattgattaatgatgttctgaaaaacgctaca

SEQ ID NO: 216850 - DNA, 75 bp, synthetic construct
  source 1..75: mol_type = other DNA
gtaggccaaataaatggtgaagagacaaaagtctatttattttctgttaaatctggaaaccttactcgtgagaca

SEQ ID NO: 216851 - DNA, 75 bp, synthetic construct
  source 1..75: mol_type = other DNA
ccgggtttgttggcacaacgctcttaaggcaaaccaaatttgatgatttttatcgttctacaaatattaatgata

SEQ ID NO: 216852 - DNA, 75 bp, synthetic construct
  source 1..75: mol_type = other DNA
cggtctggtaaatggtctgaacttcgcggtgcagtatcaaggtaacaacgaaggtgccagtaatggtcaggaagg

SEQ ID NO: 216853 - DNA, 75 bp, synthetic construct
  source 1..75: mol_type = other DNA
gatgacaccgtttgcccggagccagatggtcaataaaaactttgtttctctcggactgggactgatggaaacagg

SEQ ID NO: 216854 - DNA, 75 bp, synthetic construct
  source 1..75: mol_type = other DNA
aacgaagtttttaaacgtttaggtcgagcaataagatataattttcaagtggacgatgcaaaatttagacgcgat

SEQ ID NO: 216855 - DNA, 75 bp, synthetic construct
  source 1..75: mol_type = other DNA
gttttgattggaattatactaggtgggataacatcttctgcgcttgtattagttagggtcttcctgcgtagagga

SEQ ID NO: 216856 - DNA, 75 bp, synthetic construct
  source 1..75: mol_type = other DNA
tctacttgcagttgttaaatagacaacaagaattaaatatcgcaaagtcaagtgcaataggtaatgtgagaataa

SEQ ID NO: 216857 - DNA, 75 bp, synthetic construct
  source 1..75: mol_type = other DNA
tttaaggaaatcgaagataaagttgaaaaaagacttcaaaatcgccagatgaaatatcaaagtgaaattaaacaa

SEQ ID NO: 216858 - DNA, 75 bp, synthetic construct
  source 1..75: mol_type = other DNA
aagaaaggcttcaaaattgccagacggaatatcaaaatgaaattaatcaactatctgcgttaggtgttaattttg

SEQ ID NO: 216859 - DNA, 75 bp, synthetic construct
  source 1..75: mol_type = other DNA
actataaccggtcgcatttatatgggaacctatgaagatgtaaggaatctgtacggcagttacgctgatattgct

SEQ ID NO: 216860 - DNA, 75 bp, synthetic construct
  source 1..75: mol_type = other DNA
attagagaaaagaaaaactttacaagaggagaaaagtaaattaaataaacgcgtttcgggtatgcccgaaacaca

SEQ ID NO: 216861 - DNA, 75 bp, synthetic construct
  source 1..75: mol_type = other DNA
gagatcgaaatttcaaaacggagatttgaacagagtggtattccagtaaaaggttgcatactcaatggtgtggta

SEQ ID NO: 216862 - DNA, 75 bp, synthetic construct
  source 1..75: mol_type = other DNA
attgtcgctcagacaggaaagcgagtactcttcattgatgctgatatgagaaaaggtcatattcataaagtattc

SEQ ID NO: 216863 - DNA, 75 bp, synthetic construct
  source 1..75: mol_type = other DNA
aaaaagttttagcgttgctgatttgggtaaagatacgggaatgttaacgttgactcttactggagataacccaaa

SEQ ID NO: 216864 - DNA, 75 bp, synthetic construct
  source 1..75: mol_type = other DNA
gctacaatctcgaatgattcttggcaaaactatagatgatttaaaccttcagattcaaattgaacaaaaatattt

SEQ ID NO: 216865 - DNA, 75 bp, synthetic construct
  source 1..75: mol_type = other DNA
gcgactccaatatatcaatcaacagcactaatacaggttgagcaaaaacaaggtaacgtcattttagatagtctg

SEQ ID NO: 216866 - DNA, 75 bp, synthetic construct
  source 1..75: mol_type = other DNA
gagcaataagatataattttcaagtggacgatgcaaaatttagacgcgataatgtaaaagaaataatttctaatt

SEQ ID NO: 216867 - DNA, 75 bp, synthetic construct
  source 1..75: mol_type = other DNA
tccgcgatattaatgacgttgccagccagtcgccgtttcgccagatggtcacccccggggatataccatgtcggt

SEQ ID NO: 216868 - DNA, 75 bp, synthetic construct
  source 1..75: mol_type = other DNA
ctaacaagtttacacaatgtcttatttcccaacttgaatacgttacttattaacaacaacttgctttctgaaatt

SEQ ID NO: 216869 - DNA, 75 bp, synthetic construct
  source 1..75: mol_type = other DNA
cttaaattttttaaatgtttctggcgagaacaattgccctactatgcagctcatgttatttaatttgttttcccc

SEQ ID NO: 216870 - DNA, 75 bp, synthetic construct
  source 1..75: mol_type = other DNA
atgccagaggtagcaattgcggcaaccgatctgactggcatggatgcagatgcaatggtggaagatataaattac

SEQ ID NO: 216871 - DNA, 75 bp, synthetic construct
  source 1..75: mol_type = other DNA
gaaaccttcattaatgccagagaagattattttgtattctttaatattttctttttgtttgtatcaacatcaatc

SEQ ID NO: 216872 - DNA, 75 bp, synthetic construct
  source 1..75: mol_type = other DNA
ggattatctcgttaaacaacataacgagcagcacctcaaagaaaatgcggatggcaaccaagcgctatcaacaaa

SEQ ID NO: 216873 - DNA, 75 bp, synthetic construct
  source 1..75: mol_type = other DNA
ggcttaacgataaccagactgagttccggtaccagaacaggtcgaagtaatacccgcacgttacctccagatgcg

SEQ ID NO: 216874 - DNA, 75 bp, synthetic construct
  source 1..75: mol_type = other DNA
cgcggcgggcgttcggaataagggagcctgacggaaattatccagcgtcggaagtcaggactgaggcctttctga

SEQ ID NO: 216875 - DNA, 75 bp, synthetic construct
  source 1..75: mol_type = other DNA
gtaaaatttggtatcgtgcgccatctgttttctctgctggcgcagcaggtgccagttgttcaggctgacgtatga

SEQ ID NO: 216876 - DNA, 75 bp, synthetic construct
  source 1..75: mol_type = other DNA
aacgctacagaacgacactgaaataaccatacctacaaacccgttaccgctaaatgatggaacatcaatctttga

SEQ ID NO: 216877 - DNA, 75 bp, synthetic construct
  source 1..75: mol_type = other DNA
tcaaaatggacaaattctcaccagtagtgcacagcgcgatattcaacagaatgggcaaaaggcggctgttggcac

SEQ ID NO: 216878 - DNA, 75 bp, synthetic construct
  source 1..75: mol_type = other DNA
gccgccacgctgcccggttttcagtcgctcaaaacttccgttgaggggctgaaactgatcgccgattacgaggga

SEQ ID NO: 216879 - DNA, 75 bp, synthetic construct
  source 1..75: mol_type = other DNA
atttggagttgctgatcaaggaaaagacactggcatgctaacgctgacaatgactggtgacaatccacagcaaat

SEQ ID NO: 216880 - DNA, 75 bp, synthetic construct
  source 1..75: mol_type = other DNA
cagacagggaaaaaagtactatttattgatgccgatttacgtcggggttatgttcacaaaatgttcggtagtgaa

SEQ ID NO: 216881 - DNA, 75 bp, synthetic construct
  source 1..75: mol_type = other DNA
tccactcctatataccaagctagttcgttgatccaagtggaacaaaagcagggtaatagtatattaaatagccta

SEQ ID NO: 216882 - DNA, 75 bp, synthetic construct
  source 1..75: mol_type = other DNA
ttgcatattgaacggcgttgtgaagaaagctagcagttattatggctatggctatagtcattatggatattcata

SEQ ID NO: 216883 - DNA, 75 bp, synthetic construct
  source 1..75: mol_type = other DNA
agagaaaagtattaaaaaaatatcttcagctggatttgactatattagtcgaggcatggctccccctaatccagc

SEQ ID NO: 216884 - DNA, 75 bp, synthetic construct
  source 1..75: mol_type = other DNA
caatggagttgtgaaaaaagcaagtagctattatggatatggttatagccattatggttactcatatacagaaaa

SEQ ID NO: 216885 - DNA, 75 bp, synthetic construct
  source 1..75: mol_type = other DNA
gcacaaactggaaaatctgttctatatattgatacagatatgaggaaaggatatgcacataagctctttgagtta

SEQ ID NO: 216886 - DNA, 75 bp, synthetic construct
  source 1..75: mol_type = other DNA
gcaatctagaatgattctaggaaaaacagtcgatgatctgaatcttcaggctatagccgagaagaattactttcc

SEQ ID NO: 216887 - DNA, 75 bp, synthetic construct
  source 1..75: mol_type = other DNA
tagataaagacgctgatgaaatagatctgggtcgcatcataggggagttgattgaccatcgtaagcttataatcg

SEQ ID NO: 216888 - DNA, 75 bp, synthetic construct
  source 1..75: mol_type = other DNA
atctattctctgacacagatgaactcaatattgggcgtctgattggagaactaatcgatcatacgaaaatcatta

SEQ ID NO: 216889 - DNA, 75 bp, synthetic construct
  source 1..75: mol_type = other DNA
tatttcagaaaaaggcaaggatacgggtattttaaacttgactcttacaggagaaaatccaaaacaaattaaaga

SEQ ID NO: 216890 - DNA, 75 bp, synthetic construct
  source 1..75: mol_type = other DNA
aatatgatattgtgattcttgatactccacctattttggctgtcactgatccggcaattattgggcattatgcag

SEQ ID NO: 216891 - DNA, 75 bp, synthetic construct
  source 1..75: mol_type = other DNA
gaggatatcatgaattacttgcattcagtcaaacaggctcatggattcgtaatggcagaaatgcagcaagagatt

SEQ ID NO: 216892 - DNA, 75 bp, synthetic construct
  source 1..75: mol_type = other DNA
tattcctgtatcagaatcatttgcaaaaaatataactcgtgatagccctttgaaaaaaacgaagtctcaagagac

SEQ ID NO: 216893 - DNA, 75 bp, synthetic construct
  source 1..75: mol_type = other DNA
gaaatagttgatatcaatggtgccactctcaagattgataaaattgaagctaaaccaggtactgagtttacaatt

SEQ ID NO: 216894 - DNA, 75 bp, synthetic construct
  source 1..75: mol_type = other DNA
gcttatggaaaagcgtaaaactttgcaggatgagaaagcaaagcttaatgaacgtgtttcagcaatgccgaaaac

SEQ ID NO: 216895 - DNA, 75 bp, synthetic construct
  source 1..75: mol_type = other DNA
tcttaatgttactgatcaagggaaggatacaggtattttaaatgtttcgttgattggtgatgatgcttcattaat

SEQ ID NO: 216896 - DNA, 75 bp, synthetic construct
  source 1..75: mol_type = other DNA
aagctgcgcaggatgcaaaaagtcttgattttttaaatcaacaattaccaaaggtcagggctgaactagatgttg

SEQ ID NO: 216897 - DNA, 75 bp, synthetic construct
  source 1..75: mol_type = other DNA
gcaatctagaatgatattgggaaaaacagtcgatgacttaaacttacaggcgagagttaaagaaaatcactttcc

SEQ ID NO: 216898 - DNA, 75 bp, synthetic construct
  source 1..75: mol_type = other DNA
taagatagcagaaatgaaaatagacttcatttctagaggtcaagtaccacataatccggctgaaatgttaacaag

SEQ ID NO: 216899 - DNA, 75 bp, synthetic construct
  source 1..75: mol_type = other DNA
gaggtaagtataaaacgttttgaacagacaggaattatagtgaaaggttgtatacttaatggtgttgtaaagaaa

SEQ ID NO: 216900 - DNA, 75 bp, synthetic construct
  source 1..75: mol_type = other DNA
tgtgctgctgcgctcgttgtttaatcgcggtatcgaaagcccgcaagtgctggaagaacacggaatcagcgtcta

SEQ ID NO: 216901 - DNA, 75 bp, synthetic construct
  source 1..75: mol_type = other DNA
ctttcgttagaagccaaatcagtacttgaacaaatagttaatgtcgataatcagcttaatgaattgacattccgt

SEQ ID NO: 216902 - DNA, 75 bp, synthetic construct
  source 1..75: mol_type = other DNA
tgttgaagatcaaggaaaagatactggcatgttagccttaactttgattggagatgacccatcattaatttcagt

SEQ ID NO: 216903 - DNA, 75 bp, synthetic construct
  source 1..75: mol_type = other DNA
atatgatgctattaaacagacagcaagagctggaaatttctaaatcaagtgcaattggtaatgttcgtattgttg

SEQ ID NO: 216904 - DNA, 75 bp, synthetic construct
  source 1..75: mol_type = other DNA
tcagttaatgaattacgtaaaaaaaatgggattgaatctgaattaatttacgttaaaaaaataagacctactggg

SEQ ID NO: 216905 - DNA, 75 bp, synthetic construct
  source 1..75: mol_type = other DNA
ggtattgctcgaatctgtactaatgccactatgtgtaaaggtaaaacgtagattgcctgaagatacaattattgt

SEQ ID NO: 216906 - DNA, 75 bp, synthetic construct
  source 1..75: mol_type = other DNA
aatctaataaaacccttgttgagcatatgagtaaagcgaaagcgtttgtttttgctgcagaggaggattttggta

SEQ ID NO: 216907 - DNA, 75 bp, synthetic construct
  source 1..75: mol_type = other DNA
ataaacaaagtttatgggcgaaaagctgatgttatttatccaccggtagatattaataaatttgaattatatgat

SEQ ID NO: 216908 - DNA, 75 bp, synthetic construct
  source 1..75: mol_type = other DNA
gcgcacgcctgctggcgcaaatgcgtgatactggctttgaaacctcactcgacctggtctcccgtaagggcgatc

SEQ ID NO: 216909 - DNA, 75 bp, synthetic construct
  source 1..75: mol_type = other DNA
aatgagtggcctcacggaaaactagctggcgttccagtgtggcacatgaatgaaagtgacgagcgatttattcat

SEQ ID NO: 216910 - DNA, 75 bp, synthetic construct
  source 1..75: mol_type = other DNA
gagcctatatgtgataacttctttgatattgtaatctcttggtttaataattcaataatgatgtatatggagaat

SEQ ID NO: 216911 - DNA, 75 bp, synthetic construct
  source 1..75: mol_type = other DNA
ctggtcttgataaaggtatcaaaggattgttagctaaatggattcttcataaaatacgcatgtgggattatcgaa

SEQ ID NO: 216912 - DNA, 75 bp, synthetic construct
  source 1..75: mol_type = other DNA
aactttacatggcaatgagttgcctgatttaatttctctatctggtatatctcctgttcccaaggaatttaccca

SEQ ID NO: 216913 - DNA, 75 bp, synthetic construct
  source 1..75: mol_type = other DNA
taatgcgtaataaaacgattgccgatatttattcatgtgaaaatttaacgcagacacaggtaatgaccgctgcaa

SEQ ID NO: 216914 - DNA, 75 bp, synthetic construct
  source 1..75: mol_type = other DNA
cgcatttagataagggtgttaaaggcattctcgctaagtatcttctccataaaataagacaatgggattatagaa

SEQ ID NO: 216915 - DNA, 75 bp, synthetic construct
  source 1..75: mol_type = other DNA
gctttcggaaaaggtgggactttagagactgtaaggcctcatggtgttcaatcagctacaggtgttttattttat

SEQ ID NO: 216916 - DNA, 75 bp, synthetic construct
  source 1..75: mol_type = other DNA
cgtatcatgaaggtatatggaaggcaagctgatgtaatttatcctcctgttgatgttcatcgttttgagttagta

SEQ ID NO: 216917 - DNA, 75 bp, synthetic construct
  source 1..75: mol_type = other DNA
atggaacgtaaaggtattatcgcagcaggaaatatgttggttgatcacgtccaccagattatccagtggccggag

SEQ ID NO: 216918 - DNA, 75 bp, synthetic construct
  source 1..75: mol_type = other DNA
tttcatacccggcacttatcacctttatggcgattctttgcgtggttattacataactcttgatggtctgatgat

SEQ ID NO: 216919 - DNA, 75 bp, synthetic construct
  source 1..75: mol_type = other DNA
cgtgtaggagatgctgtttttggcgctgcacttgttgattccagacttaatggttctgacaaggaggcgcaccca

SEQ ID NO: 216920 - DNA, 75 bp, synthetic construct
  source 1..75: mol_type = other DNA
ggctttactggcaaacgtgcagcccggttcaaagaggcatacatcaacgcctttaaccagatggagaagaattta

SEQ ID NO: 216921 - DNA, 75 bp, synthetic construct
  source 1..75: mol_type = other DNA
ttacttctttcaatagtatgctcaacaccaatatacttattatatagaaaaagaaaatcttataagattttcaat

SEQ ID NO: 216922 - DNA, 75 bp, synthetic construct
  source 1..75: mol_type = other DNA
gcgtggttattacatcacccttgatggtctgatgatgcttcagcttgggttaagtctgcgcacaatgcggtacta

SEQ ID NO: 216923 - DNA, 75 bp, synthetic construct
  source 1..75: mol_type = other DNA
tatacccaaattatggtgggctgggtgggggcaccgaaaggtgcgccggtttccgtatgcgccggttacgccaac

SEQ ID NO: 216924 - DNA, 75 bp, synthetic construct
  source 1..75: mol_type = other DNA
agcgaagcaaagcgttactgacgtcgctacatgaatggatggtggagaagaatggcacgctgccgaaaaaatcca

SEQ ID NO: 216925 - DNA, 75 bp, synthetic construct
  source 1..75: mol_type = other DNA
gagccgctggtcgaaagccgctatctttacgacccgctgggccgcagggtggcaaaacgggtatggcgacgtgaa

SEQ ID NO: 216926 - DNA, 75 bp, synthetic construct
  source 1..75: mol_type = other DNA
tcggcattctctgccattctggtctacgctcaggagctgcttccgggacgtatcggtatggtttctggactcttt

SEQ ID NO: 216927 - DNA, 75 bp, synthetic construct
  source 1..75: mol_type = other DNA
gatggttatccgcatgaatgcttcagcccgctgtggttgtttcgtcgtgattttgttgagtgcgaagcaccagca

SEQ ID NO: 216928 - DNA, 75 bp, synthetic construct
  source 1..75: mol_type = other DNA
atggcagaagagaaaaaaggcggtgtttcggtgtacataagccccgaaatcgtggaggtgctcaagcagcgccac

SEQ ID NO: 216929 - DNA, 75 bp, synthetic construct
  source 1..75: mol_type = other DNA
gacgccgctgaatgatgccctgtaccgttatgtgatgaatacccgcaaggttcacactgatgacacaccggtaaa

SEQ ID NO: 216930 - DNA, 75 bp, synthetic construct
  source 1..75: mol_type = other DNA
cccatactctggaattgtgaaattatcggatatggaagaaggcgaaataaaacagaacgtcacattatttgatgt

SEQ ID NO: 216931 - DNA, 75 bp, synthetic construct
  source 1..75: mol_type = other DNA
catcgccagaagctacgcagcgtctgcgcgcagtctgggatgccaaaaaaagagagctcaaactgactcaggagc

SEQ ID NO: 216932 - DNA, 75 bp, synthetic construct
  source 1..75: mol_type = other DNA
tctcacgcaccctgacaccgcgcgggattttatggagatccacttacctaaagatttacgtgaactgtgcgatct

SEQ ID NO: 216933 - DNA, 75 bp, synthetic construct
  source 1..75: mol_type = other DNA
gtgaatctgttgcttaaacgtggtcagcaggaatacgtcttcccgacccaggtggcgcgcgtgatgggtaatgaa

SEQ ID NO: 216934 - DNA, 75 bp, synthetic construct
  source 1..75: mol_type = other DNA
agtggataaggatcttgttttaggtatgctactagagatacctcacctacatccagatgataaagaaagatttaa

SEQ ID NO: 216935 - DNA, 75 bp, synthetic construct
  source 1..75: mol_type = other DNA
actttatcttgattttcttggttagttttttttctccacaagccttttgtgatgtttactatggcgtcttacatg

SEQ ID NO: 216936 - DNA, 75 bp, synthetic construct
  source 1..75: mol_type = other DNA
gcttattcggcttagggaaaacaaaagataataaaaatatcggtagttatgccgtgttaattgatagcaacaaca

SEQ ID NO: 216937 - DNA, 75 bp, synthetic construct
  source 1..75: mol_type = other DNA
aactgggctgcctgcgcgcgaatgctggaaactgacgtcgccaacctgcatcggctggcgaaacgtctgggattg

SEQ ID NO: 216938 - DNA, 75 bp, synthetic construct
  source 1..75: mol_type = other DNA
gatcatacgtacttgatataaagtacagaaaccaaattagcacaaagatgtctgcagatattgctgctaagctta

SEQ ID NO: 216939 - DNA, 75 bp, synthetic construct
  source 1..75: mol_type = other DNA
gaaaataatgttttatttgctgaagccttcataacaacgccatacgtttttgtcatgcaaaatgcgcctgacagt

SEQ ID NO: 216940 - DNA, 75 bp, synthetic construct
  source 1..75: mol_type = other DNA
gctgcattcgcaattaaaagagatgtatccggaggttgagtggataaaagtcgataacgccagcgctgcatttca

SEQ ID NO: 216941 - DNA, 75 bp, synthetic construct
  source 1..75: mol_type = other DNA
atgatctggcagcctgagttcacagataaaacactctccaggaaacccggggcggttcagattgccggaagtgcc

SEQ ID NO: 216942 - DNA, 75 bp, synthetic construct
  source 1..75: mol_type = other DNA
atgcatttggtggccagaacgactgagccgggcttaagtgacaacgtatccttttcaagaaaaatattaattggg

SEQ ID NO: 216943 - DNA, 75 bp, synthetic construct
  source 1..75: mol_type = other DNA
gtgcattccccttcgcttttcgcgaaatattcggtatccagctggaagagttgggtgagaaccgtcatatgatga

SEQ ID NO: 216944 - DNA, 75 bp, synthetic construct
  source 1..75: mol_type = other DNA
cacaggacaataaccacccgacagggcatcctgtaaactggtttcatcagaaaaaaaacaaccgttcggactgga

SEQ ID NO: 216945 - DNA, 75 bp, synthetic construct
  source 1..75: mol_type = other DNA
ttatattcaatccgcctggcgctaacatcaatggtgtatcgctccagattgccacatctggtgtgttctggacgt

SEQ ID NO: 216946 - DNA, 75 bp, synthetic construct
  source 1..75: mol_type = other DNA
gtgagtgatttcattcgtctgtttaatgtgaaaacaccgtcgatggaacaggcaattggtctgctttccggtggc

SEQ ID NO: 216947 - DNA, 75 bp, synthetic construct
  source 1..75: mol_type = other DNA
cagatgacgatacggtcgaagacctataaaggaagcggctttaatgaactgcggtttgaagacgccacgggcggt

SEQ ID NO: 216948 - DNA, 75 bp, synthetic construct
  source 1..75: mol_type = other DNA
gtaactggtgtgacattttgcgtaaacgcttcatcaggcaacaccgggaaatgtttgaagctgctatcggttatc

SEQ ID NO: 216949 - DNA, 75 bp, synthetic construct
  source 1..75: mol_type = other DNA
agtacgcacaatgctctggtcgctcatgcagtacgtcgggaaaaaacggatgagcaggaaagagcagtactgaaa

SEQ ID NO: 216950 - DNA, 75 bp, synthetic construct
  source 1..75: mol_type = other DNA
gagaacatgatgacagcgcggacaatgcagggaggcgctatccggttatgccatgcctgtgataatcgacattat

SEQ ID NO: 216951 - DNA, 75 bp, synthetic construct
  source 1..75: mol_type = other DNA
ggtaatgcacctgtcgctcatatagtacgcacggaaaaacaggctgaacaggaaaagccggtgctgaaactggtt

SEQ ID NO: 216952 - DNA, 75 bp, synthetic construct
  source 1..75: mol_type = other DNA
gatttattgcctggaggattatcagcgggcgtgggtgttattcagttacagtttgcagaaaaaacgaatacatca

SEQ ID NO: 216953 - DNA, 75 bp, synthetic construct
  source 1..75: mol_type = other DNA
caccgcagcagatggtatgggcgagagagcaggttatttttgcgctgaatccaccggataaacgtcagaagggcc

SEQ ID NO: 216954 - DNA, 75 bp, synthetic construct
  source 1..75: mol_type = other DNA
agcattaaagaaggtatagcaggtttaaacaaggaaggatggaaccatacaggggaaattgttgaagcgtactgt

SEQ ID NO: 216955 - DNA, 75 bp, synthetic construct
  source 1..75: mol_type = other DNA
cagggaaaccgatggcttaactggctggagaagcagccggtgcagatgagccgcctggaacattatgccggtcag

SEQ ID NO: 216956 - DNA, 75 bp, synthetic construct
  source 1..75: mol_type = other DNA
cccggcgagtgagctgccgacagggatacaggacgcgacgggcagtacaaaacagatggcatggagccgttacgg

SEQ ID NO: 216957 - DNA, 75 bp, synthetic construct
  source 1..75: mol_type = other DNA
gagtgaagatgaggggcttatcaccctctggcattacgatgcgtcagaccgtatcacccggcgcacggtgaacgg

SEQ ID NO: 216958 - DNA, 75 bp, synthetic construct
  source 1..75: mol_type = other DNA
aaaaatgctcccatcgagccagtaggattaattgataggacatttggccaatcagaaaacatacagcaagcgaat

SEQ ID NO: 216959 - DNA, 75 bp, synthetic construct
  source 1..75: mol_type = other DNA
ggctcaggggtatctgtaccagaaacccatgccattctccgcctgggataaaagtggaaaattagtaaaagagta

SEQ ID NO: 216960 - DNA, 75 bp, synthetic construct
  source 1..75: mol_type = other DNA
gccataacggagacagtgagaaaaacggcgaggcaaatcacaaggagagggatgtatcagcagtgactgaaggtt

SEQ ID NO: 216961 - DNA, 75 bp, synthetic construct
  source 1..75: mol_type = other DNA
ataaattagttgtaatatcacacgctgattccagatatttaagagtgcaaaaacttggattgatatccccttttg

SEQ ID NO: 216962 - DNA, 75 bp, synthetic construct
  source 1..75: mol_type = other DNA
caagctccaaggtattcaggaaaaagagcacttggagagactgtttatgaactgccccgggaatccaggagacta

SEQ ID NO: 216963 - DNA, 75 bp, synthetic construct
  source 1..75: mol_type = other DNA
ctttaccgtgggagacggaagaaacacctgtttcatcaagtgaaaaggtagctaatgataatgaggaggatgtgt

SEQ ID NO: 216964 - DNA, 75 bp, synthetic construct
  source 1..75: mol_type = other DNA
cgcgctgactggggcgctaaaaggcgcgatgtgatggattttggtcctgttgatacaacgattcctgcgggcttc

SEQ ID NO: 216965 - DNA, 75 bp, synthetic construct
  source 1..75: mol_type = other DNA
caatagtaataaatcctgaacttgcatacagcattggcctgaatgaggcgattgctttgcagcagattaattact

SEQ ID NO: 216966 - DNA, 75 bp, synthetic construct
  source 1..75: mol_type = other DNA
ccatagtaataaatcctgaccttgcatacagcattggcctgaatgaggcgattgctttgcagcagattaattact

SEQ ID NO: 216967 - DNA, 75 bp, synthetic construct
  source 1..75: mol_type = other DNA
gcatcagtgaattgaaggcctcagctctgctgtggttgtggtatcgagtaggcagcctgacggctgcaacttgtc

SEQ ID NO: 216968 - DNA, 75 bp, synthetic construct
  source 1..75: mol_type = other DNA
ccgtgggtgatgcagtcatctgaatcggatgcgtccctgctttcccggcttgcaggtatgtacggtgccaccagt

SEQ ID NO: 216969 - DNA, 75 bp, synthetic construct
  source 1..75: mol_type = other DNA
ggtattgctgaaagcgggggcggaagtgcgctttatcacacggggcttcggggtacgggaggaccataactggca

SEQ ID NO: 216970 - DNA, 75 bp, synthetic construct
  source 1..75: mol_type = other DNA
actttactccgtctgatggtcgtacgcgtgaacttaaagtggatgtggagtccacagacaagcgtcatcccttca

SEQ ID NO: 216971 - DNA, 75 bp, synthetic construct
  source 1..75: mol_type = other DNA
gtaatcaacaattatacatagaaacacaatatatttggtttgattataatcagaagcaaattcttcaagaatctg

SEQ ID NO: 216972 - DNA, 75 bp, synthetic construct
  source 1..75: mol_type = other DNA
tgacgataacgttgccctgcagaccggaactgctgaaagcgggggcggaggtgcgttttatcacgcagggatttg

SEQ ID NO: 216973 - DNA, 75 bp, synthetic construct
  source 1..75: mol_type = other DNA
agtgagaagatggcgttgccgccgaaaggcgcggtattgacgctggggctgggatttaacggaaatctggtgaat

SEQ ID NO: 216974 - DNA, 75 bp, synthetic construct
  source 1..75: mol_type = other DNA
cggtatcaaaaacaaatgggggtcgctcaaatccagtgtaaccggaatgggtgacagcatcagtagctggtttaa

SEQ ID NO: 216975 - DNA, 75 bp, synthetic construct
  source 1..75: mol_type = other DNA
gtgggaattggtaagttactgattaactggtcgccggcaggcctgctctataaagcctttgcggctgcgctgaaa

SEQ ID NO: 216976 - DNA, 75 bp, synthetic construct
  source 1..75: mol_type = other DNA
tgacagcatcagtggctggttcagcgaaaagctgggcattcattcgccgagccgcgtgtttatgggctttggtga

SEQ ID NO: 216977 - DNA, 75 bp, synthetic construct
  source 1..75: mol_type = other DNA
cagacgtgaccgcactgaaaacccgggctttcagcgatatcacactgggcgacctggtgaaaaccatcgccactg

SEQ ID NO: 216978 - DNA, 75 bp, synthetic construct
  source 1..75: mol_type = other DNA
gatcctcttgatgattttatgaaactaaaaataatcaatgataataatgatgctaatattattctcgagttttat

SEQ ID NO: 216979 - DNA, 75 bp, synthetic construct
  source 1..75: mol_type = other DNA
tgtaaggcctcagtgtcatttcagtttggtgaggcttcttgtactcgctgcgtaatcgctattgggaaaattcaa

SEQ ID NO: 216980 - DNA, 75 bp, synthetic construct
  source 1..75: mol_type = other DNA
acttaatgtggttgtcagctaaccgaacagatgaagaatctgctgaacaattaaattactctggatgtgacttgt

SEQ ID NO: 216981 - DNA, 75 bp, synthetic construct
  source 1..75: mol_type = other DNA
gaaacacatcttttcccttacctggctgggaccctgctgtggattatagtggaggaaaaggcgcgctgtatatcg

SEQ ID NO: 216982 - DNA, 75 bp, synthetic construct
  source 1..75: mol_type = other DNA
cgctgtatgttgattttattgtggacacgctcaagaactatattgacagtaattttcgaactctcccagatcgta

SEQ ID NO: 216983 - DNA, 75 bp, synthetic construct
  source 1..75: mol_type = other DNA
ccggtcgcaaactcccaatgtaccaaatcaccaaaaacggcttcgttttcctggtgatgggcttcaccggcaaaa

SEQ ID NO: 216984 - DNA, 75 bp, synthetic construct
  source 1..75: mol_type = other DNA
ggtttctgaagatactgcaaaactgcaaataaaaagtggtagaattgaaccagaatacacaacagatattagcgt

SEQ ID NO: 216985 - DNA, 75 bp, synthetic construct
  source 1..75: mol_type = other DNA
tgatgccagtcaaggccgtgcctgcctgagcaaagctgagcttactgctgacttaatgtggttgtcagctaaccg

SEQ ID NO: 216986 - DNA, 75 bp, synthetic construct
  source 1..75: mol_type = other DNA
gtggtttttatgagtctcattcgttaatcgttaacgataacttgtcgtgcaaaaaactttttgccacagacgaaa

SEQ ID NO: 216987 - DNA, 75 bp, synthetic construct
  source 1..75: mol_type = other DNA
aaccaaactgtccgcaagtctgaacggtaatgcattgaacagcaacaaagctgcaaacgccaagactggtttctg

SEQ ID NO: 216988 - DNA, 75 bp, synthetic construct
  source 1..75: mol_type = other DNA
gtgaaatcgtcatgaaagcgcaggcctccgttaatgcgtttatgaaactgtatggtcctgaaaaaattgaggatg

SEQ ID NO: 216989 - DNA, 75 bp, synthetic construct
  source 1..75: mol_type = other DNA
ctgttgttgtacctgtgtataacaggaaagaaaagttaatcagggctattgactcagttgatactttatccccac

SEQ ID NO: 216990 - DNA, 75 bp, synthetic construct
  source 1..75: mol_type = other DNA
gcgcaaaggagcagcacgctactcatagcaaacgtgctctgccagccaaggcggtcaaacacaatgcctcctgcc

SEQ ID NO: 216991 - DNA, 75 bp, synthetic construct
  source 1..75: mol_type = other DNA
atacccgtgcgattattgaacatgactgccagataggaaatcacagctttattggacccggtgcggtgttgtgcg

SEQ ID NO: 216992 - DNA, 75 bp, synthetic construct
  source 1..75: mol_type = other DNA
tattgatgggtgccgagacagaatattaagtccatatctaatccatagtcggcaccagaaacaaccgaagccgat

SEQ ID NO: 216993 - DNA, 75 bp, synthetic construct
  source 1..75: mol_type = other DNA
ttgatagcgccaatgtcgataaagtgacggacaatttcaaagatgtacgtgaacgtatcgctatgaccctgaacg

SEQ ID NO: 216994 - DNA, 75 bp, synthetic construct
  source 1..75: mol_type = other DNA
agcagcaacgcgccagcgtacacgttgaacccgatattcaacctacaagtgaatccacaagtgggattgactctg

SEQ ID NO: 216995 - DNA, 75 bp, synthetic construct
  source 1..75: mol_type = other DNA
agcaacacggcgtacagagcgccagtgttgacaagattacggacggcttcgggaaagatacccgcgagaaaatca

SEQ ID NO: 216996 - DNA, 75 bp, synthetic construct
  source 1..75: mol_type = other DNA
ctaatggatgtaaacaaaatgcttagagatactattacaggttttgtccatcagattagtgaaataacggaatct

SEQ ID NO: 216997 - DNA, 75 bp, synthetic construct
  source 1..75: mol_type = other DNA
ttacgacttgttgcttaaattagaacaggagcaagaacaaaaacgttacattagaggatatcatgaattacttac

SEQ ID NO: 216998 - DNA, 75 bp, synthetic construct
  source 1..75: mol_type = other DNA
acagccgtagtgtaggtcatgccgttaaaggttggttagggatagatgatcagcctacagggacagcggtagaac

SEQ ID NO: 216999 - DNA, 75 bp, synthetic construct
  source 1..75: mol_type = other DNA
cccgcttcggatctgtttgcctttttgtggggggggcagatcgcgttacggagatcgaccgactgcttgagcaaa

SEQ ID NO: 217000 - DNA, 75 bp, synthetic construct
  source 1..75: mol_type = other DNA
taataatatggctttattttctgtcaggagggtatattcaatggtttgtattaagtaagcgcattatggtgatgc

SEQ ID NO: 217001 - DNA, 75 bp, synthetic construct
  source 1..75: mol_type = other DNA
tgccaagaatgaatcactggcatatacagatcagcaggttaccaaaaataatgctgtgataaatcagaatattaa

SEQ ID NO: 217002 - DNA, 75 bp, synthetic construct
  source 1..75: mol_type = other DNA
attttcagatggagagcttgctcacttgctggaaaacattttcgatgatggggcgcattatgtagacctcttcaa

SEQ ID NO: 217003 - DNA, 75 bp, synthetic construct
  source 1..75: mol_type = other DNA
gaagagactgaccagtatgccggaggccaccggctgaaacaggccggaaacacgcagtatgactatgacgccgca

SEQ ID NO: 217004 - DNA, 75 bp, synthetic construct
  source 1..75: mol_type = other DNA
ctcaggcaccgggctgggctatggcgaaggcgacgagacttatggctatgacagctgcggctacctgaaggcgca

SEQ ID NO: 217005 - DNA, 75 bp, synthetic construct
  source 1..75: mol_type = other DNA
gtgcatcctctggcgaccatccatgcagtgacaatcctgaacaccacttttacccctcgaaaacgactcagcctg

SEQ ID NO: 217006 - DNA, 75 bp, synthetic construct
  source 1..75: mol_type = other DNA
ctgctgagtttggtgtgtcagtccgtaccctgcgacgggattttcgcgaacggctgatgtatctggacctggagt

SEQ ID NO: 217007 - DNA, 75 bp, synthetic construct
  source 1..75: mol_type = other DNA
accggctggctgtcaggctgtcactgataatcagccgcctggttgcaggtgaaacgctgaacatgacgcggcttg

SEQ ID NO: 217008 - DNA, 75 bp, synthetic construct
  source 1..75: mol_type = other DNA
aatgggctaacgcccctgcggttacgccggttgccagtttatccttacaggaaagtatattacgcgcatttgcgc

SEQ ID NO: 217009 - DNA, 75 bp, synthetic construct
  source 1..75: mol_type = other DNA
tacagccggaggcgatagccgcgccacctgctgaattagccgagcagccggtatcgctgaaaaatattgattacc

SEQ ID NO: 217010 - DNA, 75 bp, synthetic construct
  source 1..75: mol_type = other DNA
tatcgtggaacagatgaagcatactattctgttataaaaccttgcgctgaaaaactggctaaagatcctgataac

SEQ ID NO: 217011 - DNA, 75 bp, synthetic construct
  source 1..75: mol_type = other DNA
tacaatgtgacttcgccagtatttggggtgatcacttacatcatcaatgatgcacgatcgggagagtttgatagc

SEQ ID NO: 217012 - DNA, 75 bp, synthetic construct
  source 1..75: mol_type = other DNA
ttaatctggagaacgggagaaaggaggcgctgccagtagatgatggcggttacagttctgcacccgctgtatttg

SEQ ID NO: 217013 - DNA, 75 bp, synthetic construct
  source 1..75: mol_type = other DNA
aatccagggggcgctgcttgttgttgatgcctcactttctccctgtgatggctcgctgctgatatgtgcaataga

SEQ ID NO: 217014 - DNA, 75 bp, synthetic construct
  source 1..75: mol_type = other DNA
agcagtcatttcagtcgggggatgattgtagacaaatttgttgacgctattttgcggttttggcgcgaaaggtga

SEQ ID NO: 217015 - DNA, 75 bp, synthetic construct
  source 1..75: mol_type = other DNA
aaaatggaaaaggagagtgatagttcttctttcattctttattatgtttgctatcaggttcaatgctttgttcat

SEQ ID NO: 217016 - DNA, 75 bp, synthetic construct
  source 1..75: mol_type = other DNA
tcaactaaaacacgcattatcgaaaggagaaaacctggcattactgcatggtttaactcctgatatccttgatag

SEQ ID NO: 217017 - DNA, 75 bp, synthetic construct
  source 1..75: mol_type = other DNA
tgaacgctggctgtatatggcagtggtcattgacctgtggtcaagtgccgttattggcttgtccatgttgccacg

SEQ ID NO: 217018 - DNA, 75 bp, synthetic construct
  source 1..75: mol_type = other DNA
aaacagcaggtttagtacgcataactaatcaattagagtctatatacggaacttttattgatatgaaagatatta

SEQ ID NO: 217019 - DNA, 75 bp, synthetic construct
  source 1..75: mol_type = other DNA
gctaaaccggtagaagaagtgaatgcagaaattcggcgtatcgtcgatgatatgttcgagacgatgtacgcagaa

SEQ ID NO: 217020 - DNA, 75 bp, synthetic construct
  source 1..75: mol_type = other DNA
aaccatagcaaacgccatttgctgaaggttggtgtgggtgtcgatggttcagttattggcgttgtcatgtcaaat

SEQ ID NO: 217021 - DNA, 75 bp, synthetic construct
  source 1..75: mol_type = other DNA
ttgtggcgagtgccgtgtataaggtcttttctgccagtgcagccccggcaggaatggagaggtgtgtggggccgg

SEQ ID NO: 217022 - DNA, 75 bp, synthetic construct
  source 1..75: mol_type = other DNA
taagaaacaaagactccataattgaagcaatctcaggatttacatataaatgtatatgtgtatttatatatacag

SEQ ID NO: 217023 - DNA, 75 bp, synthetic construct
  source 1..75: mol_type = other DNA
agaggcccgagcaacaaagaatacaaagagaaataaactttattggcggatatagctacaaactactcaggcaag

SEQ ID NO: 217024 - DNA, 75 bp, synthetic construct
  source 1..75: mol_type = other DNA
cctgtctatacagagtactttgaagcgggattcatcggtgaacttggtgaagggcaggatattaaaacgattacg

SEQ ID NO: 217025 - DNA, 75 bp, synthetic construct
  source 1..75: mol_type = other DNA
acgcaatggtgtagcaggagcgtttattccgttgagggtattagcccggacggtcagtatttagcgttggtgtca

SEQ ID NO: 217026 - DNA, 75 bp, synthetic construct
  source 1..75: mol_type = other DNA
cggtattgctacctgagtacaatattgaagtttgcttacccataaaaataaacttaacagtggcggagatggtta

SEQ ID NO: 217027 - DNA, 75 bp, synthetic construct
  source 1..75: mol_type = other DNA
tctcaaaagccaattagtttagatcctgtaaaggatatacaggctgaactactccagttagaagcaggtattaaa

SEQ ID NO: 217028 - DNA, 75 bp, synthetic construct
  source 1..75: mol_type = other DNA
agcaatatcaacttccttctgatgaaagcactacctaccttcagggctttctcacgtgatgcagtacttaagaat

SEQ ID NO: 217029 - DNA, 75 bp, synthetic construct
  source 1..75: mol_type = other DNA
ccaaatcagtatgggtctgaacgtcactaagcaagccctattatctgatacctctaatgcatcattcagtgcagc

SEQ ID NO: 217030 - DNA, 75 bp, synthetic construct
  source 1..75: mol_type = other DNA
tttgttttaacgtataagatttttactattgacaagaaaaaagtccgtaaactgggagctgctgcaaatttgagt

SEQ ID NO: 217031 - DNA, 75 bp, synthetic construct
  source 1..75: mol_type = other DNA
aaaacctctttcttgggtgaaaaggttgcttacagtgaggaaaagcaacgcttacttgagcagaacatttctatt

SEQ ID NO: 217032 - DNA, 75 bp, synthetic construct
  source 1..75: mol_type = other DNA
aaaaccccgtatctcggtgagaagattgtctatagcgaagaaaaaaaacgtttacttgagcaaaaaatttccata

SEQ ID NO: 217033 - DNA, 75 bp, synthetic construct
  source 1..75: mol_type = other DNA
gcggtcattgaagggttgggagataagtacagaatcacagagggtgaagcgatggcgctttataacgctatggcg

SEQ ID NO: 217034 - DNA, 75 bp, synthetic construct
  source 1..75: mol_type = other DNA
ctccaacgaggcgctaacagccgaagagcgtcaaacagcactaaacgaagcgctaaacgctggcgcatctgccgc

SEQ ID NO: 217035 - DNA, 75 bp, synthetic construct
  source 1..75: mol_type = other DNA
ctaaccgcgatgagtttgttgtagtgcgtaagatgaagaacattgactggttagatggcgaaggcaatgaccagg

SEQ ID NO: 217036 - DNA, 75 bp, synthetic construct
  source 1..75: mol_type = other DNA
aagtgcatatatggacgttcgtctgatttttgtgtcccagtttgtatagaagatgacttgagtaacgaggtaata

SEQ ID NO: 217037 - DNA, 75 bp, synthetic construct
  source 1..75: mol_type = other DNA
tgaaaactggtaaattacattttcttccgtccttatattcttctgtattagctgagcgggaagctgtaaaatata

SEQ ID NO: 217038 - DNA, 75 bp, synthetic construct
  source 1..75: mol_type = other DNA
acatccgtgagagttcatcacagaaagcaggtgcgctgaatgctcccatacaagagagcattgaggcttacgaag

SEQ ID NO: 217039 - DNA, 75 bp, synthetic construct
  source 1..75: mol_type = other DNA
tgacgataataatattcttaacgtgtcatattacgataactatgcaataaaacttgatttctacggggaaaataa

SEQ ID NO: 217040 - DNA, 75 bp, synthetic construct
  source 1..75: mol_type = other DNA
aaacgttgtgcccgtatcttcggcagtaagcacgctgcggcgaatccttcactggccgcgtcgctggcattcaat

SEQ ID NO: 217041 - DNA, 75 bp, synthetic construct
  source 1..75: mol_type = other DNA
aactgcatttttcgcgaatattaaagctgcagagttcatttcgaaaaaattatcacctaggtttttgaataataa

SEQ ID NO: 217042 - DNA, 75 bp, synthetic construct
  source 1..75: mol_type = other DNA
gcggaattgtccagatgggcgccgaatgggtgaaacagcagttaattggtgaagccgctaacgccgccgctactg

SEQ ID NO: 217043 - DNA, 75 bp, synthetic construct
  source 1..75: mol_type = other DNA
atatttgtatttatgctacagcatgcggacatgcaggaattggtggtgggataaatgcggctatcacatattctg

SEQ ID NO: 217044 - DNA, 75 bp, synthetic construct
  source 1..75: mol_type = other DNA
taaaccgatcgaacgcggttatgccagtgcagggttacttgcacggatcctggtcagcaaatatatggaacattg

SEQ ID NO: 217045 - DNA, 75 bp, synthetic construct
  source 1..75: mol_type = other DNA
gacccggtcagaggcggtattgcagaaaagccaggatataacggaagaggcagattcggcactgagaaacgcgat

SEQ ID NO: 217046 - DNA, 75 bp, synthetic construct
  source 1..75: mol_type = other DNA
cttgtgtcatgtgctatgactagttttactgctagcgcagatacaaacatatatccatatccatatacatatagt

SEQ ID NO: 217047 - DNA, 75 bp, synthetic construct
  source 1..75: mol_type = other DNA
atgatgcgatatattgtggttaagcgcttattaatattgtcagtttggtattacattaaatgtaatagtgagttt

SEQ ID NO: 217048 - DNA, 75 bp, synthetic construct
  source 1..75: mol_type = other DNA
ataagtagtaatggtgataggatgtataagttgaacattgtaaagcctgatggaactattgaaactttattaaaa

SEQ ID NO: 217049 - DNA, 75 bp, synthetic construct
  source 1..75: mol_type = other DNA
agtacaggatcaccgagggtgaagcgatggcgctttataacgctatggcgcagttccgcaaaaacccgtcttcct

SEQ ID NO: 217050 - DNA, 75 bp, synthetic construct
  source 1..75: mol_type = other DNA
taatggtggcaaactttatagggttggggagcacggagaaagcgagctattccagaccaataacggacggcagta

SEQ ID NO: 217051 - DNA, 75 bp, synthetic construct
  source 1..75: mol_type = other DNA
agcagctaaaaggcaacgcaaacgctgatattgatatggcagtggcggaaggtaagctgacgaaagcgcaccacg

SEQ ID NO: 217052 - DNA, 75 bp, synthetic construct
  source 1..75: mol_type = other DNA
tggtaaatgttgcacgtcagactcaggaaatagcggataagagaagccgttttttcgggtatcttgaacagcatg

SEQ ID NO: 217053 - DNA, 75 bp, synthetic construct
  source 1..75: mol_type = other DNA
ggctcttgaccaattcgtcatcaatactttctttattgtatactttaaggaataagttgcgaaatgctgcatttt

SEQ ID NO: 217054 - DNA, 75 bp, synthetic construct
  source 1..75: mol_type = other DNA
caagatcatctaaggggagtacgccatctcaatcaacttacagatgaagcacgtagagtaatatcaaactctgtt

SEQ ID NO: 217055 - DNA, 75 bp, synthetic construct
  source 1..75: mol_type = other DNA
cttattctggcaaccagcgcatattgaattatgcgatcccattgggattggtaaatgttcttgctgtggacagga

SEQ ID NO: 217056 - DNA, 75 bp, synthetic construct
  source 1..75: mol_type = other DNA
cggtgttactcaatgtcctcacattacctcgtcttcaaaaacaatttcctaatgaatcacatacggaaaaccaac

SEQ ID NO: 217057 - DNA, 75 bp, synthetic construct
  source 1..75: mol_type = other DNA
gacctgacaactaaagcgggtcgtgtcgagtgtcagttgattttgtccaaacatctaaaagggcttacattgggt

SEQ ID NO: 217058 - DNA, 75 bp, synthetic construct
  source 1..75: mol_type = other DNA
acaaggggacattggcgcgaaagatatcccctcctggcggcgaatatgcaaagttttactcaacaacgattactg

SEQ ID NO: 217059 - DNA, 75 bp, synthetic construct
  source 1..75: mol_type = other DNA
cagcaaggggacattggcgcgaaagatatcccctcctggcggcggatatgcaaagttttactcaataacgattac

SEQ ID NO: 217060 - DNA, 75 bp, synthetic construct
  source 1..75: mol_type = other DNA
ggcagggtgaagcattatgtggtggatgcactgcgattgcgttattcaaccaggcgaatcaggcacctggttttg

SEQ ID NO: 217061 - DNA, 75 bp, synthetic construct
  source 1..75: mol_type = other DNA
agaagctctcagaaaattacgaaggacaaacactcccatttctgtcatatcatccgagttaggttacagttctcc

SEQ ID NO: 217062 - DNA, 75 bp, synthetic construct
  source 1..75: mol_type = other DNA
ctataagtacatttgtacataaaataaagcttacagaagctatcaggaaattacgaaggacaaatactcccattt

SEQ ID NO: 217063 - DNA, 75 bp, synthetic construct
  source 1..75: mol_type = other DNA
gataataaaaagacggagacagatgccatttacgataaagttcggagttcttatttgctttcatgtattctgaaa

SEQ ID NO: 217064 - DNA, 75 bp, synthetic construct
  source 1..75: mol_type = other DNA
tcgattaaaaaaggtgatatactatttagtgaaattagacccgaaaataaaaggtatgctttcgtttattttgag

SEQ ID NO: 217065 - DNA, 75 bp, synthetic construct
  source 1..75: mol_type = other DNA
ttgaagaaacggagttgggttgggtgccgaaaggatggagtattgttagaactgaagatattgcattaaaaatag

SEQ ID NO: 217066 - DNA, 75 bp, synthetic construct
  source 1..75: mol_type = other DNA
accttgttcaaatcctggtttgtggattttgatccagtgattgataacgctctggatgcaggaaacccaattccg

SEQ ID NO: 217067 - DNA, 75 bp, synthetic construct
  source 1..75: mol_type = other DNA
tggttttagccgcagtgtcgattgcggcaagcgtcgcgccatctgcaatggcaggcacaccttctgtcgggctga

SEQ ID NO: 217068 - DNA, 75 bp, synthetic construct
  source 1..75: mol_type = other DNA
cgtataaaagctactcatttattagcaagccactatttgatttacaacaagggatgataccctgtagtaaccatg

SEQ ID NO: 217069 - DNA, 75 bp, synthetic construct
  source 1..75: mol_type = other DNA
aatgtcaatgccagtcaaggtataagtggtggatatcagatcctggcaaaaagctcagtcctgaatacagaagca

SEQ ID NO: 217070 - DNA, 75 bp, synthetic construct
  source 1..75: mol_type = other DNA
aacatacctaaaaattgtgatttaatagttgtttttgatagtgatgttattgatagggttgataggtttattcag

SEQ ID NO: 217071 - DNA, 75 bp, synthetic construct
  source 1..75: mol_type = other DNA
gcgagcgtctgatttatctcgacctcgaatatcagaatggctgctgccgtctgctgagcgggggacgacacgaga

SEQ ID NO: 217072 - DNA, 75 bp, synthetic construct
  source 1..75: mol_type = other DNA
tcactcagttgcgcgatagctttggcggtgaccttgcacagacggtgattgatgccaccggcagcgcgcagtcga

SEQ ID NO: 217073 - DNA, 75 bp, synthetic construct
  source 1..75: mol_type = other DNA
atgccgcagtaagtgaagggcaatactggtttatcacgctgatactgaatattgcgctgggatatctggatgaac

SEQ ID NO: 217074 - DNA, 75 bp, synthetic construct
  source 1..75: mol_type = other DNA
caggagcaacaacagcggatcgacgggaaatcaaaagcgctggttggctcggaagatttgccggtgctggatgaa

SEQ ID NO: 217075 - DNA, 75 bp, synthetic construct
  source 1..75: mol_type = other DNA
cccgtctacaaaaactgccgcactttgagcagctggtttatccgcaatggctgcatgacctgcaacaaggtaaag

SEQ ID NO: 217076 - DNA, 75 bp, synthetic construct
  source 1..75: mol_type = other DNA
cgctggcaggggggagaacagcgaccggccaccatcatcagtgaaccggaccgtaatgtcggctggccggagatt

SEQ ID NO: 217077 - DNA, 75 bp, synthetic construct
  source 1..75: mol_type = other DNA
gtgcgtgtctggaacaaacgtggtcagattttgacaggcgcggtggtgactgacgggatcaaaaaaggcgtggta

SEQ ID NO: 217078 - DNA, 75 bp, synthetic construct
  source 1..75: mol_type = other DNA
gcctttgtttcacggggagatattttacttactgtttaagcatgtatattaggagtactttcattataccgatga

SEQ ID NO: 217079 - DNA, 75 bp, synthetic construct
  source 1..75: mol_type = other DNA
actttttcatgaaattttacagagcgagagaaacagatggttctgcgagccaggcgtttgattcgggttctcagg

SEQ ID NO: 217080 - DNA, 75 bp, synthetic construct
  source 1..75: mol_type = other DNA
aatggcggcagtgagtaccaggcaaagccgcgcccgctggataaacccgctcatacaatcctcaagcagtcccgc

SEQ ID NO: 217081 - DNA, 75 bp, synthetic construct
  source 1..75: mol_type = other DNA
tactgcaggcggaaataaatttgcgacggtgagcgcattcctggcgaaacactacggcggtaactatacggggcc

SEQ ID NO: 217082 - DNA, 75 bp, synthetic construct
  source 1..75: mol_type = other DNA
accgcgccgacgaaccgagcgccacgatcaccgctggtggtggtgggaaatcgcagctggtgtccacgacaatga

SEQ ID NO: 217083 - DNA, 75 bp, synthetic construct
  source 1..75: mol_type = other DNA
ccggtttttttagaaagctaggttataatacacgaaatgttgcgatagctggttcattgcccgttggggttagtc

SEQ ID NO: 217084 - DNA, 75 bp, synthetic construct
  source 1..75: mol_type = other DNA
catccatacgtagaggtgtacaccagttctccaacaacggggtatggttcacggtctgttatcgtggaagtgctc

SEQ ID NO: 217085 - DNA, 75 bp, synthetic construct
  source 1..75: mol_type = other DNA
tactgcgaatcggtgtttgatgtcgatcccatcgtagcgaccgctggccgcccggtggggctggcatggttttcc

SEQ ID NO: 217086 - DNA, 75 bp, synthetic construct
  source 1..75: mol_type = other DNA
cagttattgcccggttaacattttcagtcattctgactcaaaatggacacattgcttttattggcggattacagg

SEQ ID NO: 217087 - DNA, 75 bp, synthetic construct
  source 1..75: mol_type = other DNA
gcgttgaaataacgccagcaggatctagatggggggtcagacctgatctcttattctatatcgaggcggcatggc

SEQ ID NO: 217088 - DNA, 75 bp, synthetic construct
  source 1..75: mol_type = other DNA
aaatgcagggagcatcagtaagggagtccacattacatggtcgctgataaatgattatggcggagagagtcgtcg

SEQ ID NO: 217089 - DNA, 75 bp, synthetic construct
  source 1..75: mol_type = other DNA
ctttcagagttcttcacaaagaaagtccaggctgcgcagatacacaaaaacccgtatttctgcccacacgatagc

SEQ ID NO: 217090 - DNA, 75 bp, synthetic construct
  source 1..75: mol_type = other DNA
gacattacttgatacattcgatttcaatgcggaaatgagctggtttcagtatcaacagtctattgaacagtatgc

SEQ ID NO: 217091 - DNA, 75 bp, synthetic construct
  source 1..75: mol_type = other DNA
tttgcaatggataaccaaaaaaagagacagcaatatgccccaaaatatatattgtatataccaggcttaatgaac

SEQ ID NO: 217092 - DNA, 75 bp, synthetic construct
  source 1..75: mol_type = other DNA
aacgggttcaagtggccttacgacaaccgcgatatgtttggtcagccgatgatcatcaaatacgcgccaaaactg

SEQ ID NO: 217093 - DNA, 75 bp, synthetic construct
  source 1..75: mol_type = other DNA
gttctataccaggaacatttggtggatttgttggttcattcgtatcagaaggtgcaagcagcgcaacgcaaaaag

SEQ ID NO: 217094 - DNA, 75 bp, synthetic construct
  source 1..75: mol_type = other DNA
gttgatctatcctctctggacttatgtaatgtcgatttagattattatgatttcacagataaacatatggctaat

SEQ ID NO: 217095 - DNA, 75 bp, synthetic construct
  source 1..75: mol_type = other DNA
aataatttcctataaccttgctactcgttctcaaccttcaatggtgccgactatgtttacggatgagctgaaaca

SEQ ID NO: 217096 - DNA, 75 bp, synthetic construct
  source 1..75: mol_type = other DNA
gtagatttttgcaactaatgacagaaaaagttaaatcagcgctacttccacttatggtggataataacgaagcaa

SEQ ID NO: 217097 - DNA, 75 bp, synthetic construct
  source 1..75: mol_type = other DNA
agaatggtacgcagaatatgatgaatggggcaacctgctgaatgaagagaacccgcaccagctgcaacagctcat

SEQ ID NO: 217098 - DNA, 75 bp, synthetic construct
  source 1..75: mol_type = other DNA
ggcctgacggtggagcagatgcaaaaccagatggacccggtgttcacgccggcgcgaaaaatccacctgtaccac

SEQ ID NO: 217099 - DNA, 75 bp, synthetic construct
  source 1..75: mol_type = other DNA
tcagcgtcactttccgacatcgaaatgcgtggtttcacctttgatcaaaaacgccagatacttcacctccagcta

SEQ ID NO: 217100 - DNA, 75 bp, synthetic construct
  source 1..75: mol_type = other DNA
gaataatttcgatttgcgggagtttgataatgtgattattagtctcggaacaaatgattttgttcaatatggttc

SEQ ID NO: 217101 - DNA, 75 bp, synthetic construct
  source 1..75: mol_type = other DNA
caggcggctgtcgccgccctgcgattactggctgaattaagttgttcagtcaatcccaatacgttctttgatgag

SEQ ID NO: 217102 - DNA, 75 bp, synthetic construct
  source 1..75: mol_type = other DNA
cagaaaggtccttacgtaaagcaggaaatattacagcatcatatacgctcacatcttgccgaacttcatatcaaa

SEQ ID NO: 217103 - DNA, 75 bp, synthetic construct
  source 1..75: mol_type = other DNA
gaaactatgcatcagaaggttatgaagttgagttcattccagaacaaaaagggatagcaaaaaccccggagtttc

SEQ ID NO: 217104 - DNA, 75 bp, synthetic construct
  source 1..75: mol_type = other DNA
cgggaggtattccaaaatgggaatatttgttttaaagcaaccacgcataaaagtgaagcttacctagatgctgat

SEQ ID NO: 217105 - DNA, 75 bp, synthetic construct
  source 1..75: mol_type = other DNA
gagttcgataaatataaaacacggatactggattcggggattaactgtaaaaaatatccgtggttatacttccct

SEQ ID NO: 217106 - DNA, 75 bp, synthetic construct
  source 1..75: mol_type = other DNA
ctggttaatggcacggatatacgtcaacttggaataaataattatcaccgtatgatagcctgtgttatgcaggac

SEQ ID NO: 217107 - DNA, 75 bp, synthetic construct
  source 1..75: mol_type = other DNA
tcacagcgtaatgaccgccccgctataccgaactactacgaagccgctatagatgctgcaacgttcaataaagct

SEQ ID NO: 217108 - DNA, 75 bp, synthetic construct
  source 1..75: mol_type = other DNA
ctgaccgggttaacgaactggcagttgccatgacgaacgcactatatcggtaccagacggtgaggggtgataagc

SEQ ID NO: 217109 - DNA, 75 bp, synthetic construct
  source 1..75: mol_type = other DNA
gcgatggctgcgggcgtcgagttatggcaaagtattcgcaatatgatgtatacctctattcctgcttttttcgtc

SEQ ID NO: 217110 - DNA, 75 bp, synthetic construct
  source 1..75: mol_type = other DNA
gcttttttctggtcaaaagcatgtatgatccgtgctatgatgaacatcaattgcataaagtgaatatgtcgcggg

SEQ ID NO: 217111 - DNA, 75 bp, synthetic construct
  source 1..75: mol_type = other DNA
gcaattacagagtttgaagtatattattttcccatggcgtttgattaatgattttggaagggttagatgtcaatt

SEQ ID NO: 217112 - DNA, 75 bp, synthetic construct
  source 1..75: mol_type = other DNA
cgaagttcattatttaaaatgtctttgtgatgaaatattcggaaggaataactttatttcaaatgttatttggga

SEQ ID NO: 217113 - DNA, 75 bp, synthetic construct
  source 1..75: mol_type = other DNA
gtgaggttgacagtctcactaaatccgttgccggtgatgccagcgccagcccgtgggagcgcgagttcgcgcaac

SEQ ID NO: 217114 - DNA, 75 bp, synthetic construct
  source 1..75: mol_type = other DNA
cggaaatcatgatcaaccttgccgggaacctgaccgccaaagcccggcagtacggcgcaaatatgtcgcagttcg

SEQ ID NO: 217115 - DNA, 75 bp, synthetic construct
  source 1..75: mol_type = other DNA
gaagaaaaacaaggggaaggaatgcatttcatggtaacaccacgcaactccagcatcagcacggacgcgataatg

SEQ ID NO: 217116 - DNA, 75 bp, synthetic construct
  source 1..75: mol_type = other DNA
agccggatctattacgcgcaatttcgttcagggagtcatcatggcgcgataatgctctaaacattgtctcacaga

SEQ ID NO: 217117 - DNA, 75 bp, synthetic construct
  source 1..75: mol_type = other DNA
gcatcaggagagtaagcagaagtctttccgtgttagtcagaaatgggaacaacgtgcaaagcttgcccttgctgg

SEQ ID NO: 217118 - DNA, 75 bp, synthetic construct
  source 1..75: mol_type = other DNA
ggtacagttcagctatacaaggtactgagggagctgattcaaccagacgacaaaatgacctgtttaggcaatggt

SEQ ID NO: 217119 - DNA, 75 bp, synthetic construct
  source 1..75: mol_type = other DNA
gcgatgggttgcttctacagcctgaacgagaagatgtatgtccgcattgtggaagagatagaagcccgtaaacgc

SEQ ID NO: 217120 - DNA, 75 bp, synthetic construct
  source 1..75: mol_type = other DNA
tggttcgataccgccatcgctgccatcggctttttactggcactgtttatcggcttacgcagccgcaaaaaaacg

SEQ ID NO: 217121 - DNA, 75 bp, synthetic construct
  source 1..75: mol_type = other DNA
atgatctcatatcagggacttgttcgcaccttccctaaaggtaaagctacagggatctattacagtgcgggcagt

SEQ ID NO: 217122 - DNA, 75 bp, synthetic construct
  source 1..75: mol_type = other DNA
aaattgccagaataaccaaagccattattaatggagagatggctttttatgagcgtgtttatacttctcatgagc

SEQ ID NO: 217123 - DNA, 75 bp, synthetic construct
  source 1..75: mol_type = other DNA
ggcacctggcaaggcatttgctgggggaacatcgcatccacggcggatcgcgtcgcatcatcgcgacactacaag

SEQ ID NO: 217124 - DNA, 75 bp, synthetic construct
  source 1..75: mol_type = other DNA
gtgaaagaatttggcctgtgggatgtggttcagcaaggcaaaatttcagtgtatgtcgcggatgcattattgaaa

SEQ ID NO: 217125 - DNA, 75 bp, synthetic construct
  source 1..75: mol_type = other DNA
agcccccgctctggtcgataacgtattaagaatgttcatgccagatgaaaacataacgaaattaattcatcaaac

SEQ ID NO: 217126 - DNA, 75 bp, synthetic construct
  source 1..75: mol_type = other DNA
tggccgatatgggactgtaccagggacgacgtatcgggccttatgtggaacagacctatctgcaactgctggagc

SEQ ID NO: 217127 - DNA, 75 bp, synthetic construct
  source 1..75: mol_type = other DNA
gaaaattgctgaggatggtgacaatggtaaccatcgcgcggatgaatctggctccgctgtttccggacagagccc

SEQ ID NO: 217128 - DNA, 75 bp, synthetic construct
  source 1..75: mol_type = other DNA
tgatgttatttcttataaggttgtttttattgtttatcttattgattttatatgcattttgtcgttcaatgaagt

SEQ ID NO: 217129 - DNA, 75 bp, synthetic construct
  source 1..75: mol_type = other DNA
taaggactgatttggtaacaaattatacatttttcactaaaaatcttaatggaattgctaagatgattgactgcc

SEQ ID NO: 217130 - DNA, 75 bp, synthetic construct
  source 1..75: mol_type = other DNA
atatgatgcgtatggttcgcagcagttctattttcccaatgtgctgaagtatgatcccgatcagtttagccagcg

SEQ ID NO: 217131 - DNA, 75 bp, synthetic construct
  source 1..75: mol_type = other DNA
aataaagaagttagtcgatacgtacatggaagtaaaggaattatagatgtaccaatattcaatactaaagatatg

SEQ ID NO: 217132 - DNA, 75 bp, synthetic construct
  source 1..75: mol_type = other DNA
acaggaggaaataattatatttattttcatcatccaatcaatgcggatgatgacataataagttgtgatttattt

SEQ ID NO: 217133 - DNA, 75 bp, synthetic construct
  source 1..75: mol_type = other DNA
cagaaaatatgggttaactctcggtgactatttgttccgaaggcgaatgagtcgggcggccgtattattgaggtt

SEQ ID NO: 217134 - DNA, 75 bp, synthetic construct
  source 1..75: mol_type = other DNA
gatgctaacgggtttagtgtccactctgtacgcaccatcttaaggtcggagacaacaataggcacgttaccagca

SEQ ID NO: 217135 - DNA, 75 bp, synthetic construct
  source 1..75: mol_type = other DNA
atcagccgcgattttgccgatttcaacgacgtatgggttagctggataccagaaggatatagcccggcacgtgct

SEQ ID NO: 217136 - DNA, 75 bp, synthetic construct
  source 1..75: mol_type = other DNA
ttttaaacttcaaatggttaaactggctttgcaactaggagcctctgttgcccgtatcgcccaggaacacgatat

SEQ ID NO: 217137 - DNA, 75 bp, synthetic construct
  source 1..75: mol_type = other DNA
aaacgcgctatcttaatgttgactacgccgccgtgacgggcttacttgttcagttcgcccgtgaaacagatgatc

SEQ ID NO: 217138 - DNA, 75 bp, synthetic construct
  source 1..75: mol_type = other DNA
cgttttctgtcagggtgtggggttccagtactcgacaaaacgtttttgaggttggcacgtctgctgcgtatctgt

SEQ ID NO: 217139 - DNA, 75 bp, synthetic construct
  source 1..75: mol_type = other DNA
tcaggagtgcagggaaagctgaaatttcagaccgttaatgattatggttcagtaactccggtcagagaagtgaac

SEQ ID NO: 217140 - DNA, 75 bp, synthetic construct
  source 1..75: mol_type = other DNA
gcacaccgatgcagaaatcatacgcctcagtgactgcgtgattgacgtccttctggacggtcacggcaaccctat

SEQ ID NO: 217141 - DNA, 75 bp, synthetic construct
  source 1..75: mol_type = other DNA
ttggtggaagtcggggtcgccgtcaacgcctggtatgcgccgttctatgatctgattcaaaccgcgctaagttcg

SEQ ID NO: 217142 - DNA, 75 bp, synthetic construct
  source 1..75: mol_type = other DNA
attgcttgtacaacaggtttggaacctaagttttttggtgaattcattaacatgtttagtgttttctttgctcct

SEQ ID NO: 217143 - DNA, 75 bp, synthetic construct
  source 1..75: mol_type = other DNA
cttgagctttatattttcccccatatcggttcgtccgacattcggcagcttaaaaccagccacctgttagccccg

SEQ ID NO: 217144 - DNA, 75 bp, synthetic construct
  source 1..75: mol_type = other DNA
gattgcatcgttacagcatgaggttgaaattgtcacagccagaatcaagaaagctaccgccctacttcttgagat

SEQ ID NO: 217145 - DNA, 75 bp, synthetic construct
  source 1..75: mol_type = other DNA
ttgtacctttgtcgcggcaggccctaagtattttggaaaagatcaaaagcatgagcggaaatcgagagctgattt

SEQ ID NO: 217146 - DNA, 75 bp, synthetic construct
  source 1..75: mol_type = other DNA
ctggctcttggggtctaccctgcggtctctcttgctgatgcccgtaaccgtagagatgatgccaaaagattaatt

SEQ ID NO: 217147 - DNA, 75 bp, synthetic construct
  source 1..75: mol_type = other DNA
tgatgcacgcgtgaaaagcgtcagagtggatcaacccggcgtcagacttagtgcccaggcaggggttaccagtgt

SEQ ID NO: 217148 - DNA, 75 bp, synthetic construct
  source 1..75: mol_type = other DNA
attatcgccgtgcgtaagacgtacaagctcggtaaaaccatccacgacataatgaatcccaaagggaaaggcaaa

SEQ ID NO: 217149 - DNA, 75 bp, synthetic construct
  source 1..75: mol_type = other DNA
gaaagactttgcagaaaaatccacccgtgggatgtcgctgtatgccgctgcgggtggacggggcgtaaagggggt

SEQ ID NO: 217150 - DNA, 75 bp, synthetic construct
  source 1..75: mol_type = other DNA
ttctggatgagcgcaggctgatgctgcaatggtgggctgattttctggatgcaaaccgtgaaaatccggtctcac

SEQ ID NO: 217151 - DNA, 75 bp, synthetic construct
  source 1..75: mol_type = other DNA
actcaaatccagccagcgatatggccggtgcgctatcgacaaccaaagcgcgacattacccggctttaccttcca

SEQ ID NO: 217152 - DNA, 75 bp, synthetic construct
  source 1..75: mol_type = other DNA
acagcgcgtcacggccattatgcgttatgccgtacagaatgattacatcgactcaaatccagccagcgatatggc

SEQ ID NO: 217153 - DNA, 75 bp, synthetic construct
  source 1..75: mol_type = other DNA
agcggaacattagtgagcttaaaactcgtgatttacttgttcctctgaaaaaagcagaggaaactggacatcttg

SEQ ID NO: 217154 - DNA, 75 bp, synthetic construct
  source 1..75: mol_type = other DNA
gggcggattatcttgatgttaatcgggagaaggggattagcccgtttgattttgccaaaatttttgcgtcgttaa

SEQ ID NO: 217155 - DNA, 75 bp, synthetic construct
  source 1..75: mol_type = other DNA
aagctattccggcaggctgttaacccgtctggcggtacagctcaatctgctgatctttatccgctccagcgagct

SEQ ID NO: 217156 - DNA, 75 bp, synthetic construct
  source 1..75: mol_type = other DNA
ctggttgaggcagagaaatctgcgcaggcgaatgtgattcgccggcgtgaagaaacggcagcgacgcgttcgtta

SEQ ID NO: 217157 - DNA, 75 bp, synthetic construct
  source 1..75: mol_type = other DNA
aatgcggtattgcaaccacggcgcaaaggggcagttaaaggccgcgatgcaatactaacggtgcaggttccggcc

SEQ ID NO: 217158 - DNA, 75 bp, synthetic construct
  source 1..75: mol_type = other DNA
ttctgggcgcgcttttctaccgttttatcagcgaaaatttttccagctatattgaagccggtgatgacagcatct

SEQ ID NO: 217159 - DNA, 75 bp, synthetic construct
  source 1..75: mol_type = other DNA
ttactaaaaattttaattggacgcggtttaacactcgcaggtaatcaaatactcgtaaaagcattatctatttta

SEQ ID NO: 217160 - DNA, 75 bp, synthetic construct
  source 1..75: mol_type = other DNA
atgattaaaaaaataagcgtaagaaaagatcagctggcattactctccagaaacggcgattactacaaagtgctg

SEQ ID NO: 217161 - DNA, 75 bp, synthetic construct
  source 1..75: mol_type = other DNA
gctgagcggatcgataacatctctgtatttggtggtctggatcaggttctgcacgggttagtgaatatcaaagga

SEQ ID NO: 217162 - DNA, 75 bp, synthetic construct
  source 1..75: mol_type = other DNA
atttacctataaagagggaacagttaaagaatcaccactatcatgtctgaataatgtatcaaatatcgcgcataa

SEQ ID NO: 217163 - DNA, 75 bp, synthetic construct
  source 1..75: mol_type = other DNA
ttttgtcttctcggataagaatcgtattttgcagggatgggaaaattattgatacagagaatgagttattaagaa

SEQ ID NO: 217164 - DNA, 75 bp, synthetic construct
  source 1..75: mol_type = other DNA
ggcctgattatgatggtggaatatatctagatggagtctggactttaaacggccaaaaaaaaataaaagaatgga

SEQ ID NO: 217165 - DNA, 75 bp, synthetic construct
  source 1..75: mol_type = other DNA
tcctgatatcagttttgatgagcagtctctagataaattagtatcgtttgcatggataaatgaatataattttgt

SEQ ID NO: 217166 - DNA, 75 bp, synthetic construct
  source 1..75: mol_type = other DNA
ttcttgcagagccagctgatactaaagcccctgagaaatacctgcctatttcattagattatataaataaatcaa

SEQ ID NO: 217167 - DNA, 75 bp, synthetic construct
  source 1..75: mol_type = other DNA
ataaggtcaaaaatcttggttggtcagatataggcattggccaacaacatgccggttatgttgatgatagtgaat

SEQ ID NO: 217168 - DNA, 75 bp, synthetic construct
  source 1..75: mol_type = other DNA
gtcagtgataggcacactaccagcatcacagcgcaatgaccgccccgctataccgaattactacgaagccgctat

SEQ ID NO: 217169 - DNA, 75 bp, synthetic construct
  source 1..75: mol_type = other DNA
gggggtttatctgctgtccagaagtatctgaaaagtttagcaagaaaacaaaagttctctcatacagattcagaa

SEQ ID NO: 217170 - DNA, 75 bp, synthetic construct
  source 1..75: mol_type = other DNA
ctgcattttaccggtaatttgcttggtaaatcctgtactcctgtaatcaatataccattacctgcgataccgctg

SEQ ID NO: 217171 - DNA, 75 bp, synthetic construct
  source 1..75: mol_type = other DNA
ttatcagtggtctgatattgttcagcggaacggccccagctgccgataacctgcattttaccggtaatttgcttg

SEQ ID NO: 217172 - DNA, 75 bp, synthetic construct
  source 1..75: mol_type = other DNA
gataatataaaaaaagcccattactccctgaccgtactcctgaatgctgagcgaaaactccctgccattaatatc

SEQ ID NO: 217173 - DNA, 75 bp, synthetic construct
  source 1..75: mol_type = other DNA
ttatccatcatgataccatgattaactcaattgcggattattatcatgagagagtaataaaaccgttctccctga

SEQ ID NO: 217174 - DNA, 75 bp, synthetic construct
  source 1..75: mol_type = other DNA
caaacccgctacgcccagtatatactccccaggctcatcgcacttgatatctataaaacttacaacgctgaaaac

SEQ ID NO: 217175 - DNA, 75 bp, synthetic construct
  source 1..75: mol_type = other DNA
ttatgcattgcgttagctggcgtaatcatgctgttgctgctggtcatcaaggcaaaggtacaaccattcgttgct

SEQ ID NO: 217176 - DNA, 75 bp, synthetic construct
  source 1..75: mol_type = other DNA
gttgctgctggtcatcaaggcaaaggtacaaccattcgttgctctgctcctcgtcagcctgttagtcgcacttgc

SEQ ID NO: 217177 - DNA, 75 bp, synthetic construct
  source 1..75: mol_type = other DNA
agaaagagtggatttgcccctatatttccagacatctgttatcacttaacccattacaagcccgctgccgcagat

SEQ ID NO: 217178 - DNA, 75 bp, synthetic construct
  source 1..75: mol_type = other DNA
acgtctgactcaacatttgaattctgttcctgttcttggagagaacagttactgggagatccttttaccagaaga

SEQ ID NO: 217179 - DNA, 75 bp, synthetic construct
  source 1..75: mol_type = other DNA
attgccgccaaatctgctgaataatggcacaacggagcaaagtgatgtaacagaggtcactgaggcacacctgtc

SEQ ID NO: 217180 - DNA, 75 bp, synthetic construct
  source 1..75: mol_type = other DNA
caaccgccaccgctattatgacccgctgcaggggcgatatatcactcaggatccgattgggctgaaggggggatg

SEQ ID NO: 217181 - DNA, 75 bp, synthetic construct
  source 1..75: mol_type = other DNA
aacacaaacaggcgcatcgacaccaaatcaaatctggtttttgaaactggaggaggacattccgggggtgtggcg

SEQ ID NO: 217182 - DNA, 75 bp, synthetic construct
  source 1..75: mol_type = other DNA
aggttgaaattgtcacagccagaatcaagaaagctaccgccctacttcttgagatggatgatattgatgaactaa

SEQ ID NO: 217183 - DNA, 75 bp, synthetic construct
  source 1..75: mol_type = other DNA
atcaggcgcaaatattaccctgacggcgctgacagtttcaccggatgcgctcagcggcaccagtgcgtcagcagt

SEQ ID NO: 217184 - DNA, 75 bp, synthetic construct
  source 1..75: mol_type = other DNA
aagacgacgacatgatatctggtgaaaaacgtctgcgtcttaactacaacggcataattgcactgttagtagaag

SEQ ID NO: 217185 - DNA, 75 bp, synthetic construct
  source 1..75: mol_type = other DNA
caaatgaagcgaaaacaaaggcagaagaggctgcagcaggaggtggtgttcccggtccgaaaggagataaagggg

SEQ ID NO: 217186 - DNA, 75 bp, synthetic construct
  source 1..75: mol_type = other DNA
gatctgatgccagaaggaatgcaaggaggaaagaactcgatgtttaactttattactcttttccagcggatagcg

SEQ ID NO: 217187 - DNA, 75 bp, synthetic construct
  source 1..75: mol_type = other DNA
aaatcgagttgttaccaattttacttgggagcacacagctcaacaaacgctcgaaggctataaactagcaattca

SEQ ID NO: 217188 - DNA, 75 bp, synthetic construct
  source 1..75: mol_type = other DNA
cggcgctccgtttcaatcctctggcaacattgccaagtggcgacaaagtggcggcagcggttggcattaccccgt

SEQ ID NO: 217189 - DNA, 75 bp, synthetic construct
  source 1..75: mol_type = other DNA
tcgccatacctttgcggctcactttatgatgtccggtggaaacatacttgcgttacaaaaaatactgggtcatca

SEQ ID NO: 217190 - DNA, 75 bp, synthetic construct
  source 1..75: mol_type = other DNA
caatttttgcgcccgggagctgatgattgatcgtgtccccgccaccatcggtggcgatggcagtttcacggttca

SEQ ID NO: 217191 - DNA, 75 bp, synthetic construct
  source 1..75: mol_type = other DNA
tcccggctgtcttttaaggaatttctctgtcaaacgattacaccgcttcttgaaacgggtgtgattacaaaatgg

SEQ ID NO: 217192 - DNA, 75 bp, synthetic construct
  source 1..75: mol_type = other DNA
tgcattatataaagtttgtaaatcacatgcattaatatcttggatggaaactcctggattgtctacacttgaagc

SEQ ID NO: 217193 - DNA, 75 bp, synthetic construct
  source 1..75: mol_type = other DNA
gaactgcttgcttcagccaatacatggactcaaccacaaactattaatggcaatttgacggtgaccggaaacggc

SEQ ID NO: 217194 - DNA, 75 bp, synthetic construct
  source 1..75: mol_type = other DNA
tttttaccggaaaggggacgttgttcacataggaaatgaaattttcggaatgtccggtgatgcattaaagctttg

SEQ ID NO: 217195 - DNA, 75 bp, synthetic construct
  source 1..75: mol_type = other DNA
aaactgagatcatggaacatgatcttacagcgcatttctggatatgcccgacgctgactgcaagtgaatgttgtg

SEQ ID NO: 217196 - DNA, 75 bp, synthetic construct
  source 1..75: mol_type = other DNA
aggaatgggatgcacggtacccgcagataagtcgcagctggcaggcaaactggccgaatgttgccaccttcttcg

SEQ ID NO: 217197 - DNA, 75 bp, synthetic construct
  source 1..75: mol_type = other DNA
gttaacccttcaatattaaatgataaaatagatcttcattttccttcagcattaaggattacaaatgtatcaaga

SEQ ID NO: 217198 - DNA, 75 bp, synthetic construct
  source 1..75: mol_type = other DNA
ataatgaaccatatattaatgataagggcgatgaaactcttcatgaaagttttaccaaactcaaagagtcaatgg

SEQ ID NO: 217199 - DNA, 75 bp, synthetic construct
  source 1..75: mol_type = other DNA
aatactttattggaaaacacgccatcccaaaagagtgttaataatcaaggctggttgtcattgttacctgttact

SEQ ID NO: 217200 - DNA, 75 bp, synthetic construct
  source 1..75: mol_type = other DNA
aatctggtttttaataaattacccaaagtggaagtgcacaataagaatgaagagaaaccagaacaaagtaagtaa

SEQ ID NO: 217201 - DNA, 75 bp, synthetic construct
  source 1..75: mol_type = other DNA
aggcgtggggaaaagtattgggtgaagataactccattacacatctggttgtgtatcctgaagtgctgtcgttgg

SEQ ID NO: 217202 - DNA, 75 bp, synthetic construct
  source 1..75: mol_type = other DNA
tctggtgtaagagtcgtgaggtggtggttctcagaaatctgattgagcaggcgtggggaaaagtattgggtgaag

SEQ ID NO: 217203 - DNA, 75 bp, synthetic construct
  source 1..75: mol_type = other DNA
ccaaagaacagcatgagtggctgaatggctggcttgaactgtggggcgcatgggtttattcaggtcgtctggaaa

SEQ ID NO: 217204 - DNA, 75 bp, synthetic construct
  source 1..75: mol_type = other DNA
gtttttagtcagttaccgaaagtggaagtgaaagctcaggaggagataaaaagtaaagagggaacggaagaaggt

SEQ ID NO: 217205 - DNA, 75 bp, synthetic construct
  source 1..75: mol_type = other DNA
tattgttgctgttgctgattggatttactggtgttatttatatgaataaatcaaaagaaattgcagttgttaata

SEQ ID NO: 217206 - DNA, 75 bp, synthetic construct
  source 1..75: mol_type = other DNA
attaccgcgggcaaacaggctcatatcagcggttcggatgtgattgcaaaccgggatatcagcattaccggtgac

SEQ ID NO: 217207 - DNA, 75 bp, synthetic construct
  source 1..75: mol_type = other DNA
gcgcattcgttctttatgcgcaatatcgagacggtgagttttttgatgtcgtccgcaatggtgaggagttcttcg

SEQ ID NO: 217208 - DNA, 75 bp, synthetic construct
  source 1..75: mol_type = other DNA
atattactattcctttaaaagcacgttacatcaaaacgggtagcgttaaaagtggtcgcgttaattctgtcgcta

SEQ ID NO: 217209 - DNA, 75 bp, synthetic construct
  source 1..75: mol_type = other DNA
ctcccacagaagcctgtctcttgatcagatctcctgatcaagagacttcatcaccaggtaaccctcaaccatatc

SEQ ID NO: 217210 - DNA, 75 bp, synthetic construct
  source 1..75: mol_type = other DNA
gatcgttacttgagcgtatttttcacgctatttgctttgaaggaattgccactgcgattctggcccccaccacag

SEQ ID NO: 217211 - DNA, 75 bp, synthetic construct
  source 1..75: mol_type = other DNA
gaaaaagaaaggtgaacatgcctacgatatgacgttaagttataaaactttgacaaaggcttttttaattcccgt

SEQ ID NO: 217212 - DNA, 75 bp, synthetic construct
  source 1..75: mol_type = other DNA
cgccacgcgttacgacaaaacggcgagaaattacctggcgatagtgaaactgggctgcatccgactcttttatca

SEQ ID NO: 217213 - DNA, 75 bp, synthetic construct
  source 1..75: mol_type = other DNA
tcgctgtacaccgcctgcggcggcatcaatccgtcgcacaccctgccgatcctgctggacgcgggaacgaacaat

SEQ ID NO: 217214 - DNA, 75 bp, synthetic construct
  source 1..75: mol_type = other DNA
gattacttcagcgtgcagtctggctctaacgatatcgccaccgccgccgtcaaactggcctgtggcgaagaagtc

SEQ ID NO: 217215 - DNA, 75 bp, synthetic construct
  source 1..75: mol_type = other DNA
tcactttatctgggaaggacgtgtacatcgggtaggtgccagtgccgggattaccttgattgatgacaacaatca

SEQ ID NO: 217216 - DNA, 75 bp, synthetic construct
  source 1..75: mol_type = other DNA
ccgttccggttactccggtcggtgcgcgaattaaatttatccgaagtgaaatcatgactttctacgaaaacaaag

SEQ ID NO: 217217 - DNA, 75 bp, synthetic construct
  source 1..75: mol_type = other DNA
tactttatatcccttatgcaggcccggtattactggaatccccgctgctgaacaaaggcagcgggtttactgaaa

SEQ ID NO: 217218 - DNA, 75 bp, synthetic construct
  source 1..75: mol_type = other DNA
cgaccaaaccaatctggcctctttccaggcaccgctggcacagccgcgttcgcgcctggcggagtggggcagtga

SEQ ID NO: 217219 - DNA, 75 bp, synthetic construct
  source 1..75: mol_type = other DNA
ttcaggcaatttgtgaggcattggtctctccctgttttccgctttatctgggaaggaaatcctgccccttggctc

SEQ ID NO: 217220 - DNA, 75 bp, synthetic construct
  source 1..75: mol_type = other DNA
gaactgattaaggcatggttgcgaaatttaggtattgtggcttttaatcaaataaaaacaaaatatgatggagag

SEQ ID NO: 217221 - DNA, 75 bp, synthetic construct
  source 1..75: mol_type = other DNA
actttccgtaattaataatggcggatacttgaaggtaaaggattttgggattgtgtctggctctccgataaagca

SEQ ID NO: 217222 - DNA, 75 bp, synthetic construct
  source 1..75: mol_type = other DNA
gcgatgattggcgtgctgatggtggcggcggtgttcctggttatcggcaacagcgtgcgtctgagcatatttgcc

SEQ ID NO: 217223 - DNA, 75 bp, synthetic construct
  source 1..75: mol_type = other DNA
ttataccctgacggctggagatggccggaccacggttgtacaaggctgggatgtcgacacggctgccaatactgt

SEQ ID NO: 217224 - DNA, 75 bp, synthetic construct
  source 1..75: mol_type = other DNA
attacgatgcaaagcaaaacagaatatctaaccttgcagagccatcacttgagcaggacgctgtaaataatcgct

SEQ ID NO: 217225 - DNA, 75 bp, synthetic construct
  source 1..75: mol_type = other DNA
tgtgtcccctcttgctgaatattccagcgatggactcatcccaggttttgttgtctgtgattttgctctagggtt

SEQ ID NO: 217226 - DNA, 75 bp, synthetic construct
  source 1..75: mol_type = other DNA
aaccctttatttatgttaacagtatatacttttgtcttctccgtggtattcaaagccagatggtcaactggtggg

SEQ ID NO: 217227 - DNA, 75 bp, synthetic construct
  source 1..75: mol_type = other DNA
actccatatttatggtgtcggaacgtgcgaaaaatttctcacagataaaataaataagcatggattaaataatgt

SEQ ID NO: 217228 - DNA, 75 bp, synthetic construct
  source 1..75: mol_type = other DNA
gtgcgaattcagttgttcgtggtgaattgcagtcaaatagcatttatgcaggcaatccaactaaattaataagga

SEQ ID NO: 217229 - DNA, 75 bp, synthetic construct
  source 1..75: mol_type = other DNA
attgatatgccgcaaaaccctgcgctcaggctgcaaatcatggtggcgtgctattccgcgatccagaagtgggag

SEQ ID NO: 217230 - DNA, 75 bp, synthetic construct
  source 1..75: mol_type = other DNA
ctacatctctttaaccaacaatatgtaagatctcaactatcgcatccgtggattaattcaattataacttctctc

SEQ ID NO: 217231 - DNA, 75 bp, synthetic construct
  source 1..75: mol_type = other DNA
tattctttgggtgccttagtcatagcctggatgggttttgccttcttccagaaaaccaggaagggatttgctgat

SEQ ID NO: 217232 - DNA, 75 bp, synthetic construct
  source 1..75: mol_type = other DNA
ttatgaaaaatataaaacagctaacaatgtgtatttcaatatcattggtacgttaagcgacagtgaattaaacaa

SEQ ID NO: 217233 - DNA, 75 bp, synthetic construct
  source 1..75: mol_type = other DNA
ataaatcctgatgatgaatcgatacgaattttttcatggcttgctgataatttcccagatctacaatattttaaa

SEQ ID NO: 217234 - DNA, 75 bp, synthetic construct
  source 1..75: mol_type = other DNA
atgttgcagcgggacgtcgtcggctgtatatcagagcaatctgtccatccctgcgtgaagccccgttactttatt

SEQ ID NO: 217235 - DNA, 75 bp, synthetic construct
  source 1..75: mol_type = other DNA
gtttatccccgctggcgcggggaactcgcgtatcgtctcgttattgcgccgccccaactcggtttatccccgctg

SEQ ID NO: 217236 - DNA, 75 bp, synthetic construct
  source 1..75: mol_type = other DNA
cgatcaggcggttttgttcttccagcgacgccggtttatccccgctggcgcggggaacaccccgaaagagattgc

SEQ ID NO: 217237 - DNA, 75 bp, synthetic construct
  source 1..75: mol_type = other DNA
gtttatccccgctggcgcggggaacacggccccggaacatctgccgcagtgcgataccccggtttatccccgctg

SEQ ID NO: 217238 - DNA, 75 bp, synthetic construct
  source 1..75: mol_type = other DNA
cctgctggcgcagttaagcggctgcagcaatacgcgaacggtctacgtcaaagtgccggtggtcccgttaccagc

SEQ ID NO: 217239 - DNA, 75 bp, synthetic construct
  source 1..75: mol_type = other DNA
tagggattattcgattttatgaggcagccccaactccgggaagagtgtggacgcagttgaaaacgagtggggtgt

SEQ ID NO: 217240 - DNA, 75 bp, synthetic construct
  source 1..75: mol_type = other DNA
gcaccctgacggcactatccattcaattcttatcggtgatatggctgaatcatctcctagcacacccaatggcat

SEQ ID NO: 217241 - DNA, 75 bp, synthetic construct
  source 1..75: mol_type = other DNA
cggacgctggggcgagcagaagctggtggtgcgactggcgcatcaggagcgcccgacggcaggcagcacgctgtg

SEQ ID NO: 217242 - DNA, 75 bp, synthetic construct
  source 1..75: mol_type = other DNA
ttacctgtcctggccgacgtcggtgtatccgaacctgctgatatggccggcagccatgctgctgggggtggccat

SEQ ID NO: 217243 - DNA, 75 bp, synthetic construct
  source 1..75: mol_type = other DNA
gcgatgatcggcgtattgatggtggcggcagtgttcctcgtcatcggtaacagtgtgcgcctgagtatctttgct

SEQ ID NO: 217244 - DNA, 75 bp, synthetic construct
  source 1..75: mol_type = other DNA
tccccgctggcgcggggaactccctcctgtaccacgatcgcgccctcatacccccggtttatccccgctggcgcg

SEQ ID NO: 217245 - DNA, 75 bp, synthetic construct
  source 1..75: mol_type = other DNA
gcgcggggaacacattttgctgggagtcattcccagctccgtaatcggtttatccccgctggcgcggggaacaca

SEQ ID NO: 217246 - DNA, 75 bp, synthetic construct
  source 1..75: mol_type = other DNA
ctggcgcggggaacacgggcgcacggaatacaaagccgtgtatctgctcggtttatccccgctggcgcggggaac

SEQ ID NO: 217247 - DNA, 75 bp, synthetic construct
  source 1..75: mol_type = other DNA
aacacatcaacgttatcgattacaactgacagggagccggtttatccccgctggcgcggggaacacccgaacggc

SEQ ID NO: 217248 - DNA, 75 bp, synthetic construct
  source 1..75: mol_type = other DNA
aggtggttttgtcgaccttaattgtggatggtattgccaggatgctttgcttagctggtattgtagtaaaaataa

SEQ ID NO: 217249 - DNA, 75 bp, synthetic construct
  source 1..75: mol_type = other DNA
tatatgtgatttttataatgttgtcgggagaatagaggaaacattggtcattaataaatataaagtcaaacactt

SEQ ID NO: 217250 - DNA, 75 bp, synthetic construct
  source 1..75: mol_type = other DNA
tttttccgtaaacccagggtcttgccggatcagggaattattgcctttgatatggattccacctttgttgaagaa

SEQ ID NO: 217251 - DNA, 75 bp, synthetic construct
  source 1..75: mol_type = other DNA
atgagcatcaaaaatttacttcccggcaaaattggcttaggcggcgcaccactcggcaacatgttccgtgccatt

SEQ ID NO: 217252 - DNA, 75 bp, synthetic construct
  source 1..75: mol_type = other DNA
tatggtgtacaaaaacgtcaaccatgcggcgacgcaatattatccgtcaccgcaaatcaccgtttatctgcaaaa

SEQ ID NO: 217253 - DNA, 75 bp, synthetic construct
  source 1..75: mol_type = other DNA
gccacggtttatccccgctggcgcggggaactcgtacggttgacggggttaataaatccggtcagcggtttatcc

SEQ ID NO: 217254 - DNA, 75 bp, synthetic construct
  source 1..75: mol_type = other DNA
gcgcggggaactcggacttaaagatcgcatcacagtactggagggcggtttatccccgctggcgcggggaactct

SEQ ID NO: 217255 - DNA, 75 bp, synthetic construct
  source 1..75: mol_type = other DNA
acgcggtttatccccgctggcgcggggaacactggtgtgattccaattgccgcacggaacgccgcggtttatccc

SEQ ID NO: 217256 - DNA, 75 bp, synthetic construct
  source 1..75: mol_type = other DNA
ctgaaacgcctgaaaacagaccgtctggatattgtctggatccacgacccggcacaggacttctacggtgacagc

SEQ ID NO: 217257 - DNA, 75 bp, synthetic construct
  source 1..75: mol_type = other DNA
gatgccttattacaacgaagtggcgaataacccgctgtttatatgggatccgcgcagcggtgtaaaaggcgaacg

SEQ ID NO: 217258 - DNA, 75 bp, synthetic construct
  source 1..75: mol_type = other DNA
tagcgggcacgcatatgatcacggctcgtctggctaacagcaatgtcagcgatacacagccaatgacgtttgtgg

SEQ ID NO: 217259 - DNA, 75 bp, synthetic construct
  source 1..75: mol_type = other DNA
tttatcatcgacgccaacccgcagtcagcgaaaattgcgacattatctgccagcaataatggtgtgctcgccaat

SEQ ID NO: 217260 - DNA, 75 bp, synthetic construct
  source 1..75: mol_type = other DNA
gcgagtaatttgggggaaattaaacttggcgtaaatggcaacctgaatccagcggccagcgtctggggaatgtgg

SEQ ID NO: 217261 - DNA, 75 bp, synthetic construct
  source 1..75: mol_type = other DNA
ttatgcccgcgactacaacttaactcattccagcgtgtcggattatcgttcgaaagggagtgtcagaggctatag

SEQ ID NO: 217262 - DNA, 75 bp, synthetic construct
  source 1..75: mol_type = other DNA
gattccatgccggagctgcttaaaaaggcggggatctatacccacctgataagcgatcatttgcattactgggaa

SEQ ID NO: 217263 - DNA, 75 bp, synthetic construct
  source 1..75: mol_type = other DNA
agagcacagtgaaagtgttatttttatcatcgaaatcagaatgcttttatgctggcagagcgatacaagctggtg

SEQ ID NO: 217264 - DNA, 75 bp, synthetic construct
  source 1..75: mol_type = other DNA
atggatactcatcctatcatcagaatgtctattgaagttctgttgcaaaaaaacagtgaattgcagattgtcctg

SEQ ID NO: 217265 - DNA, 75 bp, synthetic construct
  source 1..75: mol_type = other DNA
acggtaactccaccactggcgacgccatttatatgcgtggtgccgatacctctaacagtatttatattgatggta

SEQ ID NO: 217266 - DNA, 75 bp, synthetic construct
  source 1..75: mol_type = other DNA
gattaatcagcgacgaagacagggaaaagctgaaagcgtaccgtatttacgcaaaggcgttgcaggcgatggatt

SEQ ID NO: 217267 - DNA, 75 bp, synthetic construct
  source 1..75: mol_type = other DNA
ggtatcagtccgagcgcgagcgtcttaaatttcagcatgaaactgttcagcttgtgccagtcagtgatgtcaggc

SEQ ID NO: 217268 - DNA, 75 bp, synthetic construct
  source 1..75: mol_type = other DNA
aatatttatggcaagctaggtttgcattcaattgtagagcttatcgactacgccaaattatatgaattaatataa

SEQ ID NO: 217269 - DNA, 75 bp, synthetic construct
  source 1..75: mol_type = other DNA
atgcaaggattgcagctggagctttcgaatatcaactaaaacaacaaggcaaaaactggtatttgacaagttatc

SEQ ID NO: 217270 - DNA, 75 bp, synthetic construct
  source 1..75: mol_type = other DNA
aaaaccggtaaatcgcaaaaccaacgttttcaacgaacaggtgcgctatgccttccacggcgcattgcaggatct

SEQ ID NO: 217271 - DNA, 75 bp, synthetic construct
  source 1..75: mol_type = other DNA
tatggtgtacaaaaacgttaaccaggcggcgacgcagtattatccgtcaccgcaaatcaccgtttatctgcaaaa

SEQ ID NO: 217272 - DNA, 75 bp, synthetic construct
  source 1..75: mol_type = other DNA
ttgcaccctggtctcttcccaggcgtcaaaccgaatcgccacgctggttaggcgtcttatcagcatcatcattga

SEQ ID NO: 217273 - DNA, 75 bp, synthetic construct
  source 1..75: mol_type = other DNA
tgcgtctggtcggccagacaaccagcaagccagaacagtcttttgttttcgaaatcaccatccagcgtgttgacc

SEQ ID NO: 217274 - DNA, 75 bp, synthetic construct
  source 1..75: mol_type = other DNA
tgctgcgctatacctggcgggcgctggcgtcgggacgctggtactggcagatgacgacgatgtgcatttaagcaa

SEQ ID NO: 217275 - DNA, 75 bp, synthetic construct
  source 1..75: mol_type = other DNA
tactttcagagctgaatgctctgctgcgacaggaactgataaggcttggtgttaaccctgcccactctcttgagc

SEQ ID NO: 217276 - DNA, 75 bp, synthetic construct
  source 1..75: mol_type = other DNA
aggttcatcagggatgaaaccaaatcctactggtattaatttagcattaaaaaatctaggaatctcaaatccgga

SEQ ID NO: 217277 - DNA, 75 bp, synthetic construct
  source 1..75: mol_type = other DNA
acagattattgtttaaaagctaataatcataaagtaacaatattggttaattatgagcagtgcttaaatcatgct

SEQ ID NO: 217278 - DNA, 75 bp, synthetic construct
  source 1..75: mol_type = other DNA
ttttctataaggctgtaaataatggtacgacaacattttgtatttcatctggtatgattttttcccgaaaagcat

SEQ ID NO: 217279 - DNA, 75 bp, synthetic construct
  source 1..75: mol_type = other DNA
ggctctggcgacggtggtcgtaacgcgccgaaacgagcgaagtcatcaccgaaaccggcgaatcgcaaaaccaat

SEQ ID NO: 217280 - DNA, 75 bp, synthetic construct
  source 1..75: mol_type = other DNA
attatcttacaccatctggcgctcccattggtgatgagtggattacaggacgcacagctaatgccacttatacag

SEQ ID NO: 217281 - DNA, 75 bp, synthetic construct
  source 1..75: mol_type = other DNA
ccactggttggttaaagaataagatggaatggtatatgaacggtcatataggagaactggataaattagttcccc

SEQ ID NO: 217282 - DNA, 75 bp, synthetic construct
  source 1..75: mol_type = other DNA
actgctcatccgggatatctgggttcgcaggacacgttctatgtaggcaacctgaaaggtgtcgggcgtattaat

SEQ ID NO: 217283 - DNA, 75 bp, synthetic construct
  source 1..75: mol_type = other DNA
agttgaagtgtaagaaaggttctgacaggagagatgcatattccattgagaatgtctcagaatataacgtgcctg

SEQ ID NO: 217284 - DNA, 75 bp, synthetic construct
  source 1..75: mol_type = other DNA
gacaaatctggcgcggaatgccctcacatggcatggacacggctgccattttgaaaaatatcggctacagcgaaa

SEQ ID NO: 217285 - DNA, 75 bp, synthetic construct
  source 1..75: mol_type = other DNA
cccctgcacaatttttttcatccaaatatataaatggagtttcgctggaattaaataacatctctttttcctatt

SEQ ID NO: 217286 - DNA, 75 bp, synthetic construct
  source 1..75: mol_type = other DNA
tttttttgagaaaaaaacatcttccactcatatttcagacggaaagaacagattgtgctctttcatgtatcgcta

SEQ ID NO: 217287 - DNA, 75 bp, synthetic construct
  source 1..75: mol_type = other DNA
ttgagctaactgacagccagatcgcagcactggagcgtaaagccagtgatgacgaggcctgtggcgaaatcgaaa

SEQ ID NO: 217288 - DNA, 75 bp, synthetic construct
  source 1..75: mol_type = other DNA
aaaacactatcagtaagttggagtcattaccaaacttgcataacaaagggaattgtgaccgtaagtttaacggca

SEQ ID NO: 217289 - DNA, 75 bp, synthetic construct
  source 1..75: mol_type = other DNA
ggcgtgcgtaacaccagtcctgatgtttcttatcttattcagtcatgggtgatgacgccggataataaaaaatca

SEQ ID NO: 217290 - DNA, 75 bp, synthetic construct
  source 1..75: mol_type = other DNA
gatgacaccagataataaaaagtcagcggactttattattacaccaccgctatttgtgctgaatccagcaaacga

SEQ ID NO: 217291 - DNA, 75 bp, synthetic construct
  source 1..75: mol_type = other DNA
agcctactcgcacctgtcttttttcagaaacaacgacaacgtgaagttaacgaccttgagcgttgacgacatgcc

SEQ ID NO: 217292 - DNA, 75 bp, synthetic construct
  source 1..75: mol_type = other DNA
aagtgtgaatggcattaacgtatgttttgaaaaaaatgaaatgatagattggattaaaaaagaaatcccttttct

SEQ ID NO: 217293 - DNA, 75 bp, synthetic construct
  source 1..75: mol_type = other DNA
gcatctcaaatggaccttacaaatttttattcgcaggatttcttcgattttgcacaaaataaaggagcattcaaa

SEQ ID NO: 217294 - DNA, 75 bp, synthetic construct
  source 1..75: mol_type = other DNA
agcagtgcaattcaatgtttcccaagaataaatttagaggcagtgatcgcgttattatcgtcggcagtggcccaa

SEQ ID NO: 217295 - DNA, 75 bp, synthetic construct
  source 1..75: mol_type = other DNA
aagcatcacgccccattctccagagatttaataaaatccatggctaagcaagctggactgaaagctcgtcacttt

SEQ ID NO: 217296 - DNA, 75 bp, synthetic construct
  source 1..75: mol_type = other DNA
tgaaatacgacgaggtaatcaggggacttaagaacatggggtttgaaatgaaacctaaaacaggaacctctcacg

SEQ ID NO: 217297 - DNA, 75 bp, synthetic construct
  source 1..75: mol_type = other DNA
tcatacataattttcccgcacagagccagattcgtttatttgaaaaatgactacgcctcaactaaatattggaaa

SEQ ID NO: 217298 - DNA, 75 bp, synthetic construct
  source 1..75: mol_type = other DNA
gataaagataagaaggtgaaatcgtcaggtcgttcatatggtcaggctcagtcggtgggcactattgtattacgc

SEQ ID NO: 217299 - DNA, 75 bp, synthetic construct
  source 1..75: mol_type = other DNA
ccatccacgctctagaacaactggactggcagcggtctggctcgctcatgttatgcggtttgcgcttcagcgagc

SEQ ID NO: 217300 - DNA, 75 bp, synthetic construct
  source 1..75: mol_type = other DNA
ccagacacttattcctcaggctcaaaattttaatcattgcttgtcagactttgcaggattaccgcatggaactta

SEQ ID NO: 217301 - DNA, 75 bp, synthetic construct
  source 1..75: mol_type = other DNA
taactatatctgatttgtctaaaaatataggttcattaagcaagaataagaactatggtttacgtataagtatcg

SEQ ID NO: 217302 - DNA, 75 bp, synthetic construct
  source 1..75: mol_type = other DNA
taagaaggcaatcaccttgattctggcggtgctgctgggcggcatggtcggcgcgggtattgtgctggggcgtaa

SEQ ID NO: 217303 - DNA, 75 bp, synthetic construct
  source 1..75: mol_type = other DNA
cctgctggatatcgacaatcttgacgttgataaacttgatattcatgcttaccgctatgtgatgaaaccgacgtt

SEQ ID NO: 217304 - DNA, 75 bp, synthetic construct
  source 1..75: mol_type = other DNA
ccagagaggctggattgacctgatgaacaaccagtatttcagcgctgacctgatacaggtcgatggtgaagaggt

SEQ ID NO: 217305 - DNA, 75 bp, synthetic construct
  source 1..75: mol_type = other DNA
ccagcggggctggattgacctgatgaataaccagtatttcagcgctgacctgatacaggtcgacggtgaggaagt

SEQ ID NO: 217306 - DNA, 75 bp, synthetic construct
  source 1..75: mol_type = other DNA
taaccctgcagataataatacagcagtttacctgaatccgaaatttctggctgttaatattacaacctggtgcag

SEQ ID NO: 217307 - DNA, 75 bp, synthetic construct
  source 1..75: mol_type = other DNA
gtattaaacacagtatttagtagcgtaactcagattcttgatttaatggcttcattaaacttaactgagttctca

SEQ ID NO: 217308 - DNA, 75 bp, synthetic construct
  source 1..75: mol_type = other DNA
ttactgtcaataccttttttttaccgtcaataatccaggcaaaacctatttcaataaaagttgcctatgaaaata

SEQ ID NO: 217309 - DNA, 75 bp, synthetic construct
  source 1..75: mol_type = other DNA
aggaaatcttctgcgacgaacatggtcgcgtgcgggtgaagttcaactgggaccgttataacccggcagaccaag

SEQ ID NO: 217310 - DNA, 75 bp, synthetic construct
  source 1..75: mol_type = other DNA
taccagcgcacacagtatgaagtgtatgactaccccggacgtttcaagggtgcccacgggcagaactttgcccgc

SEQ ID NO: 217311 - DNA, 75 bp, synthetic construct
  source 1..75: mol_type = other DNA
agttaatgtagattactttatagaaaaaggtaaggtattaaatattgtcatttctgataccggaaagggaatccc

SEQ ID NO: 217312 - DNA, 75 bp, synthetic construct
  source 1..75: mol_type = other DNA
ggctcctttgttaactaaacctgtcaggttaaaagatataaaccttaaaatacatgaggttatgtcaaatcaagg

SEQ ID NO: 217313 - DNA, 75 bp, synthetic construct
  source 1..75: mol_type = other DNA
tatccgccgctgggataacttcccgattgccccggagcgccgcgccaatccagcctgggcgcagaacaccgtctg

SEQ ID NO: 217314 - DNA, 75 bp, synthetic construct
  source 1..75: mol_type = other DNA
aagcctggttgcgatatttatccgggtttgtccaattcgaatgaaatgtatctaaattatttattttctcctggg

SEQ ID NO: 217315 - DNA, 75 bp, synthetic construct
  source 1..75: mol_type = other DNA
cgctgacaacaaccggttatggcgcagttgcccccattcctcgccagtcacaagttgaaatcttgatccagcaaa

SEQ ID NO: 217316 - DNA, 75 bp, synthetic construct
  source 1..75: mol_type = other DNA
cattaccgggtggggacggggcggcaagatttactgttaacctgtgcaccagaaagaaggaaacagaccgtacac

SEQ ID NO: 217317 - DNA, 75 bp, synthetic construct
  source 1..75: mol_type = other DNA
gaatcgaaacagagaatggcgaacaggcgaaggcgcggcaccggagcctggcggaggtgttgcaggaggacacgg

SEQ ID NO: 217318 - DNA, 75 bp, synthetic construct
  source 1..75: mol_type = other DNA
aagcctgacagcatcgccatttccacacctgacagcttcactgtaactgttggcgggacagttttttcactgaca

SEQ ID NO: 217319 - DNA, 75 bp, synthetic construct
  source 1..75: mol_type = other DNA
tcggcattctgaatctcaccgaggactccttcttcaaggatgaccttcggtctctctatttaaaggaaatcttca

SEQ ID NO: 217320 - DNA, 75 bp, synthetic construct
  source 1..75: mol_type = other DNA
atgtcactaaccagacggaggtttacacagattcttgcgtcgacgttgttcctgcatcatctgccttcttttgca

SEQ ID NO: 217321 - DNA, 75 bp, synthetic construct
  source 1..75: mol_type = other DNA
caggaggacacgggtgtgacgctaccggcggagctgtcggtgatgctggggaggctggagcgggaactgcgcgcg

SEQ ID NO: 217322 - DNA, 75 bp, synthetic construct
  source 1..75: mol_type = other DNA
cccgcaggagagccgggagtaccgttacagcgacacggggaggctgacgggcgtccacaccacggcagcgaacct

SEQ ID NO: 217323 - DNA, 75 bp, synthetic construct
  source 1..75: mol_type = other DNA
gctcgccggacgtgccagcacgctctcactggaaggacttatggcgttacgtcccgatttagtgattgattgcgg

SEQ ID NO: 217324 - DNA, 75 bp, synthetic construct
  source 1..75: mol_type = other DNA
ctggctccggaagggaaaataggagtgtggctggagaaacctgacaagcccaatattcgcctgacggataagcag

SEQ ID NO: 217325 - DNA, 75 bp, synthetic construct
  source 1..75: mol_type = other DNA
atagattaaccattgcgttaatgatagccggatcagtccagacagcagcgaaagaaaaaatatcactgcttgcac

SEQ ID NO: 217326 - DNA, 75 bp, synthetic construct
  source 1..75: mol_type = other DNA
aatgcttcctgacgggcagcagaacgcatatgtaagtcttaatttaactttatatgttgatagtaaaaaaacacc

SEQ ID NO: 217327 - DNA, 75 bp, synthetic construct
  source 1..75: mol_type = other DNA
gtcggggctgtactataaccggaaccggtactacgatccgttgcagggacgctatatcacccaggatcccattgg

SEQ ID NO: 217328 - DNA, 75 bp, synthetic construct
  source 1..75: mol_type = other DNA
tatttctggcggttctgttcacgggctttaactttaacgcagaagcggctaccgtaaaacaagctcttagttgta

SEQ ID NO: 217329 - DNA, 75 bp, synthetic construct
  source 1..75: mol_type = other DNA
gccctggaaataccccacagccccgaaaaagagccagtcagttgcttaactgactggcattacaccgttagtgag

SEQ ID NO: 217330 - DNA, 75 bp, synthetic construct
  source 1..75: mol_type = other DNA
ggtatagtgaatactgccagtaataacagcatgataatggataagttattggactcagctcagggggctacgtct

SEQ ID NO: 217331 - DNA, 75 bp, synthetic construct
  source 1..75: mol_type = other DNA
tctttaccactgtgaccaccggggactgccgcaggcgcttatcagcccggaaggggaaacggcgtggtgcgggga

SEQ ID NO: 217332 - DNA, 75 bp, synthetic construct
  source 1..75: mol_type = other DNA
ggcggcgggagcgtgacctgacggggtggatgtcgctgtcgcgtaaaccggaggtgacatggtacgggtgggacg

SEQ ID NO: 217333 - DNA, 75 bp, synthetic construct
  source 1..75: mol_type = other DNA
cgttaaaagagaagatatctgtactagacagcattatgcaccaagcattagaggaagctaatgagcaagacgttg

SEQ ID NO: 217334 - DNA, 75 bp, synthetic construct
  source 1..75: mol_type = other DNA
atggctttaggcgctgcatatcaagatggactgatcgttgcgggatgcaagttgggacttgatgagccttcgaaa

SEQ ID NO: 217335 - DNA, 75 bp, synthetic construct
  source 1..75: mol_type = other DNA
tccaatatatcatgttttgaaagcgacttatcaaacaccatcttttcaaatggagaaataaacaacctcttcatt

SEQ ID NO: 217336 - DNA, 75 bp, synthetic construct
  source 1..75: mol_type = other DNA
atggaatatctggttaacgtggttccttcaggtgaagttatcgacagcacgctattgccgccaaatctgctgaat

SEQ ID NO: 217337 - DNA, 75 bp, synthetic construct
  source 1..75: mol_type = other DNA
tacactgttagtgttcctgagtcaacggcatatcatggaatccatcatatgaaattcagaatacaagatagtcat

SEQ ID NO: 217338 - DNA, 75 bp, synthetic construct
  source 1..75: mol_type = other DNA
gatacgctattactttgtttatggatatttctggctcaactaaacttggcaaaaaatatcccatagaaacagttt

SEQ ID NO: 217339 - DNA, 75 bp, synthetic construct
  source 1..75: mol_type = other DNA
agttattaaccctggctcagcccaacgaatgagcgttgctgaaatcgcaggtgacaccgtcacaactacgcaaag

SEQ ID NO: 217340 - DNA, 75 bp, synthetic construct
  source 1..75: mol_type = other DNA
cgtcaccgtacctaaacacctggcggggaaacccgctgactgtatggcgatcgtcatgcaggctatgcagtgggg

SEQ ID NO: 217341 - DNA, 75 bp, synthetic construct
  source 1..75: mol_type = other DNA
tctccggatgaaccgggcgcagcagaacgattcgccgaagttgagcgcgtgctggcaaccaataagcgtcacatg

SEQ ID NO: 217342 - DNA, 75 bp, synthetic construct
  source 1..75: mol_type = other DNA
gtacagtacataagaacaatgctacatctggtacatttacggcgtttcactttgcggcataccatgtagaaaaag

SEQ ID NO: 217343 - DNA, 75 bp, synthetic construct
  source 1..75: mol_type = other DNA
cgttatggtgtcactttcaatacggtatacaaagccattcgccggatgcgacggctgaaataccgccagtaccag

SEQ ID NO: 217344 - DNA, 75 bp, synthetic construct
  source 1..75: mol_type = other DNA
gcccacggattaacgcggaggctgatacaagtttccgcgtcaggaaagcccagtttggcgatggatatgagcagg

SEQ ID NO: 217345 - DNA, 75 bp, synthetic construct
  source 1..75: mol_type = other DNA
agcatataactcagagaatcaatattttaccagagaggactatacgtataattacaaccttttaaatgcaatata

SEQ ID NO: 217346 - DNA, 75 bp, synthetic construct
  source 1..75: mol_type = other DNA
tggcgcgacggttctggtcaactgaaaactcaaagtaatcgttatgtgattcaactgggtggtgatatcgcacaa

SEQ ID NO: 217347 - DNA, 75 bp, synthetic construct
  source 1..75: mol_type = other DNA
ctggtcgggttagggatgtgttgaaagcattcagttgtgatgaagggcatcgtgtttattctcaagctctagaac

SEQ ID NO: 217348 - DNA, 75 bp, synthetic construct
  source 1..75: mol_type = other DNA
acccgtggcaggcctacggacgattaaacggcaaattcaaatctctcggtcatttccccaccaaacaactcgcag

SEQ ID NO: 217349 - DNA, 75 bp, synthetic construct
  source 1..75: mol_type = other DNA
taacaataatgttggcggcgcagcgccagggaaaagctatcgtagctacgggcaactggaagccgaataccgcat

SEQ ID NO: 217350 - DNA, 75 bp, synthetic construct
  source 1..75: mol_type = other DNA
gcgcagcgccagggaaaagctatcgtagctacgggcaactggaagccgagtaccgcatcggacgcaatatgctgc

SEQ ID NO: 217351 - DNA, 75 bp, synthetic construct
  source 1..75: mol_type = other DNA
atgcggaagaattatttttcccagtttcgagtctaaacaaatatccatcacgaaagctctgcaaatagtaaattc

SEQ ID NO: 217352 - DNA, 75 bp, synthetic construct
  source 1..75: mol_type = other DNA
gggcagcctggcaagacaggcgctgggcgatgggataatcgatgcggcattgctggcgcgctacgaattcagcac

SEQ ID NO: 217353 - DNA, 75 bp, synthetic construct
  source 1..75: mol_type = other DNA
ttataacagccaccgtacaaaacgggaagaatatctgttgatgagtggtgatgatgtggcggataaggggttccg

SEQ ID NO: 217354 - DNA, 75 bp, synthetic construct
  source 1..75: mol_type = other DNA
ggaagccgtaataaatgcttttgttaaaagagtattacaggaggcacgtggagttgatcaggaaaccgcaatgct

SEQ ID NO: 217355 - DNA, 75 bp, synthetic construct
  source 1..75: mol_type = other DNA
cgctatcaattggtttggggacgcggttacagatccaaatgcacattcgagtatagtgaaatacgtttctgcaat

SEQ ID NO: 217356 - DNA, 75 bp, synthetic construct
  source 1..75: mol_type = other DNA
cgccagtcaacatatcgactgtcaacatcaggttgcagatgtttactattccaggtttaaaaagtcgcagataga

SEQ ID NO: 217357 - DNA, 75 bp, synthetic construct
  source 1..75: mol_type = other DNA
cccaacccaaaggcggtttcctgttattcggtaatggcgatgtcggggaaggttcctgcatggtgcataaccccg

SEQ ID NO: 217358 - DNA, 75 bp, synthetic construct
  source 1..75: mol_type = other DNA
actttctcattcaaagatggaaatggaggcggagaaggttcaggtctgggtcattacggattgtggaatgacatc

SEQ ID NO: 217359 - DNA, 75 bp, synthetic construct
  source 1..75: mol_type = other DNA
aaaagaaccttaagagttcctgaggattatgttgaccagataccatcaaatgctgatagatcaaataaaatactt

SEQ ID NO: 217360 - DNA, 75 bp, synthetic construct
  source 1..75: mol_type = other DNA
aactgtagagcaactgcaaccgaaggctatcccagacactgccatgcgacagcaattcgacaaaggccaaatcga

SEQ ID NO: 217361 - DNA, 75 bp, synthetic construct
  source 1..75: mol_type = other DNA
ctggcaatattactgcactggttatctatctgctttcctgctggcgggcgtacaagtttcgcaaaatgttgtgta

SEQ ID NO: 217362 - DNA, 75 bp, synthetic construct
  source 1..75: mol_type = other DNA
gacaacgactttgagccgaagctgattcagaccgtgcgcggcgtgggctatatgcttgaggtgccggatggtcag

SEQ ID NO: 217363 - DNA, 75 bp, synthetic construct
  source 1..75: mol_type = other DNA
taccggattgtccgtggttcagttacaacagctatcagcggcgtttagtggcctcggtcttgagattgataagtt

SEQ ID NO: 217364 - DNA, 75 bp, synthetic construct
  source 1..75: mol_type = other DNA
catagctactgttacggctccgcaaggtggctggaaagacgaagctaaagaacgtgaggatgctcagaagaaagc

SEQ ID NO: 217365 - DNA, 75 bp, synthetic construct
  source 1..75: mol_type = other DNA
ttgatattgacggggatacgtcaggtttacagcgtgctttgcgacaaggcacctcatcacttgaagaattcggtt

SEQ ID NO: 217366 - DNA, 75 bp, synthetic construct
  source 1..75: mol_type = other DNA
tgataactcccctagttcaggtagtgagcttggtggaagcattaatctctcgctgagaactgcttctaatgactt

SEQ ID NO: 217367 - DNA, 75 bp, synthetic construct
  source 1..75: mol_type = other DNA
tacagagatatgatgaatattggtgagcacaccttaaatcattttttagatataccttgcggaaaaagtggctta

SEQ ID NO: 217368 - DNA, 75 bp, synthetic construct
  source 1..75: mol_type = other DNA
ttattagtactgcaaagggtgctgctgctggtcagttccatggcggggtagatgaactaccagcaagttatgaca

SEQ ID NO: 217369 - DNA, 75 bp, synthetic construct
  source 1..75: mol_type = other DNA
gcgggcgttcggcgtaaagttggatgagtggtgccgtgatcgtgtaggcacgatccacactttccagggccgaga

SEQ ID NO: 217370 - DNA, 75 bp, synthetic construct
  source 1..75: mol_type = other DNA
ttgaatgacggtttgattaagcgtgtactgaatctttttattcaccttatctctaatcccgacaatcttgaatta

SEQ ID NO: 217371 - DNA, 75 bp, synthetic construct
  source 1..75: mol_type = other DNA
acgctgatcgtctgacctggaccgtttctgtatatcttcctgttcatgcacatctgccacgaacaaatgcctgtt

SEQ ID NO: 217372 - DNA, 75 bp, synthetic construct
  source 1..75: mol_type = other DNA
ttcgaaaacctataagggcagcgggtttaatgaactgaagtttgacgatgcgacagggaaagaacaggtctacat

SEQ ID NO: 217373 - DNA, 75 bp, synthetic construct
  source 1..75: mol_type = other DNA
ttactcttctgcacgttaaacgcgacaccgataggaacatcgcagtcgcagacggttgtaaattcataccgtctt

SEQ ID NO: 217374 - DNA, 75 bp, synthetic construct
  source 1..75: mol_type = other DNA
gaattttttcatggcttgctgataatttcccagatctacaatattttaaactacagctattagatgccagtaatc

SEQ ID NO: 217375 - DNA, 75 bp, synthetic construct
  source 1..75: mol_type = other DNA
tcggaacgaagtttgatatcaatggtttatcgttcgatgaatgcctgctgttgctgctggtatgctcgatgattg

SEQ ID NO: 217376 - DNA, 75 bp, synthetic construct
  source 1..75: mol_type = other DNA
gcgttatctgccggagtcctttgagatcccctggaatccgaacacccgtaccgaggtgagcaccctctgcatcag

SEQ ID NO: 217377 - DNA, 75 bp, synthetic construct
  source 1..75: mol_type = other DNA
ccatctgcccgaatcttttgaaatcccatggaacccgaacacccgtaccgaggtgagcaccctctgcatcagcca

SEQ ID NO: 217378 - DNA, 75 bp, synthetic construct
  source 1..75: mol_type = other DNA
ccaaatgcccgcagcaagcccagttataagctttatttcgaggtcgtcctcggcgccatcgctctcgacaaggca

SEQ ID NO: 217379 - DNA, 75 bp, synthetic construct
  source 1..75: mol_type = other DNA
ctgaaccagtcactctcttcgctcttttccctcgatctctccctggtcagccagcagtttctctcccttgaattc

SEQ ID NO: 217380 - DNA, 75 bp, synthetic construct
  source 1..75: mol_type = other DNA
cggttttggccacctggcgataccgcgtgtgggtcaggaggtgatacggcgattaaggaaattttgctggctgtg

SEQ ID NO: 217381 - DNA, 75 bp, synthetic construct
  source 1..75: mol_type = other DNA
ggatagcagcggaggaaggcatcttcttctatgaggagcacgcgcagaaaagtaccgaccagagtctggtgctgt

SEQ ID NO: 217382 - DNA, 75 bp, synthetic construct
  source 1..75: mol_type = other DNA
ctggaggacctccggcgtgacatcatcaagggggcggcgagcccgtacctggcgagtaaaggcctggagctttac

SEQ ID NO: 217383 - DNA, 75 bp, synthetic construct
  source 1..75: mol_type = other DNA
tggggtggaggcaaggttcttcctggtctggtcactcgcgccgggaaagaaaagtcgctctgcctggatggtgtg

SEQ ID NO: 217384 - DNA, 75 bp, synthetic construct
  source 1..75: mol_type = other DNA
ttctgaaaagcgctctggacatcgccttcaatgaagaagggaaacaaattcagggtttaattttgcttctgctga

SEQ ID NO: 217385 - DNA, 75 bp, synthetic construct
  source 1..75: mol_type = other DNA
atgccggaaagcgagcccgtcactaacggtgatctgagtgccgatattcgcaggcttgagcatgcgctcaccgcc

SEQ ID NO: 217386 - DNA, 75 bp, synthetic construct
  source 1..75: mol_type = other DNA
cagaactttggcctccacctgtacgccccctcaacaacgggtaagaccacatgcgcgacactcgccgcgagtgta

SEQ ID NO: 217387 - DNA, 75 bp, synthetic construct
  source 1..75: mol_type = other DNA
ataacgataacgacgggaagggtaaaaacaccgggaaggtgtacgctgaaaaagcagcccttgccgtcggcggta

SEQ ID NO: 217388 - DNA, 75 bp, synthetic construct
  source 1..75: mol_type = other DNA
ccttggctttgcttaaatcgcgcggatggctggtaattccgcgggatgaactggctggaaaattgatggagcttt

SEQ ID NO: 217389 - DNA, 75 bp, synthetic construct
  source 1..75: mol_type = other DNA
cacgtcgtactttatctctgtttttaaggcgttttacggcctgacaccgttgaattatctcgccaaacagcgaca

SEQ ID NO: 217390 - DNA, 75 bp, synthetic construct
  source 1..75: mol_type = other DNA
atccccctatgtctatccatttgtgctgggaatcagtgattgataaaaaagtgtatgaaacctggataacgctgg

SEQ ID NO: 217391 - DNA, 75 bp, synthetic construct
  source 1..75: mol_type = other DNA
caactggtgacggttgaagaagccctggttttgcttaaatcgcgcggatggctggtaatgccgcgggatgaactg

SEQ ID NO: 217392 - DNA, 75 bp, synthetic construct
  source 1..75: mol_type = other DNA
ctctttccccgatcacttacaaccagatccctgttattaccactgaacttttggcgcagctttacggtacagaag

SEQ ID NO: 217393 - DNA, 75 bp, synthetic construct
  source 1..75: mol_type = other DNA
caatcagtcaaattctgggcctcactgacgcttcccgaagcccaaaacattacacgcatcgtcagcgcaggcgcg

SEQ ID NO: 217394 - DNA, 75 bp, synthetic construct
  source 1..75: mol_type = other DNA
tgactggccggaagatatgcatccgctgcgcaaagatgcgatggattatcgactgcgccctgaaccgacgactga

SEQ ID NO: 217395 - DNA, 75 bp, synthetic construct
  source 1..75: mol_type = other DNA
cagtatgttgctggagccagagatgctggcaaacgtccagcctgatgttcatctggtctccacgctgatgtcgct

SEQ ID NO: 217396 - DNA, 75 bp, synthetic construct
  source 1..75: mol_type = other DNA
atttttgccgccatcacaccagtattcacgcagaacgttttggcattaaggttatttcatcaccgcgtcacgccg

SEQ ID NO: 217397 - DNA, 75 bp, synthetic construct
  source 1..75: mol_type = other DNA
ggcgtggtggcacagttgcaggccgagcaaggcgtggagaaagtgaattatctttctcgtgaagacgcactgggc

SEQ ID NO: 217398 - DNA, 75 bp, synthetic construct
  source 1..75: mol_type = other DNA
gatgtcgctcaactcattgaggtgtgcaccggcgggctgggccgctttcctgaatggctatcaccttcattcaac

SEQ ID NO: 217399 - DNA, 75 bp, synthetic construct
  source 1..75: mol_type = other DNA
tcgagcaggaggccgacgttattttcatggtctaccgcgatgagaaatacaacccgcaaacagagcttaaaggcg

SEQ ID NO: 217400 - DNA, 75 bp, synthetic construct
  source 1..75: mol_type = other DNA
cggcctgaaaaacctcgcaaaggaattgcgctgcccggttatcgcattgtctcagctgagccgtaagtgtgagga

SEQ ID NO: 217401 - DNA, 75 bp, synthetic construct
  source 1..75: mol_type = other DNA
ctgcttgccacgccgaatatggaacaacgcactcagggcattggcattctcgaccgacaaatcgcccgtgattat

SEQ ID NO: 217402 - DNA, 75 bp, synthetic construct
  source 1..75: mol_type = other DNA
gcaacgtctgcaaacgctgaaactggtgcgcgagatgcgcgccgacgtgtcggagctggtagagatgctgcttgc

SEQ ID NO: 217403 - DNA, 75 bp, synthetic construct
  source 1..75: mol_type = other DNA
ctgcgcaaagatgcgatggattatcgactgcgccctgaaccgacgactgataccgaaacgtatccgtttatcaac

SEQ ID NO: 217404 - DNA, 75 bp, synthetic construct
  source 1..75: mol_type = other DNA
acccagagcattactaacctggataatcgggtaacgaatcttgattcacgcgtcaccaatatcgaaaacggtatt

SEQ ID NO: 217405 - DNA, 75 bp, synthetic construct
  source 1..75: mol_type = other DNA
cgcctgacgggtgcggtttttcacggacagcatgtccgagtctcgttgttcgagcggaacgcactggaaacggag

SEQ ID NO: 217406 - DNA, 75 bp, synthetic construct
  source 1..75: mol_type = other DNA
tgatgatgacgtattagcccatatatcattactgccctataaacacgtattacctaatggtacttattttgttga

SEQ ID NO: 217407 - DNA, 75 bp, synthetic construct
  source 1..75: mol_type = other DNA
tggcattacaatggtatttatcgcgccatcacactctgttcaggacaaaccagccagcactgacaacaccaacgt

SEQ ID NO: 217408 - DNA, 75 bp, synthetic construct
  source 1..75: mol_type = other DNA
ttaaaaagatagattccacgctgcgaggcaatatcggcgcagaaattgaagccctgatgaaggcatgcggtataa

SEQ ID NO: 217409 - DNA, 75 bp, synthetic construct
  source 1..75: mol_type = other DNA
ctcaggaacacgattcggttgttcacatcgatccagatagtgatgcttctgacaataatgatgattcagagcaag

SEQ ID NO: 217410 - DNA, 75 bp, synthetic construct
  source 1..75: mol_type = other DNA
gaaaatattcttgatggcaaaggggatttatttaaaaaacgtacgctgtgggagtttgttcgcgatctttttccc

SEQ ID NO: 217411 - DNA, 75 bp, synthetic construct
  source 1..75: mol_type = other DNA
gacctcatctctcaggcgcagaaagccatgcatcgcaacactgcgcgcattgagtcgctggagtacaccaaggcg

SEQ ID NO: 217412 - DNA, 75 bp, synthetic construct
  source 1..75: mol_type = other DNA
agatgctcacgctcgacgatgagcttttctggctgcgagcggcgagcctgacagcggcagagaatatcgggcgct

SEQ ID NO: 217413 - DNA, 75 bp, synthetic construct
  source 1..75: mol_type = other DNA
tgcggtcgctcctctgccccgatgccgcagcgtgtaacggaaaaagaaaaacatgatgaagaaaaaccgcaacca

SEQ ID NO: 217414 - DNA, 75 bp, synthetic construct
  source 1..75: mol_type = other DNA
agaaagctggcctgaaagtaacgcttcctcgcttgaaaatcctggaagttcttcaggagccggacaaccatcacg

SEQ ID NO: 217415 - DNA, 75 bp, synthetic construct
  source 1..75: mol_type = other DNA
gtgactgccgaagaggtgaacaacgcgcttaaaaacgcgacaaacaataacgagtcatttggttataccgatgaa

SEQ ID NO: 217416 - DNA, 75 bp, synthetic construct
  source 1..75: mol_type = other DNA
tgactgtggtccagtaatgggagatgaaacttacgctgaaacttttggagaaaatgagaccgctgctggagatga

SEQ ID NO: 217417 - DNA, 75 bp, synthetic construct
  source 1..75: mol_type = other DNA
cggcaatatcggcgcggaaattgaagccctgatgagggcatgcggtataacgggcgcagtggttgctcccgcatt

SEQ ID NO: 217418 - DNA, 75 bp, synthetic construct
  source 1..75: mol_type = other DNA
ccgaaggcgatcaacatgccaatggcaataatgaaacaggcgagacagcaaatcccttaattacggtgaacggtc

SEQ ID NO: 217419 - DNA, 75 bp, synthetic construct
  source 1..75: mol_type = other DNA
aaaaaaatcagtgacgcgatgcgtaatattctggattggttcgaacggtatcccgatattgtgaaaaatataacc

SEQ ID NO: 217420 - DNA, 75 bp, synthetic construct
  source 1..75: mol_type = other DNA
aggagctggcttttcagcgggaggttgatgcggcatggcagcgtctttatcccggaaagctgccggtcagtatgg

SEQ ID NO: 217421 - DNA, 75 bp, synthetic construct
  source 1..75: mol_type = other DNA
ttacaacaaggaattaaggaaaataaaagaaaattactgtctcttgtttcctttgatgctgagagtggattttat

SEQ ID NO: 217422 - DNA, 75 bp, synthetic construct
  source 1..75: mol_type = other DNA
agggaatggaactgcttgccagagatattgaagccacgattagttctccggaatttaacacttcgctattgcttc

SEQ ID NO: 217423 - DNA, 75 bp, synthetic construct
  source 1..75: mol_type = other DNA
tacgttctcggccaggccgaacaggtaatgctccgcgccggtggttggcagaaagccagaatggaacagcagatg

SEQ ID NO: 217424 - DNA, 75 bp, synthetic construct
  source 1..75: mol_type = other DNA
cctctacaaccctgaccaccagcatttgcttgaagcggatctgtgctttctctgggcgtcgaacgctttcgagaa

SEQ ID NO: 217425 - DNA, 75 bp, synthetic construct
  source 1..75: mol_type = other DNA
acgtgctttatcgcatcggaaaaataatccgaaagcagattcagctgcgtatgaaaccagcgctgatatgatttt

SEQ ID NO: 217426 - DNA, 75 bp, synthetic construct
  source 1..75: mol_type = other DNA
aatttcttaaaaaaggtaagtgctatcaatagcgatgtgttaaatttttataatactgaaataaatattaaggaa

SEQ ID NO: 217427 - DNA, 75 bp, synthetic construct
  source 1..75: mol_type = other DNA
ggaaataaatgcttccattaaaaattacgatgacttattgcgagaaattaaagattcaaccataaggcgtgataa

SEQ ID NO: 217428 - DNA, 75 bp, synthetic construct
  source 1..75: mol_type = other DNA
atcagtagatgataaaaggactttatttgataacaaaagggacaattggaatactaaagaagtacaggatgaagt

SEQ ID NO: 217429 - DNA, 75 bp, synthetic construct
  source 1..75: mol_type = other DNA
tcaacggtgttttttttattattttagttatatttttggctgtaggagtattttcccgatatatctactttaggg

SEQ ID NO: 217430 - DNA, 75 bp, synthetic construct
  source 1..75: mol_type = other DNA
gaacttgaagccagatgcgcggcgctggcggcggagagtgcggtaatgctcgaaactattgaagccgttcgcagt

SEQ ID NO: 217431 - DNA, 75 bp, synthetic construct
  source 1..75: mol_type = other DNA
agctataagtaaagaccaaatacctaatttcttaaaaaaggtaagtgctatcaatagcgatgtaaaagattttta

SEQ ID NO: 217432 - DNA, 75 bp, synthetic construct
  source 1..75: mol_type = other DNA
taaagtagaagccaaatatttggctgcatcaaaagctaccggtgctgcttttactggtggtcttcctgcttcact

SEQ ID NO: 217433 - DNA, 75 bp, synthetic construct
  source 1..75: mol_type = other DNA
tagagtattgtcaggactttaccagtgatgaaggcaaagagggcgtcggaccagattcgttgccaggacgaggtc

SEQ ID NO: 217434 - DNA, 75 bp, synthetic construct
  source 1..75: mol_type = other DNA
ggcaacaatccgttggtcggtgtccgagccctttttctctatccattgaacgccttgattaattcacagcgcgag

SEQ ID NO: 217435 - DNA, 75 bp, synthetic construct
  source 1..75: mol_type = other DNA
atattttatcattccagatatggccatgtcggcaggcacaatatggtgtatgtctggagataaaatttacatgaa

SEQ ID NO: 217436 - DNA, 75 bp, synthetic construct
  source 1..75: mol_type = other DNA
cgctgttcaatgcggtctccctgatgtcccttaacccggaaccgaaaaagaaagaatatgcggtttttttcatat

SEQ ID NO: 217437 - DNA, 75 bp, synthetic construct
  source 1..75: mol_type = other DNA
agtcaggaaatgaaaaatcaataataggtatgtttaaaggttgttttatttctaaatgcgaaataaatcattata

SEQ ID NO: 217438 - DNA, 75 bp, synthetic construct
  source 1..75: mol_type = other DNA
ttcttataaatgctaatcccttttcagaggtgaaaaatgagaagcataagcataacggatattctgacaaggtta

SEQ ID NO: 217439 - DNA, 75 bp, synthetic construct
  source 1..75: mol_type = other DNA
tcgtccaggcgtaggggatgagttggtcacccgaattgtaccgcttgagaacgttcctgctcgtgacctggcccc

SEQ ID NO: 217440 - DNA, 75 bp, synthetic construct
  source 1..75: mol_type = other DNA
actttctttcgatgctttttatggctatattatttttccctgcattcaatgcatctttgttttttaccggcatta

SEQ ID NO: 217441 - DNA, 75 bp, synthetic construct
  source 1..75: mol_type = other DNA
ccttttgtcacaggatatgtcaatactaattatcacccctgcggtaataatacgggaattttcccaggagcaatc

SEQ ID NO: 217442 - DNA, 75 bp, synthetic construct
  source 1..75: mol_type = other DNA
tctgtgctttggtttcatgtcgttttcctttttaaatgttcatgtaattttacttacgataataaaatcattctt

SEQ ID NO: 217443 - DNA, 75 bp, synthetic construct
  source 1..75: mol_type = other DNA
gctaccgctcttagtgacaacggaaagtggcattctcacggaagaacgataggaataaacactcttatcaatgac

SEQ ID NO: 217444 - DNA, 75 bp, synthetic construct
  source 1..75: mol_type = other DNA
agtgggagcgtcgcggatttaacatcaaaatggaagacggcgatctggatgtactgcgcgaaggcacctgcgatt

SEQ ID NO: 217445 - DNA, 75 bp, synthetic construct
  source 1..75: mol_type = other DNA
gattggcgtgaccgtgtacaaagtgaaattactactggtttaaaacaagtaggctttcatgcaacaccaagcatt

SEQ ID NO: 217446 - DNA, 75 bp, synthetic construct
  source 1..75: mol_type = other DNA
tttttatgtccattatgtggattgttggcggcgtctatttctgggcctatcgtgaacgccactggccgtggggag

SEQ ID NO: 217447 - DNA, 75 bp, synthetic construct
  source 1..75: mol_type = other DNA
taaagcatctgactggggctggcagattgatccggtgggtctgcgttacgcactttgcgaactgtatgagcgtta

SEQ ID NO: 217448 - DNA, 75 bp, synthetic construct
  source 1..75: mol_type = other DNA
ttttacaattacgggaatttatagacgaaaactccggtgagttttttgttcaggtctggggaaatggagccaact

SEQ ID NO: 217449 - DNA, 75 bp, synthetic construct
  source 1..75: mol_type = other DNA
cgatgtgatgttcgctcaggagtcgatgcgcgaacgctacgtctttaccgatgtgcagctacgcggctattaccc

SEQ ID NO: 217450 - DNA, 75 bp, synthetic construct
  source 1..75: mol_type = other DNA
atatcgaggttggcggtaatcattacagcgttcccgaagcgctgtgtgggcagccggtatcgatacgaatatcgc

SEQ ID NO: 217451 - DNA, 75 bp, synthetic construct
  source 1..75: mol_type = other DNA
tgctgacaggcgagaacttcgccagttcaggcagacaccggaacagcgcttcacgcaggaacaggagcatctgca

SEQ ID NO: 217452 - DNA, 75 bp, synthetic construct
  source 1..75: mol_type = other DNA
agtgcctagcatgatgaggtacatgtcatatttattcacatttgtatttgtctactatttctctgccaaaaattg

SEQ ID NO: 217453 - DNA, 75 bp, synthetic construct
  source 1..75: mol_type = other DNA
acccaactggctggttgcggaaatgtggtgatggcctgggcgaccaataccgagtcgggttttgaatttcagacc

SEQ ID NO: 217454 - DNA, 75 bp, synthetic construct
  source 1..75: mol_type = other DNA
actttatcaagcgtggtgtactggaagtgcgtgccggtgtgtatgtcggagatacatccaaacgtattcgggaga

SEQ ID NO: 217455 - DNA, 75 bp, synthetic construct
  source 1..75: mol_type = other DNA
tggggagaaaacagacgtattccggtggatttggatgggttacgtttggtttcttttcttcctgttgataatcaa

SEQ ID NO: 217456 - DNA, 75 bp, synthetic construct
  source 1..75: mol_type = other DNA
agccagaatgggccagaatatatgacgggtgcagtattagctgactaccttgatgaatttgatgaggatgttatt

SEQ ID NO: 217457 - DNA, 75 bp, synthetic construct
  source 1..75: mol_type = other DNA
tcgattcagcctcgccaaggaagactaatgagccacatttcattattatacctgtagataatatcaggagattat

SEQ ID NO: 217458 - DNA, 75 bp, synthetic construct
  source 1..75: mol_type = other DNA
ctacaggaaaaaaaacagctacccggcgttatactgcagagatatagcctgagttcacttgcgtggtctccacaa

SEQ ID NO: 217459 - DNA, 75 bp, synthetic construct
  source 1..75: mol_type = other DNA
agaagactttcttagcaagtcagaaatgtcctttcctaaggactacaaacaagatgaaaaaccaaaaggattgac

SEQ ID NO: 217460 - DNA, 75 bp, synthetic construct
  source 1..75: mol_type = other DNA
acttgtttgaaaattcagcgcctgatttcagctgatttttttgcaacatctatggctcgccgtttctctgtaaat

SEQ ID NO: 217461 - DNA, 75 bp, synthetic construct
  source 1..75: mol_type = other DNA
atctagttgaacgttcgcctaacgataagcgaattcatgctttaattaatagtaatacgataaaaattccagagg

SEQ ID NO: 217462 - DNA, 75 bp, synthetic construct
  source 1..75: mol_type = other DNA
aggtcatcgtcttatttcatcgcggtcatgaacattctggtcgtctacaacatatcgttgatgaactggcgatgc

SEQ ID NO: 217463 - DNA, 75 bp, synthetic construct
  source 1..75: mol_type = other DNA
ttaaaaaggaagggaagaaaagatatgtttttctctttgatgtattaaaacaagatacctttggtatttatgttg

SEQ ID NO: 217464 - DNA, 75 bp, synthetic construct
  source 1..75: mol_type = other DNA
aataacatccgggctttatgaggtttatcgcacgttcagtgatataaacatggccggttatacatttagtgagta

SEQ ID NO: 217465 - DNA, 75 bp, synthetic construct
  source 1..75: mol_type = other DNA
tatcagcgggctggtgacggcggcgagggtggtcggccatgagggccgttcggtaacgtatgaattacgcattga

SEQ ID NO: 217466 - DNA, 75 bp, synthetic construct
  source 1..75: mol_type = other DNA
gtgggaacgttaaccgccacagctgctgaagagttaggattaacgactaatgttatcgtggccagtggcttgatt

SEQ ID NO: 217467 - DNA, 75 bp, synthetic construct
  source 1..75: mol_type = other DNA
ttaagcctgccggaaaagccagctcaggtttaccgctggataaccatccgcagtccaggaaaatccgtgcgctat

SEQ ID NO: 217468 - DNA, 75 bp, synthetic construct
  source 1..75: mol_type = other DNA
taaatcctggcgtctgagctactccaaacgttttgatgacgtgaatgcggatatcacctttgcgggctaccgctt

SEQ ID NO: 217469 - DNA, 75 bp, synthetic construct
  source 1..75: mol_type = other DNA
caccgatgcgttcggtaatgcgcttgccgggcagacggtcagcgtgttggcggacaacggcgcaacgactgcccc

SEQ ID NO: 217470 - DNA, 75 bp, synthetic construct
  source 1..75: mol_type = other DNA
agcggtatgatattttatccaggagatggtcatctctcgatagcgtcacgttcatccgcattgtgtttgcaagag

SEQ ID NO: 217471 - DNA, 75 bp, synthetic construct
  source 1..75: mol_type = other DNA
tggcgaacacgctgcgggtgagggtgacggatgcgttcggtaatgtgcttgccgggcagacggtcagcgtgacgg

SEQ ID NO: 217472 - DNA, 75 bp, synthetic construct
  source 1..75: mol_type = other DNA
ggcggcaagttggtctatgaacaatattatggcgatgaagtggcgctgtttggtaaagacgagcgacaaaatgat

SEQ ID NO: 217473 - DNA, 75 bp, synthetic construct
  source 1..75: mol_type = other DNA
gtacttataggggttcacgagaaattcaatcctgaaactggtatatcaacaccaggatcaggaaagtcttctggt

SEQ ID NO: 217474 - DNA, 75 bp, synthetic construct
  source 1..75: mol_type = other DNA
caataatggagaagtcacaataagtctgcccctaaatagtgaaatcactattaccgggaaaccaaaagacggtaa

SEQ ID NO: 217475 - DNA, 75 bp, synthetic construct
  source 1..75: mol_type = other DNA
gtcgcgggtaagccgataggcgtaaaagtgaccctgaaagatgagaatggcaacggggttaccggaagaaaagaa

SEQ ID NO: 217476 - DNA, 75 bp, synthetic construct
  source 1..75: mol_type = other DNA
agtgttttattatctgatgaatttggtaatcctgtgaatgacggtctggaattgctgacagaggatgccgtgtac

SEQ ID NO: 217477 - DNA, 75 bp, synthetic construct
  source 1..75: mol_type = other DNA
ccaaattcggttttatcggtaatctggcgccgcaggaaaccttcaatgcaaatctgaaagcatctattggtttgc

SEQ ID NO: 217478 - DNA, 75 bp, synthetic construct
  source 1..75: mol_type = other DNA
caggtgagggtgaccgatgcgttcgggaatgcgctgaatgggcagacggtcagcgtgttggcggataacggtgca

SEQ ID NO: 217479 - DNA, 75 bp, synthetic construct
  source 1..75: mol_type = other DNA
agcaatccgatgcgtatgtcatccgcgaaagcggagctgtgctggcttattcctctatcgttaccgacaaaacga

SEQ ID NO: 217480 - DNA, 75 bp, synthetic construct
  source 1..75: mol_type = other DNA
gcacagctacagatgtccggctgggcgagcgctctgacttcaaatgattacagtattagtggcgatgccgccagc

SEQ ID NO: 217481 - DNA, 75 bp, synthetic construct
  source 1..75: mol_type = other DNA
atatccaatgataacagccacttaccttatttggctcaggcatggatcgaaaatgaacaacaacaaaaaattact

SEQ ID NO: 217482 - DNA, 75 bp, synthetic construct
  source 1..75: mol_type = other DNA
aaacgaagataaaacttttttatcgacctgattctattaaagcggaacctaatgctgtatggcaggatcagttag

SEQ ID NO: 217483 - DNA, 75 bp, synthetic construct
  source 1..75: mol_type = other DNA
acgtcggctccgtggtgttgctggttatgctattgccgtggagcgcgtatcaggcggggcaaagtccgttcgtga

SEQ ID NO: 217484 - DNA, 75 bp, synthetic construct
  source 1..75: mol_type = other DNA
ggctcgtaaactaaaaaaacagtacccagatactgaatttcagttgttaggggcctgcgatgtcgataatccgag

SEQ ID NO: 217485 - DNA, 75 bp, synthetic construct
  source 1..75: mol_type = other DNA
ccggtaatgtgctggcggttgaaaatctgaatattgcctttatgcaggaccagcagaaaatagctgcggtccgca

SEQ ID NO: 217486 - DNA, 75 bp, synthetic construct
  source 1..75: mol_type = other DNA
catgagtatcctgaaaactggcttcagggctggggcgggacgctggttgtcgacggactgaaccgccccgggaat

SEQ ID NO: 217487 - DNA, 75 bp, synthetic construct
  source 1..75: mol_type = other DNA
ctctcgaagttgcagggcgaggctcgcgcacggttgcaggcgcaatacgctgccgaagatgctggatttgcgaag

SEQ ID NO: 217488 - DNA, 75 bp, synthetic construct
  source 1..75: mol_type = other DNA
caggccattcaacaggccaacagtcaggggcaatatgcctctggcattgtgaactctttatcttcaacggtcagc

SEQ ID NO: 217489 - DNA, 75 bp, synthetic construct
  source 1..75: mol_type = other DNA
cgcagaatatatgagatatcttagtaatgcattggtatctaagcgcgttgatgttcctatcttttcggataaatt

SEQ ID NO: 217490 - DNA, 75 bp, synthetic construct
  source 1..75: mol_type = other DNA
gagcttgccgctgactcaacaaataggctgagtcgcgagcaggcgatccttaatgcgcagcagtctctcggaaaa

SEQ ID NO: 217491 - DNA, 75 bp, synthetic construct
  source 1..75: mol_type = other DNA
aataagatacctaaagcgatcagcgatgcttcgagctcgctactttccttcggggacaaggcgctttcagcattt

SEQ ID NO: 217492 - DNA, 75 bp, synthetic construct
  source 1..75: mol_type = other DNA
gacatgaataatggtggaccagcaagccaggctattaccagcaatttgaacgttaagcgcacgccaagggggcag

SEQ ID NO: 217493 - DNA, 75 bp, synthetic construct
  source 1..75: mol_type = other DNA
ggatttgtttttaataaagaaacactgctgactaagtttataactcaattatatgctttttcttttcgttttgca

SEQ ID NO: 217494 - DNA, 75 bp, synthetic construct
  source 1..75: mol_type = other DNA
tggagtttgcgcgatgtagtagcccgctgccgtgactatgctgtcagcccataccttgtacatttttttcgtact

SEQ ID NO: 217495 - DNA, 75 bp, synthetic construct
  source 1..75: mol_type = other DNA
agaggttaggtgatatctcgcgtatgaaatttagcgatatttgggatgatcatctccatgtcatccaggaaaaaa

SEQ ID NO: 217496 - DNA, 75 bp, synthetic construct
  source 1..75: mol_type = other DNA
gtggagaaatacggcttgccaatcaatcatgaaaaacgtaatcgcctgataattatgccacgagacaaaggacgg

SEQ ID NO: 217497 - DNA, 75 bp, synthetic construct
  source 1..75: mol_type = other DNA
ggctatgatcgtgaagagtacaaaagactgatggaagttgatggtcaggttttaatcgcccgatttgcactggaa

SEQ ID NO: 217498 - DNA, 75 bp, synthetic construct
  source 1..75: mol_type = other DNA
actgtagaatagtcaataaaaagaatgaaagcatatcagatattgcatttgcacatataataaaaagggtaaaaa

SEQ ID NO: 217499 - DNA, 75 bp, synthetic construct
  source 1..75: mol_type = other DNA
cgccggtttatccgcaaacgcatctgagtttcctcgcgaacgtatacaaccagaaagcgcgtgaattttatcatc

SEQ ID NO: 217500 - DNA, 75 bp, synthetic construct
  source 1..75: mol_type = other DNA
agggaagctattaaccgcagggaaacaagctgacgacgcattcgatcgcattgaacgcggcgcaaagcgcgctga

SEQ ID NO: 217501 - DNA, 75 bp, synthetic construct
  source 1..75: mol_type = other DNA
aattatggatgcgtttagaattactaaataatagtgattcattagggttacgttttagtgattttgacaaactat

SEQ ID NO: 217502 - DNA, 75 bp, synthetic construct
  source 1..75: mol_type = other DNA
cttctgactaaattcataactcaattgtatgctttttcttttcgctttgcaaaagaggtttggtttctgaatgag

SEQ ID NO: 217503 - DNA, 75 bp, synthetic construct
  source 1..75: mol_type = other DNA
gctattcaacaaacagatgattaacgaggaaacgctaaacgcgcttaaacaacaacatgcagatgagctacttgc

SEQ ID NO: 217504 - DNA, 75 bp, synthetic construct
  source 1..75: mol_type = other DNA
attcttgagattagcaagcgaactggcatgaagattgaggatactacgaagctatgggaaagccttacttctgct

SEQ ID NO: 217505 - DNA, 75 bp, synthetic construct
  source 1..75: mol_type = other DNA
ggtggtagttcatccgaagaagccgcaaacgccttgcgacagttagggcaatctattaacggcggtattgtccgt

SEQ ID NO: 217506 - DNA, 75 bp, synthetic construct
  source 1..75: mol_type = other DNA
ctggggggttacagcgaagcagtttatcagtgatctgaatgcactgggcgatatcaccgtaagcgtcgtctcagc

SEQ ID NO: 217507 - DNA, 75 bp, synthetic construct
  source 1..75: mol_type = other DNA
aaatccaaccgttttttacccttctcttcgccgtgccgtacgggatttggttgttaacggtaatattagcgaaat

SEQ ID NO: 217508 - DNA, 75 bp, synthetic construct
  source 1..75: mol_type = other DNA
gaaaaacgaaaaaccacaccagaagcttttgctggtttttccgggcaaaccacaggttgaaatcagcattgacta

SEQ ID NO: 217509 - DNA, 75 bp, synthetic construct
  source 1..75: mol_type = other DNA
gagtcgaacgacctgcgggcagacagcgatgaaggctggcagatgacatacaacaaacgccagcgtctccagttg

SEQ ID NO: 217510 - DNA, 75 bp, synthetic construct
  source 1..75: mol_type = other DNA
cgcgaggaaataaacaaagccagccacccgtcacagcctgagctgaactggaaactggtggagtcgctggcgctg

SEQ ID NO: 217511 - DNA, 75 bp, synthetic construct
  source 1..75: mol_type = other DNA
cgttgtatggaggaaaaacaggcgggaaaagaggatttttttgatatcagcaacctgtcctccggcgccatagct

SEQ ID NO: 217512 - DNA, 75 bp, synthetic construct
  source 1..75: mol_type = other DNA
atagcgagcaacatgaactgacttgtgcgctttcatgtttgctaccaacggtagtctttggtgacccgatgcagt

SEQ ID NO: 217513 - DNA, 75 bp, synthetic construct
  source 1..75: mol_type = other DNA
gtgtcgttaaccaggcctatataatgaatcatcccttacagatcgtccctgtcaaaccacacccgggtgaactac

SEQ ID NO: 217514 - DNA, 75 bp, synthetic construct
  source 1..75: mol_type = other DNA
gggaagttgttaaggcagataattatgataatttcctgattaataattttgcagatattggtaaacaaaaattca

SEQ ID NO: 217515 - DNA, 75 bp, synthetic construct
  source 1..75: mol_type = other DNA
acctcgcatccctttacacaatcatctattatgtgaaggagcatggacagggtggtgaaacattgcctccactta

SEQ ID NO: 217516 - DNA, 75 bp, synthetic construct
  source 1..75: mol_type = other DNA
gactggcgtgccggaagaaggcgatattgcggtgaactggaacggagcacaacagtgcgtggtgcattaccggtt

SEQ ID NO: 217517 - DNA, 75 bp, synthetic construct
  source 1..75: mol_type = other DNA
aagcaaaatggcaacacggtttaccaaacctacgtggctccgggtgctttcgaaatcagcgatctttattccacg

SEQ ID NO: 217518 - DNA, 75 bp, synthetic construct
  source 1..75: mol_type = other DNA
ccttacagatcgtccctgtcaaaccacacccgggtgaactacccccttcactatcattttttgctatcgatacta

SEQ ID NO: 217519 - DNA, 75 bp, synthetic construct
  source 1..75: mol_type = other DNA
tctcggtcgcccggcctcgcgccgctggtggcgtcgggaaacgtttgctgaccgactggcgcgcatcgcccccga

SEQ ID NO: 217520 - DNA, 75 bp, synthetic construct
  source 1..75: mol_type = other DNA
tgaaaatatttattttaagtatattgctattaacactgagtgggtgtgctttaaagtcatcatctaattctgaaa

SEQ ID NO: 217521 - DNA, 75 bp, synthetic construct
  source 1..75: mol_type = other DNA
gtcccgcccccgttcgtgatgaaaagttattgaaatactctatttatttgatgcagttgtgtttgataactgata

SEQ ID NO: 217522 - DNA, 75 bp, synthetic construct
  source 1..75: mol_type = other DNA
gatcgtagaaattatctaatcggtgctgactggagccgctacgctactgatgatacgcggcctttatatcctact

SEQ ID NO: 217523 - DNA, 75 bp, synthetic construct
  source 1..75: mol_type = other DNA
ccggctggtgcactacacgcggacacaatatgcagagccgctggtcgaaagtcgctatctttacgacccgctggg

SEQ ID NO: 217524 - DNA, 75 bp, synthetic construct
  source 1..75: mol_type = other DNA
gggataagttatcccatgcaattaaaattgccctgtctggcgttgtgtgttcgctactcttcgttttacctgtcc

SEQ ID NO: 217525 - DNA, 75 bp, synthetic construct
  source 1..75: mol_type = other DNA
tgaaaatatttattttaagtatattgctattatcactgagtgggtgtgctttaaaagcatcatctaattctgaaa

SEQ ID NO: 217526 - DNA, 75 bp, synthetic construct
  source 1..75: mol_type = other DNA
cggaacggcaacccggcttcagacggcccgcaggattaacaatgtgctgtttgatggcagtagcgatatcactat

SEQ ID NO: 217527 - DNA, 75 bp, synthetic construct
  source 1..75: mol_type = other DNA
tttcgttttaataccgcgtggcagtggggagaacgtgaagaacaggcggtaaaacaattaggcaaacttattcaa

SEQ ID NO: 217528 - DNA, 75 bp, synthetic construct
  source 1..75: mol_type = other DNA
taacgctgattgaagatgacgtttacagcgaactttattttggacgggaaaaaccgctgcctgcgaaagcgtggg

SEQ ID NO: 217529 - DNA, 75 bp, synthetic construct
  source 1..75: mol_type = other DNA
tacgggatattcattcactggtaacagggatcacgggaaaagcggctattgtttcagcgtttccatgcgcaacta

SEQ ID NO: 217530 - DNA, 75 bp, synthetic construct
  source 1..75: mol_type = other DNA
gcgggatgaatatcgttataatgacatacctgttcgttatccacagcgagtagtgcaggcaccttgtttgcgtcc

SEQ ID NO: 217531 - DNA, 75 bp, synthetic construct
  source 1..75: mol_type = other DNA
cacaattttgtagctcaccagttgatgaacttaagaaagggctggatgcactccgggattatcctgtacacaaat

SEQ ID NO: 217532 - DNA, 75 bp, synthetic construct
  source 1..75: mol_type = other DNA
ggtgaccgagtaacaattaaatctggagtttatatatgggataataccattattgaagatgacgtttttattggg

SEQ ID NO: 217533 - DNA, 75 bp, synthetic construct
  source 1..75: mol_type = other DNA
caattatattgaccctatctatattcaagaaggtgcatcaattggtgcaaattcaaccattcttccgggagttac

SEQ ID NO: 217534 - DNA, 75 bp, synthetic construct
  source 1..75: mol_type = other DNA
acgttcagtcaacatctatcggagaaggtacaaatatttggcaatttgtagtcgtccttagaaaagcaataattg

SEQ ID NO: 217535 - DNA, 75 bp, synthetic construct
  source 1..75: mol_type = other DNA
cacacagcttctccaaagactttattgttgcggtagatatggatagtgacacatcaggtgatttaagcgggacac

SEQ ID NO: 217536 - DNA, 75 bp, synthetic construct
  source 1..75: mol_type = other DNA
attccggtagagaacggtggcatgatgacatcatgtacggctgagcaaaacagtgaagcctttgaacgcctgact

SEQ ID NO: 217537 - DNA, 75 bp, synthetic construct
  source 1..75: mol_type = other DNA
tatatatctgggatggggtttttattgaagatgatgtatttatagggccctgtgtaacatttaccaatgataaaa

SEQ ID NO: 217538 - DNA, 75 bp, synthetic construct
  source 1..75: mol_type = other DNA
ggattaaatcatctgtccttaaaaaaatcccaatatctctgccaccttataatgagcaagttgctataagttctg

SEQ ID NO: 217539 - DNA, 75 bp, synthetic construct
  source 1..75: mol_type = other DNA
gtcgatgatttgctgacagcagcttatggcagcgtatttgacactattacgacaagaactttcgagtctgtaaac

SEQ ID NO: 217540 - DNA, 75 bp, synthetic construct
  source 1..75: mol_type = other DNA
cgcagaaggataagttcggcgcgggtaagaacggttttacccgtggtaaccaccagactggcacgcctgccaccg

SEQ ID NO: 217541 - DNA, 75 bp, synthetic construct
  source 1..75: mol_type = other DNA
gcaggctccgtagttacgaaggatattccggataatgtaattgttgctggcaatccagctaaaattattcgtccc

SEQ ID NO: 217542 - DNA, 75 bp, synthetic construct
  source 1..75: mol_type = other DNA
cccggtccctgagaccgacaccggaaagctgatcatcgtcagtgaaaaccgtcgtctgttcacccgtaacaacct

SEQ ID NO: 217543 - DNA, 75 bp, synthetic construct
  source 1..75: mol_type = other DNA
taggttcaattgtaaatataacaaatgggtttgcatttaaatctgaaaattttctaacatctttaacatttaata

SEQ ID NO: 217544 - DNA, 75 bp, synthetic construct
  source 1..75: mol_type = other DNA
agacatcacgtacttacgtacagatgaaggctggctgtatctggcagtggtcattgacctgtggtcacgtgccgt

SEQ ID NO: 217545 - DNA, 75 bp, synthetic construct
  source 1..75: mol_type = other DNA
gaaggctaaagtaccggagtacaaaagcacgggataaccgggtaaacagaacacgtatttttcgtcactggataa

SEQ ID NO: 217546 - DNA, 75 bp, synthetic construct
  source 1..75: mol_type = other DNA
accttcggtggaaaccccatcggaaggttcaaaatttttggttttgatatggataacgaattcatcagtggtttt

SEQ ID NO: 217547 - DNA, 75 bp, synthetic construct
  source 1..75: mol_type = other DNA
aacgtatcgctgtgatgtggtccgagaaatctaatcagatgacggggctgttctcgaccattgatgagaaaacgt

SEQ ID NO: 217548 - DNA, 75 bp, synthetic construct
  source 1..75: mol_type = other DNA
gtacagggcgagtcgcaaatcctcatcaccactcacgacccgatgatgattggcagcctcaagcgcgagcaggtg

SEQ ID NO: 217549 - DNA, 75 bp, synthetic construct
  source 1..75: mol_type = other DNA
ccaactttcgtaatctacgtggtctcgatattgccttcgcgacgcatttgtcagccgctttaggcgcgccagctg

SEQ ID NO: 217550 - DNA, 75 bp, synthetic construct
  source 1..75: mol_type = other DNA
acgaactggcgcacagtaatgcgccaggttctcgtcatcctaaacgctggcaggacatcgaagagctgctggaag

SEQ ID NO: 217551 - DNA, 75 bp, synthetic construct
  source 1..75: mol_type = other DNA
acgatttcggtctgggtttcccctgaaactgatatttctgatgtgtctctcgaactgatcgccgctatcaaacag

SEQ ID NO: 217552 - DNA, 75 bp, synthetic construct
  source 1..75: mol_type = other DNA
ctcttaccatgtgatgaccccgagtggagcaatttcacactttattttgcacaaaactttgaacgacttggatta

SEQ ID NO: 217553 - DNA, 75 bp, synthetic construct
  source 1..75: mol_type = other DNA
gcctgcaccgtcaggggctgagggcaaaagcctcccggaagttcagcccggtcagttaccgtgtacacaacctgc

SEQ ID NO: 217554 - DNA, 75 bp, synthetic construct
  source 1..75: mol_type = other DNA
ttgtcgacaaccaggatatgtcgatttccatctggatactcggtgacccatcggtagctctaagtgaaatagacc

SEQ ID NO: 217555 - DNA, 75 bp, synthetic construct
  source 1..75: mol_type = other DNA
tcgctgccttcaattcttgatgccgcccttgccgggtccgggatccgcatggctattgtcgacaaccaggatatg

SEQ ID NO: 217556 - DNA, 75 bp, synthetic construct
  source 1..75: mol_type = other DNA
ttttgatattgataccgccattggcgtgcagcttgacgttgtaggcgaatgggttggtcgttcccgtcgcgtggc

SEQ ID NO: 217557 - DNA, 75 bp, synthetic construct
  source 1..75: mol_type = other DNA
ctgtaggttgtgtttatttgttatttcaggaatatgtcttttatttataacgtatttaattaataaaacattaag

SEQ ID NO: 217558 - DNA, 75 bp, synthetic construct
  source 1..75: mol_type = other DNA
cggatagtgatatcaataccattgttgctgatttagatcgctgggctatgggcgagcttggctccaagttaactt

SEQ ID NO: 217559 - DNA, 75 bp, synthetic construct
  source 1..75: mol_type = other DNA
cggatcaatacaggtggcttaactctaaataatcaagagatccgtaatgcgctcgctaagccaagagacagagaa

SEQ ID NO: 217560 - DNA, 75 bp, synthetic construct
  source 1..75: mol_type = other DNA
ttgtggaatcattatttaagtgaatgtcaggagttacttccttcatcttcgctctctccgcgcaaacttaggcga

SEQ ID NO: 217561 - DNA, 75 bp, synthetic construct
  source 1..75: mol_type = other DNA
aaaaagaaagttaaatttttcttttccttattatcgtattttcccaatagaaacaaatatgacaatataattaaa

SEQ ID NO: 217562 - DNA, 75 bp, synthetic construct
  source 1..75: mol_type = other DNA
aaataaagaacggcacatacggatgcaaaaattagccaacggtttaagaaggcattataaaaagaaagaactctt

SEQ ID NO: 217563 - DNA, 75 bp, synthetic construct
  source 1..75: mol_type = other DNA
gaatagttcaacggtcactgtgctatctaatcgtgaagtgaccatattacgttatctgggtgatgctgccaactt

SEQ ID NO: 217564 - DNA, 75 bp, synthetic construct
  source 1..75: mol_type = other DNA
atactgaagattcagcctggccaataatccagaactggttaaaagacgccacaaaccataccgaactcttaccgg

SEQ ID NO: 217565 - DNA, 75 bp, synthetic construct
  source 1..75: mol_type = other DNA
tgttgccagcgccctggcggtgaaagcggcacgtcgcatcaacccggagatgaaagtcggttgtatgctggcaat

SEQ ID NO: 217566 - DNA, 75 bp, synthetic construct
  source 1..75: mol_type = other DNA
agctgccctcaaacactgaaaccgcgcagatactccggccgtttgataaggaagttccaccttcagggagggttt

SEQ ID NO: 217567 - DNA, 75 bp, synthetic construct
  source 1..75: mol_type = other DNA
gcataaagtcaaatactggatgaccttcaacgaaataaacaaccagcgtaactggcgtgcgccgctgtttggtta

SEQ ID NO: 217568 - DNA, 75 bp, synthetic construct
  source 1..75: mol_type = other DNA
tgggtctgcgttacgcactttgcgaactgtatgagcgttatcagaagccgctgtttattgtcgaaaacggttttg

SEQ ID NO: 217569 - DNA, 75 bp, synthetic construct
  source 1..75: mol_type = other DNA
atttgctgattcagcgagcaggacgattacagcggcatatccgcgatattaatggtcagttaaccgcttaccctg

SEQ ID NO: 217570 - DNA, 75 bp, synthetic construct
  source 1..75: mol_type = other DNA
caagccgaagctcccgatgaagcactagcttttctttatgcatctataagtcctctgcctgaagagcataagctg

SEQ ID NO: 217571 - DNA, 75 bp, synthetic construct
  source 1..75: mol_type = other DNA
tgcaatatcctggttgggatggtgagtgtaaaacgagtttgggtttgggcttcgttcctgagggtgattctgttt

SEQ ID NO: 217572 - DNA, 75 bp, synthetic construct
  source 1..75: mol_type = other DNA
caagctatccgtgatgccttagaagctgaaggtttgcagtttatagctggtggggtagttgaaaggggtatgctg

SEQ ID NO: 217573 - DNA, 75 bp, synthetic construct
  source 1..75: mol_type = other DNA
acgttgctgagtcacagaatgatatcctttgacaaagagaataatataatcacatcagaaacagccgcaatggca

SEQ ID NO: 217574 - DNA, 75 bp, synthetic construct
  source 1..75: mol_type = other DNA
ggttaattcacgacaatcctgaaaaagccagaatgtatcttaatcagattgataataatgattgtgataccgggt

SEQ ID NO: 217575 - DNA, 75 bp, synthetic construct
  source 1..75: mol_type = other DNA
attagctggtttaggcacgccattaatcattgttctcactatttcagaaccggggattgcacaatctcttgttaa

SEQ ID NO: 217576 - DNA, 75 bp, synthetic construct
  source 1..75: mol_type = other DNA
ttgaaacggagacactggcacgctttggtaaatattgtagtttacagagagcgtcgcaagtcattgtttgtacac

SEQ ID NO: 217577 - DNA, 75 bp, synthetic construct
  source 1..75: mol_type = other DNA
acagcggcaagatccagagatggcaaacgtgattttagtcaccaatgacgcaagttgtgggtattcggctacgga

SEQ ID NO: 217578 - DNA, 75 bp, synthetic construct
  source 1..75: mol_type = other DNA
gatgagttttctttactggagggagaggcgttcaggctgtggtgcattgaacagcgacaagatccggagatggca

SEQ ID NO: 217579 - DNA, 75 bp, synthetic construct
  source 1..75: mol_type = other DNA
ttctggtccaaaggcgtgctggttttccagggcgagcagtcactgggtaaaacagcatggtttaaagcgcttctg

SEQ ID NO: 217580 - DNA, 75 bp, synthetic construct
  source 1..75: mol_type = other DNA
gagcaggacgattacagcggcatatccgcgatattaatggtcagttaaagcgtgacggaaaggacgagcgttccc

SEQ ID NO: 217581 - DNA, 75 bp, synthetic construct
  source 1..75: mol_type = other DNA
gcttaaagtctccccaaccggcaaacagaacagctttgccagccgtgcctacgcctcctgggcgatggcagaaaa

SEQ ID NO: 217582 - DNA, 75 bp, synthetic construct
  source 1..75: mol_type = other DNA
ggagcgatggtatctgtaattgatcaggataacgcaggcataattggtgatgaaggtcaggtatatttaagtggt

SEQ ID NO: 217583 - DNA, 75 bp, synthetic construct
  source 1..75: mol_type = other DNA
gaaatgaaatagactttgacagaagtgatgttaagttcaacttttccttttatgggatgaatttgaccctttatg

SEQ ID NO: 217584 - DNA, 75 bp, synthetic construct
  source 1..75: mol_type = other DNA
aaaaagtatgcgtcactcctatgattggaaaaagaaaaatgacacaagcatacgcattagacaaagtttttctga

SEQ ID NO: 217585 - DNA, 75 bp, synthetic construct
  source 1..75: mol_type = other DNA
aaattagtaataattatcgtgccagcgcttttggacttggttttaatctttataattttggtgccctttcactag

SEQ ID NO: 217586 - DNA, 75 bp, synthetic construct
  source 1..75: mol_type = other DNA
aagccaaggtataaatagtaagaatagtaacaagaatcgaatggctcttaatacatcattaagaaatagttttgg

SEQ ID NO: 217587 - DNA, 75 bp, synthetic construct
  source 1..75: mol_type = other DNA
tttattttattttgattgccggtgtttcttatcataaaggattacttgcaagaagtgttgaatatttgttcgatt

SEQ ID NO: 217588 - DNA, 75 bp, synthetic construct
  source 1..75: mol_type = other DNA
ctggtggcggcggtgctggtgcatcgtatgattcagtggccagggcgtcagggaagggcgctaacggctatgtca

SEQ ID NO: 217589 - DNA, 75 bp, synthetic construct
  source 1..75: mol_type = other DNA
cggtttttactctgacgataaaggaaataaagtaacaaaagaaaatgatgtttatgatagtctaaatttttcaag

SEQ ID NO: 217590 - DNA, 75 bp, synthetic construct
  source 1..75: mol_type = other DNA
aacgctgtcggtggcgattggcgataaagttaaaaaagaccagcttttaggggttattgatcctgaacaggctga

SEQ ID NO: 217591 - DNA, 75 bp, synthetic construct
  source 1..75: mol_type = other DNA
ttgaataaacctggtgttattactgacagtaacggatttgctattgtcaccggattaggctcatatagaaaaaat

SEQ ID NO: 217592 - DNA, 75 bp, synthetic construct
  source 1..75: mol_type = other DNA
tgaaaaggatgaattattattattcggtattaatccagaaaaaatcactcttgttttttataaaaacgagaaata

SEQ ID NO: 217593 - DNA, 75 bp, synthetic construct
  source 1..75: mol_type = other DNA
agttagagagcaatctggctgagctgcgtggcggcagcgattacgcgcaacgtaaaatcaagatagccgctgctc

SEQ ID NO: 217594 - DNA, 75 bp, synthetic construct
  source 1..75: mol_type = other DNA
catggcgaccacagccgttgctgaaaccgctggtcgacggcccgcagagcgccgtcgtgacgggaccggcaggcg

SEQ ID NO: 217595 - DNA, 75 bp, synthetic construct
  source 1..75: mol_type = other DNA
gaagctcagccaaacgaagaagggctgaagttctacgactctctgttcgatgaactgctgaaatacaacatcgaa

SEQ ID NO: 217596 - DNA, 75 bp, synthetic construct
  source 1..75: mol_type = other DNA
atcttccgacgaagcaaaaggcgcaactttcacagatggcagacagtgagcgcgcgcagctgcttgccgagcgct

SEQ ID NO: 217597 - DNA, 75 bp, synthetic construct
  source 1..75: mol_type = other DNA
accttatcacccgcgaaaaaagtaatcttaatcgcatcgtcgctacgctggggctaaaagaaatgacgcagggaa

SEQ ID NO: 217598 - DNA, 75 bp, synthetic construct
  source 1..75: mol_type = other DNA
acatggcgtgccgcgcgaaatcactaaagaagtcttgcccggcaaatactatcctaaccatgaagccgttgattt

SEQ ID NO: 217599 - DNA, 75 bp, synthetic construct
  source 1..75: mol_type = other DNA
aaatatccaaagtgattgggttgaagttgggccttttggtaatggcgaaaaattaaaggttaaaatagagtcttt

SEQ ID NO: 217600 - DNA, 75 bp, synthetic construct
  source 1..75: mol_type = other DNA
ggaatacctgtccgcaaatctgggattaccacatgatattgacactctggcccatttagcctccatgagccgaag

SEQ ID NO: 217601 - DNA, 75 bp, synthetic construct
  source 1..75: mol_type = other DNA
cgccagtaagtcgtgtagcaggaggttctggccaacaactaaaaataaaaaaatgccaaacaatttacctcacaa

SEQ ID NO: 217602 - DNA, 75 bp, synthetic construct
  source 1..75: mol_type = other DNA
accattggcaacaatcagatgattgcggttaccaacaatcagatacagacggtgggtgtcaaccagatagagacg

SEQ ID NO: 217603 - DNA, 75 bp, synthetic construct
  source 1..75: mol_type = other DNA
gaccgctataacccgtcaaaccaggacagttcatgctggatccgtgtggcacaggcgtgggcaggcaccggcttt

SEQ ID NO: 217604 - DNA, 75 bp, synthetic construct
  source 1..75: mol_type = other DNA
ctgattggcacaaacgactacgaaggccatcatgtatttgacatctggtaccgcaatacctcagcagtgaaaccc

SEQ ID NO: 217605 - DNA, 75 bp, synthetic construct
  source 1..75: mol_type = other DNA
aaagtgtttaaccgtgagctgaaacaggggaaactgaaacatctggaatacgataaagaaacgcagaagctgacc

SEQ ID NO: 217606 - DNA, 75 bp, synthetic construct
  source 1..75: mol_type = other DNA
atgtttatacgtgcgaaattgtcggttacgccatgggagagcgcatgacgaaagagttgacgggtaaagccctgt

SEQ ID NO: 217607 - DNA, 75 bp, synthetic construct
  source 1..75: mol_type = other DNA
ctctccagtgtgattacgcgtaactctccgctgtggatttcgaatccgaagcagcagatcgcgtatctggccctc

SEQ ID NO: 217608 - DNA, 75 bp, synthetic construct
  source 1..75: mol_type = other DNA
atgtatctgcataacaaaaacaatatgcgccatttttgcattactaataagaaaaagcaaaaaacatcgatattc

SEQ ID NO: 217609 - DNA, 75 bp, synthetic construct
  source 1..75: mol_type = other DNA
atgcttaattttttgtttggtttatgtttggtaattgcattgtgtattaatgccatagccggaacaaccactctc

SEQ ID NO: 217610 - DNA, 75 bp, synthetic construct
  source 1..75: mol_type = other DNA
ggaagctggcctaatgctgctgtggagatcgacaaagatggggcgacagtgggcctgacagacgtggatgttaca

SEQ ID NO: 217611 - DNA, 75 bp, synthetic construct
  source 1..75: mol_type = other DNA
attgttgcaaatatgaatacccaggatgccacacgcttaccagatcaaaatacccaactatcaattagctgtcca

SEQ ID NO: 217612 - DNA, 75 bp, synthetic construct
  source 1..75: mol_type = other DNA
tgataacgcttttctgttccaccaatgtcagtgccgcagacatcaccatccatgttagcgcgttggtggaaccgc

SEQ ID NO: 217613 - DNA, 75 bp, synthetic construct
  source 1..75: mol_type = other DNA
atttgagtaacttattagataaaaacgaacaggtattatatctttttaggagtaaaattgtgttgattttactac

SEQ ID NO: 217614 - DNA, 75 bp, synthetic construct
  source 1..75: mol_type = other DNA
aggaagattaaaggcgcttgaagaactgaacaagcctttgatgcgggaaggctatgaggcattctatggtgacga

SEQ ID NO: 217615 - DNA, 75 bp, synthetic construct
  source 1..75: mol_type = other DNA
tatttttgagaaagactatgaagctttatttattaaaaactttaaaatagaaaaatctcccgagataataattga

SEQ ID NO: 217616 - DNA, 75 bp, synthetic construct
  source 1..75: mol_type = other DNA
aaaaattcaataaatatccagaaaaactaaagagcaaattaaataaattaaatgatatttttctgcgacctaagg

SEQ ID NO: 217617 - DNA, 75 bp, synthetic construct
  source 1..75: mol_type = other DNA
aatgcattaagctatttagagaatgtcagtgaattttttgacgtatttgtgttttcagacgatcctgagtgggca

SEQ ID NO: 217618 - DNA, 75 bp, synthetic construct
  source 1..75: mol_type = other DNA
cagtgtttatcttgaagacacccccagggctgtggggatcattgcattaatggcgccagatacggcagataaata

SEQ ID NO: 217619 - DNA, 75 bp, synthetic construct
  source 1..75: mol_type = other DNA
aggttctggcccatccccaggacgtaagctggttaccctgggccgtacaatatttctttttcatcggcattgccg

SEQ ID NO: 217620 - DNA, 75 bp, synthetic construct
  source 1..75: mol_type = other DNA
taacgtcagtcggtcgcgatattctggctaaaacaagcacactggctgttatccaataccttggtttaagagaac

SEQ ID NO: 217621 - DNA, 75 bp, synthetic construct
  source 1..75: mol_type = other DNA
gaagaaaggtgcagaaagtgactggttgtttctgtcaaggcacggctctcagttaacacgccagagaatatacca

SEQ ID NO: 217622 - DNA, 75 bp, synthetic construct
  source 1..75: mol_type = other DNA
ctgctgcatgagctggtacacagtaccggtcatgaaaagcgcctgcggcgggtggggataagtacctttaccggt

SEQ ID NO: 217623 - DNA, 75 bp, synthetic construct
  source 1..75: mol_type = other DNA
ccctgaccgggaagccttatacaggggtgaacgtcctgttgctgtggctggccgcggatgaagccgggtatgtca

SEQ ID NO: 217624 - DNA, 75 bp, synthetic construct
  source 1..75: mol_type = other DNA
agatataaacaggtatttgaaaaggcaattgaaaatccagcatcatggaaaaaagaaatgacgaataaatgtact

SEQ ID NO: 217625 - DNA, 75 bp, synthetic construct
  source 1..75: mol_type = other DNA
gattgctgccgctggaggtgcttttagtggaggagttactggagcaactacagttacaaaatttatgctactaga

SEQ ID NO: 217626 - DNA, 75 bp, synthetic construct
  source 1..75: mol_type = other DNA
tgggcgctttatggcaggtcatgccacgtggcaaagcgtggtcacgcgatgaggatggtgatttaaacctttttt

SEQ ID NO: 217627 - DNA, 75 bp, synthetic construct
  source 1..75: mol_type = other DNA
actctgaagacgtccctgatggttgacggaaagagagtggcactcagtgccaggcagcagggtgaggatgtggtg

SEQ ID NO: 217628 - DNA, 75 bp, synthetic construct
  source 1..75: mol_type = other DNA
ccattttattaccgccaatctgctcccggtgatgctgggtaatattatcggcggtgcagtgctggtgagtatgtg

SEQ ID NO: 217629 - DNA, 75 bp, synthetic construct
  source 1..75: mol_type = other DNA
tttttagctctgcattcattgataagttgaatgcaatgacaaattcagatgatggagatgagactgctgatgcag

SEQ ID NO: 217630 - DNA, 75 bp, synthetic construct
  source 1..75: mol_type = other DNA
ctgctgcatgaactggtacacagtaccggtcatgaaaagcgtctgcggcgggccgggataagttcttttgccggt

SEQ ID NO: 217631 - DNA, 75 bp, synthetic construct
  source 1..75: mol_type = other DNA
tgaatggcagtggcgtcagtgtttcgtcgcttccacaggacagggcattctaccggcctgacactgaccgtatcg

SEQ ID NO: 217632 - DNA, 75 bp, synthetic construct
  source 1..75: mol_type = other DNA
agagatgctatctgttcaggagttaaagatagcctttttttatttttgttgcgcaaaaaatgaaactgcaccata

SEQ ID NO: 217633 - DNA, 75 bp, synthetic construct
  source 1..75: mol_type = other DNA
gacaaggaccgcaccgaaaaaggctgcgaatacgccgtgctggtatccctgctggagcccgacagtgagctttac

SEQ ID NO: 217634 - DNA, 75 bp, synthetic construct
  source 1..75: mol_type = other DNA
ggctgaaggggggatggaacctgtatacatatccgctgagcccggtgaatggcatggatccattaggattatatg

SEQ ID NO: 217635 - DNA, 75 bp, synthetic construct
  source 1..75: mol_type = other DNA
cttgagcttataaaaaatgccatacgaggaaccggtgaacttgatagaataattatcaataattcctcagttact

SEQ ID NO: 217636 - DNA, 75 bp, synthetic construct
  source 1..75: mol_type = other DNA
cgcacagggctgcgccagaacttccgtatcttccagaatgaggacatcgaaagcatcctcggcacgatttgcagg

SEQ ID NO: 217637 - DNA, 75 bp, synthetic construct
  source 1..75: mol_type = other DNA
tgcaaagaaagatattatccataaaaaaaatataggggtttttgctggtgatgtcgcttatcaaatgtggcggga

SEQ ID NO: 217638 - DNA, 75 bp, synthetic construct
  source 1..75: mol_type = other DNA
tcggccacagttcttcatccccataatcacgttgctacgcaatgcggcgatgaagtcacttcaatacaagtccga

SEQ ID NO: 217639 - DNA, 75 bp, synthetic construct
  source 1..75: mol_type = other DNA
accctgcgcaacggaagatgccaccggcagccggaaaaccatgacgtggagccgttacggtcagttgctgacctt

SEQ ID NO: 217640 - DNA, 75 bp, synthetic construct
  source 1..75: mol_type = other DNA
atgatgtaccagaggacctgtcgtttttcttcgcctcagagcctgtctgaacgcttttaccacattttccgtctg

SEQ ID NO: 217641 - DNA, 75 bp, synthetic construct
  source 1..75: mol_type = other DNA
gcaccgattcggggctgacgacatctgacacgggcaacaaaatcaagaacctgagcatgatgttcctgccgtttt

SEQ ID NO: 217642 - DNA, 75 bp, synthetic construct
  source 1..75: mol_type = other DNA
gcagtgtcagttgccgggtggcagaagatgggggttcgcgcccatttactcccaaagtctcaccttgcttatgta

SEQ ID NO: 217643 - DNA, 75 bp, synthetic construct
  source 1..75: mol_type = other DNA
acgccaagtgccagacatctttcggcctgaacggtgcattccgccatcaggcaaccaacacccaatcagtcagcg

SEQ ID NO: 217644 - DNA, 75 bp, synthetic construct
  source 1..75: mol_type = other DNA
gaaaaaagagcaggccgccaataacgaagagatgccagcgtgggcgcagaaactcgccgatcgcgtggacgtcgt

SEQ ID NO: 217645 - DNA, 75 bp, synthetic construct
  source 1..75: mol_type = other DNA
gtacctgacaatggtattaaaacgtcttatagctcgtggttacgtaatggaatgacaacagttttgctacatatg

SEQ ID NO: 217646 - DNA, 75 bp, synthetic construct
  source 1..75: mol_type = other DNA
agccttttcatttggtggagatctccaaacccttgcatcaaaaccgggttccacaatctcaagtatcccatcaga

SEQ ID NO: 217647 - DNA, 75 bp, synthetic construct
  source 1..75: mol_type = other DNA
tgaaacggtactataagttttattcaaatgaagaagtcgatgcgattcgtaataacggacatgcgaacgggaagt

SEQ ID NO: 217648 - DNA, 75 bp, synthetic construct
  source 1..75: mol_type = other DNA
acatcagcgctatctctgctctcattgccgtaaaacatggcaactacagttcacttacaccgcctctcagcccgg

SEQ ID NO: 217649 - DNA, 75 bp, synthetic construct
  source 1..75: mol_type = other DNA
cggtggacagactcttagagccattcataaattcaataaagataataaagataatatcagtaattatttgtgcca

SEQ ID NO: 217650 - DNA, 75 bp, synthetic construct
  source 1..75: mol_type = other DNA
aatcgtgaactgcgccgcagtaacgatatccttcgccaggcttccgcttattttgcgaaggcggagttcgaccgc

SEQ ID NO: 217651 - DNA, 75 bp, synthetic construct
  source 1..75: mol_type = other DNA
cagcaggcctttagtttactgggatggccaagtattaaaatcaacgactgaaattaaaaattatgatgggtccac

SEQ ID NO: 217652 - DNA, 75 bp, synthetic construct
  source 1..75: mol_type = other DNA
aagcatcctcggcacgattttgcaggaaaacggggtgaccgactggagcccgctgttcagcgagccccatccttc

SEQ ID NO: 217653 - DNA, 75 bp, synthetic construct
  source 1..75: mol_type = other DNA
aagcatcctcggcacgattttgcaggaaaacggggtgaccgactggagaccgctgttcagcgagccacatccttc

SEQ ID NO: 217654 - DNA, 75 bp, synthetic construct
  source 1..75: mol_type = other DNA
aagcatcctcggcacgattttgcaggaaaacggggtgaccgaatggagaccgctgttcagcgagccccatccttc

SEQ ID NO: 217655 - DNA, 75 bp, synthetic construct
  source 1..75: mol_type = other DNA
ccgcaccgctgccagggtcaatgcgcctggtgttgattgtactgattgtgatgtcgctgatttccagcgtaatcg

SEQ ID NO: 217656 - DNA, 75 bp, synthetic construct
  source 1..75: mol_type = other DNA
aagcatcctcggcacgattttgcaggaaaacggggtgaccgagtggaggccgctgttcagcgagccccatccttc

SEQ ID NO: 217657 - DNA, 75 bp, synthetic construct
  source 1..75: mol_type = other DNA
aagcatcctcggcacgattttgcaggaaaacggggtgaccgactggaggccgctgttcagcgagccgcatccttc

SEQ ID NO: 217658 - DNA, 75 bp, synthetic construct
  source 1..75: mol_type = other DNA
ccggatttaatacgctggtaacgggttcaatcctgacggaagaagttgctatcagggaaatgataaaccggggcg

SEQ ID NO: 217659 - DNA, 75 bp, synthetic construct
  source 1..75: mol_type = other DNA
tgggcctctctgttgggtgactcgctaatcgtggctatcacggattgtgctgatgaccagatagccttgccgctc

SEQ ID NO: 217660 - DNA, 75 bp, synthetic construct
  source 1..75: mol_type = other DNA
gctcgcgatgtataaaaaatcgtgggtggtgaaaaagtacatcaacaaaaccgccgacgacatgctgaagttgcc

SEQ ID NO: 217661 - DNA, 75 bp, synthetic construct
  source 1..75: mol_type = other DNA
tccagctcgggttgccaatatttacttgtggaagtgataaagacaaaaatggccgcaggctgttacccctgcggc

SEQ ID NO: 217662 - DNA, 75 bp, synthetic construct
  source 1..75: mol_type = other DNA
tagctcctttttatttcttaacctaccttaggttttacgacttcccaaagaggacattttatttatcatcatcat

SEQ ID NO: 217663 - DNA, 75 bp, synthetic construct
  source 1..75: mol_type = other DNA
atcagggaaatgataaaccggggcgtactgaagacggtcaccgaagcagaaattaaggcgattgtcgcagggggt

SEQ ID NO: 217664 - DNA, 75 bp, synthetic construct
  source 1..75: mol_type = other DNA
atgcgtagaccgctaacctatagaaaagatgctttcattgatggagcacataagacattgaaattgctatgtcaa

SEQ ID NO: 217665 - DNA, 75 bp, synthetic construct
  source 1..75: mol_type = other DNA
gcgattacaatagtaacggcgcgggtgctcatgtcgagagcgggttccgttgggttgacggattgtggagtgtta

SEQ ID NO: 217666 - DNA, 75 bp, synthetic construct
  source 1..75: mol_type = other DNA
ttgatgcagaactggacaccgtgcgtgagcgtcttggtagcgtaaaaggcgttaattacgatacggcgatgtgga

SEQ ID NO: 217667 - DNA, 75 bp, synthetic construct
  source 1..75: mol_type = other DNA
cttcctcaaccaatccgacgctaccctataccgtcaacactattgatgagcatctggacatgctgatggtttgcc

SEQ ID NO: 217668 - DNA, 75 bp, synthetic construct
  source 1..75: mol_type = other DNA
atcgccgaggacgtagcctttgccgaatcgcgcattcgccaggaaaccattgccgcggaagacgtcctgcacgac

SEQ ID NO: 217669 - DNA, 75 bp, synthetic construct
  source 1..75: mol_type = other DNA
tcgcggccggggttatcggcctcaaaattcacgaagactggggagctacacctgcggtaatcaactgcgcactga

SEQ ID NO: 217670 - DNA, 75 bp, synthetic construct
  source 1..75: mol_type = other DNA
gattaaagatctgccgcagccgctgcgatctcagggtcagatgttgatcgcccgcgaccaggggttattgtggga

SEQ ID NO: 217671 - DNA, 75 bp, synthetic construct
  source 1..75: mol_type = other DNA
gcgtacaccacccagacttgctcgtgctgcggagctattagctgcagtagtccgaagggtagggtaggccttgga

SEQ ID NO: 217672 - DNA, 75 bp, synthetic construct
  source 1..75: mol_type = other DNA
atgccttgctaaaagtaattatttcttattacgagtgtgcgttaattaaagcgagaatggagaatggtgctcaag

SEQ ID NO: 217673 - DNA, 75 bp, synthetic construct
  source 1..75: mol_type = other DNA
tatagctacatcatcattattgttattgattggtttttttcggtataataagaataaaattatttgctgggaaca

SEQ ID NO: 217674 - DNA, 75 bp, synthetic construct
  source 1..75: mol_type = other DNA
attgccaatatcaattcatctgatatacctaattgtgatgtcgtggttggggggtttccatgccagggattctca

SEQ ID NO: 217675 - DNA, 75 bp, synthetic construct
  source 1..75: mol_type = other DNA
ctggatgtgccaaacgtgaaactgtacgacggcgcatggagtgaatggggcgcgcgggcagatttaccggttgag

SEQ ID NO: 217676 - DNA, 75 bp, synthetic construct
  source 1..75: mol_type = other DNA
aattattgatgcccgcccggctgcacgttttaacgcagaagttgatgaacctcgcccaggtttacgtcgcggaca

SEQ ID NO: 217677 - DNA, 75 bp, synthetic construct
  source 1..75: mol_type = other DNA
agattctgcgtaaacgtttgtttttgtctctgccagacaaaaatgaggtctctgaaattgcgtcgatctatgcat

SEQ ID NO: 217678 - DNA, 75 bp, synthetic construct
  source 1..75: mol_type = other DNA
tgcccttcgaaatagccacttaggatcaatgccataccaatcagattttggctcagccaaaatagcagcattcaa

SEQ ID NO: 217679 - DNA, 75 bp, synthetic construct
  source 1..75: mol_type = other DNA
tatgctgttattgcttgatcaaatgcaggggcaacacgttggcagtggctctcgtttaatggactgcgaacttat

SEQ ID NO: 217680 - DNA, 75 bp, synthetic construct
  source 1..75: mol_type = other DNA
caaaaaagcctacacacagactgggcatgatcttgagcaatttgttaagcagcttggcattgaaatcggtaatgg

SEQ ID NO: 217681 - DNA, 75 bp, synthetic construct
  source 1..75: mol_type = other DNA
ctgaatgtgatggcttagaagagaagcgaaatttcacctttgcggcagcaggttctaaagaaataccgatcataa

SEQ ID NO: 217682 - DNA, 75 bp, synthetic construct
  source 1..75: mol_type = other DNA
aatttcgacgcactgagagcccgagcagagtcattgctgttcggtactttggatgaggcaagaaagacagatttg

SEQ ID NO: 217683 - DNA, 75 bp, synthetic construct
  source 1..75: mol_type = other DNA
ctggtgtatggaatgccgtggtgttctggtcggcactgttttatcacctgccacttcttgcacacttggagggag

SEQ ID NO: 217684 - DNA, 75 bp, synthetic construct
  source 1..75: mol_type = other DNA
aacgtctgcaggacacagaggcacagcaactggcagcggtgatggccgggcagttgttacctgagggagcgacag

SEQ ID NO: 217685 - DNA, 75 bp, synthetic construct
  source 1..75: mol_type = other DNA
ctggtcggcactgttttatcacctgccacttcttgcacaccttgagggtgaactggtcagtggaaagttatggca

SEQ ID NO: 217686 - DNA, 75 bp, synthetic construct
  source 1..75: mol_type = other DNA
acagacaacggcgagcgggagaaagcgcagcgccgcagcctggcggagaagctgcagcaggaagggagcgaggac

SEQ ID NO: 217687 - DNA, 75 bp, synthetic construct
  source 1..75: mol_type = other DNA
gcgatatcacggacatcaccacaccggacgggcgggagacgaaattttactataacgacgggaaccagctgacgg

SEQ ID NO: 217688 - DNA, 75 bp, synthetic construct
  source 1..75: mol_type = other DNA
attacagaatctggcgggtgcagtctggcatcagcatccggagatggcattgattcgttcagtcctgaaaacggc

SEQ ID NO: 217689 - DNA, 75 bp, synthetic construct
  source 1..75: mol_type = other DNA
gagacggaccttgcgctgccctgcccgctgccgtttattcttttccgcgcctacagcagctaccggaccagaaca

SEQ ID NO: 217690 - DNA, 75 bp, synthetic construct
  source 1..75: mol_type = other DNA
tccatgaaagacggcgtactggaagtgcggcttgtcaaggccgagcaagccaaaccgaaacagattgaaatctca

SEQ ID NO: 217691 - DNA, 75 bp, synthetic construct
  source 1..75: mol_type = other DNA
tatatttgagctcagcattgataaattatgttgaaatggcacatggtgatttcactcctatgtccatcagaccat

SEQ ID NO: 217692 - DNA, 75 bp, synthetic construct
  source 1..75: mol_type = other DNA
gcatttcgttttcgctacagacagcaacgtctgcagggcacagaggctcagcaactggcagcggtgatggccggg

SEQ ID NO: 217693 - DNA, 75 bp, synthetic construct
  source 1..75: mol_type = other DNA
atcagtatccgttgaatccggttcagtatatagattcaatgggactggcatcaaaatatggacacttaaataatg

SEQ ID NO: 217694 - DNA, 75 bp, synthetic construct
  source 1..75: mol_type = other DNA
ctgccgggtcagcagtatgatgaggagtccggcctgtattacaatcgccaccgctattatgacccgctgcagggg

SEQ ID NO: 217695 - DNA, 75 bp, synthetic construct
  source 1..75: mol_type = other DNA
gagtacgatgctgccggacgtgtcatcagtctgactaacgagaacggcagccacagcgtcttcagctacgatgcg

SEQ ID NO: 217696 - DNA, 75 bp, synthetic construct
  source 1..75: mol_type = other DNA
gtggcggtaaatatttctgcacgtcagctcgccgatcaaaccattttcaccgccctgaaacaggttctccaggaa

SEQ ID NO: 217697 - DNA, 75 bp, synthetic construct
  source 1..75: mol_type = other DNA
atgatcgtagaaacccacagcgccgcgtcagtctgcgcaatggtacgggcgggggtaggtatttcggtggttaac

SEQ ID NO: 217698 - DNA, 75 bp, synthetic construct
  source 1..75: mol_type = other DNA
tcgccatcttctgtggcaaaaaatcaacagcgacaagcatctgtgaaaaagcggtagaattcattgatcgtggta

SEQ ID NO: 217699 - DNA, 75 bp, synthetic construct
  source 1..75: mol_type = other DNA
cggctcagaaagaggtcaccattgagtctactgcatcagttgctgtgactgtcaccgtggcgctggccgacgacc

SEQ ID NO: 217700 - DNA, 75 bp, synthetic construct
  source 1..75: mol_type = other DNA
atggcaagctgccagcgttctacagcgagcgtgaagggatgaaaggctggaacctgttccagttgatgcatcgta

SEQ ID NO: 217701 - DNA, 75 bp, synthetic construct
  source 1..75: mol_type = other DNA
tggttgcctgataaatcacattataagcgacaacgaagagtatccggtcactttacaatcagaactcgataacgc

SEQ ID NO: 217702 - DNA, 75 bp, synthetic construct
  source 1..75: mol_type = other DNA
cctcacaacctgaacgttacagatgagcttagagacataaatgttgctccagataatcatgtcaggaacatactc

SEQ ID NO: 217703 - DNA, 75 bp, synthetic construct
  source 1..75: mol_type = other DNA
attaatcacttatcgcttaatacatatacggggggtgtttccgcattaatcaattctctgcgattaccttggttg

SEQ ID NO: 217704 - DNA, 75 bp, synthetic construct
  source 1..75: mol_type = other DNA
atattagatatgagccttcccacttacgataaggggcctaatgaaaatggaggtcgcttcagagtgtacggaggg

SEQ ID NO: 217705 - DNA, 75 bp, synthetic construct
  source 1..75: mol_type = other DNA
tttgaaaaaaatagataactcaacgtggaagtgcttaccaaaatatagtggcctatcaattagtacctggatgga

SEQ ID NO: 217706 - DNA, 75 bp, synthetic construct
  source 1..75: mol_type = other DNA
aatatatttttttcaactggaaatgacttcgcaattcgaagtgaggtgaaaaggctaagggatttagcttacttt

SEQ ID NO: 217707 - DNA, 75 bp, synthetic construct
  source 1..75: mol_type = other DNA
tgttatggcctgcaaaaaaagctatagaaataacgaagttacaggctgtttaactttgtcttatcgtggggttaa

SEQ ID NO: 217708 - DNA, 75 bp, synthetic construct
  source 1..75: mol_type = other DNA
ttatatctggcgtacagccgaagatggcgacgtccggcattctcatcgagagatggaagggaagtttatcgaatg

SEQ ID NO: 217709 - DNA, 75 bp, synthetic construct
  source 1..75: mol_type = other DNA
gttgaaatattgctaaataccctgggattgattggtgctcaaaccgggtttccagccattaatctgacaattact

SEQ ID NO: 217710 - DNA, 75 bp, synthetic construct
  source 1..75: mol_type = other DNA
tgcaattgtcgcttcgtggtttggttcgcaatcggggtggcgtggtcatcaatttccagttttttataatcagtt

SEQ ID NO: 217711 - DNA, 75 bp, synthetic construct
  source 1..75: mol_type = other DNA
aaacattattaaatacccttggactgattggtgctcaaactggatttccggcaattaatctgacaattactgatg

SEQ ID NO: 217712 - DNA, 75 bp, synthetic construct
  source 1..75: mol_type = other DNA
gcacgaatatactgccattccaggctcgttatattgctctcgggccgtccgtagctggtactgcaaacgctgatg

SEQ ID NO: 217713 - DNA, 75 bp, synthetic construct
  source 1..75: mol_type = other DNA
agttctcttaattatcgtggagcttacggtaatacgaatgtcggttacagtcggaatggtgacagcagccagatt

SEQ ID NO: 217714 - DNA, 75 bp, synthetic construct
  source 1..75: mol_type = other DNA
cagttacaggcaagtgccctgcagaccgcagcaattaatgtttcattcaatttgccgcctgatctctttctgtta

SEQ ID NO: 217715 - DNA, 75 bp, synthetic construct
  source 1..75: mol_type = other DNA
atgtagtaccattattaatacaaatgattggaataatcataacaatttgtataagtgttaatacattaatagcca

SEQ ID NO: 217716 - DNA, 75 bp, synthetic construct
  source 1..75: mol_type = other DNA
tcacatttaataaatgtaatttgttttttattatattattatcaactataagtagttttcttttcgttctattcg

SEQ ID NO: 217717 - DNA, 75 bp, synthetic construct
  source 1..75: mol_type = other DNA
cccctgatgcgaagcaggttcacgccgccgcgccgggcgtggtgatcgtgccgcaagccgccgcccgaccaggcg

SEQ ID NO: 217718 - DNA, 75 bp, synthetic construct
  source 1..75: mol_type = other DNA
cttccgcaagaatttgcagacaatcagcaaattaatctgctcattgaggcaacaacaagttgggtaaaaagccca

SEQ ID NO: 217719 - DNA, 75 bp, synthetic construct
  source 1..75: mol_type = other DNA
caggcagtcggcgatatcttgttttcaatcaagattatatctcaaataaattaaacaagtatatctgtttcaaat

SEQ ID NO: 217720 - DNA, 75 bp, synthetic construct
  source 1..75: mol_type = other DNA
atgaaacgctttccgctatttcttttattcacgctgcccacgctgcccacgctgtccaccgttccggcccaggcc

SEQ ID NO: 217721 - DNA, 75 bp, synthetic construct
  source 1..75: mol_type = other DNA
gcaaaaaatacggttaagcgcggacagaccttccagctgatgtatgtggatgatcttggcgcgtataaaacccgg

SEQ ID NO: 217722 - DNA, 75 bp, synthetic construct
  source 1..75: mol_type = other DNA
ctggcacaaaaaccccaggcaatactgattgcgctcggttgggcgatgaaaggcgacggttcgttaatcaaagaa

SEQ ID NO: 217723 - DNA, 75 bp, synthetic construct
  source 1..75: mol_type = other DNA
aaaatgatgttgaaattacaaaggacatccttaatgcttgcagccaccacgggggggttagaattgaaaagaaag

SEQ ID NO: 217724 - DNA, 75 bp, synthetic construct
  source 1..75: mol_type = other DNA
tttatagatttaggtaactgggattttatttcaaacttttcctttgatgactctacaagaagacttgaattagag

SEQ ID NO: 217725 - DNA, 75 bp, synthetic construct
  source 1..75: mol_type = other DNA
agttgcgatggtacaacattgctttgatgtcatttattaccgtttggggctttggcaacgttgtaaataactatg

SEQ ID NO: 217726 - DNA, 75 bp, synthetic construct
  source 1..75: mol_type = other DNA
tattgcagttgttcgcctggcgcagaaatataaaccagaatatgtctttattcgtaataagccgctggcaatgac

SEQ ID NO: 217727 - DNA, 75 bp, synthetic construct
  source 1..75: mol_type = other DNA
tggcagggattgcgatgtttgttatgtcgctcctgtatgtggcgatggcggtaaccgcgcctgcgattactgaag

SEQ ID NO: 217728 - DNA, 75 bp, synthetic construct
  source 1..75: mol_type = other DNA
aatgcctacagccccgagcagtggaacgctatcggcgtgctggtgggtatcatcattgccgtactgacgtatctg

SEQ ID NO: 217729 - DNA, 75 bp, synthetic construct
  source 1..75: mol_type = other DNA
tgaagacagaagaattaaatatttcgccgcgtaataaatgcccattttatactgtttgctgtgcatcaattcgag

SEQ ID NO: 217730 - DNA, 75 bp, synthetic construct
  source 1..75: mol_type = other DNA
aaaccgttttttgagttagatataataaaaaaaatagcagaaaaaactgagtttatgaatgaagtaatacagaaa

SEQ ID NO: 217731 - DNA, 75 bp, synthetic construct
  source 1..75: mol_type = other DNA
gtgccagtgccgcaggtgctgccactggagacgtggtggggatgatagccacagagatgtgcgaaatatcccctg

SEQ ID NO: 217732 - DNA, 75 bp, synthetic construct
  source 1..75: mol_type = other DNA
tgagttctaccttcactgatttacaagaggaacgtagcaatgttatgcaatcgttaatggagatggactgtattc

SEQ ID NO: 217733 - DNA, 75 bp, synthetic construct
  source 1..75: mol_type = other DNA
aagagaacgggtgcctagctgctgattttcttcccgccttgactgaagaagatcaaaaatcattacctcctgatc

SEQ ID NO: 217734 - DNA, 75 bp, synthetic construct
  source 1..75: mol_type = other DNA
aaatcagaaagcgatagccaatctggtttatggcggtgagtggggcaaaaagaacctgggcaaccaggttgctgg

SEQ ID NO: 217735 - DNA, 75 bp, synthetic construct
  source 1..75: mol_type = other DNA
actacctgacctgtggtacggcgttaaaactggatttagtcagcaaccctgaacttctggaaagggacattaacg

SEQ ID NO: 217736 - DNA, 75 bp, synthetic construct
  source 1..75: mol_type = other DNA
aagccggcaaatttccgcagcccatcaagcccaatccagcgggcaaggctgtacgtttcagagcggtggatattc

SEQ ID NO: 217737 - DNA, 75 bp, synthetic construct
  source 1..75: mol_type = other DNA
gagcgcagggctcaggagcacgctaaacgacagcgcagggcggtcagaagcgtcgccacccgtgcacggaacgaa

SEQ ID NO: 217738 - DNA, 75 bp, synthetic construct
  source 1..75: mol_type = other DNA
aagtcgctatctttacgacccgctgggccgcagggtggcaaaacgggtgtggcgacgtgaacgggacctgacggg

SEQ ID NO: 217739 - DNA, 75 bp, synthetic construct
  source 1..75: mol_type = other DNA
cgctgcttatcaatggcggccgtaacggtctggataaacgccgcgcgctgtttaacctggcgaaatctgtgctgg

SEQ ID NO: 217740 - DNA, 75 bp, synthetic construct
  source 1..75: mol_type = other DNA
taagcaggtcatttcttcccaagctgactcgctgattaaaatttcgcggatctgggccgatttttttcccgcaaa

SEQ ID NO: 217741 - DNA, 75 bp, synthetic construct
  source 1..75: mol_type = other DNA
actttaaatctgctggtccagctggacgcgcagaacagcattgttggcattctatcaagctggaaaaaacaactc

SEQ ID NO: 217742 - DNA, 75 bp, synthetic construct
  source 1..75: mol_type = other DNA
aaaagcgccaggacgtgcattttctccttacgcatctgtgcggcatttcacacccggcatggcgcacttttcata

SEQ ID NO: 217743 - DNA, 75 bp, synthetic construct
  source 1..75: mol_type = other DNA
gaacaacttgtggaattatttttcttatttgccctataatttatcaaaaaacagtaaaaagccgaatgttatttc

SEQ ID NO: 217744 - DNA, 75 bp, synthetic construct
  source 1..75: mol_type = other DNA
caacaaaccgcctacgcccgatccaagtaaattgccggacatagcgaaacaattaagactgccatatcctattga

SEQ ID NO: 217745 - DNA, 75 bp, synthetic construct
  source 1..75: mol_type = other DNA
gggagcatggctttgacatgagagacagagtgagcagacagaaccgaactgcacctgaacgggttaaatcaccgt

SEQ ID NO: 217746 - DNA, 75 bp, synthetic construct
  source 1..75: mol_type = other DNA
gagcgagacccaacaaaccgcctacgcccgatccaagtaaattgccggacatagcgaaacaattaagactgccat

SEQ ID NO: 217747 - DNA, 75 bp, synthetic construct
  source 1..75: mol_type = other DNA
gcgctcgacaacgacagcttcagcaacagcgaccagacgattaccggcgtcaccgctgccgcccacggcacggtg

SEQ ID NO: 217748 - DNA, 75 bp, synthetic construct
  source 1..75: mol_type = other DNA
tttaccaggtaagcgacggcaacggcggatttagcgtggcgacgctcttacttaccgtcaacccgatcgcggatg

SEQ ID NO: 217749 - DNA, 75 bp, synthetic construct
  source 1..75: mol_type = other DNA
cgaaaccgcgaacgtcaccgtaacgttaacgaacggtgcgccgaccggggttgtcggcaaaaccgccagcacagc

SEQ ID NO: 217750 - DNA, 75 bp, synthetic construct
  source 1..75: mol_type = other DNA
cgacgccgacggcaataccagccaggcgcagctgaccatcgttattcacggcgtgacgccgccgcagtcggtacg

SEQ ID NO: 217751 - DNA, 75 bp, synthetic construct
  source 1..75: mol_type = other DNA
ccaccacgggcgcgatggccgtactgtcgctggagccggtggaaagcctgaccattggcggccagaccctgacgc

SEQ ID NO: 217752 - DNA, 75 bp, synthetic construct
  source 1..75: mol_type = other DNA
ccccgccggtcgcggtggcggataaagcgagcaccctgccggaaacgccggtcagcggcaatctgctgaccaacg

SEQ ID NO: 217753 - DNA, 75 bp, synthetic construct
  source 1..75: mol_type = other DNA
gcgaccatcaaatccccctgtcagataagttcctgaaaaggaaaaaacggtctcctgtagctgaagataaagttc

SEQ ID NO: 217754 - DNA, 75 bp, synthetic construct
  source 1..75: mol_type = other DNA
atgcgttacttcaatgttgaccaaatctatgcagatttgattacaggccgaacaacaaggacacttgtttacagt

SEQ ID NO: 217755 - DNA, 75 bp, synthetic construct
  source 1..75: mol_type = other DNA
tattcatgcaataacaatggagttttttgcctttgaaaaggcggagcattttgtaaaatcttacaatgcagaaag

SEQ ID NO: 217756 - DNA, 75 bp, synthetic construct
  source 1..75: mol_type = other DNA
cggcgcgctgaccctcaacgccgacggcagctatacctttgttccggtcgccgactggaacggcaacgtgccgca

SEQ ID NO: 217757 - DNA, 75 bp, synthetic construct
  source 1..75: mol_type = other DNA
cagcgaaaccaacgcgctggtgctgctcgcctcgacccagctgcgctttgtgccgctggccgactacaacggcgc

SEQ ID NO: 217758 - DNA, 75 bp, synthetic construct
  source 1..75: mol_type = other DNA
ttaccatcggccttgcggtggtcacgggcggcggtcccggcacgattccggatcgcgtcaccaccattaccaacc

SEQ ID NO: 217759 - DNA, 75 bp, synthetic construct
  source 1..75: mol_type = other DNA
cgaatatccgcacagtcattcagccagagaaaccaggcatggatcctgaatccattgaaattaagtggcaggaaa

SEQ ID NO: 217760 - DNA, 75 bp, synthetic construct
  source 1..75: mol_type = other DNA
attatagatgcgattgctaaaattttaaacgaaatatcagatttgtctctggattactgggttaataagtcaaca

SEQ ID NO: 217761 - DNA, 75 bp, synthetic construct
  source 1..75: mol_type = other DNA
cggtcatgcaaagacaacaagcggaaaaagaaaagcaaagcctgctacagctcgtcagggataaaactcagctct

SEQ ID NO: 217762 - DNA, 75 bp, synthetic construct
  source 1..75: mol_type = other DNA
atgggggttgtggcaatacttggtgtttcgtggatgactgcaacattttttgatgcttatcaggcagagctgatc

SEQ ID NO: 217763 - DNA, 75 bp, synthetic construct
  source 1..75: mol_type = other DNA
aagccttcgctgcaagaagtcaaagtcagaagaggtcgagcgtaaacagaaccgtatttactaccgcaagccacg

SEQ ID NO: 217764 - DNA, 75 bp, synthetic construct
  source 1..75: mol_type = other DNA
caaactgatcctgtttgtggcaatggatggctggacgctgttatcccgggggttagtgatgcagtatatggattt

SEQ ID NO: 217765 - DNA, 75 bp, synthetic construct
  source 1..75: mol_type = other DNA
atgcgtggaactcaatcctgagtacgtaatgattggaaagagggtactaccagaggcagagtggatcactggtga

SEQ ID NO: 217766 - DNA, 75 bp, synthetic construct
  source 1..75: mol_type = other DNA
cgcattgagcgacataatctgaatctgagacaacatctggcaaggccggtacggaagtcactgtcgttctcaaaa

SEQ ID NO: 217767 - DNA, 75 bp, synthetic construct
  source 1..75: mol_type = other DNA
tctagtctactcagataaacaactgactcaagatgataaagagttcatcttcaataactacaaaggcgatggtat

SEQ ID NO: 217768 - DNA, 75 bp, synthetic construct
  source 1..75: mol_type = other DNA
gtgctaccagtgccattattaatgctggattccagactctctacgataacagtattgccagtagcaccgtcatta

SEQ ID NO: 217769 - DNA, 75 bp, synthetic construct
  source 1..75: mol_type = other DNA
gcaggattttactattcggcatggtgtttctgctgttatctggttgtgataataagcaggaagaattaaaactgg

SEQ ID NO: 217770 - DNA, 75 bp, synthetic construct
  source 1..75: mol_type = other DNA
ctgaaatcgttcggattctggataatttcgacaccctgactaactccatcaccgaaggtcttccgcgtgaaatcg

SEQ ID NO: 217771 - DNA, 75 bp, synthetic construct
  source 1..75: mol_type = other DNA
tttgtatctcgttagggcttatgactggctgttctatggaggagatttccgcagcaaacaaacagttaagcgatg

SEQ ID NO: 217772 - DNA, 75 bp, synthetic construct
  source 1..75: mol_type = other DNA
aatggtatgccgatccttaacaagcaattgccgccggagcaggataaacgcgaaaatgttattgatgtccctgtt

SEQ ID NO: 217773 - DNA, 75 bp, synthetic construct
  source 1..75: mol_type = other DNA
tttgacctgccggaggagccaacaggcgatggcgcgccttcatggctgactgagccgacgccacagattaacggg

SEQ ID NO: 217774 - DNA, 75 bp, synthetic construct
  source 1..75: mol_type = other DNA
tttgacctgccggacgagccaacaggcgatgccgcgccttcatggctgactgagccgacgccacagattaacggg

SEQ ID NO: 217775 - DNA, 75 bp, synthetic construct
  source 1..75: mol_type = other DNA
tatcgcccggactgagcttgggcgcgcaaccggtgcactggatcaggcgcgtgcgctgtcaatcggctcgaatgg

SEQ ID NO: 217776 - DNA, 75 bp, synthetic construct
  source 1..75: mol_type = other DNA
agggtgtacgacatccagaatcgggcgattgaagctgttgtgaccggtgggagagcagaacattttgctaaagaa

SEQ ID NO: 217777 - DNA, 75 bp, synthetic construct
  source 1..75: mol_type = other DNA
accggtcacgctggcgagctcccgaattgtcgttgttataaagaaatcgtttttccctcctcccattcttatccc

SEQ ID NO: 217778 - DNA, 75 bp, synthetic construct
  source 1..75: mol_type = other DNA
tttgacctgccggaagagccaacaggcgatgacgcgccttcatggctgactgagccgacgccacagattaacggg

SEQ ID NO: 217779 - DNA, 75 bp, synthetic construct
  source 1..75: mol_type = other DNA
tttgacctgccggaagagccaacaggctatgtcgcgccttcatggctgactgagccgacgccacagattaacggg

SEQ ID NO: 217780 - DNA, 75 bp, synthetic construct
  source 1..75: mol_type = other DNA
tttgacctgccggaagagccaacaggcaatggcgcgccttcatggctgactgagccgacgccacagattaacggg

SEQ ID NO: 217781 - DNA, 75 bp, synthetic construct
  source 1..75: mol_type = other DNA
tttgacctgccggacgagccaacaggccatggcgcgccttcatggctgactgagccgacgccacagattaacggg

SEQ ID NO: 217782 - DNA, 75 bp, synthetic construct
  source 1..75: mol_type = other DNA
tttgacctgccggatgagccaacaggcgatgtcgcgccttcatggctgactgagccgacgccacagattaacggg

SEQ ID NO: 217783 - DNA, 75 bp, synthetic construct
  source 1..75: mol_type = other DNA
tttgacctgccggatgagccaacaggctatggcgcgccttcatggctgactgagccgacgccacagattaacggg

SEQ ID NO: 217784 - DNA, 75 bp, synthetic construct
  source 1..75: mol_type = other DNA
taaccccagtgtttttaaagatacttatcaatatggttatacaagctcaggtcaaaatacctggggtgtacaagg

SEQ ID NO: 217785 - DNA, 75 bp, synthetic construct
  source 1..75: mol_type = other DNA
aaaacaagaaacaactgagtcaaaaagatatccatatattatatggattaattcaggatgatatatcttctgtgg

SEQ ID NO: 217786 - DNA, 75 bp, synthetic construct
  source 1..75: mol_type = other DNA
gaagttatatcctatattatctttagccgatatggacagtcatcgatgggatgctgttgtcaaatctatcgataa

SEQ ID NO: 217787 - DNA, 75 bp, synthetic construct
  source 1..75: mol_type = other DNA
atgaaacgccgtggtcatgttgtgctggccgacaaagcgtactcgggacacacattgcgcaacgagctgaaaaat

SEQ ID NO: 217788 - DNA, 75 bp, synthetic construct
  source 1..75: mol_type = other DNA
atcttattgaacagatgggagaagaaaatgcaaaagagcaaatttctcgtattgctactgagctatcttggaaac

SEQ ID NO: 217789 - DNA, 75 bp, synthetic construct
  source 1..75: mol_type = other DNA
cctaatggttataccgcgatttcaaatccaagcgcggggattatgagcacaacaagcggtagtggccagactcgt

SEQ ID NO: 217790 - DNA, 75 bp, synthetic construct
  source 1..75: mol_type = other DNA
tgaaggtgaaagaacgatgaaagtatatctatggcctctttatgtggtttttatatttccgttctccattatatc

SEQ ID NO: 217791 - DNA, 75 bp, synthetic construct
  source 1..75: mol_type = other DNA
cgaagtccagacattgatatcttctgcagtaaacaagcaaatactatggaccatagggactggatttgctctttt

SEQ ID NO: 217792 - DNA, 75 bp, synthetic construct
  source 1..75: mol_type = other DNA
tgttttcgattgatgcaccgcttaaagtgttattaggcgatgccgacagcaaatatattcctgccagtttatgtc

SEQ ID NO: 217793 - DNA, 75 bp, synthetic construct
  source 1..75: mol_type = other DNA
acttttctgactgtgatctgaacgtatatcttatgtttgatgctgcaagagcattcagtaaaaagttagaagtag

SEQ ID NO: 217794 - DNA, 75 bp, synthetic construct
  source 1..75: mol_type = other DNA
ccttagtacttactcacaacctaacaaatcacaaagaaccagtacaacagcttgataaggttcaccctacctggc

SEQ ID NO: 217795 - DNA, 75 bp, synthetic construct
  source 1..75: mol_type = other DNA
tggaaatggcctgatttactgtggagctggcggaatgggaacaccattaaccctggagagccatttcgtggatgc

SEQ ID NO: 217796 - DNA, 75 bp, synthetic construct
  source 1..75: mol_type = other DNA
ttccccaactcatacttttttattgatatacctcaacttgacctttataataaatcacataatgctctctttaag

SEQ ID NO: 217797 - DNA, 75 bp, synthetic construct
  source 1..75: mol_type = other DNA
tttataaccgtttctacgggggttggagggggaattgtagttaacagaaaattattaacaggtgtttctggatta

SEQ ID NO: 217798 - DNA, 75 bp, synthetic construct
  source 1..75: mol_type = other DNA
aacaacctgaaatatataatatttcaatttccccagcccgttataaccataatgcaggaattataggagcagcat

SEQ ID NO: 217799 - DNA, 75 bp, synthetic construct
  source 1..75: mol_type = other DNA
ctggagacttttgccgcacaatacgggcaagggttaagtaacatgctggaagcgaacccgggcgctgatgttttt

SEQ ID NO: 217800 - DNA, 75 bp, synthetic construct
  source 1..75: mol_type = other DNA
gcatgtttatgctgagattaattttcaaccaatcaaccaatcaaccaatcaaccaatcaaccaatgtttcgttaa

SEQ ID NO: 217801 - DNA, 75 bp, synthetic construct
  source 1..75: mol_type = other DNA
atattattcactttgtggagacatatattccccaaaaaaaattcttattacatttcctggtgtttctaattttga

SEQ ID NO: 217802 - DNA, 75 bp, synthetic construct
  source 1..75: mol_type = other DNA
aggtgtcacctgaatcttggtcgtgtggcatgggtggaaaaacactgcatgaaggagatggggcaaaatgagtcg

SEQ ID NO: 217803 - DNA, 75 bp, synthetic construct
  source 1..75: mol_type = other DNA
atgaataacgcagagaaaaatgaaattaaatccacatccgccagcaccagaaaacatctttatgatttttatgtt

SEQ ID NO: 217804 - DNA, 75 bp, synthetic construct
  source 1..75: mol_type = other DNA
ggtagacgataacaaaacgataagaataggtcgtatacagttcaacgactttaattttatcgaagagaacggtca

SEQ ID NO: 217805 - DNA, 75 bp, synthetic construct
  source 1..75: mol_type = other DNA
tcttcgccagttctgtcattccatacttactatgtcagataagcggctacgttaccaactcttgtctgatggcta

SEQ ID NO: 217806 - DNA, 75 bp, synthetic construct
  source 1..75: mol_type = other DNA
cgcaatctcttccggtcagataaacattcccagactgcggcaaggcaaattctgaaggatgcattttatttccag

SEQ ID NO: 217807 - DNA, 75 bp, synthetic construct
  source 1..75: mol_type = other DNA
tcaaaaagaccgagaatatgaatatctttgaagagctatgggagacgttacgcaatctcttccggtcagataaac

SEQ ID NO: 217808 - DNA, 75 bp, synthetic construct
  source 1..75: mol_type = other DNA
atggttaatcgttttttggttaggatttagctggactacatcgattattatcgccggggtattaacgggtatatt

SEQ ID NO: 217809 - DNA, 75 bp, synthetic construct
  source 1..75: mol_type = other DNA
cggtttagcgcaatccgaaagtgcgcacaaaacgcgagatgtgtaccaaaatgaatataaattgggtaaacgcag

SEQ ID NO: 217810 - DNA, 75 bp, synthetic construct
  source 1..75: mol_type = other DNA
actgatgtgataaacaaccatgccgaaaaaataggtaacaaccaggcgatcaccgttaccaataaccagatccag

SEQ ID NO: 217811 - DNA, 75 bp, synthetic construct
  source 1..75: mol_type = other DNA
tacccggaagtgcgctcggttctgcttctacgatcattacaggccgaaggttgggggtagggcagatagcgcaag

SEQ ID NO: 217812 - DNA, 75 bp, synthetic construct
  source 1..75: mol_type = other DNA
gcaaaaaccggtataaaaatgaaagcagaaacagaaaccggttatgaaccctccatccggatccagatggagaag

SEQ ID NO: 217813 - DNA, 75 bp, synthetic construct
  source 1..75: mol_type = other DNA
atgtttgccaaattcatagatgttattcaaacgttttttaactgtaaccggattaatttgattttgctggtgggt

SEQ ID NO: 217814 - DNA, 75 bp, synthetic construct
  source 1..75: mol_type = other DNA
tatgcatcagccagttccgctacagcgcacaaatccgcccatcttccgtggtgaccaaagactacacctttaaac

SEQ ID NO: 217815 - DNA, 75 bp, synthetic construct
  source 1..75: mol_type = other DNA
ccattgatgccgatggagaacaggatggtcttgctgatgaagtgctaatcctgcgtattgctgcaaacaacgtac

SEQ ID NO: 217816 - DNA, 75 bp, synthetic construct
  source 1..75: mol_type = other DNA
ccaaagctgatagccatgataattttgctgatagcaacggtggccttactccggatgctggcgaatcagatatag

SEQ ID NO: 217817 - DNA, 75 bp, synthetic construct
  source 1..75: mol_type = other DNA
ccgcagatcctcgacaaaatggcctacctgacggtatggcagggcgatgacgtacagcgccgggtgaaaggtgtg

SEQ ID NO: 217818 - DNA, 75 bp, synthetic construct
  source 1..75: mol_type = other DNA
cgggtttggtaacctggcgataccgcgtgtgggtcaggaggtgattgtggatttcctcaacggcgatccagacca

SEQ ID NO: 217819 - DNA, 75 bp, synthetic construct
  source 1..75: mol_type = other DNA
ccgaggtgctgaataaccgcaccacggatgtgataaacaaccatgctgagaccattggcaacaatcagatgattg

SEQ ID NO: 217820 - DNA, 75 bp, synthetic construct
  source 1..75: mol_type = other DNA
gccatcgcctggctaacggctccctttgccggggttatggcatcgttttacacccaggatccacaggttaaacac

SEQ ID NO: 217821 - DNA, 75 bp, synthetic construct
  source 1..75: mol_type = other DNA
acagcaatcgttacgaggatgagatgtttgcaatcaaatactttcagaagggaactgctcatatcacctttaagc

SEQ ID NO: 217822 - DNA, 75 bp, synthetic construct
  source 1..75: mol_type = other DNA
ccgattacggcggtaagcccgcgctggaggacatcaacctgacgctggacagcggtgagctgctggtggtgctgg

SEQ ID NO: 217823 - DNA, 75 bp, synthetic construct
  source 1..75: mol_type = other DNA
gatgaaattaaaccaaacccacaacttcttctggacataataaaatcaattggtgccacaccagaagagtgtgta

SEQ ID NO: 217824 - DNA, 75 bp, synthetic construct
  source 1..75: mol_type = other DNA
acaatattgaaaccatgaaattcgtcccggttgtccccgcgtgggtctttgttaaagcagagcccgtaccgttgc

SEQ ID NO: 217825 - DNA, 75 bp, synthetic construct
  source 1..75: mol_type = other DNA
ctctgacgttacccgccggctgggagatcacattgatgcgaaccggcacaacaactgttacgaggatgagatgtt

SEQ ID NO: 217826 - DNA, 75 bp, synthetic construct
  source 1..75: mol_type = other DNA
atgcaaacagaagctgaagtcttaaccgatcacaacgagataattcgctcgaccaatattgagcgtatcgtcaca

SEQ ID NO: 217827 - DNA, 75 bp, synthetic construct
  source 1..75: mol_type = other DNA
agcggtgcagaaagtgaaggtgcttatgccgaacagggctggacgctgagcgaaggtaaggcggaagtggtacag

SEQ ID NO: 217828 - DNA, 75 bp, synthetic construct
  source 1..75: mol_type = other DNA
ccggacgggcgtgactctttccatgcgattgacgcagacggtgagcaggatggcttaaccgatgatgttctgatt

SEQ ID NO: 217829 - DNA, 75 bp, synthetic construct
  source 1..75: mol_type = other DNA
gagcaagaatgggacattcagtgggaaatattccgacttttagctgagtgcgaagaacgcgatatcgagctgata

SEQ ID NO: 217830 - DNA, 75 bp, synthetic construct
  source 1..75: mol_type = other DNA
ggaactgcacacatcgtattcaagcgacctgagctggtcgataagctgaacgacatcatcgcccgacactatcca

SEQ ID NO: 217831 - DNA, 75 bp, synthetic construct
  source 1..75: mol_type = other DNA
cttccgggttattcaggggataggcggcgcaatgatgatgcctgttgctcggctggccttactgcgcgcttatcc

SEQ ID NO: 217832 - DNA, 75 bp, synthetic construct
  source 1..75: mol_type = other DNA
acatacctgagtacgcactatatgacgaaaaactctttacaagcattttacctatatcaaatgaccagcgcattt

SEQ ID NO: 217833 - DNA, 75 bp, synthetic construct
  source 1..75: mol_type = other DNA
gtatttgccggatcacctgccagcgaacagcagcaggctgccgcgattgttgcctcatggtttggctcacgctcc

SEQ ID NO: 217834 - DNA, 75 bp, synthetic construct
  source 1..75: mol_type = other DNA
tggacgtttcagggaatagtgggctggagcttcgttggcaaaaaattcccctacagaacgacttagcttttttcc

SEQ ID NO: 217835 - DNA, 75 bp, synthetic construct
  source 1..75: mol_type = other DNA
gagcatctgcggccggttgacatatgtcacgctcagcccctcagcacagctccacagctcgcggctgttctgggt

SEQ ID NO: 217836 - DNA, 75 bp, synthetic construct
  source 1..75: mol_type = other DNA
tgccgagtctgtcggggaatatcagatccgtcgcctgactgcagcaatgctggaggatgtacagactggcataac

SEQ ID NO: 217837 - DNA, 75 bp, synthetic construct
  source 1..75: mol_type = other DNA
atacggttgcgttaatcggagcacacactggttttcctgctatcaatctcacaataacggaggatagtcgcgcta

SEQ ID NO: 217838 - DNA, 75 bp, synthetic construct
  source 1..75: mol_type = other DNA
tttgagtttaaaaatgcactgccagaacaggcagataagagctgtatgaattatcggatgattgagaatcatgcg

SEQ ID NO: 217839 - DNA, 75 bp, synthetic construct
  source 1..75: mol_type = other DNA
agagttgccaggggcgttgtcagaagaccctctccttgcacgcttcaacttcactgcggacccggatttccggca

SEQ ID NO: 217840 - DNA, 75 bp, synthetic construct
  source 1..75: mol_type = other DNA
tggatcccgaacactttacccataccgtggaacactacaatcaggcctgtcagccgggtcagtttgatcacacga

SEQ ID NO: 217841 - DNA, 75 bp, synthetic construct
  source 1..75: mol_type = other DNA
gccggagttacgtggacattgaaatgggagtggatattttatttttctcttccattgctatttattctcaataaa

SEQ ID NO: 217842 - DNA, 75 bp, synthetic construct
  source 1..75: mol_type = other DNA
tcttgatacccgtacggcaacccgcaagacaaaactcaccgaactggcacaacgctggctggttagacgtgttgg

SEQ ID NO: 217843 - DNA, 75 bp, synthetic construct
  source 1..75: mol_type = other DNA
taactggtagcggccaaactcaatctgaaaccagcccgaaggatatttctggtaataattttgctgcgcgaattc

SEQ ID NO: 217844 - DNA, 75 bp, synthetic construct
  source 1..75: mol_type = other DNA
caaaaagtagctaaggttttagattatccagaaggctatttctatacatcagatgatgattttgcagaactgctc

SEQ ID NO: 217845 - DNA, 75 bp, synthetic construct
  source 1..75: mol_type = other DNA
cgttgtgggttagaaaagagcaagatggcacctctgaccactgagttcattcgattggtaggaagttggattgaa

SEQ ID NO: 217846 - DNA, 75 bp, synthetic construct
  source 1..75: mol_type = other DNA
acgagcaacaaagagacgtaagtgggcattagcaattggtgatatagttgctcgtcgtaatggactgtcagtaaa

SEQ ID NO: 217847 - DNA, 75 bp, synthetic construct
  source 1..75: mol_type = other DNA
caaagcaagccgttctcctgaacgcgcctgagcaccagaaaatgaaggaggtaagcgagggcatagcgtcattgt

SEQ ID NO: 217848 - DNA, 75 bp, synthetic construct
  source 1..75: mol_type = other DNA
tgaaacatgccacgggtaacaccatgagtgaatttattgctgaaaaccgcggcgcgaatgccatcacccgaccga

SEQ ID NO: 217849 - DNA, 75 bp, synthetic construct
  source 1..75: mol_type = other DNA
cgattgacgcagacggtgagcaggatggcttaaccgatgatgttctgattctgcgtattgcagcaaataacgtcc

SEQ ID NO: 217850 - DNA, 75 bp, synthetic construct
  source 1..75: mol_type = other DNA
gcatcttcttttatgaggagcatgcttacaaaagtaccgaccagagcctggtgctgtgcgacacagtccgccatc

SEQ ID NO: 217851 - DNA, 75 bp, synthetic construct
  source 1..75: mol_type = other DNA
gctgacaaaagcgcgttaccagtacctcctccggcttgatgcacagcctctgccggagtcgaggatcgccttgct

SEQ ID NO: 217852 - DNA, 75 bp, synthetic construct
  source 1..75: mol_type = other DNA
agtgaaggcattgtgtcgatgtttcgagtggacccggatctggctggtccattgatggcgatggtcaccgccatg

SEQ ID NO: 217853 - DNA, 75 bp, synthetic construct
  source 1..75: mol_type = other DNA
agccgaagctggcaggcaaactgggcatcaaaccggaagaggtgatgaccctcggcgatcaggaaaacgacatcg

SEQ ID NO: 217854 - DNA, 75 bp, synthetic construct
  source 1..75: mol_type = other DNA
gacttgttcgcaccttccctagtgcctacgcagatttatcagaaacagtgtatattaatgaaaataatgagagct

SEQ ID NO: 217855 - DNA, 75 bp, synthetic construct
  source 1..75: mol_type = other DNA
aaagaaaatacttttgccgaagtatcaaaaaatccacgtgcattcacattttcaatatttatgattgcatcaatt

SEQ ID NO: 217856 - DNA, 75 bp, synthetic construct
  source 1..75: mol_type = other DNA
gtctgatcagtgttctttttcagaaaaaatcatcccggattcatatccagtctgcctatcagctgaattccgggt

SEQ ID NO: 217857 - DNA, 75 bp, synthetic construct
  source 1..75: mol_type = other DNA
cgcctttgtcactggcgcaggtagcggtatcggacaaatgatcgctctggctttagccagcgcaggcgcacgagt

SEQ ID NO: 217858 - DNA, 75 bp, synthetic construct
  source 1..75: mol_type = other DNA
gatcccggtcagtccacagagctgattgaacgttatgaagaattgtatggtttacctgattcctgttcccctgtc

SEQ ID NO: 217859 - DNA, 75 bp, synthetic construct
  source 1..75: mol_type = other DNA
ttgaacgttatgaagaattgtatggtttacctgacacctgctctcctgttggagcccagacattacgccagcgtc

SEQ ID NO: 217860 - DNA, 75 bp, synthetic construct
  source 1..75: mol_type = other DNA
cgtatttattaaataaaaatactggctctatttctgtagtgataaagtggaagtatgagtggtataaggataata

SEQ ID NO: 217861 - DNA, 75 bp, synthetic construct
  source 1..75: mol_type = other DNA
gcgaaaagctttttatcgacttctgtagtcctacggttcctgttattaatccggacaccggtgagatacgccgcg

SEQ ID NO: 217862 - DNA, 75 bp, synthetic construct
  source 1..75: mol_type = other DNA
atcatcaatatgatcgattattcaagcgcggaaacatttttgaaatctatcaaccctctattcatggcatatggg

SEQ ID NO: 217863 - DNA, 75 bp, synthetic construct
  source 1..75: mol_type = other DNA
ggcgctcatcaccccggaaggcgaaacggcgtggtgcggggagtatgacgagtgggggaaccagcttaatgagga

SEQ ID NO: 217864 - DNA, 75 bp, synthetic construct
  source 1..75: mol_type = other DNA
acctttaaacgacccggctgggcagggcgttttgatcaggaaggccagtaccaggattaccagcgcacacagtat

SEQ ID NO: 217865 - DNA, 75 bp, synthetic construct
  source 1..75: mol_type = other DNA
cagattatcaaagtgggatcaaaccaggttgaaaaggtggggatcattcgtgcgctgacggtgggtgtggcttac

SEQ ID NO: 217866 - DNA, 75 bp, synthetic construct
  source 1..75: mol_type = other DNA
acaaccatgccgaaaaaataggtaacaaccaggcgatcaccgttaccaataaccagatccagaacattggcgtta

SEQ ID NO: 217867 - DNA, 75 bp, synthetic construct
  source 1..75: mol_type = other DNA
ttgaataaagctcattctttcaaaaagagattggataataaagctttatttaaaaacatggaattttacatagat

SEQ ID NO: 217868 - DNA, 75 bp, synthetic construct
  source 1..75: mol_type = other DNA
agttggggccgggcgagccggacatcaagcaactgcaggctcagcttgagcaggtcgacttggtcgcctggcagc

SEQ ID NO: 217869 - DNA, 75 bp, synthetic construct
  source 1..75: mol_type = other DNA
ggcgttttgatcaggaaggccagtaccaggattaccagcgcacacagtatgaagtgtatgactaccccggacgtt

SEQ ID NO: 217870 - DNA, 75 bp, synthetic construct
  source 1..75: mol_type = other DNA
tattcaaagaatcactcataatttatggactgcacgtgaaaaaaatgtgacgttaattaagcaaataaatgatct

SEQ ID NO: 217871 - DNA, 75 bp, synthetic construct
  source 1..75: mol_type = other DNA
accacactgaggaggctgccaacatggctactacccctaccctcgtacattctcaaactgcctttatctggcgct

SEQ ID NO: 217872 - DNA, 75 bp, synthetic construct
  source 1..75: mol_type = other DNA
actatccctacccttgtacattctcaaaccgcctttctctggcgctttatcatctttggcgcgtcagaacatcaa

SEQ ID NO: 217873 - DNA, 75 bp, synthetic construct
  source 1..75: mol_type = other DNA
cttcgttaaccggttacgccaaccccgtacagtccaccgccagcgaaattggcgtttcctgcggtgggtttatta

SEQ ID NO: 217874 - DNA, 75 bp, synthetic construct
  source 1..75: mol_type = other DNA
gagctgaaaaataaggccgtgaagcgttaccacttggtggatgcgtataaccgggtcgaggcagcaatcaactcc

SEQ ID NO: 217875 - DNA, 75 bp, synthetic construct
  source 1..75: mol_type = other DNA
cgaacgcatcgaatctgctcagaacgtggatagcgccaaatcgctgcgtgccgacattgaaacggcgaaagctac

SEQ ID NO: 217876 - DNA, 75 bp, synthetic construct
  source 1..75: mol_type = other DNA
aattcatatgattgtagcaatgattaatatggctctttctggaataaaactatctaacggcatctatgattttgt

SEQ ID NO: 217877 - DNA, 75 bp, synthetic construct
  source 1..75: mol_type = other DNA
atgaataagacagttttacatattaatagtaacataaccacagatgaaattagtttattgttgcaggcatccaag

SEQ ID NO: 217878 - DNA, 75 bp, synthetic construct
  source 1..75: mol_type = other DNA
tcgagaaaatttgtgcaattatttcttccctggctgagattgcgcactttcacgatacaaaatcggaatcttcaa

SEQ ID NO: 217879 - DNA, 75 bp, synthetic construct
  source 1..75: mol_type = other DNA
atttttatagagcatcatcgaagccccaattcgacggacgttctttttctgcaactgttgaaataaataataaca

SEQ ID NO: 217880 - DNA, 75 bp, synthetic construct
  source 1..75: mol_type = other DNA
ctggagataaaggcgatacagacgccgaacgcgtctttttttgtatcggcgcacacgcacaccttatcaatggtg

SEQ ID NO: 217881 - DNA, 75 bp, synthetic construct
  source 1..75: mol_type = other DNA
gggccatggtcaggttatagtataataatacctgcatggacactaacgtatgaaatttggttctatgtggttttc

SEQ ID NO: 217882 - DNA, 75 bp, synthetic construct
  source 1..75: mol_type = other DNA
tctatatgttctaatcttgcagtattatgaaaaagaaaacgtaaaaaaacatcattttttattgctactatttgt

SEQ ID NO: 217883 - DNA, 75 bp, synthetic construct
  source 1..75: mol_type = other DNA
ttactcgacgaaccgtttggcgcgctggacgccttcacccgcgaccagatgcaaaccctgctgctgaaactctgg

SEQ ID NO: 217884 - DNA, 75 bp, synthetic construct
  source 1..75: mol_type = other DNA
tgctccttatggtatttctgattctgaaactgaagatgcctatccattattcagttctgatatcactggtattca

SEQ ID NO: 217885 - DNA, 75 bp, synthetic construct
  source 1..75: mol_type = other DNA
cctgtttacaccttaggcggcaccattatcctgcaactagcgctttttaatatcttgctgccatttgtcatcatt

SEQ ID NO: 217886 - DNA, 75 bp, synthetic construct
  source 1..75: mol_type = other DNA
acatccacgcgcagaagaacatgaacaccgaggtgctgaataaccgcaccacggatgtgataaacaaccatgctg

SEQ ID NO: 217887 - DNA, 75 bp, synthetic construct
  source 1..75: mol_type = other DNA
cttccgtggtgaccaaagactacacctttaaacgccccggctgggccggacgttttgatcaggaaggccagcacc

SEQ ID NO: 217888 - DNA, 75 bp, synthetic construct
  source 1..75: mol_type = other DNA
ccacgggcagaactttgcccgctggcagatggatggctggcgaaacaacgcagaagtggcgcgcggaacaagccg

SEQ ID NO: 217889 - DNA, 75 bp, synthetic construct
  source 1..75: mol_type = other DNA
tgatgtgctggcaggatacctttcaggaatgcctgcccggtatggcaaaactggtgctggcagtggggcttgcag

SEQ ID NO: 217890 - DNA, 75 bp, synthetic construct
  source 1..75: mol_type = other DNA
cgattttgatgaacgatttgtaaaattaatcaatactgatataacgggtttaaggactgatgctctctatcttct

SEQ ID NO: 217891 - DNA, 75 bp, synthetic construct
  source 1..75: mol_type = other DNA
ctcgcagccagcaggcaacgattccggggccggagtggcacctgaatgacgaactggtggtgcgtagtctcggtt

SEQ ID NO: 217892 - DNA, 75 bp, synthetic construct
  source 1..75: mol_type = other DNA
caaaaccgtattccagcttaaaaattctattattgcgattatggccattgtcgccatggcaacagttatggatct

SEQ ID NO: 217893 - DNA, 75 bp, synthetic construct
  source 1..75: mol_type = other DNA
ttatggatctcagcggcattatttctacgctggcacagtcaattgtcgacctcacaggaagttcatatgtcttcc

SEQ ID NO: 217894 - DNA, 75 bp, synthetic construct
  source 1..75: mol_type = other DNA
gatggcgggacattagcgttaaaaatagaatggctcacaacgcctggaatgttgattatctttgcaactattctc

SEQ ID NO: 217895 - DNA, 75 bp, synthetic construct
  source 1..75: mol_type = other DNA
atgaaggtgcacccgccgctgtggcgtgccggtctgcgccagaacttccgtatcttccagaacgaggacatcaaa

SEQ ID NO: 217896 - DNA, 75 bp, synthetic construct
  source 1..75: mol_type = other DNA
ccaacttgccagattaaatggaaaaacaacaatcaattaactccttatgtctacaacagggattttgttgtaaat

SEQ ID NO: 217897 - DNA, 75 bp, synthetic construct
  source 1..75: mol_type = other DNA
aaaaaaaatatggaatgtcggtccctgagcatccggctaaccggattttttatgtcagaaatgaacaaaaaataa

SEQ ID NO: 217898 - DNA, 75 bp, synthetic construct
  source 1..75: mol_type = other DNA
atggtatgtcggtccctgagcatcctgcaaaccggattttttatgtcagaaatgagcaaaaaataaactctacaa

SEQ ID NO: 217899 - DNA, 75 bp, synthetic construct
  source 1..75: mol_type = other DNA
actaagttaggtgagcctgatacaagaaccacacttgatgacggaaatgagcaatggaaatatttcatgtctaac

SEQ ID NO: 217900 - DNA, 75 bp, synthetic construct
  source 1..75: mol_type = other DNA
aaactacacttgatagtggcaatgaagaatggacttactcgatggacaacaatcagtttgatgccaccacattca

SEQ ID NO: 217901 - DNA, 75 bp, synthetic construct
  source 1..75: mol_type = other DNA
ttgaaaaaattgaattggatttcaaaaatgattgctggaatcaaaagaaaaaacatgatgattacttctataaag

SEQ ID NO: 217902 - DNA, 75 bp, synthetic construct
  source 1..75: mol_type = other DNA
tgccgcagacgtagcagaacaacctcagccgcaaaccgtggatggcgttgccagcccggcacaagcctcggttag

SEQ ID NO: 217903 - DNA, 75 bp, synthetic construct
  source 1..75: mol_type = other DNA
atggttaagttctggtgtaggttctatgagggcagagaacaagaaaccatctattccaccaaaatccgaatgggg

SEQ ID NO: 217904 - DNA, 75 bp, synthetic construct
  source 1..75: mol_type = other DNA
cagccgttgctgaaaccgctggtcgacggcccgcagagcgccgtcgtgacgggaccggcaggcgaggaaatcttc

SEQ ID NO: 217905 - DNA, 75 bp, synthetic construct
  source 1..75: mol_type = other DNA
tacatactattacagctccggtatcagggaattttaaaactcacaagcctgcaccagaagttattgaaacagcca

SEQ ID NO: 217906 - DNA, 75 bp, synthetic construct
  source 1..75: mol_type = other DNA
atagaaaacaggcttaatttcatgcctgaacaacgagttattaacaattgtggacatattataaaaatcaacgca

SEQ ID NO: 217907 - DNA, 75 bp, synthetic construct
  source 1..75: mol_type = other DNA
gtaccttatcagcgcggcaatattcaactggcgggcaaacgcgttcaggggccgggcgcggagcgcggagtcgtt

SEQ ID NO: 217908 - DNA, 75 bp, synthetic construct
  source 1..75: mol_type = other DNA
ttgaagctaatgtcgagaagcaaaactctgatcaggacagcttattttctgcaataagagtgttctttaacgaaa

SEQ ID NO: 217909 - DNA, 75 bp, synthetic construct
  source 1..75: mol_type = other DNA
ggttaaggaccgcaatgtcagagtgcggattaatgctctcggtgctgacagcctcggcgcgtcggggcttccggc

SEQ ID NO: 217910 - DNA, 75 bp, synthetic construct
  source 1..75: mol_type = other DNA
ggagtaactctgaactatctaataaaacgatacaatttaaggaaaaaatccataatggtatcaatacagaataca

SEQ ID NO: 217911 - DNA, 75 bp, synthetic construct
  source 1..75: mol_type = other DNA
aattgacatatcagtttcagcgttggggacaaaatcatacagtccggattctggaaagtagtgaagggatacgac

SEQ ID NO: 217912 - DNA, 75 bp, synthetic construct
  source 1..75: mol_type = other DNA
tgaaccgggaatggcaggtggtggcaagtgaactgcacggcgagcagccgcaggcggtgccgggacgcagtggtt

SEQ ID NO: 217913 - DNA, 75 bp, synthetic construct
  source 1..75: mol_type = other DNA
tacgatttcctgtgccggatggcggcggaggaaggcatcttcttttatgaggagcacgcgcaaaaaagtaccgac

SEQ ID NO: 217914 - DNA, 75 bp, synthetic construct
  source 1..75: mol_type = other DNA
tatggcagggcgatgacgtacagcgccgggtgaaaggcgtggtgacctggtttgaactgggggagaacgacaaaa

SEQ ID NO: 217915 - DNA, 75 bp, synthetic construct
  source 1..75: mol_type = other DNA
cgcctgatgctccaggtgttcagcttcgtgaaccgctttcgcaccactggcgtgacccgtgccgacgtgagggcg

SEQ ID NO: 217916 - DNA, 75 bp, synthetic construct
  source 1..75: mol_type = other DNA
gccgcctgatgtatcatctgcataataccgccaggcttcttattccgtcagtggttgccgataatgcctcttccg

SEQ ID NO: 217917 - DNA, 75 bp, synthetic construct
  source 1..75: mol_type = other DNA
gaacttgataaagagttacgttatgaacttggtaagttctacacttgggttcacggtggcaggtacgatccgcta

SEQ ID NO: 217918 - DNA, 75 bp, synthetic construct
  source 1..75: mol_type = other DNA
atgctaaggctattcgtgagcaacttcatactccaactgaccggttgcgtagccagaatgcaatcaaatctgaca

SEQ ID NO: 217919 - DNA, 75 bp, synthetic construct
  source 1..75: mol_type = other DNA
atcaaattattccttatgcaggtggtactcacccggtagcaaaaggtgcccagttcgcgccggacgagtggatct

SEQ ID NO: 217920 - DNA, 75 bp, synthetic construct
  source 1..75: mol_type = other DNA
ctgctgggtgatgttgttttcgcaagtactttcaacgcaaacttctatcctcaaggtcatgacagtaatgccgat

SEQ ID NO: 217921 - DNA, 75 bp, synthetic construct
  source 1..75: mol_type = other DNA
gctgacgaaggacggaagcatatttctcaatggtacgcacattcatctggaaggggagtcggatgtgaacggtga

SEQ ID NO: 217922 - DNA, 75 bp, synthetic construct
  source 1..75: mol_type = other DNA
tataatggtaatggacgtaccgctagtttaatattgaatggtagtttttcatttccagaaacgtgttcattcaac

SEQ ID NO: 217923 - DNA, 75 bp, synthetic construct
  source 1..75: mol_type = other DNA
taccaactaaatatgacataatggtaacgttaccccaggagtttaaagaatctgggcttacgtttagaaatgcac

SEQ ID NO: 217924 - DNA, 75 bp, synthetic construct
  source 1..75: mol_type = other DNA
atgtcaatatggattaccagcgtcctatggtgaaaaaagaaaaacatttggcctcaaagtcagatgggtcaaatc

SEQ ID NO: 217925 - DNA, 75 bp, synthetic construct
  source 1..75: mol_type = other DNA
tcccttctacatcaccctggaaaaagggggcgtgaatgccttctcctcgatgcccattgatgcgaagtattatcg

SEQ ID NO: 217926 - DNA, 75 bp, synthetic construct
  source 1..75: mol_type = other DNA
gtcagttgatgtctcaggcgataacaagtacgtgacaacctcatgccgttttaaaacagaacgacaggtaaggtt

SEQ ID NO: 217927 - DNA, 75 bp, synthetic construct
  source 1..75: mol_type = other DNA
gtgactgcagagccctatgcgaatatagtgccgccgctgcctgatgtgtggataccgtttaacgattcactggat

SEQ ID NO: 217928 - DNA, 75 bp, synthetic construct
  source 1..75: mol_type = other DNA
ttatttttctcgatgcaagaacatctacgacatgtggtagctcagaaagcaaatctctttatattgaaaaaaatg

SEQ ID NO: 217929 - DNA, 75 bp, synthetic construct
  source 1..75: mol_type = other DNA
cctactgtacccaaaatgtcggatgcgatgctggcgcatcttatccgacctacggggagcgcatgtgttggtcac

SEQ ID NO: 217930 - DNA, 75 bp, synthetic construct
  source 1..75: mol_type = other DNA
caagacaatgaaggaaaacaccggacaaacagcagtttattctgccggtgagcatcttgaactctgctgtggtaa

SEQ ID NO: 217931 - DNA, 75 bp, synthetic construct
  source 1..75: mol_type = other DNA
gtgattcagaaaataaatattttagacagtagccagtcaggcgttaaaaatggggcggatagtgaggcggttttg

SEQ ID NO: 217932 - DNA, 75 bp, synthetic construct
  source 1..75: mol_type = other DNA
tactagaaattatttagaagcagtaatcaatggttttgatgactatttaaatagaacattgtacaggaccgtcgc

SEQ ID NO: 217933 - DNA, 75 bp, synthetic construct
  source 1..75: mol_type = other DNA
aatcgtttagtatcaggcttatccctttttgctgtgtcagttgctctttttattattagcatgacagcggtaatg

SEQ ID NO: 217934 - DNA, 75 bp, synthetic construct
  source 1..75: mol_type = other DNA
agcggtttgttgattgggacttgatcctcaagatcagcagtgaattcaccatagtttcggtgccggtgctcctct

SEQ ID NO: 217935 - DNA, 75 bp, synthetic construct
  source 1..75: mol_type = other DNA
caataccaagactattactacccatgtaccgtttgccaatcctgacatagattgcgatgtcaatctctcgcagca

SEQ ID NO: 217936 - DNA, 75 bp, synthetic construct
  source 1..75: mol_type = other DNA
attgttaagagtgcagcaaagcctgcctctatagctaataaagctatctgtggtgatttcaacctgaaagcggga

SEQ ID NO: 217937 - DNA, 75 bp, synthetic construct
  source 1..75: mol_type = other DNA
aaaaaagaggggaaaaagatttttttaggatataaaaaaacgggtagagatttaaaatctgtttttgaattagcg

SEQ ID NO: 217938 - DNA, 75 bp, synthetic construct
  source 1..75: mol_type = other DNA
cagttcggcgggttcaagagcgcgactgttcctgtttggctgtcaggcatcctcaatggtgcataccaatatcgc

SEQ ID NO: 217939 - DNA, 75 bp, synthetic construct
  source 1..75: mol_type = other DNA
ctgagacagttagaacctatttgcgggagttggcggtcaaagagtttgatatcacttatatcgagaatgatttta

SEQ ID NO: 217940 - DNA, 75 bp, synthetic construct
  source 1..75: mol_type = other DNA
gacgagctgggtggaggattgtgcggcatggtgtgctggcggttggcgtattgggcaccctcaactgcgcggatt

SEQ ID NO: 217941 - DNA, 75 bp, synthetic construct
  source 1..75: mol_type = other DNA
acggttcacctgagcacctcaatttgctgacacttcactcagccaaaggttgcgaatatgacgtggttatcatgg

SEQ ID NO: 217942 - DNA, 75 bp, synthetic construct
  source 1..75: mol_type = other DNA
gtttaacgggcatctgggtcacaggtttatggacccggataaaccggcgcctacagtaacaggtcgtggagatga

SEQ ID NO: 217943 - DNA, 75 bp, synthetic construct
  source 1..75: mol_type = other DNA
agtcaggcagcagagccgtataaatatgtcttacagccactgcctgatgtgtggataccgtttaacgattcactg

SEQ ID NO: 217944 - DNA, 75 bp, synthetic construct
  source 1..75: mol_type = other DNA
gttggctgctaagccgggccgaacactgggtgatatcgccattctgtacaaggactaccgtgccggcgatgttgt

SEQ ID NO: 217945 - DNA, 75 bp, synthetic construct
  source 1..75: mol_type = other DNA
cctacttagctcaggctgccgagctggccgggaatccgggccagttatccgcgtatcactcccagggacactgcg

SEQ ID NO: 217946 - DNA, 75 bp, synthetic construct
  source 1..75: mol_type = other DNA
ttaagcctgtccggaaggctggcgataaaggtgattgcagagccaccggataagcgccgccgtgacctggacaac

SEQ ID NO: 217947 - DNA, 75 bp, synthetic construct
  source 1..75: mol_type = other DNA
gcagcgaagaatcaaattgaattattactcaatattgaagatggcaatgaaataagttcagaacatacaaatgtt

SEQ ID NO: 217948 - DNA, 75 bp, synthetic construct
  source 1..75: mol_type = other DNA
acccgatccggctttcagtgagccaaaacctgaaccaaaggagaaatccgtgactgaagaagaaattaaggcgat

SEQ ID NO: 217949 - DNA, 75 bp, synthetic construct
  source 1..75: mol_type = other DNA
tgtatctgcgccacgtgggttttctcggtgcgcagccgcctgccgtaaaaggcttaaagcccgtcgagttcagcg

SEQ ID NO: 217950 - DNA, 75 bp, synthetic construct
  source 1..75: mol_type = other DNA
tcattacggcaaagtgtgggtaaataatcaggaagtgatggagcatcagggcggctatacgccatttgaagccga

SEQ ID NO: 217951 - DNA, 75 bp, synthetic construct
  source 1..75: mol_type = other DNA
tccgggtgtaatctcgctgattatgggggttgttgccctgtttacgattaaagatcgtcctggcacactcggttt

SEQ ID NO: 217952 - DNA, 75 bp, synthetic construct
  source 1..75: mol_type = other DNA
agatttcgctatcatgtcgtcggtcttttacattctttatggctccatgaagtttgtaggtggcatgttagtcga

SEQ ID NO: 217953 - DNA, 75 bp, synthetic construct
  source 1..75: mol_type = other DNA
cagtaaaaaatataatatatattattcagaagatttatcacaagaagaagatttatggttaatgagcttagctaa

SEQ ID NO: 217954 - DNA, 75 bp, synthetic construct
  source 1..75: mol_type = other DNA
tatgtattatgcagcgatgaattcaactgcatgtagattgaccgctttgggagcctattatagaaaactggcaga

SEQ ID NO: 217955 - DNA, 75 bp, synthetic construct
  source 1..75: mol_type = other DNA
attctgaaagcaccgctggatgcgctgacgcatgcgggagtgttaatggacgatgagcagtttgatgaaatcaat

SEQ ID NO: 217956 - DNA, 75 bp, synthetic construct
  source 1..75: mol_type = other DNA
atggcaatgggcgttgctcaggctgtcgcaaacgccggaaaaacgggcaaagtgttggtcgtcggtacagatgga

SEQ ID NO: 217957 - DNA, 75 bp, synthetic construct
  source 1..75: mol_type = other DNA
acgccttggcttccggctatttgtgcgtaagagccagccgctacgctttacaccgcagggagaaatcctgttgca

SEQ ID NO: 217958 - DNA, 75 bp, synthetic construct
  source 1..75: mol_type = other DNA
ctattgctggacgataaacgcatggtgcaggtgatcaacggtcagccgccgcaaatcatcacggcagaaaataac

SEQ ID NO: 217959 - DNA, 75 bp, synthetic construct
  source 1..75: mol_type = other DNA
cattatttatcgtttctgaaaatattaatattcatgctgaacctgatatcgaatattttcgagttatcgataggg

SEQ ID NO: 217960 - DNA, 75 bp, synthetic construct
  source 1..75: mol_type = other DNA
gattattttaccttcaattcaaaatcacatgatcttaatgattgcccatttattccctgtatggacggtttatgc

SEQ ID NO: 217961 - DNA, 75 bp, synthetic construct
  source 1..75: mol_type = other DNA
acagcacctctgattttggcaacatccttcttgatgtcgccaacaaatcgattttgcagggctgggacgaagctg

SEQ ID NO: 217962 - DNA, 75 bp, synthetic construct
  source 1..75: mol_type = other DNA
cggtgcattcaatgccggtgcacaaatcttcgatcgtgaagatgccaatgtggttatttccaccgaaaacgccga

SEQ ID NO: 217963 - DNA, 75 bp, synthetic construct
  source 1..75: mol_type = other DNA
ggagagagagccggacgccccggtcagtaaccgaaccctgatgagtctgctggcgtccggcgaagacctgacatc

SEQ ID NO: 217964 - DNA, 75 bp, synthetic construct
  source 1..75: mol_type = other DNA
actcatgggccattgaaactaacttcttgtgtgaataaacaaaccttgctttcaatgggagggtaccttaatgag

SEQ ID NO: 217965 - DNA, 75 bp, synthetic construct
  source 1..75: mol_type = other DNA
ggagacggtggcgaaccagaccatcaaatcggccagtgtgaaaggggcggatgcaaacgccggtgtcattaaccc

SEQ ID NO: 217966 - DNA, 75 bp, synthetic construct
  source 1..75: mol_type = other DNA
gtggacccgtaagggacgcctgtcagacttcaaaactgcatatcgcgtgggcatgggcggttttggttcgctgcg

SEQ ID NO: 217967 - DNA, 75 bp, synthetic construct
  source 1..75: mol_type = other DNA
tgatggtacacaagccgtggggtgggatcgccggggattccgatgatatgcgtgactacgctgcctggcttgatc

SEQ ID NO: 217968 - DNA, 75 bp, synthetic construct
  source 1..75: mol_type = other DNA
taccactgacggtatcgctacaaaagttcgtatcgatgctggtgtggcgccgcttgattatcgcggcctggtgaa

SEQ ID NO: 217969 - DNA, 75 bp, synthetic construct
  source 1..75: mol_type = other DNA
gaagcgcatcaatggaataagtgaagtgtttagcttgttcggcagtcgttacgacgggatcaaaatggcgtgtct

SEQ ID NO: 217970 - DNA, 75 bp, synthetic construct
  source 1..75: mol_type = other DNA
tttaccagaacgccggaaagcatcatcgcatcgatgaagaaaggcgacacgggatcagcaaacgaaagagagaag

SEQ ID NO: 217971 - DNA, 75 bp, synthetic construct
  source 1..75: mol_type = other DNA
atccgttgcgaagaacgtctggcgctggccgtcaaacgccctgaagcgttcgtgtatggctctttcagcactggc

SEQ ID NO: 217972 - DNA, 75 bp, synthetic construct
  source 1..75: mol_type = other DNA
ccagtaatgttcctattggcaataattgctaaaccttttgtcgttctatttcttggccaacaatgggaacctgtt

SEQ ID NO: 217973 - DNA, 75 bp, synthetic construct
  source 1..75: mol_type = other DNA
ttctaagtgagcgggactcaatcctgtctcttttagaaaccactactgatgatgacattattggcaaaatgagcc

SEQ ID NO: 217974 - DNA, 75 bp, synthetic construct
  source 1..75: mol_type = other DNA
ccacagggcaacctgcgccacattcgcaaagcatttgaggcacgcgacctgctgccgaatctggttccagccggg

SEQ ID NO: 217975 - DNA, 75 bp, synthetic construct
  source 1..75: mol_type = other DNA
gatggtgatattgcgtgctgatattacgtcattagagcgtcagcgaggcttcttacatcgtttgcaggaacttcg

SEQ ID NO: 217976 - DNA, 75 bp, synthetic construct
  source 1..75: mol_type = other DNA
gctcaatattttacaaccttaaatttcacctattcatctctaatataatgtatttttctttaatagctaaggatg

SEQ ID NO: 217977 - DNA, 75 bp, synthetic construct
  source 1..75: mol_type = other DNA
agaaattgctgaacgaagcagaaaatcaatacctgttttagatgatattgaaaaggatatcatacgaatttccag

SEQ ID NO: 217978 - DNA, 75 bp, synthetic construct
  source 1..75: mol_type = other DNA
atttagaagacgcaagaaccatattaccaacttcacgttgcccgggccttgaagaatatgatgctcgcaccccac

SEQ ID NO: 217979 - DNA, 75 bp, synthetic construct
  source 1..75: mol_type = other DNA
atcttaagcaaatacacgcagataaatattcagtaattacgattaatcatcttgatgaggtatcgattatctcaa

SEQ ID NO: 217980 - DNA, 75 bp, synthetic construct
  source 1..75: mol_type = other DNA
gcgactgaacttaacgccatgcgcgaggcagaaaaggccctcaaagccgcgctcggcgaactggagcagcacgta

SEQ ID NO: 217981 - DNA, 75 bp, synthetic construct
  source 1..75: mol_type = other DNA
cggcagtgccttataaacatggcaataaagatttgaatgccggaaccttcagtgcttcggtcacaatgagcatca

SEQ ID NO: 217982 - DNA, 75 bp, synthetic construct
  source 1..75: mol_type = other DNA
ttgggctctattattttccttttatcagatggctcgcaatatgtaacaggtcagaacatcgttgttgatgatgga

SEQ ID NO: 217983 - DNA, 75 bp, synthetic construct
  source 1..75: mol_type = other DNA
aaatattttgaatacaacaggtgtaaatgcttcatctttggggatcgccttatatcaaggggatgctgtggactc

SEQ ID NO: 217984 - DNA, 75 bp, synthetic construct
  source 1..75: mol_type = other DNA
tttcagaagaattttgggtgacggggatgatgagggggtatttaaggcagagacacttctcatccgtgaactggg

SEQ ID NO: 217985 - DNA, 75 bp, synthetic construct
  source 1..75: mol_type = other DNA
agcatagcgcatgtcagacttgcatgctctaatgcatcaagtaagtcagtaacaatatcaataagcagaaacaac

SEQ ID NO: 217986 - DNA, 75 bp, synthetic construct
  source 1..75: mol_type = other DNA
atgaaaccccttgagaatgaatcattggttaatgatatcagtctgttacatccgggactgctggtcactgaatgc

SEQ ID NO: 217987 - DNA, 75 bp, synthetic construct
  source 1..75: mol_type = other DNA
gcacacgcaatggctatccatacgctcacaatggcgacttacctttggttgtatagcgatttcggcttacagcca

SEQ ID NO: 217988 - DNA, 75 bp, synthetic construct
  source 1..75: mol_type = other DNA
aaatgctggaagaggcagcgattaacagcctggctattgcagacactaaggaattaatgacgttcaccaagcgcc

SEQ ID NO: 217989 - DNA, 75 bp, synthetic construct
  source 1..75: mol_type = other DNA
tggctggagggctggattgccagtcaacaaggatggcgcattgatgtcctcgcccactcgctcaatcaactacgc

SEQ ID NO: 217990 - DNA, 75 bp, synthetic construct
  source 1..75: mol_type = other DNA
gcccgcagcggccgcaacaggtgggggcggtgcgacctctggtatcggcgcgagcactggcggccaaacggcggt

SEQ ID NO: 217991 - DNA, 75 bp, synthetic construct
  source 1..75: mol_type = other DNA
ttgtcctagcgagcgtgcttgtcgccggaaatgctatggctgcgaacgacctgtcccacgccgatacatcggttc

SEQ ID NO: 217992 - DNA, 75 bp, synthetic construct
  source 1..75: mol_type = other DNA
tggaggcagcgctggagctggcacggctgatggggttacgttcacaggaagcagtacgctgttccggttcactaa

SEQ ID NO: 217993 - DNA, 75 bp, synthetic construct
  source 1..75: mol_type = other DNA
gcttgcgatccattgtcttatctgggctgcaatgacgcgctgatcgaagaaaccgtcatagccttcgacgattac

SEQ ID NO: 217994 - DNA, 75 bp, synthetic construct
  source 1..75: mol_type = other DNA
tccgagctaacccgccaccttcagcgcctggatcgcctctacccggcagcgactaccggcctgtttggtggcgcg

SEQ ID NO: 217995 - DNA, 75 bp, synthetic construct
  source 1..75: mol_type = other DNA
tgggtctgatcatgcaggtttccgcagaatggtcggcagcctacaccaacgacgaagcgtcgttgatgaccctgg

SEQ ID NO: 217996 - DNA, 75 bp, synthetic construct
  source 1..75: mol_type = other DNA
aacgggattagcccctctacgcacaggaaacttgcagagtttgtcgctgagcgattccaaagaacccttataggg

SEQ ID NO: 217997 - DNA, 75 bp, synthetic construct
  source 1..75: mol_type = other DNA
aacctgccggatctgctgcaggctgtccggcagcacacagcagatcagcgcgattctgtgctcattatttatggt

SEQ ID NO: 217998 - DNA, 75 bp, synthetic construct
  source 1..75: mol_type = other DNA
tggcgcgcgccggatatgctgaagcagaaaaagacaatgcctataacggctttacactgcgtgaactggcgcgtg

SEQ ID NO: 217999 - DNA, 75 bp, synthetic construct
  source 1..75: mol_type = other DNA
tacggttgatggtgcagcattcaaggtgcgcattgatgccggagtggcaccgcttgactggcgtggcatggtcaa

SEQ ID NO: 218000 - DNA, 75 bp, synthetic construct
  source 1..75: mol_type = other DNA
accgacggcgatggagtctgttgctaaccaggtcattcgctcctcaagtgtcaagggggctgacattaacgccgg

SEQ ID NO: 218001 - DNA, 75 bp, synthetic construct
  source 1..75: mol_type = other DNA
tgctgaccgatgtcccgatgaaactgggccgtgcggcgaaatccactattgccgatctggtttatgccattctga

SEQ ID NO: 218002 - DNA, 75 bp, synthetic construct
  source 1..75: mol_type = other DNA
ccgcagcctcaaaactcagtaaaggtggcggtgtgagcaaccgtagcatccgcgaccgtctggccagcgcagcaa

SEQ ID NO: 218003 - DNA, 75 bp, synthetic construct
  source 1..75: mol_type = other DNA
acaaaacgctatatctcctcaattatattgatgatgaagattatcgtcggcggatcctgacgcagctcaatcgag

SEQ ID NO: 218004 - DNA, 75 bp, synthetic construct
  source 1..75: mol_type = other DNA
ttcaacttctctatgttttggaaaaatagaatactgaggttattcccggcatatatattttttctcgtcatgggc

SEQ ID NO: 218005 - DNA, 75 bp, synthetic construct
  source 1..75: mol_type = other DNA
cgaggcagactatacacaaaaactttctgagaaggagttgaaggcgttcatccttaaaggacggtgtgcaattct

SEQ ID NO: 218006 - DNA, 75 bp, synthetic construct
  source 1..75: mol_type = other DNA
ggcgattccattcgtgcggctgtgatggcacgcgccggatatgccgaagcagaaaaagataatgcttataacggt

SEQ ID NO: 218007 - DNA, 75 bp, synthetic construct
  source 1..75: mol_type = other DNA
gtcgcgggatgacgattaatccccgcgccagccttgcgggtgtcgatgccgcaaacggtcagtgctggtacgaaa

SEQ ID NO: 218008 - DNA, 75 bp, synthetic construct
  source 1..75: mol_type = other DNA
tattcctcgttatgaaagtggatacaaaagtgataagacgttgctgactgctatccgagattatatatggggaag

SEQ ID NO: 218009 - DNA, 75 bp, synthetic construct
  source 1..75: mol_type = other DNA
cggcgaacacgctgcgggcgagggtgaccgatgcgttcggcaatgcgcttgccgggcagacggtcagcgtgttgg

SEQ ID NO: 218010 - DNA, 75 bp, synthetic construct
  source 1..75: mol_type = other DNA
cacctaaaaaactaaaggatgccgcaaaaaaaggacagtcatttaaatttaaggatttaacgactgttgttatta

SEQ ID NO: 218011 - DNA, 75 bp, synthetic construct
  source 1..75: mol_type = other DNA
gagatagcactggatcgtgttccggcgaacgtcagtaaaattgcgatcaccgttgtcattgaaccgccccgggtt

SEQ ID NO: 218012 - DNA, 75 bp, synthetic construct
  source 1..75: mol_type = other DNA
agaatggaggatattgggatcatatgcaggaaatgcaaaatacgctcagaggattaagaaatcatgcggatacgt

SEQ ID NO: 218013 - DNA, 75 bp, synthetic construct
  source 1..75: mol_type = other DNA
cagcaccacggcagcggcattgtggtacagggcgcgtttaatcacttcccgggggatggacttccgtgcggttga

SEQ ID NO: 218014 - DNA, 75 bp, synthetic construct
  source 1..75: mol_type = other DNA
aatatttgactctctaatattgaataatccgggactagcattagatataacaatgatagtttctcgtggaaatgt

SEQ ID NO: 218015 - DNA, 75 bp, synthetic construct
  source 1..75: mol_type = other DNA
ccggaggttaaatcacgccggcgggagatccatatggatattttatctgagcaaataaaatcagatattgataat

SEQ ID NO: 218016 - DNA, 75 bp, synthetic construct
  source 1..75: mol_type = other DNA
ccaaggcgcggaaggcctctacaccgacgctgacctgcaaatggctggttacgcagccgcgttgaaagtactgac

SEQ ID NO: 218017 - DNA, 75 bp, synthetic construct
  source 1..75: mol_type = other DNA
gtattattgaaaatatgggcagtgaaaaatatctttactttaccgttaacaacaaagagtttattgcaaaagtca

SEQ ID NO: 218018 - DNA, 69 bp, synthetic construct
  source 1..69: mol_type = other DNA
atgcagaatgaaataatgggttttctgagcagacataatgtagggaaaaccgcagaaattgcggaggcg

SEQ ID NO: 218019 - DNA, 75 bp, synthetic construct
  source 1..75: mol_type = other DNA
gcggctaattttttgtctgataatagatgtagttcaaatattctttcatggatagcatgctatgttttgggattg

SEQ ID NO: 218020 - DNA, 75 bp, synthetic construct
  source 1..75: mol_type = other DNA
ggaaccgcccgcgcgcttgatgcgtttattgaggggatgacgctgcattttgtcaccgaccgtaagccgctatcg

SEQ ID NO: 218021 - DNA, 75 bp, synthetic construct
  source 1..75: mol_type = other DNA
taatgaatttgacgctatgtcagttagacatttttcttctgtagatgatggaactccttcgaatccatcaggcaa

SEQ ID NO: 218022 - DNA, 75 bp, synthetic construct
  source 1..75: mol_type = other DNA
gcgccgggcagctttatacgggctggactccattcatgatgccaatattttaaaactggcagaatggggattatc

SEQ ID NO: 218023 - DNA, 75 bp, synthetic construct
  source 1..75: mol_type = other DNA
tagaattaattcataagttaaaaatggctgggcttgctcttgttgattctgagttatattatcagttacttgagg

SEQ ID NO: 218024 - DNA, 75 bp, synthetic construct
  source 1..75: mol_type = other DNA
ggtgtgaagataggaacaaaagcgatagattactctaaatataataagataccacttgtttatgcacaatcatgg

SEQ ID NO: 218025 - DNA, 75 bp, synthetic construct
  source 1..75: mol_type = other DNA
ttcaatgcatccgttattaaaaatattcaagagtacacaaatcaggaagtaattgttattggaagccacccggca

SEQ ID NO: 218026 - DNA, 75 bp, synthetic construct
  source 1..75: mol_type = other DNA
tcattgttagaagcgttggcgacattctaaaagacattcctacaaataaatattttggtgcgaaatgtgatggtg

SEQ ID NO: 218027 - DNA, 75 bp, synthetic construct
  source 1..75: mol_type = other DNA
atcaaaggcccactgctggggaatgtcatcaccagatagaaccactcgtaatatgttattcggccttaaaatgag

SEQ ID NO: 218028 - DNA, 75 bp, synthetic construct
  source 1..75: mol_type = other DNA
agcgaagctatcgatttagatatgaacattaccccatttttggggaatcggatggatgctatcattgtgttttac

SEQ ID NO: 218029 - DNA, 75 bp, synthetic construct
  source 1..75: mol_type = other DNA
cgcagcagctcctggaggcgcatttcccggccagtattcaggaagagatagctgacgagataggttttgatattc

SEQ ID NO: 218030 - DNA, 75 bp, synthetic construct
  source 1..75: mol_type = other DNA
agttcgccacagcaatccgaaaccactggcacgtggagaataagctgcactggcgtctggacggtgtgccgcagg

SEQ ID NO: 218031 - DNA, 75 bp, synthetic construct
  source 1..75: mol_type = other DNA
actctcccgcgcagtattacaaacgctgattgaatatggctactttaatgatgaatcttcgctgcttttaatact

SEQ ID NO: 218032 - DNA, 75 bp, synthetic construct
  source 1..75: mol_type = other DNA
ctgatgaaacagactgcggatattctgatgccggtaaaacatttgctgccggataatttccatattggtatcaac

SEQ ID NO: 218033 - DNA, 75 bp, synthetic construct
  source 1..75: mol_type = other DNA
gctgaaaaatgagagcctgagccactatcgttttaataaccgggatgatgccatctcagtaatacgggaatacat

SEQ ID NO: 218034 - DNA, 75 bp, synthetic construct
  source 1..75: mol_type = other DNA
tcccctggcagagtgttcagaagaaaatccagttccataccgcgcgggcaacagagaccaccgagtcacggacgg

SEQ ID NO: 218035 - DNA, 75 bp, synthetic construct
  source 1..75: mol_type = other DNA
gcatctatagcctcctacttgtttagtttgttgcctttttctcgtatcaatctcgttttgttatgtggcggaata

SEQ ID NO: 218036 - DNA, 75 bp, synthetic construct
  source 1..75: mol_type = other DNA
ccggcgaagtgctaccggttgtcgtggataagcacaaccacctttgggacgccgtgcgctattcgcttgatggat

SEQ ID NO: 218037 - DNA, 75 bp, synthetic construct
  source 1..75: mol_type = other DNA
gtggcctggcagcgttgaggacggaatcacatacctgaaagggtttgaagagatcattatccatgagcgctgcaa

SEQ ID NO: 218038 - DNA, 75 bp, synthetic construct
  source 1..75: mol_type = other DNA
gaatacagtgattaaagaaggcactattattggcaatgatgttatcatagattctaataactccatcggtaatta

SEQ ID NO: 218039 - DNA, 75 bp, synthetic construct
  source 1..75: mol_type = other DNA
ggtcggattgtgatgccgggaattgtctgctcgcacaaccatttttactcggggctttcccgcggaattatggca

SEQ ID NO: 218040 - DNA, 75 bp, synthetic construct
  source 1..75: mol_type = other DNA
aaccttgatgggcgaatttaaaccactgaaaacaccagtccccacggctgaaagctcgattactgcggcactcag

SEQ ID NO: 218041 - DNA, 75 bp, synthetic construct
  source 1..75: mol_type = other DNA
gtgcgttaaaacccagagaaaagacgtatcgcttaggtgatgcaggagggttgtacgttgaagtagcaaccaatg

SEQ ID NO: 218042 - DNA, 75 bp, synthetic construct
  source 1..75: mol_type = other DNA
actttacgtaaaatggagaaacgtggagcgttggagaaaatgcgtaaagttcgtcaacgctgtggagaagtattc

SEQ ID NO: 218043 - DNA, 75 bp, synthetic construct
  source 1..75: mol_type = other DNA
acacagccaagcccaaagagaagccgtacaagttatctgatggtggaggcctctaccttgaagtaaccaccaacg

SEQ ID NO: 218044 - DNA, 75 bp, synthetic construct
  source 1..75: mol_type = other DNA
cgatatgcaattgtcactggtagggctgactacaaccccgcccccgatcttgccagcgctttagctacgccgaaa

SEQ ID NO: 218045 - DNA, 75 bp, synthetic construct
  source 1..75: mol_type = other DNA
aaacagccaaacccaaagataaaatttataaaattgccgatggtggtgggctctacctgcaggtcaatcctaacg

SEQ ID NO: 218046 - DNA, 75 bp, synthetic construct
  source 1..75: mol_type = other DNA
aacgagcaaagccccaagacaagccatacacattgaacgacgggcaaggcctgtcattgcttatcaatcccgatg

SEQ ID NO: 218047 - DNA, 75 bp, synthetic construct
  source 1..75: mol_type = other DNA
cggcgaatctcccaggacatcagtacccgtgatgaaggcggtggcggaaaggtcgtggttatcgggcggcaggca

SEQ ID NO: 218048 - DNA, 75 bp, synthetic construct
  source 1..75: mol_type = other DNA
gccgaagccatggtcagaagccgtgaagagaatgaatttacggactggttctccctctggggaccatggcatgct

SEQ ID NO: 218049 - DNA, 75 bp, synthetic construct
  source 1..75: mol_type = other DNA
cacagatatggcatgcttttgaacatgaagagcacgccaacaccttttccgcgttccttgaccgcctttccgata

SEQ ID NO: 218050 - DNA, 75 bp, synthetic construct
  source 1..75: mol_type = other DNA
ttgatggcaggacgcaacgttaccagtatgacctgaccggaaaactcacgcagagtgaagatgaggggcttatca

SEQ ID NO: 218051 - DNA, 75 bp, synthetic construct
  source 1..75: mol_type = other DNA
taaccaaggaggccagcaatgttcagcagacagttagccatatgcctgatgacgatgttgatcgtgagctgcgcg

SEQ ID NO: 218052 - DNA, 75 bp, synthetic construct
  source 1..75: mol_type = other DNA
tccttgcagctgttttagctgctatagccgccgcatttggattaggccattcgcgcggcaccagcaaagccgaag

SEQ ID NO: 218053 - DNA, 75 bp, synthetic construct
  source 1..75: mol_type = other DNA
cgggtagaaacaacaaaaggagcctgggatgtacagcagattgttaatcatcttcctgatggcgatgttgaccgt

SEQ ID NO: 218054 - DNA, 75 bp, synthetic construct
  source 1..75: mol_type = other DNA
tcttcaaataagcttaattagtaaagtcatcacgtcatttaaaatcctgtttccgctccatggtggtaactcgta

SEQ ID NO: 218055 - DNA, 75 bp, synthetic construct
  source 1..75: mol_type = other DNA
ttacagcacgcagatccgcgccacaggcgtgggaaccgccgtcgcagtcgggcgtctgggggcgatgagcggtcc

SEQ ID NO: 218056 - DNA, 75 bp, synthetic construct
  source 1..75: mol_type = other DNA
ggcgctgtctctcggttttggcgatggcgtgaacggctcaatgcaggcgctgctaccatgcgaatcccccgcagc

SEQ ID NO: 218057 - DNA, 75 bp, synthetic construct
  source 1..75: mol_type = other DNA
tggccatgaatggcgtcggatgtcgcgccagtgcacgcattattggcgttggcctcaacacgattttccgccatt

SEQ ID NO: 218058 - DNA, 75 bp, synthetic construct
  source 1..75: mol_type = other DNA
atattattgaacctgtcaaattaaagtatacagacaaatacatatccaccaggcatattcacatgctatgcaatc

SEQ ID NO: 218059 - DNA, 75 bp, synthetic construct
  source 1..75: mol_type = other DNA
gctgcgacgccatggagtggcttgcagagcattacccaaccttcccggacaggatgccagatgtgccgcttaagg

SEQ ID NO: 218060 - DNA, 75 bp, synthetic construct
  source 1..75: mol_type = other DNA
agctattcaaaattgcactggcatcgctggaagcagaaccgatagcgtgggaatacggtgaaaacataatcctgt

SEQ ID NO: 218061 - DNA, 75 bp, synthetic construct
  source 1..75: mol_type = other DNA
taagtcaatggaaaacctgtatttggtattacataatcagggaataacattagaaaacgaacatatgaaaataga

SEQ ID NO: 218062 - DNA, 75 bp, synthetic construct
  source 1..75: mol_type = other DNA
gcagtcagggtgtgtcaatgaagctggttcataacggtaacccgaatcgcacgctggcgatgatctttgaaacgt

SEQ ID NO: 218063 - DNA, 75 bp, synthetic construct
  source 1..75: mol_type = other DNA
ttttatgaatataagccgggtgactggtatcagcgttcggtcggggacaaagcaccaaagtgggtgccgttatat

SEQ ID NO: 218064 - DNA, 75 bp, synthetic construct
  source 1..75: mol_type = other DNA
ttttatgaatacaaaccgggtgactggtatcagcgttcggtcgggataaagcgccaaagtgggtgccgttatatg

SEQ ID NO: 218065 - DNA, 75 bp, synthetic construct
  source 1..75: mol_type = other DNA
ttttatgaatacaaaccgggtgactggtatcagcgttcggtcggggataaagcgccaaagtgggtgccgttatat

SEQ ID NO: 218066 - DNA, 75 bp, synthetic construct
  source 1..75: mol_type = other DNA
caatctggcgataccgcgtgtgggtcaggaagtgatagtggactttctgaacggcgacccggaccagcccattgt

SEQ ID NO: 218067 - DNA, 75 bp, synthetic construct
  source 1..75: mol_type = other DNA
acctgttcgatgaaatgcatcctgcgcgggagttttgcgtgcagtacggcgaaaccgactatgagtttctctgcc

SEQ ID NO: 218068 - DNA, 75 bp, synthetic construct
  source 1..75: mol_type = other DNA
aaatgaatttcaggcgatacccgcagataaaacctggcgctcttcaccgctacccaaaccgaaagtggatggtcc

SEQ ID NO: 218069 - DNA, 75 bp, synthetic construct
  source 1..75: mol_type = other DNA
gcgatgatctttgaaacgtaccagccgggcacaaccactggggaaagaattaagcatcagggtgaggaaataggc

SEQ ID NO: 218070 - DNA, 75 bp, synthetic construct
  source 1..75: mol_type = other DNA
cagccctggcaagttttaccgtgcacgcacagcccccctcacagaccgtagaacaaacagtccggcatatttatc

SEQ ID NO: 218071 - DNA, 75 bp, synthetic construct
  source 1..75: mol_type = other DNA
gcacgcggacgcagatgaccatccgctcgaagacctataaaggaagcggctttaatgaactgcgtttcgaggatg

SEQ ID NO: 218072 - DNA, 75 bp, synthetic construct
  source 1..75: mol_type = other DNA
aggtgctggataccggtagtggtattcctgactacgcgctttcacgtatttttgaacgcttttactctttgcctc

SEQ ID NO: 218073 - DNA, 75 bp, synthetic construct
  source 1..75: mol_type = other DNA
gaaaaatccagtcctgccggcgagaaatggcaggactggtctgacagctacgcgaaaaccagacacagcaaccag

SEQ ID NO: 218074 - DNA, 75 bp, synthetic construct
  source 1..75: mol_type = other DNA
gagaaaaccagtccgggcggcgaacgctggccggactggtctgacgggtacaaaaagacccgccacggcaaccag

SEQ ID NO: 218075 - DNA, 75 bp, synthetic construct
  source 1..75: mol_type = other DNA
aataaaccaaattggtcagttgcagagtgacaatgcccctattaaagcctcgcttctttctgttactggtgacaa

SEQ ID NO: 218076 - DNA, 75 bp, synthetic construct
  source 1..75: mol_type = other DNA
gaagggagcgaagacggtcacggtgtggtgttcccggctgaactggtggggctgctggacaggctggagggggaa

SEQ ID NO: 218077 - DNA, 75 bp, synthetic construct
  source 1..75: mol_type = other DNA
agcttcgcgccgctcatccgcatcgaaacagacaacggtgaacgggagaaagcgcagtgccgcagcctggcggag

SEQ ID NO: 218078 - DNA, 75 bp, synthetic construct
  source 1..75: mol_type = other DNA
ttgctgctttttttattactgcctgtgaccagaaacctgatcctaaaagagaggattgcagtaaaccagtggcaa

SEQ ID NO: 218079 - DNA, 75 bp, synthetic construct
  source 1..75: mol_type = other DNA
cgatcataacttacctaccgcctttaccgttgatgaagaagacggcgagattgttcgtagcctgaaaatccgcca

SEQ ID NO: 218080 - DNA, 75 bp, synthetic construct
  source 1..75: mol_type = other DNA
ctaagctgtaatccagttgagcagacattaataaaatatattaaaattgagagttttgaggatactcttaacaat

SEQ ID NO: 218081 - DNA, 75 bp, synthetic construct
  source 1..75: mol_type = other DNA
cacctcacctggtgtatatccgcactcgcgaaacatatggaacccggcggctccagacggagctggcagataacg

SEQ ID NO: 218082 - DNA, 75 bp, synthetic construct
  source 1..75: mol_type = other DNA
tcttgataatcagtctccttatacaggacatgtcgatataaattacatccatgtatatgctgtgtattatggcta

SEQ ID NO: 218083 - DNA, 75 bp, synthetic construct
  source 1..75: mol_type = other DNA
gggctttcttctgattgcactggatttaacagcattggcacatgtgcatcagagaatataagattaatcacttca

SEQ ID NO: 218084 - DNA, 75 bp, synthetic construct
  source 1..75: mol_type = other DNA
gtgcataccagtgacgtacctagggggcctaaaagccttcatccagcagttcctcaccggggagcagagcttctt

SEQ ID NO: 218085 - DNA, 75 bp, synthetic construct
  source 1..75: mol_type = other DNA
ccgtaggcgagctaaacagccattacataagggaatgtattgtttttatcaaaacctcgttagaacgcgttttag

SEQ ID NO: 218086 - DNA, 75 bp, synthetic construct
  source 1..75: mol_type = other DNA
cccaccactaccactacgacagccagcaccgtctggtgttctacacgcggatacagcatggcgagccactggtcg

SEQ ID NO: 218087 - DNA, 75 bp, synthetic construct
  source 1..75: mol_type = other DNA
gttcaccgcgaggaaggtatcagcctttaccgccactatgacaaccgtggccggttaacctcggtgaaagacgca

SEQ ID NO: 218088 - DNA, 75 bp, synthetic construct
  source 1..75: mol_type = other DNA
gccatgcctgcaacggtgtttcctcgcggcagggtgctttttggtatgacccggcatctgatggataacgtcgcc

SEQ ID NO: 218089 - DNA, 75 bp, synthetic construct
  source 1..75: mol_type = other DNA
cagtgtaaagcaacatggcaactggtggatggtcaggtccagatggtgcctgaagataaatatattcacgaagcc

SEQ ID NO: 218090 - DNA, 75 bp, synthetic construct
  source 1..75: mol_type = other DNA
attgtgttgaatgccgatactggcctgatcggtatgccgcaacaaacgatgggcggcggagtaaacgtgcggtgc

SEQ ID NO: 218091 - DNA, 75 bp, synthetic construct
  source 1..75: mol_type = other DNA
tagagaaaggatatgaatggaaattcaataatttatcagtcgtagccccagaggatcaacttgggacttctgcta

SEQ ID NO: 218092 - DNA, 75 bp, synthetic construct
  source 1..75: mol_type = other DNA
ggaactacttattggcattagaagtaagttttttttctctctaatatgtataataattttgtctttatattgtaa

SEQ ID NO: 218093 - DNA, 75 bp, synthetic construct
  source 1..75: mol_type = other DNA
ccgttcttatctatctgtttaattgctgtaatgattttcttttatataaaaagagcgtcatttatttcgctacaa

SEQ ID NO: 218094 - DNA, 75 bp, synthetic construct
  source 1..75: mol_type = other DNA
cgataatcacaagtcaggaaatataagtaatgggtatataaagaaattaaaaaacaaaaggatatataaattttt

SEQ ID NO: 218095 - DNA, 75 bp, synthetic construct
  source 1..75: mol_type = other DNA
gtgaagccaccggcacctccggcgtgggcaatgatgccgccgtcgaactctctccggttgctggacgaaacgttc

SEQ ID NO: 218096 - DNA, 75 bp, synthetic construct
  source 1..75: mol_type = other DNA
ggcttcagtattccgcaccgcgctgtcgaacaacgatatcgcgatggtcggcgggcagatcaccgaccagaacac

SEQ ID NO: 218097 - DNA, 75 bp, synthetic construct
  source 1..75: mol_type = other DNA
ggcaaagcgccgcaggggcgctggtggagtggacgcttcaggagtccggggcaagcgcaaatctttttaacaagg

SEQ ID NO: 218098 - DNA, 75 bp, synthetic construct
  source 1..75: mol_type = other DNA
ccagcaatctgggagaaaccggggcggcatccgggccactgacactggcctatctgaatgaaatgatgtgtcgat

SEQ ID NO: 218099 - DNA, 75 bp, synthetic construct
  source 1..75: mol_type = other DNA
caatatattgcagaattaacgtagatactgttatggcctgcaagttttttcctggtccggtttcccggattgcag

SEQ ID NO: 218100 - DNA, 75 bp, synthetic construct
  source 1..75: mol_type = other DNA
cgttttacactgactgagcaccctgccgatgatctgaaccgggactggcaggtagtggcaagtgaactgcatggc

SEQ ID NO: 218101 - DNA, 75 bp, synthetic construct
  source 1..75: mol_type = other DNA
gatccagggcgtgaaggatgaaacggtaaatacgaagattttttcgcagaccaataaatacattatgcacgccgg

SEQ ID NO: 218102 - DNA, 75 bp, synthetic construct
  source 1..75: mol_type = other DNA
cgaaattcttccgcctggtgctgccgtgggaactttaactgccacagctgctgaagaattaggattaacgaccaa

SEQ ID NO: 218103 - DNA, 75 bp, synthetic construct
  source 1..75: mol_type = other DNA
ttccctgacagggtgatgccacgcggtcgcgtcttcttcggcgcaacgcgcgactacatgagcaacctagcggcg

SEQ ID NO: 218104 - DNA, 75 bp, synthetic construct
  source 1..75: mol_type = other DNA
ggcttcagtgtatcgtaccgcgttgtcgaacaacgatatcgcgatggccggtgggcagatcaccgaccagaacac

SEQ ID NO: 218105 - DNA, 75 bp, synthetic construct
  source 1..75: mol_type = other DNA
tcgagctgcagctcgtggacgagaacgggcagggtattgagctcagcgattttaaagtgacctttacgatcgact

SEQ ID NO: 218106 - DNA, 75 bp, synthetic construct
  source 1..75: mol_type = other DNA
gttctgtgatagcctgataaaattgagtgggtgtaatatgtatcccttcttgctgtgctatgggcgtaacacgat

SEQ ID NO: 218107 - DNA, 75 bp, synthetic construct
  source 1..75: mol_type = other DNA
tgtctggcgctgtatcacgaaactccgcgtctctctaacgtttcacaatcgcaaaatgatctcatgacccgcgat

SEQ ID NO: 218108 - DNA, 75 bp, synthetic construct
  source 1..75: mol_type = other DNA
acgggcttattcagttgaaccaggactcggtgtatcgctcgcaattaccgaacgatgagatccaaagatcacagg

SEQ ID NO: 218109 - DNA, 75 bp, synthetic construct
  source 1..75: mol_type = other DNA
tctcaaaggaaagcgttaatcaggttattgagttattgggatataaaggaaggctgacaggacatggtttccgcc

SEQ ID NO: 218110 - DNA, 75 bp, synthetic construct
  source 1..75: mol_type = other DNA
tggcaggtaccgcttatgtcaccgtaaacggggtgaccgttatggtggagggctcattcaagtatcagacctcca

SEQ ID NO: 218111 - DNA, 75 bp, synthetic construct
  source 1..75: mol_type = other DNA
cacctctaacatgaaccgacgccacaagctcgccctgcacttactgatcatctgcatggtgcgtaaatcggagat

SEQ ID NO: 218112 - DNA, 75 bp, synthetic construct
  source 1..75: mol_type = other DNA
agccgaaacgaccaccgacgcccgatctccaaaacaacgctgaactgtgcggtgcgtacgttggatctgaacgtc

SEQ ID NO: 218113 - DNA, 75 bp, synthetic construct
  source 1..75: mol_type = other DNA
aaattaatgccctgcacgggacgttactggagtttggtgaaaccatccataaaggccgggcagcgatggagcggg

SEQ ID NO: 218114 - DNA, 75 bp, synthetic construct
  source 1..75: mol_type = other DNA
caacggacagatttcactgggatttcaggccagctatccagcatggctgcaagcgcagcagcttggtttaaccag

SEQ ID NO: 218115 - DNA, 75 bp, synthetic construct
  source 1..75: mol_type = other DNA
ttgaagccatgtttcagcaggcgtttacggaaagtggcgtggcaaccgggcgtccgacggcaaaagcgtgggtag

SEQ ID NO: 218116 - DNA, 75 bp, synthetic construct
  source 1..75: mol_type = other DNA
gagagtatctccagccatccgggcgttgccgaagtggcggtggttggggtgaaagatgcgctgaaagggcaggtg

SEQ ID NO: 218117 - DNA, 75 bp, synthetic construct
  source 1..75: mol_type = other DNA
aaatacttgagttctttacctattcatcctgttaaacaaccaagagatttgtgtggtgaaaaacagcttgaattt

SEQ ID NO: 218118 - DNA, 75 bp, synthetic construct
  source 1..75: mol_type = other DNA
agataattacttgagttctttacctattcatcctgttgaacaaccaggatatttgtgtgatggaaaacagcttga

SEQ ID NO: 218119 - DNA, 75 bp, synthetic construct
  source 1..75: mol_type = other DNA
gatgcgccgggtgatatcaccctaggccagtgccggatacctgcggccagactgcaggatactgagaaactacag

SEQ ID NO: 218120 - DNA, 75 bp, synthetic construct
  source 1..75: mol_type = other DNA
cggacacaatatgaagagccgctggtcgaaagtcgctatctttacgacccgctgggccgcagggtggcaaaacgg

SEQ ID NO: 218121 - DNA, 75 bp, synthetic construct
  source 1..75: mol_type = other DNA
accatgacgtggagccgttacggtcagttgctgagcttcaccgactgttccggttatgtaacccgctatgaccat

SEQ ID NO: 218122 - DNA, 75 bp, synthetic construct
  source 1..75: mol_type = other DNA
cccttcagcgccagcgagcgccgcgccgccgaacgcgcgatgcgcaatctggatcccgctctctgccaacaggtg

SEQ ID NO: 218123 - DNA, 75 bp, synthetic construct
  source 1..75: mol_type = other DNA
acatcgcattttgatagtcgtcacgattggaatactttcattgcattggtcaggctgatgaatgccattcgtaat

SEQ ID NO: 218124 - DNA, 75 bp, synthetic construct
  source 1..75: mol_type = other DNA
cgctgcaatcattgaccgatctgatgtttaattcagtgtttgccagcgtaaataatctctaccatcgaccacagc

SEQ ID NO: 218125 - DNA, 75 bp, synthetic construct
  source 1..75: mol_type = other DNA
gtggatcactattgcaccgttcgtgacaacaaaaggggtaagctgaaatcgtttatggattacatcgacatatgc

SEQ ID NO: 218126 - DNA, 75 bp, synthetic construct
  source 1..75: mol_type = other DNA
tacaccgtaagagctggaaaaaccggacagaagtggaactggccacactaacgtgggtggactggtataacaatc

SEQ ID NO: 218127 - DNA, 75 bp, synthetic construct
  source 1..75: mol_type = other DNA
tctatggaaacgacattcgtgctggatgcactggagcaggcgttgtgggcccgtcggccgtccggcacagtccat

SEQ ID NO: 218128 - DNA, 75 bp, synthetic construct
  source 1..75: mol_type = other DNA
tggaaacgacattcgtgctggatgcgctggagcaggcgttgtgggcccgtcgtccgtctggcaccatccatcaca

SEQ ID NO: 218129 - DNA, 75 bp, synthetic construct
  source 1..75: mol_type = other DNA
cgcgccgaacgcggaaatcggcaagatcaaaaacgatctcaagcagttgccgaatgcgctcggtcatctggtacg

SEQ ID NO: 218130 - DNA, 75 bp, synthetic construct
  source 1..75: mol_type = other DNA
cggtcatctggtgcgtacatgggaagagaaaggtcgccagctcggtgaacaggccagccagtggccgatgattta

SEQ ID NO: 218131 - DNA, 75 bp, synthetic construct
  source 1..75: mol_type = other DNA
ttaatgaccacacaccgtttatcagtgagcagacgaaacaatggctggcagcttcgcccgacgccaaagttgcac

SEQ ID NO: 218132 - DNA, 75 bp, synthetic construct
  source 1..75: mol_type = other DNA
atgaccgccaacgactggattcttccttggtttatgttggtgcgcataatgtatattatgttaaatatggtgggt

SEQ ID NO: 218133 - DNA, 75 bp, synthetic construct
  source 1..75: mol_type = other DNA
atgaccgccaacgactggattcttccttggtttatactggtgcgcataatgtatattatgttaaatttagtccgt

SEQ ID NO: 218134 - DNA, 75 bp, synthetic construct
  source 1..75: mol_type = other DNA
ttacctggacgcacggctgcgtgattgagagcggagagttccgccatggcccgctggagattgtcgaaccgggcg

SEQ ID NO: 218135 - DNA, 75 bp, synthetic construct
  source 1..75: mol_type = other DNA
ggcgtcgatcataatgcgcacacggaagccaatggctcacgtattgagaatgacgcaaataacaacatccagacc

SEQ ID NO: 218136 - DNA, 75 bp, synthetic construct
  source 1..75: mol_type = other DNA
gccgatgacatcagtaaaaaaggcgcatacattgactcctgggcgcaatatagctggtttaaaaactcggtgaaa

SEQ ID NO: 218137 - DNA, 75 bp, synthetic construct
  source 1..75: mol_type = other DNA
cggaagccttccgtaaacagcgcgtcacgtctttatcctcccctgccggtccccgttctgtttcctcttctcagg

SEQ ID NO: 218138 - DNA, 75 bp, synthetic construct
  source 1..75: mol_type = other DNA
gttttggcttgaacaccgccaaagaggtgagtttgtcaatgcagcgtctggaacaggcaggcgtcaatattaaag

SEQ ID NO: 218139 - DNA, 75 bp, synthetic construct
  source 1..75: mol_type = other DNA
tctgccacacaagcgggaggaagtgtcgcttctgctgttttccagaacagcgcgtcgacaaatctagcagacctg

SEQ ID NO: 218140 - DNA, 75 bp, synthetic construct
  source 1..75: mol_type = other DNA
aaccgcacaggttttagaaaaaaatcactacacaactatgacaaagcaggctgtgtccaaggccttagcgtctgt

SEQ ID NO: 218141 - DNA, 75 bp, synthetic construct
  source 1..75: mol_type = other DNA
aaaaatgagtggagtcgcgagactcttaatcgctggattaatggtaagtgctcacctaagacgctgacgttagcc

SEQ ID NO: 218142 - DNA, 75 bp, synthetic construct
  source 1..75: mol_type = other DNA
aagccgagcaggataaaaacaaggtgctgctgcagcagctcgccgaccgtttcaaggtggaacgccaggcgttta

SEQ ID NO: 218143 - DNA, 75 bp, synthetic construct
  source 1..75: mol_type = other DNA
agcacacattaaatcactggatatatggtttaagggtgatgttgtggaacgttatgattttcgtcagactgcaag

SEQ ID NO: 218144 - DNA, 75 bp, synthetic construct
  source 1..75: mol_type = other DNA
cggcttcgggcgctcactgattttccaccgcgaggccgcaggcgagctggctggcgaaatcaccggggtgacgga

SEQ ID NO: 218145 - DNA, 75 bp, synthetic construct
  source 1..75: mol_type = other DNA
ccggtgaacccgctactcggtgcgaaggttctgcctgttgaaaccgacctggcactgcccggcccgctgccgttt

SEQ ID NO: 218146 - DNA, 75 bp, synthetic construct
  source 1..75: mol_type = other DNA
atgaaacagcgtcaggtgatggtttacacccacgactccatcggtctaggcgaagatggcccgactcaccagccg

SEQ ID NO: 218147 - DNA, 75 bp, synthetic construct
  source 1..75: mol_type = other DNA
cctgcggctgaaaccgccacaacagacatcgctgacaacccggcccctgccggtgcaccggagatgaatgcagca

SEQ ID NO: 218148 - DNA, 75 bp, synthetic construct
  source 1..75: mol_type = other DNA
gagatcactcaataacggcgtttttcaaggtagttgtcgccttttgtaataaaattacgttatgcagcctctttt

SEQ ID NO: 218149 - DNA, 75 bp, synthetic construct
  source 1..75: mol_type = other DNA
tctttccgtcggagttcaggagcgcttccttcctccaacgggacaaatcggcagaggtttctacattgcgaagat

SEQ ID NO: 218150 - DNA, 75 bp, synthetic construct
  source 1..75: mol_type = other DNA
aatcatgcacacaaaaagcattcttcatgaaatggatcttctaaaaaacgatgtatacgacataatcaatgatat

SEQ ID NO: 218151 - DNA, 75 bp, synthetic construct
  source 1..75: mol_type = other DNA
ggccaaaaattagaagccacattcaaatcaccaatttataaaactacccaatggagttcgccgctgaagattgca

SEQ ID NO: 218152 - DNA, 75 bp, synthetic construct
  source 1..75: mol_type = other DNA
gtagggaatatcttccatggcggcttacctacttctgctgccggtcttaatgggtctactgcggtaaacattgtg

SEQ ID NO: 218153 - DNA, 75 bp, synthetic construct
  source 1..75: mol_type = other DNA
ttgataaaatcagaaaacatgatatgacagggatagtacttattgatgaaattgatgctcatcttcatgtaacat

SEQ ID NO: 218154 - DNA, 75 bp, synthetic construct
  source 1..75: mol_type = other DNA
gacaactggcaaagatagttcatgattatgccagtcggttcccacagacagcatatggcgatgctcaattactgc

SEQ ID NO: 218155 - DNA, 75 bp, synthetic construct
  source 1..75: mol_type = other DNA
ataccaaggtcgtaggtaaaggtgaagcagatcggctgtttatcaatactgctggcatcggcgtgtttgaacatc

SEQ ID NO: 218156 - DNA, 75 bp, synthetic construct
  source 1..75: mol_type = other DNA
gtgcgccggagatgaatgcggcaaaagcgccggctgacactgacgatatcaatgcaagactggctgcggctatgg

SEQ ID NO: 218157 - DNA, 75 bp, synthetic construct
  source 1..75: mol_type = other DNA
agcatgttacgtatggaacattgataaatgttatacctcgcttttcatctcggggacaaattgagatgtctttaa

SEQ ID NO: 218158 - DNA, 75 bp, synthetic construct
  source 1..75: mol_type = other DNA
ccacgacagcaggtgaacatgagcagggggcactgaaggcactggaggaggccagggagattgcaaaaacgccag

SEQ ID NO: 218159 - DNA, 75 bp, synthetic construct
  source 1..75: mol_type = other DNA
tcaaaaaattcagatggattacatctgtctgcaataccccgggtattttcggtttgcgaaatggatggaacaact

SEQ ID NO: 218160 - DNA, 75 bp, synthetic construct
  source 1..75: mol_type = other DNA
cgtgttattcgtgcgctggctgcgggaatgggagttgcccgtaaggatctgaaggccatggcggataacggaaag

SEQ ID NO: 218161 - DNA, 75 bp, synthetic construct
  source 1..75: mol_type = other DNA
atatggttacagtgctgatgatgtgctgaaggtgacggaggccatttccacggggctgaaaatctccggtgccag

SEQ ID NO: 218162 - DNA, 75 bp, synthetic construct
  source 1..75: mol_type = other DNA
tgctgagatattacaaactgactgggcgaaataaatcaaaagtatctatctttggtataatatcggcttttttcg

SEQ ID NO: 218163 - DNA, 75 bp, synthetic construct
  source 1..75: mol_type = other DNA
aaaataaaactggtatacaaaatcaatcgcattattggcaattttttaaccagctttcacttgatgagttaacac

SEQ ID NO: 218164 - DNA, 75 bp, synthetic construct
  source 1..75: mol_type = other DNA
tcgaatcgtttggcagatatgcagttacagtataacccggcaaaggggcttgaggaggctaaacaaaaagtgaaa

SEQ ID NO: 218165 - DNA, 75 bp, synthetic construct
  source 1..75: mol_type = other DNA
ctgaagttgaactggcggttgctgcctacgaaaaactgactgctgaaggcgtgaaagcgcgcgtggtttccatgc

SEQ ID NO: 218166 - DNA, 75 bp, synthetic construct
  source 1..75: mol_type = other DNA
cacacaccgtctggtacgccgacgatatccgccgcggagaacgcgaggcggcagatgcgctggggctcacactct

SEQ ID NO: 218167 - DNA, 75 bp, synthetic construct
  source 1..75: mol_type = other DNA
agaataccgccattacgctgtagaaggtgatcctgggcattacagtgaatgcctgtacaacatcgaagaaattat

SEQ ID NO: 218168 - DNA, 75 bp, synthetic construct
  source 1..75: mol_type = other DNA
tgaagttacagtactgcgtgaaattgagatgctcgaaaatatggatttgctttctaactaccagttagaggagtt

SEQ ID NO: 218169 - DNA, 75 bp, synthetic construct
  source 1..75: mol_type = other DNA
tctgccaggcaattacaagcaattcgtaactcaagccgccataagggtggaaaatccgaggcggaaaaaacagct

SEQ ID NO: 218170 - DNA, 75 bp, synthetic construct
  source 1..75: mol_type = other DNA
agttcggtaatcacgcagttcagccaggctctggcgcagggtgttcttcgaggcgaggaatttaactccgtcaac

SEQ ID NO: 218171 - DNA, 75 bp, synthetic construct
  source 1..75: mol_type = other DNA
tacggtatattgcggaacatgacgatgcgctggcgtttgcgcgtattaatcgccagctgatctctttacgcataa

SEQ ID NO: 218172 - DNA, 75 bp, synthetic construct
  source 1..75: mol_type = other DNA
gcaaatgagcttgaaaaacactttcgaggccgttgcccgcgaatggcatcaaacgaaatccgatcgctggtcatt

SEQ ID NO: 218173 - DNA, 75 bp, synthetic construct
  source 1..75: mol_type = other DNA
agcttatcgcgaagaaattattaaaacatttgaacaggatgtttttcctttcattggtaaacggccaatagctga

SEQ ID NO: 218174 - DNA, 75 bp, synthetic construct
  source 1..75: mol_type = other DNA
agagcaggctaaagccatgacttttgaggtagtcagtagggagtggcatcgtagtaaagccgatcgctggacgct

SEQ ID NO: 218175 - DNA, 75 bp, synthetic construct
  source 1..75: mol_type = other DNA
cgctatgcaattataactggccgcgcagaatacaatcctgctcctgatttggctattgctttggccgttccgaag

SEQ ID NO: 218176 - DNA, 75 bp, synthetic construct
  source 1..75: mol_type = other DNA
tcatcatgcttacaggggtacgaactcaggaattacgttttgcccgctgggaggatatcaattttgaaaagcggc

SEQ ID NO: 218177 - DNA, 75 bp, synthetic construct
  source 1..75: mol_type = other DNA
tgcctatcgcgaagaaatcattaggacgtttgaacatgatgtttttccttttattggtaaacgaccaatatctga

SEQ ID NO: 218178 - DNA, 75 bp, synthetic construct
  source 1..75: mol_type = other DNA
gtacggatttaacagcgaatggatagagttacaattggctcatgttgataagaatagtattcgaggcacttataa

SEQ ID NO: 218179 - DNA, 75 bp, synthetic construct
  source 1..75: mol_type = other DNA
tgtgggaaatcccggcagaagtgatgaagatgaaacggcctcatattgtgccgctctcagagcaggtcattgcgc

SEQ ID NO: 218180 - DNA, 75 bp, synthetic construct
  source 1..75: mol_type = other DNA
acatcggcaagcgctctattgctgaaatcaaaccaatggagttgctggaggccctgcgtaaaatggaaaaacgcg

SEQ ID NO: 218181 - DNA, 75 bp, synthetic construct
  source 1..75: mol_type = other DNA
ggcaggaacgatcctcgcaagcctatcagcaaggaaagcatcaatcaggttattgagttgttgggatataaaggc

SEQ ID NO: 218182 - DNA, 75 bp, synthetic construct
  source 1..75: mol_type = other DNA
acatttgaacaagatgtattcccgttcattggcaaacgccctatcagtaaaatcaaaccattagaactccttgaa

SEQ ID NO: 218183 - DNA, 75 bp, synthetic construct
  source 1..75: mol_type = other DNA
tagtcatgttaactggtgtaagaacacaggagatgcgatttgctacgtgggaagaagttgaccttgataaaggta

SEQ ID NO: 218184 - DNA, 75 bp, synthetic construct
  source 1..75: mol_type = other DNA
actggtaaaattatatatggttttttcttcggtttaattattgatggttacttctccccaattgctgaagtccat

SEQ ID NO: 218185 - DNA, 75 bp, synthetic construct
  source 1..75: mol_type = other DNA
aaattgcagtgtttcgcattaataacctgagattgagagaagagattgatttcttgttaaaatcttgtgatgatt

SEQ ID NO: 218186 - DNA, 75 bp, synthetic construct
  source 1..75: mol_type = other DNA
tacttgaactttatgctgaaaatgacagaaagataaaagaactggaacaggtcaaaagccatatatctcagttag

SEQ ID NO: 218187 - DNA, 75 bp, synthetic construct
  source 1..75: mol_type = other DNA
tcgacaatctgagctactcggaactctcggacttctacttggcctggcatcaggctttgggaatcgcaccgcccc

SEQ ID NO: 218188 - DNA, 75 bp, synthetic construct
  source 1..75: mol_type = other DNA
gcagggggaactgaatgcattgaaggctgcgcaggataaatatgggcctgttccggcggatgcgacggaagaaca

SEQ ID NO: 218189 - DNA, 75 bp, synthetic construct
  source 1..75: mol_type = other DNA
cgatatcacggtcggcaaccacacccagctcgatggtgcggttatcgcttccacggcgacggcagataaaaacag

SEQ ID NO: 218190 - DNA, 75 bp, synthetic construct
  source 1..75: mol_type = other DNA
cgggaatgcgtctgcgccacccggtgactgacgataccagcgatgaccgcctggcacacagccccgcagaccgga

SEQ ID NO: 218191 - DNA, 75 bp, synthetic construct
  source 1..75: mol_type = other DNA
gatactaatctggcaaatctcggcggcgcactggagctcaactggacgcttccaggtcagccggataacacgccg

SEQ ID NO: 218192 - DNA, 75 bp, synthetic construct
  source 1..75: mol_type = other DNA
gatgcactgtggcacgtctcatggcggttatgggacttgccggtgttctccggggtaaaaaggtccgtacgacca

SEQ ID NO: 218193 - DNA, 75 bp, synthetic construct
  source 1..75: mol_type = other DNA
tggcagttatgggacttgccggtgttctccggggtaaaaaggtccgcactaccgtcagccggaaagtctcatcat

SEQ ID NO: 218194 - DNA, 75 bp, synthetic construct
  source 1..75: mol_type = other DNA
atcggcttcaaaattcctgatttcactaatttggctcgggcgttggtcgtcagtagaggtttcttaggcgaggcg

SEQ ID NO: 218195 - DNA, 75 bp, synthetic construct
  source 1..75: mol_type = other DNA
acgctgacgacatggcagcatcattttattgatgtcatcacagggctggcggtaggtatgttgattgactggatg

SEQ ID NO: 218196 - DNA, 75 bp, synthetic construct
  source 1..75: mol_type = other DNA
tggaacctgctctgaagaaaattaatgagaagacgccattaaaggtaacatataccactgaagaagatggtcgct

SEQ ID NO: 218197 - DNA, 75 bp, synthetic construct
  source 1..75: mol_type = other DNA
aagggtacgaagatggcccttataactcgaaatacagccagcaatacgctgatgcgtatggtcagatagtcaatc

SEQ ID NO: 218198 - DNA, 75 bp, synthetic construct
  source 1..75: mol_type = other DNA
gggatatctgggcctgtgagtctcaggacaacagatagttatgatggtgatactatgtcaggttatattaacaac

SEQ ID NO: 218199 - DNA, 75 bp, synthetic construct
  source 1..75: mol_type = other DNA
agagctttatggtttggttcaagaaattccacaaaaagagactacgccattttatccacgttcgccttatgctgt

SEQ ID NO: 218200 - DNA, 75 bp, synthetic construct
  source 1..75: mol_type = other DNA
tgggaggttactccacacgaactccgaccagacatttaccctaacccaaccgacggtttacccgttggatgtaag

SEQ ID NO: 218201 - DNA, 75 bp, synthetic construct
  source 1..75: mol_type = other DNA
aaaagctggcaaaaaggtcagcaattagttctggtgccaaatccgcattaccccggcaataaccgaacttcaaac

SEQ ID NO: 218202 - DNA, 75 bp, synthetic construct
  source 1..75: mol_type = other DNA
ctggccattactggaaccgcgagcccccctttccccctctcgcagcgaaacgttaattgccctggcgcaacaacc

SEQ ID NO: 218203 - DNA, 75 bp, synthetic construct
  source 1..75: mol_type = other DNA
ctttgtgcggccgatcgcgcccatgaaacaaagtttctgcaacaaaaacgcaccaggtggcagcgcttcgccctc

SEQ ID NO: 218204 - DNA, 75 bp, synthetic construct
  source 1..75: mol_type = other DNA
atgttcgcatattattcagttcgctcatgttcaccatcatgtgcaaatggtgatatttataacaaaaataatgtt

SEQ ID NO: 218205 - DNA, 75 bp, synthetic construct
  source 1..75: mol_type = other DNA
atggaggaattattctggttacagaaaaaagtcgccattatcactggcgccggacaggggatcgggcgtgccatc

SEQ ID NO: 218206 - DNA, 75 bp, synthetic construct
  source 1..75: mol_type = other DNA
ctacaaaaacattgttgctgattatggtcctgccgatggaccgctgattattattggtgcgcactatgactctgc

SEQ ID NO: 218207 - DNA, 75 bp, synthetic construct
  source 1..75: mol_type = other DNA
ttgcggaaaaattctcccagcgagaactggctatgctgatgagcacgaaacaacaaagtgtatctcgttggttca

SEQ ID NO: 218208 - DNA, 75 bp, synthetic construct
  source 1..75: mol_type = other DNA
tctggcgaaatccggtataacggttaatgcctattgcccgggtattgtgcggacaccaatgatggaaggcatcgc

SEQ ID NO: 218209 - DNA, 75 bp, synthetic construct
  source 1..75: mol_type = other DNA
ggggagattgtggggaaaataatcaacgcctcatctcaggccggtcaggttggtaaccctgacctggctgtctat

SEQ ID NO: 218210 - DNA, 75 bp, synthetic construct
  source 1..75: mol_type = other DNA
gctatcagtaatctgcgcacggtgttctcttcggcggtggcggagatttccgggcaactgggtaacgagctggca

SEQ ID NO: 218211 - DNA, 75 bp, synthetic construct
  source 1..75: mol_type = other DNA
acatcaggttgcagatgtttactattccaggtttaaaaagtcgcagatagaaaattatttcctggccatttgtta

SEQ ID NO: 218212 - DNA, 75 bp, synthetic construct
  source 1..75: mol_type = other DNA
atcaatattgtgcgcggtcagccagtatctggtggacggctgggtgtgaagatttacaaaattgagagtgagtga

SEQ ID NO: 218213 - DNA, 75 bp, synthetic construct
  source 1..75: mol_type = other DNA
cggactgagtgataaggaacagttcgaaaaaattatcgacagggcgctgtcactgaaggatgaatcaaaggcatc

SEQ ID NO: 218214 - DNA, 75 bp, synthetic construct
  source 1..75: mol_type = other DNA
gcgcatccggacttaccggaaaaggtgaaacagtcctgggcatcgacacgtggttatttgggttttgattcggat

SEQ ID NO: 218215 - DNA, 75 bp, synthetic construct
  source 1..75: mol_type = other DNA
ttgccgatgaactgaccacggtcacccgaaataatccggcttttaacggggacaaccgtctgacggatggaggac

SEQ ID NO: 218216 - DNA, 75 bp, synthetic construct
  source 1..75: mol_type = other DNA
ttacggagggtaattgagaaaaataatagctataataaagaaaattatactgttaaaaaacaaaaagaagccgcc

SEQ ID NO: 218217 - DNA, 75 bp, synthetic construct
  source 1..75: mol_type = other DNA
atttcaaaaaggatggaggtaaacttaatctggataaacgcatttctgaccttatctacattaatcttttcccta

SEQ ID NO: 218218 - DNA, 75 bp, synthetic construct
  source 1..75: mol_type = other DNA
tgataaatacgttgctgatgatatagataaatatttaaaacttagtaattgcaatttacttaaaacctgtttggg

SEQ ID NO: 218219 - DNA, 75 bp, synthetic construct
  source 1..75: mol_type = other DNA
gcttaatggtgctgaaatggatttcatagggacttcgttttatcacaaatatagatgtgaattaaaatatgataa

SEQ ID NO: 218220 - DNA, 75 bp, synthetic construct
  source 1..75: mol_type = other DNA
tttgaattaaataataaagacaataaagataaaaaagatgtagccagaattaatgagattaaggaaatactaaag

SEQ ID NO: 218221 - DNA, 75 bp, synthetic construct
  source 1..75: mol_type = other DNA
ttgttagcagagtatttaaaataaatattgattcgcaagataatcataatgatgctgaaaaaaatacaatgcgtt

SEQ ID NO: 218222 - DNA, 75 bp, synthetic construct
  source 1..75: mol_type = other DNA
gaggaggcattaaaaaggttgtgtcttttctgagggacactctgtatccggcagccctgaagtttggcgaaggtg

SEQ ID NO: 218223 - DNA, 75 bp, synthetic construct
  source 1..75: mol_type = other DNA
ggccatccgttacaggatgcaccgacgattacgttgcaagacattgcgaaagaggactttttgcttctcgatatg

SEQ ID NO: 218224 - DNA, 75 bp, synthetic construct
  source 1..75: mol_type = other DNA
tggaacgctgcgcattggtgttactgaaaccctctcagcctacatgctgcctgcgctgctgagcgcgattacggc

SEQ ID NO: 218225 - DNA, 75 bp, synthetic construct
  source 1..75: mol_type = other DNA
tgtccactattctctcaggaatttcaggatctgccagacggtgctgagacgacgcttacagacaatatggaaacc

SEQ ID NO: 218226 - DNA, 75 bp, synthetic construct
  source 1..75: mol_type = other DNA
ctggacggtgctaccgtggatggtgctacccgcctatatgctgaggtaattattattaataaaatcaccccaaaa

SEQ ID NO: 218227 - DNA, 75 bp, synthetic construct
  source 1..75: mol_type = other DNA
atcctggacggtgctaccgtggacggtgctacccacctatatgatgaggtaattattattaataaaatcaccccc

SEQ ID NO: 218228 - DNA, 75 bp, synthetic construct
  source 1..75: mol_type = other DNA
tcgcaaagggcaatatgcgctgggtcgcccagaccttcggtgatatcgagttaagtgtcacttttttcattgaaa

SEQ ID NO: 218229 - DNA, 75 bp, synthetic construct
  source 1..75: mol_type = other DNA
ttgttgacggtgacaccataactgcgttggatgctcaaaacacaaccatcaaaatacggatgtatggtatagacg

SEQ ID NO: 218230 - DNA, 75 bp, synthetic construct
  source 1..75: mol_type = other DNA
acgtccagtggtctgggtgttcaaactaacaatatcactcttcttaagaatgaggtttacttcgaaaaaatagcg

SEQ ID NO: 218231 - DNA, 75 bp, synthetic construct
  source 1..75: mol_type = other DNA
gctatcaataatctccgcactgttttctcttctgctgttgctgaaatttctgggcaactgggaaatgagcttgca

SEQ ID NO: 218232 - DNA, 75 bp, synthetic construct
  source 1..75: mol_type = other DNA
acaatttaaaagtggtcgaaaaagccgataacgcggcgcaagtcaaagacgcgttaaccaaaatgcgtgctgcgg

SEQ ID NO: 218233 - DNA, 75 bp, synthetic construct
  source 1..75: mol_type = other DNA
aactagcgtgtcttctttctggtgtcgaaaacactgatggattatataattctctccatgtgtcagcatctgatt

SEQ ID NO: 218234 - DNA, 75 bp, synthetic construct
  source 1..75: mol_type = other DNA
tcgaagcttcagctcagaaagcagttaaaggcctctgggtagatcctaatcccgttgccccctgggagtggcgcc

SEQ ID NO: 218235 - DNA, 75 bp, synthetic construct
  source 1..75: mol_type = other DNA
aaggacaggctattttcaccgccacgaccactgtcgcagcgaaatatacactcacggcgaaagtgagtcaggccg

SEQ ID NO: 218236 - DNA, 75 bp, synthetic construct
  source 1..75: mol_type = other DNA
cgccagaaggggtgacggagaaggattatcagttcctgccgtcgaaaaatgaccatttcgtgagcggaaaaatca

SEQ ID NO: 218237 - DNA, 75 bp, synthetic construct
  source 1..75: mol_type = other DNA
gctgtaggttctacggcatctggctggacaaataatggtgatgggacgtggactgcgcagattactctcggctct

SEQ ID NO: 218238 - DNA, 75 bp, synthetic construct
  source 1..75: mol_type = other DNA
aattgccgtgcgtagttcttttgattattgggttactggaataaataaaaactctttctggtatctggattcgtc

SEQ ID NO: 218239 - DNA, 75 bp, synthetic construct
  source 1..75: mol_type = other DNA
gattggctgctacgtatcacggccagccagcgcaactggggcttcgggttatgctttttgtacctgcgcaacgtc

SEQ ID NO: 218240 - DNA, 75 bp, synthetic construct
  source 1..75: mol_type = other DNA
aacgggcctgaatatacaagcaaggcactgatgtcatgggcagctcaacagaatataacacttcattttattcag

SEQ ID NO: 218241 - DNA, 75 bp, synthetic construct
  source 1..75: mol_type = other DNA
aaagacaattattatgcgatttctgcggttgcctacgataacaaaggcaatacctcaaaacgcgtgcagacagag

SEQ ID NO: 218242 - DNA, 75 bp, synthetic construct
  source 1..75: mol_type = other DNA
aaaagtacgtaatagtgcagattttaaaccacttccggcggaaatccgctcgcttttcccaagtgaatttgaaga

SEQ ID NO: 218243 - DNA, 75 bp, synthetic construct
  source 1..75: mol_type = other DNA
tacagcaaacttcggttccaaattttaacgggcctcagtttcgtatttccctgtcagaccaaaacagactgtttt

SEQ ID NO: 218244 - DNA, 75 bp, synthetic construct
  source 1..75: mol_type = other DNA
acaaacgtataaagttacggtgactgatgccaataacaatttggtgaaagatagcgaagtgacgctgactgccag

SEQ ID NO: 218245 - DNA, 75 bp, synthetic construct
  source 1..75: mol_type = other DNA
acggagaaggattatcaattcctgccgtcgaaggctgaccatttctcaggtgggaaaatggatttgcccctatat

SEQ ID NO: 218246 - DNA, 75 bp, synthetic construct
  source 1..75: mol_type = other DNA
tcagctgggcacattacaacaaacgctgaagtttgttgccgggccgcttgatgcagcacattcgtccatcaccct

SEQ ID NO: 218247 - DNA, 75 bp, synthetic construct
  source 1..75: mol_type = other DNA
aatttaaaaagtctgttagaggcctttaactctgaagctattgaaagtttgaaactggacagatatgcgtccaga

SEQ ID NO: 218248 - DNA, 75 bp, synthetic construct
  source 1..75: mol_type = other DNA
ggttgaaaatatggcaagagtagttcctcgtgctggtgaacagttccaacgtataaaggaaatgaaagagcaagg

SEQ ID NO: 218249 - DNA, 75 bp, synthetic construct
  source 1..75: mol_type = other DNA
agatatcgatgccgccaaattgaaattaaccaccgaaatagccgccatcggtgagataaaaacggaaactgaaac

SEQ ID NO: 218250 - DNA, 75 bp, synthetic construct
  source 1..75: mol_type = other DNA
ctccctgtgtgatagcaccagccagtccggttccttcgccttcaggagcattatctttctggagactgattcagg

SEQ ID NO: 218251 - DNA, 75 bp, synthetic construct
  source 1..75: mol_type = other DNA
cgttcagctcgccccaaaagttgctgcacaccccgagccaccgcttactgaaaaaatgcgcatccttgcttacct

SEQ ID NO: 218252 - DNA, 75 bp, synthetic construct
  source 1..75: mol_type = other DNA
ctcccaggctgattttcgtcacgccatcccatcaataccctctgggcgtggtgatgagtcttgagcgacggcaac

SEQ ID NO: 218253 - DNA, 75 bp, synthetic construct
  source 1..75: mol_type = other DNA
aatcccgcagtgcagagtggaaactggtggacgatatcatctctgatcatcgttaacgataatgaggcgggttca

SEQ ID NO: 218254 - DNA, 75 bp, synthetic construct
  source 1..75: mol_type = other DNA
gttggctaaaagaaaataaaaatatggtggaggctattaagggaatttttccagaggtaataaataaaaatatag

SEQ ID NO: 218255 - DNA, 75 bp, synthetic construct
  source 1..75: mol_type = other DNA
aactgaggacaaagttaagagatttgagagaattaaatatctcgccattccagaagaaaaatggcgctttagtgc

SEQ ID NO: 218256 - DNA, 75 bp, synthetic construct
  source 1..75: mol_type = other DNA
cgttctgccattccaaatggcaatagattttactttgattttgctgatttgcaagttctttactacgatcatgag

SEQ ID NO: 218257 - DNA, 75 bp, synthetic construct
  source 1..75: mol_type = other DNA
tgtatgcgatttcactggtcgtggtgttcctcgccctcgccgcactctatgagagctggtcaattccgttctcgg

SEQ ID NO: 218258 - DNA, 75 bp, synthetic construct
  source 1..75: mol_type = other DNA
cccagtatttgaaaattgtttttttgagggatgtaatttcgagaatgtgtcccttgttggctttgataaagtgac

SEQ ID NO: 218259 - DNA, 75 bp, synthetic construct
  source 1..75: mol_type = other DNA
tggtaatcttgctgcaaacactcaggttaaaattcctgtttatatgtacaataaaggagctatagctgaaaaaga

SEQ ID NO: 218260 - DNA, 75 bp, synthetic construct
  source 1..75: mol_type = other DNA
ggattttattatggatgatttaaaaaaagtaaaaaatacggaagcatgggtatggtataaaaattgcgatagtaa

SEQ ID NO: 218261 - DNA, 75 bp, synthetic construct
  source 1..75: mol_type = other DNA
tatctctatgacttccattacccgtgcaaaaaagacggtaagcttgcggcacaggttgcgttcaatattatgctg

SEQ ID NO: 218262 - DNA, 75 bp, synthetic construct
  source 1..75: mol_type = other DNA
aaaaatcgatatggatttgttcagcttgatctggaaacgcaaacacgcacgattaaaaaaagtggtgagtggttt

SEQ ID NO: 218263 - DNA, 75 bp, synthetic construct
  source 1..75: mol_type = other DNA
gcaggtgttaaaagcctgcggtgcagtagattacttctgtcagcacgggcatggcttgatatcgaaaaaacgcgt

SEQ ID NO: 218264 - DNA, 75 bp, synthetic construct
  source 1..75: mol_type = other DNA
tggcacccaggcggcaaccatgggcgctacaggtgcagatctatccactggtggagcgctggatatcttcggcga

SEQ ID NO: 218265 - DNA, 75 bp, synthetic construct
  source 1..75: mol_type = other DNA
gcttataggattggtggtggtgaatggaacccgttcacacaaagcaccccagcaccaattagtgtcgctatcggt

SEQ ID NO: 218266 - DNA, 75 bp, synthetic construct
  source 1..75: mol_type = other DNA
tcagggtttacctctttttcgagataaagctgctcctgaaattaatgagaaattaaaatggattgaaacggggaa

SEQ ID NO: 218267 - DNA, 75 bp, synthetic construct
  source 1..75: mol_type = other DNA
cgatagtatggaagctgcttatatgctgaaagataatatccgttggtattatcacaatggtgacctatcattacc

SEQ ID NO: 218268 - DNA, 75 bp, synthetic construct
  source 1..75: mol_type = other DNA
agagtgcacctgtgctaccaatttcctgtttgattatgggtgggactcagttatcacgtcattattatgtgaaag

SEQ ID NO: 218269 - DNA, 75 bp, synthetic construct
  source 1..75: mol_type = other DNA
tgttggcttattcgccactatttatatccttaatattaaagatgcgcggaactcatcttattgccatctgacttt

SEQ ID NO: 218270 - DNA, 75 bp, synthetic construct
  source 1..75: mol_type = other DNA
attgttccggcgaactcatattgacgcatttttcaggcgagccactggcagcgcatacgattgatcaccgtctga

SEQ ID NO: 218271 - DNA, 75 bp, synthetic construct
  source 1..75: mol_type = other DNA
cggaggacatgcgcacctatgccgacctgctcgatagagttgaggcggttctgttacccgcttatgcacagaaaa

SEQ ID NO: 218272 - DNA, 75 bp, synthetic construct
  source 1..75: mol_type = other DNA
tttatttgggcaatatgtgcgacgatttttaccttcagttttggatttattttggctttagcactggctaaaaaa

SEQ ID NO: 218273 - DNA, 75 bp, synthetic construct
  source 1..75: mol_type = other DNA
atatagaggaacttaaacaatttcggcctgatattttatccgcttgtgaaaaagcaattgcttcagcgaactttg

SEQ ID NO: 218274 - DNA, 75 bp, synthetic construct
  source 1..75: mol_type = other DNA
catcgaacgaacttccctcggttctttgcttgaccatactggcgcatttggcgaaagcgaaaaatatgccgcacg

SEQ ID NO: 218275 - DNA, 75 bp, synthetic construct
  source 1..75: mol_type = other DNA
tgatgggtaccggcggtattggtttcaccattggcagcagtaagacaacgcacgaccgccgcgaggccgggacaa

SEQ ID NO: 218276 - DNA, 75 bp, synthetic construct
  source 1..75: mol_type = other DNA
acaatgtgtatcgctattacggcaaactggccatgatccccaacgacgggcatctgcagtatggagatgcttctg

SEQ ID NO: 218277 - DNA, 75 bp, synthetic construct
  source 1..75: mol_type = other DNA
ctcagatagatgaaaaaagagatgaggtagtaactgattcttataccatatcatggcgtgaagtaattaatctat

SEQ ID NO: 218278 - DNA, 75 bp, synthetic construct
  source 1..75: mol_type = other DNA
tgaggttgaagtattgcgagaaatagaggtgctcgaaaatatgacgttattatctaatcatcagtcagacaatct

SEQ ID NO: 218279 - DNA, 75 bp, synthetic construct
  source 1..75: mol_type = other DNA
cagaagggctgacggcacagtgccatccggttacggttgtgttccctgagcccagttcacggggaagggatgcgg

SEQ ID NO: 218280 - DNA, 75 bp, synthetic construct
  source 1..75: mol_type = other DNA
cgctgctggtcgatttctgggcgccatggtgcgggccgtgcaagatgatggcgccacagttccagcaagcggcgc

SEQ ID NO: 218281 - DNA, 75 bp, synthetic construct
  source 1..75: mol_type = other DNA
tcaaacgaagccattgactgcctgatgttcagctatcaaatggaacatccggacgaacatcaaaacgtcagacaa

SEQ ID NO: 218282 - DNA, 75 bp, synthetic construct
  source 1..75: mol_type = other DNA
ttgcttgaccatactggcgcatttggcatttggtgccgatcgctcctggtcggtagtcgtcggtacttccggctc

SEQ ID NO: 218283 - DNA, 75 bp, synthetic construct
  source 1..75: mol_type = other DNA
gagaagctcaaataagactgggtgagttgatggtgtcaatacgacctatgcaggtaaatggatattttatgggaa

SEQ ID NO: 218284 - DNA, 75 bp, synthetic construct
  source 1..75: mol_type = other DNA
agatgtaccgatgtgttatggcagcttatgaaagcgtatcgggatgttaatggcttatactacttatttaagcgt

SEQ ID NO: 218285 - DNA, 75 bp, synthetic construct
  source 1..75: mol_type = other DNA
taaagtctttggtattggatattcggaaaggtaaagacgttagttttcttctggggtcagccgtgagttgctcgc

SEQ ID NO: 218286 - DNA, 75 bp, synthetic construct
  source 1..75: mol_type = other DNA
cgcggtaaagggctggcgaaaaaactggccttaatggcgatggagcaggcacgagagatgggcttcaaacgctga

SEQ ID NO: 218287 - DNA, 75 bp, synthetic construct
  source 1..75: mol_type = other DNA
gaataactggaaaaaatatcatggattatgtcctgaagttctttggggagcgtttcgaacggcaacgaataacta

SEQ ID NO: 218288 - DNA, 75 bp, synthetic construct
  source 1..75: mol_type = other DNA
tcgatgaatgaatatatcaatgacactaaccattacacgaattatcagaatgaaaaagagagttatattgtcacg

SEQ ID NO: 218289 - DNA, 75 bp, synthetic construct
  source 1..75: mol_type = other DNA
aatatgaactttcaattttttaacacatttaatgataattatcttagaacgaacgcatacgataaatattttaaa

SEQ ID NO: 218290 - DNA, 75 bp, synthetic construct
  source 1..75: mol_type = other DNA
atttaccgttacaaatggaccgtcaccggggactcgaaccccgcaccacaaaacaacaatacgtgttatgcactc

SEQ ID NO: 218291 - DNA, 75 bp, synthetic construct
  source 1..75: mol_type = other DNA
tggcagacccgttgggaattagcttataaacaggatgcgtctcatgtaatggctgagttactcaatacactgcaa

SEQ ID NO: 218292 - DNA, 75 bp, synthetic construct
  source 1..75: mol_type = other DNA
gcaaggatcgcggttcgcagggaccaatgtatcacaaaaggtaacggccttcgccgtggcgactatagcggtata

SEQ ID NO: 218293 - DNA, 75 bp, synthetic construct
  source 1..75: mol_type = other DNA
aaaacctggcgcggcaggctggcggggcgcacaagactgtccacgaccgtatcgccacagcaggacgtttctgcg

SEQ ID NO: 218294 - DNA, 75 bp, synthetic construct
  source 1..75: mol_type = other DNA
aaactgaaacgcaaggaattagccgataccctcggcattggtgagcaggcgcttaacagctacatgaaaggtagt

SEQ ID NO: 218295 - DNA, 75 bp, synthetic construct
  source 1..75: mol_type = other DNA
cgcgggctatgtcaacggtagcggcaaactgaaacgcaaggaattagccgataccctcggcattggtgagcaggc

SEQ ID NO: 218296 - DNA, 75 bp, synthetic construct
  source 1..75: mol_type = other DNA
ttccggtatgacccggtcgacaggctgacggagcagcgtggctttgatggcaggacgcaacgttaccattatgac

SEQ ID NO: 218297 - DNA, 75 bp, synthetic construct
  source 1..75: mol_type = other DNA
atcagtagcgaggaccttatcacctctgactttcatcttatgacggcagatgagcgcaacgtggttaaagcggca

SEQ ID NO: 218298 - DNA, 75 bp, synthetic construct
  source 1..75: mol_type = other DNA
agcatgtgcttgatcaggataacggccatgcgcgttgcccatcctgcggggaaattattgaaatgaaagctcttt

SEQ ID NO: 218299 - DNA, 75 bp, synthetic construct
  source 1..75: mol_type = other DNA
agcgctcgtggtaggcccgttcttctcgcctgtcgaatcctctcagttgtggctgcacactcaggtgcagctggg

SEQ ID NO: 218300 - DNA, 75 bp, synthetic construct
  source 1..75: mol_type = other DNA
aaatatcgtaaaggcgttattgatagcgttgccggagatgcgtcaactgtctctggcaaaagaagatgtgcacaa

SEQ ID NO: 218301 - DNA, 75 bp, synthetic construct
  source 1..75: mol_type = other DNA
tatctgtcaggtaatggtcatctgattgtattaggtaatgttattgtcgataactttattaatcatgatttcgcg

SEQ ID NO: 218302 - DNA, 75 bp, synthetic construct
  source 1..75: mol_type = other DNA
atcgttcagggtttaccgctttttcgcgataaagccgctcctgaaattaatgagaaattaaaatggattgaaacg

SEQ ID NO: 218303 - DNA, 75 bp, synthetic construct
  source 1..75: mol_type = other DNA
taagcagcctatcactgggtcaattcatcgtacacagcacgatgtaaactatgaaagaattagcgcttttgacct

SEQ ID NO: 218304 - DNA, 75 bp, synthetic construct
  source 1..75: mol_type = other DNA
gttgctggcgttcaccgactgctcgggctaccagacccgctatgagtatgaccgcttcggccagatgacggcggt

SEQ ID NO: 218305 - DNA, 75 bp, synthetic construct
  source 1..75: mol_type = other DNA
acagatgcgacgggcagcacccggcagatgacctggagccgctacggtcagttgctggcgttcaccgactgctcg

SEQ ID NO: 218306 - DNA, 75 bp, synthetic construct
  source 1..75: mol_type = other DNA
ggttgaggagatccactcggtcaacgtcagaaccaacgtcgtgcatccaaccgatacgctggtgcgcgtgaaggt

SEQ ID NO: 218307 - DNA, 75 bp, synthetic construct
  source 1..75: mol_type = other DNA
tctttccactgcagcagggggtataacattcgtaagcgtcgtctcagcaccgtctggcagatcctgaaattcctg

SEQ ID NO: 218308 - DNA, 75 bp, synthetic construct
  source 1..75: mol_type = other DNA
tggtggtgataagctgaaattctatggtacaactggtgccccactaactaacagagacatgtcaggcgttagtgt

SEQ ID NO: 218309 - DNA, 75 bp, synthetic construct
  source 1..75: mol_type = other DNA
gcagtccaagccgtttaccggaaagcgcatttcagcggcggcgggtcttccgacgattctgtcattgttcattaa

SEQ ID NO: 218310 - DNA, 75 bp, synthetic construct
  source 1..75: mol_type = other DNA
tcgatgttctcttacggcatgttagaagttaaccgtctggcaggccgtcagctcccggtcgatggtggctttgat

SEQ ID NO: 218311 - DNA, 75 bp, synthetic construct
  source 1..75: mol_type = other DNA
aaagcaggttggacaagctattggcaaaggctctggtccattcaaggatgaagaaacaggtgttcttaaaaagtt

SEQ ID NO: 218312 - DNA, 75 bp, synthetic construct
  source 1..75: mol_type = other DNA
gatgcgcggcggcagctacggctggcagggggcgggaaaaggctatattggcatttgctggaccaactccatcgc

SEQ ID NO: 218313 - DNA, 75 bp, synthetic construct
  source 1..75: mol_type = other DNA
gcagtgtcagtactgacgatcaaatgttgcctcccaatctgcgcggctacgcgccagacatttccggcgtggcac

SEQ ID NO: 218314 - DNA, 75 bp, synthetic construct
  source 1..75: mol_type = other DNA
cattttgccgatgggctactggaaaggttctggcatgtcgattgtgctggatatgatcgctactctcctttccga

SEQ ID NO: 218315 - DNA, 75 bp, synthetic construct
  source 1..75: mol_type = other DNA
gatggcgaccagagctatgcgcgtctgggttttaaaggcgaaacccaaattaacgatcaactcactggcggtgat

SEQ ID NO: 218316 - DNA, 75 bp, synthetic construct
  source 1..75: mol_type = other DNA
ctcagatacgtaagcagacagctactcatcgggataaccgcgaacatgatgattttgccgatgatagcttatcgg

SEQ ID NO: 218317 - DNA, 75 bp, synthetic construct
  source 1..75: mol_type = other DNA
caattatcctgttagtattaacgaataagctaccactgttgttatcaggtgttgtaggaggagcttctttacaag

SEQ ID NO: 218318 - DNA, 75 bp, synthetic construct
  source 1..75: mol_type = other DNA
caacagaccgttggtggggaaatagcgaatcaaatacgtaaacacaccgccgatcgtcagagtaaccacgaacag

SEQ ID NO: 218319 - DNA, 75 bp, synthetic construct
  source 1..75: mol_type = other DNA
aaaattttacgttatagatttgaccaaaaagtaattgaaaaaattcaattgtcacaatggtggaaatatgacatt

SEQ ID NO: 218320 - DNA, 75 bp, synthetic construct
  source 1..75: mol_type = other DNA
gcttcacgcttatttcggtctttacgctgcgggacaaatccagcaaccagcctgcaaaggcgctaactgaaaacc

SEQ ID NO: 218321 - DNA, 75 bp, synthetic construct
  source 1..75: mol_type = other DNA
ccgaatcaggtaaacacaaaagacaaacatacaaaagacaataaagacaatattaataacccccctaaatccccc

SEQ ID NO: 218322 - DNA, 75 bp, synthetic construct
  source 1..75: mol_type = other DNA
gtcgctactatgcctggcgggcgttaccatcattaaaagccaaactggcgctgggcgaggattacctcagatccg

SEQ ID NO: 218323 - DNA, 75 bp, synthetic construct
  source 1..75: mol_type = other DNA
acactatcaataagttggagtcattaccctgatgataagcgtgacgatggtgataaaacttatgcccgtctcggc

SEQ ID NO: 218324 - DNA, 75 bp, synthetic construct
  source 1..75: mol_type = other DNA
ccgcccaatctgcgcggctacgcccccgatatttccggggtggcgcacaccacggcaaaagtgaccgtcagccag

SEQ ID NO: 218325 - DNA, 75 bp, synthetic construct
  source 1..75: mol_type = other DNA
tcgccgtgaacctgctgataaaaacggggtcatgtttgatagcggtatacctctggatagaaacctcgcatcaca

SEQ ID NO: 218326 - DNA, 75 bp, synthetic construct
  source 1..75: mol_type = other DNA
gtgattggtggacggttgggcaagaaaagtgggctgggcgtgtacgactggcgcgcggaacgtgaggcagttgtt

SEQ ID NO: 218327 - DNA, 75 bp, synthetic construct
  source 1..75: mol_type = other DNA
gtcaattttgctgtcacctgttcggtgtttaacgctttctggcaggagcgtcgtttttaccttcgctggtgcaac

SEQ ID NO: 218328 - DNA, 75 bp, synthetic construct
  source 1..75: mol_type = other DNA
agaaaagaaaagtgacggtgtcacggaaattgacgatgttttattgattgagacacaaggcgagacggcacaggc

SEQ ID NO: 218329 - DNA, 75 bp, synthetic construct
  source 1..75: mol_type = other DNA
ataatactgttaggttgattaatgtattatttatttttgcatatatctcaataatatttttgtatggcaatgcat

SEQ ID NO: 218330 - DNA, 75 bp, synthetic construct
  source 1..75: mol_type = other DNA
tacgggtgcttccctggtatattgcgctggcaatatccggaagctatgccagtgcctgggctgatgatgatattc

SEQ ID NO: 218331 - DNA, 75 bp, synthetic construct
  source 1..75: mol_type = other DNA
gggatccaccttctcgttgggatgatggcatctccgggatcattgcggactacagcatcactgcgcaaacacgac

SEQ ID NO: 218332 - DNA, 75 bp, synthetic construct
  source 1..75: mol_type = other DNA
ccgttagcggcactgcctttcgggtgacaattccagcggtgttacaaatcgcctgtctgcgacgaatgattagcg

SEQ ID NO: 218333 - DNA, 75 bp, synthetic construct
  source 1..75: mol_type = other DNA
atggcgagagacgttttaatcaatcacacacgagatgttgatattaatgagccagacggaccaacgaatctttcc

SEQ ID NO: 218334 - DNA, 75 bp, synthetic construct
  source 1..75: mol_type = other DNA
tactgattagtggttatgtttatgttactctttgtttggaaacaagatataggtataagcgttctgtgggatggg

SEQ ID NO: 218335 - DNA, 75 bp, synthetic construct
  source 1..75: mol_type = other DNA
ctggcacagcttactggctggcaggctattgacggatttaaagaaggtgaacccgcggaggcggaaattggtgtc

SEQ ID NO: 218336 - DNA, 75 bp, synthetic construct
  source 1..75: mol_type = other DNA
ttggctataccaccgttcctgacttcatgatcgacgcctacctgtgcaagctggcgaagatagaaccctgcctga

SEQ ID NO: 218337 - DNA, 75 bp, synthetic construct
  source 1..75: mol_type = other DNA
tctttctgtttgtttctataattatgcagcaagatgtttttgcagcattcacattaaatggaactaggtttattt

SEQ ID NO: 218338 - DNA, 75 bp, synthetic construct
  source 1..75: mol_type = other DNA
ggtgaaatcgaaaatattgggcgctgggtcatcgcggaagcttgccgtcagttagcagaatggcgtagccagaat

SEQ ID NO: 218339 - DNA, 75 bp, synthetic construct
  source 1..75: mol_type = other DNA
accctgctggcagaaaaccgccgtaacggtattaccgttgatgacagcgtgtgggcaaaaatccaggcgttataa

SEQ ID NO: 218340 - DNA, 75 bp, synthetic construct
  source 1..75: mol_type = other DNA
ttgtcgtgctggcgttgttttacctgttctatctgttgcggctggacagccagacgcaggacatcctgcaccagc

SEQ ID NO: 218341 - DNA, 75 bp, synthetic construct
  source 1..75: mol_type = other DNA
ccccatgtttggtttgtatgatattacacgagggaaaagcgaacctgattatgaaggtcctggtaatggttttcg

SEQ ID NO: 218342 - DNA, 75 bp, synthetic construct
  source 1..75: mol_type = other DNA
ggagcaaccgattgaatttctctctggtggtaatcaacaaaaagtgttgctctcacgctggctgttgactcgtcc

SEQ ID NO: 218343 - DNA, 75 bp, synthetic construct
  source 1..75: mol_type = other DNA
gatatacacgctcatctggcatatgcatttctggaacagaatgccccgcgtaaggcactgaacagccgctcgtaa

SEQ ID NO: 218344 - DNA, 75 bp, synthetic construct
  source 1..75: mol_type = other DNA
tatgaactgtatgacaaaccggaagcagttcaggaggcgctggaaaaagttattccttttttcaacacccatctg

SEQ ID NO: 218345 - DNA, 75 bp, synthetic construct
  source 1..75: mol_type = other DNA
tagatcttaccgggataaatgaattcgaggatatatatgttaatacagaatattatatttcgcgtgtgcgttggc

SEQ ID NO: 218346 - DNA, 75 bp, synthetic construct
  source 1..75: mol_type = other DNA
tgataccgatgatcaagcaatcatgcttgatgatgatgtgttaatatatattgaaaaagaaggagattcaataaa

SEQ ID NO: 218347 - DNA, 75 bp, synthetic construct
  source 1..75: mol_type = other DNA
ggggatatgaatattgcaggatgtgcagctatctttcataatgaagaaagtttaattgatattcttgacaaaagc

SEQ ID NO: 218348 - DNA, 75 bp, synthetic construct
  source 1..75: mol_type = other DNA
aggagggtatattcaatggtttgtattaaggaaggtgcgaataagcaggtcatttcttcccaagctgactcgctg

SEQ ID NO: 218349 - DNA, 75 bp, synthetic construct
  source 1..75: mol_type = other DNA
cagggtcaggaacgcgacctcatcctttccagttacgtggtggccgaccgagattttgttgcgtcagaagatgcg

SEQ ID NO: 218350 - DNA, 75 bp, synthetic construct
  source 1..75: mol_type = other DNA
ttacaagggtgaggagcgactcctccgcacctcccttgagtgatcagatcgaagatatgccgaggacctccgcaa

SEQ ID NO: 218351 - DNA, 75 bp, synthetic construct
  source 1..75: mol_type = other DNA
cacaagccgtggggtatctctggcgatatgcgtgattatgctgatttgctgggtaaggtagaaaccgtattaatc

SEQ ID NO: 218352 - DNA, 75 bp, synthetic construct
  source 1..75: mol_type = other DNA
gggtaaggtagaaaccgtattaatccctgcttatgccagaaaaacgggcaaatcggcacaggaaattgccgacat

SEQ ID NO: 218353 - DNA, 75 bp, synthetic construct
  source 1..75: mol_type = other DNA
cggtgcgacatttagttcagaaacaaccctgaataacggaaccaacaccattccgttccaggcgcgttattttgc

SEQ ID NO: 218354 - DNA, 75 bp, synthetic construct
  source 1..75: mol_type = other DNA
agcgggcggcaaaagcgccaacatcgttttcgccgattgtccggatctgcaaaaagcggcaagcgccaccgccgc

SEQ ID NO: 218355 - DNA, 75 bp, synthetic construct
  source 1..75: mol_type = other DNA
gcgcaaaactggctgccgggccacccgcttgatcccgcaacctccatgggcaccttaatcgactgcgcccatgcc

SEQ ID NO: 218356 - DNA, 75 bp, synthetic construct
  source 1..75: mol_type = other DNA
cagacggcttctgcgcaaactgctgatgttactttcctgactttacctgttagtacaactggaaaagtgccctgc

SEQ ID NO: 218357 - DNA, 75 bp, synthetic construct
  source 1..75: mol_type = other DNA
tgaataaactcgccgatttaatggaagcccacgccgaagagctggcactgctggaaactctcgacaccggcaaac

SEQ ID NO: 218358 - DNA, 75 bp, synthetic construct
  source 1..75: mol_type = other DNA
gctgccgccatcggcccgaccatctttgtggatgtagacccgaatgcgtccttaagtcgcgaagagattttcggc

SEQ ID NO: 218359 - DNA, 75 bp, synthetic construct
  source 1..75: mol_type = other DNA
cggcccgaccatctttgtggatgtggacccgaatgcgtccttaagtcgcgaagagattttcggtccggtgctggt

SEQ ID NO: 218360 - DNA, 75 bp, synthetic construct
  source 1..75: mol_type = other DNA
gcgggcctttgtctcgcgtcgctgggccgggcgattacccgcagagcgtgaacgtattctgctacgttttgctga

SEQ ID NO: 218361 - DNA, 75 bp, synthetic construct
  source 1..75: mol_type = other DNA
cattgtaggaggttgtctatcatatttttatcatgataactctattttgtacgtaacattagcctgtattccagt

SEQ ID NO: 218362 - DNA, 75 bp, synthetic construct
  source 1..75: mol_type = other DNA
cgctacgaccgccagactatttttggccttgtccgtgaacgtccgatcgacattcacaaagatcccgtagcactg

SEQ ID NO: 218363 - DNA, 75 bp, synthetic construct
  source 1..75: mol_type = other DNA
caggcgaggaaaaagaatcctgcactgccagagttctggtacgcccgggcggtgacttatgaggtgaacggtgtg

SEQ ID NO: 218364 - DNA, 75 bp, synthetic construct
  source 1..75: mol_type = other DNA
gaagatgggggcatgtgtattgatgggttcggtgagtatgtgggtcactcgctgcctgatggaatgcatgagctt

SEQ ID NO: 218365 - DNA, 75 bp, synthetic construct
  source 1..75: mol_type = other DNA
ttatcagctaaacagttagaaggtggtcaactgagagttgctgatattcatttggaaaactacaaagggtttgag

SEQ ID NO: 218366 - DNA, 75 bp, synthetic construct
  source 1..75: mol_type = other DNA
ttggcctgatggagttaatcgaagttcggggtggcatgaaaggtgttcgttacatttatgttcgctcagatcaaa

SEQ ID NO: 218367 - DNA, 75 bp, synthetic construct
  source 1..75: mol_type = other DNA
ttcaatccaaacgtgagtacgaaaatgtaatgcagcacctctctaagaattttgtagctgttggttcatggcaag

SEQ ID NO: 218368 - DNA, 75 bp, synthetic construct
  source 1..75: mol_type = other DNA
atgaacaatccggttatcggtgtcgtaatgtgcaggaacaggcttaagggtcatgcgacccagactctgcaagaa

SEQ ID NO: 218369 - DNA, 75 bp, synthetic construct
  source 1..75: mol_type = other DNA
aattcatgctttcattaccctcaatagaaagcatagattcaatagaattgagtgaggaactcagaaaagagaaaa

SEQ ID NO: 218370 - DNA, 75 bp, synthetic construct
  source 1..75: mol_type = other DNA
gaaagaggggttaacttgtctgtcagaataaagaaaatagacatagcgaaaaaaccatattttgttattcggcta

SEQ ID NO: 218371 - DNA, 75 bp, synthetic construct
  source 1..75: mol_type = other DNA
ttaaactatcagagaatgtaatcagagaaggcgatttttatgcattctgtgctctaccgctgcttatcagtatgt

SEQ ID NO: 218372 - DNA, 75 bp, synthetic construct
  source 1..75: mol_type = other DNA
cgttggtttgctttgtcgcatgccttatttttttgtcgtccggtgatatttttcgtgaaaagccaatcgctctaa

SEQ ID NO: 218373 - DNA, 75 bp, synthetic construct
  source 1..75: mol_type = other DNA
acaacggcgacctggtgcgcatcagcggcccgcgacagacgcgggaatacggctacagcgccacgggcaggctgg

SEQ ID NO: 218374 - DNA, 75 bp, synthetic construct
  source 1..75: mol_type = other DNA
cagcttcggcagcatggcaggcagtaatgccgcatacgaactgaccagcacatacacccccgcaggccagttaca

SEQ ID NO: 218375 - DNA, 75 bp, synthetic construct
  source 1..75: mol_type = other DNA
gtgcaggcgttttttgacggcatgggtacgcagtttgccaacgtggtaacgctggtggtcgcgggtgaaatattt

SEQ ID NO: 218376 - DNA, 75 bp, synthetic construct
  source 1..75: mol_type = other DNA
cgcgaatgcgctcgccccactggtagaaacggcaaattcacgcggtatcaaagtggtgacctttgattcaggcat

SEQ ID NO: 218377 - DNA, 75 bp, synthetic construct
  source 1..75: mol_type = other DNA
cgttatctctgctggcctgcgtaacttccagcgcactggcgaaggatttaaatcttccggttgttagtaaaggtt

SEQ ID NO: 218378 - DNA, 75 bp, synthetic construct
  source 1..75: mol_type = other DNA
cttggcagcctgtatctcgctacgaaccacgacgttaccgtggttttaagcaagacctacattcagggctgcaaa

SEQ ID NO: 218379 - DNA, 75 bp, synthetic construct
  source 1..75: mol_type = other DNA
caggtggcggtgaagagattcattgcgggttgagtgtagggttcaatccggggcagcagagcatcgcggtatcgg

SEQ ID NO: 218380 - DNA, 75 bp, synthetic construct
  source 1..75: mol_type = other DNA
atgatgctgaaaatcaccgaatcgtataagacggcggtgatcagcaccgcccacgtcacggcagcggattcagaa

SEQ ID NO: 218381 - DNA, 75 bp, synthetic construct
  source 1..75: mol_type = other DNA
tgtctgatgacgctgacgatgtgtttatcgttgcgttcatcatggcttaacaaagtgctgggcggtctggataaa

SEQ ID NO: 218382 - DNA, 75 bp, synthetic construct
  source 1..75: mol_type = other DNA
caataatccttcagagttcaggattatggctactggtcatgcccatttagatatagcgtggatgtggcctttaag

SEQ ID NO: 218383 - DNA, 75 bp, synthetic construct
  source 1..75: mol_type = other DNA
cgaaagcacgctgttttatatttgttttattgaatataagaggaggccataaaacggcccccttgtttttatcag

SEQ ID NO: 218384 - DNA, 75 bp, synthetic construct
  source 1..75: mol_type = other DNA
atgtttaaacagaacgaaaaatctatcgctcaaattgctgagtatatcccgcgtgcgtgccgggatatgcagttg

SEQ ID NO: 218385 - DNA, 75 bp, synthetic construct
  source 1..75: mol_type = other DNA
cgttaatgtatcgtgatggtaaaggtgtaaataaaaatccacaaaaagctatttcattatatctaaacgcggcta

SEQ ID NO: 218386 - DNA, 75 bp, synthetic construct
  source 1..75: mol_type = other DNA
taaacctcatcaataaatatgatttatctgatgattatttaagtttaattattgagttaatagggtggtcatttc

SEQ ID NO: 218387 - DNA, 75 bp, synthetic construct
  source 1..75: mol_type = other DNA
acagaaattaacgaaagttgtcttctttattatcgcatcgaaaaagaaatagccagttatttttacagtacgatg

SEQ ID NO: 218388 - DNA, 75 bp, synthetic construct
  source 1..75: mol_type = other DNA
accgtaaagttgccgatgattgttatgaagcgcacgctacagcagcttctgggcggcgcaccgtttatcatcagc

SEQ ID NO: 218389 - DNA, 75 bp, synthetic construct
  source 1..75: mol_type = other DNA
gtcacgcttattgggtggttgaacatgatggtcaagtcgcaggcggtggtggaattgcgccactaacgggtagtg

SEQ ID NO: 218390 - DNA, 75 bp, synthetic construct
  source 1..75: mol_type = other DNA
tatctaaaaacaataattaaatacaaaagcaacaataaagatgggatgccgaattttgatgaattaatcagcaaa

SEQ ID NO: 218391 - DNA, 75 bp, synthetic construct
  source 1..75: mol_type = other DNA
aagaaaagttatttgagaaccatttaaactcattattaaaacaagtcatttccgaaccaaaattaaaccctccac

SEQ ID NO: 218392 - DNA, 75 bp, synthetic construct
  source 1..75: mol_type = other DNA
tattggtgtagttgaataccttaaatctcttgggcagaaggttattatcctgcctgattttaacagcagtgttga

SEQ ID NO: 218393 - DNA, 75 bp, synthetic construct
  source 1..75: mol_type = other DNA
acgaggaacataagcaggagtttctgcacgcggtcgatgccagggtgaatgagctggaagagctgctgccgctgc

SEQ ID NO: 218394 - DNA, 75 bp, synthetic construct
  source 1..75: mol_type = other DNA
tggcgaatgtaggtaaccttttacggaccgtaacccgaaaaaccagaaatcaggacgtagacgtaagagaggcgg

SEQ ID NO: 218395 - DNA, 75 bp, synthetic construct
  source 1..75: mol_type = other DNA
cctatgcgcaggacatcaaaaatatatatcgtgtattactggcaagaaaaaagttactttctgaacgtctcgcgc

SEQ ID NO: 218396 - DNA, 75 bp, synthetic construct
  source 1..75: mol_type = other DNA
gcttaccacgaaatccttcctgaagctccaagaatccgcgcactgaatgacaagcgtaaaaaccagatccgaacg

SEQ ID NO: 218397 - DNA, 75 bp, synthetic construct
  source 1..75: mol_type = other DNA
gcgcgatttcggtttatgatgaaaataaccgactctttgtcacctccaattttcatcttgatccctcatcaatgc

SEQ ID NO: 218398 - DNA, 75 bp, synthetic construct
  source 1..75: mol_type = other DNA
tctgcgccagctttgatgaaacgctggcgatgttgaaggcgggggatgtggtgtattgcgatccgccttatgacg

SEQ ID NO: 218399 - DNA, 75 bp, synthetic construct
  source 1..75: mol_type = other DNA
atgaatgttgtcgtttcgcccgcactccgtttgcgcaaacttactgccgccgataatgctgctatcgccagcgtc

SEQ ID NO: 218400 - DNA, 75 bp, synthetic construct
  source 1..75: mol_type = other DNA
ggaatatacgtccggtgagacagaaaatgaaacccgtagcgtagctttgaagcgtctgggacgtaaaggagctag

SEQ ID NO: 218401 - DNA, 75 bp, synthetic construct
  source 1..75: mol_type = other DNA
acactcatcggtagctggattgtcgatgatgaagcgtgcggaatggggatccgtgaagataacacactgatcacc

SEQ ID NO: 218402 - DNA, 75 bp, synthetic construct
  source 1..75: mol_type = other DNA
agaaaaaccagaacggcgcagatattccgggaaaagataccttcaccaaaaaatattggggcctgccgcgcatat

SEQ ID NO: 218403 - DNA, 75 bp, synthetic construct
  source 1..75: mol_type = other DNA
cgctgatggcaataatgccaccaaaaccagcctcaatgatgagatgtgcgaagccattatctccgccgtacgcga

SEQ ID NO: 218404 - DNA, 75 bp, synthetic construct
  source 1..75: mol_type = other DNA
gatgcaatatcctctgcccgttttgctgctgtctcggcgcgcgttgccgcggattccgccgtacttttgctctga

SEQ ID NO: 218405 - DNA, 75 bp, synthetic construct
  source 1..75: mol_type = other DNA
ctggcagctctatctggggcgttgtatttactgcggacgttgtgaagagtgtgcccgaccagagccatccagctt

SEQ ID NO: 218406 - DNA, 75 bp, synthetic construct
  source 1..75: mol_type = other DNA
tctggattgatattccaccggcgacacgtgaagagttgattgctgctgccgaacaagaacgccagaaactactgg

SEQ ID NO: 218407 - DNA, 75 bp, synthetic construct
  source 1..75: mol_type = other DNA
ctcgattcttttgcattaaccatcgcaaacctgctcagtgctgttcgcaccttcaacctcctggatgatacgcga

SEQ ID NO: 218408 - DNA, 75 bp, synthetic construct
  source 1..75: mol_type = other DNA
gaacttttatttaacgccggggaggtgaatttcgatattagccgtctttcatttataaaaaagatacccacagct

SEQ ID NO: 218409 - DNA, 75 bp, synthetic construct
  source 1..75: mol_type = other DNA
ggctcacatgtattcccttgatatttggttcaaagggaatgttgtagaccgatataatttcagccagacggcgag

SEQ ID NO: 218410 - DNA, 75 bp, synthetic construct
  source 1..75: mol_type = other DNA
acttccaggtatcaagcagtcggaggtcttttgcacgatgccacggtggaattctataccgacagcagttttaac

SEQ ID NO: 218411 - DNA, 75 bp, synthetic construct
  source 1..75: mol_type = other DNA
tgaacttcgctcaagctctccagatatatacgttggagacgatggctggcacactgtacaattttctattacggg

SEQ ID NO: 218412 - DNA, 75 bp, synthetic construct
  source 1..75: mol_type = other DNA
gcaaaaggtgccggagtacttattgaagggttacccaacagcaaaaattcacaaaatttcacgcttaagccaaat

SEQ ID NO: 218413 - DNA, 75 bp, synthetic construct
  source 1..75: mol_type = other DNA
ttcagcgcagcctcgatatccaacagcgtagcgttcaacaattagcgaacactattgtaaatagtcttattcaat

SEQ ID NO: 218414 - DNA, 75 bp, synthetic construct
  source 1..75: mol_type = other DNA
tagcgaacactattgtaaatagtcttattcaatatgacgatcctgcagcatggactgagcaggagcaattgttga

SEQ ID NO: 218415 - DNA, 75 bp, synthetic construct
  source 1..75: mol_type = other DNA
ataccgacagcagttttaaccctgctccaaatactaacgtgcaattaaaacatactggtgattatttgtattcat

SEQ ID NO: 218416 - DNA, 75 bp, synthetic construct
  source 1..75: mol_type = other DNA
gtacaaacgaatttattgcagctatgcaaaatagtgattcgactttaacattttgggaaactcaaactaatagag

SEQ ID NO: 218417 - DNA, 75 bp, synthetic construct
  source 1..75: mol_type = other DNA
aagtcgtgtttttctctttgttactgtgtgttggtacacagcaagcagtagctgcacaggatcagaatacacatg

SEQ ID NO: 218418 - DNA, 75 bp, synthetic construct
  source 1..75: mol_type = other DNA
caacggcggcgaccgccgtggtttatcctcattctacgcttgcggcaagcgttccggcagctacacccgcgccag

SEQ ID NO: 218419 - DNA, 75 bp, synthetic construct
  source 1..75: mol_type = other DNA
agacaacggtgagcgggagaaagcgcagcgccgcagcctggcggagaagttacagcaggaagggagcgaagacgg

SEQ ID NO: 218420 - DNA, 75 bp, synthetic construct
  source 1..75: mol_type = other DNA
ttttaccactgcgaccaccggggcctgccgctggcgctcatcagcgaagacggcaatactgtgtggagtgcagaa

SEQ ID NO: 218421 - DNA, 75 bp, synthetic construct
  source 1..75: mol_type = other DNA
taagaaagctactaccggtactaattttgataaaattggtgaagacgaaagaaataaaaagttaaaagaacaaga

SEQ ID NO: 218422 - DNA, 75 bp, synthetic construct
  source 1..75: mol_type = other DNA
tctgtttcggtaacaaacaaccagaatactgaagaaactgcaaagcggattgcctcggtgatgggttttcatgtc

SEQ ID NO: 218423 - DNA, 75 bp, synthetic construct
  source 1..75: mol_type = other DNA
acgaatcactgattcacatcagtggaacaccttgttaagtctgcataatgcgcagttttatttgctgcaacgtac

SEQ ID NO: 218424 - DNA, 75 bp, synthetic construct
  source 1..75: mol_type = other DNA
tatgtcggcggtggcgatcggggatttggctttcagatgttcactctggtactgatcgccttttttattgtttca

SEQ ID NO: 218425 - DNA, 75 bp, synthetic construct
  source 1..75: mol_type = other DNA
tacggtgaatataaattgcacatccgctgtgagagcattgcttattccgtgcagacgatggtggtgaagggcggt

SEQ ID NO: 218426 - DNA, 75 bp, synthetic construct
  source 1..75: mol_type = other DNA
caccggcaaaaaaagcgtgctggattatctgttgaaaccctttaacaaagcacaggaggcgttgcgcgaacgatg

SEQ ID NO: 218427 - DNA, 75 bp, synthetic construct
  source 1..75: mol_type = other DNA
atgaacggacaactgcaatataaccgtggcctgactgaaccccgcctgccgcgttcggcgctggcagtgcgtgtg

SEQ ID NO: 218428 - DNA, 75 bp, synthetic construct
  source 1..75: mol_type = other DNA
aagtgagcaataaaccgctggtcttccctgacgaactgaataaattccccgaacttatcgagtcggaaacggcgt

SEQ ID NO: 218429 - DNA, 75 bp, synthetic construct
  source 1..75: mol_type = other DNA
ctggtgacgtggatttgcccctatatttccagacacctgttatcacttaacccattactggcttgctgccgtaga

SEQ ID NO: 218430 - DNA, 75 bp, synthetic construct
  source 1..75: mol_type = other DNA
atgcacagaattcgtgttttacgtgatcgtggattaattggtcgcaagagaaaaacgctgagcagagaagaaatc

SEQ ID NO: 218431 - DNA, 75 bp, synthetic construct
  source 1..75: mol_type = other DNA
aactgcgtgatgagaaggggatgacattcagcgaaatcaggaagcacatccgggacacgaccgggatatccctta

SEQ ID NO: 218432 - DNA, 75 bp, synthetic construct
  source 1..75: mol_type = other DNA
ctggttccaaccatcacgctcgataaacgtgagcgcgaacaactggttccttatccgcgtttttttgccagtctg

SEQ ID NO: 218433 - DNA, 75 bp, synthetic construct
  source 1..75: mol_type = other DNA
cggcgcttttctgggtattacaggtcatcatggtggcagataccgttgattacggtgaatataaactgcacgtac

SEQ ID NO: 218434 - DNA, 75 bp, synthetic construct
  source 1..75: mol_type = other DNA
tcacaacgtcgtcctcattgtgattgcgggtattttgctgaatgtgggaacggcgcttttctgggtattacaggt

SEQ ID NO: 218435 - DNA, 75 bp, synthetic construct
  source 1..75: mol_type = other DNA
gacatttatcgccgatatcaggacggcgaagatcgctgatatggaggtcattaaggatggttcagaggcggacgg

SEQ ID NO: 218436 - DNA, 75 bp, synthetic construct
  source 1..75: mol_type = other DNA
gcgcaacggttgccccgacggtgatcaccgagccggacggcacggtggaaatcagtgtcaccagccagacggcgg

SEQ ID NO: 218437 - DNA, 75 bp, synthetic construct
  source 1..75: mol_type = other DNA
tacctcaagggataattcaggaatcatggagtgagatgaattcatattgtattggtaatggttatatattaccgt

SEQ ID NO: 218438 - DNA, 75 bp, synthetic construct
  source 1..75: mol_type = other DNA
gataatgccctgtatgtgaaaattgtccggggcagtaaaaccctgcggctgtataaggtacaaaccggttactga

SEQ ID NO: 218439 - DNA, 75 bp, synthetic construct
  source 1..75: mol_type = other DNA
acggcgcagatcgctgatctggtggtcattaaggacggctcagtggctgacggcgcaatggcgaacatgctgcag

SEQ ID NO: 218440 - DNA, 75 bp, synthetic construct
  source 1..75: mol_type = other DNA
gccgaaaagcaataaagggaataaagtcacatatagattctcactgcagaaatggtttttaccccaaggagattt

SEQ ID NO: 218441 - DNA, 75 bp, synthetic construct
  source 1..75: mol_type = other DNA
gcaatggtcgcttcgactgtcatcacagggccggacggcacggtggagatctcagtcaccagccagatcgccgga

SEQ ID NO: 218442 - DNA, 75 bp, synthetic construct
  source 1..75: mol_type = other DNA
agcatcaacagcagcagcctgagccggaacgtgacgtttgtcgccgatgtcagcacggcaaaaatagcggatctg

SEQ ID NO: 218443 - DNA, 75 bp, synthetic construct
  source 1..75: mol_type = other DNA
caacggcgcaacgactgccccgacggtcatcacagagccggacggtacggtggagatctcagtcaccagccagac

SEQ ID NO: 218444 - DNA, 75 bp, synthetic construct
  source 1..75: mol_type = other DNA
agtctggaggtgacgcaggataacgcggtcgcagacggttcgacggcgaatacgctgcaggtgaaagtcaccgat

SEQ ID NO: 218445 - DNA, 75 bp, synthetic construct
  source 1..75: mol_type = other DNA
gcgaacacgctgcgggtgagggtcaccgatgcgttcggtaatacgcttgccgggcagacggtcagcgtgacggca

SEQ ID NO: 218446 - DNA, 75 bp, synthetic construct
  source 1..75: mol_type = other DNA
cagtcagacggcgggcaccagtgccgtcactgcaaccatcaacagcagcagccagagccggaacgtgacgtttgt

SEQ ID NO: 218447 - DNA, 75 bp, synthetic construct
  source 1..75: mol_type = other DNA
tcttatatgatatctttttatctatataataaaacaaataataaattatatcttctttcatccatgttccttgca

SEQ ID NO: 218448 - DNA, 75 bp, synthetic construct
  source 1..75: mol_type = other DNA
aaacgtatgggtgacctgcgtgacatcaacggcgaagccggtgcatgggcacgcatcatgagcggtactggctct

SEQ ID NO: 218449 - DNA, 75 bp, synthetic construct
  source 1..75: mol_type = other DNA
cggaagcagaaaaccgccggcgctttaatatcattaatgataaagaaaatcgggtgaacggtatcgcactctatt

SEQ ID NO: 218450 - DNA, 75 bp, synthetic construct
  source 1..75: mol_type = other DNA
acctggtttccagttgattaaccagcgaatcacccacagcacgattaacgacaatatttgggcatcgctacaaaa

SEQ ID NO: 218451 - DNA, 75 bp, synthetic construct
  source 1..75: mol_type = other DNA
tagtgctactgacgcgtggtcaggttgaagctttgcaacgcattcaggaagaggagcgtaaacgttctgaatttg

SEQ ID NO: 218452 - DNA, 75 bp, synthetic construct
  source 1..75: mol_type = other DNA
agtgccacagcagacaaaaagtctgacaagaaaaaaccttccgttagctgtcaggatgttgtcgatgcttaccac

SEQ ID NO: 218453 - DNA, 75 bp, synthetic construct
  source 1..75: mol_type = other DNA
gagcgtcagaaatctgtgcttggtgtggcaccgtcaattcatgttatagcccggcaactgatggataaggcactt

SEQ ID NO: 218454 - DNA, 75 bp, synthetic construct
  source 1..75: mol_type = other DNA
atggcaacgttttatctggttagccagtggctggcacagtacggacaatttgttgcaggcatgtcatacactatg

SEQ ID NO: 218455 - DNA, 75 bp, synthetic construct
  source 1..75: mol_type = other DNA
cgcagattcagaaaggccagaaagtagttgatgttgctgtaaacaaggcaattccggttctgggtattcgtacta

SEQ ID NO: 218456 - DNA, 75 bp, synthetic construct
  source 1..75: mol_type = other DNA
ttaataaatgagaagaaggattttattttattcgcgataactatcctagtcttccttgcttcttttgtcgcaata

SEQ ID NO: 218457 - DNA, 75 bp, synthetic construct
  source 1..75: mol_type = other DNA
acgtctgactaaagggatcagtcagcaagagctggacgaatatcagcaaaatattcaacgcagcctcgatattca

SEQ ID NO: 218458 - DNA, 75 bp, synthetic construct
  source 1..75: mol_type = other DNA
gaacagatgcaaaaactacttgatgcagcggagccagagatcaggaacattatattaatgggcttgttttccggg

SEQ ID NO: 218459 - DNA, 75 bp, synthetic construct
  source 1..75: mol_type = other DNA
tattaccgctccactcattcgtaataccgttcgcccaacaacattactgatgctgtacacctttatctcatttat

SEQ ID NO: 218460 - DNA, 75 bp, synthetic construct
  source 1..75: mol_type = other DNA
taattgcagatataaaaaaaaccaaccgtaaaggttggttttttcttgggatttttggtcgcacgagagtagttt

SEQ ID NO: 218461 - DNA, 75 bp, synthetic construct
  source 1..75: mol_type = other DNA
gaattaattgcagatataaaaaaaaccaaccgtaaaggttggttttttcttgggatttttggtccacgagagtag

SEQ ID NO: 218462 - DNA, 75 bp, synthetic construct
  source 1..75: mol_type = other DNA
gcagtccaggccgtttaccgtaaagcgcatttcagcggcggcgggtcgcctggcgattctgtcgtagtgcattga

SEQ ID NO: 218463 - DNA, 75 bp, synthetic construct
  source 1..75: mol_type = other DNA
ttttgctgattatcggcgtggccggttttattggcacgctggttgtttcggcatttctcaacagaaaattctacc

SEQ ID NO: 218464 - DNA, 75 bp, synthetic construct
  source 1..75: mol_type = other DNA
gcatttctcaacagaaaattctaccccacgctgatggccatacccggactgatggccgtcattgccatcggtctg

SEQ ID NO: 218465 - DNA, 75 bp, synthetic construct
  source 1..75: mol_type = other DNA
ccgctacgttgaaaataaacgtgtgctgaactgtttctcctataccggtggtttcgccgtatcggcactgatggg

SEQ ID NO: 218466 - DNA, 75 bp, synthetic construct
  source 1..75: mol_type = other DNA
tccacgcagctcatgcaagatgtcaccccagacgcatggccatcctggccagtaaaactgggttggctgacaccg

SEQ ID NO: 218467 - DNA, 75 bp, synthetic construct
  source 1..75: mol_type = other DNA
atgaaaatcaagcatgagcacatccgcatggcgatgaatgcctgggcatatcctgatggtgagaaagttcctgca

SEQ ID NO: 218468 - DNA, 75 bp, synthetic construct
  source 1..75: mol_type = other DNA
gtgctataaccgtgcatactcaggcagatacgtcacgtcccgatccgttatttaatcctctgaaaacgggcgttt

SEQ ID NO: 218469 - DNA, 75 bp, synthetic construct
  source 1..75: mol_type = other DNA
tgccgaaggcgtgaaagcgcgcgtggtttccatgccgtctaccgacgcattcgacaagcaggacgcggcttaccg

SEQ ID NO: 218470 - DNA, 75 bp, synthetic construct
  source 1..75: mol_type = other DNA
ttattgctgatgtcgacgagcgtacccgtaaaacaggcgaagccttcgccgccgggctggcacctgactgtgcaa

SEQ ID NO: 218471 - DNA, 75 bp, synthetic construct
  source 1..75: mol_type = other DNA
aaacgctcagggcatgtgttcactggcggattttacgcaaatagtgaatgaagcgcgtattccggcatgtagttt

SEQ ID NO: 218472 - DNA, 75 bp, synthetic construct
  source 1..75: mol_type = other DNA
cctgctcacgccgattgcccgcgatttaggcgtgacggaggggttggctgggcaggggattgctatctccggcgc

SEQ ID NO: 218473 - DNA, 75 bp, synthetic construct
  source 1..75: mol_type = other DNA
atgcgcaatggtcgtctggttgtcagggtcgaagggaaaatcggtggtatatcagtcagcaaaatgaaaccttga

SEQ ID NO: 218474 - DNA, 75 bp, synthetic construct
  source 1..75: mol_type = other DNA
aaggagtcggtgtacttatagaaggtttagcaactagtaaaaaccctctaatgacattgaaacctaatgattcaa

SEQ ID NO: 218475 - DNA, 75 bp, synthetic construct
  source 1..75: mol_type = other DNA
tgagttcctgcgctggaataaagctggtggtaaagtcctgaatgggctcacccgtcgccgggaggcagagcgggc

SEQ ID NO: 218476 - DNA, 75 bp, synthetic construct
  source 1..75: mol_type = other DNA
gcagataagccacattgctatgcttcggcaattgaaaatattcattttactggtggatatctggacgaaaccaat

SEQ ID NO: 218477 - DNA, 75 bp, synthetic construct
  source 1..75: mol_type = other DNA
cagatgttgcccaaccggaagaaattaaaacagcgggagcatcctgcctgataaaaatgacgcggccatgcttta

SEQ ID NO: 218478 - DNA, 75 bp, synthetic construct
  source 1..75: mol_type = other DNA
gtggattgtacgcctgggaattcgagaaagatgctcagaaattcagtctgaaagtcaaagggcaatatattgcga

SEQ ID NO: 218479 - DNA, 75 bp, synthetic construct
  source 1..75: mol_type = other DNA
acgtgaatggcttgaagccgcaaccgatgcgcacaagaaactcggatggaaagcgaaaggcgctgttatttctgc

SEQ ID NO: 218480 - DNA, 75 bp, synthetic construct
  source 1..75: mol_type = other DNA
ggtgcagggctacgcagacagacaacggaagcattctccggtaagaaaatcaccgccacgatgttcaagggcagc

SEQ ID NO: 218481 - DNA, 75 bp, synthetic construct
  source 1..75: mol_type = other DNA
agcggtaagtcatgggcaattgcgaggctgcttgttgaagcggcgcgtcggcagccagtgcgtattctctgcgct

SEQ ID NO: 218482 - DNA, 75 bp, synthetic construct
  source 1..75: mol_type = other DNA
gtgaaagcgcgcgtggtttccatgccgtctaccgacgcattcgacaagcaggatgcggcttaccgtgagtctgta

SEQ ID NO: 218483 - DNA, 75 bp, synthetic construct
  source 1..75: mol_type = other DNA
ttgcctgctgacggtgaactacaccgacaacccgcactttcctgaagttctccgtctggagatggaagagtgtaa

SEQ ID NO: 218484 - DNA, 75 bp, synthetic construct
  source 1..75: mol_type = other DNA
ttacctgtgggatggtgatggcgtcggtgcgggcctacgcagacagacaacggaagcgttctccggcaagaaaat

SEQ ID NO: 218485 - DNA, 75 bp, synthetic construct
  source 1..75: mol_type = other DNA
cgagtggggcttcatcgattttgtgaatcgtcagtggaaagagaaaatattttctccagtggcgggtaagaatat

SEQ ID NO: 218486 - DNA, 75 bp, synthetic construct
  source 1..75: mol_type = other DNA
tgctacattcgaggaaccagcgacacaagccgaaccgcaaaacatgctaactctttctgatgcgtgggctatgta

SEQ ID NO: 218487 - DNA, 75 bp, synthetic construct
  source 1..75: mol_type = other DNA
catgaagaccgcgaggttgtctctccttcggtagatgaggaagaacaaactgaagcacaaccagaacacgtgtta

SEQ ID NO: 218488 - DNA, 75 bp, synthetic construct
  source 1..75: mol_type = other DNA
tgatagcatgcgatgatgtcccaccggatgatctggttggtgttgaggctatccataagcatctcaaactgtata

SEQ ID NO: 218489 - DNA, 75 bp, synthetic construct
  source 1..75: mol_type = other DNA
ctgagaacgctacaaggcaggtagtcatccaccctaagttaatcgaatggggtttcatggagtacgttgatcgcc

SEQ ID NO: 218490 - DNA, 75 bp, synthetic construct
  source 1..75: mol_type = other DNA
acatgtaccgaagcgagaaggggcgaagctggactaaagcaatcgcccaggccaatgagcgttttatggaagtac

SEQ ID NO: 218491 - DNA, 75 bp, synthetic construct
  source 1..75: mol_type = other DNA
atgcgcatgatgtgctgtgtctatggaatgagaaaagtcgcttctcccggtactgggaggaagaatttcgatggc

SEQ ID NO: 218492 - DNA, 75 bp, synthetic construct
  source 1..75: mol_type = other DNA
ccgccgcaaactcaaagccaaccgggatcataaaaatctcagctggaatctggcggaaaggctgcaggtttattg

SEQ ID NO: 218493 - DNA, 75 bp, synthetic construct
  source 1..75: mol_type = other DNA
tagaactgagcgaagagatctgacaaaaaaaacgttaggtagcatcccccaaggggcagcccttaaagccttgaa

SEQ ID NO: 218494 - DNA, 75 bp, synthetic construct
  source 1..75: mol_type = other DNA
ctgacaataaagatattctggagaagtctccgactgatggagtagtcgccgcaccgtcgaaagcgaggtttggag

SEQ ID NO: 218495 - DNA, 75 bp, synthetic construct
  source 1..75: mol_type = other DNA
agaatggtttctaccagcattcagtttttctgacccagacggataacagaatagtcagttcgcacgatgatggca

SEQ ID NO: 218496 - DNA, 75 bp, synthetic construct
  source 1..75: mol_type = other DNA
aaccatttatataccgtgctggaaaaaggtgcggacggcaatcaggtgataattgtcggtgccgttcacgaatgc

SEQ ID NO: 218497 - DNA, 75 bp, synthetic construct
  source 1..75: mol_type = other DNA
tattcttggggtacagaactcttccatacacgtttcagcgaaacggcaactactatctgcaaatccggctttcta

SEQ ID NO: 218498 - DNA, 75 bp, synthetic construct
  source 1..75: mol_type = other DNA
tggcaactgacagtggtagcattgcttccggttccacttcttgtgctggtgacagtctggagaggaagacggatc

SEQ ID NO: 218499 - DNA, 75 bp, synthetic construct
  source 1..75: mol_type = other DNA
cgtcgggtcatactctggcagtgaccggaccctcgggggctggaaaatccacgctcagccgtttattgttacggt

SEQ ID NO: 218500 - DNA, 75 bp, synthetic construct
  source 1..75: mol_type = other DNA
tatgcagattttaattaccttgaggggaatgtgctgaacctgaaagaacagaagaccgggaagactcgatctatc

SEQ ID NO: 218501 - DNA, 75 bp, synthetic construct
  source 1..75: mol_type = other DNA
tggcggtacgcgggactatatgaacatgtggccgagcggtggttttcctatcactaaccatatgccgtattacga

SEQ ID NO: 218502 - DNA, 75 bp, synthetic construct
  source 1..75: mol_type = other DNA
tgaacgttggtacaatgaccagttccgctatatctacatagagtggcatcaaccggtggatttcgacacactggt

SEQ ID NO: 218503 - DNA, 75 bp, synthetic construct
  source 1..75: mol_type = other DNA
aattgcagcggccagacaggccaatgcacatgagttcatcagcgggctaccacagggatataatactatagtagg

SEQ ID NO: 218504 - DNA, 75 bp, synthetic construct
  source 1..75: mol_type = other DNA
ctcaggtatcagtaacagggggccgtgctgttgcatggtatgaggccgatatttataaatggattaatgagaggc

SEQ ID NO: 218505 - DNA, 75 bp, synthetic construct
  source 1..75: mol_type = other DNA
tgattgagtgcgatgatgttccaccggatcaactgataggcgttgaggccatccataagcatctcaagctgtata

SEQ ID NO: 218506 - DNA, 75 bp, synthetic construct
  source 1..75: mol_type = other DNA
ctgacagctatcgtgaagcatctgctttgatgattggcgttactccgcatattccttttgttaaatcattagcta

SEQ ID NO: 218507 - DNA, 75 bp, synthetic construct
  source 1..75: mol_type = other DNA
ccagcaagcagccggagctggcgcaaaaattcctccagtttatggtttctccggcttttcagaatgcgatcccaa

SEQ ID NO: 218508 - DNA, 75 bp, synthetic construct
  source 1..75: mol_type = other DNA
tgggcatcttcattggcggtaatcgatgatgttgatcatttcctgtttgatggagatggacttggagcagggctt

SEQ ID NO: 218509 - DNA, 75 bp, synthetic construct
  source 1..75: mol_type = other DNA
cagtgcaggttttgtcaaaccacagaacaggaaatcactggccgacgtcgtgatgtactacaacggcaagccagt

SEQ ID NO: 218510 - DNA, 75 bp, synthetic construct
  source 1..75: mol_type = other DNA
cacgctgcgggcgagggtgaccgatgcgttcgggaatgcgcttgccgggcagacggtcagcgtgttggcggacaa

SEQ ID NO: 218511 - DNA, 75 bp, synthetic construct
  source 1..75: mol_type = other DNA
agtgaaggcattgtgtcgatgtttcgagtggacccagatctggctggtccattgatggcgatggtcaccaccatg

SEQ ID NO: 218512 - DNA, 75 bp, synthetic construct
  source 1..75: mol_type = other DNA
atgcaatcacttacgttttaccaggatacaggatcgccgcagcaggcggtgataaatcgtgctcaagcgtgcaag

SEQ ID NO: 218513 - DNA, 75 bp, synthetic construct
  source 1..75: mol_type = other DNA
gaacgtccgccagctgactcctgcaatcctcgccgttctgccgattgtgtaccgcagtcgcctgctgccagaaga

SEQ ID NO: 218514 - DNA, 75 bp, synthetic construct
  source 1..75: mol_type = other DNA
gccatcatcccggaccgtacccgtatcataatgaatgagtcagataaaggggaagcattaaaacttactaatcaa

SEQ ID NO: 218515 - DNA, 75 bp, synthetic construct
  source 1..75: mol_type = other DNA
agtagtgcgacaaaggatgtcggaactgcggcagggaatgttatgcaggtgggagcttttggggttggtgctgtt

SEQ ID NO: 218516 - DNA, 75 bp, synthetic construct
  source 1..75: mol_type = other DNA
gcgttcgaagaaaagcatggttctcaggttgatttaatttttcgttttcttgatcacgcctttgcaactggcgtg

SEQ ID NO: 218517 - DNA, 75 bp, synthetic construct
  source 1..75: mol_type = other DNA
gttatctttatgcttcgcacttcaccagagcatattttctttctgataaggaaatatcatttattaaatcgaatc

SEQ ID NO: 218518 - DNA, 75 bp, synthetic construct
  source 1..75: mol_type = other DNA
aaatctcaggataaacatgcacttttccccatttttactgcgagttggcgagctaatcgtataaagaataaaggt

SEQ ID NO: 218519 - DNA, 75 bp, synthetic construct
  source 1..75: mol_type = other DNA
atatttttaaatataaaacaacggaacgaaaaaaatcatgcaataaatatgtttcgtgaagtctcaatcagtaat

SEQ ID NO: 218520 - DNA, 75 bp, synthetic construct
  source 1..75: mol_type = other DNA
atttcaatagcgagcggtaccgcgagaacgttcgtcagttgacgccggcaattcttgctgttctgccgctcgagt

SEQ ID NO: 218521 - DNA, 75 bp, synthetic construct
  source 1..75: mol_type = other DNA
gtgatttttatcaaagcgagtggtgaatgtgtcgatttcagcaaaaatattcttgatacagttgacttctcgcag

SEQ ID NO: 218522 - DNA, 75 bp, synthetic construct
  source 1..75: mol_type = other DNA
ttgacttttctcagagtaactttggtcatggtaattttcgcgaatgtcagattaaaaattcaaacttcgataaat

SEQ ID NO: 218523 - DNA, 75 bp, synthetic construct
  source 1..75: mol_type = other DNA
cctgaagccaaagcagggtagccaactgcttatacagcatggcggcgggacggagcttgccaagctgagaggaag

SEQ ID NO: 218524 - DNA, 75 bp, synthetic construct
  source 1..75: mol_type = other DNA
cgaaggcgctgaaaagctcaccctgtggatgaccggcgcgcccaatgagtgggatttatacgcccgtcagttccg

SEQ ID NO: 218525 - DNA, 75 bp, synthetic construct
  source 1..75: mol_type = other DNA
gcggaatatgtgaacaacggaggaaatcccatgcagtatgcaaaatctgtcattctgaacgttgaagaaatcgac

SEQ ID NO: 218526 - DNA, 75 bp, synthetic construct
  source 1..75: mol_type = other DNA
gcgcccggaaagggtgggcggatttccacacagcaccggcgcccggcaaggtgggcggatttccacacggcaccg

SEQ ID NO: 218527 - DNA, 75 bp, synthetic construct
  source 1..75: mol_type = other DNA
gcgttgttgggatcaattctgaaaccgctaaaaacaaagctgaccgatggcgctgaagtggcgctggatacgctg

SEQ ID NO: 218528 - DNA, 75 bp, synthetic construct
  source 1..75: mol_type = other DNA
ggtgcgtagtctcggttatcaaacggtagaactgaacgagtttattctgcccgctaaagccgccaacgctgtcga

SEQ ID NO: 218529 - DNA, 75 bp, synthetic construct
  source 1..75: mol_type = other DNA
agtgagatttgtcaggcaaaatccatcggcaggtttgtcgttagtggctcgtgctggagggatgattgttgggag

SEQ ID NO: 218530 - DNA, 75 bp, synthetic construct
  source 1..75: mol_type = other DNA
ttattcgagagaacctgttccggtgtttccctgaatcaggctggtaatgtttttcacggcagggtgttaagctat

SEQ ID NO: 218531 - DNA, 75 bp, synthetic construct
  source 1..75: mol_type = other DNA
atgggattcccttcaccagcgacggactacgtcgagcaaaggttgtctgttaactcgatctgcaatgtcggccca

SEQ ID NO: 218532 - DNA, 75 bp, synthetic construct
  source 1..75: mol_type = other DNA
gttctgatccagcacggcggcgggacggagcttgccacgctgagaggaaagtcgctgattaccgaagatggcgaa

SEQ ID NO: 218533 - DNA, 75 bp, synthetic construct
  source 1..75: mol_type = other DNA
actacgtcgagcaaaggttgtctgttaactcgatctgcaatgtcggcccaaacacgctagttttcgagcgatctg

SEQ ID NO: 218534 - DNA, 75 bp, synthetic construct
  source 1..75: mol_type = other DNA
acgcgccagcgtcgcatcaggcaaccggctcgggcgttggatgtcggatgcggcgtgaccgccttgtctgaccta

SEQ ID NO: 218535 - DNA, 75 bp, synthetic construct
  source 1..75: mol_type = other DNA
ggccaattcgtatcaaggaacaattaccttctgctgattattacctcacttggagtaaaaaatatattccttcca

SEQ ID NO: 218536 - DNA, 75 bp, synthetic construct
  source 1..75: mol_type = other DNA
cgcttgccgggcagacagtcagcgtgattgcagacaacagcgcaacggttgctccgacggtcaccacgcagccgg

SEQ ID NO: 218537 - DNA, 75 bp, synthetic construct
  source 1..75: mol_type = other DNA
ccggaacgtgacatttatcgccgatgtcaggacggcgaagatcgctgatctggtagtcacccgggataactcagt

SEQ ID NO: 218538 - DNA, 75 bp, synthetic construct
  source 1..75: mol_type = other DNA
ccagacggcggggatcagtactgtcacagccagcatcaacaacagcagtctgagccggaacgtgacatttatcgc

SEQ ID NO: 218539 - DNA, 75 bp, synthetic construct
  source 1..75: mol_type = other DNA
atttcctcttaacaaattatcaaaccctgtactgctatcatttctaagatgcatcgacgacaccgactttaataa

SEQ ID NO: 218540 - DNA, 75 bp, synthetic construct
  source 1..75: mol_type = other DNA
cggctatgtgatggcgacagaaaaaatcagaagtactggtgtgacaacaaagacagtgcccacaggcgggcagag

SEQ ID NO: 218541 - DNA, 75 bp, synthetic construct
  source 1..75: mol_type = other DNA
tcgttagccaggataacgcggtggcagacggcgcgacggcgaatacgctgcaagtgagggtcacggatgcgttcg

SEQ ID NO: 218542 - DNA, 75 bp, synthetic construct
  source 1..75: mol_type = other DNA
gaaaccgacaacacttacccgatagcggttacagcggaagattcgaaaggaaatttctcccggtgtgaagaaagt

SEQ ID NO: 218543 - DNA, 75 bp, synthetic construct
  source 1..75: mol_type = other DNA
gccagagccagaacgtcacctttgtacctggtgatgcatcgcagctcacttcaaccgttgaaacaaataagtcga

SEQ ID NO: 218544 - DNA, 75 bp, synthetic construct
  source 1..75: mol_type = other DNA
cgccagcatcaacaacagcagcctgagccagagcgtgaagtttattgccgatgtcagcacggcgcagatcgcgat

SEQ ID NO: 218545 - DNA, 75 bp, synthetic construct
  source 1..75: mol_type = other DNA
gcagacggtcagcgtgacggcaggcaacggcgcaacggttgctccggtggtcaccacgcagccggacggcacggt

SEQ ID NO: 218546 - DNA, 75 bp, synthetic construct
  source 1..75: mol_type = other DNA
acggtcagcgtgttggcggataacggcgcaacggttgccccgacagtcactacgcagccggacggcacggtggaa

SEQ ID NO: 218547 - DNA, 75 bp, synthetic construct
  source 1..75: mol_type = other DNA
gacggcgcagatcgcggagctggtggttattaaggatggttcagaggcagacggtgcgacggcgaacacgctgca

SEQ ID NO: 218548 - DNA, 75 bp, synthetic construct
  source 1..75: mol_type = other DNA
gaacgggattatttcaccctcagagagcgaattgaaaccatcaccagccaactgacaggcctgcaagcgtatgtg

SEQ ID NO: 218549 - DNA, 75 bp, synthetic construct
  source 1..75: mol_type = other DNA
gccagatggtgcgaacaaaggtgacaaggtggaagtgacctttacggatgaagagggtaatgagcagaaagtcac

SEQ ID NO: 218550 - DNA, 75 bp, synthetic construct
  source 1..75: mol_type = other DNA
agttattgactgcgctagaacattattgcgtaatatattatgtatggctttattttatctaagcattgataatgt

SEQ ID NO: 218551 - DNA, 75 bp, synthetic construct
  source 1..75: mol_type = other DNA
gtccggtgcttgcctgggatgtggtcgcacccggtcagagtgggtttattgctcccgatggaacagttgataagc

SEQ ID NO: 218552 - DNA, 75 bp, synthetic construct
  source 1..75: mol_type = other DNA
tccttatataaaagatccaattatacgcagttatatccattctggtgaagataacaagttcgatgattttatgcg

SEQ ID NO: 218553 - DNA, 75 bp, synthetic construct
  source 1..75: mol_type = other DNA
caggattatgatttatggtttcgtttactcaaaaaagggttgaaatgttataagattaataattattcatatata

SEQ ID NO: 218554 - DNA, 75 bp, synthetic construct
  source 1..75: mol_type = other DNA
tccggacggtaacaacatcgaagctgtttaccatggtgagggtgatcgcagtgcccgctctgtagaaatcagctt

SEQ ID NO: 218555 - DNA, 75 bp, synthetic construct
  source 1..75: mol_type = other DNA
tgcagcggtgctggatgccaaatacacgaaggacttagctgatgctaaaaagcagcttgatgatttgcagcgttg

SEQ ID NO: 218556 - DNA, 75 bp, synthetic construct
  source 1..75: mol_type = other DNA
ctcaattattaccgtctccgaagtggaatcgacaggataaccgcgcaggttaactacctgcaggaatacatcagg

SEQ ID NO: 218557 - DNA, 75 bp, synthetic construct
  source 1..75: mol_type = other DNA
tccatgaaaaggaaaggctttcgcgttaagcctgccggaaaagccagctcaggtttaccgctggataaccatccg

SEQ ID NO: 218558 - DNA, 75 bp, synthetic construct
  source 1..75: mol_type = other DNA
ctgccctttccccagaggatatgtccattctgcaaggctacgctgatggaatgaatgcctggattgataaggtaa

SEQ ID NO: 218559 - DNA, 75 bp, synthetic construct
  source 1..75: mol_type = other DNA
atctgggtttgaaactattgatcttggggaaagttcagagaatcatctggatgtcggtataaaatcggatatgct

SEQ ID NO: 218560 - DNA, 75 bp, synthetic construct
  source 1..75: mol_type = other DNA
tggtcaggtaactgaagctgtcctgacccaggatggccctgtactggagaatttcactgcaggacaatccgggac

SEQ ID NO: 218561 - DNA, 75 bp, synthetic construct
  source 1..75: mol_type = other DNA
catccgttgttatacagtatggcggagatgtgtacctccgaatgctgcgcgtgcctgggactccccttagtgaca

SEQ ID NO: 218562 - DNA, 75 bp, synthetic construct
  source 1..75: mol_type = other DNA
atgcagataatctttggagaaaaatgcgtgtcattacgactattttttgccgccgtcttaatgctatggtgcgct

SEQ ID NO: 218563 - DNA, 75 bp, synthetic construct
  source 1..75: mol_type = other DNA
atgcgtgttattactacgactatttttgccgccgtcttaatgctatggtgcgctcaaactgctgcttatagcggg

SEQ ID NO: 218564 - DNA, 75 bp, synthetic construct
  source 1..75: mol_type = other DNA
gtttgcctttttgtgggggggggggcagatcgcgttacggagatcgaccgactgcttgagcaaaagccacgctta

SEQ ID NO: 218565 - DNA, 75 bp, synthetic construct
  source 1..75: mol_type = other DNA
gcgcatgggatggtaaagaggtggcgtctttgctggcctggactcatcagatgaaggccaaaaattggcaggagt

SEQ ID NO: 218566 - DNA, 75 bp, synthetic construct
  source 1..75: mol_type = other DNA
aattgcgtcactatccagcggtttgtatccgcgatacctccgttaacttccccccgatgcaagcctggttgttgg

SEQ ID NO: 218567 - DNA, 75 bp, synthetic construct
  source 1..75: mol_type = other DNA
gcagtggttaatttatgcaggtgtcatggtgctgctcgtgcttgccgggctggttatccatgcgttattgcgtcg

SEQ ID NO: 218568 - DNA, 75 bp, synthetic construct
  source 1..75: mol_type = other DNA
atgaatataattctgccgataaaagatatatttattattgcgggaaacatagtttttagcgttttatacaatgaa

SEQ ID NO: 218569 - DNA, 75 bp, synthetic construct
  source 1..75: mol_type = other DNA
gaagggagtcggatagataaatatttctctgatgaaaaaaggaacacttctaaaattgtaataaagctgggtgat

SEQ ID NO: 218570 - DNA, 75 bp, synthetic construct
  source 1..75: mol_type = other DNA
tacgactgatttttgctgccgtgttaatactttggggcgctcaagccgctgcttataccggacagtgccatgtta

SEQ ID NO: 218571 - DNA, 75 bp, synthetic construct
  source 1..75: mol_type = other DNA
ggtgacacgccagggcaaatttttcgcagtatgatcgatggttatcaccgccatcgcagtcatcacgcagagacc

SEQ ID NO: 218572 - DNA, 75 bp, synthetic construct
  source 1..75: mol_type = other DNA
gccacttttctgtcggaccggtggccttaatggtgcaggtacatacctggtgtggcttcgcattgctggccttct

SEQ ID NO: 218573 - DNA, 75 bp, synthetic construct
  source 1..75: mol_type = other DNA
cgtctcttcgtctggattttttaggttataacgcccaaattattcaacgatcgggtgatgctgccaacttactga

SEQ ID NO: 218574 - DNA, 75 bp, synthetic construct
  source 1..75: mol_type = other DNA
gagccagaacgtcacctttgtaccgggtgatgcatcgcagctcacttcaaccgttgaaacaaataagtcgaacta

SEQ ID NO: 218575 - DNA, 75 bp, synthetic construct
  source 1..75: mol_type = other DNA
ggtgagggtcacggatgcgttcggtaatgcgcttgccgggcagacggtcagcgtgatggcggacaacggcgcaac

SEQ ID NO: 218576 - DNA, 75 bp, synthetic construct
  source 1..75: mol_type = other DNA
gataaagacgggattgccagcgttaaccttgccagtgaccaggcggtaaacagtcttatcaaggccgagaccaat

SEQ ID NO: 218577 - DNA, 75 bp, synthetic construct
  source 1..75: mol_type = other DNA
tggtggtcattaaggacggttcagaggcagacggtgcgacggcgaacacgctgcgggcgagggtaaccgatgcat

SEQ ID NO: 218578 - DNA, 75 bp, synthetic construct
  source 1..75: mol_type = other DNA
ggatgtcaggacggcgcagatcgctgatctggtggtcattaaggacggcgcagtggcagacggcgcaatggcgaa

SEQ ID NO: 218579 - DNA, 75 bp, synthetic construct
  source 1..75: mol_type = other DNA
ttcacagcttcgtatacgagaagttttagtagtggaaggggcggatttacctgtcagtgctttattagttgatga

SEQ ID NO: 218580 - DNA, 75 bp, synthetic construct
  source 1..75: mol_type = other DNA
ttgtcctgatatttccggcaacccatcagggtatatcggatttatgcgcattatgagtaatgcaaaaggctttcc

SEQ ID NO: 218581 - DNA, 75 bp, synthetic construct
  source 1..75: mol_type = other DNA
tgatatgtatgttcagacttttccaaatgagcaaggtcgattaacaataagatttacatacggtggttcaactgg

SEQ ID NO: 218582 - DNA, 75 bp, synthetic construct
  source 1..75: mol_type = other DNA
atttggtggttcacaaaccgggaaaaatgaacgcagcacgcttgtgatcatcattaccccgactttcccgtcagg

SEQ ID NO: 218583 - DNA, 75 bp, synthetic construct
  source 1..75: mol_type = other DNA
aaggcaacccaaccgcatatcaggcggctctgtttggtgctacgtcccgtgacatcattttccctgacactttgg

SEQ ID NO: 218584 - DNA, 75 bp, synthetic construct
  source 1..75: mol_type = other DNA
ctggggatctttaccagccgtccaagtgatacgcaaatcatcgcactcgacacacttgaagatgtgcagcgtgaa

SEQ ID NO: 218585 - DNA, 75 bp, synthetic construct
  source 1..75: mol_type = other DNA
aattacctggggcgcactggcgtgtgtaggactggtactgatgatttggctgtatcaggcgctgaaattcagaaa

SEQ ID NO: 218586 - DNA, 75 bp, synthetic construct
  source 1..75: mol_type = other DNA
aaaaagtttatgtcgagcaattacgacatttcatcactcctgatgttatgctaataattgctatttttgggataa

SEQ ID NO: 218587 - DNA, 75 bp, synthetic construct
  source 1..75: mol_type = other DNA
atgaaaaaaacactactcgcagccgcgctagtgatggtttctggttccgctctggctgtagatggtggtcatatc

SEQ ID NO: 218588 - DNA, 75 bp, synthetic construct
  source 1..75: mol_type = other DNA
tgtgtttaacgcatcttacgttaaagcaccgaacagccaggctgttactgctggtcatgtaactactaacgcact

SEQ ID NO: 218589 - DNA, 75 bp, synthetic construct
  source 1..75: mol_type = other DNA
agctttacgcttccgggacagttccggaaccgactcctaatcctgaacccacaccagctcccgctcagcctccca

SEQ ID NO: 218590 - DNA, 75 bp, synthetic construct
  source 1..75: mol_type = other DNA
atttagggtcaccagttgttaattcaatgtatatatataaatatgatatacatgacttggtatactttttcaatt

SEQ ID NO: 218591 - DNA, 75 bp, synthetic construct
  source 1..75: mol_type = other DNA
cgccaccatcccggataactctattacgttgtttgataaacttttttacagcgaagacctgctgctgacgctgaa

SEQ ID NO: 218592 - DNA, 75 bp, synthetic construct
  source 1..75: mol_type = other DNA
atgcagaaaaaacgactgattcagcttatccatattgcccgtaatgaactgggtatggatgaagacacctaccgc

SEQ ID NO: 218593 - DNA, 75 bp, synthetic construct
  source 1..75: mol_type = other DNA
tcaggctttggggataaccgtaccggatgaacataaactggttaccggctactcttctgctcgcgtagagggatt

SEQ ID NO: 218594 - DNA, 75 bp, synthetic construct
  source 1..75: mol_type = other DNA
caggcctgcaaggaagggaatgtggccaacagcgaagagagctgggcaacggatgtgctggtggaggtgatcgcc

SEQ ID NO: 218595 - DNA, 75 bp, synthetic construct
  source 1..75: mol_type = other DNA
ggacaattgaatcaacaggcagaatcaaagcaggtgaatatctccacctgaatggtcaggcaacattaaatgcga

SEQ ID NO: 218596 - DNA, 75 bp, synthetic construct
  source 1..75: mol_type = other DNA
gatggtcaccttcccaaactgaattagttatagttgatatcgactgtgaagtcataagctacaaaaccagagaat

SEQ ID NO: 218597 - DNA, 75 bp, synthetic construct
  source 1..75: mol_type = other DNA
gggtgatctgaatcttggtgggaagagcatcaaaaacatcaaagacattacggcatcagggacaacaacaacggg

SEQ ID NO: 218598 - DNA, 75 bp, synthetic construct
  source 1..75: mol_type = other DNA
acgatatattagtagctgatgtgattcgtcgcattgtagaacaaaccccggcatttaaatgctgtggcatagcgt

SEQ ID NO: 218599 - DNA, 75 bp, synthetic construct
  source 1..75: mol_type = other DNA
gtctgttgaagcggctctggaagtatcagtggctgcgaaatgcggcgccgctggatgatgaactggaggctacga

SEQ ID NO: 218600 - DNA, 75 bp, synthetic construct
  source 1..75: mol_type = other DNA
cagaagcagaacaaaaatttactgctctggaaaatacgctgaatgctgcacgaccacatctgggagaattatatg

SEQ ID NO: 218601 - DNA, 75 bp, synthetic construct
  source 1..75: mol_type = other DNA
ggattctgctgtacccttcttttattggtgttattctttctgcgtacctgagtattaaagcactaatagtcagtt

SEQ ID NO: 218602 - DNA, 75 bp, synthetic construct
  source 1..75: mol_type = other DNA
aaagcccggttcccgaaagtaaatttcaacgatgccaaatcagcgcgtgacgttcgcgccgctgttctggtgagc

SEQ ID NO: 218603 - DNA, 75 bp, synthetic construct
  source 1..75: mol_type = other DNA
cagcaccacactggcagacgcgaaagcccgcttccctaaagtcagcttcaatgatgccaaatcagcgcgtgacgt

SEQ ID NO: 218604 - DNA, 75 bp, synthetic construct
  source 1..75: mol_type = other DNA
taaatatgacactcgccttacagaagaaaaaattgcgattgataaagctattagagaattacattttagcagcga

SEQ ID NO: 218605 - DNA, 75 bp, synthetic construct
  source 1..75: mol_type = other DNA
ataatttcgtccgactctactctaaatggagcgactaaactcgttagcggcacaaccacgctgaagctttcagaa

SEQ ID NO: 218606 - DNA, 75 bp, synthetic construct
  source 1..75: mol_type = other DNA
tatttttttccaatgtcaccgcggtatcaaaacaagataaaggaatatcaattgatgcatcaaatatcgattctc

SEQ ID NO: 218607 - DNA, 75 bp, synthetic construct
  source 1..75: mol_type = other DNA
aaaataagacatttacccaaaggactgtcaacagatacattgcgaattatttgtaggtggattgatgagcatcaa

SEQ ID NO: 218608 - DNA, 75 bp, synthetic construct
  source 1..75: mol_type = other DNA
acatttttgagcatggctgcaagattgatgcagcagaaagaaaccgcttcagattgtccacgccgcgcggtgcgc

SEQ ID NO: 218609 - DNA, 75 bp, synthetic construct
  source 1..75: mol_type = other DNA
ccgggagagaaaacatcagcagcctggtgtttgactgggagcaccggatcccgttaataccgctgacgattattc

SEQ ID NO: 218610 - DNA, 75 bp, synthetic construct
  source 1..75: mol_type = other DNA
tctggatgggcgtcgatcataatgcgcacacggaagccaatggctcacgtattgagaatgacgcaaataacaaca

SEQ ID NO: 218611 - DNA, 75 bp, synthetic construct
  source 1..75: mol_type = other DNA
gaccatcccggagacgctaactgatattcagcgtgcagcgcggttttattatctccagaagcaatcattcggagg

SEQ ID NO: 218612 - DNA, 75 bp, synthetic construct
  source 1..75: mol_type = other DNA
aaggctacggcgtaccatttggccttgagcagtaccagcgtatggcagagctggcgcgcaccatgcagggccgga

SEQ ID NO: 218613 - DNA, 75 bp, synthetic construct
  source 1..75: mol_type = other DNA
ttaatagcagaatcaaactaatttatcgtccgcataaacttaacgaaacaggcaaagttaacgcggcatttaaat

SEQ ID NO: 218614 - DNA, 75 bp, synthetic construct
  source 1..75: mol_type = other DNA
gcacattgattatgttccgaagcatcctaatacaggagggctacgtttggattttaatcctcaacatatgacgaa

SEQ ID NO: 218615 - DNA, 75 bp, synthetic construct
  source 1..75: mol_type = other DNA
ttgtcgattgatacggtagatattcgctatacgttgagcggtgggcctaatgctaatcgctcgaaagtcagccgt

SEQ ID NO: 218616 - DNA, 75 bp, synthetic construct
  source 1..75: mol_type = other DNA
ttaatctgctaaggctggaagaggagttgagcgccgcccatttgcggctatcacgcacgtttgtagaacatttac

SEQ ID NO: 218617 - DNA, 75 bp, synthetic construct
  source 1..75: mol_type = other DNA
tttggcagcagcagatcaatgcctggcttgactccggcctctccggccacgccttttgcaaaagccaggcactgg

SEQ ID NO: 218618 - DNA, 75 bp, synthetic construct
  source 1..75: mol_type = other DNA
cggtcgatcaccggctggcagaactaaccatgaacaaactttacgatcgcgttccggcttctgtctggaaatatg

SEQ ID NO: 218619 - DNA, 75 bp, synthetic construct
  source 1..75: mol_type = other DNA
gcaattagaatcttgcgaatgtctgcaatacctgaatctcagccataatcaattatctgatattgttgcaggtaa

SEQ ID NO: 218620 - DNA, 75 bp, synthetic construct
  source 1..75: mol_type = other DNA
cgggatgacgttctcaccctcacagaatggcacttcactggatctgcaggcaggactggaagcccgtgtccggga

SEQ ID NO: 218621 - DNA, 75 bp, synthetic construct
  source 1..75: mol_type = other DNA
caataacgacttccgcgcccggggctggggctggctgggctcactggaaaccggtctgctcttcagtatcactga

SEQ ID NO: 218622 - DNA, 75 bp, synthetic construct
  source 1..75: mol_type = other DNA
gtgtataaatcaattaaattatacagaacattctttttatttctttgtgccttttttattgcctcaaatccgtcc

SEQ ID NO: 218623 - DNA, 75 bp, synthetic construct
  source 1..75: mol_type = other DNA
ttgaaacaccagagcaggcaaggaaggaaagggtgttcaggattgccagtttatccacatataccggagcatgtt

SEQ ID NO: 218624 - DNA, 75 bp, synthetic construct
  source 1..75: mol_type = other DNA
atgtatagaactcatcgacaacacagcctgttaagctctggtggagtgccatcgtttattggtgggctggtggtg

SEQ ID NO: 218625 - DNA, 75 bp, synthetic construct
  source 1..75: mol_type = other DNA
atttttaaatatataagtttagagtttaataaaataagacctgtagagaatgtatttttttatcctgcaaatgcg

SEQ ID NO: 218626 - DNA, 75 bp, synthetic construct
  source 1..75: mol_type = other DNA
agcaaccgtctcaggaggagcttcgagattgcatcgccaaagtttattcgggaggaatctatgtccagaaaaaca

SEQ ID NO: 218627 - DNA, 75 bp, synthetic construct
  source 1..75: mol_type = other DNA
acgtcaattttgttgagataacgccagagaaggggattgccgcctgtttgacgactgaaagcctggatgcaatgg

SEQ ID NO: 218628 - DNA, 75 bp, synthetic construct
  source 1..75: mol_type = other DNA
ttgcgcaacaattcaacatggagtcgtagtagtggccaaaccgcagaatggaagaatctcagcagctatttgcaa

SEQ ID NO: 218629 - DNA, 75 bp, synthetic construct
  source 1..75: mol_type = other DNA
cctcggcgatttcggagcaatttcgttcgacgcgacccaggctaaaagtacgctggcagaccaaagtgaacataa

SEQ ID NO: 218630 - DNA, 75 bp, synthetic construct
  source 1..75: mol_type = other DNA
tccttcgccgagatcgggggcgccctggtcgatgcacaggatgatggccagccgctgggcgatgtcatcgcgagt

SEQ ID NO: 218631 - DNA, 75 bp, synthetic construct
  source 1..75: mol_type = other DNA
agtggtcgaaacccacgaccggatcgtcggccgtctctaccgtgcttcggagcgtatttgccatgcaaaggtcgc

SEQ ID NO: 218632 - DNA, 75 bp, synthetic construct
  source 1..75: mol_type = other DNA
ctggattgtggctacctcattttcacttaatcactttcaatgaagaggaggcattaaataaacttcggaacagaa

SEQ ID NO: 218633 - DNA, 75 bp, synthetic construct
  source 1..75: mol_type = other DNA
ggaatttctgacgatcataacggcattatcgagctgcctgcggatgcgccgattggcaccgacatcaggcgaata

SEQ ID NO: 218634 - DNA, 75 bp, synthetic construct
  source 1..75: mol_type = other DNA
aagtttatttatacgggtttcctagttcaacattttttaatttaagcagtaatgctcatgtaaaatgttgtattt

SEQ ID NO: 218635 - DNA, 75 bp, synthetic construct
  source 1..75: mol_type = other DNA
atgatggatggagcggataatcccaatgatgaattaccgtcttcttatatcactggcgctgacattcagaaaaaa

SEQ ID NO: 218636 - DNA, 75 bp, synthetic construct
  source 1..75: mol_type = other DNA
aatcacgagtcgtctgaagcatcatcattctttgttaatgattttgatgctgcgactgaactcagtagtagcgaa

SEQ ID NO: 218637 - DNA, 75 bp, synthetic construct
  source 1..75: mol_type = other DNA
tgaaatcagcggacatcgttacacttttgaggcagatgcatcggggcgctggagctttaccctgcctgatgcatt

SEQ ID NO: 218638 - DNA, 75 bp, synthetic construct
  source 1..75: mol_type = other DNA
ggaacaaacaggtactaactcaccttctacaaaagacaccgtaggtactgataagaaacaacttaatgaattact

SEQ ID NO: 218639 - DNA, 75 bp, synthetic construct
  source 1..75: mol_type = other DNA
taggtttcttttttctgtttttttcaatgagttcttcagcgcaaaataatggtgttaacttaaataaaacacggg

SEQ ID NO: 218640 - DNA, 75 bp, synthetic construct
  source 1..75: mol_type = other DNA
aaggtgatgcacaaacactaaaatcagcaaacacttatacaaataagcaagtgaatgcgctggagcaaaatacca

SEQ ID NO: 218641 - DNA, 75 bp, synthetic construct
  source 1..75: mol_type = other DNA
gaaaacaaatacgttctctggccactttgtcgttgatacaaaagcgccacagactctcagcgcagggcttgaaga

SEQ ID NO: 218642 - DNA, 75 bp, synthetic construct
  source 1..75: mol_type = other DNA
gttccaatcttgggactttatctgttcctttaacatttagtgctgctgttgctgctatatatcctaacagctcag

SEQ ID NO: 218643 - DNA, 75 bp, synthetic construct
  source 1..75: mol_type = other DNA
tgccggttaccacaattggaatgacatcagtcaccccaactatactgctacagatagggcatcttatctcgctta

SEQ ID NO: 218644 - DNA, 75 bp, synthetic construct
  source 1..75: mol_type = other DNA
gtttatccccgctggcgcggggaactctaatatccctggcgataatcaaccggcttactcggtttatccccgctg

SEQ ID NO: 218645 - DNA, 75 bp, synthetic construct
  source 1..75: mol_type = other DNA
aagctgaaacatgccaatggtcagtatgttgaaacatccgatatattgaagtcaattgatgccagtaaattgggc

SEQ ID NO: 218646 - DNA, 75 bp, synthetic construct
  source 1..75: mol_type = other DNA
gatgaacaacgactaccggtggaaattgagggggccgcattatctggcgcacaggttgaacttttaatcgataat

SEQ ID NO: 218647 - DNA, 75 bp, synthetic construct
  source 1..75: mol_type = other DNA
tggaggggttgattatgaaactatttcagataattatggtcaatggagtgtaaccataaaatccccattaaagga

SEQ ID NO: 218648 - DNA, 75 bp, synthetic construct
  source 1..75: mol_type = other DNA
aaaatggagaaactcgcataattggtggtgtttccgatgggaaattaacaacagatgctgctacagttggccaac

SEQ ID NO: 218649 - DNA, 75 bp, synthetic construct
  source 1..75: mol_type = other DNA
ccgcgagttctataagtgcggcgttcaatgaagatactcccttcgatggatcgtatggaattttcgaacttaaca

SEQ ID NO: 218650 - DNA, 75 bp, synthetic construct
  source 1..75: mol_type = other DNA
agaggaattaaattctattcgagatcaaatcaatgatgaaatgtattcctttgcaataccaatggatcttagtga

SEQ ID NO: 218651 - DNA, 75 bp, synthetic construct
  source 1..75: mol_type = other DNA
ctcgacgttaaggctatatcatatattaatagattctagtatatttatcggtgttttaagaatttctgaaattct

SEQ ID NO: 218652 - DNA, 75 bp, synthetic construct
  source 1..75: mol_type = other DNA
atacctgcccgggtcggtttatatcgccaggggtataattatggatctccggcgacattgtcttattctgagatg

SEQ ID NO: 218653 - DNA, 75 bp, synthetic construct
  source 1..75: mol_type = other DNA
ggaccagtatttgtttggtgcgctgcataccaatcagatgaacatcccggaatatgcgcggcggctgatagtgaa

SEQ ID NO: 218654 - DNA, 75 bp, synthetic construct
  source 1..75: mol_type = other DNA
cccgggtattgcagataccggtttcctgccgggaagaatcataaacagaacaccgggaataacgccttcaggaat

SEQ ID NO: 218655 - DNA, 75 bp, synthetic construct
  source 1..75: mol_type = other DNA
atgaaaccaagcacacactgcgtttattgtggtgttctcatgaacaggattgaaaatcacccccactgccgctca

SEQ ID NO: 218656 - DNA, 75 bp, synthetic construct
  source 1..75: mol_type = other DNA
ttaacggggaatctttcctgattgttggccgtgaagctaaggaaatgttcatatgtttcaatcgcgtaatgatgt

SEQ ID NO: 218657 - DNA, 75 bp, synthetic construct
  source 1..75: mol_type = other DNA
ttgacgaggtgttaggtgtcatttgccgcatggtaggagagcactcaacaggcagctttgatgctgttaataaat

SEQ ID NO: 218658 - DNA, 75 bp, synthetic construct
  source 1..75: mol_type = other DNA
ctgtttcgccactggaccaaacatgctctgctcaacgccatcgttcaacccgatcaattcatcgaaatcggtgag

SEQ ID NO: 218659 - DNA, 75 bp, synthetic construct
  source 1..75: mol_type = other DNA
atggttaaccgactgtgtgggacttccgtggcagatttcaatcgtatctgcgaaattctcgctagcacctgtgtt

SEQ ID NO: 218660 - DNA, 75 bp, synthetic construct
  source 1..75: mol_type = other DNA
gaaatgttcgccgtatgaatgacatctatttccgtccaattcatcgaaaccagtattttgaggaaatgaaagcat

SEQ ID NO: 218661 - DNA, 75 bp, synthetic construct
  source 1..75: mol_type = other DNA
tgcgtatttattaattttaattactattccgggcgtctttgtggctttcatttcgctgctgaagttaaacggtaa

SEQ ID NO: 218662 - DNA, 75 bp, synthetic construct
  source 1..75: mol_type = other DNA
gacgacgctctcaaattattcaataggagtatcattagctggcacgttagcaagaaaaacagtttcggctgttga

SEQ ID NO: 218663 - DNA, 75 bp, synthetic construct
  source 1..75: mol_type = other DNA
tagcatcgggaatgcaataataagaaacaatgaaatttacccaagtcaagtgagcatatctaatttagagaacat

SEQ ID NO: 218664 - DNA, 75 bp, synthetic construct
  source 1..75: mol_type = other DNA
gcattcttaacgttcgcacacagtaaagaatctcacccttttactatcgcttcatacaccaaagagaagaacacg

SEQ ID NO: 218665 - DNA, 75 bp, synthetic construct
  source 1..75: mol_type = other DNA
cgcccagcttgagtatcgtaaacatcatggcgcgtcctttgttcctgtggatctctggtattgcgtcagccgaag

SEQ ID NO: 218666 - DNA, 75 bp, synthetic construct
  source 1..75: mol_type = other DNA
gatctctggtattgcgtcagccgaagcgaggatgcctggtatgttgataaactgacctcactttgtgcccaggcc

SEQ ID NO: 218667 - DNA, 75 bp, synthetic construct
  source 1..75: mol_type = other DNA
cctggcagccgctaacactctttttgttatgcgtctgaacgatcgtgcaggtgaaacgcgttacatcgatcctgt

SEQ ID NO: 218668 - DNA, 75 bp, synthetic construct
  source 1..75: mol_type = other DNA
gagaatttattaaggattcgaggattttcgccggtgcctacgaatattcattaacccgaggtaataccgaagcga

SEQ ID NO: 218669 - DNA, 75 bp, synthetic construct
  source 1..75: mol_type = other DNA
tgatgataattcagctacggataaagtcgttattgatggaaatacctctggaacaacccgagttaaagttaccaa

SEQ ID NO: 218670 - DNA, 75 bp, synthetic construct
  source 1..75: mol_type = other DNA
cccgcgctggagatcacgctcggtcagttaactgttgagttcgaaactgatgggtggtttgctctgacgggtgcc

SEQ ID NO: 218671 - DNA, 75 bp, synthetic construct
  source 1..75: mol_type = other DNA
agattaaaaatgatgctttcgagttaagcggaaaaacaaatcagatacttatttttaatggtaaaaagaaagaca

SEQ ID NO: 218672 - DNA, 75 bp, synthetic construct
  source 1..75: mol_type = other DNA
gtaacagctttgatattgtcttttgctactctattaccacttcagcatcacatcgacgccccaagagtgatgatc

SEQ ID NO: 218673 - DNA, 75 bp, synthetic construct
  source 1..75: mol_type = other DNA
agtaaagttcaataataacacagataaaaactggctattgcgagcatgggtgtctgattataattctaaaaataa

SEQ ID NO: 218674 - DNA, 75 bp, synthetic construct
  source 1..75: mol_type = other DNA
gccggagtcatctggtaagttattgccttgtccggggcgggggggctggcagcactggtatccggggggatgcaa

SEQ ID NO: 218675 - DNA, 75 bp, synthetic construct
  source 1..75: mol_type = other DNA
ctggtaatacggctgcgccttgtttccatgtgctaaaaaataagggatataaagtaacaatggaaactcatgcat

SEQ ID NO: 218676 - DNA, 75 bp, synthetic construct
  source 1..75: mol_type = other DNA
accggcgaggtggtggggatgatagccacagagatgtgcggaatatcccctggtactgttacatgtaaaagataa

SEQ ID NO: 218677 - DNA, 75 bp, synthetic construct
  source 1..75: mol_type = other DNA
gatcgaattattcgatgctcttccctcctccgagcaggaagccttactgtctgaaatgcgcgcaagagtagagaa

SEQ ID NO: 218678 - DNA, 75 bp, synthetic construct
  source 1..75: mol_type = other DNA
cccgaaatactgattgttgatgaagcattggctgtaggtgatattggttttcaatataagtgctttaagcgcatg

SEQ ID NO: 218679 - DNA, 75 bp, synthetic construct
  source 1..75: mol_type = other DNA
cgagctataattgaagatttctcaattatgaaagcagatggcactcctctctctgaaaagccacttgtaaaacca

SEQ ID NO: 218680 - DNA, 75 bp, synthetic construct
  source 1..75: mol_type = other DNA
aaactagcggccaggatattaaatggtctgtgattactgatgaaggtggtgagagtcgtttgtttatatctcatt

SEQ ID NO: 218681 - DNA, 75 bp, synthetic construct
  source 1..75: mol_type = other DNA
gaccatcgcggcctgccgctggcgcttatcagtgcggaaggggcaacagaatggtgcgcagaatacgatgaatgg

SEQ ID NO: 218682 - DNA, 75 bp, synthetic construct
  source 1..75: mol_type = other DNA
cttgctaagtttgcataacgcgcaattttatttactacaacgcacgccagaggttgcccgcagccgcgccacccc

SEQ ID NO: 218683 - DNA, 75 bp, synthetic construct
  source 1..75: mol_type = other DNA
tctaaaatagctgagacattatttttcaacctcaataaagaaccctataaaaacagccctgagttacaggaattg

SEQ ID NO: 218684 - DNA, 75 bp, synthetic construct
  source 1..75: mol_type = other DNA
aagtcgtattttgcttgtcgtttttatcaagcgcatttcccacctatgctgcggatgatgtcaaagtgactcaaa

SEQ ID NO: 218685 - DNA, 75 bp, synthetic construct
  source 1..75: mol_type = other DNA
tggatgttgataatccagaatcatcgacagaatctgttggtatcggtgcaggtgttgacgcttcagttatgactc

SEQ ID NO: 218686 - DNA, 75 bp, synthetic construct
  source 1..75: mol_type = other DNA
ccggaggtgacgtggtatggctgggacggagacaggctgacgacggtgcagactgacaccacacgtatccagacg

SEQ ID NO: 218687 - DNA, 75 bp, synthetic construct
  source 1..75: mol_type = other DNA
tagtgaactcatcatagttggagagggcgaagaacggcttacattgcaaacatttatcgatcaaaattctctcag

SEQ ID NO: 218688 - DNA, 75 bp, synthetic construct
  source 1..75: mol_type = other DNA
atgtttccattaaatgatctgtcgttaaaaactcagtcggttcaattaaataaagtcacatctaatactgaatct

SEQ ID NO: 218689 - DNA, 75 bp, synthetic construct
  source 1..75: mol_type = other DNA
ctaacattaacttgctttcgagcgcaacaagttctggtttttatgcatacggcggtaatacagacccggattttg

SEQ ID NO: 218690 - DNA, 75 bp, synthetic construct
  source 1..75: mol_type = other DNA
aagttacagcaggaagggagtgaggacggtcacggtgtggtgttcccgctggaactggtgaggatgctggacagg

SEQ ID NO: 218691 - DNA, 75 bp, synthetic construct
  source 1..75: mol_type = other DNA
cagcaccaggcgcggagaatactcgtgtggcgaatagcaccgggctgaaaactgactggcgcggatataccgttg

SEQ ID NO: 218692 - DNA, 75 bp, synthetic construct
  source 1..75: mol_type = other DNA
agcgtgccattacttcagcgtcaggggcgaatcaagtacgcggtgacaatggcgaaatacagaaccaatagtaat

SEQ ID NO: 218693 - DNA, 75 bp, synthetic construct
  source 1..75: mol_type = other DNA
actgaaagcctggatgcaatgggcgtgaatactgatgcgtttccggcttttaaacaactggacaaacaagcgtgt

SEQ ID NO: 218694 - DNA, 75 bp, synthetic construct
  source 1..75: mol_type = other DNA
gacggatgccctgacggacctgacacagccggggatggtactgaatgcaccacaaggcgtcagcatcagcagtcc

SEQ ID NO: 218695 - DNA, 75 bp, synthetic construct
  source 1..75: mol_type = other DNA
gacggcccgtgtgaccagtgcaaaagaaggggatatctacgcctggcaggatgcatcaggcatgtaccgggtgaa

SEQ ID NO: 218696 - DNA, 75 bp, synthetic construct
  source 1..75: mol_type = other DNA
tgaatactgatgcgtttccggcttttaaacaactggacaaacaagcgtgtgcgccattggcggagattattccgg

SEQ ID NO: 218697 - DNA, 75 bp, synthetic construct
  source 1..75: mol_type = other DNA
gagttgctgggcaagttaacgaaaattacagatgccagactttgcaaaggtttcagtgactgggctagttcagtc

SEQ ID NO: 218698 - DNA, 75 bp, synthetic construct
  source 1..75: mol_type = other DNA
ttatacacaaatccccacccggggatttgtgatgtctgtcagtctgctttagggggactctttccatccggtagt

SEQ ID NO: 218699 - DNA, 75 bp, synthetic construct
  source 1..75: mol_type = other DNA
agccgccgctggctggcatcgtgcggcctgactgtggcgcagatgcaaagccagatggacccggaatacacaccg

SEQ ID NO: 218700 - DNA, 75 bp, synthetic construct
  source 1..75: mol_type = other DNA
aaccggaggagacatggtacgggtgggacggcgacaggctgacgacggtgcaggctgacaccacacgtatccaga

SEQ ID NO: 218701 - DNA, 75 bp, synthetic construct
  source 1..75: mol_type = other DNA
atgttctcggtcactcattagctgacgtagatttaccctacttcaagaagttggagcaatcagtcagacctgatg

SEQ ID NO: 218702 - DNA, 75 bp, synthetic construct
  source 1..75: mol_type = other DNA
ccactacgccctggtgagactctcattgatattgatgaaatttatggggaagatgaaggcggaggctcatgcgca

SEQ ID NO: 218703 - DNA, 75 bp, synthetic construct
  source 1..75: mol_type = other DNA
aaaactcgcgcccttcgaacagtgggttcgtccgatgcttaatgctggtgataaagttacaagctatgtagcaat

SEQ ID NO: 218704 - DNA, 75 bp, synthetic construct
  source 1..75: mol_type = other DNA
ttactcatgatttcgatagtattgatgaattttatgcagagttacagcaaaataaactaaataaatatctaacta

SEQ ID NO: 218705 - DNA, 75 bp, synthetic construct
  source 1..75: mol_type = other DNA
tggaatgtaatcctattaaagaggcatttttaatgccatggacccttacagggattcgctatgaaatatcgcagc

SEQ ID NO: 218706 - DNA, 75 bp, synthetic construct
  source 1..75: mol_type = other DNA
gtaatgaacttaacttatcaagcctttctttgggttctgtgccgcctcttccagagtggattgaaatacttagcc

SEQ ID NO: 218707 - DNA, 75 bp, synthetic construct
  source 1..75: mol_type = other DNA
ggatgtatctctttcatctacattatccatgccttccggtaacgatacacttttacgatttgctaagtatagtga

SEQ ID NO: 218708 - DNA, 75 bp, synthetic construct
  source 1..75: mol_type = other DNA
aatctgctaaatgatgtgaatgctgacctgattaacttttacaagactctgcaacgcgaggcgaattcacttatc

SEQ ID NO: 218709 - DNA, 75 bp, synthetic construct
  source 1..75: mol_type = other DNA
atatcctcaatggtgcggtggtccataactgtcaggcattcagtatcgcgggattacgtggtgggcttgatgatg

SEQ ID NO: 218710 - DNA, 75 bp, synthetic construct
  source 1..75: mol_type = other DNA
atccccgctggcgcggggaacactcgcgccagcacgtcgtccggaatcatgattccggtttatccccgctggcgc

SEQ ID NO: 218711 - DNA, 75 bp, synthetic construct
  source 1..75: mol_type = other DNA
caagatgaatcggtagagaaaattattgttgcccttgccaccacgatgtcagagccagctacgatagatttggtt

SEQ ID NO: 218712 - DNA, 75 bp, synthetic construct
  source 1..75: mol_type = other DNA
agtcaactggatatcccggaactccagcgccgtgggctggtcattctggcttcggagagtaaggattttcgtctg

SEQ ID NO: 218713 - DNA, 75 bp, synthetic construct
  source 1..75: mol_type = other DNA
tgcgaaaacgaaggaacgtaaccctgagatgcccgactacgaggagatgaaaacgaccgggatctttaagaaaaa

SEQ ID NO: 218714 - DNA, 75 bp, synthetic construct
  source 1..75: mol_type = other DNA
ccgttcatcgttcgcagttggcatgcggtaacctggcacacggtttcgctgcctgccagccagaagacaaagcct

SEQ ID NO: 218715 - DNA, 75 bp, synthetic construct
  source 1..75: mol_type = other DNA
accacagaggatgtcgagaaaatcgttgttgcattagctacaactatgtcctcgcctgatatcattgatcttatt

SEQ ID NO: 218716 - DNA, 75 bp, synthetic construct
  source 1..75: mol_type = other DNA
aacggcgaagtggccggaagaagaagcccttcatatcccgttgggactgatgattatcaacgtgtccatttagct

SEQ ID NO: 218717 - DNA, 75 bp, synthetic construct
  source 1..75: mol_type = other DNA
taatgaatattggtatggaactgcgctctcgttatatggaaaatgtcattgagcggttaaatagaatggttccgg

SEQ ID NO: 218718 - DNA, 75 bp, synthetic construct
  source 1..75: mol_type = other DNA
ttcagcaggcatacgatgcttatgacgacttaatgctggataaacgatatatcagggacaatgatgcctggggag

SEQ ID NO: 218719 - DNA, 75 bp, synthetic construct
  source 1..75: mol_type = other DNA
atgggaattctcctcacaggagcaccgggagggcccccctgtggtgcccgttccccgctgcctgtgggctgttca

SEQ ID NO: 218720 - DNA, 75 bp, synthetic construct
  source 1..75: mol_type = other DNA
tcaatattctgacctctcaccgcccttcaccgctggcaaagggaaacccgtcgcacagcaatcttgtccagatcg

SEQ ID NO: 218721 - DNA, 75 bp, synthetic construct
  source 1..75: mol_type = other DNA
tgcttttctgtgcgcacatctggggattaccggtgacgtacagcacgaaagttatattgacggatggcttaacgt

SEQ ID NO: 218722 - DNA, 75 bp, synthetic construct
  source 1..75: mol_type = other DNA
gccgcggatgaagccgggtatgtcagcaatgactggctgacgtaccgtcaggcgcaacaactgggtggccacgtc

SEQ ID NO: 218723 - DNA, 75 bp, synthetic construct
  source 1..75: mol_type = other DNA
cggtaacctggcacacggtttcgctgcctgccagccagaagacaaagcctctttgaaaagcatgttgcgtactga

SEQ ID NO: 218724 - DNA, 75 bp, synthetic construct
  source 1..75: mol_type = other DNA
taaaaagtgtagggatatggattttagtggtcgaaatgtaaaagagtttataaggttattatcagatcacgatca

SEQ ID NO: 218725 - DNA, 75 bp, synthetic construct
  source 1..75: mol_type = other DNA
aacaggaacttgctataaataatagggatgataggtattctttacagtcagaagctgaaaaaataatgatgggtg

SEQ ID NO: 218726 - DNA, 75 bp, synthetic construct
  source 1..75: mol_type = other DNA
cttcatcagacagatacaaaaaaattgacgctttatgaaaaagaatttaactcacttattggtgatacattcaga

SEQ ID NO: 218727 - DNA, 75 bp, synthetic construct
  source 1..75: mol_type = other DNA
ccgatgccacgttctacacctggcgcaaaaagtacggcgggatttctccttcagagctgaaacaggcactgttgc

SEQ ID NO: 218728 - DNA, 75 bp, synthetic construct
  source 1..75: mol_type = other DNA
ttgaggaagagaacttaagactgaagatgctggttgccgatctgagcctcgacaaagccatgctgcaggatgtgc

SEQ ID NO: 218729 - DNA, 75 bp, synthetic construct
  source 1..75: mol_type = other DNA
tctgagctgaagcacatgcgccagcttgaggaagagaacttaagactgaagatgctggttgccgatctgagcctc

SEQ ID NO: 218730 - DNA, 75 bp, synthetic construct
  source 1..75: mol_type = other DNA
gttatgaaattaaagggggggcaatggtactttctatgtttcagggccaccggtgtatgttgacctggtcgttaa

SEQ ID NO: 218731 - DNA, 75 bp, synthetic construct
  source 1..75: mol_type = other DNA
ccacctgtaagctgcaggtgctgaagaacggggttgagattttccatgaaccggcaacggatgtcagccgggtgt

SEQ ID NO: 218732 - DNA, 75 bp, synthetic construct
  source 1..75: mol_type = other DNA
gcctgccagccagaagacaaagcctctttgaaaagcatgttgcgtactgagagatcccctcataatttccccaaa

SEQ ID NO: 218733 - DNA, 75 bp, synthetic construct
  source 1..75: mol_type = other DNA
aattgtaggacattatctaaagatgccactttccgtgaagtttttcgaagtttattattttacattttagattcc

SEQ ID NO: 218734 - DNA, 75 bp, synthetic construct
  source 1..75: mol_type = other DNA
acaaaagtatagggatagggattttagtggtcgaaatgtggaagagtttataggtttattatccgcgcacgatag

SEQ ID NO: 218735 - DNA, 75 bp, synthetic construct
  source 1..75: mol_type = other DNA
aaatcaatattgtgcgcggccagctcgtttctggtgggcggctgggcgtgaagatttacaaaattgaaagtgagt

SEQ ID NO: 218736 - DNA, 75 bp, synthetic construct
  source 1..75: mol_type = other DNA
attgatgaagtttgtgggttgttaatgcaatatggtgttgaatgctttggtgctgaatggcttaataaaataaaa

SEQ ID NO: 218737 - DNA, 75 bp, synthetic construct
  source 1..75: mol_type = other DNA
gcgggtatctcgctgtttggcttgttgatttccgtagcgtttgccccggagactcgagggatgtcactggcgcag

SEQ ID NO: 218738 - DNA, 75 bp, synthetic construct
  source 1..75: mol_type = other DNA
cagatatccgcgcctctgccgtgggcgtgattatgtccttaagtcgtattggcaccattgtttcgacctgggcac

SEQ ID NO: 218739 - DNA, 75 bp, synthetic construct
  source 1..75: mol_type = other DNA
tgtgaatgccatcgccctggtggtgattactattttgattgtctgggaggcgatagaacgcttccgcactccgcg

SEQ ID NO: 218740 - DNA, 75 bp, synthetic construct
  source 1..75: mol_type = other DNA
ttgttgaccacttcacaaatagcgcggcagtgtggccgaagtttgtctgttttggctcgccagatatcaagtagc

SEQ ID NO: 218741 - DNA, 75 bp, synthetic construct
  source 1..75: mol_type = other DNA
ttacatgaacaggccgaattccgggttactggtatgacaccccaagattttgttaacaaaatagttcagagtatt

SEQ ID NO: 218742 - DNA, 75 bp, synthetic construct
  source 1..75: mol_type = other DNA
gatggcggtggcgttttctggcgccatattgacgaactatctaccggacaacagtgtaccgctgttctgcatttg

SEQ ID NO: 218743 - DNA, 75 bp, synthetic construct
  source 1..75: mol_type = other DNA
atgccaggtggggaatcacaccaaccgtcgcccaagcgttgctgcgtttaaacgaaaaacagcttctggaactgg

SEQ ID NO: 218744 - DNA, 75 bp, synthetic construct
  source 1..75: mol_type = other DNA
tcagcgttcatcagcggagcttgctcctttacaacttgagctatcaggtttaatcggcgcagaagaggctcagct

SEQ ID NO: 218745 - DNA, 75 bp, synthetic construct
  source 1..75: mol_type = other DNA
tcccatacaagtgatagacccaatggggttagatgcgattgagaatatgacatcaggtggactaatttatgccgt

SEQ ID NO: 218746 - DNA, 75 bp, synthetic construct
  source 1..75: mol_type = other DNA
aaagtgatcgttttcagccctccgcctggcagaaatttattcagcaattaaatacctggaacatggaggatgtcg

SEQ ID NO: 218747 - DNA, 75 bp, synthetic construct
  source 1..75: mol_type = other DNA
atgaaaggattctcatcagaaaaaatagattattacatcgatataatcattaaagattatgaaagcgtcaaagaa

SEQ ID NO: 218748 - DNA, 75 bp, synthetic construct
  source 1..75: mol_type = other DNA
tgcctgaatctgggacaacaggagtatgcttactggcgacttctggacatattcacaaaaactgcgcaggagaac

SEQ ID NO: 218749 - DNA, 75 bp, synthetic construct
  source 1..75: mol_type = other DNA
ctacgatccgttgcaggggcggtatatcactcaggacccgatagggctggcggggggatggagtctgtatgcgta

SEQ ID NO: 218750 - DNA, 75 bp, synthetic construct
  source 1..75: mol_type = other DNA
cggtactatgacccgctacaggggaggtatattacacaagaccccattgggctggaggggggatggagtctgtat

SEQ ID NO: 218751 - DNA, 75 bp, synthetic construct
  source 1..75: mol_type = other DNA
ctttatcactgtgaccaccggggcctgccgctggcgcttatcagtgaagacggcaatacggcgtggagcgcggaa

SEQ ID NO: 218752 - DNA, 75 bp, synthetic construct
  source 1..75: mol_type = other DNA
gtacgaactagacgggataagttataacgtcgcacgttgtgacggtatggtcactgacgaaaaagttgagaaggc

SEQ ID NO: 218753 - DNA, 75 bp, synthetic construct
  source 1..75: mol_type = other DNA
ctaccttgaatgtgagtgggatcatcattacgccaaatcacaaaaagaacgcatcttccgtcgattatccggcaa

SEQ ID NO: 218754 - DNA, 75 bp, synthetic construct
  source 1..75: mol_type = other DNA
cacatgctgaccgttgtgaacacagaaagccaggagacatggaaatggacggaaagaatcgggcagcatcctctt

SEQ ID NO: 218755 - DNA, 75 bp, synthetic construct
  source 1..75: mol_type = other DNA
atttagcactatttttgttcacattgctcctcataattgcatcaataatcttttccagaactccaaggattcttg

SEQ ID NO: 218756 - DNA, 75 bp, synthetic construct
  source 1..75: mol_type = other DNA
tcatactttgcacaatgaattacccaaagggttagaatttcattaccgctctcccatctcagctcgtaatttgcg

SEQ ID NO: 218757 - DNA, 75 bp, synthetic construct
  source 1..75: mol_type = other DNA
ggctcgttcgttgaggatgatctccgccagtatttcagcgacgtcctctatagcctgaaaactacagccggcgac

SEQ ID NO: 218758 - DNA, 75 bp, synthetic construct
  source 1..75: mol_type = other DNA
tggagtctgtatgcgtatccgctgaatccggtgaatggtattgatccattagggttaagtcccgcagatgtagcg

SEQ ID NO: 218759 - DNA, 75 bp, synthetic construct
  source 1..75: mol_type = other DNA
gtagagcaggtcgcttctctgcgtgtgaccccgaacatgtccacatggcgtccatgtgaccaggttgaatccgcg

SEQ ID NO: 218760 - DNA, 75 bp, synthetic construct
  source 1..75: mol_type = other DNA
atgcccagccgcaaaataataaaatttctgattatatctttactcgttatattaatttctctgtcaatcatatat

SEQ ID NO: 218761 - DNA, 75 bp, synthetic construct
  source 1..75: mol_type = other DNA
caatttatcactgataaaattgaaaagaggtttgttcccagcggtggtataaaagaaagactcctttttacgtta

SEQ ID NO: 218762 - DNA, 75 bp, synthetic construct
  source 1..75: mol_type = other DNA
gtggggtaatgtgggtgttcaggctggtgacaaggggtacagcgacacctcagccatgctgggtgtgaagtacac

SEQ ID NO: 218763 - DNA, 75 bp, synthetic construct
  source 1..75: mol_type = other DNA
aagtacagcctgaactggatgcgttttttcgtgaaacacgccattcgctggattatctgtttgccccgtttaatt

SEQ ID NO: 218764 - DNA, 75 bp, synthetic construct
  source 1..75: mol_type = other DNA
ttatacatcgttgctcatggcaacacatcagttattggggcaggttcagcaactgggccaacgttgaatcccgta

SEQ ID NO: 218765 - DNA, 75 bp, synthetic construct
  source 1..75: mol_type = other DNA
gttgatcaccttggaatggctgctcttggtccgattgattacttcaatgttcaggacaagatggttggtcgccag

SEQ ID NO: 218766 - DNA, 75 bp, synthetic construct
  source 1..75: mol_type = other DNA
tgggatatcagaaggcgcgacggcaacgaaccctaaaactggtcagaaactcatttataggaacggacaatggca

SEQ ID NO: 218767 - DNA, 75 bp, synthetic construct
  source 1..75: mol_type = other DNA
tagataacggtaatactaataagggagatgagtatcatagagtagccgctttgatatctgctaaggctgtgtatg

SEQ ID NO: 218768 - DNA, 75 bp, synthetic construct
  source 1..75: mol_type = other DNA
ggagatggcggcagataaaaaacgcgatcaagattatgaagatcaattacgccaacttgagctagaaaaccgaaa

SEQ ID NO: 218769 - DNA, 75 bp, synthetic construct
  source 1..75: mol_type = other DNA
tttggtgattataagttgttgaatatagcttataataactggctagaaaatgaagatactactaaagaggtgtat

SEQ ID NO: 218770 - DNA, 75 bp, synthetic construct
  source 1..75: mol_type = other DNA
gccagcgcgataaaagcgcagcctgaactggatacgttttttcgtgaaacacgccactcgctggattatctgttt

SEQ ID NO: 218771 - DNA, 75 bp, synthetic construct
  source 1..75: mol_type = other DNA
agcgttttgcgatattttcattcccgccagcgcgataaaagcgcagcctgaactggatacgttttttcgtgaaac

SEQ ID NO: 218772 - DNA, 75 bp, synthetic construct
  source 1..75: mol_type = other DNA
atgatgattgaaggacataaaggccttataattgtccctccacgaatgggattggttaatacatctatcgttagt

SEQ ID NO: 218773 - DNA, 75 bp, synthetic construct
  source 1..75: mol_type = other DNA
ttgatgtatcgagagactggagattaaaaaatgatgatggtatggagttttataccttaagaaaaaaagggatta

SEQ ID NO: 218774 - DNA, 75 bp, synthetic construct
  source 1..75: mol_type = other DNA
atccccgctggcgcggggaactctttttccagctccagcattgctgttgtattgacggtttatccccgctggcgc

SEQ ID NO: 218775 - DNA, 75 bp, synthetic construct
  source 1..75: mol_type = other DNA
tttatccccgctggcgcggggaactcatatccttattggaatacatgagctgcgcccacggtttatccccgctgg

SEQ ID NO: 218776 - DNA, 75 bp, synthetic construct
  source 1..75: mol_type = other DNA
aaatcagcctcaatactaccaacatcaccaaagacttcaccactaatctctcttcgatttttcatgaaattggtg

SEQ ID NO: 218777 - DNA, 75 bp, synthetic construct
  source 1..75: mol_type = other DNA
acactccatgagccaaaatttcaaggctgggattcgcggtttatccccgctggcgcggggaacacgtacatactc

SEQ ID NO: 218778 - DNA, 75 bp, synthetic construct
  source 1..75: mol_type = other DNA
gaactctttttccagctccagcattgctgttgtattgacggtttatccccgctggcgcggggaactcttaatcag

SEQ ID NO: 218779 - DNA, 75 bp, synthetic construct
  source 1..75: mol_type = other DNA
atgtatgaccggaaaacctcagactggcgcggtttatccccgctggcgcggggaactcccattctggaatttgta

SEQ ID NO: 218780 - DNA, 75 bp, synthetic construct
  source 1..75: mol_type = other DNA
tgatgccactgctggataagctgcgtgagcagtacgggggcggtggatttacccctatatttccagacacctgtt

SEQ ID NO: 218781 - DNA, 75 bp, synthetic construct
  source 1..75: mol_type = other DNA
tatgactcacaatgggcggcaatttgttccattgcctcaaagattggctgtacgccagagaccctgcgtatctgg

SEQ ID NO: 218782 - DNA, 75 bp, synthetic construct
  source 1..75: mol_type = other DNA
aaatggtggaacgatacagcatcacaaagaatatttgactctctaatattgaataatccgggactagcattagat

SEQ ID NO: 218783 - DNA, 75 bp, synthetic construct
  source 1..75: mol_type = other DNA
tactatccacttttatgttttttattttccccgattttttcaaatcgtttcacatgccttcatttattttaatta

SEQ ID NO: 218784 - DNA, 75 bp, synthetic construct
  source 1..75: mol_type = other DNA
aatttgagtggaaaggatgtagctggtcttctcgcataccttggtttgggagaagcagcgaaaatgcctgctgcg

SEQ ID NO: 218785 - DNA, 75 bp, synthetic construct
  source 1..75: mol_type = other DNA
tgcagcgaactgcatattgccccgtcaacgtattaccattgtcagcaacagcgacatcatccggataaacgcagt

SEQ ID NO: 218786 - DNA, 75 bp, synthetic construct
  source 1..75: mol_type = other DNA
aaccctgagactgtaacgactgatgatgttaagactccaggtactcttcttacaacactgggcatcagctcctct

SEQ ID NO: 218787 - DNA, 75 bp, synthetic construct
  source 1..75: mol_type = other DNA
accgcaccggcacgctgaaaaacgggcaggggcgtctgttcctcgccatcaccgagctgcgcacgccggaacccg

SEQ ID NO: 218788 - DNA, 75 bp, synthetic construct
  source 1..75: mol_type = other DNA
tttaccggcctggccgcagcttggcgcaagcctgatgtatgaacaatattatggcgatgaggtagggctgtttgg

SEQ ID NO: 218789 - DNA, 75 bp, synthetic construct
  source 1..75: mol_type = other DNA
gcacaccatggacaatcgaagatattcgctaccttgaaacgtattatggcgtgaagaaaacccgcgaaatagcgg

SEQ ID NO: 218790 - DNA, 75 bp, synthetic construct
  source 1..75: mol_type = other DNA
tgccggggcgttcccgtagttcagttcagggggctatgaggcgtttacagaaaatgagtgcgcagaaatctgtca

SEQ ID NO: 218791 - DNA, 75 bp, synthetic construct
  source 1..75: mol_type = other DNA
ttatcgcggcagcgtgcctgactgcatccggcgctgcaatggctggtaataaagatgctgttcaaaccggtactg

SEQ ID NO: 218792 - DNA, 75 bp, synthetic construct
  source 1..75: mol_type = other DNA
tattacgcaatttctgcggtcgcatacgataacaaaggcaatgcctcaaaacgcgtacagactgcagtggttatc

SEQ ID NO: 218793 - DNA, 75 bp, synthetic construct
  source 1..75: mol_type = other DNA
ctgaatttgcagcccgagataaaaaagtagccgaacgcctgcacgatttgacgccctttatcgtagtaaatcatc

SEQ ID NO: 218794 - DNA, 75 bp, synthetic construct
  source 1..75: mol_type = other DNA
ccggaggtctgtcgcaaactggggttttctgatgccacgttctatacgtggcgcaagaaatacggcggtatttcg

SEQ ID NO: 218795 - DNA, 75 bp, synthetic construct
  source 1..75: mol_type = other DNA
acctggagccgaacgggactgcaacaaccaatgagcaggggcaggctgtattcaccgcctctaccactaaagcgg

SEQ ID NO: 218796 - DNA, 75 bp, synthetic construct
  source 1..75: mol_type = other DNA
gttgctacgctgactaccggcggaaagacgggtgatcttcacatcatgccgctattcaacggccagccagcagcc

SEQ ID NO: 218797 - DNA, 75 bp, synthetic construct
  source 1..75: mol_type = other DNA
taatggcgacgggacgtggatcgcgcaaatttctctgggtactacggcgggtgaattaattgttatgccgaagat

SEQ ID NO: 218798 - DNA, 75 bp, synthetic construct
  source 1..75: mol_type = other DNA
ccgatgtgcaggttatcacgactaaatacagtacagccaactccacctacgatacaattatcaaattattatcgt

SEQ ID NO: 218799 - DNA, 75 bp, synthetic construct
  source 1..75: mol_type = other DNA
acattaagcaagccattagcagcgcaccacgaaatagccaaacgatggaaatgcacctccagatgatcaaatatg

SEQ ID NO: 218800 - DNA, 75 bp, synthetic construct
  source 1..75: mol_type = other DNA
agactttgaaagtttcggttttttcaatcgcaaaggattagataaatacatcatggattttatggatgtaaagaa

SEQ ID NO: 218801 - DNA, 75 bp, synthetic construct
  source 1..75: mol_type = other DNA
gtttcgcagtagggatcagccgcagctctttccgctaccgttctgtggcggcagacgacagcgcactccgcctac

SEQ ID NO: 218802 - DNA, 75 bp, synthetic construct
  source 1..75: mol_type = other DNA
ggtgctgaataaccgcaccactgatgtgataaacaaccatgccgaaaaaataggtaacaaccaggcgatcaccgt

SEQ ID NO: 218803 - DNA, 75 bp, synthetic construct
  source 1..75: mol_type = other DNA
tgtggtgccacacaacctgtaccggatgcgcctgtgccgaaagatttaccccccggaatgccggatatgcggcaa

SEQ ID NO: 218804 - DNA, 75 bp, synthetic construct
  source 1..75: mol_type = other DNA
ttaactgggaccgctataacccgtcaaaccaggacagttcatgctggatccgtgtggcacaggcgtgggcaggca

SEQ ID NO: 218805 - DNA, 75 bp, synthetic construct
  source 1..75: mol_type = other DNA
aatattatttcttgcctctccagtatttcaggaataggtaacctgtattatgcttgttcacaggcatttcctgtc

SEQ ID NO: 218806 - DNA, 75 bp, synthetic construct
  source 1..75: mol_type = other DNA
atggttagtgtgacgagttatacatatccaacggaaacagagaatgataatagtcattttcagagtcaaactcag

SEQ ID NO: 218807 - DNA, 75 bp, synthetic construct
  source 1..75: mol_type = other DNA
ttttattatatcgataaatatcctaatggtgattttcattatcattacaatccagactatgttttataccctccg

SEQ ID NO: 218808 - DNA, 75 bp, synthetic construct
  source 1..75: mol_type = other DNA
taattttgcttagtgccccacttgcaactatcgcagccgatacagaagaaatcagccaaaaacttgatgatggtt

SEQ ID NO: 218809 - DNA, 75 bp, synthetic construct
  source 1..75: mol_type = other DNA
gtatatgaaaaagatatcaacccagaaataaaaataaatgatatcaagagatttattgttaatagctctgcaagc

SEQ ID NO: 218810 - DNA, 75 bp, synthetic construct
  source 1..75: mol_type = other DNA
ttactgtttttggtggggattttattatggatgatttaaaaatagtaaaaaatacggaagcatgggtatggtata

SEQ ID NO: 218811 - DNA, 75 bp, synthetic construct
  source 1..75: mol_type = other DNA
taaggccagtcgttctttatctgttggtgaatatcagtatttattactgcttgcaaatatgcatccgtcttacag

SEQ ID NO: 218812 - DNA, 75 bp, synthetic construct
  source 1..75: mol_type = other DNA
ttatggaatctggcgtaagttcctagttttaactggtcgagtaccgcaagaaatcattccggtatttggtgtatt

SEQ ID NO: 218813 - DNA, 75 bp, synthetic construct
  source 1..75: mol_type = other DNA
ccgaaaggcggcgccctctttcgctacaaggaagttattcagttttgcaaagataaaggattgatttccgaacac

SEQ ID NO: 218814 - DNA, 75 bp, synthetic construct
  source 1..75: mol_type = other DNA
atgagtaagatcgcgagattcagttacaaggcattagccaccatttaccccgtaacgcgtgacgactggacaaac

SEQ ID NO: 218815 - DNA, 75 bp, synthetic construct
  source 1..75: mol_type = other DNA
tgagaaaggcgatctgaaaggctttgagttcggtgtatttgactggcacgccaacggcacggcgaccgatgcgaa

SEQ ID NO: 218816 - DNA, 75 bp, synthetic construct
  source 1..75: mol_type = other DNA
tgttcttcatcaacgcagccagcgtcagacatctatgaagatgaaggcattttaatgatcaccccagcggcaacc

SEQ ID NO: 218817 - DNA, 75 bp, synthetic construct
  source 1..75: mol_type = other DNA
ctactttatgaaaagcacagggacacgcgatgtacgccaagcgcgattgtttcgggatgctattgctctggaatg

SEQ ID NO: 218818 - DNA, 75 bp, synthetic construct
  source 1..75: mol_type = other DNA
ggctattggtgcttacagcggtatgcggatcaatgaaatatgtacgctgcgtgagagctggcaaaggtctatacc

SEQ ID NO: 218819 - DNA, 75 bp, synthetic construct
  source 1..75: mol_type = other DNA
tgtgatatggccggagccaccataacggagcgacagcgttatgccggaaataaataccggatgaagccctcgctg

SEQ ID NO: 218820 - DNA, 75 bp, synthetic construct
  source 1..75: mol_type = other DNA
aaacctattcacgaaatagcgcctcaacgattgaacttaaaaaatacgtcgaattgttgtcatataaagacatca

SEQ ID NO: 218821 - DNA, 75 bp, synthetic construct
  source 1..75: mol_type = other DNA
gggcgtattgtgctttgaggtaacggagggcaaaaccaagagcgcagcgcgaatcgttccagtacacagcaagct

SEQ ID NO: 218822 - DNA, 75 bp, synthetic construct
  source 1..75: mol_type = other DNA
gagctagcaaaggtctatgccttgcttgatgacgagatgaaggcagtaacggctattggtgcatacagcggcatg

SEQ ID NO: 218823 - DNA, 75 bp, synthetic construct
  source 1..75: mol_type = other DNA
atgagtaagattgcgagattcagctacagggcattagcaaccatttactctgtaacgcgtgacgactggacaaac

SEQ ID NO: 218824 - DNA, 75 bp, synthetic construct
  source 1..75: mol_type = other DNA
tgccttcaacgtgctggatatcgaatctgctacctacacagtaaaggacagcaccggggctattctcgttgatgg

SEQ ID NO: 218825 - DNA, 75 bp, synthetic construct
  source 1..75: mol_type = other DNA
cggtcgcagacgcccagatgcaagccatcgacatgctgaacggcgacactctgttggctgatggtgacgggctga

SEQ ID NO: 218826 - DNA, 75 bp, synthetic construct
  source 1..75: mol_type = other DNA
tcaaagcattgctatgttgcctggatgattccctcgatgttgatgaaattgatttcacttctctggagctaatga

SEQ ID NO: 218827 - DNA, 75 bp, synthetic construct
  source 1..75: mol_type = other DNA
gggcgagtgaactctacgatttggtgattgtcgacacgccgccagtacttgcggtgactgacccaagtattgtgg

SEQ ID NO: 218828 - DNA, 75 bp, synthetic construct
  source 1..75: mol_type = other DNA
tgaaattgagattatccgttctcgaatgattttaggtgatacggttgacaagtttaacctaactaccgtcgtaac

SEQ ID NO: 218829 - DNA, 75 bp, synthetic construct
  source 1..75: mol_type = other DNA
cgagccgctagaaattaccagcggtcaaatgtcgattccggttgtcgtgtcggctgaatataaccagctctctga

SEQ ID NO: 218830 - DNA, 75 bp, synthetic construct
  source 1..75: mol_type = other DNA
agcgatgattgtggccatgagccgtgagatctgtgtgaagctgtatgatgcgctggtggctctacgcccggaatg

SEQ ID NO: 218831 - DNA, 75 bp, synthetic construct
  source 1..75: mol_type = other DNA
taagtatccgcccgataaaacaccggggacggtggagttaatattaaaacaagcggaagttatttcgaatcactg

SEQ ID NO: 218832 - DNA, 75 bp, synthetic construct
  source 1..75: mol_type = other DNA
acagcgtggtggcactgatgctgcttctgcgcattatcagttgggacgacattgtcagtaataaagcggcgtgga

SEQ ID NO: 218833 - DNA, 75 bp, synthetic construct
  source 1..75: mol_type = other DNA
ttttttatcaggagtttttaagtcatcttaaaaaattgagtgaggttagtatggataaggtatctgataaaaatg

SEQ ID NO: 218834 - DNA, 75 bp, synthetic construct
  source 1..75: mol_type = other DNA
ataaagtgttggctgatacatataatccttttcccagctatgtaagtcttattgatagttacggtggtaacaatc

SEQ ID NO: 218835 - DNA, 75 bp, synthetic construct
  source 1..75: mol_type = other DNA
ttgtgccggtgatgggagcgattgtcgcgggactggcattattgctggtgtttatgtcagccagaaaacaacctg

SEQ ID NO: 218836 - DNA, 75 bp, synthetic construct
  source 1..75: mol_type = other DNA
aggcgttaccattctttcggcgctctctatgctgccaaatgccccagcctggctatcaatttccgggattattgc

SEQ ID NO: 218837 - DNA, 75 bp, synthetic construct
  source 1..75: mol_type = other DNA
cgcctttagccatacgcccattatttctacgtttgccatagacagacgtgaaaaatatggcgaacacgctatgga

SEQ ID NO: 218838 - DNA, 75 bp, synthetic construct
  source 1..75: mol_type = other DNA
tggtgttgatcctgaatctcatctttctgatggggcgccacgcaacaatccgggtaatggggtttttagtattcc

SEQ ID NO: 218839 - DNA, 75 bp, synthetic construct
  source 1..75: mol_type = other DNA
ccagccagtacgcgctgtttgtggaagatgaatggcggatcttcgagccgctggcgctgacgaccggcgtacgta

SEQ ID NO: 218840 - DNA, 75 bp, synthetic construct
  source 1..75: mol_type = other DNA
aatataacggtgtgtctgtcacgctttctgagctgtctgcgctgcagcgtattgagcatcttgccctcctgaaac

SEQ ID NO: 218841 - DNA, 75 bp, synthetic construct
  source 1..75: mol_type = other DNA
cgggtaatgggatttttggtattcccattgattgcctatttcttatttctttccatttaccttgtcggtagttgg

SEQ ID NO: 218842 - DNA, 75 bp, synthetic construct
  source 1..75: mol_type = other DNA
aaagaacacgcgggcagcgcgcattttaaatatgccatgcgcgacgcaatggatatttcaacgattggctgcgcc

SEQ ID NO: 218843 - DNA, 75 bp, synthetic construct
  source 1..75: mol_type = other DNA
caataaacacaatatggcgctcgtgactattgaagacctggtggcttatcgtcaggcggatgaacgcaaagccag

SEQ ID NO: 218844 - DNA, 75 bp, synthetic construct
  source 1..75: mol_type = other DNA
aaacgcgctggttgcactgcgtgaaggacgcggtgtaatggtgcttgatgatgaagaccgtgaaaatgaaggcga

SEQ ID NO: 218845 - DNA, 75 bp, synthetic construct
  source 1..75: mol_type = other DNA
gctctggcgtcatttacgtcgtcacggcttgtggcatctgacgggcgatgttatcaggagtctgcgatgtctgta

SEQ ID NO: 218846 - DNA, 75 bp, synthetic construct
  source 1..75: mol_type = other DNA
cgttcgcgcagcgattgccgatggcgcaaaaccgtcagatctgaatcgcccgggccacgttttcccacttcgcgc

SEQ ID NO: 218847 - DNA, 75 bp, synthetic construct
  source 1..75: mol_type = other DNA
acatttacccagctcattgaagatcctgtaactcaacgtcatctcccggcgttatgtgctgcggcttcatccatt

SEQ ID NO: 218848 - DNA, 75 bp, synthetic construct
  source 1..75: mol_type = other DNA
tggtctggacagcagctataccctgattcttgtcgatggtaaacgcgtgaactcccgcaatgctgtcttccgtca

SEQ ID NO: 218849 - DNA, 75 bp, synthetic construct
  source 1..75: mol_type = other DNA
tgggtcagtattgtcacgataaacagtgaaaccggctaccggaatatgaatgtgctggatgatattctcacgccg

SEQ ID NO: 218850 - DNA, 75 bp, synthetic construct
  source 1..75: mol_type = other DNA
agcgtgccctgttgcagttgctgcctgacgggctggcatgggataagcggccgtcatccgttcttgcggctttgt

SEQ ID NO: 218851 - DNA, 75 bp, synthetic construct
  source 1..75: mol_type = other DNA
gcatttatggcgaagggcttacccgtaccaacaaatacgggcaattctcaattctgacgtttaccccgctgatgg

SEQ ID NO: 218852 - DNA, 75 bp, synthetic construct
  source 1..75: mol_type = other DNA
tcacacggctgatggcgttgaagatggcatttcaatctgctacttcaaaccatactcgcaaggccgtgctcgctg

SEQ ID NO: 218853 - DNA, 75 bp, synthetic construct
  source 1..75: mol_type = other DNA
agcgcgccctgttgcagttgctgcctgacgggctggtatgggataagcggccgtcatccgttcttgcggctttgt

SEQ ID NO: 218854 - DNA, 75 bp, synthetic construct
  source 1..75: mol_type = other DNA
atggctgtaaccctgaccccgcatcagcgcgccctgttgcagttgctgcctgacgggctggcatgggacaagcgt

SEQ ID NO: 218855 - DNA, 75 bp, synthetic construct
  source 1..75: mol_type = other DNA
ctggcgctgacgaccggcgtacgtatggacgatcacgaaacctacggtgaacactggagtccgcgtgcctacctg

SEQ ID NO: 218856 - DNA, 75 bp, synthetic construct
  source 1..75: mol_type = other DNA
tcggcggtgaatggcgtcacgacaaacttagcgatgcggtaaacctgaccggcggcaccagcaccaaaacatctg

SEQ ID NO: 218857 - DNA, 75 bp, synthetic construct
  source 1..75: mol_type = other DNA
aacaaaaaccctggtaacagcagcccgattacctcagaaagtaatactgttgatggcaaatacacgttaccgctg

SEQ ID NO: 218858 - DNA, 75 bp, synthetic construct
  source 1..75: mol_type = other DNA
cagcatcggcgtagcagctggtgagagtaaatctgcaactgaaatcatcgctgtttccgggccgcgctgctgggt

SEQ ID NO: 218859 - DNA, 75 bp, synthetic construct
  source 1..75: mol_type = other DNA
gtggcttattacaacataaggcaggagtttaattactcaactgaaattactgatttcatgaaagcggtatatttc

SEQ ID NO: 218860 - DNA, 75 bp, synthetic construct
  source 1..75: mol_type = other DNA
cctgccgtggcgcatgtaagattgtgggtagcccggatctgaaaccagaaaccatgtactgcacccattttgttg

SEQ ID NO: 218861 - DNA, 75 bp, synthetic construct
  source 1..75: mol_type = other DNA
cacgccatacgggcatcaggtgattatttctgaactgatgtgggtatggttgccgggaatggtgctgatgggaat

SEQ ID NO: 218862 - DNA, 75 bp, synthetic construct
  source 1..75: mol_type = other DNA
cgtctgttatttgccggaatcgtcctggcgatgctgccagacgccgacgtattgtcgtttaaatttggcgttgct

SEQ ID NO: 218863 - DNA, 75 bp, synthetic construct
  source 1..75: mol_type = other DNA
tcggcctgatgctctctatcgtgggtgtgctgctgcgctcgttgtttaatcgcggcatcgaaagcccgcaagtgc

SEQ ID NO: 218864 - DNA, 75 bp, synthetic construct
  source 1..75: mol_type = other DNA
aagtgctaccggaatattaccagccagcgaatgtctgggccgtttatgtttcaaggctggcgacgtcagcgaaag

SEQ ID NO: 218865 - DNA, 75 bp, synthetic construct
  source 1..75: mol_type = other DNA
agtcaccggcccactgtcgtctaatcaatggagaaattgtccatcagtggtgtctcgatgggcaggggattgctc

SEQ ID NO: 218866 - DNA, 75 bp, synthetic construct
  source 1..75: mol_type = other DNA
cgttatctgttcaaccagtatccgccacattctggctgtacgaaagagtacgctgctgcaaatcgacacacttac

SEQ ID NO: 218867 - DNA, 75 bp, synthetic construct
  source 1..75: mol_type = other DNA
cttaatggatgcgcaggcccgtgatacatggtaccggtcactggagtacgataattttccggaaatcagcgaagc

SEQ ID NO: 218868 - DNA, 75 bp, synthetic construct
  source 1..75: mol_type = other DNA
tatcaacgttctccaagctactcagctattcaatcaaccaactctttattcgacagtcctgcttagcctcttatc

SEQ ID NO: 218869 - DNA, 75 bp, synthetic construct
  source 1..75: mol_type = other DNA
ctctaatggtaagtatattaaattcgctgttggagaagctatggcaacggtgagagagatagaaagtgaacgtca

SEQ ID NO: 218870 - DNA, 75 bp, synthetic construct
  source 1..75: mol_type = other DNA
gtgtttacgcttaatgtgctggacgataaaaactacactctgagcagtgatggcggctttagcgcccgtgggcaa

SEQ ID NO: 218871 - DNA, 75 bp, synthetic construct
  source 1..75: mol_type = other DNA
ggatgatcaatcaactgcaaaacagcctgacggtaacggagaacggcaaagacgcaggcgtcctgagcctgactt

SEQ ID NO: 218872 - DNA, 75 bp, synthetic construct
  source 1..75: mol_type = other DNA
tgttgatcgactgcgatatgcgcaaaggctacacccacgagctgttgggcactaataacgtcaatggcctgtcgg

SEQ ID NO: 218873 - DNA, 75 bp, synthetic construct
  source 1..75: mol_type = other DNA
taagaagggatctgcacacatcactttcaaaaggctggaactgattgacagaattaacgatataatagctaggca

SEQ ID NO: 218874 - DNA, 75 bp, synthetic construct
  source 1..75: mol_type = other DNA
gatatctgtgtgaagctctacaatgccatcaccgagatccgcccagactggcacagcacggatgtcgaacaaggg

SEQ ID NO: 218875 - DNA, 75 bp, synthetic construct
  source 1..75: mol_type = other DNA
ccggcgctcaacctgcgcagcaacatcgtggtcatttccgatgaagcgcaccgcagtcagtatggcctgaacgcc

SEQ ID NO: 218876 - DNA, 75 bp, synthetic construct
  source 1..75: mol_type = other DNA
tccgcagcagggcgcggggaatacgcgttatcgtcgcagctttgtggcgaccggatttatgggtgatgctgccaa

SEQ ID NO: 218877 - DNA, 75 bp, synthetic construct
  source 1..75: mol_type = other DNA
ccggcgctaaacctgcgcagcaatatcgtcgtcatttccgatgaagcgcaccgcagccagtatggtcttagcgcc

SEQ ID NO: 218878 - DNA, 75 bp, synthetic construct
  source 1..75: mol_type = other DNA
accggtggggatttcatcttatcaccgggcaacaggcagatcgacttgccgacctggaaagaatgctgtatttgt

SEQ ID NO: 218879 - DNA, 75 bp, synthetic construct
  source 1..75: mol_type = other DNA
aaagagaaaaccaaaagtgactggagccgtctggaaaaactggttggttctgaacctcgtatcaatgaggtggcc

SEQ ID NO: 218880 - DNA, 75 bp, synthetic construct
  source 1..75: mol_type = other DNA
atgttcaattttgtagtcagccgcgaaagcctgttatcagggtttcagtggtttttctttattttttgcaacacc

SEQ ID NO: 218881 - DNA, 75 bp, synthetic construct
  source 1..75: mol_type = other DNA
tttcttgctaccgcactggcctgcttcgctcaggcgttctgcggtcatcgtcgcgctattatggaagggccaggc

SEQ ID NO: 218882 - DNA, 75 bp, synthetic construct
  source 1..75: mol_type = other DNA
tctgacggcggtgattacaggtctggtaaatatcagtaatacctacggtgcgattcggggcacggatgtttttta

SEQ ID NO: 218883 - DNA, 75 bp, synthetic construct
  source 1..75: mol_type = other DNA
tatccctttacccgtgagtagtgcggtcatgctggtttcttatctgcctttactcttttccgcgctggtgtttag

SEQ ID NO: 218884 - DNA, 75 bp, synthetic construct
  source 1..75: mol_type = other DNA
acgttttgcccgttatggcctgctggtcggcaccataaccggctggttgttgtggtacttttgctttccttcttc

SEQ ID NO: 218885 - DNA, 75 bp, synthetic construct
  source 1..75: mol_type = other DNA
tggcgcacaactgaccagcatcttttttaaaggtatgctcgggctgccgtttggcatagccgatcctgattttaa

SEQ ID NO: 218886 - DNA, 75 bp, synthetic construct
  source 1..75: mol_type = other DNA
ggttatcctcaactcgatcttccgccgcgcgacgggataccaggattacgggtactacgagtacgagtatcagtc

SEQ ID NO: 218887 - DNA, 75 bp, synthetic construct
  source 1..75: mol_type = other DNA
atcagccagacccataagcgcgtactgatgatcgactgcgatatgcgtaaaggctattcccacgaactgctcggc

SEQ ID NO: 218888 - DNA, 75 bp, synthetic construct
  source 1..75: mol_type = other DNA
gcccatcggtctcgggcaacgatgagatcgacattggtcgccttgtgggcaccgtggtggaagccaaatggtggg

SEQ ID NO: 218889 - DNA, 75 bp, synthetic construct
  source 1..75: mol_type = other DNA
atgaacgagctgataaatagcaacgtcatcaaaatgaccagcattgaaatctctgagcttacaggtaagcgtcat

SEQ ID NO: 218890 - DNA, 75 bp, synthetic construct
  source 1..75: mol_type = other DNA
atgccaaccgttattacgcacgccgccgttctcctatgcattggtttagggttgggttcgaaagccatccctccg

SEQ ID NO: 218891 - DNA, 75 bp, synthetic construct
  source 1..75: mol_type = other DNA
gtcggcaaggtgttggaacatgatggcgtgacgatgctcgttgaggcgattcatgccagcccggagagccaattt

SEQ ID NO: 218892 - DNA, 75 bp, synthetic construct
  source 1..75: mol_type = other DNA
gggctggctcaggcgcgtgatccgcagctggcggcatggattgaagagaacgtcaccttcccgtgcaccatggtt

SEQ ID NO: 218893 - DNA, 75 bp, synthetic construct
  source 1..75: mol_type = other DNA
ccgtcagtgggtgattgaagataacttcgttaatggtcgcccggactgggataaagtgggcgcacagttcgttgc

SEQ ID NO: 218894 - DNA, 75 bp, synthetic construct
  source 1..75: mol_type = other DNA
cctttctgtttatgccagtgtgcccaaatcgaacctacagcttgagctgtataacaaactcaagcgccatcgcaa

SEQ ID NO: 218895 - DNA, 75 bp, synthetic construct
  source 1..75: mol_type = other DNA
tcgtgaaaaagggctgaaagcatttacggtgatgtcctgcgataacgtgcgtgaaaacggtcatgtggcgaaggt

SEQ ID NO: 218896 - DNA, 75 bp, synthetic construct
  source 1..75: mol_type = other DNA
ctggatctcaataacccgctgatcaagcacgatctggaaaacccgactgcgccgaagtccgcgattggttacatc

SEQ ID NO: 218897 - DNA, 75 bp, synthetic construct
  source 1..75: mol_type = other DNA
gatctggaaaacccgactgcgccgaagtccgcgattggttacatcgtagaagccctgcgtctgcgtcgtgaaaaa

SEQ ID NO: 218898 - DNA, 75 bp, synthetic construct
  source 1..75: mol_type = other DNA
cgggcgtggtcaacagtggctgaccagaaagctgctcgataacggaatgctgaaagtaaccggggaggctgctta

SEQ ID NO: 218899 - DNA, 75 bp, synthetic construct
  source 1..75: mol_type = other DNA
gcccactggtggaaactattgccgccgttggacagacttttccgcccgttgcagtgctggcgattgccgttccgg

SEQ ID NO: 218900 - DNA, 75 bp, synthetic construct
  source 1..75: mol_type = other DNA
actcgcccgtggggcgcggaatttcgcccactggtggaaactattgccgccgttggacagacttttccgcccgtc

SEQ ID NO: 218901 - DNA, 75 bp, synthetic construct
  source 1..75: mol_type = other DNA
atcatcatcggacttagcggatttaataccgcttatgtgattcagggggcgttgctggtggcactggcggcgatc

SEQ ID NO: 218902 - DNA, 75 bp, synthetic construct
  source 1..75: mol_type = other DNA
gtgacctgattaatcccattccggaagaatcaacggaaacggcggcaagacaacatatcgagccactggccccgg

SEQ ID NO: 218903 - DNA, 75 bp, synthetic construct
  source 1..75: mol_type = other DNA
ctatttcacagtgaaagaaacagcggtcaacacaaatcacggaatacagatatcgttcaccacaaaaatcaccgg

SEQ ID NO: 218904 - DNA, 75 bp, synthetic construct
  source 1..75: mol_type = other DNA
cgttgggcagacttttccacctgtagcggtgctggcgattgccgttccggtgatggggtttggtctgcaaccggc

SEQ ID NO: 218905 - DNA, 75 bp, synthetic construct
  source 1..75: mol_type = other DNA
acagcactgaataaagccgatttatttaccgccacctcaaccaccagcagttcatcggctttcagcgccaccacc

SEQ ID NO: 218906 - DNA, 75 bp, synthetic construct
  source 1..75: mol_type = other DNA
acagtctggaggcggcagaaaaatctaccctgacgccgatatcaaaacagcaaagctcttacaccgcgaaactga

SEQ ID NO: 218907 - DNA, 75 bp, synthetic construct
  source 1..75: mol_type = other DNA
gcttcctcaaattgaggtttccgaaagaatcaataacttagggttcaatgttcagtacgagcattacgtcttcga

SEQ ID NO: 218908 - DNA, 75 bp, synthetic construct
  source 1..75: mol_type = other DNA
cgcaacgtagagggcgtgctggctgtgtcgctggtttatcaccagcaggaagagcaaggtgaggaaacaccatga

SEQ ID NO: 218909 - DNA, 75 bp, synthetic construct
  source 1..75: mol_type = other DNA
gcctggtcgtgcaggccaaaagcgaacgaatttcagacatcagcacccaactgaacgcctttcccggctgtgaag

SEQ ID NO: 218910 - DNA, 75 bp, synthetic construct
  source 1..75: mol_type = other DNA
caactggcgcaggcacagacgctgacaaccaaaaatagtcaaaaagacagtaaagccgccatcgccaccagcgat

SEQ ID NO: 218911 - DNA, 75 bp, synthetic construct
  source 1..75: mol_type = other DNA
tgctgtgcgcgctttctggctgcgcccggagcacgcctccctctgcctttagtggtaagggagaacccgtaaaca

SEQ ID NO: 218912 - DNA, 75 bp, synthetic construct
  source 1..75: mol_type = other DNA
ccagcggggcaatgtcgatttatcagcgttatctggctaaccagacgccaacgccgctgaatcttgttccgccag

SEQ ID NO: 218913 - DNA, 75 bp, synthetic construct
  source 1..75: mol_type = other DNA
catcagcaagaacgagatggtgaagctgctggaggcaacccagtatcgtcaggtgtcgaaaatgacccgtcctgg

SEQ ID NO: 218914 - DNA, 75 bp, synthetic construct
  source 1..75: mol_type = other DNA
gccgcaacagcaacctgctcaacaggagcagaaagacagcgacggcgtggctggttggatcaaggagatgtttgg

SEQ ID NO: 218915 - DNA, 75 bp, synthetic construct
  source 1..75: mol_type = other DNA
ccgcaggcggaacgcgcagttccggcacaagcggcgtatctgacgctatggaccatgcagcaagtggtgcaacgt

SEQ ID NO: 218916 - DNA, 75 bp, synthetic construct
  source 1..75: mol_type = other DNA
tgttggtagatgcgctgacccgttcgatgaacgtgccaacggtgaatctggggatggcgttagggttacctgcgg

SEQ ID NO: 218917 - DNA, 75 bp, synthetic construct
  source 1..75: mol_type = other DNA
ggacgcggcagaaaaagccgccgtggaaggcattccggcactgaagaaacagcgtaagttgagcgatctggaaac

SEQ ID NO: 218918 - DNA, 75 bp, synthetic construct
  source 1..75: mol_type = other DNA
acgatggcccggaatcgcacttcagcaagcgcggtacgccgaccatgggcgggattatgatcctgacggcgattg

SEQ ID NO: 218919 - DNA, 75 bp, synthetic construct
  source 1..75: mol_type = other DNA
gacacgccggggagctggttatcgtctgcaccgcgatagtcggggcagggctgggcttcctgtggtttaacacct

SEQ ID NO: 218920 - DNA, 75 bp, synthetic construct
  source 1..75: mol_type = other DNA
cctgaccgatggcctcgacggtctggccattatgccgaccgtctttgtcgcaggtggttttgcactggtggcctg

SEQ ID NO: 218921 - DNA, 75 bp, synthetic construct
  source 1..75: mol_type = other DNA
cgccagaagatattgcagatatgggcgtggactacgacggcaactttgtttgcagcggtggcatgcgtgtcttgc

SEQ ID NO: 218922 - DNA, 75 bp, synthetic construct
  source 1..75: mol_type = other DNA
gctactgctaaaactggctatcgtttttgccgtgctgatcgccatttacggcgtttatctcgatcaaaaaattcg

SEQ ID NO: 218923 - DNA, 75 bp, synthetic construct
  source 1..75: mol_type = other DNA
atcattactgcgctgatggtggtgttcttgcgtctgatgatgttccgcaaaggtaaattgttaatcgagagcctg

SEQ ID NO: 218924 - DNA, 75 bp, synthetic construct
  source 1..75: mol_type = other DNA
ctgttcctctccagcgagcgttcttactggcgtaaagcgaacgaagcctacatggcgctgatcatggacgcgcgt

SEQ ID NO: 218925 - DNA, 75 bp, synthetic construct
  source 1..75: mol_type = other DNA
aagaagccctgccggaaaagctcaatcgcttccttgattatcttaaccgttcatccgatgacggcgtaacacaac

SEQ ID NO: 218926 - DNA, 75 bp, synthetic construct
  source 1..75: mol_type = other DNA
atgtctgaagccaaacgtgtggataccggggcgctcgttgaggcaggggctgatttggacgatattactgtttat

SEQ ID NO: 218927 - DNA, 75 bp, synthetic construct
  source 1..75: mol_type = other DNA
tccggattctaaccttcccgcacattatcaggcgtttcgtagcgagctggcaaaagcgttgaacgtggatgagtc

SEQ ID NO: 218928 - DNA, 75 bp, synthetic construct
  source 1..75: mol_type = other DNA
gcagatacggagttttatgaaacagtaataatgcgttatgggcgagaaagtattgtaagattactgcagccattg

SEQ ID NO: 218929 - DNA, 75 bp, synthetic construct
  source 1..75: mol_type = other DNA
tcgattgacaggcttagagccttcaaaagacgtctactctctatcgatctggatgctacacaaggcgaaaacgca

SEQ ID NO: 218930 - DNA, 75 bp, synthetic construct
  source 1..75: mol_type = other DNA
cgatccggaagcgtatctgcgccatattctgagcgtactgccggaatggccttccaaccgagttggcgaactcct

SEQ ID NO: 218931 - DNA, 75 bp, synthetic construct
  source 1..75: mol_type = other DNA
ctctattacggattactgagcatgatttcgcttactgttgtcgccacgctaaagtccgtggggattattttatcc

SEQ ID NO: 218932 - DNA, 75 bp, synthetic construct
  source 1..75: mol_type = other DNA
gtcaggtgtcgaaaatgacccgtcctggcgaatttaccgtgcaggctaacagcattgagatgatccgccgtccgt

SEQ ID NO: 218933 - DNA, 75 bp, synthetic construct
  source 1..75: mol_type = other DNA
ggggtaatctctccacagcctgcttttatgcaactggtacgtcaggagctgcaggcgaaactgggcgataaagtg

SEQ ID NO: 218934 - DNA, 75 bp, synthetic construct
  source 1..75: mol_type = other DNA
tgtgagcagatcgccgttgatataaagttgaaacaggaagaagcgtatcaaaaaggtgcgcttagccatcacatt

SEQ ID NO: 218935 - DNA, 75 bp, synthetic construct
  source 1..75: mol_type = other DNA
ttaaatatgccatgcgcgacgcgatggatatttcaacgattggctgcgccgcacattgtcggctggataatggaa

SEQ ID NO: 218936 - DNA, 75 bp, synthetic construct
  source 1..75: mol_type = other DNA
aaaaagctgacagtgaaatatcctggcgtcaggatgctgttgatgctgatatcgcaactgatgaagaagctacaa

SEQ ID NO: 218937 - DNA, 75 bp, synthetic construct
  source 1..75: mol_type = other DNA
atatgtatgtccgctgtcttgcggcaagctgggatgcatcaaatccgcagtgggaaccgtggttaagagtcggtc

SEQ ID NO: 218938 - DNA, 75 bp, synthetic construct
  source 1..75: mol_type = other DNA
ggctgcatatgacctggctaacgctaaatacaccgcacaggacgctaccacggcgcgaaaagggattgttcagct

SEQ ID NO: 218939 - DNA, 75 bp, synthetic construct
  source 1..75: mol_type = other DNA
acacctcgtattcacttcccctgaatctgggtatcggcggtgcagtggcaaaactctccagcctggactggcaga

SEQ ID NO: 218940 - DNA, 75 bp, synthetic construct
  source 1..75: mol_type = other DNA
ggatgtcgtttctggcaacggcggggctgggcgtgatttcaatggtgagtctgttcttctcgttaccggaaggtg

SEQ ID NO: 218941 - DNA, 75 bp, synthetic construct
  source 1..75: mol_type = other DNA
gtgccgggcagtctgataaccgttcggcttgataacatgaccaatattcccgacggtatggactggggcgtcatt

SEQ ID NO: 218942 - DNA, 75 bp, synthetic construct
  source 1..75: mol_type = other DNA
atattggtcagcataaccacactgtaggtattggtgcccatgcacacactgtagcattaggtgcgcacggacaca

SEQ ID NO: 218943 - DNA, 75 bp, synthetic construct
  source 1..75: mol_type = other DNA
aaaattaaaggtggccccgtccaaaagatagaagatattgccaatcgtgaattaaaaaattatagtgcaaaaata

SEQ ID NO: 218944 - DNA, 75 bp, synthetic construct
  source 1..75: mol_type = other DNA
gagcggcaattagagatatagttgttcaacggcaaatacatccaacaaattatgaccatctggcattgatagcta

SEQ ID NO: 218945 - DNA, 75 bp, synthetic construct
  source 1..75: mol_type = other DNA
attgtggtcactccgccggtgcagcgtcttgagccgggagccaaaagtatggtccgtctggccagcaccccggat

SEQ ID NO: 218946 - DNA, 75 bp, synthetic construct
  source 1..75: mol_type = other DNA
caaaaccgtatgctgagaaaatgttgcagatccaacaagatcagcagactccctggcattttcataaccaaaaaa

SEQ ID NO: 218947 - DNA, 75 bp, synthetic construct
  source 1..75: mol_type = other DNA
aggtttttgctgccggcaattttgcaggtacgcaacgcttcaccacgagagacggcaatgtatacatacgcagac

SEQ ID NO: 218948 - DNA, 75 bp, synthetic construct
  source 1..75: mol_type = other DNA
agcgtttccgccaggtgttccgttgccgtggccatcagatacaccacctgcgggctatgcaattatgcaggggca

SEQ ID NO: 218949 - DNA, 75 bp, synthetic construct
  source 1..75: mol_type = other DNA
agctgctggtggtgcggtaatttccgctgggctgggatacagttttgtgccggtgatgggggcgattgtcgcggg

SEQ ID NO: 218950 - DNA, 75 bp, synthetic construct
  source 1..75: mol_type = other DNA
ccctagcgattacggacccggtgccagtgctgagcgatgaagagattgccgtagtgctggagaaattcaaaacct

SEQ ID NO: 218951 - DNA, 75 bp, synthetic construct
  source 1..75: mol_type = other DNA
gagataccagcagaaagaatattagatacaccagaatggaaagactatcgtccaaaatactccggttccacatat

SEQ ID NO: 218952 - DNA, 75 bp, synthetic construct
  source 1..75: mol_type = other DNA
aactcatagctaacaagtcagagggctatggccagagtattaccgccagcgaattacgatggatttaccgtaata

SEQ ID NO: 218953 - DNA, 75 bp, synthetic construct
  source 1..75: mol_type = other DNA
agctggtggtcccattctttaaagatgtgatgccgcagctggggctgttctacattctgctggcttacttcgtca

SEQ ID NO: 218954 - DNA, 75 bp, synthetic construct
  source 1..75: mol_type = other DNA
gcgcagcaacccttgccgatgccatcaacctgctgactgacaacccgcaggccaaactgctcgccggtggcactg

SEQ ID NO: 218955 - DNA, 75 bp, synthetic construct
  source 1..75: mol_type = other DNA
ccgcagcctgtgaactcagcctgtatgaatcacagctctacaactggcgcagtaaacagcaacatccacagacgt

SEQ ID NO: 218956 - DNA, 75 bp, synthetic construct
  source 1..75: mol_type = other DNA
ataatacagatcatactattcgaaaattacttaatgatgattttcgaggatattgctttagagattttttaaaga

SEQ ID NO: 218957 - DNA, 75 bp, synthetic construct
  source 1..75: mol_type = other DNA
gcgacgctgctgatcgagcgtttcagcaacccgtctctgcgtcaccgtacctggcagattgcaatggacggcagc

SEQ ID NO: 218958 - DNA, 75 bp, synthetic construct
  source 1..75: mol_type = other DNA
tcattatccctgcttacaacgccgctgaaaccagcgttagtttggttactaaaatcctcagtgaaccccacttgg

SEQ ID NO: 218959 - DNA, 75 bp, synthetic construct
  source 1..75: mol_type = other DNA
gttcccaccacgggaacggtgacaattagagggaaaacggttccttgtgttcaatggccgttggcactcaagctg

SEQ ID NO: 218960 - DNA, 75 bp, synthetic construct
  source 1..75: mol_type = other DNA
cgttctgaagcaacaaagcagatgccacttccccgccttgccgcctccgcttcgcaacctttaaccagaacagtc

SEQ ID NO: 218961 - DNA, 75 bp, synthetic construct
  source 1..75: mol_type = other DNA
aataaaaggtaacgctgtagagggaattgcaagtgttccagccgagttatcttctctcagtatcagagattatag

SEQ ID NO: 218962 - DNA, 75 bp, synthetic construct
  source 1..75: mol_type = other DNA
atgtggaaccttttgcggcgaacccgaaaaaaacagaaatcaggacgtgatgtaagagaggcgggctggaccacc

SEQ ID NO: 218963 - DNA, 75 bp, synthetic construct
  source 1..75: mol_type = other DNA
ctggaagcgttgtcccgccgtgatgcccgtgaagatccgttcgcgtcgtccggtaaaacagcttccgtgcctcag

SEQ ID NO: 218964 - DNA, 75 bp, synthetic construct
  source 1..75: mol_type = other DNA
taatgcccgggggcagatcaaagaactgcgtattctggactggagccgggttgaacctctggtggcggatgacgg

SEQ ID NO: 218965 - DNA, 75 bp, synthetic construct
  source 1..75: mol_type = other DNA
gaaagccgatccggaaaccgttttgtcctttcacgcggtgttttcatgcatttcgctgatatcccaggatatcgc

SEQ ID NO: 218966 - DNA, 75 bp, synthetic construct
  source 1..75: mol_type = other DNA
tcaaaaatcctttccccggggcacgtatgccacacaccagggcggactctggcgggcgtatgaaaaaacgcacgg

SEQ ID NO: 218967 - DNA, 75 bp, synthetic construct
  source 1..75: mol_type = other DNA
gtatgccacacaccagggcggactctggcgggcgtatgaaaaaacgcacgggatgcggggatgggaatgcctggt

SEQ ID NO: 218968 - DNA, 75 bp, synthetic construct
  source 1..75: mol_type = other DNA
gaaaaatacgcttctcacgcccaatgaggcccgtaaacgggagaacctgccgcccctggccggcggtgatgcact

SEQ ID NO: 218969 - DNA, 75 bp, synthetic construct
  source 1..75: mol_type = other DNA
attttgctctaaggcacctatggttggttataagataggagccactttttatgtcttatggctcgacagggagtt

SEQ ID NO: 218970 - DNA, 75 bp, synthetic construct
  source 1..75: mol_type = other DNA
ttattattagtcgtctgttttcctttctgtgttttgtgctgtttacccttttttctattatctgcattatttcca

SEQ ID NO: 218971 - DNA, 75 bp, synthetic construct
  source 1..75: mol_type = other DNA
ctcggcactccgctgaatccgaacaccagcgtcacacgcggtattcccgtcggtgttggagtgattgttatctcc

SEQ ID NO: 218972 - DNA, 75 bp, synthetic construct
  source 1..75: mol_type = other DNA
agaaagcactacagcaaccatcatctcgcggctggactccgatattttcctttgtcagagaacctttcgcaggtg

SEQ ID NO: 218973 - DNA, 75 bp, synthetic construct
  source 1..75: mol_type = other DNA
atgtggaaccttttgtggcgaacccgaaaaaaccagaaatcaggacgtgatgtaaaagaggtgggctggaccagc

SEQ ID NO: 218974 - DNA, 75 bp, synthetic construct
  source 1..75: mol_type = other DNA
tccgatgcttgagcagatggtgaaagaggccgtaagtcatatcccagtcccgcgtgatggtcgtgactacgatcc

SEQ ID NO: 218975 - DNA, 75 bp, synthetic construct
  source 1..75: mol_type = other DNA
acggtggaacaactgaagatgaccgctgaaattgtctgttcggtgttccgtgtcccggcctacaagattggcgtg

SEQ ID NO: 218976 - DNA, 75 bp, synthetic construct
  source 1..75: mol_type = other DNA
aagaaggatcgggtcgttccggtggggcatgtggcactggagtgggtaacgcgctatctgcgcagcgtgcggcct

SEQ ID NO: 218977 - DNA, 75 bp, synthetic construct
  source 1..75: mol_type = other DNA
gctgtggagcaccgggatcaggcgcatggaagtggcaaacctgatgctgtcagacgtggacttcacgcgcggcgt

SEQ ID NO: 218978 - DNA, 75 bp, synthetic construct
  source 1..75: mol_type = other DNA
cggtgagtgccctgccggctccgcaggacgggcgtgatgccacggctctggaaatactccccgccattgacgatc

SEQ ID NO: 218979 - DNA, 75 bp, synthetic construct
  source 1..75: mol_type = other DNA
cgccccttgccggcggtgatgcactgtatcttcagcagcagaactacagtctggaggcgctgtcccgtcgtgatg

SEQ ID NO: 218980 - DNA, 75 bp, synthetic construct
  source 1..75: mol_type = other DNA
atatccctgttccgcgtgatggtcgtgactacgatccggaagtactgcagaaggcggtgaatgatgcggtcgcaa

SEQ ID NO: 218981 - DNA, 75 bp, synthetic construct
  source 1..75: mol_type = other DNA
gtgatccacgaccggtttaactgtttttttcatccgcttataggattgccgccggtgtatgccgccgggctggcg

SEQ ID NO: 218982 - DNA, 75 bp, synthetic construct
  source 1..75: mol_type = other DNA
gatcaaaaatcctttccccggggcacgtatgccacacaccagggcggactctggcgggcgtatgaaaaaacgcac

SEQ ID NO: 218983 - DNA, 75 bp, synthetic construct
  source 1..75: mol_type = other DNA
aagaaggatcgggtcgttccggtgggccatgtggcgctggagtgggtaacgcgctacctgcgtaacgtccgacct

SEQ ID NO: 218984 - DNA, 75 bp, synthetic construct
  source 1..75: mol_type = other DNA
ggaaacgcggcaggtgctgggcagtctggacacggagaagccgctgggcctgcgcaaccgggcaatactggaagt

SEQ ID NO: 218985 - DNA, 75 bp, synthetic construct
  source 1..75: mol_type = other DNA
aaaattgtcacaagtaaatctagtcaaaaccgtgtgaaaatatttagaatcattaaaaagtactataatctttgg

SEQ ID NO: 218986 - DNA, 75 bp, synthetic construct
  source 1..75: mol_type = other DNA
accgggttcaggtggtggccgcactgatggccatcgagagagagttgcgcagcttacggcaggtcgtcagggaac

SEQ ID NO: 218987 - DNA, 75 bp, synthetic construct
  source 1..75: mol_type = other DNA
tggcggtatggatgcggcgggtctgtctgggtgagccggttgcccgttccgggaagctgccgacactggcaccgc

SEQ ID NO: 218988 - DNA, 75 bp, synthetic construct
  source 1..75: mol_type = other DNA
gccggtatgggtaacaacctgaaccagatcgcccggaaagtgaatgccggtggtgccggtcatgatcgggtgcag

SEQ ID NO: 218989 - DNA, 75 bp, synthetic construct
  source 1..75: mol_type = other DNA
ccgggttcatgtggtggccgcactgatggccatcgagggtgaattgcgccagttgcggcaggctgtcagggaaca

SEQ ID NO: 218990 - DNA, 75 bp, synthetic construct
  source 1..75: mol_type = other DNA
atgggggatttgttagggggaatgataccgatgaaacgcgagaagatgctcacgatacgggttaccgatgaggag

SEQ ID NO: 218991 - DNA, 75 bp, synthetic construct
  source 1..75: mol_type = other DNA
gtgaaccatctcatgatcgacaccgaaacattgggtaccggaccggacgcagtcatattcgcgattggcgcggtg

SEQ ID NO: 218992 - DNA, 75 bp, synthetic construct
  source 1..75: mol_type = other DNA
ggcgacgccgtttaccaggcaaaggtcgtgtcagaaatctggcagcgcttcacaacaccattcctgaacatatga

SEQ ID NO: 218993 - DNA, 75 bp, synthetic construct
  source 1..75: mol_type = other DNA
cgcactgaacgacgccatttaccaggcgaaggttgtttcagaaatctggcagcgcttcactgcgccattcctgag

SEQ ID NO: 218994 - DNA, 75 bp, synthetic construct
  source 1..75: mol_type = other DNA
tggcggtatggatgcggcgggtctgcctgggggagccggttgcccgttccggaaaactgccgacactggcaccgc

SEQ ID NO: 218995 - DNA, 75 bp, synthetic construct
  source 1..75: mol_type = other DNA
gtcagtgggaaaatggcaagtgtgccattcctgatcgtgtagtcgagcaactgttggctatgcgtcagcaggtaa

SEQ ID NO: 218996 - DNA, 75 bp, synthetic construct
  source 1..75: mol_type = other DNA
cagaccggtgacagtgaaagctggcgtcagtgggaaaatggcaagtgtgccattcctgatcgtgtagtcgagcaa

SEQ ID NO: 218997 - DNA, 75 bp, synthetic construct
  source 1..75: mol_type = other DNA
cactcctgggcgcgttggtgtcgcgctcgtggtcttgcgtggtttccgatctccccggaagctgcccgcgaatac

SEQ ID NO: 218998 - DNA, 75 bp, synthetic construct
  source 1..75: mol_type = other DNA
ctacgtgaaaggcgatcgtgtggtggttgatggtcaggcatatgaagccttgttctggacacaaaatgataaccc

SEQ ID NO: 218999 - DNA, 75 bp, synthetic construct
  source 1..75: mol_type = other DNA
aatttaccatgttatcttcaatggtaatgtttatcagaatgcctggtgggttggttctgaagattgcccgcgtgg

SEQ ID NO: 219000 - DNA, 75 bp, synthetic construct
  source 1..75: mol_type = other DNA
ctattgaacgtcgtaaccttgctgtgaagaaagtgcaggataaatggaagtcagaaggcaaagatattgctatct

SEQ ID NO: 219001 - DNA, 75 bp, synthetic construct
  source 1..75: mol_type = other DNA
ttttttatcaataaaaatcagcatgttaaagaaatgagggtttcggatgttatgaaactctcagactctgagtga

SEQ ID NO: 219002 - DNA, 75 bp, synthetic construct
  source 1..75: mol_type = other DNA
gttatccagactactatatacagatgatgacgaagaaagcgaaatgaggcagtccagccaaatcaaagataccga

SEQ ID NO: 219003 - DNA, 75 bp, synthetic construct
  source 1..75: mol_type = other DNA
ttctgaaggctacctgcctccggtcattgctgaagctaaagacgttgcacacattaccaatgagcaaatccgaac

SEQ ID NO: 219004 - DNA, 75 bp, synthetic construct
  source 1..75: mol_type = other DNA
ttcttactctggttgtttcattaaccagtgtgctgacacgtctgtctcccatccagattccacttcctttaatcc

SEQ ID NO: 219005 - DNA, 75 bp, synthetic construct
  source 1..75: mol_type = other DNA
ccggaaacacttatgcggtatcttcgccgtggcggcgtgtctgtgggggctaatagccgcctgatggattcgtaa

SEQ ID NO: 219006 - DNA, 75 bp, synthetic construct
  source 1..75: mol_type = other DNA
atgtcggaaatctcgcgtattcgtgtaggagatctggaccaaacaggtgacactgtcacgctacatatttcacac

SEQ ID NO: 219007 - DNA, 75 bp, synthetic construct
  source 1..75: mol_type = other DNA
atttctcagagtaaagtgcagaaagtttctccttctgacagcaacccgtggcgtgtttttgttgactggaccgga

SEQ ID NO: 219008 - DNA, 75 bp, synthetic construct
  source 1..75: mol_type = other DNA
agaaattaaaacagaaactgtggcggacattgtgcagccgttgccatcgtttaccgaaacgcaagcagatgagct

SEQ ID NO: 219009 - DNA, 75 bp, synthetic construct
  source 1..75: mol_type = other DNA
ccgcaggcggaaaagtaatcatccaatgctgtttgccggatacaaaacacgccacttgttgttagcgacttttgc

SEQ ID NO: 219010 - DNA, 75 bp, synthetic construct
  source 1..75: mol_type = other DNA
ggctgatggggctgcgttcgcaggaggcggtacagagttcacagtcgctgaaaacgtggctgaacgcggtgaaac

SEQ ID NO: 219011 - DNA, 75 bp, synthetic construct
  source 1..75: mol_type = other DNA
gttcgccatatcgaatgctacattgaggaacggctggagctggatattggtttacgaacgttgcaaaacgaaatg

SEQ ID NO: 219012 - DNA, 75 bp, synthetic construct
  source 1..75: mol_type = other DNA
acatacgcgactgactaataaatcattagggctggcgggcgcgtcgcgcaatgggacgcggcaggccatcacgcc

SEQ ID NO: 219013 - DNA, 75 bp, synthetic construct
  source 1..75: mol_type = other DNA
aaaccggctgaaagtggtgtttggcaccaaaggtgggcgtccccgccatacgacagttctggatactggcgcagt

SEQ ID NO: 219014 - DNA, 75 bp, synthetic construct
  source 1..75: mol_type = other DNA
aaaacctggcgcggcaggctggcgggtcgcacaagactgtccatgaccgtatcgccacggcaggacggttctgcg

SEQ ID NO: 219015 - DNA, 75 bp, synthetic construct
  source 1..75: mol_type = other DNA
aggctggacgcaggcaggtggtggagcatccgcgtctgaccaataaggcattaggggtatcaggcgcttcgcgca

SEQ ID NO: 219016 - DNA, 75 bp, synthetic construct
  source 1..75: mol_type = other DNA
aggtgatacccggctaaccgtggtactcggtaccaaaggtggacggccccgtgacacgattattcaggatactgg

SEQ ID NO: 219017 - DNA, 75 bp, synthetic construct
  source 1..75: mol_type = other DNA
ctcgttgcgctacgcatgggcgcaggatgccattcgtcattatctggcgcagggattttgtgagaaggaagcgct

SEQ ID NO: 219018 - DNA, 75 bp, synthetic construct
  source 1..75: mol_type = other DNA
atcgacgcaggtatggaagtgttctacttctgcgccgacccgcacaataagccgatcgttcacccgaaagtcacc

SEQ ID NO: 219019 - DNA, 75 bp, synthetic construct
  source 1..75: mol_type = other DNA
atggcccggtgaaaaaaatgcagcattcgctcggcaaactcaacatgctgcactacttcccggaaaaactgttca

SEQ ID NO: 219020 - DNA, 75 bp, synthetic construct
  source 1..75: mol_type = other DNA
cgcgcagaagtagctcgtctgtttgataccgaacttgaggtcatcgcaggagcgaacgaattgctggcgagcgtt

SEQ ID NO: 219021 - DNA, 75 bp, synthetic construct
  source 1..75: mol_type = other DNA
atgtcccagatagaagcggtatttttcgactgcgacggtacgctggtcgatagcgaggtcatttgctctcgtgcc

SEQ ID NO: 219022 - DNA, 75 bp, synthetic construct
  source 1..75: mol_type = other DNA
gcggcactgcaggccgtgctgagacaggctggacgcaggcaggtggtggagcatccgcgcctgaccaataaggcg

SEQ ID NO: 219023 - DNA, 75 bp, synthetic construct
  source 1..75: mol_type = other DNA
gctcctgctcctgctcctgctcctgctcctgcaacaattttggaaaccagggagcaaaaggaaagtatcagtgaa

SEQ ID NO: 219024 - DNA, 75 bp, synthetic construct
  source 1..75: mol_type = other DNA
ggtaaaatgaacggcttctcattctcttaccgcgatatagctttcaaagcttcgcagttaggcaagggttactct

SEQ ID NO: 219025 - DNA, 75 bp, synthetic construct
  source 1..75: mol_type = other DNA
atgctttcagaacggactggccttctttcccctaaagaagctctccaacagatacttgataaaagtttggcagat

SEQ ID NO: 219026 - DNA, 75 bp, synthetic construct
  source 1..75: mol_type = other DNA
aagatgaacggcttctcattcgaataccgcgatatagctttcaaagcttcacagttaggcaagggttactcttgg

SEQ ID NO: 219027 - DNA, 75 bp, synthetic construct
  source 1..75: mol_type = other DNA
ctcggtggaaaaattacagaactggaattacggctcagagaagacaaacgtaaagaaatcgtagaaaagattctt

SEQ ID NO: 219028 - DNA, 75 bp, synthetic construct
  source 1..75: mol_type = other DNA
ggggtaaaagcttcgcaggtgttgttcaatatgcattgaagccgggagcacatcataaaagcgatccagtcgtca

SEQ ID NO: 219029 - DNA, 75 bp, synthetic construct
  source 1..75: mol_type = other DNA
gctgggcatgacaatagcgcttttccctgtgctgattgttattgcggtggtgagttccctgtcctggaccatcat

SEQ ID NO: 219030 - DNA, 75 bp, synthetic construct
  source 1..75: mol_type = other DNA
agggagcagtgacttccggttctctgagccggagattcagcgcatgttctctgattatgttcataactgcgtagt

SEQ ID NO: 219031 - DNA, 75 bp, synthetic construct
  source 1..75: mol_type = other DNA
tttaatgaagctaagatcgcggaagaaaaaaggcaaagtgataagattggagacaatagcattggaaggaatgat

SEQ ID NO: 219032 - DNA, 75 bp, synthetic construct
  source 1..75: mol_type = other DNA
aaattcataattccgggcgtcattctcatgaaattgtcattggcatcgataatacttatccgacaattaaagaaa

SEQ ID NO: 219033 - DNA, 75 bp, synthetic construct
  source 1..75: mol_type = other DNA
cagcaatacctttagatgctggagaggcaaaagaaaatatagataagttgaaaaatgagatgataaaacgcagtg

SEQ ID NO: 219034 - DNA, 75 bp, synthetic construct
  source 1..75: mol_type = other DNA
ttgttacagcaatttgagcagaacaaagctcgtaccggagaggggatggggagtgtgtcttcctcctctggtggc

SEQ ID NO: 219035 - DNA, 75 bp, synthetic construct
  source 1..75: mol_type = other DNA
gcctgtggttctctggtggtggtggcgctttaccttatcgcccagatggtgggcgcaggtaaactgatcgagctg

SEQ ID NO: 219036 - DNA, 75 bp, synthetic construct
  source 1..75: mol_type = other DNA
atcattaagttatttttctcttagtttaaaaaaactatcttacatacatcatgtttcctcattaattagtgagta

SEQ ID NO: 219037 - DNA, 75 bp, synthetic construct
  source 1..75: mol_type = other DNA
gtggtgcaaacaatggcgaaaagcgccgctcgccaggtgacgaatcagattgtacgcgggatgttggggagtttg

SEQ ID NO: 219038 - DNA, 75 bp, synthetic construct
  source 1..75: mol_type = other DNA
catcttcccgtatgaatacccggcgctgttctctatcagcgtggcattcctcggcatctggttcttctcggcaac

SEQ ID NO: 219039 - DNA, 75 bp, synthetic construct
  source 1..75: mol_type = other DNA
tatcctcggcgtgctgtttgagaatcagaacatcgcctttatggtggggctggcgtttgccatcgcggcgagctg

SEQ ID NO: 219040 - DNA, 75 bp, synthetic construct
  source 1..75: mol_type = other DNA
ggcggccgttcacctggcgaatgcagtgggcggcaacctgttcctcggttttatttcagcggttgctttcgccac

SEQ ID NO: 219041 - DNA, 75 bp, synthetic construct
  source 1..75: mol_type = other DNA
aatgagcttaatctttctaatattttgcttaaacgctatagtcatttgttgtcacaacacgccaaagaacataaa

SEQ ID NO: 219042 - DNA, 75 bp, synthetic construct
  source 1..75: mol_type = other DNA
aaagcaggtaacactaattgctcgttctctctacaatgagagtaactgtaacttgttactggactcaattaagta

SEQ ID NO: 219043 - DNA, 75 bp, synthetic construct
  source 1..75: mol_type = other DNA
taattctggttgcaagctttgttagcgtcccagttcaggcggtaacagctaaaaactatgagaaaggaactaaag

SEQ ID NO: 219044 - DNA, 75 bp, synthetic construct
  source 1..75: mol_type = other DNA
actggcagagtcattgtcggaaatcggtgttccggtgtttatggccgatgtgaaaggcgatctgaccggcatcgc

SEQ ID NO: 219045 - DNA, 75 bp, synthetic construct
  source 1..75: mol_type = other DNA
ccagaagcaggcgatttggataaaccgaaactggtatttttcttcgacgaagcgcatctgctgttcaacgatgca

SEQ ID NO: 219046 - DNA, 75 bp, synthetic construct
  source 1..75: mol_type = other DNA
tgaaaggtgatttaacgggagttgcggaggaaggtacatcttcggaaaaactgctcgcaaggcttaaaaatatcg

SEQ ID NO: 219047 - DNA, 75 bp, synthetic construct
  source 1..75: mol_type = other DNA
tacagatcctcggtcacgaaaaagccatcttcccgtatgaatacccggcgctgttctctatcagcgtggcattcc

SEQ ID NO: 219048 - DNA, 75 bp, synthetic construct
  source 1..75: mol_type = other DNA
gcaggtctccaccgatctgggccacggcgatgggcgcgggcgctatatccggcaggtgtacggacgaggcatgga

SEQ ID NO: 219049 - DNA, 75 bp, synthetic construct
  source 1..75: mol_type = other DNA
ggccagcgtgatgactcgtggttgcgaaggatactgcggggcttctgcggcaggctcaatggatggtctatttaa

SEQ ID NO: 219050 - DNA, 75 bp, synthetic construct
  source 1..75: mol_type = other DNA
tttttacatacgccagacattgcccaggccccggaactggtacatactgaaccgccccgggtttcctggagagtg

SEQ ID NO: 219051 - DNA, 75 bp, synthetic construct
  source 1..75: mol_type = other DNA
gcggctacgatattcagcgctggaagccagacccggcgttaatgttccatgcggcaaaagcgatgaatgtaaatg

SEQ ID NO: 219052 - DNA, 75 bp, synthetic construct
  source 1..75: mol_type = other DNA
tctgaaaaccgccatgaattattggcacaatcaggcgcggcgctgcggcctgacgggcgagcactccccgcacag

SEQ ID NO: 219053 - DNA, 75 bp, synthetic construct
  source 1..75: mol_type = other DNA
agatgcacggctcagtaatcgtacattagggctggctggcgcaagccgtaacggcacaaagcaggccattcctga

SEQ ID NO: 219054 - DNA, 75 bp, synthetic construct
  source 1..75: mol_type = other DNA
atatcctgacctttattatcggctttggtgcgatcatgctggtcggtgcgaatccggaatataaagacgcggcgg

SEQ ID NO: 219055 - DNA, 75 bp, synthetic construct
  source 1..75: mol_type = other DNA
cggtgccagctttatggcctttatggtgatgaaacacgttggctttagcttcaacaatctgttcagcgaagcgat

SEQ ID NO: 219056 - DNA, 75 bp, synthetic construct
  source 1..75: mol_type = other DNA
atcatgaagccgggcgggctggtaaaagatccaatctccgcactctcgctggggctgggactgatgtttggtacg

SEQ ID NO: 219057 - DNA, 75 bp, synthetic construct
  source 1..75: mol_type = other DNA
accgtctgttccgctggcgacgttccggcatgagcgccacctggtgtgcgctgttgctgatggtgctggcgaatc

SEQ ID NO: 219058 - DNA, 75 bp, synthetic construct
  source 1..75: mol_type = other DNA
ttcgcattcatggtaacgcggtggaatatattcccatcgcgattgtgttgatgctgtttatggaaatgaatggcg

SEQ ID NO: 219059 - DNA, 75 bp, synthetic construct
  source 1..75: mol_type = other DNA
gtgtcccatacatgccccacagagcgagacgatgaaataatctctttcagtatcattgagttagactattactcc

SEQ ID NO: 219060 - DNA, 75 bp, synthetic construct
  source 1..75: mol_type = other DNA
tctgcataacatcaccgaagtggcgattcaccgtctggagcaacagcttggcaagccttacgtctggggcggcac

SEQ ID NO: 219061 - DNA, 75 bp, synthetic construct
  source 1..75: mol_type = other DNA
tcggcagatttctgcatccaggcgtgttttcgttatgcgttttgctccctttattcgccagcgccaccacatcac

SEQ ID NO: 219062 - DNA, 75 bp, synthetic construct
  source 1..75: mol_type = other DNA
caccggggaaaccattcgggtaagtcggttagctgaacctttctggcaggatcattttttaggcgcgcgacggat

SEQ ID NO: 219063 - DNA, 75 bp, synthetic construct
  source 1..75: mol_type = other DNA
gcaagccctacgtctggggcggcacgcggcccgataaaggcttcgactgtagcgggttagttttttatgcttaca

SEQ ID NO: 219064 - DNA, 75 bp, synthetic construct
  source 1..75: mol_type = other DNA
gcgccggggagatttgctgtttttccatatccacagccgcgaaattgccgaccatatgggcgtgtatctgggcga

SEQ ID NO: 219065 - DNA, 75 bp, synthetic construct
  source 1..75: mol_type = other DNA
cggttagctgaacctttctggcaggatcattttttaggcgcgcgccggattttgacggaagagacgattttgtag

SEQ ID NO: 219066 - DNA, 75 bp, synthetic construct
  source 1..75: mol_type = other DNA
attctgttcctggtgtgacgatgcgcacctgcaccctgacgccggagacgaatgtgtctccgggcgggccgttcg

SEQ ID NO: 219067 - DNA, 75 bp, synthetic construct
  source 1..75: mol_type = other DNA
caatgagatgtaccactaccgtcgggcaacgattgtggcgaataacgacctgcgccggggagatttgctgttttt

SEQ ID NO: 219068 - DNA, 75 bp, synthetic construct
  source 1..75: mol_type = other DNA
ttgggcaccctgactccagggtcaaagatacatgctccgctggaaatcacctggaagtgtgaaggtgacactccg

SEQ ID NO: 219069 - DNA, 75 bp, synthetic construct
  source 1..75: mol_type = other DNA
aatggcatgatcgcctctaaagcagcccgcatgcgttccatcgtcgttcctgcgccagaagcgcaaaatgatcca

SEQ ID NO: 219070 - DNA, 75 bp, synthetic construct
  source 1..75: mol_type = other DNA
gatgcgtacctgcaccttgactccggagacgaatgtgtctcagaacgggccattcggcttggcatcggccacgtt

SEQ ID NO: 219071 - DNA, 75 bp, synthetic construct
  source 1..75: mol_type = other DNA
cagcactgatgctggcggtgacagcaggcaacacacaggctgccctgactgccacagcaacgctgacgattaatg

SEQ ID NO: 219072 - DNA, 75 bp, synthetic construct
  source 1..75: mol_type = other DNA
attcaccgtctggagcaacagcttggcaagccttacgtctggggcggcacgcggcccgatcaaggcttcgactgt

SEQ ID NO: 219073 - DNA, 75 bp, synthetic construct
  source 1..75: mol_type = other DNA
tgatcattctttcgcctgaaaatcacgtattgctctttaggttctgtcataaagatgatgctctgaggggaaaaa

SEQ ID NO: 219074 - DNA, 75 bp, synthetic construct
  source 1..75: mol_type = other DNA
aaccagaccgggacattgttaccagcaagtaataagcacgcatggatgtgcgccctgaatgatttttttaatgac

SEQ ID NO: 219075 - DNA, 75 bp, synthetic construct
  source 1..75: mol_type = other DNA
aaatgaatggacgacagttctgttggttgattgtggggtctggttcacctgaactgcgggaacatttacagtatc

SEQ ID NO: 219076 - DNA, 75 bp, synthetic construct
  source 1..75: mol_type = other DNA
tttgatgcgcttaatgtaaatgttttgcatgttacaccctctgatttttcatggtaccaaaaagggttagtcggt

SEQ ID NO: 219077 - DNA, 75 bp, synthetic construct
  source 1..75: mol_type = other DNA
tcagatatcggaaaaaaccttaactcagggctttaatgatgcctctaataaaaaactgaagctttctgaaaaaga

SEQ ID NO: 219078 - DNA, 75 bp, synthetic construct
  source 1..75: mol_type = other DNA
ttttgcttttattgttttcgctcccctcttttaccggagctgcggaacatcaggatgattttttatctgacatat

SEQ ID NO: 219079 - DNA, 75 bp, synthetic construct
  source 1..75: mol_type = other DNA
tatagaaatgaagggccttctggtctggtttcccaccgacgtggaaagcgtcctaataattccttttctactgaa

SEQ ID NO: 219080 - DNA, 75 bp, synthetic construct
  source 1..75: mol_type = other DNA
aacagcaaatgcatggttgccgacctttattgaagcctataacaaccggttcgctacgtcgcctcgtactactga

SEQ ID NO: 219081 - DNA, 75 bp, synthetic construct
  source 1..75: mol_type = other DNA
gggggggaagaaatatctgaacatcattatatagctccgttttcctcttttgaatatccgattcctgtgagtaag

SEQ ID NO: 219082 - DNA, 75 bp, synthetic construct
  source 1..75: mol_type = other DNA
caggtgggcggaagggaaggacggggagaagaaggctgacaaagtctccctgaatgtacagctttcagtgagcag

SEQ ID NO: 219083 - DNA, 75 bp, synthetic construct
  source 1..75: mol_type = other DNA
acaacccggcctcgtcgggggagacgctgacggtgattaatgaccaggactatccgatgctggtgcagtcggagg

SEQ ID NO: 219084 - DNA, 75 bp, synthetic construct
  source 1..75: mol_type = other DNA
tcagcagtcaaagggcatcctgacgatgtggccggacaggtggaatggaagaggaaagagggtaagttggaaggg

SEQ ID NO: 219085 - DNA, 75 bp, synthetic construct
  source 1..75: mol_type = other DNA
ctgctgcatcactcaaccacgctgaatatcaaaggagagcgttaccggttaaaagagaaacgtaaagctgtggtg

SEQ ID NO: 219086 - DNA, 75 bp, synthetic construct
  source 1..75: mol_type = other DNA
gggccagctaaacatgcttcatcgtcggtccgggctgccacgaccaagtgacagcaatgctgtttcactggtcat

SEQ ID NO: 219087 - DNA, 75 bp, synthetic construct
  source 1..75: mol_type = other DNA
gacacagcaagtaagctcagaactgacattgcaaaaccagcctggcataactcgcttcgcctccctaaaggtgaa

SEQ ID NO: 219088 - DNA, 75 bp, synthetic construct
  source 1..75: mol_type = other DNA
ccgctggagctggtcgacatggttgagaaactggacctgtacatcaccgttaaaggtggtggtatctctggtcag

SEQ ID NO: 219089 - DNA, 75 bp, synthetic construct
  source 1..75: mol_type = other DNA
tcgcgttttcatcaaaccgggcaacggcaaaatcgttatcaaccaacgttctctggaacagtacttcggtcgtga

SEQ ID NO: 219090 - DNA, 75 bp, synthetic construct
  source 1..75: mol_type = other DNA
atgcaagctggtggctggaccaacgtaaatattgtcatgaactatatccgtaacctggatagtgaaacaggggca

SEQ ID NO: 219091 - DNA, 75 bp, synthetic construct
  source 1..75: mol_type = other DNA
cagaaagaagagaaagtatcagcgaaaaaatcgctgaactcgaactacgattcatagaaggaagacgaaacgaaa

SEQ ID NO: 219092 - DNA, 75 bp, synthetic construct
  source 1..75: mol_type = other DNA
actgctgggcaaatcttagtaaccgactcaactacaaccccgaccatttagaagctctgcgaacgggtatagaga

SEQ ID NO: 219093 - DNA, 75 bp, synthetic construct
  source 1..75: mol_type = other DNA
ggcacaagagcttcgttaatgtcgtaaagtatgtgttgaagcctgggtctcaccataaaagagatcctgtggtta

SEQ ID NO: 219094 - DNA, 75 bp, synthetic construct
  source 1..75: mol_type = other DNA
agaaccttatcagcacacgtatcatagaagagctggagcaggactaccagctaacaagaaccaaaggaactgatg

SEQ ID NO: 219095 - DNA, 75 bp, synthetic construct
  source 1..75: mol_type = other DNA
gacggcgaatgtcgcttctaccgggaaaatgaacggcttctcattttcttaccgcgatattgctttcaaagcttc

SEQ ID NO: 219096 - DNA, 75 bp, synthetic construct
  source 1..75: mol_type = other DNA
cctgcaacagttttgaaaaacactgagagaaaggaaagtatcagtgaaaaaattgctgaactcgaactacgactc

SEQ ID NO: 219097 - DNA, 75 bp, synthetic construct
  source 1..75: mol_type = other DNA
tgattattacaaagtccaggacgctacacgtcgcaaagcgtctgcattcactaatctgaccggttatgtaatgct

SEQ ID NO: 219098 - DNA, 75 bp, synthetic construct
  source 1..75: mol_type = other DNA
tatttctctggcgagctggaaaccttcctgctgatggcgcgcgacgagcaggacgatccgctcaatctgaaaggt

SEQ ID NO: 219099 - DNA, 75 bp, synthetic construct
  source 1..75: mol_type = other DNA
tcttttgccggtgcgatgggctacggtcagtttatgccatcgtcttataaacaatatgcagtggattttagcggc

SEQ ID NO: 219100 - DNA, 75 bp, synthetic construct
  source 1..75: mol_type = other DNA
gcatatcaacttgtgggatccggttgatgccatcggtagcgtggcgaattatttcaaagcgcacggctgggtgaa

SEQ ID NO: 219101 - DNA, 75 bp, synthetic construct
  source 1..75: mol_type = other DNA
tttctggaatcagtatgaagatgcgctgaatcgcgcgtggcaggtgtatggcgtaccgccggaaattatcgtcgg

SEQ ID NO: 219102 - DNA, 75 bp, synthetic construct
  source 1..75: mol_type = other DNA
atcagcaggccagcttgctgcgtctggatgttggcactggttaccagtactggtatggtctgccgaacttctaca

SEQ ID NO: 219103 - DNA, 75 bp, synthetic construct
  source 1..75: mol_type = other DNA
ttcaggtgagctggaaaccttcctgctgatggcgcgcgacgagcaggacgatccgctcaatctgaaaggttcctt

SEQ ID NO: 219104 - DNA, 75 bp, synthetic construct
  source 1..75: mol_type = other DNA
gggcgcagtacctggcggcaccgaacgtaactttgccagctacggtcatctgatgggtgaaatgccgcgtgaagt

SEQ ID NO: 219105 - DNA, 75 bp, synthetic construct
  source 1..75: mol_type = other DNA
tcgtacgcgacatacttcagggtattgtcttttgaatatctgagtgaaagtatttccacactgctgtatctggat

SEQ ID NO: 219106 - DNA, 75 bp, synthetic construct
  source 1..75: mol_type = other DNA
tgcaccgacagataaatggatgcctgtttctgtaggcgttgattctctcgataaccttcgcaccagtatttacaa

SEQ ID NO: 219107 - DNA, 75 bp, synthetic construct
  source 1..75: mol_type = other DNA
acggtcagtttatcgagtcgccgcgcaccggggaaaccattcgggtaagtcggttagctgaacctttctggcagg

SEQ ID NO: 219108 - DNA, 75 bp, synthetic construct
  source 1..75: mol_type = other DNA
agaaactggacctgtacatcaccgttaaaggtggtggtatctctggtcaggctggtgcgatccgtcacggtatca

SEQ ID NO: 219109 - DNA, 75 bp, synthetic construct
  source 1..75: mol_type = other DNA
accgacgttacgggttttggtttgctggggcatttaagcgaaatgtgtcagggcgcaggtgtgcaggcgcgcgtc

SEQ ID NO: 219110 - DNA, 75 bp, synthetic construct
  source 1..75: mol_type = other DNA
acggggttgactccccggcgttctggctggctgtgctgatgtggtgcgtgttctttgttgtgatgaggctgctgg

SEQ ID NO: 219111 - DNA, 75 bp, synthetic construct
  source 1..75: mol_type = other DNA
gattactggctgcgacagacggcgacttttatagaacaggcaaaagttctacaagaaccccctttgcaattaaca

SEQ ID NO: 219112 - DNA, 75 bp, synthetic construct
  source 1..75: mol_type = other DNA
tttcaccgttctgcggctacatggagactgccacgctggaaatattctttggcgcgatggtccgatgtttgtcga

SEQ ID NO: 219113 - DNA, 75 bp, synthetic construct
  source 1..75: mol_type = other DNA
ctgcaaagctttatgagctatggcgccagtggcaacggtatggaggtctcggtcgtcgcccagaatgcgcagttg

SEQ ID NO: 219114 - DNA, 75 bp, synthetic construct
  source 1..75: mol_type = other DNA
agcactgggtctggttgattctggtcgtggttctggtggtaggcgtgcgctggtggctgaaacgacgcgggaaga

SEQ ID NO: 219115 - DNA, 75 bp, synthetic construct
  source 1..75: mol_type = other DNA
tacttcgccgcgcgggtgaaatcaccgcactggcgcatacacgggcgatggaaaaatgccgtccggggatgttcg

SEQ ID NO: 219116 - DNA, 75 bp, synthetic construct
  source 1..75: mol_type = other DNA
gagaaactgggcgttgaccgcgcactggcattcagcgaaatcaatcagcaactttatcaactacttaacggtctg

SEQ ID NO: 219117 - DNA, 75 bp, synthetic construct
  source 1..75: mol_type = other DNA
tctgagcacatttgaacaactgcaccagaagaaagatgaggtgtttgagcggggcgtgatcaacgtcttcatagg

SEQ ID NO: 219118 - DNA, 75 bp, synthetic construct
  source 1..75: mol_type = other DNA
tctgagcacatttgaacaactgcaccagaacaaagatgaggtgtttgaccggggcgtgatcaacgtcttcatagg

SEQ ID NO: 219119 - DNA, 75 bp, synthetic construct
  source 1..75: mol_type = other DNA
tctgagcacatttgaacaactgcaccagaaaaaggatgaggtgtttgagcggggcgtgatcaacgtcttcatagg

SEQ ID NO: 219120 - DNA, 75 bp, synthetic construct
  source 1..75: mol_type = other DNA
cgggaaatacactatcagcgtcactcatctggcacaggcgcaaaccctgaccacaagcaccaccagagacgatac

SEQ ID NO: 219121 - DNA, 75 bp, synthetic construct
  source 1..75: mol_type = other DNA
aaaagatgccagcggcgtaggtgcattgattgttggcgatggtaaaaaaccggcatcacgaccaccatcggcagc

SEQ ID NO: 219122 - DNA, 75 bp, synthetic construct
  source 1..75: mol_type = other DNA
tcgacaacttcagcagtctgaccaaatacactgccgtagatgcgggttctgatagccagagttcagacaacggcg

SEQ ID NO: 219123 - DNA, 75 bp, synthetic construct
  source 1..75: mol_type = other DNA
tctggtcgtggttctggtggtgggcgtgcgctggtggctgaaacggcgcgggaagaaaaagccggatcatcaggc

SEQ ID NO: 219124 - DNA, 75 bp, synthetic construct
  source 1..75: mol_type = other DNA
gcaaggggcgacgcatttctttggtgagccaatgctggatatcaaagactggatgcgtaccgatgctaacggtaa

SEQ ID NO: 219125 - DNA, 75 bp, synthetic construct
  source 1..75: mol_type = other DNA
aagatgacgtggaccgggaatccgcctatgagatgttgcaaaaaggctttcaggccagtaccgagcagcaaaata

SEQ ID NO: 219126 - DNA, 75 bp, synthetic construct
  source 1..75: mol_type = other DNA
gcgtcaatgactggcaaccgcatgccaatccggtggtggtgtgggatatctttggcgagaaaggccattcggtac

SEQ ID NO: 219127 - DNA, 75 bp, synthetic construct
  source 1..75: mol_type = other DNA
agtagcgcatcggttggtgccatccagcgcgggctgttgtcgctggaacaacaaggcgcagcacacttttttggc

SEQ ID NO: 219128 - DNA, 75 bp, synthetic construct
  source 1..75: mol_type = other DNA
ggtgttccggtgtttatggccgatgtgaaaggtgatttaacgggagtagcggaggaaggtacatcttcggaaaaa

SEQ ID NO: 219129 - DNA, 75 bp, synthetic construct
  source 1..75: mol_type = other DNA
atccccccacgaaagagaaagaggtggcggtggatgacggtattctcggtggattgaaggatattttgtttggca

SEQ ID NO: 219130 - DNA, 75 bp, synthetic construct
  source 1..75: mol_type = other DNA
ccgctcgggactgggccatgaaacaggatattcgttgcggttgctggctgacggagaaaccggaaaccgcaatga

SEQ ID NO: 219131 - DNA, 75 bp, synthetic construct
  source 1..75: mol_type = other DNA
ccgtggttgcacagtcttgatcagcatctgaaacactgggtctggttgattctggtcgtggttctggtggttggc

SEQ ID NO: 219132 - DNA, 75 bp, synthetic construct
  source 1..75: mol_type = other DNA
atggatctcaatacactcatctcacaatatggttatgccgcgctggtgctcggcagtctggctgagggtgaaacc

SEQ ID NO: 219133 - DNA, 75 bp, synthetic construct
  source 1..75: mol_type = other DNA
cgttccgggatgctttccttaatggatgcacaggcccgtgagacatggtaccggtcactggagtacgataatttt

SEQ ID NO: 219134 - DNA, 75 bp, synthetic construct
  source 1..75: mol_type = other DNA
ctgctccggactgggccatgaaacaggatattcgttgcggttgctggctgatggagaaacctgatacagcaatga

SEQ ID NO: 219135 - DNA, 75 bp, synthetic construct
  source 1..75: mol_type = other DNA
acgggatgcgttcatataatatcgattatgtctgatatcacagcctcccgtccgaaagtggtcaacgggcatacg

SEQ ID NO: 219136 - DNA, 75 bp, synthetic construct
  source 1..75: mol_type = other DNA
tcagcggcaaaccgatccccgacagccgggaaaatatcattattcggctggatgatcacatccgctccgttcagg

SEQ ID NO: 219137 - DNA, 75 bp, synthetic construct
  source 1..75: mol_type = other DNA
cgttcagggatgctttccttaatggatgcacaggcccgtgatacatggtaccgatcactggaatatgataatttt

SEQ ID NO: 219138 - DNA, 75 bp, synthetic construct
  source 1..75: mol_type = other DNA
atgcgcaggcccgtgatacatggtaccggtcactggagtacgataattttccggaaatcagtgaagcgaacattc

SEQ ID NO: 219139 - DNA, 75 bp, synthetic construct
  source 1..75: mol_type = other DNA
atcgtcaacaatctggtgaggtgggacagatggggatttcaccttatcaccggacaacaggcagaccgacttgcc

SEQ ID NO: 219140 - DNA, 75 bp, synthetic construct
  source 1..75: mol_type = other DNA
ccgcccgggactgggccatgaaacaggattttcgctgcggctgctggctgatggataaaacggaaaccgcaatga

SEQ ID NO: 219141 - DNA, 75 bp, synthetic construct
  source 1..75: mol_type = other DNA
atgcaataagccaggacggatggaaaaggctaaaatccatttatcgtgtgagtcctacccgcatcgtgattcgca

SEQ ID NO: 219142 - DNA, 75 bp, synthetic construct
  source 1..75: mol_type = other DNA
gctgaaatcgcagaactgtcagacaaagtcacctttaaagaagataacagcttgccggtgcgtaagccgtctttc

SEQ ID NO: 219143 - DNA, 75 bp, synthetic construct
  source 1..75: mol_type = other DNA
gccggtatggcaggcaatttaccaccgccggatctccgggcatggctgacgcccactgacaaccaggatgacggc

SEQ ID NO: 219144 - DNA, 75 bp, synthetic construct
  source 1..75: mol_type = other DNA
ccggtaaacacttgccgctgcgcagcaacatcacgccaggcagtaaaaaagccggtgtggtgtggcatacgcagg

SEQ ID NO: 219145 - DNA, 75 bp, synthetic construct
  source 1..75: mol_type = other DNA
cgaaatctggcgtgacctgatgcaacgttccgggatgctgtcattaatggatgcgcaggcccgtgaaacatggta

SEQ ID NO: 219146 - DNA, 75 bp, synthetic construct
  source 1..75: mol_type = other DNA
atggaaaaacctgaaacggcaatgaaagctatcacccgcaatctcgatcgcgaaatctggcgtgacctgatgcaa

SEQ ID NO: 219147 - DNA, 75 bp, synthetic construct
  source 1..75: mol_type = other DNA
attgagtccgatccgaaactgcgggcgttacgtccacatctcaaaatcgatctggtccaggaaggtctacgtatt

SEQ ID NO: 219148 - DNA, 75 bp, synthetic construct
  source 1..75: mol_type = other DNA
tttaagaagggctccgcgcatatcacgttcagaaaaccagaactggttgacagactgaatgatattatcgcaaaa

SEQ ID NO: 219149 - DNA, 75 bp, synthetic construct
  source 1..75: mol_type = other DNA
tgaaatggcgcaaccacagtatcaacagtggttggaagatcatttgacgcataacccggaagatctgcatcttca

SEQ ID NO: 219150 - DNA, 75 bp, synthetic construct
  source 1..75: mol_type = other DNA
ccagatgtgccgctggcatttattatcggtcaggattcattgctgacctttccgacctggtacgaatacgaaacc

SEQ ID NO: 219151 - DNA, 75 bp, synthetic construct
  source 1..75: mol_type = other DNA
ctggcgaatttgattggtctgacgcgagtcacaatcatccctaataatgttcctccgcatcgtccccagccggaa

SEQ ID NO: 219152 - DNA, 75 bp, synthetic construct
  source 1..75: mol_type = other DNA
tctgagcacatttgaacaactgcaccagaaaaacgatgaggtgtttgaccggggcgtgatcaacgtcttcatagg

SEQ ID NO: 219153 - DNA, 75 bp, synthetic construct
  source 1..75: mol_type = other DNA
tctgagcacatttgaacaactgcaccagaaaaatgatgaggtgtttgatcggggcgtgatcaacgtcttcatagg

SEQ ID NO: 219154 - DNA, 75 bp, synthetic construct
  source 1..75: mol_type = other DNA
tctgagcacatttgaacaactgcaccagaaaaaagatgaggtgtttgaacggggcgtgatcaacgtcttcatagg

SEQ ID NO: 219155 - DNA, 75 bp, synthetic construct
  source 1..75: mol_type = other DNA
gatgatcacatccagtctgttcagggtaaagagagctatgaagatgagatgttcagcatcagatactttaagaaa

SEQ ID NO: 219156 - DNA, 75 bp, synthetic construct
  source 1..75: mol_type = other DNA
tcccgtccggaagtggtcaccgggcatacggacgttatctgctcaaccagtatccgccacattctggctgtacga

SEQ ID NO: 219157 - DNA, 75 bp, synthetic construct
  source 1..75: mol_type = other DNA
ccgaggtaaaaccgcactggactgggcgttgaaacaggattttcgctgcggctgctggctcatggagaaacctga

SEQ ID NO: 219158 - DNA, 75 bp, synthetic construct
  source 1..75: mol_type = other DNA
gcgaacagtgcgcagcgaaagcacatgcttgaactggctattgccgacaaaccgctgtttacccttgatgaacgg

SEQ ID NO: 219159 - DNA, 75 bp, synthetic construct
  source 1..75: mol_type = other DNA
gcggcaccttcgatccggtgcactatggtcatcttaaacccgtagaaactctggcgaatctgattggtctgacgc

SEQ ID NO: 219160 - DNA, 75 bp, synthetic construct
  source 1..75: mol_type = other DNA
ccggcaactgacagaaatctcagtgctgacggaaagcattggcggcaaaaccgcccgggactgggccatgaaaca

SEQ ID NO: 219161 - DNA, 75 bp, synthetic construct
  source 1..75: mol_type = other DNA
gactggaagcgttagggattaaaacattgctttgcgatccgcctcgcgctgaccgtggggatgagggtgatttcc

SEQ ID NO: 219162 - DNA, 75 bp, synthetic construct
  source 1..75: mol_type = other DNA
aaaaataagaaaccaggtggataaccttttccagaaacatcccagaataacggcaatacgggtggatctccatta

SEQ ID NO: 219163 - DNA, 75 bp, synthetic construct
  source 1..75: mol_type = other DNA
caccagcgcttattggcacgtctggattatttgacgaagctcgacactaaagctgcaggccagcgtaactttggt

SEQ ID NO: 219164 - DNA, 75 bp, synthetic construct
  source 1..75: mol_type = other DNA
cctgaaaacatcctgaaaattgtcaaagaatggcggcgttcgcaaggattgcctttgttcaaagattcagaatga

SEQ ID NO: 219165 - DNA, 75 bp, synthetic construct
  source 1..75: mol_type = other DNA
tttccgcagcgccaggttgcaatgcaattgccgtcgtggagtacgttttctcatcactgctaatgcttgctgagc

SEQ ID NO: 219166 - DNA, 75 bp, synthetic construct
  source 1..75: mol_type = other DNA
gctgacctgcctgaatgaaggccagaagttaagcgtagtgctggatgtctgggaaggcgaaccggaacttaacgt

SEQ ID NO: 219167 - DNA, 75 bp, synthetic construct
  source 1..75: mol_type = other DNA
ggcagtgggcatatcactttcaaacgcccggatctggtggagaagatgaatgatatcgtggcgaagcactttccg

SEQ ID NO: 219168 - DNA, 75 bp, synthetic construct
  source 1..75: mol_type = other DNA
caggaaatcctcggttgtccggtacaagtgatcagcggtgaagaagaagctcgcctgatttatcagggtgttgct

SEQ ID NO: 219169 - DNA, 75 bp, synthetic construct
  source 1..75: mol_type = other DNA
cagtactgaactggtaaccggcacgggcgcacaaaccacctcgttgttcagcctgtcgatgggctgcgtcacctg

SEQ ID NO: 219170 - DNA, 75 bp, synthetic construct
  source 1..75: mol_type = other DNA
acatcgtgaatgccaacatcaacgctctgttagagaaagcggaagatccacagaaactggtgcgtctgatgatcc

SEQ ID NO: 219171 - DNA, 75 bp, synthetic construct
  source 1..75: mol_type = other DNA
gtaaagagagctatgaagatgagatgttcagcatcagatactttaggaagggctccgcgcatatcacgttcagaa

SEQ ID NO: 219172 - DNA, 75 bp, synthetic construct
  source 1..75: mol_type = other DNA
tttccggaaatcagcgaggcgaacattctgagcacatttgaacaactacaccagaataaggatgaagtgtttgag

SEQ ID NO: 219173 - DNA, 75 bp, synthetic construct
  source 1..75: mol_type = other DNA
atggctgaactgactgcgcttcacacattaacagcgcaaatgaaacgtgaagggatccgccgcttgctggtgttg

SEQ ID NO: 219174 - DNA, 75 bp, synthetic construct
  source 1..75: mol_type = other DNA
gaaagtcaaaagataatacctgagccatcaggagaggctgtgaaaaaaatgattgatggtaaaaaggaacgactg

SEQ ID NO: 219175 - DNA, 75 bp, synthetic construct
  source 1..75: mol_type = other DNA
atgggctgagacacagcaatttatagaggatggtttaataagcgatgccaaagaagttttctcatggggacttct

SEQ ID NO: 219176 - DNA, 75 bp, synthetic construct
  source 1..75: mol_type = other DNA
tatacccgtacaacgtagccagttgacatggattgacactgattaccttgaaaatgacgaagaataccccttact

SEQ ID NO: 219177 - DNA, 75 bp, synthetic construct
  source 1..75: mol_type = other DNA
ttttgtgcaggaacaggtacagcctggtgttgataatgcctggcgtgaatcccgtggggatattggtaaaggaat

SEQ ID NO: 219178 - DNA, 75 bp, synthetic construct
  source 1..75: mol_type = other DNA
aggccagcgattactttaccagtcgcaaagtcagtgaatccggcagccatactgacaataatgccgattcccgcg

SEQ ID NO: 219179 - DNA, 75 bp, synthetic construct
  source 1..75: mol_type = other DNA
ccggagattgcagaacgtcgtcgggcgatggcctggtcttttgtgcaggaacaggtacagcctggtgttgataat

SEQ ID NO: 219180 - DNA, 75 bp, synthetic construct
  source 1..75: mol_type = other DNA
gccggatagcagttcatccggctcgtcagcgggaaggcacaggtcagcaactgattgctggtgctttgcaatata

SEQ ID NO: 219181 - DNA, 75 bp, synthetic construct
  source 1..75: mol_type = other DNA
ggcgcacggcagcaatccacaggcagcgacattgcgcggacggcgggtcagcaggatagcagttcatccagctcg

SEQ ID NO: 219182 - DNA, 75 bp, synthetic construct
  source 1..75: mol_type = other DNA
ctctggcggcaaaaccagcagttcacgttgacgcattttattccccgtactgactggcaacccgcgaccggcgca

SEQ ID NO: 219183 - DNA, 75 bp, synthetic construct
  source 1..75: mol_type = other DNA
tgggccggttttcgtcgtccgcggggaaatctggtggctcaatcgctggcagcgcacggcagcaatccactggcg

SEQ ID NO: 219184 - DNA, 75 bp, synthetic construct
  source 1..75: mol_type = other DNA
ttgctttcgcccatcgtccccttttaacgtcgttaggttgtttaacacgcctgctgcaaaccagtgaacgggcat

SEQ ID NO: 219185 - DNA, 75 bp, synthetic construct
  source 1..75: mol_type = other DNA
tggtttttgacgacgaaaacttcactcacgaaccacaaggtgacatcgtcatttctgcttttgaacagacgttat

SEQ ID NO: 219186 - DNA, 75 bp, synthetic construct
  source 1..75: mol_type = other DNA
acaatctggtgagatgggaccggtggggatttcatcttatcaccgggcaccaggtagatcgacttgccgacctgg

SEQ ID NO: 219187 - DNA, 75 bp, synthetic construct
  source 1..75: mol_type = other DNA
ctgcactggactgggccatgaaacaggattttcgctgcggttgctggctgatggaaaaaccggaaaccgcaatga

SEQ ID NO: 219188 - DNA, 75 bp, synthetic construct
  source 1..75: mol_type = other DNA
gtaaagaatgctatgaagatgagatgttcagcatcagatactttaagaaaggctccgcgcacatcaggttcagga

SEQ ID NO: 219189 - DNA, 75 bp, synthetic construct
  source 1..75: mol_type = other DNA
aagggctccgcgcatatcacattcagaaaaccagaactggttgatcggctaaatgacatcattgcaaagcgttat

SEQ ID NO: 219190 - DNA, 75 bp, synthetic construct
  source 1..75: mol_type = other DNA
cgctgctgcaaatcgacacacttatccggcaactggcggaaatctcagtactgacagaaagtattggaggtaaaa

SEQ ID NO: 219191 - DNA, 75 bp, synthetic construct
  source 1..75: mol_type = other DNA
atgcaaatcgacacacttatccggcaactgacagaaatctcagcaatgacagaaagtattggaggtaaaaccgcc

SEQ ID NO: 219192 - DNA, 75 bp, synthetic construct
  source 1..75: mol_type = other DNA
cggaagtggtcaccgggcatacggacgttatctgctcaaccagtacccgccacattctggctgtacgaaagagta

SEQ ID NO: 219193 - DNA, 75 bp, synthetic construct
  source 1..75: mol_type = other DNA
aagggaactgcacacatcgtattcaagcgacctgagctggttgataagctgaacaacatcatcgcccgacactat

SEQ ID NO: 219194 - DNA, 75 bp, synthetic construct
  source 1..75: mol_type = other DNA
aaaaggcgtgggcgtctggttcgtttcgcaaaacccgtctgatattccggataatgtgctcgggcagctcggtaa

SEQ ID NO: 219195 - DNA, 75 bp, synthetic construct
  source 1..75: mol_type = other DNA
cgcagttataacagtgaagattaccctgacgaagaagcagatactcaaagcgtggagattatcggaaaagttttc

SEQ ID NO: 219196 - DNA, 75 bp, synthetic construct
  source 1..75: mol_type = other DNA
ctgacggaaagcatcggaggtaaaactgccccggactgggccatgaaacaggattttcgctgcggttgctggctg

SEQ ID NO: 219197 - DNA, 75 bp, synthetic construct
  source 1..75: mol_type = other DNA
cgaaatctggcgtgacctgatgcaacgttcagggatgctttccttaatggatgcacaggcccgtgatacatggta

SEQ ID NO: 219198 - DNA, 75 bp, synthetic construct
  source 1..75: mol_type = other DNA
ccgttcagggtaaaggacgctatgaagatgagatgttcatcattaaatactttaagaagggatctgcacacatca

SEQ ID NO: 219199 - DNA, 75 bp, synthetic construct
  source 1..75: mol_type = other DNA
gggccatgaaacaggattttcgctgtggttgctggctgactgagaaaccggaaaccgcaatgaaagccattaccc

SEQ ID NO: 219200 - DNA, 75 bp, synthetic construct
  source 1..75: mol_type = other DNA
gacctggaaagaatgttgcatctgctcagcggtaaaccgatccccaacaaccgggggaatatcaccattaatctg

SEQ ID NO: 219201 - DNA, 75 bp, synthetic construct
  source 1..75: mol_type = other DNA
tgagcacatttgaacaactgcaccagaataacgatgacgtgtttgaccggggtgtgatcaacgtcttcacagggc

SEQ ID NO: 219202 - DNA, 75 bp, synthetic construct
  source 1..75: mol_type = other DNA
ggctcagcacccgctgggtaaagagattatcgatcaggaaattgagtggcagagctatgtccactggccgctgga

SEQ ID NO: 219203 - DNA, 75 bp, synthetic construct
  source 1..75: mol_type = other DNA
acgcgaagtgttacgtccggttgccgatgaattacggtatcacggctggaaagtgtgcgttggtgcttccggcac

SEQ ID NO: 219204 - DNA, 75 bp, synthetic construct
  source 1..75: mol_type = other DNA
tgcgggtgattttatcgccaaagcacaggaaatccttggctgcccggtacaagtcatcagcggtgaagaagaagc

SEQ ID NO: 219205 - DNA, 75 bp, synthetic construct
  source 1..75: mol_type = other DNA
cgctgctgcaaatcgacacacttatccggcaactggcagaaatctcggtgctgacggaaagcatcggaggtaaaa

SEQ ID NO: 219206 - DNA, 75 bp, synthetic construct
  source 1..75: mol_type = other DNA
ggctctgcgcatatcacgtttaaacacccggaactggtggagaagctgaatactgttctggcgaaacattattcg

SEQ ID NO: 219207 - DNA, 75 bp, synthetic construct
  source 1..75: mol_type = other DNA
tgagcacatttaaacaactgcaccagaataaggatgagctgtttgagcggggggagatcaatgccttcagaggac

SEQ ID NO: 219208 - DNA, 75 bp, synthetic construct
  source 1..75: mol_type = other DNA
tgagcacatttgaacaactgcaccagaataacgatgatgtgtttgaccggggcgtgatcaacgtcttcaaagggc

SEQ ID NO: 219209 - DNA, 75 bp, synthetic construct
  source 1..75: mol_type = other DNA
tgagcacatttgaacaactgcaccagaataacgatgaagtgtttgaccggggcgtgatcaacgtcttcatagggc

SEQ ID NO: 219210 - DNA, 75 bp, synthetic construct
  source 1..75: mol_type = other DNA
atgcacaggcccgtgatacatggtaccggtcactggaatacgataattttccggaaatcagtgaagcgaacattc

SEQ ID NO: 219211 - DNA, 75 bp, synthetic construct
  source 1..75: mol_type = other DNA
atgcagaaaatgaaaccggcgctgaaaaaaacgctgatggcggtagcgtgcctgagcgcagtaccggcagcccag

SEQ ID NO: 219212 - DNA, 75 bp, synthetic construct
  source 1..75: mol_type = other DNA
ctgatgtcaacggcggaatgagtgccacgcagctacctgctccaacacgcgacagccagcgtcagggcggacacc

SEQ ID NO: 219213 - DNA, 75 bp, synthetic construct
  source 1..75: mol_type = other DNA
cccactgaaccaacagcaacgtgataacgcccgccagcgtatacaatcggcatcacctgaacaacgtcaggtttt

SEQ ID NO: 219214 - DNA, 75 bp, synthetic construct
  source 1..75: mol_type = other DNA
ggaatgagcgccacgcagctacctgctccaacacgcgacagccagcgtcaggcggcagcaagtcagtttcagcaa

SEQ ID NO: 219215 - DNA, 75 bp, synthetic construct
  source 1..75: mol_type = other DNA
tgctactcacggcaatggccggagtgacctcagtcaatgcggctgattacaaaaaaaatccattcacactcgtct

SEQ ID NO: 219216 - DNA, 75 bp, synthetic construct
  source 1..75: mol_type = other DNA
acccgtattggtttgttggggatttgcgggggaggagggtattcacttgctgccgccgagacggacaaacgattc

SEQ ID NO: 219217 - DNA, 75 bp, synthetic construct
  source 1..75: mol_type = other DNA
gtactgcccgattgaataacgagcagcggtcagcagtacgcgaacgtctctctgaacgtggggcaagaagactgg

SEQ ID NO: 219218 - DNA, 75 bp, synthetic construct
  source 1..75: mol_type = other DNA
gcagcgcgtgagcgtattcagtccgcatcaccagagcagcgccaggtgtttaaggaaaaagtacagcagcgccca

SEQ ID NO: 219219 - DNA, 75 bp, synthetic construct
  source 1..75: mol_type = other DNA
caaccactgacccagcaacaaaaggacgccgctcgtcagcgttatcagtcagcttctcctgagcagcgccaggca

SEQ ID NO: 219220 - DNA, 75 bp, synthetic construct
  source 1..75: mol_type = other DNA
ccgatgtcaaaagcggtatgagcgccacacaactacccgcaccgtcgcgcgacaaccagcgccaggcggctgcaa

SEQ ID NO: 219221 - DNA, 75 bp, synthetic construct
  source 1..75: mol_type = other DNA
gcggtttcatcaaaccgatgtcaacggcggaatgagtgccacgcagctacctgctccaacacgcgacagccagcg

SEQ ID NO: 219222 - DNA, 75 bp, synthetic construct
  source 1..75: mol_type = other DNA
aagaaagctgtaccggtaaaacagaccgtcactgcccccgttacgttatctgataccgtttcaacagccagcccc

SEQ ID NO: 219223 - DNA, 75 bp, synthetic construct
  source 1..75: mol_type = other DNA
gacacaacagactgcgcctgacatcaccgcagttacgcttcctgcaacggtttccgcacctcccgtaacacccgc

SEQ ID NO: 219224 - DNA, 75 bp, synthetic construct
  source 1..75: mol_type = other DNA
agtccttcatcaggaagtggatggttacgatctgaaagtgcagtacaaggttgcacgtaaagggtcagcaaatga

SEQ ID NO: 219225 - DNA, 75 bp, synthetic construct
  source 1..75: mol_type = other DNA
agctcttcgcctgaaccagaagtctctgtaggtgcatatcgatatgccctgcaatgcgtccggcggccctggcgc

SEQ ID NO: 219226 - DNA, 75 bp, synthetic construct
  source 1..75: mol_type = other DNA
tgctgatgactactggtatgacgtgaatgacataaaagcgtgggtcagcgatacgctgaagacgtttgattttga

SEQ ID NO: 219227 - DNA, 75 bp, synthetic construct
  source 1..75: mol_type = other DNA
acacctgcaacatctgatacatctgaaactcctaaaatacctgaaatacctggaacacataaaatacctgcaacg

SEQ ID NO: 219228 - DNA, 75 bp, synthetic construct
  source 1..75: mol_type = other DNA
tggaaatcacagtctaacatatcccaaaagctgaaccgccttataagccatcttgatgcaaaaagtagcaatagt

SEQ ID NO: 219229 - DNA, 75 bp, synthetic construct
  source 1..75: mol_type = other DNA
ttgcttcggaagcggattctctttatcaagaaaatgagcgtttgcaggcggagattgatcagctcaatcgcactg

SEQ ID NO: 219230 - DNA, 75 bp, synthetic construct
  source 1..75: mol_type = other DNA
ggaagtgacgctcagtaatggtgcatcaatgaagcaattcattgaggacggtgaagggtatatccagttaaccga

SEQ ID NO: 219231 - DNA, 75 bp, synthetic construct
  source 1..75: mol_type = other DNA
tttcaatttatttggccgtcgcaagttttatatatagtaatattagtatgctattcgtaggttttggcaatttta

SEQ ID NO: 219232 - DNA, 75 bp, synthetic construct
  source 1..75: mol_type = other DNA
gtcgtaaaagtcagagtttccagcttcgtttgccagcgcgaatgaaggaggagattagacgtgttgctgaaatgg

SEQ ID NO: 219233 - DNA, 75 bp, synthetic construct
  source 1..75: mol_type = other DNA
gatcgccgggttactggagcgtgttgatcgtcaacaaagatagcccgatcaacaacctgaacgatctgctggcga

SEQ ID NO: 219234 - DNA, 75 bp, synthetic construct
  source 1..75: mol_type = other DNA
acctaaagtaattcttactggagcaatactaaattattccgatctatcgggtaaagatctttcagaatatgatct

SEQ ID NO: 219235 - DNA, 75 bp, synthetic construct
  source 1..75: mol_type = other DNA
cgctttagttagacaacttaaagagcttcacatttcggtgcgaatagtagaaaatttagttaggcaaatttcacc

SEQ ID NO: 219236 - DNA, 75 bp, synthetic construct
  source 1..75: mol_type = other DNA
ttcttcaaaggctggaatcgttggccgtttggctgcaataggtactgatattcctgtaatatttactgctcatgg

SEQ ID NO: 219237 - DNA, 75 bp, synthetic construct
  source 1..75: mol_type = other DNA
tttatcgatctgagcggtcccaaagatgaagtgagcgccgcgctcgatcgggtgatgagcgatgaaatcgtgctc

SEQ ID NO: 219238 - DNA, 75 bp, synthetic construct
  source 1..75: mol_type = other DNA
gctgatggtgcacgtcaccgcgcaccgcatcgatccgggctggtctggttgcattgtgctggagttctacaactc

SEQ ID NO: 219239 - DNA, 75 bp, synthetic construct
  source 1..75: mol_type = other DNA
gctttgagccgctttccggcccggcggcgcgaccatacaaccgccgtgaagatgcgaaatatcgcaaccagcagg

SEQ ID NO: 219240 - DNA, 75 bp, synthetic construct
  source 1..75: mol_type = other DNA
ggcggcacacgtaaaaaggtggacgaactgctggctttgtacaaaccaggagtcgtttcacccgcgaaaaaataa

SEQ ID NO: 219241 - DNA, 75 bp, synthetic construct
  source 1..75: mol_type = other DNA
tcagttccgcgaagagttcaacaaaagccaggatccgttccgtcgggcggtactgtttttatatttgaaccgcta

SEQ ID NO: 219242 - DNA, 75 bp, synthetic construct
  source 1..75: mol_type = other DNA
atccttgccgatatcaatagcgacctgatcagtctctataacattgtgaagatgcgtactgatgagtacgtacag

SEQ ID NO: 219243 - DNA, 75 bp, synthetic construct
  source 1..75: mol_type = other DNA
gattgccgccgtactgcgtatcgcgctgggttccgcaaccgttgcggcaatcactgcggggggtatcgcggcacc

SEQ ID NO: 219244 - DNA, 75 bp, synthetic construct
  source 1..75: mol_type = other DNA
aggagccggtgccgtccagtgccccgctgttcaccgaacgttgcccggcgggttttccgtcgccggccgccgatt

SEQ ID NO: 219245 - DNA, 75 bp, synthetic construct
  source 1..75: mol_type = other DNA
ttgagcgactggtggattcatttccggcgcaggaaaaagatcccgtgcgtaatcaactggcagggagtttacggg

SEQ ID NO: 219246 - DNA, 75 bp, synthetic construct
  source 1..75: mol_type = other DNA
tggcgaattcaccgttaagcgcctgcagcttaaaccccgtatcgccctgctgccgatgaatcccgcctaccccac

SEQ ID NO: 219247 - DNA, 75 bp, synthetic construct
  source 1..75: mol_type = other DNA
tactgatggcaatgcgtgccatcgctgaaatgatcctgccgaaaggtcacgctttcctgccggtagcagagttct

SEQ ID NO: 219248 - DNA, 75 bp, synthetic construct
  source 1..75: mol_type = other DNA
gatccgcttcaaaatgaacggtttcatcgccctcgtcctggtggcgcttgctgtcggattaatgcaaggtatgcc

SEQ ID NO: 219249 - DNA, 75 bp, synthetic construct
  source 1..75: mol_type = other DNA
aagatgcgtactgatgagtacgtacaggctgcccgcgagctgtttgttcctgagacgaattgcgccgaggtttac

SEQ ID NO: 219250 - DNA, 75 bp, synthetic construct
  source 1..75: mol_type = other DNA
atggataagaagcaagtaacggatttaaggtcggaactactcgattcacgttttggagctaagtccatttccact

SEQ ID NO: 219251 - DNA, 75 bp, synthetic construct
  source 1..75: mol_type = other DNA
atggataagaagcaagtaacggatttaaggtcggaactactcgattcacgttttggagctaagtcaatttcaact

SEQ ID NO: 219252 - DNA, 75 bp, synthetic construct
  source 1..75: mol_type = other DNA
gaaatcgatcagtgcttcaggccataaattcggtctggctccgctgggctgcggctgggttatctggcgtgacga

SEQ ID NO: 219253 - DNA, 75 bp, synthetic construct
  source 1..75: mol_type = other DNA
atggataagaagcaagtaacggatttaaggtcggaactactcgattcacgttttggggctaagtcgatttcaact

SEQ ID NO: 219254 - DNA, 75 bp, synthetic construct
  source 1..75: mol_type = other DNA
atggataagaagcaagtaacggatttaaggtcggaactactcgattcacgttttggtgctaagtctatttcaact

SEQ ID NO: 219255 - DNA, 75 bp, synthetic construct
  source 1..75: mol_type = other DNA
atggataagaagcaagtaacggatttaaggtcggaactactcgattcacgttttggagctaagtcgatttcgact

SEQ ID NO: 219256 - DNA, 75 bp, synthetic construct
  source 1..75: mol_type = other DNA
tgaaaaacagaaactgaccgatctgattaagtccctggaacatgaagtgacgctggtggacgacacgctggcacg

SEQ ID NO: 219257 - DNA, 75 bp, synthetic construct
  source 1..75: mol_type = other DNA
cagaatggtgatctgctggtagtggacagggccgaaaaaccacaacacggggacatcgttatcgctgagatcgac

SEQ ID NO: 219258 - DNA, 75 bp, synthetic construct
  source 1..75: mol_type = other DNA
tcgctttccgaacaaaaaaaaattgccgactgcctgtcttcgctggatgacctgctcacacttgaagttcagaaa

SEQ ID NO: 219259 - DNA, 75 bp, synthetic construct
  source 1..75: mol_type = other DNA
tagtatgttgcgcactggccaacaaattagcccggatagcgtgggcaatcacaacacagcagactgtgttcgaaa

SEQ ID NO: 219260 - DNA, 75 bp, synthetic construct
  source 1..75: mol_type = other DNA
ctgccgacaggggatgccgtaataaaacggttgtctctggtgttggctgaacacgaaatacctgaatatctgagt

SEQ ID NO: 219261 - DNA, 75 bp, synthetic construct
  source 1..75: mol_type = other DNA
tccagcccagaacagaaacccaacaggcaatgagggcattacaccgggtcagagaatcgctcatcagggataagg

SEQ ID NO: 219262 - DNA, 75 bp, synthetic construct
  source 1..75: mol_type = other DNA
aaacataaaagtcagagcgaacgtgattatatgcgttctgaacgactacgtgcggtcgcgcagtttcgtggacag

SEQ ID NO: 219263 - DNA, 75 bp, synthetic construct
  source 1..75: mol_type = other DNA
aaagaaaaggtattcttgctattggcgcacatcctgatgatatcgaactgggctgtggtgcgtccctcgctcgtc

SEQ ID NO: 219264 - DNA, 75 bp, synthetic construct
  source 1..75: mol_type = other DNA
atggataagaagcaagtaacggatttaaggtcggaactactcgattcacgttttggcgcgaagtctatttcgact

SEQ ID NO: 219265 - DNA, 75 bp, synthetic construct
  source 1..75: mol_type = other DNA
tgcaaccagttctgttatgcagatcatggtaatgactgtgggtgcgattaacaaaaaagatgttaacaagctcta

SEQ ID NO: 219266 - DNA, 75 bp, synthetic construct
  source 1..75: mol_type = other DNA
caaaagcctgtatgcgggagttccatacgaatactatctgtatgattcggcaaaacctgcggatgttcgaaattt

SEQ ID NO: 219267 - DNA, 75 bp, synthetic construct
  source 1..75: mol_type = other DNA
cagggaactgcaggttgtgataataatattaatcgacatgatgaatccagaaactcactacaatcattaggatgc

SEQ ID NO: 219268 - DNA, 75 bp, synthetic construct
  source 1..75: mol_type = other DNA
tccgctcagaactactcgattcacgttttggtgccaagacgatttccactatcgctgactcaaaacgatttccgc

SEQ ID NO: 219269 - DNA, 75 bp, synthetic construct
  source 1..75: mol_type = other DNA
ggtcagaactactcgattcacgttttggtgctaaggccatttcgactatcgcagaatcaaaacgctttccgctgc

SEQ ID NO: 219270 - DNA, 75 bp, synthetic construct
  source 1..75: mol_type = other DNA
gttcggaactactcgattcacgttttggtgccaaggccatttcgactatcgcagaatcaaaacgctttccgctgc

SEQ ID NO: 219271 - DNA, 75 bp, synthetic construct
  source 1..75: mol_type = other DNA
atggataagaagcaagtaacggatttaaggtcggaactactcgattcacgttttggcgcaaagtccatttctact

SEQ ID NO: 219272 - DNA, 75 bp, synthetic construct
  source 1..75: mol_type = other DNA
tccgctcagaactactcgattcacgttttggtgccaaggcaatttcgactatcgctgactcaaaacgatttccgc

SEQ ID NO: 219273 - DNA, 75 bp, synthetic construct
  source 1..75: mol_type = other DNA
tccgctcagaactactcgattcacgttttggtgccaagccgatttcaactatcgctgactcaaaacgatttccgc

SEQ ID NO: 219274 - DNA, 75 bp, synthetic construct
  source 1..75: mol_type = other DNA
acaaaaaagatgttaacaagctctatcagtccagtgaaaaaacaactgtggacgatctggataagcccattgatt

SEQ ID NO: 219275 - DNA, 75 bp, synthetic construct
  source 1..75: mol_type = other DNA
tatgcttgctgctgctttcgttatcctttactccggtgtgctcctgtttattctgtatttttgtttttctgccct

SEQ ID NO: 219276 - DNA, 75 bp, synthetic construct
  source 1..75: mol_type = other DNA
tcacaacgacaggcagagcggcttctgtctctgggattccgtgctcccatagggtctgtcagcaggaaaacagga

SEQ ID NO: 219277 - DNA, 75 bp, synthetic construct
  source 1..75: mol_type = other DNA
tctgatgcagcattattatgacatcgttgataacctgaacctcaaagtcctggacttcgatatcgaaggcacctg

SEQ ID NO: 219278 - DNA, 75 bp, synthetic construct
  source 1..75: mol_type = other DNA
gttgtggtgcaggatgcggcactgctggagtcgggggcggctatccgtaccgcagaaggcggcgcagagcacgtt

SEQ ID NO: 219279 - DNA, 75 bp, synthetic construct
  source 1..75: mol_type = other DNA
ttcttgatcaaaaagcgtaacggtacaaccgtgcagcagtgggtaagccaggcaggcgcgcaggattgtgtactg

SEQ ID NO: 219280 - DNA, 75 bp, synthetic construct
  source 1..75: mol_type = other DNA
tgcagaattactggactcagcaggccgggcttttcaccatgagcgccaaaaaagccatgctggcgcatcccgaac

SEQ ID NO: 219281 - DNA, 75 bp, synthetic construct
  source 1..75: mol_type = other DNA
atgaaacgccccaattttctgttcatcatgaccgatacccaggccaccaatatggtcggttgctatagcggtaag

SEQ ID NO: 219282 - DNA, 75 bp, synthetic construct
  source 1..75: mol_type = other DNA
gttgccagtgaaaattatcaagcctacgctgagcgcttacagtctgaaattgagaacgaaacaggcatccgtttt

SEQ ID NO: 219283 - DNA, 75 bp, synthetic construct
  source 1..75: mol_type = other DNA
gacgatctggataagccaattgatctgatacgtgctacacgcccaattattattgtagatgaaccgcaaagtgtt

SEQ ID NO: 219284 - DNA, 75 bp, synthetic construct
  source 1..75: mol_type = other DNA
tgaagatttcgtgcaaaaggaacttggcaatcgccatgcctaccagtacgcgatccacaatccgccaggtgcaat

SEQ ID NO: 219285 - DNA, 75 bp, synthetic construct
  source 1..75: mol_type = other DNA
caatggcctaaacagcgttgaggatttacaggcgaaccatatcgacgaaaccttcacctgggcgcaccgcatcag

SEQ ID NO: 219286 - DNA, 75 bp, synthetic construct
  source 1..75: mol_type = other DNA
aatggcctaaacagcgtcgaagatttacaggcgaaccatattgacgaaaccttcacctgggcgcaccgcatcagc

SEQ ID NO: 219287 - DNA, 75 bp, synthetic construct
  source 1..75: mol_type = other DNA
agggctggacggcgctctccgatatgttgcctggccagggattattacatgtggtgccaatcccggaagcgatgg

SEQ ID NO: 219288 - DNA, 75 bp, synthetic construct
  source 1..75: mol_type = other DNA
cccgatgtcagcgtgatttatccggacagaattcgccgtcgcccaccaggcacgacgtccaaaggtctgggcgca

SEQ ID NO: 219289 - DNA, 75 bp, synthetic construct
  source 1..75: mol_type = other DNA
tgaacgtcttacgcgaaaactctctatctctgatgcaggaattacaatgaccttcaagataggtgatgttgtcat

SEQ ID NO: 219290 - DNA, 75 bp, synthetic construct
  source 1..75: mol_type = other DNA
gctcgctgattgcgctgcatcgccatgatgatcttcaggagctggagctgaaaggcggtgaagtgattcgcgcga

SEQ ID NO: 219291 - DNA, 75 bp, synthetic construct
  source 1..75: mol_type = other DNA
cttcattatgcaaagcggtatggatctgttttatgccggattcagcaataatctgccaccactgcgttttatgcg

SEQ ID NO: 219292 - DNA, 75 bp, synthetic construct
  source 1..75: mol_type = other DNA
gtgaatcttggttatcgtgatgtcgatgccctgattgatgttctggtcaacgcccgcagctacggcgaagcgtgg

SEQ ID NO: 219293 - DNA, 75 bp, synthetic construct
  source 1..75: mol_type = other DNA
gatcagccgtaattgaagcatcagcaggccttgaaagctatattctcagaaaaattattaatgcctttcatcgca

SEQ ID NO: 219294 - DNA, 75 bp, synthetic construct
  source 1..75: mol_type = other DNA
ttaaagaaaacataccgtagcgtaataaaaaatgatgatagtatttttattgaagataactatgcactcgaacaa

SEQ ID NO: 219295 - DNA, 75 bp, synthetic construct
  source 1..75: mol_type = other DNA
acatctaaggaatatactctctgctgattctttagaagaaattcaacacgctattgaacacgcatctttaggtaa

SEQ ID NO: 219296 - DNA, 75 bp, synthetic construct
  source 1..75: mol_type = other DNA
agttttaatcaagcccgtttaaagaaagaagtgaataggagattttccattccgggtttaacgtcttatcagcca

SEQ ID NO: 219297 - DNA, 75 bp, synthetic construct
  source 1..75: mol_type = other DNA
actgcagcagtttattaaaataatggaacaaaaagcgcaactaccaatctatattgacaagaacaatttgaaaga

SEQ ID NO: 219298 - DNA, 75 bp, synthetic construct
  source 1..75: mol_type = other DNA
acacagataaaatgattcgctacatctccgacctcctgattaaaggaagcggattcggtgacatctttaactcaa

SEQ ID NO: 219299 - DNA, 75 bp, synthetic construct
  source 1..75: mol_type = other DNA
aaattcccggaacgcctgccgccgcagccaccgctattgatggttatgagctgacgaaacagggaaaagcagggc

SEQ ID NO: 219300 - DNA, 75 bp, synthetic construct
  source 1..75: mol_type = other DNA
acctggccactttctgccagacctgggacgacgagaacgtccataaattgatggatttgtcgataaaaaaaaact

SEQ ID NO: 219301 - DNA, 75 bp, synthetic construct
  source 1..75: mol_type = other DNA
acctggccactttctgccagacctgggacgacgagaatgtccataaattgatggatttttcgatgaaaaaaaact

SEQ ID NO: 219302 - DNA, 75 bp, synthetic construct
  source 1..75: mol_type = other DNA
acctggccactttctgccagacctgggacgacgagaaagtccataaattgatggatttttcgattaaaaaaaact

SEQ ID NO: 219303 - DNA, 75 bp, synthetic construct
  source 1..75: mol_type = other DNA
gttccgaactactcgattcacgttttggtgcgaaggccatttcgactatcgcagaatcaaaacgctttccgctgc

SEQ ID NO: 219304 - DNA, 75 bp, synthetic construct
  source 1..75: mol_type = other DNA
gatctgaactactcgattcacgttttggtgccaaggccatttcgactatcgcagaatcaaaacgctttccgctgc

SEQ ID NO: 219305 - DNA, 75 bp, synthetic construct
  source 1..75: mol_type = other DNA
acctggccactttctgccagacctgggacgacgagaaggtccataaattgatggatttctcgataaaaaaaaact

SEQ ID NO: 219306 - DNA, 75 bp, synthetic construct
  source 1..75: mol_type = other DNA
cgctggtgggcgatgccgcgcataccatccatccgctggcggggcagggagtgaatcttggttatcgtgatgtcg

SEQ ID NO: 219307 - DNA, 75 bp, synthetic construct
  source 1..75: mol_type = other DNA
tgtggtgtttgatgcagccgaattgaagctgccgttgcttggctatatggtggaaaacactgtcctgcaacaggc

SEQ ID NO: 219308 - DNA, 75 bp, synthetic construct
  source 1..75: mol_type = other DNA
gtggtcgggacttatgcactgaacaacagcctgtttgatgtcggcattatgttgattgcgggcgtagtgggctat

SEQ ID NO: 219309 - DNA, 75 bp, synthetic construct
  source 1..75: mol_type = other DNA
catgcatatcgacgccgccagcggaggcttccttgcgccgtttgtcgccccggatatcgtctgggacttccgtct

SEQ ID NO: 219310 - DNA, 75 bp, synthetic construct
  source 1..75: mol_type = other DNA
tggggccgtatgagttcatctgtacgggtcgcccggacgaaggcatcccggcggtttgcttcaaactgaaagatg

SEQ ID NO: 219311 - DNA, 75 bp, synthetic construct
  source 1..75: mol_type = other DNA
gagctgcgcgagatccctatgcgccccggtcagttgtttatggacccgaaacgcatgattgaagcctgcgacgaa

SEQ ID NO: 219312 - DNA, 75 bp, synthetic construct
  source 1..75: mol_type = other DNA
caccgatattgccggagttactcaagagcgagaatggcttgattctggtgacgggggcgacggggagtggcaaat

SEQ ID NO: 219313 - DNA, 75 bp, synthetic construct
  source 1..75: mol_type = other DNA
gatgatttgaccaaccctttcttcgctgaatttacaatgggccttgagatgacgctggcggagcacggttttatc

SEQ ID NO: 219314 - DNA, 75 bp, synthetic construct
  source 1..75: mol_type = other DNA
agcattctcgcgctgcttgaggctggcgattggtcagaacattgcactaaaacagagctaggcggtcggcttgaa

SEQ ID NO: 219315 - DNA, 75 bp, synthetic construct
  source 1..75: mol_type = other DNA
attgattttccaccgcgattattccttagtggtggggtacgaaacaatgtctggcgtgcattttctaaccgcaat

SEQ ID NO: 219316 - DNA, 75 bp, synthetic construct
  source 1..75: mol_type = other DNA
tcgctcgcagacatattcatatgtcgccattggacgctgcgatatttggcgtaacacaaggagaaaccgtgaaag

SEQ ID NO: 219317 - DNA, 75 bp, synthetic construct
  source 1..75: mol_type = other DNA
tgaccggtcaggtaattgcgcagatgcggcaacgaacgattccgctgggtatatcaaaccggcatgttcatttgt

SEQ ID NO: 219318 - DNA, 75 bp, synthetic construct
  source 1..75: mol_type = other DNA
gtccgggaagctacggaatatctcattcaacaaggacaccgggacatcgtgtttattggggggcttacgcaccat

SEQ ID NO: 219319 - DNA, 75 bp, synthetic construct
  source 1..75: mol_type = other DNA
gttgggaaacggcgatcccttttcttccctggactattgttccttactggagtctggatcttttatatgggtttt

SEQ ID NO: 219320 - DNA, 75 bp, synthetic construct
  source 1..75: mol_type = other DNA
aagagcaaggcagcgttctggtccattgtgcgttgggattatcgcgcagtgcgctggtggtggcggcatggctgt

SEQ ID NO: 219321 - DNA, 75 bp, synthetic construct
  source 1..75: mol_type = other DNA
gaccagatggaagcagaagcagaaagccacagctttggtaaacaacgatcgctggatgagcaatttgctgaactg

SEQ ID NO: 219322 - DNA, 75 bp, synthetic construct
  source 1..75: mol_type = other DNA
tgcaggtaatgacagagggtgcggaccagcagagacaatgggctcagggtgaatatccctttcgcatggctacct

SEQ ID NO: 219323 - DNA, 75 bp, synthetic construct
  source 1..75: mol_type = other DNA
tgatgaagcgattaactatattcgcgtcagacgcccgcagattgtgctgacagccgagcacaaagcgatgctgag

SEQ ID NO: 219324 - DNA, 75 bp, synthetic construct
  source 1..75: mol_type = other DNA
ttacgcgaagagcaaggcagcgttctggtccattgcgcgttgggattatcgcgcagtgcgctggtggtggcggca

SEQ ID NO: 219325 - DNA, 75 bp, synthetic construct
  source 1..75: mol_type = other DNA
actattgttcgcttgatggttaacattcttgatccaaaagctggtgagagtgtctacgatcccgcctgtggtact

SEQ ID NO: 219326 - DNA, 75 bp, synthetic construct
  source 1..75: mol_type = other DNA
aagataaccatatgtgtaatctgggtcaggaccttttttgtgaaattttcgaacccggagcgatttacgatttac

SEQ ID NO: 219327 - DNA, 75 bp, synthetic construct
  source 1..75: mol_type = other DNA
aagaaaaccatatgtgtaatctgggccaggaactattctttaaaattttcgagcctgaatcgatttataatttac

SEQ ID NO: 219328 - DNA, 75 bp, synthetic construct
  source 1..75: mol_type = other DNA
aagaaaaccatatgtgcaatttaggcgaggatcttttttgcaagatcttcgaacccggagcgatttatgatttgc

SEQ ID NO: 219329 - DNA, 75 bp, synthetic construct
  source 1..75: mol_type = other DNA
ggtggtggatattccggcactgtgcgatgcgctggcaagcaagcacctggctggagcggcaatcgacgtattccc

SEQ ID NO: 219330 - DNA, 75 bp, synthetic construct
  source 1..75: mol_type = other DNA
aagccgatgaagacgttgccgaaaaagcattgcaggccatgaaagctattcctggcaccattcgcgcccgtttgc

SEQ ID NO: 219331 - DNA, 75 bp, synthetic construct
  source 1..75: mol_type = other DNA
tggttctcgctaattaaatgtcctattgagatgaaaagtctttcaaagcgaataatccaataccacattggactg

SEQ ID NO: 219332 - DNA, 75 bp, synthetic construct
  source 1..75: mol_type = other DNA
ataaagatcatgtattgatcatcaatgctgaagaaatctataccaagggacgtgcgcagaatacgctgtccaaca

SEQ ID NO: 219333 - DNA, 75 bp, synthetic construct
  source 1..75: mol_type = other DNA
ggaagaggtgctcaaagattttcaacggaatctggctgggctggaaaaagcagaagaggagctggaagccctgct

SEQ ID NO: 219334 - DNA, 75 bp, synthetic construct
  source 1..75: mol_type = other DNA
tgtttcgtggcggagctgagggggtaattcgaaccaaattgctgcaagaaaatcgcattgtggcgattattggtg

SEQ ID NO: 219335 - DNA, 75 bp, synthetic construct
  source 1..75: mol_type = other DNA
tccgcgcttgctaaaaatcaaaggtcaggaaaaaaacctgacaacagaagctattgcacggatgaacctgttttt

SEQ ID NO: 219336 - DNA, 75 bp, synthetic construct
  source 1..75: mol_type = other DNA
agcaggctgatgaaatataccaaatctaccatgacctagctcaacaggggccggatgcaaaagaaatcgaaggcg

SEQ ID NO: 219337 - DNA, 75 bp, synthetic construct
  source 1..75: mol_type = other DNA
gccgatgcgatggagagcgttggggatgcagagcttgccaaagggaagatgtttcaccgtattcagataccagag

SEQ ID NO: 219338 - DNA, 75 bp, synthetic construct
  source 1..75: mol_type = other DNA
caccttgccggggatgaccattgtctgcggcgactcgcataccgccacccacggcgcgtttggcgcactggcctt

SEQ ID NO: 219339 - DNA, 75 bp, synthetic construct
  source 1..75: mol_type = other DNA
gctaaccttcaggatatacgccatggtcggtgccatatttcttttgtgaaagaacgcgggactgcgccagtatgt

SEQ ID NO: 219340 - DNA, 75 bp, synthetic construct
  source 1..75: mol_type = other DNA
agacctatttaccgcgtaagtttaaaacgacggtagtgatcccgccgcagaacgacatcgatctgcacgccaatg

SEQ ID NO: 219341 - DNA, 75 bp, synthetic construct
  source 1..75: mol_type = other DNA
cccaggcggaagcggaaggtctggacaaaatttttatcgaagccggttttgaatggcgcttgccaggttgttcaa

SEQ ID NO: 219342 - DNA, 75 bp, synthetic construct
  source 1..75: mol_type = other DNA
tctgaatccgggcgaacgttgtgcctccaccagcaaccgtaactttgaaggccgccaggggcgcggcgggcgcac

SEQ ID NO: 219343 - DNA, 75 bp, synthetic construct
  source 1..75: mol_type = other DNA
ggtgaaatggcgcgcatccagatgcaggaactgatcaaaaactgcaaagagtttggcgtcgagctgtatgacctg

SEQ ID NO: 219344 - DNA, 75 bp, synthetic construct
  source 1..75: mol_type = other DNA
atgaacgaaaaacatccagggcctttagtggtcgaaggaaaactgacagacgccgagcgcatgaagcttgagagc

SEQ ID NO: 219345 - DNA, 75 bp, synthetic construct
  source 1..75: mol_type = other DNA
aaacggcaagctggtgggctttaacctgctggtgggcggtgggctttctatcgaacacggcaacaagaaaaccta

SEQ ID NO: 219346 - DNA, 75 bp, synthetic construct
  source 1..75: mol_type = other DNA
aagatttaaacgacggtctgaccggcggctttaagggcgataacttcctgctgatccgcttccacggcatgtatc

SEQ ID NO: 219347 - DNA, 75 bp, synthetic construct
  source 1..75: mol_type = other DNA
gagaactgtctgaaggcattgcgcgaaggtgataccctggttgtttgggcgcttgatcggctcggcggttcattg

SEQ ID NO: 219348 - DNA, 75 bp, synthetic construct
  source 1..75: mol_type = other DNA
gggggtaccgttaagtgaagagcaacaacgctatatcgtgatggtcatttaccattggctggttattcagatgaa

SEQ ID NO: 219349 - DNA, 75 bp, synthetic construct
  source 1..75: mol_type = other DNA
atgctgatgcggtatatctgagaaaccatgaaggctgtccacactgctggcgtggtgtcacagggcgtacagtga

SEQ ID NO: 219350 - DNA, 75 bp, synthetic construct
  source 1..75: mol_type = other DNA
atggggctgaaaccgggtattccgctgacagaagtggctatcgacaaagtgtttatcggttcctgtaccaactcg

SEQ ID NO: 219351 - DNA, 75 bp, synthetic construct
  source 1..75: mol_type = other DNA
gatcgttgtattttgaattcaaatatttttattctgaatacttgaattttaattcacgcttagaaagtcgctata

SEQ ID NO: 219352 - DNA, 75 bp, synthetic construct
  source 1..75: mol_type = other DNA
tggttttgtcgtcgcctggagccggtgagcaaaatgactgctggtgtttatttaggggcgtttccacgacatatt

SEQ ID NO: 219353 - DNA, 75 bp, synthetic construct
  source 1..75: mol_type = other DNA
tccgcaaggctggctgacgccaatgggagagatgggcggccagctatcgggcggcgagcgccagcggatttccat

SEQ ID NO: 219354 - DNA, 75 bp, synthetic construct
  source 1..75: mol_type = other DNA
tggagatggctaaagacggaacagtatccaaagatacccatgccagccggattggtcaggcggtatggagactgg

SEQ ID NO: 219355 - DNA, 75 bp, synthetic construct
  source 1..75: mol_type = other DNA
aaggtaaaggtgttatatttacaacagtagtgaatggtggcggcgcatatttaggtagttcaatcaagcatgagg

SEQ ID NO: 219356 - DNA, 75 bp, synthetic construct
  source 1..75: mol_type = other DNA
ctatgctaattttaatccagaaaagtatccaaaattcaaagttcttatggatacacccaatggcatacttatcgc

SEQ ID NO: 219357 - DNA, 75 bp, synthetic construct
  source 1..75: mol_type = other DNA
cgacgctgacgacctggcagcatcattttattgatgtcatcacagggctggcggtaggtatgttgattgactgga

SEQ ID NO: 219358 - DNA, 75 bp, synthetic construct
  source 1..75: mol_type = other DNA
tcagtctggttatgttggccagtattatcgctactcataattggccgtgggtacggtgggcttggcgcgataaca

SEQ ID NO: 219359 - DNA, 75 bp, synthetic construct
  source 1..75: mol_type = other DNA
gccgccaggggcgcggcgggcgcacgcatctggtcagcccggcaatggctgccgccgcggctgtgaccggccatt

SEQ ID NO: 219360 - DNA, 75 bp, synthetic construct
  source 1..75: mol_type = other DNA
ctttatccgatcattgatgcgctgttacggggagacgcgccgcaacttcttaactgggctatggccttcagcgtc

SEQ ID NO: 219361 - DNA, 75 bp, synthetic construct
  source 1..75: mol_type = other DNA
ggggagatctgaaggcggcgctggcggatggtgtagcaccgtttatcgcaaatgaaataaaaaaacagatcccgg

SEQ ID NO: 219362 - DNA, 75 bp, synthetic construct
  source 1..75: mol_type = other DNA
gccgtgatacggagaatgcccattcggcgctgaataaaatctttgataaagagaaagagcagaaccgggtaaaag

SEQ ID NO: 219363 - DNA, 75 bp, synthetic construct
  source 1..75: mol_type = other DNA
taccatctttgcttcgaatacgtcatctttaccgattggtgatatcgccgctcacgccgcgcgacctgagcaagt

SEQ ID NO: 219364 - DNA, 75 bp, synthetic construct
  source 1..75: mol_type = other DNA
gatcctcacaggcaagcaactacgggcaaagcaggctttaaaactggggctggtggatgatgtcgttccgcactc

SEQ ID NO: 219365 - DNA, 75 bp, synthetic construct
  source 1..75: mol_type = other DNA
ctggcgaaaaaacagggcaaaacgccaatcgtggtgcaggataaagccggattttacgttaatcgcattctggca

SEQ ID NO: 219366 - DNA, 75 bp, synthetic construct
  source 1..75: mol_type = other DNA
agcaatgttgcacccgctcccttaaacagcgtggggattttaggcggcggcttgatgggcggcggtattgcttac

SEQ ID NO: 219367 - DNA, 75 bp, synthetic construct
  source 1..75: mol_type = other DNA
cggtgctcggtttgcctgaagttcagcttgggttgttacccggttcaggtggcacccagcgtttaccgcgcctga

SEQ ID NO: 219368 - DNA, 75 bp, synthetic construct
  source 1..75: mol_type = other DNA
cacagggcaccagtagcggctatgacgctgaagctcgagcctttggtgaactggcgatgacatcacaatcgcagg

SEQ ID NO: 219369 - DNA, 75 bp, synthetic construct
  source 1..75: mol_type = other DNA
ctcacgcctcgcggccggagcaggttatcggtcttcatttcttcagcccggtagaaaaaatgccgctggtggaga

SEQ ID NO: 219370 - DNA, 75 bp, synthetic construct
  source 1..75: mol_type = other DNA
acattctgattgcctgcgtggatgggctgaccggcttccctgaagcgataaacagcatttatccgcagacagagg

SEQ ID NO: 219371 - DNA, 75 bp, synthetic construct
  source 1..75: mol_type = other DNA
ccccacaaaacgtactcaaacagaccacgcaaatgcgtatgtgggtcaccattggcggcgtcagcgccctggttg

SEQ ID NO: 219372 - DNA, 75 bp, synthetic construct
  source 1..75: mol_type = other DNA
tcggcgtcagcacagcactagagatgatcctcactggcaagcaactacgggcaaagcaggcgttaaagctggggc

SEQ ID NO: 219373 - DNA, 75 bp, synthetic construct
  source 1..75: mol_type = other DNA
ggtaaaacgccaattgtcgtgcgtgacaaagccgggttttacgtcaatcgcattttagcgccttacattaatgaa

SEQ ID NO: 219374 - DNA, 75 bp, synthetic construct
  source 1..75: mol_type = other DNA
ctttgcgtagtatcttttttgccagtacggaagtgaagaaagatcccggtagtgatgcaccgcctgcgccattaa

SEQ ID NO: 219375 - DNA, 75 bp, synthetic construct
  source 1..75: mol_type = other DNA
aactgcaaaacggcgcaagaagcggaagcactggcgcggcaggggcaacagttaatggcggagattcatgctttg

SEQ ID NO: 219376 - DNA, 75 bp, synthetic construct
  source 1..75: mol_type = other DNA
aaaggtgtggaagccatgcgtcaggaactggcccgtttacagcaagaaggctatcgctacgcggtgcttgatgcc

SEQ ID NO: 219377 - DNA, 75 bp, synthetic construct
  source 1..75: mol_type = other DNA
gaaggcgtgacacgctttattgtcgcaggcggtgagacctccggcgtagtcacacagagcctgggcataaaaggg

SEQ ID NO: 219378 - DNA, 75 bp, synthetic construct
  source 1..75: mol_type = other DNA
aggcataccgaccacttccatttattatatgacctgcctgactgtctttattatctctgttgcgttactgatggt

SEQ ID NO: 219379 - DNA, 75 bp, synthetic construct
  source 1..75: mol_type = other DNA
ttagtgtaaagcataatgtctcggatctacacctgtgtagcgcctggcctgcacgctggcgtattcgcgggagga

SEQ ID NO: 219380 - DNA, 75 bp, synthetic construct
  source 1..75: mol_type = other DNA
catattctgacgctggaagatcctgttgaatatctctatgccagccagcgatgtttgatccagcagcgagaaatt

SEQ ID NO: 219381 - DNA, 75 bp, synthetic construct
  source 1..75: mol_type = other DNA
ataccgaagacgaactggatctgaatgcctacagtatccgtcgccccagcgcgacctactttgtccgggccatag

SEQ ID NO: 219382 - DNA, 75 bp, synthetic construct
  source 1..75: mol_type = other DNA
tattgaagcggtgtttgaaaatctcgaattaaaacaaaagatggtggcggaagtagaggaaaattgcgccactca

SEQ ID NO: 219383 - DNA, 75 bp, synthetic construct
  source 1..75: mol_type = other DNA
cgtaatggcggggccgttggggcgtacgctgctgttcaaaatggtcggcaaaaaaacagagcagaaaacgcaggg

SEQ ID NO: 219384 - DNA, 75 bp, synthetic construct
  source 1..75: mol_type = other DNA
aatctgcgcggcgtggtgtttatctccgcgaaaccggacaactttattgccggggcagacatcaacatgatcggc

SEQ ID NO: 219385 - DNA, 75 bp, synthetic construct
  source 1..75: mol_type = other DNA
atggacaacaaaatatcaacctattcaccggcatttagtattgtgtcatggatagctctcgttggtggtatcgtt

SEQ ID NO: 219386 - DNA, 75 bp, synthetic construct
  source 1..75: mol_type = other DNA
tggctttcttcttaagcttgtttggtgcagtagcggtgcagaaaaatattcgtgatgccggaataggtaatgact

SEQ ID NO: 219387 - DNA, 75 bp, synthetic construct
  source 1..75: mol_type = other DNA
cagtacctgaacaattcttttgaaccaccatataaaacaccttcctgttgttggggatatccagattatacagat

SEQ ID NO: 219388 - DNA, 75 bp, synthetic construct
  source 1..75: mol_type = other DNA
cattttgctttaaagaaagcgaatttggggtccgtgtttgcactggctgtcattccaagattagttatggcgaag

SEQ ID NO: 219389 - DNA, 75 bp, synthetic construct
  source 1..75: mol_type = other DNA
taatcggtggtaaggaggttagcaataaaattcaacctcttatctttaaggataacttttcagcttttgagtatg

SEQ ID NO: 219390 - DNA, 75 bp, synthetic construct
  source 1..75: mol_type = other DNA
actggaaacagttgcttatcgtagtgatgcttgcggcgctggttatcggtggagtggttgcgtggaaggataacg

SEQ ID NO: 219391 - DNA, 75 bp, synthetic construct
  source 1..75: mol_type = other DNA
agagggcggccgcaccacgggagtggcgtatcgcttgccggaagagacgctggagcaggaactgaccttgctgtg

SEQ ID NO: 219392 - DNA, 75 bp, synthetic construct
  source 1..75: mol_type = other DNA
atggatcgttgatgtggaatccggcactggagtttaccgaatcgtgcaccggtacactggttggatggcatcgcg

SEQ ID NO: 219393 - DNA, 75 bp, synthetic construct
  source 1..75: mol_type = other DNA
aatccggcgctggagtttatcgagtcctgtaccggtacgctggttggctggcatcgggcattctgtctgcgcctg

SEQ ID NO: 219394 - DNA, 75 bp, synthetic construct
  source 1..75: mol_type = other DNA
aggaccataacaacagcggcgatattctcattaccgggagccagattaagtccggcaatgacaccagcctgaatg

SEQ ID NO: 219395 - DNA, 75 bp, synthetic construct
  source 1..75: mol_type = other DNA
attatatcgatactattaatttgtcattttgtcactcctcatcagtgatagaattaagtagagtaaaaaggaagt

SEQ ID NO: 219396 - DNA, 75 bp, synthetic construct
  source 1..75: mol_type = other DNA
aatgtattgtcggtgtgtcgtcagttctttttttgattttttcgctaatttctcttttggaaactattcagaatg

SEQ ID NO: 219397 - DNA, 75 bp, synthetic construct
  source 1..75: mol_type = other DNA
gagcagctcaggcagtataacgccattgtcggcgctgggtcgtcagccgcagacaccggagttttgcttgccgac

SEQ ID NO: 219398 - DNA, 75 bp, synthetic construct
  source 1..75: mol_type = other DNA
ggcattgtagcctggaatattcacggtgacagacagtacgacgccgggtatgcgcaggcgaaggctgatcgcaaa

SEQ ID NO: 219399 - DNA, 75 bp, synthetic construct
  source 1..75: mol_type = other DNA
cgatgtatgccatccgtaaagcgccgtctctggcgaaataccgtggtcgtctggataacgtgtttgttaccgtga

SEQ ID NO: 219400 - DNA, 75 bp, synthetic construct
  source 1..75: mol_type = other DNA
ggggatgcaggatgacgggctgaatgatttactggtgtcggtgaaaaaactgctggcggagaatttcccggatgg

SEQ ID NO: 219401 - DNA, 75 bp, synthetic construct
  source 1..75: mol_type = other DNA
cggctggataatggcggaacgatgaaggatttggccccctcaccatcactctgcaactcaaagacaaatatggtc

SEQ ID NO: 219402 - DNA, 75 bp, synthetic construct
  source 1..75: mol_type = other DNA
aacgtggtctgccccactccgggcacaggatcaacgttacatcggtatacgcaatacagatacgatatggctccc

SEQ ID NO: 219403 - DNA, 75 bp, synthetic construct
  source 1..75: mol_type = other DNA
acgtacggacatctcaacccattgaatcattttgattatcgcgaaacgcgagaattggcgagcaacgaacacgaa

SEQ ID NO: 219404 - DNA, 75 bp, synthetic construct
  source 1..75: mol_type = other DNA
ggtattaacacaaagacggtgaatacctttctgtatacgggaatggcgaaaaacgggctgtatggtgtgagtgtc

SEQ ID NO: 219405 - DNA, 75 bp, synthetic construct
  source 1..75: mol_type = other DNA
ggcattcacacgaagacggtgaatacctttctgtatacgggaatggcgaaaaacgggctgtatggtgtgagcgtg

SEQ ID NO: 219406 - DNA, 75 bp, synthetic construct
  source 1..75: mol_type = other DNA
tggcatccagatggaagataaaggccaggtgacactggaagatgctaatggcggcaagtacgaaggctatcgtac

SEQ ID NO: 219407 - DNA, 75 bp, synthetic construct
  source 1..75: mol_type = other DNA
ccacacgcggccagtgcatgtgccagctcgtctacttttccagcagctccgaaaatacgcagcgttttatcgaac

SEQ ID NO: 219408 - DNA, 75 bp, synthetic construct
  source 1..75: mol_type = other DNA
atcgcgttcctgaagcggcggaagcgctgcgtgctcagggctttcgtcagttgccggtagtgattgctggcgatc

SEQ ID NO: 219409 - DNA, 75 bp, synthetic construct
  source 1..75: mol_type = other DNA
ccaatgtcaccttttccgcagcgcaaaaactgtgtcagggaggacgaggtcgcacattataacgatttcgtagca

SEQ ID NO: 219410 - DNA, 75 bp, synthetic construct
  source 1..75: mol_type = other DNA
tgccgggccgcctgagtctcaacgctttactgaaacatcgccagattaccaggcttgccgctggtggtcaaacct

SEQ ID NO: 219411 - DNA, 75 bp, synthetic construct
  source 1..75: mol_type = other DNA
cgataacacttctatctggctggtggtgtggggtgaaaacaccgttcacggcatcttccctaaaggccagaaggc

SEQ ID NO: 219412 - DNA, 75 bp, synthetic construct
  source 1..75: mol_type = other DNA
tgtggcgatttctgtgcttttatcggctatgtgggctgggatgagataaaaaaccgccttgatgaattcgccaac

SEQ ID NO: 219413 - DNA, 75 bp, synthetic construct
  source 1..75: mol_type = other DNA
gtcctacgcttctattggtatttgggcgccgattctgctgttgctgtgtaaaatggcgcaaggcttctcggtggg

SEQ ID NO: 219414 - DNA, 75 bp, synthetic construct
  source 1..75: mol_type = other DNA
tttgttgcggaatactctcctgaccgcaaacgtggctttatgggtagctggctggatttcggttctattgccggg

SEQ ID NO: 219415 - DNA, 75 bp, synthetic construct
  source 1..75: mol_type = other DNA
gtacgttctgtattggcttaataccgtcctacgacacgattggtatttgggcaccgattctgctgttgatctgta

SEQ ID NO: 219416 - DNA, 75 bp, synthetic construct
  source 1..75: mol_type = other DNA
cggtaagcggtacgaacaaccagcgttgtgtgaatcatatttctgaaccggataccgaaattccaccgggcttca

SEQ ID NO: 219417 - DNA, 75 bp, synthetic construct
  source 1..75: mol_type = other DNA
ggaactcttaacgcagggattaaaaacctatacgcaggatcagcaaactacaccgggctttcagtagatgctgtt

SEQ ID NO: 219418 - DNA, 75 bp, synthetic construct
  source 1..75: mol_type = other DNA
ccgtttgtgatcctcggtagtgttgcgctgtttgcactggcgatcccggcgtttattctgattaacagtaatatc

SEQ ID NO: 219419 - DNA, 75 bp, synthetic construct
  source 1..75: mol_type = other DNA
actgccgtaaaacatggcagctacagtttacttacaccgcctctcagcccggtacacaccagaaaattattgata

SEQ ID NO: 219420 - DNA, 75 bp, synthetic construct
  source 1..75: mol_type = other DNA
cacgcctggtatcgttatcccaacgatcaggtcgggcgtcatccgttcgatggcattaccgacccgtggtacaac

SEQ ID NO: 219421 - DNA, 75 bp, synthetic construct
  source 1..75: mol_type = other DNA
cacgttacatcaaaacggcagatcagcactctacgagcaatctcatggggtgttctgggaacgctctcactagtg

SEQ ID NO: 219422 - DNA, 75 bp, synthetic construct
  source 1..75: mol_type = other DNA
cgatggcagcgggaaccttgcttggctgggccagttacagcatggtcgctcatataacatcaaaacggcagatca

SEQ ID NO: 219423 - DNA, 75 bp, synthetic construct
  source 1..75: mol_type = other DNA
aacctcgcgcatacaaccgggcagtgatgtgattgtctgcgctgaaatggacgaacagtggggctacgtcggtgc

SEQ ID NO: 219424 - DNA, 75 bp, synthetic construct
  source 1..75: mol_type = other DNA
cgcaaaatctcctgcagagcgcaagagggcgcagcgagagagggaaagaaagcgggaacaaaatggcgattgtca

SEQ ID NO: 219425 - DNA, 75 bp, synthetic construct
  source 1..75: mol_type = other DNA
atgaagacgtttcctctgcaaagtctgacgcttaatgaagcgcagcaaaagcagtttgcgctggtggatagcatt

SEQ ID NO: 219426 - DNA, 75 bp, synthetic construct
  source 1..75: mol_type = other DNA
agcagatggggctgacgcttattactgctaatttcaatgacctgtcggcactgaagcaggtcgtcgacgagcaac

SEQ ID NO: 219427 - DNA, 75 bp, synthetic construct
  source 1..75: mol_type = other DNA
cgccacgctctattccggcggcagccagattcagggtgcacaggcgctggaagtcttgcgtgggctggtgtttgc

SEQ ID NO: 219428 - DNA, 75 bp, synthetic construct
  source 1..75: mol_type = other DNA
gttaaccgatgacaactatgcggtgatgaaggtagcgcgaattggttgcgaatgcggggcgaatgtctcgacttt

SEQ ID NO: 219429 - DNA, 75 bp, synthetic construct
  source 1..75: mol_type = other DNA
cggagtcgaaatatgaaattccgccgctcttttatcgactttccgggacgtttcgtcaggcgaatccgcaattag

SEQ ID NO: 219430 - DNA, 75 bp, synthetic construct
  source 1..75: mol_type = other DNA
atgaaggtggcgcggattggctgcgaatgcggggcgaatgtctcaactttttcctgcttcaagctgtttgggccg

SEQ ID NO: 219431 - DNA, 75 bp, synthetic construct
  source 1..75: mol_type = other DNA
gctcttttatcgcctttccggaacgtttcgccaggcgaatccacaatcagaacattgtgcgattcgcattaaccc

SEQ ID NO: 219432 - DNA, 75 bp, synthetic construct
  source 1..75: mol_type = other DNA
ctgaagcaggtcgtcgacgagcaacaaccggatgcggcgctggtgcagcatacgcgccagcagccgcaggacagc

SEQ ID NO: 219433 - DNA, 75 bp, synthetic construct
  source 1..75: mol_type = other DNA
agtttcatcagccgattgccgccagggtgctggaagaagcgcaaaagcgtggcgcgttgccttacccggtcggtg

SEQ ID NO: 219434 - DNA, 75 bp, synthetic construct
  source 1..75: mol_type = other DNA
cggctttgcttaaaccagggcagcgtcttctggtgcatgacgcgcccgtttatccgacgacacgcgtcatcattg

SEQ ID NO: 219435 - DNA, 75 bp, synthetic construct
  source 1..75: mol_type = other DNA
cgttgcgcgcggcaggtgttccagccttaaccgatgacaactatgcggtgatgaaggtggcgcgcattggctgtg

SEQ ID NO: 219436 - DNA, 75 bp, synthetic construct
  source 1..75: mol_type = other DNA
tgtcgctgacagccagccggacgtgcggatctcggcgatcagtgcggcttcggtatcattgcttaaaggtttagg

SEQ ID NO: 219437 - DNA, 75 bp, synthetic construct
  source 1..75: mol_type = other DNA
atgcgcagtcgtgtatgttaattagcgtacagtgtgagaacgatcccggcgacagcacctggttaccagatgcgg

SEQ ID NO: 219438 - DNA, 75 bp, synthetic construct
  source 1..75: mol_type = other DNA
gcgtattcgccagttgcagaatatgaatatggcacagctccaggcggaaatcgcgaagcatttcccgtcgcgtct

SEQ ID NO: 219439 - DNA, 75 bp, synthetic construct
  source 1..75: mol_type = other DNA
ttgaacatgcccagcctgcgccgtttgttgcggacagccagccggacgtgcggatctcggcgatcagcgcggctt

SEQ ID NO: 219440 - DNA, 75 bp, synthetic construct
  source 1..75: mol_type = other DNA
aagggcggtgaagtgattcgcgcgaagctggtgattggtgccgacggcgcaaattcgcaggtgcggcagatggcg

SEQ ID NO: 219441 - DNA, 75 bp, synthetic construct
  source 1..75: mol_type = other DNA
tggaaaacactgtcctgcaacaggcgctgtggcaggcgctggaagcgcatccgaaagtaacgttacgtgtgccag

SEQ ID NO: 219442 - DNA, 75 bp, synthetic construct
  source 1..75: mol_type = other DNA
aaagccattaatggtgtactttcatttaatgagtcaaatgatgtcaatgggataacatttaaaaactggtttgcg

SEQ ID NO: 219443 - DNA, 75 bp, synthetic construct
  source 1..75: mol_type = other DNA
cgttgccatccttaccgcagactggaaacgtgggagtgggaaacggcgcatgtggtgtttgatgcagccgaatta

SEQ ID NO: 219444 - DNA, 75 bp, synthetic construct
  source 1..75: mol_type = other DNA
gcaaaagcactgccggacatcagcgctgtctctgctctcattgccgtaaaacatggcaactacagttcacttaca

SEQ ID NO: 219445 - DNA, 75 bp, synthetic construct
  source 1..75: mol_type = other DNA
agctgaaagagaaagatcccagcctgtcgttccgtcgctcctgccgtgaaggtgtgtgcggttccgacggtctga

SEQ ID NO: 219446 - DNA, 75 bp, synthetic construct
  source 1..75: mol_type = other DNA
gcgtactttgcacagctttgacccatgtctcgcctgttcaacacatgtgctgggcgacgacggtagcgagctgat

SEQ ID NO: 219447 - DNA, 75 bp, synthetic construct
  source 1..75: mol_type = other DNA
tgctgccagtggatttggttgatccgcagcaggtgcaggagtttgtcgatcacgcctggtatcgttatcccaacg

SEQ ID NO: 219448 - DNA, 75 bp, synthetic construct
  source 1..75: mol_type = other DNA
tgatgtcggcgctgaacctgccactttccggcatccagtcgacattgggtcgcattttgtgccgcgcacatgaag

SEQ ID NO: 219449 - DNA, 75 bp, synthetic construct
  source 1..75: mol_type = other DNA
ttccggcatccagtcaacgttgggccgcattttgtgccgcgcgcacgaagcgcagtgggccgcaggtaagttgca

SEQ ID NO: 219450 - DNA, 75 bp, synthetic construct
  source 1..75: mol_type = other DNA
cgcagtgggccgcaggtaagttgcagtacttcttcgacaagctgatgaccaacctgaaaaatggcaatctcgcca

SEQ ID NO: 219451 - DNA, 75 bp, synthetic construct
  source 1..75: mol_type = other DNA
aagtggggccgctggcacgcacgttaatcgcttatcacaaaggcgatgctgcgaccgttgagtcggtcgatcgca

SEQ ID NO: 219452 - DNA, 75 bp, synthetic construct
  source 1..75: mol_type = other DNA
gtctgtccaaaagggctgaacccgacgcgcgccatcggccatatcaagtcgatgttgttgcaacgcaatgcgtaa

SEQ ID NO: 219453 - DNA, 75 bp, synthetic construct
  source 1..75: mol_type = other DNA
gaacggcaaaaatggtctggcttgtataaccccaatttcggcactcaaccagtcgggcaagaagattgtgattcg

SEQ ID NO: 219454 - DNA, 75 bp, synthetic construct
  source 1..75: mol_type = other DNA
gccttaaaaaaaatgcgccgcagccgtccgctggatggcatcatctggccactgacagaagagcagagtcgccag

SEQ ID NO: 219455 - DNA, 75 bp, synthetic construct
  source 1..75: mol_type = other DNA
tggcgctgctggagctgaaaaacttccgcctgccgggacaggtatttctgaccggcaggagtgcgtattaccgtg

SEQ ID NO: 219456 - DNA, 75 bp, synthetic construct
  source 1..75: mol_type = other DNA
atgaaattcagagcgtgttgatgaacgctctctccctccaggaagtccacgtttccggcgatggcagccactttc

SEQ ID NO: 219457 - DNA, 75 bp, synthetic construct
  source 1..75: mol_type = other DNA
tacccgttcaaagcctcacaaaacgatgcctccctccccctgctggcgcagtacctgcgcgatgacgggcgcatc

SEQ ID NO: 219458 - DNA, 75 bp, synthetic construct
  source 1..75: mol_type = other DNA
taccacgctgatggcagatgacctgcgctatgcaggtgtaccggaaggtgtgcgtcagagcgtgttgccgtcact

SEQ ID NO: 219459 - DNA, 75 bp, synthetic construct
  source 1..75: mol_type = other DNA
gcggagcctgatgtcacgctgctgaccgccttaaaaaaactgcgccgcagccgtccgctggacggcatcatctgg

SEQ ID NO: 219460 - DNA, 75 bp, synthetic construct
  source 1..75: mol_type = other DNA
tagtgcccaggggttggtaaacccggtgttggggacggtattcacatccctgtctgaaattctggcatatatgcg

SEQ ID NO: 219461 - DNA, 75 bp, synthetic construct
  source 1..75: mol_type = other DNA
taaggtggatggcaaacggtgctgcgctggagaaacagggcgtggaaatcacgctgatttacagcggcagccata

SEQ ID NO: 219462 - DNA, 75 bp, synthetic construct
  source 1..75: mol_type = other DNA
atgatgccgataccgtaacgcttaaggaagtgacagatgcgctgctgcattgtgcagaacagcttcgtatatctg

SEQ ID NO: 219463 - DNA, 75 bp, synthetic construct
  source 1..75: mol_type = other DNA
cagcaggcgatttatggtccgctgatggaatatatagcggataaccgtattcatgctgtgtcgatcaaagcgtat

SEQ ID NO: 219464 - DNA, 75 bp, synthetic construct
  source 1..75: mol_type = other DNA
agctttctgacattgagtcagtagaaggtctttcgccggagttcatctcctggcttgaaagccagtcccctaaag

SEQ ID NO: 219465 - DNA, 75 bp, synthetic construct
  source 1..75: mol_type = other DNA
tgctaataaccagacattctatataacgcaggagtcagctgaaggtggaataaaatataaagctgtcactacaga

SEQ ID NO: 219466 - DNA, 75 bp, synthetic construct
  source 1..75: mol_type = other DNA
tttttatatctaatgtacttttattcttggttattgtggccttcgtgggggggatcatctggcgttttggtgatc

SEQ ID NO: 219467 - DNA, 75 bp, synthetic construct
  source 1..75: mol_type = other DNA
taccttcgcatcgttgcgcctgaaaagattcaggaattcatcactgattgtttaaagacgcagttaaacacgtcc

SEQ ID NO: 219468 - DNA, 75 bp, synthetic construct
  source 1..75: mol_type = other DNA
gagataaggcgggtttaagccaacaggaagtcgccgagcgggcaggtgaaaatgttctgtcccaaaagcaggtct

SEQ ID NO: 219469 - DNA, 75 bp, synthetic construct
  source 1..75: mol_type = other DNA
atgatgtgtaagcgtaaacgctggtcacgcgaagaccgggaatttatcgaagccagtgtcgggaaaatgaccgtc

SEQ ID NO: 219470 - DNA, 75 bp, synthetic construct
  source 1..75: mol_type = other DNA
gtactattgcaaggctagagtcaagccagaaaatagcaaatgtatttttaaggaattttgtactcactgtagtgg

SEQ ID NO: 219471 - DNA, 75 bp, synthetic construct
  source 1..75: mol_type = other DNA
ggttgtggtatttgaaagtttcgcgattctggaaactatctggttacttgatacgccggggcaattaattgaacc

SEQ ID NO: 219472 - DNA, 75 bp, synthetic construct
  source 1..75: mol_type = other DNA
ctggaagcacaaaccctgccgctgacggaacagggcatgtcgcagctgctgaccgataaccgccatgatttcctg

SEQ ID NO: 219473 - DNA, 75 bp, synthetic construct
  source 1..75: mol_type = other DNA
ctatcgggcggtgacgacaaagaaagccgacagccgtcatccggcaatggtggaactcgccgccttcctgcgcga

SEQ ID NO: 219474 - DNA, 75 bp, synthetic construct
  source 1..75: mol_type = other DNA
gtggcggcaggtgctgacgcccgcagcggacagcctgaaccgccagtggcagcgggcgattgtcagccactggaa

SEQ ID NO: 219475 - DNA, 75 bp, synthetic construct
  source 1..75: mol_type = other DNA
tatccgttcaaagcctcacaaaacgatgcctctcttcccctgctggcgcagtatctgcgcgatgacgggcgcatc

SEQ ID NO: 219476 - DNA, 75 bp, synthetic construct
  source 1..75: mol_type = other DNA
acggacggttaatcgccgccagtctgggcgaggaatggagtggcttcggtcaggcgctgttcgtccgcccggtag

SEQ ID NO: 219477 - DNA, 75 bp, synthetic construct
  source 1..75: mol_type = other DNA
aggcgatggaacgcatactggcggattaccggggaagctggagccttattcgcctgctggaacaggcgcaggtga

SEQ ID NO: 219478 - DNA, 75 bp, synthetic construct
  source 1..75: mol_type = other DNA
cagtgcatcccttgagcaaaccagtcagcaaatacttcttaatgcagattcaatgcgcgtggccctggatgaagg

SEQ ID NO: 219479 - DNA, 75 bp, synthetic construct
  source 1..75: mol_type = other DNA
aaaattgtatgtggactacttctgatgttcgatacacaaacgctcgatgcgttgcagagcacattaaacattcac

SEQ ID NO: 219480 - DNA, 75 bp, synthetic construct
  source 1..75: mol_type = other DNA
aggttttgtcggtaactatgaaaaacttattaaagattaccaaatagttatggggcagttacaagcattaatttc

SEQ ID NO: 219481 - DNA, 75 bp, synthetic construct
  source 1..75: mol_type = other DNA
ttattgctcaaataaaattactacgtactgagattagcgattcctcgcaggcacaattagctaatcacactcatt

SEQ ID NO: 219482 - DNA, 75 bp, synthetic construct
  source 1..75: mol_type = other DNA
gaacaattagatagtcactctcattttagtaataaactttgggaacagttgcaacaatttgcagaccttatggca

SEQ ID NO: 219483 - DNA, 75 bp, synthetic construct
  source 1..75: mol_type = other DNA
ccctggttgctcccgactggcgggacgaacaaccagcgttgtgtgaatcatatttccgaaccggataccgaaatt

SEQ ID NO: 219484 - DNA, 75 bp, synthetic construct
  source 1..75: mol_type = other DNA
tctggcgggaatacccgttgcgtgctggggcaaacccgaagaaatccgctttcagtgcctggaaggccagattac

SEQ ID NO: 219485 - DNA, 75 bp, synthetic construct
  source 1..75: mol_type = other DNA
taagtatccgcctgacaaaacgcctggggcggtagagttaattttaaaacaagcggaagttatttcgaatcactg

SEQ ID NO: 219486 - DNA, 75 bp, synthetic construct
  source 1..75: mol_type = other DNA
ctgacatcctacacatcatccgtatctgtcaggcgaacgatttattgcagcttctgcaagaaaccacagcacgcc

SEQ ID NO: 219487 - DNA, 75 bp, synthetic construct
  source 1..75: mol_type = other DNA
gaaaaaccatctcgtcgtcttggcgatgccaaaccggcaggcgaacaacaacgccgtcgccgtccgcgtaaacct

SEQ ID NO: 219488 - DNA, 75 bp, synthetic construct
  source 1..75: mol_type = other DNA
gcagatgatgaagttgcgcggcggcgttgatgtgctggtggcaacgccgggacgtctgctggacctggaacatca

SEQ ID NO: 219489 - DNA, 75 bp, synthetic construct
  source 1..75: mol_type = other DNA
cggcgaagcgttatcgctggtgtgtgttgatgagcacaaactgctgcgtgatatcgaaaaactgctgaaaaaaga

SEQ ID NO: 219490 - DNA, 75 bp, synthetic construct
  source 1..75: mol_type = other DNA
aagttgcagaactggatgatgccgatactgtaacgcttaaggaagtgatggatgcgctgctgcattgtgtagaac

SEQ ID NO: 219491 - DNA, 75 bp, synthetic construct
  source 1..75: mol_type = other DNA
gcaaacgtattgccgagctggaagctaatcttgtggcgctggcggcggagaatgcacttgctcgtaaagcagttc

SEQ ID NO: 219492 - DNA, 75 bp, synthetic construct
  source 1..75: mol_type = other DNA
aaccacgccgtggagaaggtggtgcgaaatcagctagcgcgaagcccgcagaaaaaacatctcgtcgtcttggcg

SEQ ID NO: 219493 - DNA, 75 bp, synthetic construct
  source 1..75: mol_type = other DNA
cccgtgaactggcggcgcagattggcgaaaacgtccgtgattacagcaaatatctgaacattcgttcgctggtgg

SEQ ID NO: 219494 - DNA, 75 bp, synthetic construct
  source 1..75: mol_type = other DNA
aaaatctgcaagcacgaagcctgcagaaaaaccgtctcgtcgtcccggcgatgccaaaccggcaggtgagcaaca

SEQ ID NO: 219495 - DNA, 75 bp, synthetic construct
  source 1..75: mol_type = other DNA
ccagcgcactatgcggatgccattcgttataatgctcgaacgcctctgcaaggttctttgctgccgttaacccgt

SEQ ID NO: 219496 - DNA, 75 bp, synthetic construct
  source 1..75: mol_type = other DNA
tacctgaacattcgttcgctggtggtgtttggtggcgtcagcattaacccgcagatgatgaagctgcgtggcggt

SEQ ID NO: 219497 - DNA, 75 bp, synthetic construct
  source 1..75: mol_type = other DNA
aaaatctgcaagcgcgaaacctgcagaaaaaccgtctcgccgcctcggcgatgccaaaccggcaggcgaacaaca

SEQ ID NO: 219498 - DNA, 75 bp, synthetic construct
  source 1..75: mol_type = other DNA
tttgttgataagaaacgcaaacgggaattactgtcgcacatgattggtaaaggtaactggcagcaggtgctggtg

SEQ ID NO: 219499 - DNA, 75 bp, synthetic construct
  source 1..75: mol_type = other DNA
aaatttactgatatcttccatggcgcggatggtgatgaccatatagaaggaaatgatgggaatgaccgcttatat

SEQ ID NO: 219500 - DNA, 75 bp, synthetic construct
  source 1..75: mol_type = other DNA
gtatctaatgctatagaatattcagaggttgcacctaaaaatactggaggtgtttttactaaagcctttcttgat

SEQ ID NO: 219501 - DNA, 75 bp, synthetic construct
  source 1..75: mol_type = other DNA
gaaaagagcatcgctgctgctcataaaaattccttcaatgtagatgtggagattcatggatattccgaccaagga

SEQ ID NO: 219502 - DNA, 75 bp, synthetic construct
  source 1..75: mol_type = other DNA
aggctttcgttcttctgacagaacagcgtcagcatctgggggatgaaggctgggtatttccgggcaaggggaccg

SEQ ID NO: 219503 - DNA, 75 bp, synthetic construct
  source 1..75: mol_type = other DNA
aagataaaagacacattaagataaatgaaaaaataaacacactgattgggattgttaatgaaaatatcgcaataa

SEQ ID NO: 219504 - DNA, 75 bp, synthetic construct
  source 1..75: mol_type = other DNA
ggatgaccgtctggtcactctcccggaccaaaatgggaaacaccaccattaagacggtgactcttcattctgtcg

SEQ ID NO: 219505 - DNA, 75 bp, synthetic construct
  source 1..75: mol_type = other DNA
tattgtccaaaacacggtgctttagtcttctttgatagagctgtagatgatcaccgacatcaattttgggctttg

SEQ ID NO: 219506 - DNA, 75 bp, synthetic construct
  source 1..75: mol_type = other DNA
ccggatggtgcgatccacgcgatcgccgatgtgctgggtattccggcaagcgacgtcgaaggtgtggcaacgttc

SEQ ID NO: 219507 - DNA, 75 bp, synthetic construct
  source 1..75: mol_type = other DNA
gccctggaagacatcattaaaaatcaaattccttctgatgttgaaatcatgcgggtatataccatgcatgatgcc

SEQ ID NO: 219508 - DNA, 75 bp, synthetic construct
  source 1..75: mol_type = other DNA
atgactaccggtaattctggcgtagatggaataatcgatcgccacgaagaatcacgcaacgctctaaagatatta

SEQ ID NO: 219509 - DNA, 75 bp, synthetic construct
  source 1..75: mol_type = other DNA
gtaaacccgatcatgaagcccttgctctgctcatgttccttgccctgacggggctgcgcctgggggaaacccgtc

SEQ ID NO: 219510 - DNA, 75 bp, synthetic construct
  source 1..75: mol_type = other DNA
ttaaaaagccgggcgcagctattcagatcgcggcggcggtaaataaacaatacgcgccagaactggatatcgtag

SEQ ID NO: 219511 - DNA, 75 bp, synthetic construct
  source 1..75: mol_type = other DNA
cgttcagaagcagcgtggctgggtaccggatggtgcgatccacgcgatcgccgatgtgctgggtattccggcaag

SEQ ID NO: 219512 - DNA, 75 bp, synthetic construct
  source 1..75: mol_type = other DNA
agtaacgaagtagcgaaaattcttatcgagcgattttcacttccgaaaaattatttaaaggcaaaagcttttgct

SEQ ID NO: 219513 - DNA, 75 bp, synthetic construct
  source 1..75: mol_type = other DNA
ctccgcaatgcgatgaaaagcgccaaaggccctggcaacttccgaaatctgtttatgtactcgcctaacggcaaa

SEQ ID NO: 219514 - DNA, 75 bp, synthetic construct
  source 1..75: mol_type = other DNA
ccctgaacgggtgctttattccgcattctctgctttcccggcaggcgttttccgcgtttgcgcttgactggtttg

SEQ ID NO: 219515 - DNA, 75 bp, synthetic construct
  source 1..75: mol_type = other DNA
ccagtaaccatcaatcctaaagagaagaattacctcttagttggacaaggaaaatatgaaatcttatctcttcct

SEQ ID NO: 219516 - DNA, 75 bp, synthetic construct
  source 1..75: mol_type = other DNA
tcagatcacctgtttattatgatggcagccgtggtaattgccgtaggcgtgatgatgttcgccgcgcgctcgatt

SEQ ID NO: 219517 - DNA, 75 bp, synthetic construct
  source 1..75: mol_type = other DNA
ctaacgcctggcttgctctcggtacgctgacgctgctggagatcgtacttgggatcgacaatattattttccttt

SEQ ID NO: 219518 - DNA, 75 bp, synthetic construct
  source 1..75: mol_type = other DNA
atgggaaagagtaagaaaaaccgcgctgcggcgatgaatcacatccagcataaaagccagacttcagccgaagca

SEQ ID NO: 219519 - DNA, 75 bp, synthetic construct
  source 1..75: mol_type = other DNA
tgaggcaacatcaagttcttcttgtcaacttgtttcaaatgcaaccagcaatgaaaacagcaacgtaaacattaa

SEQ ID NO: 219520 - DNA, 75 bp, synthetic construct
  source 1..75: mol_type = other DNA
gaattccggaaactttctctagagcaagacaaaaaacacattaagataaatgaaaaaataaatacattgattgag

SEQ ID NO: 219521 - DNA, 75 bp, synthetic construct
  source 1..75: mol_type = other DNA
aaaattaggtgcgtatcaatatttatactcagctacatctgaattcaatgtcgtaaaggaaaacgtagagttaat

SEQ ID NO: 219522 - DNA, 75 bp, synthetic construct
  source 1..75: mol_type = other DNA
tcaagtactgccagctatgaacatggcaatgtagacattcaaataagatctcttattgaaaaatacagcagtgag

SEQ ID NO: 219523 - DNA, 75 bp, synthetic construct
  source 1..75: mol_type = other DNA
caaaagaaatttatgaagaattgataattgccgtgccgagcagggaaaatgaattcagaaaactttctcttgagc

SEQ ID NO: 219524 - DNA, 75 bp, synthetic construct
  source 1..75: mol_type = other DNA
aaacacattaagataaatgaaaaaataaacacattaattagtatcgttaatgaatctgtttcgataaagcaatga

SEQ ID NO: 219525 - DNA, 75 bp, synthetic construct
  source 1..75: mol_type = other DNA
tggcatggcgatgcgtgccaaaacgccaatctttgatgacgatggaaaagtcatcggtgtggtgtcgattggcta

SEQ ID NO: 219526 - DNA, 75 bp, synthetic construct
  source 1..75: mol_type = other DNA
gtgcgtaatcgtcaggcatcagcgcttaggggcggtcagagtggcgtcgttggtttaattgttcgtgatttaacc

SEQ ID NO: 219527 - DNA, 75 bp, synthetic construct
  source 1..75: mol_type = other DNA
taaaatttggcctgccgtttcacagcgattgggtgctggagtgcacttccagccagaagcaagctgcggaagcta

SEQ ID NO: 219528 - DNA, 75 bp, synthetic construct
  source 1..75: mol_type = other DNA
ttaatactaaaatcgatgctttaaaatggcatgtatttgatattcctaacggctatggtactgctcgtgctggtg

SEQ ID NO: 219529 - DNA, 75 bp, synthetic construct
  source 1..75: mol_type = other DNA
aaaagccgagaggaaagaagagcgccggcgtaagcgagcggaagcaaaagcaaaagcaaaagcaaaagtgaagta

SEQ ID NO: 219530 - DNA, 75 bp, synthetic construct
  source 1..75: mol_type = other DNA
gtgatggaagcattggcctcggtggatgagtttggcgagcagttgcgcctcaacggctgtgtcaatcatcacttt

SEQ ID NO: 219531 - DNA, 75 bp, synthetic construct
  source 1..75: mol_type = other DNA
tgacggaactggcaatgttgccgggctgaatatctctgttgcaaccggcgttttgcttggcgaatggtggcgtca

SEQ ID NO: 219532 - DNA, 75 bp, synthetic construct
  source 1..75: mol_type = other DNA
tccagcgaacagggccaaccactgttcaaaaccagtttgccagcgaaaatggtgttggttttggggcaggaatat

SEQ ID NO: 219533 - DNA, 75 bp, synthetic construct
  source 1..75: mol_type = other DNA
ggtactggtgctgggtcaggaatatgaagggttaccggatgccgcacgcgatccgaacgatctgcgcgtgaagat

SEQ ID NO: 219534 - DNA, 75 bp, synthetic construct
  source 1..75: mol_type = other DNA
taaaatttggtctgccgtttcacagcgattgggtactggaatgttcttccagccagaagctggctgcggaagcta

SEQ ID NO: 219535 - DNA, 75 bp, synthetic construct
  source 1..75: mol_type = other DNA
aaccacacttgatgatatacctgttacctgggccagcacgccagcgcgggaacttggtaccacacttgcggatcg

SEQ ID NO: 219536 - DNA, 75 bp, synthetic construct
  source 1..75: mol_type = other DNA
ccgggctgacagaggcactggaagcacaggggcggatggtttttttgctccacggcggtaaagatggcgagcaac

SEQ ID NO: 219537 - DNA, 75 bp, synthetic construct
  source 1..75: mol_type = other DNA
ctgctgcgcgtgatgttcaaagcacaatatatcccttacctgatcgccggtttcctgtttgtttgctacatccag

SEQ ID NO: 219538 - DNA, 75 bp, synthetic construct
  source 1..75: mol_type = other DNA
atgacaaaaaagggcgctttcactagcgccttttttattgtgccggagcgcgaaaaactggtattaaccctctat

SEQ ID NO: 219539 - DNA, 75 bp, synthetic construct
  source 1..75: mol_type = other DNA
gtccgccgcatgagtgatatggggatgtcgacagaagtcattaagcaggcacttcagctttctgatgagcagatt

SEQ ID NO: 219540 - DNA, 75 bp, synthetic construct
  source 1..75: mol_type = other DNA
gtgagtgaaaaagttaacaaaatcactatgattcatgacggggcgttcaagaagacgcttgaagatcccgccgca

SEQ ID NO: 219541 - DNA, 75 bp, synthetic construct
  source 1..75: mol_type = other DNA
gtggataaggttttagattcagccctcctttcttcggcaaataaaagaaagggtatccttgctattggcgcacat

SEQ ID NO: 219542 - DNA, 75 bp, synthetic construct
  source 1..75: mol_type = other DNA
gtcaggtttttactatcaaaaaagtgactgtgcgcccggagtcaatacccgcagggatcggtctgtgcgacagcc

SEQ ID NO: 219543 - DNA, 75 bp, synthetic construct
  source 1..75: mol_type = other DNA
tctcagtcaggggtatggcaaaagccgggcgttcggttgtggtctgatgctgatcaaacctggagcagaggcgtg

SEQ ID NO: 219544 - DNA, 75 bp, synthetic construct
  source 1..75: mol_type = other DNA
acggcgaaacactaaccgtaacggaagagaatattatagcagttgcaaagctgttaggtattacacctaccgaac

SEQ ID NO: 219545 - DNA, 75 bp, synthetic construct
  source 1..75: mol_type = other DNA
atttatgcgaaagaagcactgcaaaaactgggcgcatgggatacgctctctccgaaactggccccagcggaagat

SEQ ID NO: 219546 - DNA, 75 bp, synthetic construct
  source 1..75: mol_type = other DNA
tgaatggcggtcgcctggctgttggtgatccggaacatgttccggctggcatttatgcgaaagaagctctgcaaa

SEQ ID NO: 219547 - DNA, 75 bp, synthetic construct
  source 1..75: mol_type = other DNA
taaccagaaaggcaaactgcaggtgaacgccggtggtacagccacgaatgtcaccctgaagcagggaggcgcact

SEQ ID NO: 219548 - DNA, 75 bp, synthetic construct
  source 1..75: mol_type = other DNA
gtggtctggcggatttcaccaccgttaaccagaaaggcaaactgcaggtgaacgccggtggtacagccacgaatg

SEQ ID NO: 219549 - DNA, 75 bp, synthetic construct
  source 1..75: mol_type = other DNA
ctggataccacactgaatggcggttaccagtatgtgcacaacggaggcacagcctctgacacggttgtaaacagt

SEQ ID NO: 219550 - DNA, 75 bp, synthetic construct
  source 1..75: mol_type = other DNA
ctttcagggttcgctccctcgcaacggaaatatgagctgccaaggtaattttgggtatgaaaaatatggctgtaa

SEQ ID NO: 219551 - DNA, 75 bp, synthetic construct
  source 1..75: mol_type = other DNA
tgccgggtaatgtttatcctgttgaaattgaaaccaaagtaagtgtttcttatattggtagaggttttgacaaaa

SEQ ID NO: 219552 - DNA, 75 bp, synthetic construct
  source 1..75: mol_type = other DNA
gagcaacgataatgcttttattcctgtaccagcattaactccagccagtttaattattgaagataataattatgg

SEQ ID NO: 219553 - DNA, 75 bp, synthetic construct
  source 1..75: mol_type = other DNA
atgtgagactatcagcgaaaagcaacttcctgatgagctagtcaagaactttcgggttcaacacctattagctaa

SEQ ID NO: 219554 - DNA, 75 bp, synthetic construct
  source 1..75: mol_type = other DNA
ggtttaacaactctgtctggcagtgttgtaagaattaaatctaatactaatgaaaaagatctgttaaaaattggt

SEQ ID NO: 219555 - DNA, 75 bp, synthetic construct
  source 1..75: mol_type = other DNA
actcattttctgaatacgattattaccaatataagggaagatcaaaaagatggcaatttaattcatcaactatga

SEQ ID NO: 219556 - DNA, 75 bp, synthetic construct
  source 1..75: mol_type = other DNA
gtcaaaacccagctcgatatcaccctcggtggcaacgaactgctgtggcttaccgttcatctggtgcggatcgcg

SEQ ID NO: 219557 - DNA, 75 bp, synthetic construct
  source 1..75: mol_type = other DNA
tcagtgaaaatgttgaaggatatttttaatctcgtgcagtaccactttaagcaggagatcgacactgaatcgatt

SEQ ID NO: 219558 - DNA, 75 bp, synthetic construct
  source 1..75: mol_type = other DNA
gcgaggctgtaaccattattcgccagcagtacggtattgaactaccggaagaggaagccgggaatatcgcttttc

SEQ ID NO: 219559 - DNA, 75 bp, synthetic construct
  source 1..75: mol_type = other DNA
gactggtacggtctggcaagagccgcccggcaaacgtcctggcatcagtctgcgctttactttaagcgcaatgta

SEQ ID NO: 219560 - DNA, 75 bp, synthetic construct
  source 1..75: mol_type = other DNA
gcggatgtaccgatgatcatgcttgcgttgaaaatggtcaaccgtgtcgctggcttcgcgtgaatagagtggaag

SEQ ID NO: 219561 - DNA, 75 bp, synthetic construct
  source 1..75: mol_type = other DNA
gcggatgcaccgatgatcacgcttgtgttgaaaacggtcaaccgtgtcactggcttcgcgtgaatagagtggaag

SEQ ID NO: 219562 - DNA, 75 bp, synthetic construct
  source 1..75: mol_type = other DNA
ggaaattgtcgtttcgctgtgtcttaccttttctgtttctgttgtgttttttgtaggggcaattgtgggatggat

SEQ ID NO: 219563 - DNA, 75 bp, synthetic construct
  source 1..75: mol_type = other DNA
aattagtcccctctcattcctgtccattgccgataagtttaaacgtgccaataaaatagaggagtattcacaacg

SEQ ID NO: 219564 - DNA, 75 bp, synthetic construct
  source 1..75: mol_type = other DNA
gtctggtaacgcgaagcccgcagaaaaaccgtctcggcgatgccaaaccggcaggcgaacaacaacgtcgccgcc

SEQ ID NO: 219565 - DNA, 75 bp, synthetic construct
  source 1..75: mol_type = other DNA
gccctgatatcctgcgcgctgttgccgagcagggttaccgtgaacccacccctattcagcagcaggcgatccctg

SEQ ID NO: 219566 - DNA, 75 bp, synthetic construct
  source 1..75: mol_type = other DNA
tcagtcggtaataaccagtatcgggaaattcgtattgagtcacacctgggagacggggatgataaggtcttttta

SEQ ID NO: 219567 - DNA, 75 bp, synthetic construct
  source 1..75: mol_type = other DNA
gaattcactcatattaatggcacagacttaaccgagacagataacttatactccgtggaggagctcatcggaacc

SEQ ID NO: 219568 - DNA, 75 bp, synthetic construct
  source 1..75: mol_type = other DNA
tgcaccggtaagcgcgctggtaggggctgttacggggataatttcaggcatccttgaggcttcaaaacaggcaat

SEQ ID NO: 219569 - DNA, 75 bp, synthetic construct
  source 1..75: mol_type = other DNA
tattaccgagttattagtcaagggtgttgataaatggacggtgaagggggttcaggacaaggggtctgtatatga

SEQ ID NO: 219570 - DNA, 75 bp, synthetic construct
  source 1..75: mol_type = other DNA
gcttcagtatcttcaggtattagtgctgctgcaacgacatctctggttggtgcaccggtaagcgcgctggtaggg

SEQ ID NO: 219571 - DNA, 75 bp, synthetic construct
  source 1..75: mol_type = other DNA
acggatgccgccagttttatggcgcggatggataccgttctgcagatatacggagaggaaaaaggtgcgaaataa

SEQ ID NO: 219572 - DNA, 75 bp, synthetic construct
  source 1..75: mol_type = other DNA
atatcggtgataacttaggaaaggcaggcggtatattatcaacgtttcaaaatttcctgggcactgcactttcct

SEQ ID NO: 219573 - DNA, 75 bp, synthetic construct
  source 1..75: mol_type = other DNA
cagagtaataacaaggtaagttatgtgtatgggcatgatgcatcaacttatgggagccaggacaatcttaatcca

SEQ ID NO: 219574 - DNA, 75 bp, synthetic construct
  source 1..75: mol_type = other DNA
aaggaaatgatgggaatgaccgcttatatggtgataaaggtaatgacacactgagtggtggaaacggagatgacc

SEQ ID NO: 219575 - DNA, 75 bp, synthetic construct
  source 1..75: mol_type = other DNA
gctcattcatgcgcccaacgggggcaaagaaggtgtgcaaattttgccgttccagcagatcactgcaaaggatga

SEQ ID NO: 219576 - DNA, 75 bp, synthetic construct
  source 1..75: mol_type = other DNA
cgtcatggaggccatgaagcacatcaatgactggcttggcgaagaggtgatccgttttaactcttatgcacttct

SEQ ID NO: 219577 - DNA, 75 bp, synthetic construct
  source 1..75: mol_type = other DNA
cgccaacaacaaagacgttgagagcctgaaaaaatcattgaaagatgcgcgcggcggtggcgcttttaaaaacct

SEQ ID NO: 219578 - DNA, 75 bp, synthetic construct
  source 1..75: mol_type = other DNA
ttttgccgtttcagcaaatcaccgcaaaggatgagttcatgaacgtcaaggctgcatcgcgtgatgatgtgctgt

SEQ ID NO: 219579 - DNA, 75 bp, synthetic construct
  source 1..75: mol_type = other DNA
gagatttacgggatgccggattacctgggcggcctgctgtctgccagcctgtcacattccgccgatatcttccgc

SEQ ID NO: 219580 - DNA, 75 bp, synthetic construct
  source 1..75: mol_type = other DNA
gtggaaaaagcgagccgtgtcttcgtccgcaatgaactgatgcccctgcaaaagcgactgcaggagctgaatgac

SEQ ID NO: 219581 - DNA, 75 bp, synthetic construct
  source 1..75: mol_type = other DNA
ggtggcttcggcgacgtagagaaagcggcgaaggtgttttccatcaacgaactggccccgatacaagaaagcctg

SEQ ID NO: 219582 - DNA, 75 bp, synthetic construct
  source 1..75: mol_type = other DNA
ctccgcaacgcaatgaaaagcgccaaaggtccgggtaacttccgcaatctgtttatgtactcgcctaatggtaaa

SEQ ID NO: 219583 - DNA, 75 bp, synthetic construct
  source 1..75: mol_type = other DNA
caaaatacgtccgtcgtggtgttgagccggatgtgtactggtttgtgcagacgggggagcaggaccacgagttcc

SEQ ID NO: 219584 - DNA, 75 bp, synthetic construct
  source 1..75: mol_type = other DNA
gtatattttgaaccaccgatcagcccctacggcatcgcccggatgtttgattcaacggcctatcatcagtcgccg

SEQ ID NO: 219585 - DNA, 75 bp, synthetic construct
  source 1..75: mol_type = other DNA
aggccagaccgcagccgggtgccagcgaacaaaccgcaggcattgagtcattcagctttggcgacccggtagcta

SEQ ID NO: 219586 - DNA, 75 bp, synthetic construct
  source 1..75: mol_type = other DNA
atgagtaagaaaaaagggaaaacaccgcgacctgcggcaaaaacaatcaccgccagcgccccgaaaatggaagca

SEQ ID NO: 219587 - DNA, 75 bp, synthetic construct
  source 1..75: mol_type = other DNA
actgccgttccagcagataaccgcaaaggatgaattcctgaacatcaaggggagcgcccgcgacgatatccttgc

SEQ ID NO: 219588 - DNA, 75 bp, synthetic construct
  source 1..75: mol_type = other DNA
gttacagaagcgactgcaggagcttaacgactggctgggcgaagaaataattcgcttcgaaccttatatgtatta

SEQ ID NO: 219589 - DNA, 75 bp, synthetic construct
  source 1..75: mol_type = other DNA
tgatgcgctcaggaaagaatcatcgctcagtgcattcacatttgatggtccttaccgcctgaccgggcatgacct

SEQ ID NO: 219590 - DNA, 75 bp, synthetic construct
  source 1..75: mol_type = other DNA
tggatgacgatggcccgggcgttagcccggcagatcgcgagcagattttccgtccattctatcgtactgacgaag

SEQ ID NO: 219591 - DNA, 75 bp, synthetic construct
  source 1..75: mol_type = other DNA
gattttctttaccctcgccgaccacctgactttcgccatcgaacgcaaccgcaaagggatcgctattcagaaccg

SEQ ID NO: 219592 - DNA, 75 bp, synthetic construct
  source 1..75: mol_type = other DNA
gattttctttacccttgccgatcacctggcttttgccatcgagcgcagccgcaaagggatcaccattcaaaaccg

SEQ ID NO: 219593 - DNA, 75 bp, synthetic construct
  source 1..75: mol_type = other DNA
gacacgccactgagggtgttcacatcaaactggaacacagagaaaaacaaacccagaggtcaaaaagtagctgcg

SEQ ID NO: 219594 - DNA, 75 bp, synthetic construct
  source 1..75: mol_type = other DNA
gataagtgggcaccgccaggacagcgtttgttattggtgaccaccgaaggccgcgtgatcggcgctgaacgcagc

SEQ ID NO: 219595 - DNA, 75 bp, synthetic construct
  source 1..75: mol_type = other DNA
aatacacgcggcggggcagtgatctcgatacgtactggtacctcaatgatgatggttctgaattcgcgttccgga

SEQ ID NO: 219596 - DNA, 75 bp, synthetic construct
  source 1..75: mol_type = other DNA
gttcctcaccctctgctgtcccgccaggcgttttcagcgtttgcgctcgactggtttgtgtttggtaatgcctat

SEQ ID NO: 219597 - DNA, 75 bp, synthetic construct
  source 1..75: mol_type = other DNA
cgtattgaaaccgaagcgcaacgtctggacagcatgatcaacgacctgttggtgatgtcacgtaatcagcagaaa

SEQ ID NO: 219598 - DNA, 75 bp, synthetic construct
  source 1..75: mol_type = other DNA
tcaggggctgatgattgagcagcatgtcgaagcggagctggcgaacgatccgcccaacgatttaatgtggtggcg

SEQ ID NO: 219599 - DNA, 75 bp, synthetic construct
  source 1..75: mol_type = other DNA
gaaatgcagatcattcgcaactttattggtcaggcggataacgccgatcacccgcagaagaaaaagtatggtcgc

SEQ ID NO: 219600 - DNA, 75 bp, synthetic construct
  source 1..75: mol_type = other DNA
gaaggtgagctgatgcggttacgcgcctggcaacggctgggtattaccccggagccggatgatgagacggagcct

SEQ ID NO: 219601 - DNA, 75 bp, synthetic construct
  source 1..75: mol_type = other DNA
acaacacaaggtgctgcgactggattgcagatgtacgaggcatataacaatggctacccttcgtcttacgggaat

SEQ ID NO: 219602 - DNA, 75 bp, synthetic construct
  source 1..75: mol_type = other DNA
gtaacgcggccacagcgaccaagttgcaaacagctagaactattaacggggtgtcgtttaacggctctgcgaata

SEQ ID NO: 219603 - DNA, 75 bp, synthetic construct
  source 1..75: mol_type = other DNA
ccaagcctttggccttatttttaggcgttccgaagattatattcatcttatcccgactaatgaaggggagggaga

SEQ ID NO: 219604 - DNA, 75 bp, synthetic construct
  source 1..75: mol_type = other DNA
tcagcgtgggcacaggtatataccgctaaggattcaatccctggtgtgaatacaaccggtaatcagaacactact

SEQ ID NO: 219605 - DNA, 75 bp, synthetic construct
  source 1..75: mol_type = other DNA
ggttggggcagggacagcctggaacgtaacagctaatggggtgttgcctgggatgatcgtcattggccccgacaa

SEQ ID NO: 219606 - DNA, 75 bp, synthetic construct
  source 1..75: mol_type = other DNA
atgccaccggtaatcagaacactactggcaacgcagcctctgcaacgaagttgcagacagccagaacaattggag

SEQ ID NO: 219607 - DNA, 75 bp, synthetic construct
  source 1..75: mol_type = other DNA
gcttcaataacaacagagcaattagtgactctgctacgagataatggtgcttttaatgcaaaggcatggatagcg

SEQ ID NO: 219608 - DNA, 75 bp, synthetic construct
  source 1..75: mol_type = other DNA
cgaaaagttaacggtaaagcactgactgcggatatcacattaacgccgaaagatattggtactttaaattcagta

SEQ ID NO: 219609 - DNA, 75 bp, synthetic construct
  source 1..75: mol_type = other DNA
gattcaatccctggtgtgaatacaaccggtaatcagaacactactggtaatgccgcaaccgccacaaaattgcag

SEQ ID NO: 219610 - DNA, 75 bp, synthetic construct
  source 1..75: mol_type = other DNA
ctgctgcgactcgtgcagaagctgccgctgatcgtgctgaagagattgccggtgcagttgcgatggaagacgcaa

SEQ ID NO: 219611 - DNA, 75 bp, synthetic construct
  source 1..75: mol_type = other DNA
catttacacagggcagcaatactctggttggggcaggtacagcctggaacgtaacagctaatggtgtgttgccgg

SEQ ID NO: 219612 - DNA, 75 bp, synthetic construct
  source 1..75: mol_type = other DNA
attacctcttaccggtggtacattatctggaggtttgacatcttctggcgagatcatttcaaaatatgcaaatgg

SEQ ID NO: 219613 - DNA, 75 bp, synthetic construct
  source 1..75: mol_type = other DNA
cgttgtctgttacaggcggattaactggttcattgaatggtaatgcaagtacagcaacgaaattacagacgacaa

SEQ ID NO: 219614 - DNA, 75 bp, synthetic construct
  source 1..75: mol_type = other DNA
cagctacgaagttgcaaacagcgagaaacatcaatggtgttaagtttgatggttcaggcgatatcaacattaata

SEQ ID NO: 219615 - DNA, 75 bp, synthetic construct
  source 1..75: mol_type = other DNA
gcaaacctgccagtggtcgcgccgtattgtctcaggaacaggacggcattaaatcgcacacccacagcgccagcg

SEQ ID NO: 219616 - DNA, 75 bp, synthetic construct
  source 1..75: mol_type = other DNA
agataccgttccgtctggctatgccctgatgcaggggcagacttttgacaaatctgcttacccgaaacttgcagc

SEQ ID NO: 219617 - DNA, 75 bp, synthetic construct
  source 1..75: mol_type = other DNA
cgctcaggggctggtaaaaagcgcggcgctggtgacgcgtctggcgcatggcgtaaagcatggattggactggca

SEQ ID NO: 219618 - DNA, 75 bp, synthetic construct
  source 1..75: mol_type = other DNA
gacgctggggaatatgccgtatttcttcatgcaacgacccgtgatgataaacactggccggaggaacactggcga

SEQ ID NO: 219619 - DNA, 75 bp, synthetic construct
  source 1..75: mol_type = other DNA
cgaccgtctttttgaaacctggcgatctgctggttgcgccgcacgactgctacggtggtagctatcgcctgttcg

SEQ ID NO: 219620 - DNA, 75 bp, synthetic construct
  source 1..75: mol_type = other DNA
tggtaatgcaagtacagcaacgaaattgcagacggcaagatctatcggtggagttgttttcgacggttctgcaaa

SEQ ID NO: 219621 - DNA, 75 bp, synthetic construct
  source 1..75: mol_type = other DNA
aaaggcagcgccacgacggcatccacgaaggcgacagaggcagctggtagtgcgacggcggcagctcagagcaaa

SEQ ID NO: 219622 - DNA, 75 bp, synthetic construct
  source 1..75: mol_type = other DNA
caactcacgtaccgcaaacggcacggatgcgaacgcatacctccagaatgatggtacttgggtttgtggcggtaa

SEQ ID NO: 219623 - DNA, 75 bp, synthetic construct
  source 1..75: mol_type = other DNA
actatcggcggcgtgagctttgatggtactgcgaatattaatttgccaggtgttaatacgactggtaatcagaat

SEQ ID NO: 219624 - DNA, 75 bp, synthetic construct
  source 1..75: mol_type = other DNA
agaggcggcaggcagtgcgacggcagcatctcagagcaaaactgctgctgaatccgctgcgacccgtgcggaagc

SEQ ID NO: 219625 - DNA, 75 bp, synthetic construct
  source 1..75: mol_type = other DNA
tggcggcatcaatggtagtttgaacggtaatgctgcaactgcaacaaaactgcaaacagcacgcacaataggcgg

SEQ ID NO: 219626 - DNA, 75 bp, synthetic construct
  source 1..75: mol_type = other DNA
caagctttcaacgtgggtattggtaaagatcttggccttttaggtgccttttctgtcgatatcacgcaagccaat

SEQ ID NO: 219627 - DNA, 75 bp, synthetic construct
  source 1..75: mol_type = other DNA
gtcagggaaattacaggtttcatggggcaatgataaaaactcaaactgtattgtcgattacaagcttcctgaagt

SEQ ID NO: 219628 - DNA, 75 bp, synthetic construct
  source 1..75: mol_type = other DNA
cttttactattgatgatattaactctgcgactaatggcggtgatctgcaagttacgataaaagaggcagacggca

SEQ ID NO: 219629 - DNA, 75 bp, synthetic construct
  source 1..75: mol_type = other DNA
gtgagtaaacgaattgcgctttttccggcgttattgctggcgttgctggtgattgccgctacggcgctgacctgg

SEQ ID NO: 219630 - DNA, 75 bp, synthetic construct
  source 1..75: mol_type = other DNA
gattgtcgctacggcgctgacctggatgaacttctcgcaggcgctgccgcgtagccagtgggcgcaggctgcctg

SEQ ID NO: 219631 - DNA, 75 bp, synthetic construct
  source 1..75: mol_type = other DNA
ccagtttgctgcgctggcaggggcttgtgttgttggcttaattgtctttggcgtcgcgtgggggaaacggctttc

SEQ ID NO: 219632 - DNA, 75 bp, synthetic construct
  source 1..75: mol_type = other DNA
ttcaaacgccagttacagtatgtcaaacgatttgaaaggcggcatgaccaacctatcaggggttaatgaaggtac

SEQ ID NO: 219633 - DNA, 75 bp, synthetic construct
  source 1..75: mol_type = other DNA
tgtaaaaaacggcgaaagagttaatcttattgcactcacgccagacggtaaacgtagctcacgccgcatggatag

SEQ ID NO: 219634 - DNA, 75 bp, synthetic construct
  source 1..75: mol_type = other DNA
tgatatccgcgtttggtcatgtagtagccaggatagtccacgaggaactgtgctgcatcatccttcagtttatga

SEQ ID NO: 219635 - DNA, 75 bp, synthetic construct
  source 1..75: mol_type = other DNA
actgtattgtcgagtacaagcttccggaagtctctcctggaaccttactgaaccagcagacagcaatctgtcgct

SEQ ID NO: 219636 - DNA, 75 bp, synthetic construct
  source 1..75: mol_type = other DNA
gttgcccgatagccaacatggtttcgctccggtgattcatggtattgcccgtggcaccgcacaagtgagtgtaaa

SEQ ID NO: 219637 - DNA, 75 bp, synthetic construct
  source 1..75: mol_type = other DNA
gtacaggggaggtattagtacttgatggtgctacttttagcgctaaaactgacttgattgatggcacgaatatac

SEQ ID NO: 219638 - DNA, 75 bp, synthetic construct
  source 1..75: mol_type = other DNA
tccggttcgacctacaacgcgaccgatgcgcaggtctggcgcaccggaattgtgatggtgattttgctggcgatt

SEQ ID NO: 219639 - DNA, 75 bp, synthetic construct
  source 1..75: mol_type = other DNA
gtttggtcgtgatgcgcacggctggacgtgggcgagcggggcgctgctcgatgatttaatgccctggcgctggcc

SEQ ID NO: 219640 - DNA, 75 bp, synthetic construct
  source 1..75: mol_type = other DNA
gctgctgttgtggttgctacctcgtctacgcagtattagcgcgccggatatgaaggttaacgatcgggttgcgac

SEQ ID NO: 219641 - DNA, 75 bp, synthetic construct
  source 1..75: mol_type = other DNA
gcaaagcatgttcctgtggagcaccggaacgctgacgcaaaccgactggggcggcgttgagcgtttatggccgca

SEQ ID NO: 219642 - DNA, 75 bp, synthetic construct
  source 1..75: mol_type = other DNA
gataaatttcttactcttcataagctttccgagaaaaaagatcgtgacagggtgttacaaaaaggttttgaagct

SEQ ID NO: 219643 - DNA, 75 bp, synthetic construct
  source 1..75: mol_type = other DNA
acctcgatgacaccctgttccagacccgccgaaaaatggttgatgaacttgcccttgaaccgttccggaccggcg

SEQ ID NO: 219644 - DNA, 75 bp, synthetic construct
  source 1..75: mol_type = other DNA
gtgagtaaacgaattgcgcttttcccggcgttattgctggcgttgttggtggttgccgcatcggcgctcacctgg

SEQ ID NO: 219645 - DNA, 75 bp, synthetic construct
  source 1..75: mol_type = other DNA
ttttgctggcgattaccccgctgtgccgccgctggctgaccattttaccgctgggtggtgataccgcacgagccg

SEQ ID NO: 219646 - DNA, 75 bp, synthetic construct
  source 1..75: mol_type = other DNA
ccagtttgccgcgctggtgggcgcttgtgtcgttggcttaatcgtctttggcgtcgcgtgggggaaacggctttc

SEQ ID NO: 219647 - DNA, 75 bp, synthetic construct
  source 1..75: mol_type = other DNA
cgactgctgctggcgtcgctgattggtgcgttaattctctggctttccgatcaaatcatcctctggctgactcgt

SEQ ID NO: 219648 - DNA, 75 bp, synthetic construct
  source 1..75: mol_type = other DNA
ggcgtactgtttcagcaagtgctgcgtaacccgctggcggaaccgacgacactgggcgtggcaacaggggcgcaa

SEQ ID NO: 219649 - DNA, 75 bp, synthetic construct
  source 1..75: mol_type = other DNA
gtagggattatcggttttatcgggttgttcgcaccactgctggcgaaaatgctgggggcgcggcgtttgctgcca

SEQ ID NO: 219650 - DNA, 75 bp, synthetic construct
  source 1..75: mol_type = other DNA
ttgataggtgcaccgctgctgctgtggctgctgccccgtttacgcagtattagcgcgccggatatgaaggtgaac

SEQ ID NO: 219651 - DNA, 75 bp, synthetic construct
  source 1..75: mol_type = other DNA
ctgaacttcatttaccggaaggacggcaaggacattgtgcccgatcgtatccgttccgcgcttgggcttggctga

SEQ ID NO: 219652 - DNA, 75 bp, synthetic construct
  source 1..75: mol_type = other DNA
tttttacggtgtttgtggatggtgaaaacgaagtgggtaaggtgacctccgtcactccgcccaaactgacgcgca

SEQ ID NO: 219653 - DNA, 75 bp, synthetic construct
  source 1..75: mol_type = other DNA
tttttacgatgtttgtggatggtgaaaacgaagtgggtaaagtgacctccgtcactcggcccaaactgacgcgca

SEQ ID NO: 219654 - DNA, 75 bp, synthetic construct
  source 1..75: mol_type = other DNA
aaaccgacagctaccggggtggtggcatgatgggggcggtaagtattgatctcggcctggacgactccgcgcttg

SEQ ID NO: 219655 - DNA, 75 bp, synthetic construct
  source 1..75: mol_type = other DNA
atgaatactttgaacccgcatttgcggtgctgggaggtgcctgatggctgtgccaaaacatcttcgctttttacg

SEQ ID NO: 219656 - DNA, 75 bp, synthetic construct
  source 1..75: mol_type = other DNA
atgcgagctttgtcatggggggcgcagttcgtgagctgttccttaagtatggcggcacgattgacggcacgctac

SEQ ID NO: 219657 - DNA, 75 bp, synthetic construct
  source 1..75: mol_type = other DNA
ccgatcaaaacggaatcgcgacaacaagcgtgaaaggtgagataacggggagcgtcactgtagcgcagtcacaag

SEQ ID NO: 219658 - DNA, 75 bp, synthetic construct
  source 1..75: mol_type = other DNA
agcgtttcctgacgttcctggcggagcggggcgtcagctgcagcgatccgcagagactgaccgaaagcgccggcc

SEQ ID NO: 219659 - DNA, 75 bp, synthetic construct
  source 1..75: mol_type = other DNA
cagcaggccataaacgatggcgtcatttttgaggccagcgctgacacgccggacttttcccctgagctggcggcg

SEQ ID NO: 219660 - DNA, 75 bp, synthetic construct
  source 1..75: mol_type = other DNA
ctgaacttcatttaccggaaggacggcaaggacattgtgcccgatcgcatccgttccgcgctcgggcttggctga

SEQ ID NO: 219661 - DNA, 75 bp, synthetic construct
  source 1..75: mol_type = other DNA
tctatacaaatagtatctccaacatttacgataaaagatatcgatactgaaattttaactgattcagtaaagaga

SEQ ID NO: 219662 - DNA, 75 bp, synthetic construct
  source 1..75: mol_type = other DNA
ttgattacactcaaaatatcaacggtgattacaaagctactgttacaggagacggagagggtatcgcaacgctga

SEQ ID NO: 219663 - DNA, 75 bp, synthetic construct
  source 1..75: mol_type = other DNA
atggctgttccaaaacatcttcgcttttttacgttgtttgtggatggtgaaaacgaagtgggtaatgtgacttcc

SEQ ID NO: 219664 - DNA, 75 bp, synthetic construct
  source 1..75: mol_type = other DNA
agctaccgcctggttaatcaaggctggagcgttttgcttgtgtttgtatggtattgcacagttggttagtgcggt

SEQ ID NO: 219665 - DNA, 75 bp, synthetic construct
  source 1..75: mol_type = other DNA
tggtcattggtattagctcaacagcacttttcaatatgcaggaatcagataatctttttaaggaattctgttcca

SEQ ID NO: 219666 - DNA, 75 bp, synthetic construct
  source 1..75: mol_type = other DNA
agcactggcttttgctattaagtgggtggcggtcggtatcgctgtgtctccgatgctgtatgggctggcaaaact

SEQ ID NO: 219667 - DNA, 75 bp, synthetic construct
  source 1..75: mol_type = other DNA
ccagtaccgtctgaccacctgcgtgcacagtaactggcagctcaaagcactgcaaaatgcgcggctaaaagcgcc

SEQ ID NO: 219668 - DNA, 75 bp, synthetic construct
  source 1..75: mol_type = other DNA
attttgccgaagcggaacatcctgatggaatttccggcgcgatggcgcgtattgagcaggcggcggaagggctgg

SEQ ID NO: 219669 - DNA, 75 bp, synthetic construct
  source 1..75: mol_type = other DNA
tgttgccgccggatacgctgacggttatccgcgccacgcgccaacgggcactcccgttttagtggatggtgtgcg

SEQ ID NO: 219670 - DNA, 75 bp, synthetic construct
  source 1..75: mol_type = other DNA
tcatgaccgtcgtccgaccaatgctgacattctttgaggggttcatttacgctatcaccccgatcattgctttta

SEQ ID NO: 219671 - DNA, 75 bp, synthetic construct
  source 1..75: mol_type = other DNA
aaagaaacgatgcagtctatcgctcaaagccgttatgggctgactgaatcccaagccgctgtttatgccgaatcg

SEQ ID NO: 219672 - DNA, 75 bp, synthetic construct
  source 1..75: mol_type = other DNA
ctttttttgagaataatgttaacaatatagatatgaataaattacgtgacagggttcataatactattgtgcagg

SEQ ID NO: 219673 - DNA, 75 bp, synthetic construct
  source 1..75: mol_type = other DNA
cgtgagacgttcctggaacaattacatccgggaatgcacattaaccaaagttgatctcaacctaatgtcccttga

SEQ ID NO: 219674 - DNA, 75 bp, synthetic construct
  source 1..75: mol_type = other DNA
ctggtgtcagcatccgacaccttcacaacaatgagccaactccagaatcaaatgggctccatgactaacaccgac

SEQ ID NO: 219675 - DNA, 75 bp, synthetic construct
  source 1..75: mol_type = other DNA
gtctcaactccatgtacgctctttcctcaactggagatgttctgcaacactggattgcaaccggcggcatgttgg

SEQ ID NO: 219676 - DNA, 75 bp, synthetic construct
  source 1..75: mol_type = other DNA
atctgttggcatttactaccgctgcgcgttttagcagcttcagtaaagcggcagacgagttgggtttaaccactt

SEQ ID NO: 219677 - DNA, 75 bp, synthetic construct
  source 1..75: mol_type = other DNA
ccagatttcaacaccaaatgtcagtgccagattttaggtgaaggaattggtttttgccggattacatggtccgtg

SEQ ID NO: 219678 - DNA, 75 bp, synthetic construct
  source 1..75: mol_type = other DNA
tgacgcagtggattaaaaaacaatttatgcctaaagggatattaacggagatttatcaggatttactgcatcggg

SEQ ID NO: 219679 - DNA, 75 bp, synthetic construct
  source 1..75: mol_type = other DNA
ctgatggaaacggcaacccattcgccaatgaggcggtgacattcacgctaccggcagatgtgagcgcaagcttca

SEQ ID NO: 219680 - DNA, 75 bp, synthetic construct
  source 1..75: mol_type = other DNA
aggcatcgggtcactgtacagtgaatggggagatatggggcattacacgactgacgctggttttcaatcaaatat

SEQ ID NO: 219681 - DNA, 75 bp, synthetic construct
  source 1..75: mol_type = other DNA
tctctactgatacgcatggtatagccgaggtcaccatgacgcccgaaagaaacggttcgtatatggtgaaagcat

SEQ ID NO: 219682 - DNA, 75 bp, synthetic construct
  source 1..75: mol_type = other DNA
gaatcagatggtttgtagggctccgctaaagagtttaaataatttagaagcagcggctgtttataaaaaaatcac

SEQ ID NO: 219683 - DNA, 75 bp, synthetic construct
  source 1..75: mol_type = other DNA
gaatcaagtagagtgtcgttctacaagtatgtctcttgcagatttgccagctcaaaccgtttttcaaaatttaaa

SEQ ID NO: 219684 - DNA, 75 bp, synthetic construct
  source 1..75: mol_type = other DNA
cgtcgatgggcgatgtcctccatacgctgcccgcgctaaccgatgcgcagcaggcaatccctggaataacgtttg

SEQ ID NO: 219685 - DNA, 75 bp, synthetic construct
  source 1..75: mol_type = other DNA
ctctttactcgcaacacccgcaatattgagctaacggaatccgggcgttatttttttcgcaaggccaccgatctg

SEQ ID NO: 219686 - DNA, 75 bp, synthetic construct
  source 1..75: mol_type = other DNA
gaggcgatggcgcaatccctgctggttacccgacaaatccataatccgcgccaggattcgcgcatgttactggcg

SEQ ID NO: 219687 - DNA, 75 bp, synthetic construct
  source 1..75: mol_type = other DNA
atatggtgaaagcatccctggcgaatggagcctcacttgagaaacaactggaggctattgatgaaaaactgacac

SEQ ID NO: 219688 - DNA, 75 bp, synthetic construct
  source 1..75: mol_type = other DNA
gcaacggattatcgtctgcaaaactcagaagaaacgtgacaagctccgttccattaccgaggccgaagccgacct

SEQ ID NO: 219689 - DNA, 75 bp, synthetic construct
  source 1..75: mol_type = other DNA
cacaaatgtgaatttaatgatgtgaaccgccccggttttcctggagagtgttttatctgtgaactcaggctgcca

SEQ ID NO: 219690 - DNA, 75 bp, synthetic construct
  source 1..75: mol_type = other DNA
tttctttcatcaacatcagattatgacaataccggaaatggcagcctgggagccctcgccagagacttttttgaa

SEQ ID NO: 219691 - DNA, 75 bp, synthetic construct
  source 1..75: mol_type = other DNA
aatgacctctggcgcgaagtgttcggacgagccttccccagacgtaaggtgggtattatggaagccagccttggt

SEQ ID NO: 219692 - DNA, 75 bp, synthetic construct
  source 1..75: mol_type = other DNA
ggttgtatagcaaataatctcgatttagatgttgtgatgattattattgatggtgccttcagcggaattgttcaa

SEQ ID NO: 219693 - DNA, 75 bp, synthetic construct
  source 1..75: mol_type = other DNA
cttagtcgataaagtattaagaatgttcataccagataaaaatgtagcaaaactaattcataaaacaaatgaatt

SEQ ID NO: 219694 - DNA, 75 bp, synthetic construct
  source 1..75: mol_type = other DNA
cctggtcgataacgtattaaaaaagtttattccaaatgaaaacataacgaaattaattcataaaacgaatgaatt

SEQ ID NO: 219695 - DNA, 75 bp, synthetic construct
  source 1..75: mol_type = other DNA
gcaggcgctgtttgccgatcctgatattctcctgctcgacgaaccaaccaacaacctggacatcgataccattcg

SEQ ID NO: 219696 - DNA, 75 bp, synthetic construct
  source 1..75: mol_type = other DNA
gcgaagaagatggctataaagttgccgatctggaagtgaaatacggcgaaatggacggttactctgcggaagctc

SEQ ID NO: 219697 - DNA, 75 bp, synthetic construct
  source 1..75: mol_type = other DNA
aaaacgaaaccgccgcttgggcggccagcaatgccttgggttgcgacattgatccctttctggccgtggccagcc

SEQ ID NO: 219698 - DNA, 75 bp, synthetic construct
  source 1..75: mol_type = other DNA
ccctacaccgttatgtggaaggtactgaacgtgggtgacgaagcacgcagaagaaatatgatccggggacaaatc

SEQ ID NO: 219699 - DNA, 75 bp, synthetic construct
  source 1..75: mol_type = other DNA
gaagaatatcctgaccagactgtgaaaaaggacagactggttgttcagatcatctttaaaaacttttatgtcgag

SEQ ID NO: 219700 - DNA, 75 bp, synthetic construct
  source 1..75: mol_type = other DNA
tcacgaccgtgagttcgtaagctccctggcgacccgtattctggaaatcaccccggaacgcgtgatcgactttag

SEQ ID NO: 219701 - DNA, 75 bp, synthetic construct
  source 1..75: mol_type = other DNA
cccacctcatgcacctggacatgctgcaatcgccagcatgcaagctatatgtacggggcaagctcgagcattgat

SEQ ID NO: 219702 - DNA, 75 bp, synthetic construct
  source 1..75: mol_type = other DNA
gattcaagcaagcccacttatcgtcaaaatcggtgttgcaaaaacgggagtgaccatagatccgttttccaagcg

SEQ ID NO: 219703 - DNA, 75 bp, synthetic construct
  source 1..75: mol_type = other DNA
tgatgtgaactacagcggactgatttgtaaaaatccgttccacctggaatggcaggggatggaggggcgagagga

SEQ ID NO: 219704 - DNA, 75 bp, synthetic construct
  source 1..75: mol_type = other DNA
cgattgttaagaagtcgtcagccaataatacccaagtcactgagggtgctttttctgcagtcgcaacctttaatt

SEQ ID NO: 219705 - DNA, 75 bp, synthetic construct
  source 1..75: mol_type = other DNA
ctgttcacccgtcgcgcccagcagaaattcgccgactacgattttgtgaagtatagcgagctggatctcgaaaaa

SEQ ID NO: 219706 - DNA, 75 bp, synthetic construct
  source 1..75: mol_type = other DNA
aatcaggccctgctccagctttacgctgccggcgtcgccctaccgtgggccgacctgctggcgggcgatggacaa

SEQ ID NO: 219707 - DNA, 75 bp, synthetic construct
  source 1..75: mol_type = other DNA
tgcgcgttgaagcccgtcatcctgctggcgagtggctgccgctatcgcccccccccccccttcccgcgccacccc

SEQ ID NO: 219708 - DNA, 75 bp, synthetic construct
  source 1..75: mol_type = other DNA
cgcatggccgcaataatggccggaattggtatcaacctgatgagctggccgattctgcttgtgattggtgccatt

SEQ ID NO: 219709 - DNA, 75 bp, synthetic construct
  source 1..75: mol_type = other DNA
gttaaaacaggtgcagggtaacgtcaccggctttgcggaaaaatcaaaagcggcctttatgcagattggcggcgg

SEQ ID NO: 219710 - DNA, 75 bp, synthetic construct
  source 1..75: mol_type = other DNA
gatcctgctggtgattggtgccgttgccttacttgctgccggttgctggctgctgattaaacactgggacacggt

SEQ ID NO: 219711 - DNA, 75 bp, synthetic construct
  source 1..75: mol_type = other DNA
atgcacggtaacgtaaatgaaatttgcgcaaggcttctcgatagttttgatccacagcagcggatcagcctgctg

SEQ ID NO: 219712 - DNA, 75 bp, synthetic construct
  source 1..75: mol_type = other DNA
gggatcaccagcgcgaatcctgcctgggatatgtttagcgcctacaatggcatggccgcaggcttcttcaatggc

SEQ ID NO: 219713 - DNA, 75 bp, synthetic construct
  source 1..75: mol_type = other DNA
gtcgtggaactggattgttcagaaactgaataaaattcctggcgtggatatttcactggccagtgaaaccacgca

SEQ ID NO: 219714 - DNA, 75 bp, synthetic construct
  source 1..75: mol_type = other DNA
accggtggcgattatcttcccgcaaagcgcctccgacggcgtggaagtgctgtatcaggaattcagctttggccg

SEQ ID NO: 219715 - DNA, 75 bp, synthetic construct
  source 1..75: mol_type = other DNA
ccaccctggagaatgttgcatccgcattcgggcgtcacggatatgaactactgattcacccgcacgaccctgcga

SEQ ID NO: 219716 - DNA, 75 bp, synthetic construct
  source 1..75: mol_type = other DNA
acaattcaggcactgcgaatcgcgctggatagtatagagcggagcgacgccatgcttcagggtaaaggagggtga

SEQ ID NO: 219717 - DNA, 75 bp, synthetic construct
  source 1..75: mol_type = other DNA
cgcattgttacctgaaaccgagaaagcaaagatcgaaagttacattgaatttgtcatcaaccagaacgaaaaaaa

SEQ ID NO: 219718 - DNA, 75 bp, synthetic construct
  source 1..75: mol_type = other DNA
aggatgctgggctcatgcgcggcgcaaaatccacgatgtatatatcagtaccaaaagcgcgacggcggaagaagc

SEQ ID NO: 219719 - DNA, 75 bp, synthetic construct
  source 1..75: mol_type = other DNA
gatgaagcggagcatctggcgcttaaagaacatcatctgcgagaaatgaccccttcagatactgccatgcattct

SEQ ID NO: 219720 - DNA, 75 bp, synthetic construct
  source 1..75: mol_type = other DNA
aaagggttatcactgaaaaaagccatgcagcaactgataccgccgggatggacatttgacattgcaccggatgtc

SEQ ID NO: 219721 - DNA, 75 bp, synthetic construct
  source 1..75: mol_type = other DNA
gatctcccgtctgatgggattcctgctggtatgtatgggggtgcagtttattattaacggcatcctggaaatcat

SEQ ID NO: 219722 - DNA, 75 bp, synthetic construct
  source 1..75: mol_type = other DNA
gtccacagtgcgtcagagttcaacctttgctgattgggtactgatggttgcgccgccgctgatctttttcctggt

SEQ ID NO: 219723 - DNA, 75 bp, synthetic construct
  source 1..75: mol_type = other DNA
catccggaacagtatgtctgggttttaaaattgttaaaaacacgcaaatcaaacgaagcggacccgtacccttga

SEQ ID NO: 219724 - DNA, 75 bp, synthetic construct
  source 1..75: mol_type = other DNA
tgctgatggcatcatgtgatagtgaactaaaaatctggtctggaaaaacaaattcatggtggttgtcatgcggag

SEQ ID NO: 219725 - DNA, 75 bp, synthetic construct
  source 1..75: mol_type = other DNA
cgttagtttttcttattttttaaaaaaaccatcttatgccttgttacgtctcagagctatgaattttaggttgaa

SEQ ID NO: 219726 - DNA, 75 bp, synthetic construct
  source 1..75: mol_type = other DNA
ttcaaaagtaaatttaattcaccagttattcccggtgttttgcttgcaagagtggttggtcctgaatccgaagaa

SEQ ID NO: 219727 - DNA, 75 bp, synthetic construct
  source 1..75: mol_type = other DNA
ttatctgatgcggggatttactacttttttgttcataataaagataaacacattatgctgttagcagatgatcct

SEQ ID NO: 219728 - DNA, 75 bp, synthetic construct
  source 1..75: mol_type = other DNA
ggtaagttacacggtacgcgactgagttgtgagatcggagaacaatacaataattcgttaccttcacgattcatt

SEQ ID NO: 219729 - DNA, 75 bp, synthetic construct
  source 1..75: mol_type = other DNA
taaagctgccacgcttaagcttgaaggtcaggcgatatctgaagtaaaaggcaccatgttgacgcttcagggctc

SEQ ID NO: 219730 - DNA, 75 bp, synthetic construct
  source 1..75: mol_type = other DNA
gtacaggccgattttaatctggtggaagattttgacgccaccgaccggggtgaaggcggttttggtcactctggt

SEQ ID NO: 219731 - DNA, 75 bp, synthetic construct
  source 1..75: mol_type = other DNA
gtaccgaccgggctggcgattcatattgccgacccttcactggcggcgatgatgttgccgcgttccgggctgggc

SEQ ID NO: 219732 - DNA, 75 bp, synthetic construct
  source 1..75: mol_type = other DNA
gcgtgcattgggtgctgatattgtgatagcggtcgacctgcagcacgatgctcatttgatgcaacaagatctgct

SEQ ID NO: 219733 - DNA, 75 bp, synthetic construct
  source 1..75: mol_type = other DNA
ccttcctgaaggaaaacgtgaggtgatacaaaaacgttctgaagcagtgatggcttcatgtgacagtgaaatcaa

SEQ ID NO: 219734 - DNA, 75 bp, synthetic construct
  source 1..75: mol_type = other DNA
aatgctgataacaaatcattaactaagttacatggaacgagtcttagctgtgaaattggagaaaaatacaaatcg

SEQ ID NO: 219735 - DNA, 75 bp, synthetic construct
  source 1..75: mol_type = other DNA
ttctggacccgcgcgttgggaaggaatttccactcccgacttatgccacctctggctctgccggacttgacctgc

SEQ ID NO: 219736 - DNA, 75 bp, synthetic construct
  source 1..75: mol_type = other DNA
tcgcaccttcgcaccttcgcaccatcggaacatcaatagacatcaacggacgtttttttatgactgaaatccgcg

SEQ ID NO: 219737 - DNA, 75 bp, synthetic construct
  source 1..75: mol_type = other DNA
agatgagagcgggatcccgtgtatcagcggtgaacgtaaaaccaatgccggcacctatctgccgaccctgtttgc

SEQ ID NO: 219738 - DNA, 75 bp, synthetic construct
  source 1..75: mol_type = other DNA
ccgatgaagacggtattccctgcatcagcggtacccgtaaatccaatgcgtcaagttatctgccaacgatatttg

SEQ ID NO: 219739 - DNA, 75 bp, synthetic construct
  source 1..75: mol_type = other DNA
aagaaaccgcgccggcgatcagggaggaaaaccgcgcggcctgatgtgcagctcggccactttagccggattttt

SEQ ID NO: 219740 - DNA, 75 bp, synthetic construct
  source 1..75: mol_type = other DNA
gatgattctgcgcttaaggctgttcagcgtgatgcgctgcgcttcagtacaacctacggcgccagcgcagtggag

SEQ ID NO: 219741 - DNA, 75 bp, synthetic construct
  source 1..75: mol_type = other DNA
gacccgccagaaagcggcctatgaagcgaaagtgaagggacgtacgaatgaaaaaggggcggaagagagcgccga

SEQ ID NO: 219742 - DNA, 75 bp, synthetic construct
  source 1..75: mol_type = other DNA
ctgtccggtggaatgaatgagacggcagactgggtgaggcagcgttacgggcagacgtttgatgccatttatgtt

SEQ ID NO: 219743 - DNA, 75 bp, synthetic construct
  source 1..75: mol_type = other DNA
agaagctaacgaactctccagtattcagacggtaccaagcctgtatcaacgcgtagtacagccggaccgtaacga

SEQ ID NO: 219744 - DNA, 75 bp, synthetic construct
  source 1..75: mol_type = other DNA
atgattaaaaaactattatctttactggtattaagcgcaatttccgccaccgcctttgccgcgacaccgccgaat

SEQ ID NO: 219745 - DNA, 75 bp, synthetic construct
  source 1..75: mol_type = other DNA
tggttttaagcacaatttccgccacaaccgttgccgctacaccgcctaatacgttggttgtagcccaggggctgg

SEQ ID NO: 219746 - DNA, 75 bp, synthetic construct
  source 1..75: mol_type = other DNA
gcagggcggccgccatcgtcagacctggcgatggtcgacgccggcgcgcatcgtcggatgtggcgatgcgagctc

SEQ ID NO: 219747 - DNA, 75 bp, synthetic construct
  source 1..75: mol_type = other DNA
gtcggcagaaggcttaatggggccgtttgctctgaacgatccggccgcaggtacgaccggccgtggtacaccaac

SEQ ID NO: 219748 - DNA, 75 bp, synthetic construct
  source 1..75: mol_type = other DNA
ggattacttcttcagttgaaggtgtggaaaccgatattaatgccagcaaaacccggcagcagctcaacgatgtcg

SEQ ID NO: 219749 - DNA, 75 bp, synthetic construct
  source 1..75: mol_type = other DNA
gcgcgtttgacagctatctgctgctgcgcgggttgcgaacactggtgccgcgtatggagctggcccagcgcaacg

SEQ ID NO: 219750 - DNA, 75 bp, synthetic construct
  source 1..75: mol_type = other DNA
aatgccgcttttgacctggtgtacttttccggcgcacgttctaagttcgtcccagagtgcatcattcggggcggt

SEQ ID NO: 219751 - DNA, 75 bp, synthetic construct
  source 1..75: mol_type = other DNA
gaatatgggcagcatcagcatggtcgatgcggtttataccgacacgatgccgccagcaggcgtgatgcaggtgct

SEQ ID NO: 219752 - DNA, 75 bp, synthetic construct
  source 1..75: mol_type = other DNA
tacggcggcagctatcgcctgttcgacagcctggcgaaacgcggctgttatcgcgtgctgtttgttgatcaagga

SEQ ID NO: 219753 - DNA, 75 bp, synthetic construct
  source 1..75: mol_type = other DNA
cgaccgtctttttgaaacctggcgatctgctggttgcgccgcacgactgctacggcggcagctatcgcctgttcg

SEQ ID NO: 219754 - DNA, 75 bp, synthetic construct
  source 1..75: mol_type = other DNA
cgtatggagctggcgcagcgcaacgcgcaggcgattgtgaaatatctgcaaacccagccgttggtgaaaaaactg

SEQ ID NO: 219755 - DNA, 75 bp, synthetic construct
  source 1..75: mol_type = other DNA
cgaattacgtagccgcgatggtgggatcataggcgaagcgacgctcgattttatctcccagttccgccttgattt

SEQ ID NO: 219756 - DNA, 75 bp, synthetic construct
  source 1..75: mol_type = other DNA
ggcggttattttgtggggaagctacgcagctccggcgcaattatgcggctggtgggcaagggtggcattgaagcg

SEQ ID NO: 219757 - DNA, 75 bp, synthetic construct
  source 1..75: mol_type = other DNA
ctttccgcaacagaaagcgattgattcaccggaggcgaaaagcaagtcggaagagctggaagatgaacccagtgc

SEQ ID NO: 219758 - DNA, 75 bp, synthetic construct
  source 1..75: mol_type = other DNA
gatgccgtctacaccgacgccccgccgccagtaagcgtgatgcaggtgctgacggaccatcatattcaactggag

SEQ ID NO: 219759 - DNA, 75 bp, synthetic construct
  source 1..75: mol_type = other DNA
caacacagtctgcatcacaatgtgccggaaggcgggtattacgcgaattaccgtcatgaaatattccacgcaatt

SEQ ID NO: 219760 - DNA, 75 bp, synthetic construct
  source 1..75: mol_type = other DNA
atgaaacaaacacaacgtcacaacggtattatcgaactggttaaacagcagggttatgtcagtaccgaggagctg

SEQ ID NO: 219761 - DNA, 75 bp, synthetic construct
  source 1..75: mol_type = other DNA
acagttttctgtaatgctggagagtgaaatatttaaagagcttggtatagtaaattattcaatggttcctgatac

SEQ ID NO: 219762 - DNA, 75 bp, synthetic construct
  source 1..75: mol_type = other DNA
acacacaatcggggaaaagtgattttattgatacctgccattcggagatcataaccggacatgtttcaataacag

SEQ ID NO: 219763 - DNA, 75 bp, synthetic construct
  source 1..75: mol_type = other DNA
aattattaattaatgggagagtccacgaaagaatcgccacacatatagttacaggagctcatgggtatgaaacgc

SEQ ID NO: 219764 - DNA, 75 bp, synthetic construct
  source 1..75: mol_type = other DNA
tatccgcgccatgcgcctaccggcacccctgttttagttgacggcgtgcgcaccatgacagtagggacagtttcg

SEQ ID NO: 219765 - DNA, 75 bp, synthetic construct
  source 1..75: mol_type = other DNA
atatcaactctgcggccaatggtggtgatctgcaagtaaccataaaagaggcagacggcagtattcagacattat

SEQ ID NO: 219766 - DNA, 75 bp, synthetic construct
  source 1..75: mol_type = other DNA
ttttaatggtaattctattaataatcgtagtaaccataatgcaggaaaatccaactatgcatatttgaatttaca

SEQ ID NO: 219767 - DNA, 75 bp, synthetic construct
  source 1..75: mol_type = other DNA
attcgctaccggttgagtcgtgtccgtgcgacggtgattctgcatgttgggtgacgcgtggctggcatgagacta

SEQ ID NO: 219768 - DNA, 75 bp, synthetic construct
  source 1..75: mol_type = other DNA
gctgctggagttcgattaccacgaagttcgcaccaagcgcgccattattgataactcgcgccacgttatgctggt

SEQ ID NO: 219769 - DNA, 75 bp, synthetic construct
  source 1..75: mol_type = other DNA
gctaacacgctgatggtaaaagaggatttccgtattattctcgccggtggcgaattacgcagccgcgatggcggg

SEQ ID NO: 219770 - DNA, 75 bp, synthetic construct
  source 1..75: mol_type = other DNA
atgattctgaaaattgttgtattgaataactctggtaatgttggtaaatctactttgtgtagatcttttttatct

SEQ ID NO: 219771 - DNA, 75 bp, synthetic construct
  source 1..75: mol_type = other DNA
atctatggttatcgcactgtacaatttttccgaacaccagataaagacaatgtgcgaggaaataaacaaactgct

SEQ ID NO: 219772 - DNA, 75 bp, synthetic construct
  source 1..75: mol_type = other DNA
cgaacttatctcactgttcgagctattgggcaagcaggtgaacctctttatccgtagatacgaaagcgagcatgg

SEQ ID NO: 219773 - DNA, 75 bp, synthetic construct
  source 1..75: mol_type = other DNA
atgaacgccatcaccattttcccctcgattataaaacttgagttattcagtagtctcccctcttgcaactcacac

SEQ ID NO: 219774 - DNA, 75 bp, synthetic construct
  source 1..75: mol_type = other DNA
catcagcaacgcggcaaaagccgttgtgcgtcctgacttcgtggacatcgatattcgctttgaccagttccgtga

SEQ ID NO: 219775 - DNA, 75 bp, synthetic construct
  source 1..75: mol_type = other DNA
ggcgatttccttaatgccatcgggatccgcaacgacgatttcgaagacctgaccagcaccgaagtggccgagccg

SEQ ID NO: 219776 - DNA, 75 bp, synthetic construct
  source 1..75: mol_type = other DNA
catcagcaacgcggccaaagccgttgtgcgtcctgacttcgtggatatcgatattcgcttcgaccagttccgtga

SEQ ID NO: 219777 - DNA, 75 bp, synthetic construct
  source 1..75: mol_type = other DNA
atgccggatgctgaccggcacacacagagccggtggcgtgagctggcgcgccggtgaccttgtggtgccactgta

SEQ ID NO: 219778 - DNA, 75 bp, synthetic construct
  source 1..75: mol_type = other DNA
gccgccgttgctgaaacagacgctgcccggaagaacgccgccgcactggcacaaaccctgatggcgaaaacctgt

SEQ ID NO: 219779 - DNA, 75 bp, synthetic construct
  source 1..75: mol_type = other DNA
aacggagagcgttacatccgctgcccgtttgaagacggtcacagcactggcggtgacccgaccagcacagtttac

SEQ ID NO: 219780 - DNA, 75 bp, synthetic construct
  source 1..75: mol_type = other DNA
gcaacccggagtggctgtggtcatgcagtcacggagcaggacgcagccagcgtcggcaggccatgcgctcacgcg

SEQ ID NO: 219781 - DNA, 75 bp, synthetic construct
  source 1..75: mol_type = other DNA
aagagaatggtccggaagataccacgcaagatgacgatatgaagcagagcatcgtcaaatggctgttcgagctga

SEQ ID NO: 219782 - DNA, 75 bp, synthetic construct
  source 1..75: mol_type = other DNA
gcaactggataagccagttgatgacgtcagccgtatgcttcgtcttaacgagcgcattacctcggtagacacccc

SEQ ID NO: 219783 - DNA, 75 bp, synthetic construct
  source 1..75: mol_type = other DNA
aattgcgggtataagcgtgcccaaaggcgaattggggggaaaatgactcgaatttttgaggcggtgtcccaacct

SEQ ID NO: 219784 - DNA, 75 bp, synthetic construct
  source 1..75: mol_type = other DNA
gtttgccggatgaacctccggctattactggtgagcagcttgaaacgctgtggcagcgcctggctgaacaactcc

SEQ ID NO: 219785 - DNA, 75 bp, synthetic construct
  source 1..75: mol_type = other DNA
tgctgtggcgtcatccgatcctaaccgtacgccatctcattgatgacaagcgtccggtgccggagttgccagaaa

SEQ ID NO: 219786 - DNA, 75 bp, synthetic construct
  source 1..75: mol_type = other DNA
gtgatccgccgcgctggcgatgtgatcccgcaggtggttaacgtcgtgctttctgaacgcccggaggatacccgt

SEQ ID NO: 219787 - DNA, 75 bp, synthetic construct
  source 1..75: mol_type = other DNA
ccgccaaacaggccgggagcacttacccaatacatttgcgtttatacgtaattcaggaatttcaggaatcattcc

SEQ ID NO: 219788 - DNA, 75 bp, synthetic construct
  source 1..75: mol_type = other DNA
cttgcagatacgcttcagaccgcaaccggcgtaacaacaaaaaccctcttcaactcaatgcttgtttgggaaggt

SEQ ID NO: 219789 - DNA, 75 bp, synthetic construct
  source 1..75: mol_type = other DNA
aagcgcagaaaaaagccgaggctgctgctgcggcgctgaagaagaaagctgaagcggcagaagcagctgcagctg

SEQ ID NO: 219790 - DNA, 75 bp, synthetic construct
  source 1..75: mol_type = other DNA
ctttccgcagcataaagcgactgattcacccgaggcaaaaagtaaatcagaagagctggaggatgaacccagcgc

SEQ ID NO: 219791 - DNA, 75 bp, synthetic construct
  source 1..75: mol_type = other DNA
tgctgtggcgtcatccgatcttaaccgtgcgtcatctgattgatgacaagcgtccggtgccggaattgccggaaa

SEQ ID NO: 219792 - DNA, 75 bp, synthetic construct
  source 1..75: mol_type = other DNA
cgcctgatccatctggatctcgagcattccagcggaagctatcgacttacccgccgaacgggccgggagcactca

SEQ ID NO: 219793 - DNA, 75 bp, synthetic construct
  source 1..75: mol_type = other DNA
cgtctgaaaagcaacgaaaaagtgacctggtgctgtgagctgaaactggatggtcttgccgtcagcattctgtat

SEQ ID NO: 219794 - DNA, 75 bp, synthetic construct
  source 1..75: mol_type = other DNA
gtgatccgccgcgctggcgatgtgatcccgcaggtggttaacgtcgtgctttctgaacgccctgaagacacccgt

SEQ ID NO: 219795 - DNA, 75 bp, synthetic construct
  source 1..75: mol_type = other DNA
gaccgtccgacgctgggctttgatattgacggcgtggtgattaaggtcaactcactggcacagcaggagcagctt

SEQ ID NO: 219796 - DNA, 75 bp, synthetic construct
  source 1..75: mol_type = other DNA
ggcgttggtgtgctggaaggcggtgagctgccagatactcatcttggtcgtttactgcaatttaaaaagtgggga

SEQ ID NO: 219797 - DNA, 75 bp, synthetic construct
  source 1..75: mol_type = other DNA
tgctttcaacaaacgcgttcaggatcgtctgaaaagtaacgaaaaagtgacctggtgctgtgagctgaagctcga

SEQ ID NO: 219798 - DNA, 75 bp, synthetic construct
  source 1..75: mol_type = other DNA
gaactgattacccctgattcacccactcaacgtgttggtgcagcaccgttagcggctttcagccagatccgtcat

SEQ ID NO: 219799 - DNA, 75 bp, synthetic construct
  source 1..75: mol_type = other DNA
agctgatccagatcagccccccgttccgccacaatcggtaacgtcacggtcaaacgatccagaagcagaccagat

SEQ ID NO: 219800 - DNA, 75 bp, synthetic construct
  source 1..75: mol_type = other DNA
cagtgaaatgagtgcagcgctgggtcaggtattcggccaagctattgcgcaggttgtacaaaaaaacctgaatat

SEQ ID NO: 219801 - DNA, 75 bp, synthetic construct
  source 1..75: mol_type = other DNA
gatgattgcgtggcaacgtcttgtgttcccggacggtaaagctctggatttagggtctatgccgggtgctgatat

SEQ ID NO: 219802 - DNA, 75 bp, synthetic construct
  source 1..75: mol_type = other DNA
atgtcggtaataaggcaataattaccttgatacagaagaatggtgagcccgtaccgtttggtagtgtggtgacat

SEQ ID NO: 219803 - DNA, 75 bp, synthetic construct
  source 1..75: mol_type = other DNA
cgtggcgcaaggctggcagaatcaaaacagaggagagtcaggtaacattaaccttaactatcgtggaccttatgc

SEQ ID NO: 219804 - DNA, 75 bp, synthetic construct
  source 1..75: mol_type = other DNA
ttgctgtagaggctgtaagcattgctgaagcagaagcccctcttgaaagaaaagtcattaacgatgaacagatgg

SEQ ID NO: 219805 - DNA, 75 bp, synthetic construct
  source 1..75: mol_type = other DNA
gccacaggtgcatctccaggaaggtatgaagtagatgtgattttaaacggtaagcttgtagataaacatgtggaa

SEQ ID NO: 219806 - DNA, 75 bp, synthetic construct
  source 1..75: mol_type = other DNA
ttcatccgaaagatgaacaggaggctgtgatgcgtacgctggaactggaatctgaacccgtcaccaaattgttgc

SEQ ID NO: 219807 - DNA, 75 bp, synthetic construct
  source 1..75: mol_type = other DNA
ctgtcaccagtccgtctccggcctgcgtcaccatctctgtgctgtcacgtgaaaataacggtgttgcatccgaag

SEQ ID NO: 219808 - DNA, 75 bp, synthetic construct
  source 1..75: mol_type = other DNA
aacaaatttcagcaccacatagccaatacgaacttcgtgcaggttgggtcattcctggcgtcatgattagtggca

SEQ ID NO: 219809 - DNA, 75 bp, synthetic construct
  source 1..75: mol_type = other DNA
gcaagtgatgtaaaagttttaaataactctagtatatatacagattggcgtggatatgcggttgtaccaagtttg

SEQ ID NO: 219810 - DNA, 75 bp, synthetic construct
  source 1..75: mol_type = other DNA
tatctttgagcaatgggggatcgactcaagaaaagtaaaattaagcgatgggcatgttggtatattagaaaaaaa

SEQ ID NO: 219811 - DNA, 75 bp, synthetic construct
  source 1..75: mol_type = other DNA
cgtcatggtacacccagcgacgttgaagggcagaagcttttagtgaaaaaaggccagattatttttggtaagcgt

SEQ ID NO: 219812 - DNA, 75 bp, synthetic construct
  source 1..75: mol_type = other DNA
gccctggccaacacttgccaggcggcgcaccagaaatggtgataaactctataccaacatcaactccagtaacta

SEQ ID NO: 219813 - DNA, 75 bp, synthetic construct
  source 1..75: mol_type = other DNA
cggtcagtcgcacggatgcgcggggcggaacggttgcgctggcgcacgatgcgcgcggtcagctgacgcgttaca

SEQ ID NO: 219814 - DNA, 75 bp, synthetic construct
  source 1..75: mol_type = other DNA
cggcgaggttgcgctggtgctcgatgcgcgcggtcaactgacgcgttacaccgactgttcagggcgcaccacgga

SEQ ID NO: 219815 - DNA, 75 bp, synthetic construct
  source 1..75: mol_type = other DNA
aacagcgcccggacggtctgatacggatgtttgtgctgaatgcgggcgggtatccggtcatcatccagacgcagg

SEQ ID NO: 219816 - DNA, 75 bp, synthetic construct
  source 1..75: mol_type = other DNA
acgtgtttgatgagtttgatgaccacggcgtcgcgccgttactttttatggaaacaccataccggcagcgaattg

SEQ ID NO: 219817 - DNA, 75 bp, synthetic construct
  source 1..75: mol_type = other DNA
ggaaaaattctgaccggctctcccaatgtcagcaccaacagccgacctgctgcccgcgccgtactgagtacggtg

SEQ ID NO: 219818 - DNA, 75 bp, synthetic construct
  source 1..75: mol_type = other DNA
tgcatctaatccggataccctgaaggcgctttgtgcagccattatccatcatgaaaacggtagccagccatacag

SEQ ID NO: 219819 - DNA, 75 bp, synthetic construct
  source 1..75: mol_type = other DNA
acagttgccgagcgaagataagatgaaagacgctttcgacaaacaggtaggtaacgcatttgcccgtaacccgca

SEQ ID NO: 219820 - DNA, 75 bp, synthetic construct
  source 1..75: mol_type = other DNA
taccgacaaaaaataaacgttataccggtgtagcctggttcgatgctttaagtgaatcagatcaggccagcgtgt

SEQ ID NO: 219821 - DNA, 75 bp, synthetic construct
  source 1..75: mol_type = other DNA
tacgggtatgatgaacaggggctggcggtcagccgcacggatgcgcggggcggcgaggttgcgctggtgctcgat

SEQ ID NO: 219822 - DNA, 75 bp, synthetic construct
  source 1..75: mol_type = other DNA
tggttaaataatttagaggcaatgaaaatagctaaaaatggaggaagaggtgtaaccagtaatgaaaaacgacca

SEQ ID NO: 219823 - DNA, 75 bp, synthetic construct
  source 1..75: mol_type = other DNA
tcggggcgcaccacggactatgactacgatgaagacggcaacctgacgacggtgacggacgcggaggggaaagcg

SEQ ID NO: 219824 - DNA, 75 bp, synthetic construct
  source 1..75: mol_type = other DNA
ggccggaaacaacaataccgaacgcctgaccatcaccccggcggatgactccactatcccgccgacacctgccgt

SEQ ID NO: 219825 - DNA, 75 bp, synthetic construct
  source 1..75: mol_type = other DNA
cggtcgcaagtccgtcgccagcctgcgtgacgattaccgtgctatcgcgcgagggtgacggcactgctagtcctg

SEQ ID NO: 219826 - DNA, 75 bp, synthetic construct
  source 1..75: mol_type = other DNA
gggcgtgatatccgtctgtcagccatttatgcggcgctgcatgttgagggggtgcagcgtgtcgagctgacatca

SEQ ID NO: 219827 - DNA, 75 bp, synthetic construct
  source 1..75: mol_type = other DNA
tggcgatccggactttgcggcttattataaagaaccgtcgaaaaccattcctgacccgaaactcaacctggttta

SEQ ID NO: 219828 - DNA, 75 bp, synthetic construct
  source 1..75: mol_type = other DNA
gaacgcaaagcgacgctggtctcgctttaccctgaagaacaacaggacgctgttgcgcgtactctcgcccttgag

SEQ ID NO: 219829 - DNA, 75 bp, synthetic construct
  source 1..75: mol_type = other DNA
taccggaacccgccatcatcgcggagcctgactttgaggcaattctggctgacacaaaggccatgatgattgcga

SEQ ID NO: 219830 - DNA, 75 bp, synthetic construct
  source 1..75: mol_type = other DNA
gcttaagcgtcgccgggtcggtgggtgcctatcagtatcatggccgcagtgccgacgggcgtgtcgcggatatct

SEQ ID NO: 219831 - DNA, 75 bp, synthetic construct
  source 1..75: mol_type = other DNA
tatctgttcttccggccagtgcgtcagataaatccttccgcgtatcgtcagctgaccgggccaaagccacagtta

SEQ ID NO: 219832 - DNA, 75 bp, synthetic construct
  source 1..75: mol_type = other DNA
gatgagggcaccgtgaggggatataaaatcaaatacccaaatggtgtcgtcgatgtgtttaagggctgggtgagc

SEQ ID NO: 219833 - DNA, 75 bp, synthetic construct
  source 1..75: mol_type = other DNA
acagaagagctacagacagagaagaaactgattcagaaagaaattaataatttaaagcagttagtatctaaagaa

SEQ ID NO: 219834 - DNA, 75 bp, synthetic construct
  source 1..75: mol_type = other DNA
gaagagaaagaaaatgctaaaattgatgctgatattaaagcggaagtagagcgtggtaagcgtgaagagctggtc

SEQ ID NO: 219835 - DNA, 75 bp, synthetic construct
  source 1..75: mol_type = other DNA
attcttgcatgggtatggttcaattggcctaacttagcaatgctctttatgagtgatgctcctgttaagtttcga

SEQ ID NO: 219836 - DNA, 75 bp, synthetic construct
  source 1..75: mol_type = other DNA
gtacatcgccagtcagacgcggctcggtcgggatattcgccgtagtgctatttttgccgcgttgcatgttgaggg

SEQ ID NO: 219837 - DNA, 75 bp, synthetic construct
  source 1..75: mol_type = other DNA
gtgcaaccagcccggcgcctgcagaggtggtgctgactgtccttagccgcgaaggcgatggaactgcagaaaaag

SEQ ID NO: 219838 - DNA, 75 bp, synthetic construct
  source 1..75: mol_type = other DNA
tacctgcaccggatgtggtcgaggagctggactttgaaaccattcttgccgaacgcaaggcgacactgatttccc

SEQ ID NO: 219839 - DNA, 75 bp, synthetic construct
  source 1..75: mol_type = other DNA
ggtcccgaaagcgaacccattcgcgctgccgctgtgaaaaagctggaagcgtatatcacggcacagcaccggctg

SEQ ID NO: 219840 - DNA, 75 bp, synthetic construct
  source 1..75: mol_type = other DNA
gaaaacaacggcgtcgcctctgatgagctgctcgccgtggtacgtaacgcacttaacgccgaagatgtcaggccg

SEQ ID NO: 219841 - DNA, 75 bp, synthetic construct
  source 1..75: mol_type = other DNA
ctggcgtcagcgggtgaacgaagccgcgcaggcagtgacgctggcctactccgccggtaacgacctcgacgtcgt

SEQ ID NO: 219842 - DNA, 75 bp, synthetic construct
  source 1..75: mol_type = other DNA
tcagagccgattgttaagctgctgcaggaaaacgcctaccgtgaagttatctggcgtcagcgggtgaacgaagcc

SEQ ID NO: 219843 - DNA, 75 bp, synthetic construct
  source 1..75: mol_type = other DNA
tacattcttccgggtatcggcattgtgctggggctgacggcggtgttcggtgcgctgggctggatcctgcgccgt

SEQ ID NO: 219844 - DNA, 75 bp, synthetic construct
  source 1..75: mol_type = other DNA
gcgcaggcggtgacgctggcctactccgccggtaacgacctcgacgtcgtggccgggaacaacaataccgaacgc

SEQ ID NO: 219845 - DNA, 75 bp, synthetic construct
  source 1..75: mol_type = other DNA
acgcggttctctataccttaaccaacagcctgaccggtgcaggcgtcagcaaatatatcctgccaggtattggca

SEQ ID NO: 219846 - DNA, 75 bp, synthetic construct
  source 1..75: mol_type = other DNA
ctgcgtattcagcaggcttttgagggcttaagcgtcgccgggtcagtgggagcttatcagtatcatggtcgcagt

SEQ ID NO: 219847 - DNA, 75 bp, synthetic construct
  source 1..75: mol_type = other DNA
tttatgcggcgctgcatgttgaaggggtgcagcgtgtcgagctggcatcaccgcagaccgacatagtgctgagta

SEQ ID NO: 219848 - DNA, 75 bp, synthetic construct
  source 1..75: mol_type = other DNA
cagccgagattgtgccgtaccagattgacgcgacgctctacgtttaccccggtcccgaatctgaacccatcaggc

SEQ ID NO: 219849 - DNA, 75 bp, synthetic construct
  source 1..75: mol_type = other DNA
cgtttgataaaaccggtacgctaaccgtcggtaaaccgcgcgttaccgcgatgcatccggcaaccggtgttagcg

SEQ ID NO: 219850 - DNA, 75 bp, synthetic construct
  source 1..75: mol_type = other DNA
ggtgccgccgctgctgtttgccgcaagctggcaggagtggatttataaagggctgacgctgctgctgattggctg

SEQ ID NO: 219851 - DNA, 75 bp, synthetic construct
  source 1..75: mol_type = other DNA
cttttagggatgaccggcctgtggctggcagtgctggcagatacgggggcgacagtgctggtaacggcgaatgcg

SEQ ID NO: 219852 - DNA, 75 bp, synthetic construct
  source 1..75: mol_type = other DNA
aaagagaatctgccgctgattacgcttattgtgatgatggcaatcagttgggggctggagcaatttaatcatccg

SEQ ID NO: 219853 - DNA, 75 bp, synthetic construct
  source 1..75: mol_type = other DNA
attccctgcgcgatgaacaggccaccgacgaaccacaagaatcacgcctgaaagagaatctgccgctgattacgc

SEQ ID NO: 219854 - DNA, 75 bp, synthetic construct
  source 1..75: mol_type = other DNA
ctcttgggtatgaccggcctgtggcttgcggtgctggcagacacgggggcgacggtgctggtaacggcgaatgcg

SEQ ID NO: 219855 - DNA, 75 bp, synthetic construct
  source 1..75: mol_type = other DNA
gttgaacaaggaacagcttggtagtgtttcactgcattctatgcgcggcctgatgaaaaatatctttgaggttaa

SEQ ID NO: 219856 - DNA, 75 bp, synthetic construct
  source 1..75: mol_type = other DNA
atgaacgacatcaaaacagcttattcactcggcagcgatggcatgttaatcactcgctacacagaagacgcaagt

SEQ ID NO: 219857 - DNA, 75 bp, synthetic construct
  source 1..75: mol_type = other DNA
aatgatttaggtgtacaggtagctatagctgtgcttaatgacgcgcggaaagacgcacagctaatgccagaacct

SEQ ID NO: 219858 - DNA, 75 bp, synthetic construct
  source 1..75: mol_type = other DNA
aaatgccgtgcgccagcttgcaggcgtgaatcaggtgcaggtgttgttcgccaccgaaaaactggtggttgatgc

SEQ ID NO: 219859 - DNA, 75 bp, synthetic construct
  source 1..75: mol_type = other DNA
attcatccggcaacgggcgttagcgaatctgaactgctggcgctggctgctgccgtagagcaaggtgcgacgcat

SEQ ID NO: 219860 - DNA, 75 bp, synthetic construct
  source 1..75: mol_type = other DNA
gtttcactgcattctatgcgcggcctgatgaaaaatatctttgaggttaagatgttgcagaaatgcattgaggaa

SEQ ID NO: 219861 - DNA, 75 bp, synthetic construct
  source 1..75: mol_type = other DNA
aaacgttaatgagcgtagccgccattggcgcgctgtttattggcgcaacggcggaagctgcgatggtgttattgc

SEQ ID NO: 219862 - DNA, 75 bp, synthetic construct
  source 1..75: mol_type = other DNA
gaacattccactaagccaaagtgtgagaatccagcctggttccgtcccgacagctataaggcgctgggcggacag

SEQ ID NO: 219863 - DNA, 75 bp, synthetic construct
  source 1..75: mol_type = other DNA
cgctggagcagctgctggacaaggccgaatccgaagggcgcatcttcaaaagcgaacgtggatatatggaaggac

SEQ ID NO: 219864 - DNA, 75 bp, synthetic construct
  source 1..75: mol_type = other DNA
caatcagccggtgaagattgactataaccaccagtcactgattgaggggcatgcggcaccggctgccggttttgt

SEQ ID NO: 219865 - DNA, 75 bp, synthetic construct
  source 1..75: mol_type = other DNA
atgattaagatgcctgtgacggttgaggtgtggggcgtggattctctggctgagtgtctggatgcagtggggccg

SEQ ID NO: 219866 - DNA, 75 bp, synthetic construct
  source 1..75: mol_type = other DNA
cagcagaagagcttatagcgctgagtgaagcggcagagcaggcgatgttcaccaaagggatggaaatccacgtcc

SEQ ID NO: 219867 - DNA, 75 bp, synthetic construct
  source 1..75: mol_type = other DNA
tgctgtgaattgcatggtgaagtttgagcacattgagcaggcggttcctttcactgcaacagccagcgataccga

SEQ ID NO: 219868 - DNA, 75 bp, synthetic construct
  source 1..75: mol_type = other DNA
atgggttacctctgataaagaaaaaaggtgattttaacaaagagataaaaaaacaaaagacatatcttgccgcat

SEQ ID NO: 219869 - DNA, 75 bp, synthetic construct
  source 1..75: mol_type = other DNA
gattatttatttatgtcatcaggtcatgatatttatcatgatgcagagtttggaaaagatatacctgaaattgta

SEQ ID NO: 219870 - DNA, 75 bp, synthetic construct
  source 1..75: mol_type = other DNA
gaatagctgaaggtaatggactttacattagatatattaagtattttggtaatatagttgtgtttgcattaatta

SEQ ID NO: 219871 - DNA, 75 bp, synthetic construct
  source 1..75: mol_type = other DNA
gcacggcggcgctgtctgccctcaccgggatcaaaacccgtgcggatgcacacgacaacctgaaaacacaggtcg

SEQ ID NO: 219872 - DNA, 75 bp, synthetic construct
  source 1..75: mol_type = other DNA
cgggatcaaaacccgtgcggatgcacacgacaacctgaaaacacaggtcgccagtctgtcggcagagctggaaac

SEQ ID NO: 219873 - DNA, 75 bp, synthetic construct
  source 1..75: mol_type = other DNA
ttgattttatcagcgcgaaatgggctgaattcgaagcattttgtgaagacaacggagacaacccggacgacatca

SEQ ID NO: 219874 - DNA, 75 bp, synthetic construct
  source 1..75: mol_type = other DNA
ttcccggtcatcatccagacacagggtacagaaggcggggggcgtaatgagcgacaggagcgtgacgcgctgggt

SEQ ID NO: 219875 - DNA, 75 bp, synthetic construct
  source 1..75: mol_type = other DNA
gcatattgaacttgtgaagggcgggcgtcccggtaacctggtggaatatcgttacgatgataacgggcaactgac

SEQ ID NO: 219876 - DNA, 75 bp, synthetic construct
  source 1..75: mol_type = other DNA
ttttgaatcagcgttaggaatgaataagagtcatgctgatgatttgattgctcaaataaaaaaaggtgttcaaaa

SEQ ID NO: 219877 - DNA, 75 bp, synthetic construct
  source 1..75: mol_type = other DNA
tgattataacggtctgcaacttgcagcccatctgacctggaattctgattccttctgccgcccgctatccggggc

SEQ ID NO: 219878 - DNA, 75 bp, synthetic construct
  source 1..75: mol_type = other DNA
tgaggtgcgaaatgcccagtactccggaagagaagaaaaaggtccttactcgagttcgtcgtattcgggggcaga

SEQ ID NO: 219879 - DNA, 75 bp, synthetic construct
  source 1..75: mol_type = other DNA
aagggctgagcgttgccgggccaacggcggcatatgaatttttcggcctgtctgctgatgggcgcgttgctgatg

SEQ ID NO: 219880 - DNA, 75 bp, synthetic construct
  source 1..75: mol_type = other DNA
ccgcctttgccttttttacctgtggtttttttgccggtctggtgctgggttttcttgctgaccagatagcgtccg

SEQ ID NO: 219881 - DNA, 75 bp, synthetic construct
  source 1..75: mol_type = other DNA
cggacatctgctccagacggcactggacggtatcacggtcagtgaatatgagcgtgacagtctgcaccgtcaggt

SEQ ID NO: 219882 - DNA, 75 bp, synthetic construct
  source 1..75: mol_type = other DNA
ttctgctgccggaaacggatttcaccctgccgggccgcctgcctgttacctgttcgcgcttttatgccagccatc

SEQ ID NO: 219883 - DNA, 75 bp, synthetic construct
  source 1..75: mol_type = other DNA
atctgttcagatattatgcgccggagtgcgggcggtttatcagccaggacccgatagggctggcgggtgggctga

SEQ ID NO: 219884 - DNA, 75 bp, synthetic construct
  source 1..75: mol_type = other DNA
tcaccttcatcggtgtacagggacgggaactgagttatccgaaagcgatgctgacgccgggccaccagatattcg

SEQ ID NO: 219885 - DNA, 75 bp, synthetic construct
  source 1..75: mol_type = other DNA
cagtcagccgcacggatgcgaggggcggcctggttgcgctggtgcacgatgcgcgcggtcaactggtgcgttaca

SEQ ID NO: 219886 - DNA, 75 bp, synthetic construct
  source 1..75: mol_type = other DNA
aatggaataattggctgacaacccgcacggggattgcctttgcggataatacgccggtctttgctcgccaggatt

SEQ ID NO: 219887 - DNA, 75 bp, synthetic construct
  source 1..75: mol_type = other DNA
aaggaaagcaaggaagccagccgccgggtcgagttgcgcatgcagttcttcgggcttaaagataaacgtgataag

SEQ ID NO: 219888 - DNA, 75 bp, synthetic construct
  source 1..75: mol_type = other DNA
taccgacaccgacggttcgtacttatacaacctacatctctccctgcaacgctctgaatgggtaatgtgtagtct

SEQ ID NO: 219889 - DNA, 75 bp, synthetic construct
  source 1..75: mol_type = other DNA
caagggggcaggatatttccagattgtgtgaacgcctggaactgcatgcccgcaatgtgaacaaaaacatcgtag

SEQ ID NO: 219890 - DNA, 75 bp, synthetic construct
  source 1..75: mol_type = other DNA
taattcacatagaaaggatcagaaaatcaaacagcgatgactttgaaagaaagaaagaacaacttaaatatcact

SEQ ID NO: 219891 - DNA, 75 bp, synthetic construct
  source 1..75: mol_type = other DNA
taatgcacatagaaagggtcagaaagtcaaatagcgatgactttgaaagaaagaaagaacaacttaaatatcact

SEQ ID NO: 219892 - DNA, 75 bp, synthetic construct
  source 1..75: mol_type = other DNA
atgtttggaaacgcatttggcgttaaaaaacgccgcagcgatgaagcagaaaaaccattctggatctcctatgcc

SEQ ID NO: 219893 - DNA, 75 bp, synthetic construct
  source 1..75: mol_type = other DNA
ccacagtgctggcgctgctggatgagctggaagccaaagaccagaggattgctgtgctgaccgaatcgctcaagc

SEQ ID NO: 219894 - DNA, 75 bp, synthetic construct
  source 1..75: mol_type = other DNA
ccattggccgacgtcgtgctcgataaaacccaggccgcgtactgcaccgaaaccagtgttgtgatcgggggctct

SEQ ID NO: 219895 - DNA, 75 bp, synthetic construct
  source 1..75: mol_type = other DNA
atgataaaacggacgttattagcagcagcaatttttagtgcatttcctgcttgtgccgggttaacttccattacc

SEQ ID NO: 219896 - DNA, 75 bp, synthetic construct
  source 1..75: mol_type = other DNA
aaaacccttctggatctcctatgcagatctgatgactgccatgatggtgttgtttctggtggtgatggtggcgtc

SEQ ID NO: 219897 - DNA, 75 bp, synthetic construct
  source 1..75: mol_type = other DNA
atatcgatacctggaaaaccattgataactacctcgacctgcgcgtaacgcgcaagggcgaggcagattttttac

SEQ ID NO: 219898 - DNA, 75 bp, synthetic construct
  source 1..75: mol_type = other DNA
cttgaccttggcggtgactgtgacgcgccagaagtgatgattgcaggcaatcctgacattcagcaggcgcagaag

SEQ ID NO: 219899 - DNA, 75 bp, synthetic construct
  source 1..75: mol_type = other DNA
aacctcttccactggtctggtttatcaggtagtagaagccggtaaaggcgaagcccgaaagacagcgatactgtt

SEQ ID NO: 219900 - DNA, 75 bp, synthetic construct
  source 1..75: mol_type = other DNA
agcccacaagcggtggagaaagattgtccacagagcaaaaacaaaacatcagccgtaaaatctgcctgctgcatg

SEQ ID NO: 219901 - DNA, 75 bp, synthetic construct
  source 1..75: mol_type = other DNA
atttttaccatcaggtgatcggtgagccttatcgacataaggtgctgtttgttatctgccagtcggataaggtcg

SEQ ID NO: 219902 - DNA, 75 bp, synthetic construct
  source 1..75: mol_type = other DNA
gctatatgaccgtcgtggatttacccggtgtaggcgaaagtggcgttcgcgataccgagtatgctgcgctgtacc

SEQ ID NO: 219903 - DNA, 75 bp, synthetic construct
  source 1..75: mol_type = other DNA
ttaacctgattgatgaaagcgaatttacccagaaagccggtattgcgacagataatatcgttgctgttgggatga

SEQ ID NO: 219904 - DNA, 75 bp, synthetic construct
  source 1..75: mol_type = other DNA
gggagattatcaacttaatgttcagccagcgtatttcctggctagccgctgtgcgtatcatgcataaattatcgc

SEQ ID NO: 219905 - DNA, 75 bp, synthetic construct
  source 1..75: mol_type = other DNA
tgaaagcactggcgaaagaactgaacgtgccggtggtggcgctgtcccagttgaaccgttctctggaacaacgtg

SEQ ID NO: 219906 - DNA, 75 bp, synthetic construct
  source 1..75: mol_type = other DNA
cgctgcagaggtcgctttctggcctaccacagtgggcatcagaacgtattctcaagcaaataaaccagcttactc

SEQ ID NO: 219907 - DNA, 75 bp, synthetic construct
  source 1..75: mol_type = other DNA
gtccacggaacagaaacgaaacatcagccgtaaaatctgccagttgcatgaactctttcagccggtaaatccggt

SEQ ID NO: 219908 - DNA, 75 bp, synthetic construct
  source 1..75: mol_type = other DNA
tgttgccacattctgtgtttctggcctatatctgaaatccttgtgcctgtccgttgcctgctgttgtggggtatt

SEQ ID NO: 219909 - DNA, 75 bp, synthetic construct
  source 1..75: mol_type = other DNA
acccagctcatcaaccaggtcaattttcgcctgcctcgcctggagaatgagcgggaagctaaccattttgatgcc

SEQ ID NO: 219910 - DNA, 75 bp, synthetic construct
  source 1..75: mol_type = other DNA
gtgaacagcttccccaactggacctggtgctgtggttgattaaaggcgatgatcgggcgctggcggtggatgaac

SEQ ID NO: 219911 - DNA, 75 bp, synthetic construct
  source 1..75: mol_type = other DNA
cggcgttggtgagtctgagcgacgggacacggagtacgctgcattgtaccgtgaacagcttccccaactggacct

SEQ ID NO: 219912 - DNA, 75 bp, synthetic construct
  source 1..75: mol_type = other DNA
tacctgcaacttatgcgcgtccccgagctgcaagataaccgaacgctggaaattgccgagatttctcgctcactg

SEQ ID NO: 219913 - DNA, 75 bp, synthetic construct
  source 1..75: mol_type = other DNA
aactggcaagattttgagctaaaaattaaaagcgcgaagatggtgttattgtgtaatcctcataacccgacagga

SEQ ID NO: 219914 - DNA, 75 bp, synthetic construct
  source 1..75: mol_type = other DNA
agctgtgcaagacataatgtctggttatgttcagatgaaattcacagtgattttgtttttaatcgtagctttaca

SEQ ID NO: 219915 - DNA, 75 bp, synthetic construct
  source 1..75: mol_type = other DNA
aataaaaaaagaaaaagtagtggtgtttaattcgatatcgaagacatttaatgttcctgcgctaacaggatcgta

SEQ ID NO: 219916 - DNA, 75 bp, synthetic construct
  source 1..75: mol_type = other DNA
attgaaaatccccgtgagagcgagatcttcgccagctacccacgcatcctcgcggatagcgtcatgcttgatttt

SEQ ID NO: 219917 - DNA, 75 bp, synthetic construct
  source 1..75: mol_type = other DNA
ttgcagtcgagaaaagttatatatggggcttacgcgcattgcaggtgtaatcagaaatattaatcaggaaaaaga

SEQ ID NO: 219918 - DNA, 75 bp, synthetic construct
  source 1..75: mol_type = other DNA
ctgcagtcgagaaaaattatatatggggcttgcgcgccttgcgagtgtaattaaaaatattaatcaggaaaaaga

SEQ ID NO: 219919 - DNA, 75 bp, synthetic construct
  source 1..75: mol_type = other DNA
ttaacctgattgaggaaagtgaatttacccggaaagccggtgttgcgacagataatatcgttgctgtgggtatga

SEQ ID NO: 219920 - DNA, 75 bp, synthetic construct
  source 1..75: mol_type = other DNA
ttgttataccagtccacccacgttagtgtggccagttccacttctgcacggtttttccagctcttacggtgtatt

SEQ ID NO: 219921 - DNA, 75 bp, synthetic construct
  source 1..75: mol_type = other DNA
ggcccaattggcacggtgagattggcttttaacggccaatactcacggtttgataactatgctggtgctgactgg

SEQ ID NO: 219922 - DNA, 75 bp, synthetic construct
  source 1..75: mol_type = other DNA
acataatgtctggttatgttcagatgaaattcacagtgattttgtttttaatcgtagctttacatctgcgcttaa

SEQ ID NO: 219923 - DNA, 75 bp, synthetic construct
  source 1..75: mol_type = other DNA
acagtctggtcggaagaagaactgcataaaatcgctgcaagctgtacaaggcataatgtctggttatgttcagat

SEQ ID NO: 219924 - DNA, 75 bp, synthetic construct
  source 1..75: mol_type = other DNA
ctgatggtaggatttcaagacgccattatatattgtcatttactttgacaaacctaatttgcaccttccttattg

SEQ ID NO: 219925 - DNA, 75 bp, synthetic construct
  source 1..75: mol_type = other DNA
accagtcattcagcgcggtaagttgcagccaggagaacattgcggcgtttatcaataaaatcaaagcctctccgt

SEQ ID NO: 219926 - DNA, 75 bp, synthetic construct
  source 1..75: mol_type = other DNA
taccttgaggaaggtagggctgataattttttaacgtctctaatttgcagagacgatgttgtttataataaatag

SEQ ID NO: 219927 - DNA, 75 bp, synthetic construct
  source 1..75: mol_type = other DNA
aattatttgccggatgatgtcaccgcagtaagtaaagccccaacaatagattttagccagaatgctaatgcgcat

SEQ ID NO: 219928 - DNA, 75 bp, synthetic construct
  source 1..75: mol_type = other DNA
gaagcgaaaatcgaattgctgtcgcgcgaggaagatatattaaagccattgaacaatataatgtcactatccgca

SEQ ID NO: 219929 - DNA, 75 bp, synthetic construct
  source 1..75: mol_type = other DNA
aggaaataaataaagatgccatcctgaatgaaaaggatgctgtgaaaaatattcccggtattaccataaaaagtg

SEQ ID NO: 219930 - DNA, 75 bp, synthetic construct
  source 1..75: mol_type = other DNA
ggcgaggtgcagtggcgaaaccgtccaccgtcagtcagcattcgcggggcggataatgttattgaactactgaga

SEQ ID NO: 219931 - DNA, 75 bp, synthetic construct
  source 1..75: mol_type = other DNA
taatggctgctgccggtccgctggcagtgacttttcatcgcgccttcgatatgtgcgctaaccctctaaatacac

SEQ ID NO: 219932 - DNA, 75 bp, synthetic construct
  source 1..75: mol_type = other DNA
cgcctgtaactgatgacatcagcagagcgctggcttttgctattaagtgggtggcggtcggtattgctgtgtctc

SEQ ID NO: 219933 - DNA, 75 bp, synthetic construct
  source 1..75: mol_type = other DNA
tacgccggttgagctgtggggcaaggagatcaaaattgatgatgtcgccgccgctgccggaacggtaggctatga

SEQ ID NO: 219934 - DNA, 75 bp, synthetic construct
  source 1..75: mol_type = other DNA
atgcgcagccccaaaagagggggcttaacgccgtcgttgggtgtactgaaatccgtgcgccagcgggtgacgatc

SEQ ID NO: 219935 - DNA, 75 bp, synthetic construct
  source 1..75: mol_type = other DNA
gcccacgcggtggtgatttttgctacagcgacggtgagtttgccgccattcttgaggatgtgcgcacagtccgcg

SEQ ID NO: 219936 - DNA, 75 bp, synthetic construct
  source 1..75: mol_type = other DNA
agtgacttttcatcgcgccttcgatatgtgcgctaaccctctaaatacactcaataatcttgcggaattgggcat

SEQ ID NO: 219937 - DNA, 75 bp, synthetic construct
  source 1..75: mol_type = other DNA
gaagtgaaaatcgaattgccgttgcgcgaggaagatatattaaagccattgaacaatataatgttactatccgca

SEQ ID NO: 219938 - DNA, 75 bp, synthetic construct
  source 1..75: mol_type = other DNA
aagggtggtattgaagcgatctcccgtctgatgggattcctgctggtatgtatgggcgtgcagtttattattaac

SEQ ID NO: 219939 - DNA, 75 bp, synthetic construct
  source 1..75: mol_type = other DNA
atgcagcaagattctgatttttttcttcggtgtgatatcatgaatattattaatgagctcaactttgcagattta

SEQ ID NO: 219940 - DNA, 75 bp, synthetic construct
  source 1..75: mol_type = other DNA
aggctacgcgtgatgcactgcctctgatggaaaatgcttaccgccaaatgcagatgaatgcgcaggcagaaaaag

SEQ ID NO: 219941 - DNA, 75 bp, synthetic construct
  source 1..75: mol_type = other DNA
ctgccggaatcactcatggtcctcagccgtcagagcctgcttcagcttatagactggccccctgaatctccagac

SEQ ID NO: 219942 - DNA, 75 bp, synthetic construct
  source 1..75: mol_type = other DNA
atgcataaatcagaaactgaaaaaatagattctattctggatgaacatcaacggatacattgcagacataaccga

SEQ ID NO: 219943 - DNA, 75 bp, synthetic construct
  source 1..75: mol_type = other DNA
cagtcgtatttttaattattacagcgtaccggaggaatcacgcatggtactcagtcgtcaggaattgctctggct

SEQ ID NO: 219944 - DNA, 75 bp, synthetic construct
  source 1..75: mol_type = other DNA
ggcggttatgtgctgaaagacagcggcggtaagccagatattattttgattgccaccggttcagagatggaaatc

SEQ ID NO: 219945 - DNA, 75 bp, synthetic construct
  source 1..75: mol_type = other DNA
ataagcttggtataattgatttttttgatcatctttatacattagaagatattcataatatccacccgaatccca

SEQ ID NO: 219946 - DNA, 75 bp, synthetic construct
  source 1..75: mol_type = other DNA
gtctggaagaattcgttcagcatgtacatgatgccggtaaagagatgattcaaagttatcgttttaataaaggat

SEQ ID NO: 219947 - DNA, 75 bp, synthetic construct
  source 1..75: mol_type = other DNA
atgacgcgcatgaaatatctggtggcagccgccacactaagcctgtttttggcgggttgctcggggtcaaaggaa

SEQ ID NO: 219948 - DNA, 75 bp, synthetic construct
  source 1..75: mol_type = other DNA
aatttttttatcttcatcttggggtaccttatcgagttgcggttgtgcaaacaatcagtggttcaggttttttct

SEQ ID NO: 219949 - DNA, 75 bp, synthetic construct
  source 1..75: mol_type = other DNA
tatcgggagtcggtgttgccttctaacgttgcggctcgcgtggcggtggaagcaggtattgccgattactggtac

SEQ ID NO: 219950 - DNA, 75 bp, synthetic construct
  source 1..75: mol_type = other DNA
gtacatgttcccgaaaatcgacgccaaacgctttaatattcacgacgatcagaaaatggtgctggatttcctgtt

SEQ ID NO: 219951 - DNA, 75 bp, synthetic construct
  source 1..75: mol_type = other DNA
atcgagcattgcttatatctgataataaaaaaccagtagtgctctcagctacacacaagacggagtcttataaca

SEQ ID NO: 219952 - DNA, 75 bp, synthetic construct
  source 1..75: mol_type = other DNA
tcccattttggatgttcgtacaaagaaatcagtgaggagcagtttaccgaagcactatcacttgcagctcgagtt

SEQ ID NO: 219953 - DNA, 75 bp, synthetic construct
  source 1..75: mol_type = other DNA
ttatcagagcatcagtgaatttattacacccggcgggcgtctttatgaacagcgtaaccgtgcgtgggaattgat

SEQ ID NO: 219954 - DNA, 75 bp, synthetic construct
  source 1..75: mol_type = other DNA
ttatcagagcatcagtgaatttattactcccggcgggcgtctttatgagcagcgtaaccgcgcgtgggaattgat

SEQ ID NO: 219955 - DNA, 75 bp, synthetic construct
  source 1..75: mol_type = other DNA
aacacgctaaaggatacatcgagggtcttgagatgctggcctcaatgcgcctttgcgccaacgttccggcacaac

SEQ ID NO: 219956 - DNA, 75 bp, synthetic construct
  source 1..75: mol_type = other DNA
aagaaattagtcaaaaagcggtttggctttctgggcagatggttgaatgtgattgggacatatacgttgatgtgc

SEQ ID NO: 219957 - DNA, 75 bp, synthetic construct
  source 1..75: mol_type = other DNA
gctcaaaaaaattatcccatgttagagctaaagccggaaaacaaggtgggagcagtaaagcggaagtatatcgag

SEQ ID NO: 219958 - DNA, 75 bp, synthetic construct
  source 1..75: mol_type = other DNA
cgctctgatttgccgcagtgaccttgatgccacccttgcgctccgtaaccatttgaattcagctaaacaatcaat

SEQ ID NO: 219959 - DNA, 75 bp, synthetic construct
  source 1..75: mol_type = other DNA
gtcgtcactgaaatctcattttgggtgttcatacaaagaaatcagcgaggagcagtttaccgaagctctgtcact

SEQ ID NO: 219960 - DNA, 75 bp, synthetic construct
  source 1..75: mol_type = other DNA
cgctgaccaaatttgtcgatggcactggaccggtaacctgttcccgttcctgtttatcaccatcgcctgtggcgc

SEQ ID NO: 219961 - DNA, 75 bp, synthetic construct
  source 1..75: mol_type = other DNA
cgacccagtacaggaatgctggataaacttggaaaaacgtatttttcaaaagactatttttcctttagtccgtga

SEQ ID NO: 219962 - DNA, 75 bp, synthetic construct
  source 1..75: mol_type = other DNA
ctggaccgtcatctccatgaacccggcgtggccttcacctccacgcatgcggcacgggaatggctgattctgaac

SEQ ID NO: 219963 - DNA, 75 bp, synthetic construct
  source 1..75: mol_type = other DNA
ttgaagatgccagcggtaaaaaaacgcgtgattacatatcaacactgccgccgatggaacgtattgagccggatg

SEQ ID NO: 219964 - DNA, 75 bp, synthetic construct
  source 1..75: mol_type = other DNA
cactggaagaaaaagtagcccgtgatggcattgagctaactgacagccagatcgcagcactggagcgtaaagcca

SEQ ID NO: 219965 - DNA, 75 bp, synthetic construct
  source 1..75: mol_type = other DNA
gcacgacaggagcgggaaatgtttgttgtgctttacctcgataaccagaaccgactgctgaaacacgaaacgcta

SEQ ID NO: 219966 - DNA, 75 bp, synthetic construct
  source 1..75: mol_type = other DNA
gcgccgaaggctgatgcaaagccggaagctgatgcaaagccggaagctgatgcgaaagccgcagactctgctaaa

SEQ ID NO: 219967 - DNA, 75 bp, synthetic construct
  source 1..75: mol_type = other DNA
gctggatgtgaaaccagcgccgaaggctgatgcaaagccggaagctgatgcgaaagccgcagattctgctaaaaa

SEQ ID NO: 219968 - DNA, 75 bp, synthetic construct
  source 1..75: mol_type = other DNA
gcactgggcgcttcgctgggtcgttacatggaaaactctctgaaagagcaagaaaagctgggcatcaaactggat

SEQ ID NO: 219969 - DNA, 75 bp, synthetic construct
  source 1..75: mol_type = other DNA
aggcggcatatcactctatactggcccggtgatcaccagataccgctatacccagtatgactccagcgatgcagg

SEQ ID NO: 219970 - DNA, 75 bp, synthetic construct
  source 1..75: mol_type = other DNA
tatcttcgtcagcctggcatgtcctttacctcaagtacggcagcacgtgactggcttcggttacatctggcagga

SEQ ID NO: 219971 - DNA, 75 bp, synthetic construct
  source 1..75: mol_type = other DNA
gatgccctagcactggttgatgtgaacacgctcgaccatctggttatcggatcagatggcattgtgtcgtttgct

SEQ ID NO: 219972 - DNA, 75 bp, synthetic construct
  source 1..75: mol_type = other DNA
gtgctggcgcataaccatccatccggtgatccggagcccagccaatgcgatcgcaacattacgagcaggcttaaa

SEQ ID NO: 219973 - DNA, 75 bp, synthetic construct
  source 1..75: mol_type = other DNA
tctatctcgataaccagcaccgtttactggagagtgaaacgctatttgccggttcggttaaccatgtccaggtcc

SEQ ID NO: 219974 - DNA, 75 bp, synthetic construct
  source 1..75: mol_type = other DNA
aggcggcgtatcactctatactggcccggtgatcaccaggtaccgctatacccactatgactccagcgatgcagg

SEQ ID NO: 219975 - DNA, 75 bp, synthetic construct
  source 1..75: mol_type = other DNA
tcgtgggttacgcgtagatggggtcgggacaatgattggaggcacgtttaacagcttcccacatacgtcattttc

SEQ ID NO: 219976 - DNA, 75 bp, synthetic construct
  source 1..75: mol_type = other DNA
accggtgtagttattacctctatcgggctgagtattattcaggttggtattgactgggctgctggtggtaagggc

SEQ ID NO: 219977 - DNA, 75 bp, synthetic construct
  source 1..75: mol_type = other DNA
cttgcgttgggcgaaatagtcggtcgcaaactctcatcgcaggacatcattcgcgggctacgagtagatggcgtg

SEQ ID NO: 219978 - DNA, 75 bp, synthetic construct
  source 1..75: mol_type = other DNA
tttgaagctatcctgacgcgggaaaaaatgggcagtaccggtatcggcaatggtattgcaattccgcatggcaaa

SEQ ID NO: 219979 - DNA, 75 bp, synthetic construct
  source 1..75: mol_type = other DNA
tattaaagctactaacggtgatggaaatgtgaaacctggtattgttgacgccacggggattatgaccatcaaggc

SEQ ID NO: 219980 - DNA, 75 bp, synthetic construct
  source 1..75: mol_type = other DNA
cggtggtttctgcatttcttagtggtagtgctatggctgcgttgactaatggtcaagctgataactcagcaagct

SEQ ID NO: 219981 - DNA, 75 bp, synthetic construct
  source 1..75: mol_type = other DNA
tttgctgctgtaacaccaatgatagccattgggatgaacccggatatcggcctgctggggatatttggtgccact

SEQ ID NO: 219982 - DNA, 75 bp, synthetic construct
  source 1..75: mol_type = other DNA
gggcatgttttcgctggagcgcgatattgaaaacccccgcgaaagcgagatcttcgccagttatccccgcatcct

SEQ ID NO: 219983 - DNA, 75 bp, synthetic construct
  source 1..75: mol_type = other DNA
tggtccacgcgctgggatcggctgaccgtccagccgccgaactgggcatgctgattgctcacgctatggtgggca

SEQ ID NO: 219984 - DNA, 75 bp, synthetic construct
  source 1..75: mol_type = other DNA
atgattggcgacagactcggcctctctaaagaggctattgcaatgctcatcagttccgacctcttttgctgtggt

SEQ ID NO: 219985 - DNA, 75 bp, synthetic construct
  source 1..75: mol_type = other DNA
atcgccgcgggttttatcaccacattattagcgccacttatcggtcgcttgatgcctttattcccgccactggtt

SEQ ID NO: 219986 - DNA, 75 bp, synthetic construct
  source 1..75: mol_type = other DNA
agccgtactacaaccattgctgcatagcggcattatgttggcaacccttagcgctgtcgtgctgaacgttttctt

SEQ ID NO: 219987 - DNA, 75 bp, synthetic construct
  source 1..75: mol_type = other DNA
tcacagaatataaagggaatatcggagatactcagaatagtattcatggcgaagaaaatattgtagacagacaat

SEQ ID NO: 219988 - DNA, 75 bp, synthetic construct
  source 1..75: mol_type = other DNA
taaactggtcagcgatgcataaggcggtttcggcaaccggtttgcgggttattggcgtaagtggctgcaaagatg

SEQ ID NO: 219989 - DNA, 75 bp, synthetic construct
  source 1..75: mol_type = other DNA
agacaaacctggaaagtggaacataaattatcggatattctactgttgactatttgtgccgttatttctggtgca

SEQ ID NO: 219990 - DNA, 75 bp, synthetic construct
  source 1..75: mol_type = other DNA
tttgtgccgttatttctggtgcagagggttgggaagatatagaggattttggggaaacacatctcgattttttga

SEQ ID NO: 219991 - DNA, 75 bp, synthetic construct
  source 1..75: mol_type = other DNA
gctggttgcaggcgaaaaccatgctcgaacgtcacaggacattgcgcgacagcattggcagcaactttcgaatgt

SEQ ID NO: 219992 - DNA, 75 bp, synthetic construct
  source 1..75: mol_type = other DNA
atgataaagcatacgttattagtgccgtttttttttagtgcattgcccgcttatgccgggttaacttccattacc

SEQ ID NO: 219993 - DNA, 75 bp, synthetic construct
  source 1..75: mol_type = other DNA
ggggcaagtggtgaccgggaaacgcaaatattttgtacgaacctgatggcggaactggtgtccatcgcaggtgaa

SEQ ID NO: 219994 - DNA, 75 bp, synthetic construct
  source 1..75: mol_type = other DNA
gtgaccgtggcaaaaaccgacaacagcagcgcccgtcctgtcgcagggaaagtgatcggcatctgtggcgatggc

SEQ ID NO: 219995 - DNA, 75 bp, synthetic construct
  source 1..75: mol_type = other DNA
atggatcgcaataccccctatcgtgacggcgagctgaacccggtgccggttgccgctgcgaccgaaatttttggt

SEQ ID NO: 219996 - DNA, 75 bp, synthetic construct
  source 1..75: mol_type = other DNA
gcaaaagcaatagagttattgacatcgcatggtgataatattctcgtttttacacctgtctataatgcatttttt

SEQ ID NO: 219997 - DNA, 75 bp, synthetic construct
  source 1..75: mol_type = other DNA
tttgtgccgttatttctggtgcagaaggttgggaagatatagaggattttggggaaacacatcccgatgttttga

SEQ ID NO: 219998 - DNA, 75 bp, synthetic construct
  source 1..75: mol_type = other DNA
ggtgaaacgcatctcgattttttgaggcaatatggtgattttgaaaatggtattcctgtccacgataccattgcc

SEQ ID NO: 219999 - DNA, 75 bp, synthetic construct
  source 1..75: mol_type = other DNA
tcggcacggaatacctggaattctgccgcacggcaaaacacaaccctctgaaccgcttcaaattaagccctgaaa

SEQ ID NO: 220000 - DNA, 75 bp, synthetic construct
  source 1..75: mol_type = other DNA
attttcatcgtgcacatgcagccatcactgcgggacaacaagcggttgagaagaaaatggatgagcttttaccgc

SEQ ID NO: 220001 - DNA, 75 bp, synthetic construct
  source 1..75: mol_type = other DNA
ttattccgacacatagtcggcctaatcttttgcgaaaagctatagaaagtgttttgaatcagacatataagccat

SEQ ID NO: 220002 - DNA, 75 bp, synthetic construct
  source 1..75: mol_type = other DNA
acaaaccgcgagcgagctggcgtagtcacggtaatttgctgtttaccaactggctcaactattacgtctatcaga

SEQ ID NO: 220003 - DNA, 75 bp, synthetic construct
  source 1..75: mol_type = other DNA
atcctctacggcattcctaagcaaacccgcaccgacaaactctctggcgtttacgagcatcatattctccatcct

SEQ ID NO: 220004 - DNA, 75 bp, synthetic construct
  source 1..75: mol_type = other DNA
gcgtgtggaccaactgttatcacgcttacccggcacatgcggcgtttggcggctacaaacagtcgggcatcggac

SEQ ID NO: 220005 - DNA, 75 bp, synthetic construct
  source 1..75: mol_type = other DNA
gataaatgggcgcatacttcggtgcaggatcgcgcggcgattctgtttaagattgccgatcggatggagcagaac

SEQ ID NO: 220006 - DNA, 75 bp, synthetic construct
  source 1..75: mol_type = other DNA
ctgaagttaacggaacggcgctgaccattgaacccggcaccgggttagagcaaggcgggcagggcgtgcatatcc

SEQ ID NO: 220007 - DNA, 75 bp, synthetic construct
  source 1..75: mol_type = other DNA
tgctgattgggttctttgtcctcgagccgctcggtattcccgttagcgcaattgcggctgttggcgctgtaatcc

SEQ ID NO: 220008 - DNA, 75 bp, synthetic construct
  source 1..75: mol_type = other DNA
ttgccaacgatggtgcggcattgattctgacgccaattgttatcgccatgctgcttgcattaggtttcagcaaag

SEQ ID NO: 220009 - DNA, 75 bp, synthetic construct
  source 1..75: mol_type = other DNA
gccgccgtgatggtcccggttaacctggccgcgattgcggctacgctggtgatgctgcatctgtttttccgtaag

SEQ ID NO: 220010 - DNA, 75 bp, synthetic construct
  source 1..75: mol_type = other DNA
accaactggctcaactattacgtctatcagatcacgccatacgatctacggcacatgaatccaacgctggattaa

SEQ ID NO: 220011 - DNA, 75 bp, synthetic construct
  source 1..75: mol_type = other DNA
gccgttgggtatcccggtcagcgcgattgcggcggcaggggccatcattctgtttgcggtggcaaaacgcggcca

SEQ ID NO: 220012 - DNA, 75 bp, synthetic construct
  source 1..75: mol_type = other DNA
tcctgaccattgttttggttatctggcaaccaaagggattagggatcggctggagtgcaatgctgggcgcgggac

SEQ ID NO: 220013 - DNA, 75 bp, synthetic construct
  source 1..75: mol_type = other DNA
acggaacgcgaagcgcgtagtcgttgcccgtccggttgtgttgctgtattcgccgcccgtattcgtcaggaggtg

SEQ ID NO: 220014 - DNA, 75 bp, synthetic construct
  source 1..75: mol_type = other DNA
aagaaaaaggcttcaccgcgcaagcgaacgtcgaaaaaaagcccgccatcggaagaggccggtaatggagcgata

SEQ ID NO: 220015 - DNA, 75 bp, synthetic construct
  source 1..75: mol_type = other DNA
ctccgtgaccaaacaacttaacgtcatcaaacgcttcctgcatgaagccagcgaaatcgttcacgccggggaccc

SEQ ID NO: 220016 - DNA, 75 bp, synthetic construct
  source 1..75: mol_type = other DNA
tgccgactggctgtacggcatcaatatgacccgtgcgtataccattctcggtcgcaatgccggttatcagggcgt

SEQ ID NO: 220017 - DNA, 75 bp, synthetic construct
  source 1..75: mol_type = other DNA
cgccagcaggtacagcgttgcttgataaacgacctgaacccgcaggcggttgagcgggcgatcgatcgtcttcgt

SEQ ID NO: 220018 - DNA, 75 bp, synthetic construct
  source 1..75: mol_type = other DNA
ggcgtaatgctggctaccagggggtactttccgttgggcgcgtgcagacgccagtgcttgggctggtggtgcgcc

SEQ ID NO: 220019 - DNA, 75 bp, synthetic construct
  source 1..75: mol_type = other DNA
ctatctgcaactggcaccggaaaagcgccagcaggtacagcgttgtttgataaacgacctgaacccgcaggcggt

SEQ ID NO: 220020 - DNA, 75 bp, synthetic construct
  source 1..75: mol_type = other DNA
ctctgctgggaacgttattactttccggctgtgccggaaccagtacggaatttgagtgtaacgccaccacatccg

SEQ ID NO: 220021 - DNA, 75 bp, synthetic construct
  source 1..75: mol_type = other DNA
gctttattgcctttggcgcgtcagaatcccaaatcatcaacgtaaccgcctggacagaacgcgaagcgcgtaacc

SEQ ID NO: 220022 - DNA, 75 bp, synthetic construct
  source 1..75: mol_type = other DNA
tgcctttggcgcgtcagaccatcaaatcatccacgtaaccgcctggacggaacgcgaagcgcgtaaccgttgccc

SEQ ID NO: 220023 - DNA, 75 bp, synthetic construct
  source 1..75: mol_type = other DNA
tttgagtgtaacgccaccacatcagatacctgtatgacgatggagcaggccaatgagaaggccaaaaaactggag

SEQ ID NO: 220024 - DNA, 75 bp, synthetic construct
  source 1..75: mol_type = other DNA
aatacagcaaagaacacgaatggctgcgtaaagaagccgacggcacttacaccgttggtataaccgaacatgccc

SEQ ID NO: 220025 - DNA, 75 bp, synthetic construct
  source 1..75: mol_type = other DNA
acatccggagcagaaactgctggcaccacgcccgctgtttaccgctgcccgggaagtgaaaacggtcgttccggt

SEQ ID NO: 220026 - DNA, 75 bp, synthetic construct
  source 1..75: mol_type = other DNA
ggcacgttggctctatctgctgacacaaatcactgcggccagttatttgtgggcagcctcgctcggttatgggta

SEQ ID NO: 220027 - DNA, 75 bp, synthetic construct
  source 1..75: mol_type = other DNA
cgggaccgtctcacttggctgcacggccgaggtgtcgcctgccccgaggtcatcgactggcgagcgacggagaaa

SEQ ID NO: 220028 - DNA, 75 bp, synthetic construct
  source 1..75: mol_type = other DNA
caattccgggagtaccggcggctgatctgtctggagcggatttgctcaaagcgtggccgtcaatggggcagcaac

SEQ ID NO: 220029 - DNA, 75 bp, synthetic construct
  source 1..75: mol_type = other DNA
aaactcttcaatgcacgggtctgatcgaccttgggcggctcggaacagcagatcgctatgccgatttggcactca

SEQ ID NO: 220030 - DNA, 75 bp, synthetic construct
  source 1..75: mol_type = other DNA
atattgggaagcaagaaaaaacataatggacgtctggggtggagatatccaactaatacctgaagagagtaccct

SEQ ID NO: 220031 - DNA, 75 bp, synthetic construct
  source 1..75: mol_type = other DNA
tgatcgtctgttctgcattgaaaaaacactatcgcgacttgctgcgtgaaggtaatccgaatctctctttcatct

SEQ ID NO: 220032 - DNA, 75 bp, synthetic construct
  source 1..75: mol_type = other DNA
ccgggagtaccggcggctgatctgtctggagcggatttgctcaaagcgtggccgtcaatggggcagcaacttggc

SEQ ID NO: 220033 - DNA, 75 bp, synthetic construct
  source 1..75: mol_type = other DNA
cgggacaataaaattaacgctcggaacagatagtacaacaacgccagaggtgctgtcacaagacgttctgactca

SEQ ID NO: 220034 - DNA, 75 bp, synthetic construct
  source 1..75: mol_type = other DNA
ttattgatcgcccgatagatctgcacctcggaacagacgtcgtagagtcaataaacgcatatctgcataaattag

SEQ ID NO: 220035 - DNA, 75 bp, synthetic construct
  source 1..75: mol_type = other DNA
gcaaaaagagccagactttaacttgttgcaatttttgcagaaactggcgaaagagtcaggttttgacggcgaact

SEQ ID NO: 220036 - DNA, 75 bp, synthetic construct
  source 1..75: mol_type = other DNA
atcagaaaactgaaggaacctccattaaatcgaactaatattttttttggtgaatcgcattctgactggttgcct

SEQ ID NO: 220037 - DNA, 75 bp, synthetic construct
  source 1..75: mol_type = other DNA
atgttcggacgcgccgttgatgtggtgtcccgcaatgccgtcaatcccgacttcttaccggacgaggacaagagt

SEQ ID NO: 220038 - DNA, 75 bp, synthetic construct
  source 1..75: mol_type = other DNA
gtgtctcaatgatacatggaaacggcgttggggtatcatctggaactgtaatgcaattgaatgtgcccgaaggcg

SEQ ID NO: 220039 - DNA, 75 bp, synthetic construct
  source 1..75: mol_type = other DNA
ctcaaacgatgccaccgcaggtggggcaattcaggcattaagcgcgcaaggtttatcagggaaagtagcaatttc

SEQ ID NO: 220040 - DNA, 75 bp, synthetic construct
  source 1..75: mol_type = other DNA
ggttggcgcactgtcgattgatggcagcaccgcgaccggcgttatcaaagaagcgatgatttatgccaacgtcat

SEQ ID NO: 220041 - DNA, 75 bp, synthetic construct
  source 1..75: mol_type = other DNA
tatcaaagacccggcgacgttcagaactggctggattgtattaatccttctgctggtaggtttttttgtgcttga

SEQ ID NO: 220042 - DNA, 75 bp, synthetic construct
  source 1..75: mol_type = other DNA
gctgctcttcacctggatcgtcctgcttggtgcgatggttgcggcactgtttgccaacgacggtgcggcactgat

SEQ ID NO: 220043 - DNA, 75 bp, synthetic construct
  source 1..75: mol_type = other DNA
actggtgatctggcaacccagaggcctgagtattggctggagcgcgagtatcggggcagtgctggcgcttggaac

SEQ ID NO: 220044 - DNA, 75 bp, synthetic construct
  source 1..75: mol_type = other DNA
tactttgttggcaaataccgcggcagaaattgccgttgagttgggcaatggtcaggaaccgaaagcagatactac

SEQ ID NO: 220045 - DNA, 75 bp, synthetic construct
  source 1..75: mol_type = other DNA
gctgccctccgggctgttgttactgatcccggtgattgagctgaagaagcccgtacagaagaggatattgcccca

SEQ ID NO: 220046 - DNA, 75 bp, synthetic construct
  source 1..75: mol_type = other DNA
tccagggtgataagcgcgatttattaaaatcactgcttgaagcgaaagggatgaaggtaaaactcgccggcggtt

SEQ ID NO: 220047 - DNA, 75 bp, synthetic construct
  source 1..75: mol_type = other DNA
tccagggagataagcgtgatttattaaaagcactccttgaagcgaaaggaatgaaagtaaaactcgctggcggtt

SEQ ID NO: 220048 - DNA, 75 bp, synthetic construct
  source 1..75: mol_type = other DNA
tttgctctttacgtatatcgtcctgctaggtgcagcggtggcggcattgtttgccaacgatggtgcggcattgat

SEQ ID NO: 220049 - DNA, 75 bp, synthetic construct
  source 1..75: mol_type = other DNA
gcactacgctggcgtttgttatggcggccggattcattgccgataccgccagcctgccgcttattgtctctaacc

SEQ ID NO: 220050 - DNA, 75 bp, synthetic construct
  source 1..75: mol_type = other DNA
atccgcacgtggccatcacgccggtgctgccctccgggctgttgttactgatcccggtgattgaggctgaagaag

SEQ ID NO: 220051 - DNA, 75 bp, synthetic construct
  source 1..75: mol_type = other DNA
attgcacaggcgctggactggatgccggtgcagccagatgccatatccggcatgtggacagtcgaactgaacagg

SEQ ID NO: 220052 - DNA, 75 bp, synthetic construct
  source 1..75: mol_type = other DNA
ggcacaccgttcgccgacgaggtgacgcgcaactggatagcgcagcaggtcatgatgcgggaagacggcgcatgg

SEQ ID NO: 220053 - DNA, 75 bp, synthetic construct
  source 1..75: mol_type = other DNA
atgattttcatatcaacgtgcttttagaaaccagtacgtcgctttctgagtcaacggttatggctatctggcagg

SEQ ID NO: 220054 - DNA, 75 bp, synthetic construct
  source 1..75: mol_type = other DNA
gtattccttttaaagatgcttcctgtgctaaaacagcaagatgtaaatatcttggatttcctacagctttttcat

SEQ ID NO: 220055 - DNA, 75 bp, synthetic construct
  source 1..75: mol_type = other DNA
ccacgggtcgtggtcgccatcgcgctggacgatcagcagcgcatcgtcgacaccttgtttatgaaaggactgacc

SEQ ID NO: 220056 - DNA, 75 bp, synthetic construct
  source 1..75: mol_type = other DNA
atggcgaaagaacgtttatatgatgatgtcatggtggaagcgctccgggaagatccggcctttgctcaggcctat

SEQ ID NO: 220057 - DNA, 75 bp, synthetic construct
  source 1..75: mol_type = other DNA
gcaaagtcagctttatacagcaaaacaattggttagcgaactgattggtatggacagcaaactgtccggtgtact

SEQ ID NO: 220058 - DNA, 75 bp, synthetic construct
  source 1..75: mol_type = other DNA
acgcgaactgggtcagttgctgattcagatccatggtcaacacgctcatcagttactcaccaaacctgagcatca

SEQ ID NO: 220059 - DNA, 75 bp, synthetic construct
  source 1..75: mol_type = other DNA
agaacttaacgaatttaatccgcagcccggagagtttgaacaaatcgacgaagagtacaaacgtctggcgaacag

SEQ ID NO: 220060 - DNA, 75 bp, synthetic construct
  source 1..75: mol_type = other DNA
aaaggccgtactgctggtgatttccgtgcgtctggaaccgaagaacccggaacggacggcagaatccgccaccgc

SEQ ID NO: 220061 - DNA, 75 bp, synthetic construct
  source 1..75: mol_type = other DNA
acgaaacatcatcagcaggcactggaaacggcgcgcgcgttacaccagcaacgccagcactatgcagaagaactt

SEQ ID NO: 220062 - DNA, 75 bp, synthetic construct
  source 1..75: mol_type = other DNA
tgtgtgttacccacctgccacaagtcgcgggatgtggtcatcaacactattttgtcagcaaagaaaccgatggtg

SEQ ID NO: 220063 - DNA, 75 bp, synthetic construct
  source 1..75: mol_type = other DNA
ctatggtttgaatcttttacaaaaggttggataaaaatccttgattcgaaggttatagggaatgagttagtatat

SEQ ID NO: 220064 - DNA, 75 bp, synthetic construct
  source 1..75: mol_type = other DNA
tgctgatgctgtttaccgcaagcgtcagtgccgcgttacctgcccgttatatgcaaaccatcgaaaatgctgcgg

SEQ ID NO: 220065 - DNA, 75 bp, synthetic construct
  source 1..75: mol_type = other DNA
actggaaggatatctgcgtaattcgatgaatctacccgctcgcgcggttgtgctgacgtttgatgatggtttgaa

SEQ ID NO: 220066 - DNA, 75 bp, synthetic construct
  source 1..75: mol_type = other DNA
catacccattttttgcatcgggtggatggttatcgccgccccatattactgagccgtagtgagcacaatattctg

SEQ ID NO: 220067 - DNA, 75 bp, synthetic construct
  source 1..75: mol_type = other DNA
gatcatgttgcttatctcattgatggagatgctccctgccgcattagccgccgaaggaatgtcccccgttctggg

SEQ ID NO: 220068 - DNA, 75 bp, synthetic construct
  source 1..75: mol_type = other DNA
aggcaacctgtacgagtattttttcaatgttgatggtgtacgcagcattgatacaggtacagcaatgactaagcc

SEQ ID NO: 220069 - DNA, 75 bp, synthetic construct
  source 1..75: mol_type = other DNA
tttgtatctttcttatccatttggcggatttaatgacaaagcggtgaaggcggcaaatgatgccggatttcacct

SEQ ID NO: 220070 - DNA, 75 bp, synthetic construct
  source 1..75: mol_type = other DNA
cggggttaaccgcctgctaaaacgtgcggaagacattgtgctggcaacgctgatcctgctgctgatctccccggt

SEQ ID NO: 220071 - DNA, 75 bp, synthetic construct
  source 1..75: mol_type = other DNA
gtcgttaccggataccttggtgaggttgatgtatcgagagactggagattaaaaaatgatgatggtatggagttt

SEQ ID NO: 220072 - DNA, 75 bp, synthetic construct
  source 1..75: mol_type = other DNA
atggtggacatgattaatgaaagtgcacggcaaacgccagtcattgcacaaacggacgttctggttatcggtggc

SEQ ID NO: 220073 - DNA, 75 bp, synthetic construct
  source 1..75: mol_type = other DNA
gggtgatctgaataaaccactgagcaaccaaaatcttattacctggaaagatacgccggtatataacgcgcccga

SEQ ID NO: 220074 - DNA, 75 bp, synthetic construct
  source 1..75: mol_type = other DNA
agccgttgctgaagcagccgcgaaacatcaggtggcgctggaaatcaataattcttcatttttacactcacgtaa

SEQ ID NO: 220075 - DNA, 75 bp, synthetic construct
  source 1..75: mol_type = other DNA
aagttccgttcgatgaaagtgatggagaacgacaaagtggtgactcaggcgacgcagaacgatccgcgcgtcact

SEQ ID NO: 220076 - DNA, 75 bp, synthetic construct
  source 1..75: mol_type = other DNA
gactgatcgtatcattattatatcatgcattaaaccgataaaaaacgagaactcaaaaataaatatagattcttt

SEQ ID NO: 220077 - DNA, 75 bp, synthetic construct
  source 1..75: mol_type = other DNA
ggcctacgcgctggggcagatcctcgacgtgcacgtttttaaccgcctgcgtcagagtcgtcgctggtggctggc

SEQ ID NO: 220078 - DNA, 75 bp, synthetic construct
  source 1..75: mol_type = other DNA
ggcagcctgaaaatcatgatcccgatgatctcctcaatggaagagatcttatgggtgaaagaaaaactggcagaa

SEQ ID NO: 220079 - DNA, 75 bp, synthetic construct
  source 1..75: mol_type = other DNA
tggtatttgcctgtagacgcacagctttcaggtgatgaaccagcgaaactgcttgcgcaactaacctcgctggct

SEQ ID NO: 220080 - DNA, 75 bp, synthetic construct
  source 1..75: mol_type = other DNA
ggggctatggcggtaaagctgagtcgtatccgctgttattgtcggcagataccaccacagcacaggcgggcgatg

SEQ ID NO: 220081 - DNA, 75 bp, synthetic construct
  source 1..75: mol_type = other DNA
tgatcctgctgctgatttcgcctgcgctgtgctgcattgccctggcggtgaaactcacctccgccgggccggtca

SEQ ID NO: 220082 - DNA, 75 bp, synthetic construct
  source 1..75: mol_type = other DNA
ccggcagcagacctgcggtgacgaaacttccggagcagaaactgctggcaccacgtccgttgtttaccgctgccc

SEQ ID NO: 220083 - DNA, 75 bp, synthetic construct
  source 1..75: mol_type = other DNA
tgtggctccgggcagtggtggcagtgctgataagaaaaaggctgcaccgcgtaaacgtagtgcgaaaaaaaatcc

SEQ ID NO: 220084 - DNA, 75 bp, synthetic construct
  source 1..75: mol_type = other DNA
catcaacctgacggagaacgaagcgaaggtctataacctgattgctcgtcagtatttgatgcagttctgtccgga

SEQ ID NO: 220085 - DNA, 75 bp, synthetic construct
  source 1..75: mol_type = other DNA
gaagggaacttccggacaaccacggtgcgggccgccagcacggccagtccatccggcagcgggcctgtagtgact

SEQ ID NO: 220086 - DNA, 75 bp, synthetic construct
  source 1..75: mol_type = other DNA
ccggcagcagacctgcggtgacgacacttccggagcagaaactgctggcaccacgcccgctgtttaccgctgccc

SEQ ID NO: 220087 - DNA, 75 bp, synthetic construct
  source 1..75: mol_type = other DNA
cggcatcactgccgcgcctggctgaagggaacttgtcagcgccaataatcttggcgttgacaaacttccggacaa

SEQ ID NO: 220088 - DNA, 75 bp, synthetic construct
  source 1..75: mol_type = other DNA
tggtgcgcctgttgcggtttctcccgtgcgttctgatgcggtaaaagccattctggcgcaacaccctgatgtgca

SEQ ID NO: 220089 - DNA, 75 bp, synthetic construct
  source 1..75: mol_type = other DNA
cgcggtgcgccctggcagattgtcatcttctcgctcggcatgtatctggtggtttatggcctgcgcaatgccggg

SEQ ID NO: 220090 - DNA, 75 bp, synthetic construct
  source 1..75: mol_type = other DNA
tggctgcgatctgggaccgaaaataacacctatcggcagcctggcaacgctactctggctgcatgtgctttcaca

SEQ ID NO: 220091 - DNA, 75 bp, synthetic construct
  source 1..75: mol_type = other DNA
ctcggtgccgccgttgccgccctgtttgccaatgatggcgcggcgcttattttgacgccgattgtcatcgccatg

SEQ ID NO: 220092 - DNA, 75 bp, synthetic construct
  source 1..75: mol_type = other DNA
gtaaatctattgcaatagatgccctcggcctttgtctcggtggtcgcgctgaagccgacatggtgcgtaccggcg

SEQ ID NO: 220093 - DNA, 75 bp, synthetic construct
  source 1..75: mol_type = other DNA
ctttggcctcggctttagcgaatatgcctcggtcatggtgccggtggacatcgccgcaatactggccacgctggt

SEQ ID NO: 220094 - DNA, 75 bp, synthetic construct
  source 1..75: mol_type = other DNA
cctatatttccagacacctgttatcacttaccccatcactggcccactgccgcagatattcccgtggcgagcgat

SEQ ID NO: 220095 - DNA, 75 bp, synthetic construct
  source 1..75: mol_type = other DNA
gcgaatccctgcgctggagtctgttggtggcactgaataaaacccgcccttataccgccagtgaaaccctgttac

SEQ ID NO: 220096 - DNA, 75 bp, synthetic construct
  source 1..75: mol_type = other DNA
caaaagtgcgcttaaccacagaccgactggtcgtgcgtctggtgcatgatcgtgatgcctggcgtcttgcggatt

SEQ ID NO: 220097 - DNA, 75 bp, synthetic construct
  source 1..75: mol_type = other DNA
tgactgaaaaagatgcggtgaaatgccgggcctttgcagaagaaaattggtggtatttgcccgttgacgcacagc

SEQ ID NO: 220098 - DNA, 75 bp, synthetic construct
  source 1..75: mol_type = other DNA
actggctgggttgttttactgcttctgctggtgggatttttcgtcctggaaccgctcggcattccggtgagcgcc

SEQ ID NO: 220099 - DNA, 75 bp, synthetic construct
  source 1..75: mol_type = other DNA
tgctctggttgcacgtactttcgcagaagaatatgacgattagctgggggaattacttccgtacaggaattatta

SEQ ID NO: 220100 - DNA, 75 bp, synthetic construct
  source 1..75: mol_type = other DNA
ctgacccgtctcggcgtggatattgtggagtataccgtagaatgtggccccggtattgcccgcccgcagaaatac

SEQ ID NO: 220101 - DNA, 75 bp, synthetic construct
  source 1..75: mol_type = other DNA
acggagttacagggcttgaacaggtcgacgattttattattggtgagacaaactgcacagcgaacctgctgaacg

SEQ ID NO: 220102 - DNA, 75 bp, synthetic construct
  source 1..75: mol_type = other DNA
aggcaagaaaggcaaagaggttcttactgtccctgttgacgacgttgtttccaaggtacaggtgcgtaagcgctt

SEQ ID NO: 220103 - DNA, 75 bp, synthetic construct
  source 1..75: mol_type = other DNA
ggtgcagcattttcttctgaaatgtatcccaaactggcaaaggcctaccccaccaataaattaccggatttacgc

SEQ ID NO: 220104 - DNA, 75 bp, synthetic construct
  source 1..75: mol_type = other DNA
ctccgtcttcccgatttgcgcggtgagtttatccgtggatgggacgacgggcgaaaagtggatacagggcgcgat

SEQ ID NO: 220105 - DNA, 75 bp, synthetic construct
  source 1..75: mol_type = other DNA
agctggggccgctgcgggagtatttcgaagatccgggcgtatttgaagtccgaatcaaccgttataacgaggtgg

SEQ ID NO: 220106 - DNA, 75 bp, synthetic construct
  source 1..75: mol_type = other DNA
gcggtgttatgtcaacgcacgctaactctacgagcgatgcctttatgcgaatgctctactccaccattgacgttg

SEQ ID NO: 220107 - DNA, 75 bp, synthetic construct
  source 1..75: mol_type = other DNA
tcaataaagctaacaatatgcccatgaccaaagaaaacttcttaggcttggtaattatgttgattctttcaaaag

SEQ ID NO: 220108 - DNA, 75 bp, synthetic construct
  source 1..75: mol_type = other DNA
ccatgcaggagcgtggcggcgcagacgtgctgcacggcgtgccaaaaatactctatctcgaccccggctcggcaa

SEQ ID NO: 220109 - DNA, 75 bp, synthetic construct
  source 1..75: mol_type = other DNA
agccgagccctgcgtaactatggcctgcacccggaacaactggatgcccctgcgccgcataccgaagtggccagt

SEQ ID NO: 220110 - DNA, 75 bp, synthetic construct
  source 1..75: mol_type = other DNA
tgcacccggaacaactggatgctcctgcaccgcataccgaagtggccagtctgcagcccaatcatgtctggcaga

SEQ ID NO: 220111 - DNA, 75 bp, synthetic construct
  source 1..75: mol_type = other DNA
gcgccaccgggcaggtggaaaaggcccgtgacattatcgaacgtaaactggagccgggtctcaaattccagccgg

SEQ ID NO: 220112 - DNA, 75 bp, synthetic construct
  source 1..75: mol_type = other DNA
gaagatttcagcggagagcttaagctggaaggcccggtgaccagcacccgtaatccgtgggtatggaaagtcgga

SEQ ID NO: 220113 - DNA, 75 bp, synthetic construct
  source 1..75: mol_type = other DNA
gctggccgcgaaatggcgcagccactttaacgcaacagctgttcacagccgccacggtaaaacccgcacggatat

SEQ ID NO: 220114 - DNA, 75 bp, synthetic construct
  source 1..75: mol_type = other DNA
tggcgaaaaggaagattcgcgaaatctactattcgccagaatataagtatgagtgcatgaatggagggataaagt

SEQ ID NO: 220115 - DNA, 75 bp, synthetic construct
  source 1..75: mol_type = other DNA
tcagcatgttatggaatgatagttagtcatgtggggcatacaccttcaggcgcaggaatcctgtcggcttctgca

SEQ ID NO: 220116 - DNA, 75 bp, synthetic construct
  source 1..75: mol_type = other DNA
gactatgacgcgatcccgaaattgcctgggttgaagagtacattaagttgggcgcagtgcctggcggcaccgaac

SEQ ID NO: 220117 - DNA, 75 bp, synthetic construct
  source 1..75: mol_type = other DNA
actgctgaaaccggaacatcagggactggcgacggaagtgatgtgtcggatgaatatcgcgggagcgtcctttgc

SEQ ID NO: 220118 - DNA, 75 bp, synthetic construct
  source 1..75: mol_type = other DNA
ttaaattaatccctttgctgatgggtataatatgcatcgcattaggtgggtttgtattagcaggttctgggcaaa

SEQ ID NO: 220119 - DNA, 75 bp, synthetic construct
  source 1..75: mol_type = other DNA
acggcaatttgcgcttgtcttattggccttgtcgccactattgtccatcaaacgcggaatacgttctcagtgaaa

SEQ ID NO: 220120 - DNA, 75 bp, synthetic construct
  source 1..75: mol_type = other DNA
ctggttggcttaggtgcagtgtgttttacgctattttcaatcgtttctatattagaagcagggtctgcaaaaaaa

SEQ ID NO: 220121 - DNA, 75 bp, synthetic construct
  source 1..75: mol_type = other DNA
atgattaagcgcgtactggttgtatcaatggtaggtctgtctcttgtcggttgtgttaataacgataccctttct

SEQ ID NO: 220122 - DNA, 75 bp, synthetic construct
  source 1..75: mol_type = other DNA
actggtacttcaagaacgggttttacagcccgtatgtcaggtgccggtgggtttaatctttgctatatagcgaaa

SEQ ID NO: 220123 - DNA, 75 bp, synthetic construct
  source 1..75: mol_type = other DNA
ttgaccatgtttgacttacgcgacagtttcgatgccctcgcctcggctgaaaaactgccttacagcaagccgcat

SEQ ID NO: 220124 - DNA, 75 bp, synthetic construct
  source 1..75: mol_type = other DNA
atggcgattgcgatcctcggctggccgattaacaaactttccccggaaattgcccgcgaagtaaccgaaggtgga

SEQ ID NO: 220125 - DNA, 75 bp, synthetic construct
  source 1..75: mol_type = other DNA
gcttgtgggtaatgagacccgcgacgatgcggcggtgtacgatctgggcaatggcaccagcgttatcagtaccac

SEQ ID NO: 220126 - DNA, 75 bp, synthetic construct
  source 1..75: mol_type = other DNA
agaaggcgcggcacgaccagttgcttaccgcgcttcgtgcgctgctgttaagccgcaagaatccgtttggtgata

SEQ ID NO: 220127 - DNA, 75 bp, synthetic construct
  source 1..75: mol_type = other DNA
tatctccgggaatgtaggtgacaatgatgtctatggtgcacagcaacatgcacctttattaaatatgagtttcga

SEQ ID NO: 220128 - DNA, 75 bp, synthetic construct
  source 1..75: mol_type = other DNA
taacgattttccttttgcctttccgtcagcatgttatggaatgatagttagtcatgtggggcatacaccttcagg

SEQ ID NO: 220129 - DNA, 75 bp, synthetic construct
  source 1..75: mol_type = other DNA
tcgatattgcggtgagcaaaaacacgttcccgattttcggtgcgggctgggatcgcctgatgggacgtcagaacg

SEQ ID NO: 220130 - DNA, 75 bp, synthetic construct
  source 1..75: mol_type = other DNA
ccacaccagaagatttgcgcaaaaaacggccgtatgtactggtcggcgcattcgtcgtcgggatgttgttgacgc

SEQ ID NO: 220131 - DNA, 75 bp, synthetic construct
  source 1..75: mol_type = other DNA
gtgcaaccggcttcttcacttatcagcgaactaaacgagggcaaaacactgcttcacgccgggccgccaatgcgc

SEQ ID NO: 220132 - DNA, 75 bp, synthetic construct
  source 1..75: mol_type = other DNA
tgatggcggcactcagggactgaacttgctgggctatgtcgaaagcgccagccatctgttgattctcgatgccat

SEQ ID NO: 220133 - DNA, 75 bp, synthetic construct
  source 1..75: mol_type = other DNA
cctctgtgctgtgatttacaccttcttcgccacgccgatttatagcgcagacgcgctggtacaaatcgaacaaag

SEQ ID NO: 220134 - DNA, 75 bp, synthetic construct
  source 1..75: mol_type = other DNA
acgacggcatgccgctgcctgtggtggcgaaaggcgatgaattgttgtgcgaaaaaggcgaagtggtagagcggc

SEQ ID NO: 220135 - DNA, 75 bp, synthetic construct
  source 1..75: mol_type = other DNA
ctccggtcaggcagttcagaggaattgtggcatcgggtgggggggggctgttaaaaaagcacccaataagcgtgt

SEQ ID NO: 220136 - DNA, 75 bp, synthetic construct
  source 1..75: mol_type = other DNA
ggtgattctgaactccatcttccgccgcgccagcgcgtatcaggattatggctattacgaatatgaatataagtc

SEQ ID NO: 220137 - DNA, 75 bp, synthetic construct
  source 1..75: mol_type = other DNA
cgcgcagctgaacgaactgacctttaaagaggcggaaatttctaagctgttcaccaaagttcacccggcgtaccg

SEQ ID NO: 220138 - DNA, 75 bp, synthetic construct
  source 1..75: mol_type = other DNA
aaattctgattggtcagggcgatattactaccgctgctaaaccgacctctattgccaaatttgacctgatcccgc

SEQ ID NO: 220139 - DNA, 75 bp, synthetic construct
  source 1..75: mol_type = other DNA
cgttgctggtttccagctctttgctgttttatatcggtatggcgtttgcctattttgtggtcttcccgctggcat

SEQ ID NO: 220140 - DNA, 75 bp, synthetic construct
  source 1..75: mol_type = other DNA
gtgactgataaacgcaaaaaacgcgctgatgccggtcgcagcgccctgacccgcgacgaagccgcgctgatatct

SEQ ID NO: 220141 - DNA, 75 bp, synthetic construct
  source 1..75: mol_type = other DNA
gtgactgataaacgcaaaaaacgcgcagatgccggacgcagcgccctgacccgcgacgaagccgcgctgatatct

SEQ ID NO: 220142 - DNA, 75 bp, synthetic construct
  source 1..75: mol_type = other DNA
gcactggatgaagtcatggccacgctgaccacgccggcgcgcagcagggttatcagcattgttaacggcaactga

SEQ ID NO: 220143 - DNA, 75 bp, synthetic construct
  source 1..75: mol_type = other DNA
tgcacccggaacaactggatgcacctgcaccgcataccgaagtggccagtctgcatcccaatcatgtctggcaga

SEQ ID NO: 220144 - DNA, 75 bp, synthetic construct
  source 1..75: mol_type = other DNA
gtgactgataaacgcaaaaaacgcgcggatgccgggcgcagcgccctgacccgcgacgaagccgcgctgatatct

SEQ ID NO: 220145 - DNA, 75 bp, synthetic construct
  source 1..75: mol_type = other DNA
gtgactgataaacgcaaaaaacgcgccgatgccggccgcagcgccctgacccgcgacgaagccgcgctgatatct

SEQ ID NO: 220146 - DNA, 75 bp, synthetic construct
  source 1..75: mol_type = other DNA
aatctctgttctgttcttattaacgccatgcaggaacgtggcggcgctgacgtgctgcacggtgtgcctaaaata

SEQ ID NO: 220147 - DNA, 75 bp, synthetic construct
  source 1..75: mol_type = other DNA
gcctttaatttacgcccaggggcaaacacccttggtaatgactccaacttattgatagtgttttatgttcagata

SEQ ID NO: 220148 - DNA, 75 bp, synthetic construct
  source 1..75: mol_type = other DNA
tctcgacagtgccctggcgcagcaccgtgccgtctcgttaatccgagtggatttacgtttccctgagtatatgcc

SEQ ID NO: 220149 - DNA, 75 bp, synthetic construct
  source 1..75: mol_type = other DNA
gcactggatgaagtcatggccacgctgaccacgccggcccgcagcagcgttatcagcattgttaacggcaactga

SEQ ID NO: 220150 - DNA, 75 bp, synthetic construct
  source 1..75: mol_type = other DNA
gcactggatgaagtcatggccacgctgaccacgccggctcgcagcagtgttatcagcattgttaacggcaactga

SEQ ID NO: 220151 - DNA, 75 bp, synthetic construct
  source 1..75: mol_type = other DNA
gcactggatgaagtcatggccacgctgaccacgccggcacgcagcagagttatcagcattgttaacggcaactga

SEQ ID NO: 220152 - DNA, 75 bp, synthetic construct
  source 1..75: mol_type = other DNA
cactgttacccgcggcggctttggtgaatccgttgctaaacaaagcgccatgcagcgtagcgcaacaggcacttc

SEQ ID NO: 220153 - DNA, 75 bp, synthetic construct
  source 1..75: mol_type = other DNA
accgagggggagaacgtcatccacctgcgcaccctgcgtcgggtcaacggcgtcgcgctctgtttaatcgaccac

SEQ ID NO: 220154 - DNA, 75 bp, synthetic construct
  source 1..75: mol_type = other DNA
atgaattactggcaaccggtgcggttatctggtcggggcaaaaaaaaactgggtgaagatgacggcctggtggca

SEQ ID NO: 220155 - DNA, 75 bp, synthetic construct
  source 1..75: mol_type = other DNA
acaacaaccgctgttctcctcgaaaaacccagccagcccggcttacggtaaatatactgatgccaccggtaaaaa

SEQ ID NO: 220156 - DNA, 75 bp, synthetic construct
  source 1..75: mol_type = other DNA
tgatgggcggcggcgcgggctttgcgcaacaaccgctgttctcttcgaaaaacccggccagcccggcttacggca

SEQ ID NO: 220157 - DNA, 75 bp, synthetic construct
  source 1..75: mol_type = other DNA
cagcggtagcttctggatgccgctgatggccggttacatgatgggacgtctgatgggcggcggcgcgggctttgc

SEQ ID NO: 220158 - DNA, 75 bp, synthetic construct
  source 1..75: mol_type = other DNA
gatgagttagataatacccttgaacaatataataagctcattgaaaaaataatgaatgataagcgagaacttaaa

SEQ ID NO: 220159 - DNA, 75 bp, synthetic construct
  source 1..75: mol_type = other DNA
ggtcggagctctttgcggaaacgttcggtatgttcaaggtaatatttgggtgacaaataactcattaattattaa

SEQ ID NO: 220160 - DNA, 75 bp, synthetic construct
  source 1..75: mol_type = other DNA
attgaacagacaatacgtaataatgaattattactaaccgagttgtctttattaagagaaaaaatagagatctta

SEQ ID NO: 220161 - DNA, 75 bp, synthetic construct
  source 1..75: mol_type = other DNA
gctgcgctttacgctgacagaagtaaatgatcaacccgtccggcaaacgccgatgtttacgctgctgcgtgatgc

SEQ ID NO: 220162 - DNA, 75 bp, synthetic construct
  source 1..75: mol_type = other DNA
atgctggcgctggcggaaaatatgctcgaccgctacggcatcatcagtcgtcaggcggtgatagccgaaaatatc

SEQ ID NO: 220163 - DNA, 75 bp, synthetic construct
  source 1..75: mol_type = other DNA
ggggggggcgacggagcaagctgttttccttgccaacaatcttgcaaaaaaaatgcgattgctaaaacaaaagtg

SEQ ID NO: 220164 - DNA, 75 bp, synthetic construct
  source 1..75: mol_type = other DNA
tggcaccgaaaccggcgaccaccactaccgttacccgcggtggctttggtgaatctgttgccaaacaaagcacca

SEQ ID NO: 220165 - DNA, 75 bp, synthetic construct
  source 1..75: mol_type = other DNA
tgtcagcgttaaatctggcgaacatgaactcattggtgacagtggtgcagtaactgccagctttaccaagtatgt

SEQ ID NO: 220166 - DNA, 75 bp, synthetic construct
  source 1..75: mol_type = other DNA
gctatgcggggtcaattatcaccatgatatggggttgggcactgttagcaggcaatgatgtgatggcagacgagt

SEQ ID NO: 220167 - DNA, 75 bp, synthetic construct
  source 1..75: mol_type = other DNA
tggtgttattgggttatttttctcggctcaatcacggtgctgcagggcatatacgtcttagtcagttccgatgca

SEQ ID NO: 220168 - DNA, 75 bp, synthetic construct
  source 1..75: mol_type = other DNA
gcttatcgcgatagccgcaccaatggcctaatggcgcaggcgcaacaacaactcggcaaacgcgatatttatcaa

SEQ ID NO: 220169 - DNA, 75 bp, synthetic construct
  source 1..75: mol_type = other DNA
agtgccattcgccttggattaaacaaggtgtgcgaggaagggattcgtatcgatagtattgggattgatacctag

SEQ ID NO: 220170 - DNA, 75 bp, synthetic construct
  source 1..75: mol_type = other DNA
tacgcacggtaatgagtcggtggcagaaggtgtgtttacagtgagtgctgccgaacaggaaaccgttattcatct

SEQ ID NO: 220171 - DNA, 75 bp, synthetic construct
  source 1..75: mol_type = other DNA
ctgagaagttgaatgagtttcggctctggcttaaaccccgactggaaaagaaacgtgcccagcaccaccactttt

SEQ ID NO: 220172 - DNA, 75 bp, synthetic construct
  source 1..75: mol_type = other DNA
acagcagccgctgttctcctcgaaaaacccagccagcccggcttacggtaaatataccgacgcgacgggtaaaaa

SEQ ID NO: 220173 - DNA, 75 bp, synthetic construct
  source 1..75: mol_type = other DNA
ctgctacgtcaacttggcgaatcaactcaggtgatgtgtgttacccacctgccacaagtcgcgggatgtggtcat

SEQ ID NO: 220174 - DNA, 75 bp, synthetic construct
  source 1..75: mol_type = other DNA
tttgcgcaggagcaggaggtcaagccttagggttacataacgctggcttcgctcaccgcgcactagtcgagattg

SEQ ID NO: 220175 - DNA, 75 bp, synthetic construct
  source 1..75: mol_type = other DNA
gatggctgaagcagccattggcctcaattttactgtccccgccacgctgaagggaagcactgactgcactgaagg

SEQ ID NO: 220176 - DNA, 75 bp, synthetic construct
  source 1..75: mol_type = other DNA
gtaccagtccacagccaaaactgagtgtggcgaacctggacagctcgatctcagcgctctgtctggcgtatgacg

SEQ ID NO: 220177 - DNA, 75 bp, synthetic construct
  source 1..75: mol_type = other DNA
ctctcgaaaaccttggtttgggagaagcggcaaaacgaaatgtgggaacaggggaaaatcagatacctgatatgt

SEQ ID NO: 220178 - DNA, 75 bp, synthetic construct
  source 1..75: mol_type = other DNA
tggatacactgaacgaactggcggcggcactggggaatgatccgaactttgccacgacaatgcttaatgcgctgg

SEQ ID NO: 220179 - DNA, 75 bp, synthetic construct
  source 1..75: mol_type = other DNA
gaggattgattatccaatggggggcaggagatgcaggtacgggttatgtaggctcgacaggaaatgagatgaatt

SEQ ID NO: 220180 - DNA, 75 bp, synthetic construct
  source 1..75: mol_type = other DNA
gaacagtggggacgaattagttttcctggtgaacacgggcctgtatccgccaatgtttcattcccaattccattt

SEQ ID NO: 220181 - DNA, 75 bp, synthetic construct
  source 1..75: mol_type = other DNA
cgtctggattaattttacagtgtggtcagttgaatggtgccccgaatgtatcttcaacatacgggatgaagtttc

SEQ ID NO: 220182 - DNA, 75 bp, synthetic construct
  source 1..75: mol_type = other DNA
gaaggagcaaaactcaatgcagcaacggctacattaggacgcaccggtttcatagctataccggttatgattggt

SEQ ID NO: 220183 - DNA, 75 bp, synthetic construct
  source 1..75: mol_type = other DNA
tctggcactgacgtatcaagaacgcgattcactgtgtcgtatacgacacccaatctcggcgaaattccgactttg

SEQ ID NO: 220184 - DNA, 75 bp, synthetic construct
  source 1..75: mol_type = other DNA
atgccatttgctcgttatttctgcattttcataaacgttggtttgggagaagcggcaaaacggaatgtgggcaca

SEQ ID NO: 220185 - DNA, 75 bp, synthetic construct
  source 1..75: mol_type = other DNA
gacgtgcttagatgctggctcagtgggcgctacagtgacacgcagtagtgacgatactgcgtgttacggtcgtta

SEQ ID NO: 220186 - DNA, 75 bp, synthetic construct
  source 1..75: mol_type = other DNA
cgttacctgtttcaccatcgcaattttccctgatgtcatctgtgactgagcaaggaataaatccttttgcttact

SEQ ID NO: 220187 - DNA, 75 bp, synthetic construct
  source 1..75: mol_type = other DNA
agtcaataaggttattcggcaggtcagctttattgctgcagctctggcccagtttgtaagtgataaaacgcaacg

SEQ ID NO: 220188 - DNA, 75 bp, synthetic construct
  source 1..75: mol_type = other DNA
ctctcgaaaaccttggtttgggagaagccagatatgtcattcagcgaggagctaatgtcaatggtgcatggatac

SEQ ID NO: 220189 - DNA, 75 bp, synthetic construct
  source 1..75: mol_type = other DNA
atgttaaagttatttgcaaagtacacctctattggtgtgctgaacacccttatacactgggtggtttttggtgtt

SEQ ID NO: 220190 - DNA, 75 bp, synthetic construct
  source 1..75: mol_type = other DNA
ggactagttttgccagtatccgcaatggacataagaaaggttcaaaaagtttggagtaccatcaaaagtggtggt

SEQ ID NO: 220191 - DNA, 75 bp, synthetic construct
  source 1..75: mol_type = other DNA
tactaaaacgactttatatcttaagaacggattcgctggagacgatgtcgcggctggtgagtaaccagccgcagg

SEQ ID NO: 220192 - DNA, 75 bp, synthetic construct
  source 1..75: mol_type = other DNA
tcgcgatgtatttgatttccagtcacatacccattttttgcatcgggtggatggttatcgccgacccatattact

SEQ ID NO: 220193 - DNA, 75 bp, synthetic construct
  source 1..75: mol_type = other DNA
gtttcttagtgattctatagttaacattgaacagacaatacgtaataatgaattattactaaccgagttgtcttt

SEQ ID NO: 220194 - DNA, 75 bp, synthetic construct
  source 1..75: mol_type = other DNA
cttgttctacaggattgtcttgaagagtggcttttagctgggaatgggaattgtgaaatagattctaaaggttta

SEQ ID NO: 220195 - DNA, 75 bp, synthetic construct
  source 1..75: mol_type = other DNA
tacaaaatacatggctgtgttagtgatcctaacaacataattatcacaggtgaagactacgcaaacttcgacaat

SEQ ID NO: 220196 - DNA, 75 bp, synthetic construct
  source 1..75: mol_type = other DNA
cgacggcgtttattattacctctcgcatcaaacgtcatccacagaaatggaatccgcagtcattacagtttatga

SEQ ID NO: 220197 - DNA, 75 bp, synthetic construct
  source 1..75: mol_type = other DNA
cggatacaacattttaaaagctattttggaaatagagttctcaccgccgacagtggttagcttttgtagtttagg

SEQ ID NO: 220198 - DNA, 75 bp, synthetic construct
  source 1..75: mol_type = other DNA
cagtggttagcttttgtagtttaggcggctacagcgcacatcaatcattggttaaatcattttacatcgttcggt

SEQ ID NO: 220199 - DNA, 75 bp, synthetic construct
  source 1..75: mol_type = other DNA
tggaaagagtccccctaaagcagactgacagacatcacaaatccccgggtggggatttgtgtataagagacagcc

SEQ ID NO: 220200 - DNA, 75 bp, synthetic construct
  source 1..75: mol_type = other DNA
taaaacggctttatatcttaagaacggattcgctggagacaatgtcgcggctggtgagtaaccagccgcaggggt

SEQ ID NO: 220201 - DNA, 75 bp, synthetic construct
  source 1..75: mol_type = other DNA
cagattatttcggtcatgccaaccgcagccgattattatgaattcaactttggttttggtacgggatatattgat

SEQ ID NO: 220202 - DNA, 75 bp, synthetic construct
  source 1..75: mol_type = other DNA
tccctgtccgagatgttcggtgatctccgttcgcagctgaataatctgcaggacacggcaacgtctgccttaagc

SEQ ID NO: 220203 - DNA, 75 bp, synthetic construct
  source 1..75: mol_type = other DNA
tcagtactcaactgaataatctgcaggacacggcaacgtctgctttaagcgatatcagtaaaacggttggagggc

SEQ ID NO: 220204 - DNA, 75 bp, synthetic construct
  source 1..75: mol_type = other DNA
actggcactggagcagatggcagaacaggggaaagcatggcccctgattgaaggaagcggcacgatttacggcat

SEQ ID NO: 220205 - DNA, 75 bp, synthetic construct
  source 1..75: mol_type = other DNA
gcttcatcaatggcaattgctgaactttcagcattgacaagcttatcttttgacacagttccggatgtatttgat

SEQ ID NO: 220206 - DNA, 75 bp, synthetic construct
  source 1..75: mol_type = other DNA
atcatcgaattcttacgtgaagagtgctgtgtaaacagtaaaacagatgttgcggaacacgctggcaaaaatgga

SEQ ID NO: 220207 - DNA, 75 bp, synthetic construct
  source 1..75: mol_type = other DNA
atgcagttggaagaagttgctaaagcgctgaaagagctaggtcacccgacccgtttgttcatatttaaacacctg

SEQ ID NO: 220208 - DNA, 75 bp, synthetic construct
  source 1..75: mol_type = other DNA
cgggccgcacgacaacttccatccgagtaactcgcatgtgatccccgcattgctgcgccgcttccacgaggcgac

SEQ ID NO: 220209 - DNA, 75 bp, synthetic construct
  source 1..75: mol_type = other DNA
ttcgccgctgaaaatattgatcaggtgtatctggcggcggcaaaggtgggcggcattgtggccaacaacaccttc

SEQ ID NO: 220210 - DNA, 75 bp, synthetic construct
  source 1..75: mol_type = other DNA
atgagtaaacaacgcatttttattgctggccatcgcggaatggtcggttccgccatcaggcgacagctcgaacag

SEQ ID NO: 220211 - DNA, 75 bp, synthetic construct
  source 1..75: mol_type = other DNA
gtatgtgatcgaggggctgaaccagacgaaagcagaatttttccgtgacgggatgccgcgccgcattgagttctc

SEQ ID NO: 220212 - DNA, 75 bp, synthetic construct
  source 1..75: mol_type = other DNA
cgatggtgaaagtggtgggctttaaagggcgggtggtgtttgatgccaccaaacccgacggcacgccgcgcaagc

SEQ ID NO: 220213 - DNA, 75 bp, synthetic construct
  source 1..75: mol_type = other DNA
cgcggtgatgtggaactggtattacgcacccgcgacgaactgaacctgctggacagccgcgcggtgcatgatttc

SEQ ID NO: 220214 - DNA, 75 bp, synthetic construct
  source 1..75: mol_type = other DNA
gcataccaattgacgaaggacgataccaggcatcagatgctaattgatcagaatatttttaaacccagagatttg

SEQ ID NO: 220215 - DNA, 75 bp, synthetic construct
  source 1..75: mol_type = other DNA
gggactgaacagcgatgtcactgccgaagaggtttatgacctggctgtactggcgctgaatttatcaaatatcgc

SEQ ID NO: 220216 - DNA, 75 bp, synthetic construct
  source 1..75: mol_type = other DNA
ttgaactctttgttggaaatttctagtaaatccgaagatgcgctgggggtagcacttagtgcatttaatctaaga

SEQ ID NO: 220217 - DNA, 75 bp, synthetic construct
  source 1..75: mol_type = other DNA
tggagatcttggccgattaggagggttgctgaaattatggctagcaaatgatccaaggactgctaattttccacc

SEQ ID NO: 220218 - DNA, 75 bp, synthetic construct
  source 1..75: mol_type = other DNA
ccatatgaaagacaaccgctgggtgcctggctggatgtgttcaccacgtccacagacggatgccactgaacgcgc

SEQ ID NO: 220219 - DNA, 75 bp, synthetic construct
  source 1..75: mol_type = other DNA
ctggtgtggaaaccggatatcattcgtctgtggaaattccccaccgagataaaagaatttaccatcaatcagaat

SEQ ID NO: 220220 - DNA, 75 bp, synthetic construct
  source 1..75: mol_type = other DNA
ctgtttgatgacgtggttaagttgtttgagtttgatacaaccactcaaaagttagaaatcccggcaaaggaggca

SEQ ID NO: 220221 - DNA, 75 bp, synthetic construct
  source 1..75: mol_type = other DNA
tggcgacatgcggcaaacagcctggtcaaccgacgtccgtccacgcagtttctgggaccggacaacgatatgctg

SEQ ID NO: 220222 - DNA, 75 bp, synthetic construct
  source 1..75: mol_type = other DNA
caggggaaagcgtggcccctgattgaaggcagtggcacgatttacggtatgtatgtgattgagggactgaatcag

SEQ ID NO: 220223 - DNA, 75 bp, synthetic construct
  source 1..75: mol_type = other DNA
actaaaacggagtttttccgcaacggtatgccgcgcaggattgagttcaccctgtcgctaaaacgggtggatgaa

SEQ ID NO: 220224 - DNA, 75 bp, synthetic construct
  source 1..75: mol_type = other DNA
ggaagcatggaaagcatattagagtgccagttcttcctgatgaagaagcaattataaaagctaatgcagaagcat

SEQ ID NO: 220225 - DNA, 75 bp, synthetic construct
  source 1..75: mol_type = other DNA
tagagcttagccgggtaaatgctgatcttggtcgacttggtgggttacttaaactgtggttagttaacgatcctc

SEQ ID NO: 220226 - DNA, 75 bp, synthetic construct
  source 1..75: mol_type = other DNA
tctgggaccggataacgacatgctgacgctttctggcgttcttatgccggagataacgggcggcaggctgtcgtt

SEQ ID NO: 220227 - DNA, 75 bp, synthetic construct
  source 1..75: mol_type = other DNA
gtggatgtcacctttgaagatgaaaagggtgctaaccacaccgtgacgctggagaacggagataacggctggaca

SEQ ID NO: 220228 - DNA, 75 bp, synthetic construct
  source 1..75: mol_type = other DNA
gtggatgtcacctttgaagatgaaaagggtgctaaacacaccgtgacgctggagaacggcgataacggctggaca

SEQ ID NO: 220229 - DNA, 75 bp, synthetic construct
  source 1..75: mol_type = other DNA
gtggatgtcacctttgaagatgaaaagggtgataaccacaccgtgacgctggagaacggcgataacggctggaca

SEQ ID NO: 220230 - DNA, 75 bp, synthetic construct
  source 1..75: mol_type = other DNA
tgattgacagaggttgggataaagcgaaaggggaattagatttccgcgacgaagaaaaccaaagccggcggccac

SEQ ID NO: 220231 - DNA, 75 bp, synthetic construct
  source 1..75: mol_type = other DNA
tgtggcacgtattatccgggcaaaaaaaccagccatttttgtgcttgagaacgtcaaaaacctgaaaagccatga

SEQ ID NO: 220232 - DNA, 75 bp, synthetic construct
  source 1..75: mol_type = other DNA
ggagggaaaccattccgtattccggtttcagatactcagtcatatcggcagttcggtaactccgttgtggtgcca

SEQ ID NO: 220233 - DNA, 75 bp, synthetic construct
  source 1..75: mol_type = other DNA
caaaagatatatctaatatgcctaaggaatatctttctgtttatcaggatggcagtaatttaagcttgggtaacg

SEQ ID NO: 220234 - DNA, 75 bp, synthetic construct
  source 1..75: mol_type = other DNA
tccggtgatgatttaattctgcgtaagaaggaagaagatacggaggtccggatagagggattctgggaagaatgc

SEQ ID NO: 220235 - DNA, 75 bp, synthetic construct
  source 1..75: mol_type = other DNA
cgatgatattgttacgatcaaacgtactggtgtaacaaatgccggacagatttatcttggttcaggtagtgatac

SEQ ID NO: 220236 - DNA, 75 bp, synthetic construct
  source 1..75: mol_type = other DNA
tgagcatacttatacgctttacagcagtgtaagtggcgcaaatgtgtatattgataataatattattgatgcgaa

SEQ ID NO: 220237 - DNA, 75 bp, synthetic construct
  source 1..75: mol_type = other DNA
ttatacgctttacagcagtgtaagtggagcaaatgtgtatattgataacaatatcattgatgcgaatggtgtaat

SEQ ID NO: 220238 - DNA, 75 bp, synthetic construct
  source 1..75: mol_type = other DNA
accaaacctgttggtaatcaaggttccattaacggtggagaaggtagcgatactctggttctggcaggtaatatt

SEQ ID NO: 220239 - DNA, 75 bp, synthetic construct
  source 1..75: mol_type = other DNA
tgttgcgcgtattattaaagccaaaaaaccggcgattttcgtccttgagaacgttaagaacctgaaaagtcacga

SEQ ID NO: 220240 - DNA, 75 bp, synthetic construct
  source 1..75: mol_type = other DNA
gggaaagtaacttttcgaatccccgtatccgatactcaagcttaccgccagttcggaaattccgtcatcgtgccg

SEQ ID NO: 220241 - DNA, 75 bp, synthetic construct
  source 1..75: mol_type = other DNA
gttagatggcactgagcatagttatacgctttacagcagtgtaagtggagcaaatgtgtatattgataacaatat

SEQ ID NO: 220242 - DNA, 75 bp, synthetic construct
  source 1..75: mol_type = other DNA
gtcgcacattaacgtcggcacgggcgttgactgcactatccgcgagctggcgcaaaccatcgccaaagtggtggg

SEQ ID NO: 220243 - DNA, 75 bp, synthetic construct
  source 1..75: mol_type = other DNA
gcacaccccggaaaattgattttacgctgtcgctcacccgcgttgatgaatcactggccgcgctttatggacgat

SEQ ID NO: 220244 - DNA, 75 bp, synthetic construct
  source 1..75: mol_type = other DNA
ctgaataatttgcaggacacggcaacgtctgccttaagcgatatcagtaaaacggtgggagggctgctgtcgtga

SEQ ID NO: 220245 - DNA, 75 bp, synthetic construct
  source 1..75: mol_type = other DNA
aaccgttaggcgtggtggggcagattatcccgtggaactttccgctgctgatggcgagctggaaaatggcgcctg

SEQ ID NO: 220246 - DNA, 75 bp, synthetic construct
  source 1..75: mol_type = other DNA
atgaccaacaatcccccttcagcacgtgttcagcccggcgagtatggttttcctcttaagttaaaagcccgctac

SEQ ID NO: 220247 - DNA, 75 bp, synthetic construct
  source 1..75: mol_type = other DNA
cgaaaccagtgctgccgacgtgccgctggcgattgaccattttcgctatttcgcctcgtgtattcgggcgcagga

SEQ ID NO: 220248 - DNA, 75 bp, synthetic construct
  source 1..75: mol_type = other DNA
tatttggcccggtgctggcggtgaccaccttcaaaacgatggaagaagcgctggagctggcgaacgacacgcaat

SEQ ID NO: 220249 - DNA, 75 bp, synthetic construct
  source 1..75: mol_type = other DNA
tcaactacattgatattggtaaaaaagagggcgcagatgtgctcaccggcgggcggcgcaagctgctggaaggcg

SEQ ID NO: 220250 - DNA, 75 bp, synthetic construct
  source 1..75: mol_type = other DNA
aatatgcgcgtgttccaggaggagatttttggtccggtgctggcggtgaccaccttcaaaacgatggaagaagcg

SEQ ID NO: 220251 - DNA, 75 bp, synthetic construct
  source 1..75: mol_type = other DNA
ccgctattgtccttggactggggatcagcgcctgtggttatttcgtcggcgatggtgttaaacatttaaaaacca

SEQ ID NO: 220252 - DNA, 75 bp, synthetic construct
  source 1..75: mol_type = other DNA
tcgaaaaagtcgtcgctaaactaaacgaactgcaagtcgccacggatggtgctatcgctgatagcaaaatcgcct

SEQ ID NO: 220253 - DNA, 75 bp, synthetic construct
  source 1..75: mol_type = other DNA
gatacggctgaattaaccattgcgattaactttaagggcaatgttcccggcgagcttttcccaaaactggaagac

SEQ ID NO: 220254 - DNA, 75 bp, synthetic construct
  source 1..75: mol_type = other DNA
acgcctgataattgatgactgcagccagcagacaccgtcatcgctgcgtgccagtgcccgccgttatacccgcct

SEQ ID NO: 220255 - DNA, 75 bp, synthetic construct
  source 1..75: mol_type = other DNA
gacctggtcctgctggctgcccgtccgtcaatggggaaaacttctctggcgctgtccatgtgtctcagtgccgcc

SEQ ID NO: 220256 - DNA, 75 bp, synthetic construct
  source 1..75: mol_type = other DNA
agagcatctggaacatcagggcaggctggacgtcctgggcggttttgcttatctggccgagctcagcaagaacac

SEQ ID NO: 220257 - DNA, 75 bp, synthetic construct
  source 1..75: mol_type = other DNA
gatcagcgcgcgctttttctaaacttctttctctgtccggttgtaagagcctgggatggccaagcaccgttcgta

SEQ ID NO: 220258 - DNA, 75 bp, synthetic construct
  source 1..75: mol_type = other DNA
ccgttgatgctgaacaggctgtgcttggcggcctgatgcttgataatgatcgctgggatgaagtggtgctgatgc

SEQ ID NO: 220259 - DNA, 75 bp, synthetic construct
  source 1..75: mol_type = other DNA
ccttaccttctgtcttaatgccctgtgtaaccggaccgatgaaacggtatttcttttcagtatcgaaatgtcccg

SEQ ID NO: 220260 - DNA, 75 bp, synthetic construct
  source 1..75: mol_type = other DNA
ttttgacgcccatttgcgttcggttacgaagcaaattgaaacgcagactgacattgatttgatggcaattggcat

SEQ ID NO: 220261 - DNA, 75 bp, synthetic construct
  source 1..75: mol_type = other DNA
caaattctcgcgaagttcgctcacgtatggggtgcgtaggctacacattcccacttcttaataacgtggatggtg

SEQ ID NO: 220262 - DNA, 75 bp, synthetic construct
  source 1..75: mol_type = other DNA
tcgctttgaatctttaatgctacctatcatcaaaaattggaatgaaaaggtaaattctcgcgaagttcgctcacg

SEQ ID NO: 220263 - DNA, 75 bp, synthetic construct
  source 1..75: mol_type = other DNA
tgcggatttggttttatttttataccgcgatgaggtgtatcacgaacactcaccggataaaggtgtggcagaaat

SEQ ID NO: 220264 - DNA, 75 bp, synthetic construct
  source 1..75: mol_type = other DNA
cagtcggcagtgctacgcgccaggggagcagttcgccgacccggtttatcggccagtcggctatgacgtcaagga

SEQ ID NO: 220265 - DNA, 75 bp, synthetic construct
  source 1..75: mol_type = other DNA
cggctgactgtattggctgccgtacttgtgaagtagcctgtgtggtcgctcacccttcagaacaggagttgaatg

SEQ ID NO: 220266 - DNA, 75 bp, synthetic construct
  source 1..75: mol_type = other DNA
aacgggtggataaggagggcaatcgcagcgttgccacggtcccacttacctacgcctctgcaacggatgtagcca

SEQ ID NO: 220267 - DNA, 75 bp, synthetic construct
  source 1..75: mol_type = other DNA
tcgctcataacggctattggctggttgatggcgcagtggttaatccgattcctatttccctcacgcgtgcgatgg

SEQ ID NO: 220268 - DNA, 75 bp, synthetic construct
  source 1..75: mol_type = other DNA
acgccagtgatgtgccaccagtgcgaaaacgctccttgtgttggcgcttgtcccgtgcaggcgttgagcataggg

SEQ ID NO: 220269 - DNA, 75 bp, synthetic construct
  source 1..75: mol_type = other DNA
gcgccggtgatgtgccaccagtgcgaaaacgccccttgtgttggcgcttgtcccgtgggggcgctgacgatgagc

SEQ ID NO: 220270 - DNA, 75 bp, synthetic construct
  source 1..75: mol_type = other DNA
accgcttaggcgcatcaggcagcacccggttgttactcgacaccgtgaagcccatcaggaagaagggcaaaaaat

SEQ ID NO: 220271 - DNA, 75 bp, synthetic construct
  source 1..75: mol_type = other DNA
cagttcttgaatccgcggaacggcgacttttttctctttcccagacaggcatgctgcatgagcgcagtgaagtta

SEQ ID NO: 220272 - DNA, 75 bp, synthetic construct
  source 1..75: mol_type = other DNA
ttctccgccatgcaggcgttgttgcttcagaataagcctatcgacctgataaccctggctgaatcaatggagcag

SEQ ID NO: 220273 - DNA, 75 bp, synthetic construct
  source 1..75: mol_type = other DNA
gatagtgctggtgcaggaagcgtggtgcattatgaaccctctaacgttcttctgatgactggtcgtgctgctgtg

SEQ ID NO: 220274 - DNA, 75 bp, synthetic construct
  source 1..75: mol_type = other DNA
tgggggatatcccagtactgggacatctttttagctcaaaaagtgaacatgcagccaagcgtaatctgatgttgt

SEQ ID NO: 220275 - DNA, 75 bp, synthetic construct
  source 1..75: mol_type = other DNA
acctaaaaacactgacgttgtggtaattgcaaaacctgagcacgtagcagttatccgcccggcagaaataacatc

SEQ ID NO: 220276 - DNA, 75 bp, synthetic construct
  source 1..75: mol_type = other DNA
tttgatgacgtggttaagttgtttgagcttgatacattcgaaagcccagcaaaggaggcaaccagtgagcaagat

SEQ ID NO: 220277 - DNA, 75 bp, synthetic construct
  source 1..75: mol_type = other DNA
aagaaatcatatcccgcattgaaatgtatggacatggtgcagggtatatcgcagacgaggttaatgatctggcta

SEQ ID NO: 220278 - DNA, 75 bp, synthetic construct
  source 1..75: mol_type = other DNA
cggataaagctggcaaccgaactgcaacgtagccaacgtggccatacgctgtatgttctggatgaaccgaccacc

SEQ ID NO: 220279 - DNA, 75 bp, synthetic construct
  source 1..75: mol_type = other DNA
gtctagtggcgatatttatggttcagtgtggggaaacaactggttaagcacatggctgcataatcatgtcgttcg

SEQ ID NO: 220280 - DNA, 75 bp, synthetic construct
  source 1..75: mol_type = other DNA
agcgaactggctgcggcgctgggcaatgacccgaattttgcgaccaccatgactaacgcgcttgcgggtaagcaa

SEQ ID NO: 220281 - DNA, 75 bp, synthetic construct
  source 1..75: mol_type = other DNA
gatcgtgccgcgttaaccgcgttgacaagtgttggacgtgccattcttggcaaaaccagcactcagggagttctt

SEQ ID NO: 220282 - DNA, 75 bp, synthetic construct
  source 1..75: mol_type = other DNA
atgggtggttgtgactcgtgcggtcaggattgtggcgctgacatgactgaagattctgatggcgattatgtcctg

SEQ ID NO: 220283 - DNA, 75 bp, synthetic construct
  source 1..75: mol_type = other DNA
cgcaaacctgaagcgatacgagcttgatatggatggttgtgactcgttcggtcaggattgtggcgctgacatgac

SEQ ID NO: 220284 - DNA, 75 bp, synthetic construct
  source 1..75: mol_type = other DNA
aggtgatgcggctgaacatgcagagcaccatatgaaagacaaccgctgggttccaggctggatgtgtgcaccaca

SEQ ID NO: 220285 - DNA, 75 bp, synthetic construct
  source 1..75: mol_type = other DNA
ccggcagagcagtccattctgtaacgccggatgtccgccggacctcagcattatcgacagagaaacgactggctg

SEQ ID NO: 220286 - DNA, 75 bp, synthetic construct
  source 1..75: mol_type = other DNA
ggtaagtcttcactggcttttggaaccatttatgctgaggcgcaacgacgctactttgaatcggttgccccgtat

SEQ ID NO: 220287 - DNA, 75 bp, synthetic construct
  source 1..75: mol_type = other DNA
agtttgatacaaccactcagaagttcgaaagcccagcaaaggaggcagccagtgagcgagattgtctatcaggca

SEQ ID NO: 220288 - DNA, 75 bp, synthetic construct
  source 1..75: mol_type = other DNA
atttgcagggccttcacgaggtgatggggttaattatgtaaccattcgtcctcgtaacattgcgtttaattatat

SEQ ID NO: 220289 - DNA, 75 bp, synthetic construct
  source 1..75: mol_type = other DNA
tcggtttatacctggagcctgtttaatggcgcgctttccgccaagctggatgcgccggtaagccaggtcgctttc

SEQ ID NO: 220290 - DNA, 75 bp, synthetic construct
  source 1..75: mol_type = other DNA
ttacgcactggttaacagtgttgaagagttagggccgtcagtcgtcactgagttatctcgtatcattcttgggta

SEQ ID NO: 220291 - DNA, 75 bp, synthetic construct
  source 1..75: mol_type = other DNA
caataacgtcgatggtgagagtgtcgcgcaactggctaccctgtttgcagggcgaatggaggacaaaaagatcat

SEQ ID NO: 220292 - DNA, 75 bp, synthetic construct
  source 1..75: mol_type = other DNA
tagtagagcttataataaaggtttaaaactggcttcaaatctaaattataagtatgttcttcttttagaccaaga

SEQ ID NO: 220293 - DNA, 75 bp, synthetic construct
  source 1..75: mol_type = other DNA
tgtgaatcaaatgaatttataaaggaaatttttgtatataataattctcctggtgaaatatttataccggactat

SEQ ID NO: 220294 - DNA, 75 bp, synthetic construct
  source 1..75: mol_type = other DNA
tggtcggtctggcggatggcgcgggttacctgctgacgctctctaactgcgtgaagtggttcccggagcgtagat

SEQ ID NO: 220295 - DNA, 75 bp, synthetic construct
  source 1..75: mol_type = other DNA
ggaaactcagtctcaggacggtactttcgacaagctgaccaagaaagaagcgctgatgcgcactcgtgagctgga

SEQ ID NO: 220296 - DNA, 75 bp, synthetic construct
  source 1..75: mol_type = other DNA
ttcagcatgtgacaaaacaacatggcagggcaaaacggcatttaaagatacggtcatcgacatggcgcgttataa

SEQ ID NO: 220297 - DNA, 75 bp, synthetic construct
  source 1..75: mol_type = other DNA
cacttatcaaatcgcacattagtcgcgatgatggtcacttttattcagtggctatgcaggttgctgcgcatgagg

SEQ ID NO: 220298 - DNA, 75 bp, synthetic construct
  source 1..75: mol_type = other DNA
atgctttcaggtaaacaaatacctgttgcagaacgaggcaatgaagcatatgtccgctataaccggcgcggcgaa

SEQ ID NO: 220299 - DNA, 75 bp, synthetic construct
  source 1..75: mol_type = other DNA
cgaagggcttgaactccttctggatgaaatgattaacgacctgaatactcatggtatgccagaagcgccagtgac

SEQ ID NO: 220300 - DNA, 75 bp, synthetic construct
  source 1..75: mol_type = other DNA
ccatgaattacacttggagcggcgcaaacgtgaacgatgagcatctgttgttttcaaccaataatacggtgattt

SEQ ID NO: 220301 - DNA, 75 bp, synthetic construct
  source 1..75: mol_type = other DNA
tgtagtcattcctgcaggttctgagagggtttcatttattgtcgatccagtactggaggcgaatcaggatgcgtt

SEQ ID NO: 220302 - DNA, 75 bp, synthetic construct
  source 1..75: mol_type = other DNA
tgcgtggcaaaatatcaacttaagcggaacgtataacttcactaatactgggaaattgcccaatattggcgaaat

SEQ ID NO: 220303 - DNA, 75 bp, synthetic construct
  source 1..75: mol_type = other DNA
ctgataagcagagcgatgcagcaggtcagaaaagacctggcgcaccaacttaatcaactcaccagtcctgaactt

SEQ ID NO: 220304 - DNA, 75 bp, synthetic construct
  source 1..75: mol_type = other DNA
ctcgactgcccggatgagatggacgccttctacgcgctatacgacggcagtgataatacgggaattagcgacagt

SEQ ID NO: 220305 - DNA, 75 bp, synthetic construct
  source 1..75: mol_type = other DNA
aaagcggatatcctaaaagggagtattggcaatggctttaaattaggtggtgaaggtcaaccagtaaatcacaaa

SEQ ID NO: 220306 - DNA, 75 bp, synthetic construct
  source 1..75: mol_type = other DNA
gatcctgtagatttacagacagccgtaaaatttgtcgcccccggcggtaatatataccttaacgatggtcaatat

SEQ ID NO: 220307 - DNA, 75 bp, synthetic construct
  source 1..75: mol_type = other DNA
ggtgaaaaatgcatcatttaaaccgggcaagccactggttgattacaaacaattaacttcacgtcaattcagtcg

SEQ ID NO: 220308 - DNA, 75 bp, synthetic construct
  source 1..75: mol_type = other DNA
gacgtgatggtggtttttcgctgctatatgccgcgggcaatatcggttctatcgccgcccccatcgcctgtggcc

SEQ ID NO: 220309 - DNA, 75 bp, synthetic construct
  source 1..75: mol_type = other DNA
atgcttctctggtttacgttacccctattctcgtggcttgccgaccgcctgctcggcaaccgcactgcagtgatt

SEQ ID NO: 220310 - DNA, 75 bp, synthetic construct
  source 1..75: mol_type = other DNA
tcagatacagctttaaatatccatggcacagaggatacagcaaaacaatttgcagaaaaagaagtggaagatctc

SEQ ID NO: 220311 - DNA, 75 bp, synthetic construct
  source 1..75: mol_type = other DNA
tcaggatccagaactgataacggccctcgactgcccggatgagatggacgctctacgcgctatacgacggcagtg

SEQ ID NO: 220312 - DNA, 75 bp, synthetic construct
  source 1..75: mol_type = other DNA
agctgtgcttaaaaaagccaatcaatacccatcgtattgcgcagcactgggataccatccaacggattgcagtat

SEQ ID NO: 220313 - DNA, 75 bp, synthetic construct
  source 1..75: mol_type = other DNA
ctgaatggccagctgacgctgcctgatatcactaaataccgggcactcgacgccgacctgatcgacggggaacat

SEQ ID NO: 220314 - DNA, 75 bp, synthetic construct
  source 1..75: mol_type = other DNA
cgattaattgattttgtgttgtggtcaactaaaactggccaccgcgttagagtttttccagtatcggttttctga

SEQ ID NO: 220315 - DNA, 75 bp, synthetic construct
  source 1..75: mol_type = other DNA
atttttgcctgacggtggccggtcatcaggtgtttgatgaggagcaacagcagctgattgccggcatgtcaccgg

SEQ ID NO: 220316 - DNA, 75 bp, synthetic construct
  source 1..75: mol_type = other DNA
acgtaccggaatcgactgatatctacgtttttgacgctaacgaagatgaggtcgctgatctgaaattgtctcacg

SEQ ID NO: 220317 - DNA, 75 bp, synthetic construct
  source 1..75: mol_type = other DNA
cggtttatgcggcaacggggtctaaacgcaccgcaattctgtgggcggggatttctggactagcagaaattcttg

SEQ ID NO: 220318 - DNA, 75 bp, synthetic construct
  source 1..75: mol_type = other DNA
cggctgccggacgtggtgttgtatcgccggagaatatcgcgttcacccgctggctgacacacctgcagaacggtg

SEQ ID NO: 220319 - DNA, 75 bp, synthetic construct
  source 1..75: mol_type = other DNA
atgccaaactggtgcagtaaccgtatgcatttttctggtgaaccggcacagattgctgagattaaacgactggcc

SEQ ID NO: 220320 - DNA, 75 bp, synthetic construct
  source 1..75: mol_type = other DNA
aatcaaatataagatgggatatggcaacgctttatgatcatccagataaatatagtgaatattgtgaacatcttg

SEQ ID NO: 220321 - DNA, 75 bp, synthetic construct
  source 1..75: mol_type = other DNA
tccgtgatggcatcgatcgctatctcacgccctcacgggctcagccccgtacaacgtcagccgtgaacggtcact

SEQ ID NO: 220322 - DNA, 75 bp, synthetic construct
  source 1..75: mol_type = other DNA
gaagacgcgctgtggggtcaacagccggtggaagacgtcattgcgcgtacccataaagcgggcgtgaaagaagtg

SEQ ID NO: 220323 - DNA, 75 bp, synthetic construct
  source 1..75: mol_type = other DNA
cccactccacaacggaatctttcaggaatacgttctggctcaaaaaaataatggaacactgttttaatatggttg

SEQ ID NO: 220324 - DNA, 75 bp, synthetic construct
  source 1..75: mol_type = other DNA
ccggaattatggtcgcgctttctgtcgacgaattaatgccgctggccaaagagatcgatcccaataataacccca

SEQ ID NO: 220325 - DNA, 75 bp, synthetic construct
  source 1..75: mol_type = other DNA
gagatgctccctgccgcattagccgccgaaggaatgtcccccgttctgggctacgggatgtttatctttggtctg

SEQ ID NO: 220326 - DNA, 75 bp, synthetic construct
  source 1..75: mol_type = other DNA
gcgccagcttgaccaggtgcaggcggcgctggagcgggcccgggtggctgcagttcagtccggttcgtctgagcc

SEQ ID NO: 220327 - DNA, 75 bp, synthetic construct
  source 1..75: mol_type = other DNA
ggggggatatcaccgtcaccagcgaacaagggaaaggttcaacctttactttgacgatccatgcaccgtcggtgg

SEQ ID NO: 220328 - DNA, 75 bp, synthetic construct
  source 1..75: mol_type = other DNA
tccgcaggatgagctggataaaatttttgccatgtattaccaggtgaaagacagtcacggcggtaaacctgccac

SEQ ID NO: 220329 - DNA, 75 bp, synthetic construct
  source 1..75: mol_type = other DNA
gctgatgtttactcaccggaagccgctgcgaaagtcattgaaaccgatgaaaaagtgttccgtcataatgtgtca

SEQ ID NO: 220330 - DNA, 75 bp, synthetic construct
  source 1..75: mol_type = other DNA
tccggttccggacaatattcacccgatgaccaaagatgaagcgggagtctggtcgtggcgcacgcctgtcctgaa

SEQ ID NO: 220331 - DNA, 75 bp, synthetic construct
  source 1..75: mol_type = other DNA
ctcgaacgtgccagccgcgacaaaacgacttttatctccaccatcagtcacgaattgcgtacaccgctgaacggt

SEQ ID NO: 220332 - DNA, 75 bp, synthetic construct
  source 1..75: mol_type = other DNA
ggaaattgccgttcgtgaaaaagcggaagctgaattgcaggaaaccttcggtcagctgaaaattgaaatcaaaga

SEQ ID NO: 220333 - DNA, 75 bp, synthetic construct
  source 1..75: mol_type = other DNA
atgaatcaatcttatggacggctggtcagtcgggcggcgattgctgcgacggcgattgctgcgacggcgatggct

SEQ ID NO: 220334 - DNA, 75 bp, synthetic construct
  source 1..75: mol_type = other DNA
catagcgcagatgccctgtttgctttgggtattggcatctatattttatatagtgcgttacgcatggggtatgag

SEQ ID NO: 220335 - DNA, 75 bp, synthetic construct
  source 1..75: mol_type = other DNA
cgccgatgacggatcctggggttggggttatcgtgactatcgtggcgttaatctgcacgatcatacttgtctcgt

SEQ ID NO: 220336 - DNA, 75 bp, synthetic construct
  source 1..75: mol_type = other DNA
tgaaatccgtaaagtgccgtactacgaccgcgtgggtaaacgtcacggtttgatgggctttggtcgcgacattac

SEQ ID NO: 220337 - DNA, 75 bp, synthetic construct
  source 1..75: mol_type = other DNA
ttgccaaaatcgatcaagcgcacagccattctgctcactctcggtatcagtctgcataacttcccggaagggatt

SEQ ID NO: 220338 - DNA, 75 bp, synthetic construct
  source 1..75: mol_type = other DNA
ggtaaagccgagtccctcgcggcgctggcgcaaagtatgtttatctccggttcggcgctgttcctgtttttgact

SEQ ID NO: 220339 - DNA, 75 bp, synthetic construct
  source 1..75: mol_type = other DNA
gtgctctatttctatcacggctttggtgataccggacgttccgctattgatcagggggcgtatcccgcaaatcat

SEQ ID NO: 220340 - DNA, 75 bp, synthetic construct
  source 1..75: mol_type = other DNA
gtggccaaaaattgaggcatttattacctggctaagagagcaggtatgtcagtcttgtcagtaccagcgataccg

SEQ ID NO: 220341 - DNA, 75 bp, synthetic construct
  source 1..75: mol_type = other DNA
gtggccaaaaattgaggcatttattacctggctaagagagcaggtatgtcagtcttgtcagtatccgtgataccg

SEQ ID NO: 220342 - DNA, 75 bp, synthetic construct
  source 1..75: mol_type = other DNA
gtggccaaaaattgaggcatttattacctggctaagagagcaggtatgtcagtcttgtcagtaaccgggataccg

SEQ ID NO: 220343 - DNA, 75 bp, synthetic construct
  source 1..75: mol_type = other DNA
cgcaaatgtcgagccggcaggagccacaaataaaaccgttacttgggaatccaaaaataccgagtttgcaacggt

SEQ ID NO: 220344 - DNA, 75 bp, synthetic construct
  source 1..75: mol_type = other DNA
gcgcaacattatgcggttaatttgccgacatcttctggaattggctttgatcgttctgatttagctgttattgcc

SEQ ID NO: 220345 - DNA, 75 bp, synthetic construct
  source 1..75: mol_type = other DNA
gtggccaaaaattgaggcatttattacctggctaagagagcaggtatgtcagtcttgtcagtagccgagataccg

SEQ ID NO: 220346 - DNA, 75 bp, synthetic construct
  source 1..75: mol_type = other DNA
accttgagtatatccgcgaatggagcgtctggttcgatatccggatcgttttcctgacggtgttcaagggcttcg

SEQ ID NO: 220347 - DNA, 75 bp, synthetic construct
  source 1..75: mol_type = other DNA
actggacggaaagcgtcaagcgccaggtggtaaaggatgctttttatatccatcagcataaaggaaccaccagtg

SEQ ID NO: 220348 - DNA, 75 bp, synthetic construct
  source 1..75: mol_type = other DNA
agctgtggaacccggacacctgcccggcaaatctgctgccgtggctggcgtgggcgttttcggtcgacagatggg

SEQ ID NO: 220349 - DNA, 75 bp, synthetic construct
  source 1..75: mol_type = other DNA
cgcacgagtgaaaaaactggtccatcaactggcggacaccacctgttcggtgctgctgatccccgatgtctttac

SEQ ID NO: 220350 - DNA, 75 bp, synthetic construct
  source 1..75: mol_type = other DNA
tgatggagagcttccgtaatcagccgtggttagggtttgaagtggtgggtgtctatcacgatccgaaaccgggcg

SEQ ID NO: 220351 - DNA, 75 bp, synthetic construct
  source 1..75: mol_type = other DNA
ttttccgccagactcgctatggcatggatggcaaaccgatcaaagtgtggaagttccgttccatgaaagtgatgg

SEQ ID NO: 220352 - DNA, 75 bp, synthetic construct
  source 1..75: mol_type = other DNA
ttaaccgaacatcagcgtcagcagatgcgagatcttatgcagcaggcccgacatgaacagcctcctgttaatgtt

SEQ ID NO: 220353 - DNA, 75 bp, synthetic construct
  source 1..75: mol_type = other DNA
ggaactggaatggtcttccccgacagatgacgatgagctgccggaagtcaccggacctgcgtggatagtcgacaa

SEQ ID NO: 220354 - DNA, 75 bp, synthetic construct
  source 1..75: mol_type = other DNA
cggtatggcgtgaagtggccttgtgggtatgacctgaatatcagcagtcagggagacaacttcattcaggtggat

SEQ ID NO: 220355 - DNA, 75 bp, synthetic construct
  source 1..75: mol_type = other DNA
gcacatcgctattaatattttgacgaatgataaggtattcaaggcagggttaagacgtaagatgcgaaatgcagc

SEQ ID NO: 220356 - DNA, 75 bp, synthetic construct
  source 1..75: mol_type = other DNA
attatctgcgctggaagattgggtgacctctttcagttattgggatgttttacgcctgatggatctctcctggca

SEQ ID NO: 220357 - DNA, 75 bp, synthetic construct
  source 1..75: mol_type = other DNA
gagccagaaatgacggtcagatattatatcagttctgctgatttaaccgcagaaaagttcgccacagcaatccga

SEQ ID NO: 220358 - DNA, 75 bp, synthetic construct
  source 1..75: mol_type = other DNA
atgcctggcggcgacgtgtttaactttgaaatcaacatcaacgatgcgggccagatggatgaacaaaaacttgtc

SEQ ID NO: 220359 - DNA, 75 bp, synthetic construct
  source 1..75: mol_type = other DNA
gccgggcaacggaacaaatcagccagcgcaccgcgcagtacaaccgccagcttactgagcaacaacggcggcttg

SEQ ID NO: 220360 - DNA, 75 bp, synthetic construct
  source 1..75: mol_type = other DNA
cgacagatgacgatgagctgccggaagtcaccggacctgcgtggatagtcgacaagatggcgcattatggcggat

SEQ ID NO: 220361 - DNA, 75 bp, synthetic construct
  source 1..75: mol_type = other DNA
aaagggttggaactggtcgccgaaagacgatcagcagaagaaaaccaaccagaagcaacagcaggccattgacca

SEQ ID NO: 220362 - DNA, 75 bp, synthetic construct
  source 1..75: mol_type = other DNA
caccactggccccgatttttaacagtatcggcaacgcgatcagcggcgtctgggaatggtttaccaaactactgg

SEQ ID NO: 220363 - DNA, 75 bp, synthetic construct
  source 1..75: mol_type = other DNA
tgctcaatggcaactgaccaaaaccggcgcggttaacgcattcagttcagcaggtgaaacccttcgcgatccgct

SEQ ID NO: 220364 - DNA, 75 bp, synthetic construct
  source 1..75: mol_type = other DNA
taagacgtaagatgcgaaatgcagctatggacagaaactatctggcgtcagtccttgcggagagcgggctttcgt

SEQ ID NO: 220365 - DNA, 75 bp, synthetic construct
  source 1..75: mol_type = other DNA
cctgatgaacttattgatttcacgtttgaatggaaaggtctgaagaaattatgcgtggcagtctcctttcggtca

SEQ ID NO: 220366 - DNA, 75 bp, synthetic construct
  source 1..75: mol_type = other DNA
tgcctttatctcgtttctggcgattttgcagaccattgataaatcgttgtacgaagcggcagagatggatggcgc

SEQ ID NO: 220367 - DNA, 75 bp, synthetic construct
  source 1..75: mol_type = other DNA
gtgcgtattctctccgatcccggcttctggcactcgctgtggatgacggtctggtataccgcgctggtggtggcg

SEQ ID NO: 220368 - DNA, 75 bp, synthetic construct
  source 1..75: mol_type = other DNA
ctgttaacggacatactgagaatgtacctgcgactatggaagataagctcgatacaactggtctggtatatacag

SEQ ID NO: 220369 - DNA, 75 bp, synthetic construct
  source 1..75: mol_type = other DNA
atgatgttattgttttaacaaaagattatgactctggcaaaggactcaatcagggttatataaatggtggtgatg

SEQ ID NO: 220370 - DNA, 75 bp, synthetic construct
  source 1..75: mol_type = other DNA
aaccagtacctatagtaatctggctaactcttcagatggtggtccggataattctaaagctgatggtaatgcttc

SEQ ID NO: 220371 - DNA, 75 bp, synthetic construct
  source 1..75: mol_type = other DNA
ccgcagagaagttcgccacagcaatccgaaaccactggcacgtggagaataagctgcactggcgtctggacgtgg

SEQ ID NO: 220372 - DNA, 75 bp, synthetic construct
  source 1..75: mol_type = other DNA
aaattatgcgtggcagtctcctttcggtccataatagcagaacaaaagaaagagctcgaaatgacggtcagatat

SEQ ID NO: 220373 - DNA, 75 bp, synthetic construct
  source 1..75: mol_type = other DNA
gggcggctaaataaagccttcgaggaaaaatttccgctgaaagaattaaataatccagagcatgacagttacgca

SEQ ID NO: 220374 - DNA, 75 bp, synthetic construct
  source 1..75: mol_type = other DNA
atggaacttaatgaaagaaatattacgatgaatataaaaattgctgctttaacgctggctattgccagcggtatt

SEQ ID NO: 220375 - DNA, 75 bp, synthetic construct
  source 1..75: mol_type = other DNA
aggcgctggtttccggaatgaatcatctggaaagctttggctggctggccacattcagtggtgttaccacgacaa

SEQ ID NO: 220376 - DNA, 75 bp, synthetic construct
  source 1..75: mol_type = other DNA
agctgcactggcgtctggacgtggtaatgaatgaagacgactgcaaaataagaagaggaaacgccgcagaattat

SEQ ID NO: 220377 - DNA, 75 bp, synthetic construct
  source 1..75: mol_type = other DNA
atgccccggactgacggctgccgggcgtggcgttgtatcgccggagaatatcgcgttcacccgctggctgtgcag

SEQ ID NO: 220378 - DNA, 75 bp, synthetic construct
  source 1..75: mol_type = other DNA
ggggagctggaatggtcttccccgacagatgacgatgagctgccggaagtcaccggacctgcgtggatagtcgac

SEQ ID NO: 220379 - DNA, 75 bp, synthetic construct
  source 1..75: mol_type = other DNA
gatttggcgatctactttgatgacgcgccgtcagcgcaactgactcatcactttctgatggatgaagaaatcctg

SEQ ID NO: 220380 - DNA, 75 bp, synthetic construct
  source 1..75: mol_type = other DNA
cggcattgttgccaacaacacctatccggcggatttcatctaccagaacatgatgattgagagcaatatcattca

SEQ ID NO: 220381 - DNA, 75 bp, synthetic construct
  source 1..75: mol_type = other DNA
ggcacagaatgcgccggacgtggtggtgtggggcagcggtacaccgatgcgtgaattcctgcacgtcgatgatat

SEQ ID NO: 220382 - DNA, 75 bp, synthetic construct
  source 1..75: mol_type = other DNA
tgtctggtcagtcaatatcagaagtgttcctcaacattaaagagaaagtgctggcgtggaagccggatatcatcc

SEQ ID NO: 220383 - DNA, 75 bp, synthetic construct
  source 1..75: mol_type = other DNA
cttcatcaactaggttggaatcataaaattacccttcacaagggtcttgaaaatacatacaactggtttcttgaa

SEQ ID NO: 220384 - DNA, 75 bp, synthetic construct
  source 1..75: mol_type = other DNA
aaagaggtgactggtgtggcttctggagtaacgaggctgtatcggtgtggtggaaccgtctgtgtgacaacgtac

SEQ ID NO: 220385 - DNA, 75 bp, synthetic construct
  source 1..75: mol_type = other DNA
gcgcggagagctcgttgatgtgctctggggggaactggaatggtcttccccgacagatgacgatgagctgccgga

SEQ ID NO: 220386 - DNA, 75 bp, synthetic construct
  source 1..75: mol_type = other DNA
tgtcgccgtgctcctctttttactgcgccggctgacgcggcgcggcataaacgctgcctgtggtcagtgtcccgc

SEQ ID NO: 220387 - DNA, 75 bp, synthetic construct
  source 1..75: mol_type = other DNA
aggatcgcaataacctgttttttgtcatccgtggcgacaagccgcagcaagagacgctggcagtgaagcgtaaca

SEQ ID NO: 220388 - DNA, 75 bp, synthetic construct
  source 1..75: mol_type = other DNA
cgtggagagcttgttgatgtgctgtggggggagctggaatggtcacatccgacagatgatgatgagctgccggaa

SEQ ID NO: 220389 - DNA, 75 bp, synthetic construct
  source 1..75: mol_type = other DNA
cctgctgacggttctgccgacccgcctggatgttgaagtgaatggctttaacggcggtgttctgaacggtgttcc

SEQ ID NO: 220390 - DNA, 75 bp, synthetic construct
  source 1..75: mol_type = other DNA
atgatgctggcgaccgaagaacttcgcgtggcgctggcaacgacgcatttaccgctgcgcgatatcgcagatgct

SEQ ID NO: 220391 - DNA, 75 bp, synthetic construct
  source 1..75: mol_type = other DNA
gcgcggagagcttgttgatgtgctgtggggggagctggaatggtcttccccgacagatgatgatgagctgccgga

SEQ ID NO: 220392 - DNA, 75 bp, synthetic construct
  source 1..75: mol_type = other DNA
atggtggtgttctgaacggagtcccctctgcatatcactggtataccgaacggtatggcgtgaagtggccggtgg

SEQ ID NO: 220393 - DNA, 75 bp, synthetic construct
  source 1..75: mol_type = other DNA
ctggatgttgaagtgaacggcttcaatggcggtgcactgaacgatgttccttctgcatatcactggtatacagaa

SEQ ID NO: 220394 - DNA, 75 bp, synthetic construct
  source 1..75: mol_type = other DNA
cgtggtaaagccgatgtcggcagttttattacggcgcttaatctcgccatcacaatgattgttaacacccaatga

SEQ ID NO: 220395 - DNA, 75 bp, synthetic construct
  source 1..75: mol_type = other DNA
ccggtcataccgagtttttcgaagagcgctcgcaggcaaaaaaagtggtgatgatgctggcaaccgaagaacttc

SEQ ID NO: 220396 - DNA, 75 bp, synthetic construct
  source 1..75: mol_type = other DNA
ggtatgaggtgaatatcagcagtcagggagacaacttcattcaggttgatttcgacactccgtgtgtcagccgga

SEQ ID NO: 220397 - DNA, 75 bp, synthetic construct
  source 1..75: mol_type = other DNA
aggattaccggacgatgtcagggataccatcaccgcacttttcaccgcaaaaagaggtgactggtgtggcttctg

SEQ ID NO: 220398 - DNA, 75 bp, synthetic construct
  source 1..75: mol_type = other DNA
tgttgtatcgccggagaatatcgcgttcacacgctggctgacacacctgcagaacggtgtgctactggatgaaca

SEQ ID NO: 220399 - DNA, 75 bp, synthetic construct
  source 1..75: mol_type = other DNA
atgccaaactggtgctcgaatcgtatgaatttttctggtgaaccggcacagatggctgagattaaacgactggcc

SEQ ID NO: 220400 - DNA, 75 bp, synthetic construct
  source 1..75: mol_type = other DNA
gagtaacgagaaagtatcgacgtggtggaaccgtctgtgtgacaacgtactgccggaagtcaccgcgccgaagtg

SEQ ID NO: 220401 - DNA, 75 bp, synthetic construct
  source 1..75: mol_type = other DNA
agtaacgaggatgtatcggtgtggtggaaccgtctgtgtgacaacgtactgccggaaaaaaccatgccgtttgac

SEQ ID NO: 220402 - DNA, 75 bp, synthetic construct
  source 1..75: mol_type = other DNA
tccatcaaatcggcactgcgtcttgaccccgacgggatcctgaacggtgaaatccgcgaccacgattccgccatt

SEQ ID NO: 220403 - DNA, 75 bp, synthetic construct
  source 1..75: mol_type = other DNA
gggcaacgttactgaaagatcctgaactcatctatcagggtgcaaaagcgatgcgcgaagctgtaccggcgcatt

SEQ ID NO: 220404 - DNA, 75 bp, synthetic construct
  source 1..75: mol_type = other DNA
tggaaaaacagggcgataccgggttatatcacgtcgcgcggattaagcagtggttgagttatttgcgtaaagaat

SEQ ID NO: 220405 - DNA, 75 bp, synthetic construct
  source 1..75: mol_type = other DNA
ctgcgacgcagtgatgaaaatcgccgctgcgcggtaccttcagcttatccccttcggctaccgggtcgggcgcga

SEQ ID NO: 220406 - DNA, 75 bp, synthetic construct
  source 1..75: mol_type = other DNA
ttgtgacgcggtgatgattgggcgtggggcgcttaatattcctaacctgagccgagtggtgaaatataacgaacc

SEQ ID NO: 220407 - DNA, 75 bp, synthetic construct
  source 1..75: mol_type = other DNA
taaagaatacgatgaagcaacggaattatttcagcatgttcgggtgttgaataattcccctgatattgcaagggc

SEQ ID NO: 220408 - DNA, 75 bp, synthetic construct
  source 1..75: mol_type = other DNA
atgcgtgtgttactggctccgatggagggtgtgcttgactctctggtgcgggaattactgaccgaagttaacgac

SEQ ID NO: 220409 - DNA, 75 bp, synthetic construct
  source 1..75: mol_type = other DNA
aagaaagaagaagacgccgtcgttgacgacctgctggcagaggtcagccacgcgaagcgcgatttcagcgaagaa

SEQ ID NO: 220410 - DNA, 75 bp, synthetic construct
  source 1..75: mol_type = other DNA
aaccatcgcgaaagtcgtcgcctgggcgagcaagatgggcaaaacgccgattgtggttaacgactgccccggctt

SEQ ID NO: 220411 - DNA, 75 bp, synthetic construct
  source 1..75: mol_type = other DNA
gacaccctcggtagcgcaaaatacctcgatatggcacagcaatatcagcacctcggcccgctgtatgaagtgccg

SEQ ID NO: 220412 - DNA, 75 bp, synthetic construct
  source 1..75: mol_type = other DNA
gccggtggtgcagacaacccggcaggtgttgatgataaagatctggttaaatacgccgatgttggcgcgacttac

SEQ ID NO: 220413 - DNA, 75 bp, synthetic construct
  source 1..75: mol_type = other DNA
ctttgaagtcactgcacagtaccagtttgattttggtctgcgtccggcagtctctttcctgatgtctaaaggccg

SEQ ID NO: 220414 - DNA, 75 bp, synthetic construct
  source 1..75: mol_type = other DNA
atttttatcgttgtggttaaacgtgaatttttacttcttcacaaatcttatagcgaaggtgttgaaatgagaaaa

SEQ ID NO: 220415 - DNA, 75 bp, synthetic construct
  source 1..75: mol_type = other DNA
ggatctcaattgcggctgcccgtcgaaaacggttaacggcagcggcggcggggcgacgttactcaaagatcctga

SEQ ID NO: 220416 - DNA, 75 bp, synthetic construct
  source 1..75: mol_type = other DNA
gctcttctcagagctgaaaaactggccgcgggtgcagctaaaaactgaacatttaccgacaaaagccgcgaatgc

SEQ ID NO: 220417 - DNA, 75 bp, synthetic construct
  source 1..75: mol_type = other DNA
actggcgatctggaaaacagtgccgaacgtttccaggctgacacgctggcgcgttttgagaatcgcggcgtcgac

SEQ ID NO: 220418 - DNA, 75 bp, synthetic construct
  source 1..75: mol_type = other DNA
gggcaggtttactatctctacaatgacgtggaaaacatccagaaagccgcagaacgactggcggaactggtaccg

SEQ ID NO: 220419 - DNA, 75 bp, synthetic construct
  source 1..75: mol_type = other DNA
tagaatcggcataccgggccggagtccttagcctccgtgatataggcgagaaatacggcgtaacagaaggggcta

SEQ ID NO: 220420 - DNA, 75 bp, synthetic construct
  source 1..75: mol_type = other DNA
cacgctggaagaagtggaagccatcaacctgctgcccgcacatgaatttccgaccgataaagcggcgattgagct

SEQ ID NO: 220421 - DNA, 75 bp, synthetic construct
  source 1..75: mol_type = other DNA
atgccggaatgaccacgctggaagctggcggcattactggcgagtacctgatgctcacctatgccaacgacgcca

SEQ ID NO: 220422 - DNA, 75 bp, synthetic construct
  source 1..75: mol_type = other DNA
ggccactggcaatggatcgtctggtgtgcggtgacgttggctttggtaaaacggaagtggcgatgcgtgccgctt

SEQ ID NO: 220423 - DNA, 75 bp, synthetic construct
  source 1..75: mol_type = other DNA
aatgcggtgcttagcgacatgtgtcagccgctggcaatggatcgtctggtgtgcggcgatgttggctttggtaaa

SEQ ID NO: 220424 - DNA, 75 bp, synthetic construct
  source 1..75: mol_type = other DNA
ccggcagtcgcatcctccgggtactaaaagcgctgcgtggtcatgctctgaacggtatttccaacggtgaactgg

SEQ ID NO: 220425 - DNA, 75 bp, synthetic construct
  source 1..75: mol_type = other DNA
gcctgaagtttattcaggatttgggcgaacggaaaaaacgtatcgaatgggtgcgccagtttatgcgtgaactgg

SEQ ID NO: 220426 - DNA, 75 bp, synthetic construct
  source 1..75: mol_type = other DNA
cgctggaagatctcaccagccagcaaacggaagtcgaactgcggatgccgtcgctactgccggacgatttcatcc

SEQ ID NO: 220427 - DNA, 75 bp, synthetic construct
  source 1..75: mol_type = other DNA
agagggcttcgcgtttaaacacgatcgtgagcagtatcagttgttctgcgacagcttcccgtttgaaaccacgcc

SEQ ID NO: 220428 - DNA, 75 bp, synthetic construct
  source 1..75: mol_type = other DNA
ggcaggtaaagggttacagtgccggaggtccggctgtgggagtttctgaattgtggttctgttgttccctgaatg

SEQ ID NO: 220429 - DNA, 75 bp, synthetic construct
  source 1..75: mol_type = other DNA
acaaaacggcgaccctgcgaaaccggttattgcggcagggcaaacttattttgctatccagacccgacggcagga

SEQ ID NO: 220430 - DNA, 75 bp, synthetic construct
  source 1..75: mol_type = other DNA
aactgcagcagccgcagcgtgttcacgggttgaccagtagcgatgaatatccgcaagcgtgctgcgaactgtgtc

SEQ ID NO: 220431 - DNA, 75 bp, synthetic construct
  source 1..75: mol_type = other DNA
aaatcaacctgttggatgaagatgacagtttctacgctgccaatggcatctctaccgatgatattgtcgctttag

SEQ ID NO: 220432 - DNA, 75 bp, synthetic construct
  source 1..75: mol_type = other DNA
tggcgtcgctgtttttccggctgatacgtaaagcctgtcgtcagcgtcttgaggggcgggaactatgtcaaagct

SEQ ID NO: 220433 - DNA, 75 bp, synthetic construct
  source 1..75: mol_type = other DNA
catcagccaaaatattgtctctactgatacgcatggtatagccgaggtcactatgacgcccgaaagaaacggttc

SEQ ID NO: 220434 - DNA, 75 bp, synthetic construct
  source 1..75: mol_type = other DNA
tctcgctggagatgccatcagaacagattatgatgcgttctctggcgtcgctgtcgcgcgttgaccagactaaaa

SEQ ID NO: 220435 - DNA, 75 bp, synthetic construct
  source 1..75: mol_type = other DNA
atggcggcatcggacttatcatgatcgattacctgcaactgatgcgtgtgccggcgctttcagataaccgtacac

SEQ ID NO: 220436 - DNA, 75 bp, synthetic construct
  source 1..75: mol_type = other DNA
agcaggatgcggacttgatcatgtttatctatcgtgatgaggtgtatcacgaaaacagtgatttaaaaggcatcg

SEQ ID NO: 220437 - DNA, 75 bp, synthetic construct
  source 1..75: mol_type = other DNA
ttgagtcaattgttaactcagaagtatgggaaacctgaattttcagattcagataaggcaacttggaaacttcct

SEQ ID NO: 220438 - DNA, 75 bp, synthetic construct
  source 1..75: mol_type = other DNA
atgaaaacgtcggctctggcctagtcaccgcgatggtaaaaggcgacgttggcgcagtgaatgccgcggtggatt

SEQ ID NO: 220439 - DNA, 75 bp, synthetic construct
  source 1..75: mol_type = other DNA
tgtcaaaaaatacaccaagtgcggcgaacatcagtgcatatgcggatatcgtgcgcgaacgtgccgttgttcgtg

SEQ ID NO: 220440 - DNA, 75 bp, synthetic construct
  source 1..75: mol_type = other DNA
caggtgcgatgtctggcatgctgacgcttatgccacagctgaacggtgtggatgcggctaaagcccccgccgtgg

SEQ ID NO: 220441 - DNA, 75 bp, synthetic construct
  source 1..75: mol_type = other DNA
ggcgtcgctgtttttccggctgatacgtaaagcctgtcgtcagcgtcttgaggagcgggaaccatgtcaaggctg

SEQ ID NO: 220442 - DNA, 75 bp, synthetic construct
  source 1..75: mol_type = other DNA
ggcgtcgctgttcttccggttggtacgtacggcctgccgtcagcgttttgaggggcgggaaccatgtcaaagctg

SEQ ID NO: 220443 - DNA, 75 bp, synthetic construct
  source 1..75: mol_type = other DNA
gcgtcgctgttcttccggctgatacgtacggcctgccgtcagcgtcttgaggggcgggaaccatgtcaaagctga

SEQ ID NO: 220444 - DNA, 75 bp, synthetic construct
  source 1..75: mol_type = other DNA
tgccgccggtaaagatgtcggcgcggatcaggcgctgaaaatcggtctggtggatggcgtagtcaaagcagaaaa

SEQ ID NO: 220445 - DNA, 75 bp, synthetic construct
  source 1..75: mol_type = other DNA
cgaacaaagcagcctttatcgtcggtgctgatatcaccgaatttttgtccctgttcctcgttcctgaagaacagt

SEQ ID NO: 220446 - DNA, 75 bp, synthetic construct
  source 1..75: mol_type = other DNA
tctggtggtgatggtggcgacgtttatctcgctggtcgctgccgggtggatttttaccgcactgatttatctcgt

SEQ ID NO: 220447 - DNA, 75 bp, synthetic construct
  source 1..75: mol_type = other DNA
tttttaccgcgctgatttacctcgtggcgtcggtgttcttccggttgatacgcacggcctgtcgtcagcgttttg

SEQ ID NO: 220448 - DNA, 75 bp, synthetic construct
  source 1..75: mol_type = other DNA
cgtcgcaagtaagttctcgattagcaacggaggaaaaggcatgacggatagtaacggggttgcaatcgcctccct

SEQ ID NO: 220449 - DNA, 75 bp, synthetic construct
  source 1..75: mol_type = other DNA
cgtcgcaagtcggttctcgattagcaacagcggaaaaggcatgacggatagcaacgggactgcaatcgcctccct

SEQ ID NO: 220450 - DNA, 75 bp, synthetic construct
  source 1..75: mol_type = other DNA
tcagttttgtcgctgcctgggcgattctggcgacggttatctgtgtggttgccggtggtgtcggcgtgtatgcca

SEQ ID NO: 220451 - DNA, 75 bp, synthetic construct
  source 1..75: mol_type = other DNA
ggcgtcgctgtttttccggctgatacgtaaagcctgtcgtcagcgtcttgaggggcgggaaccatgtcaaagctg

SEQ ID NO: 220452 - DNA, 75 bp, synthetic construct
  source 1..75: mol_type = other DNA
gctgatttatctcgtagcgtcgctgtttttccggctgatacgcacggcctgccgtcagcgtcttgaggggcggga

SEQ ID NO: 220453 - DNA, 75 bp, synthetic construct
  source 1..75: mol_type = other DNA
aagcagggcggcgtactggttccccgtaaatatcacctcatcagaaccgcttatgaaatcaacgaagagccaacc

SEQ ID NO: 220454 - DNA, 75 bp, synthetic construct
  source 1..75: mol_type = other DNA
cggcagacccaacccgaactggacaaatgcgacggtaagacaaagcagtgattatttggtcggcatgtttgctgc

SEQ ID NO: 220455 - DNA, 75 bp, synthetic construct
  source 1..75: mol_type = other DNA
atttcgcaaggctatgcataaagccgggttgcgctggtatggcgtgcgggtggctgagccacatcatgacggtac

SEQ ID NO: 220456 - DNA, 75 bp, synthetic construct
  source 1..75: mol_type = other DNA
tgaaaccgaaacggcgtaaagactacaaacagcgaattacagaccatcagcgacagcagctcgtctatgaactga

SEQ ID NO: 220457 - DNA, 75 bp, synthetic construct
  source 1..75: mol_type = other DNA
ttctggcagatgtcagcgcccagcccacccacatcagcaagccgctgatgcaacgtatcgaatacttcagcagcc

SEQ ID NO: 220458 - DNA, 75 bp, synthetic construct
  source 1..75: mol_type = other DNA
tttatggtatctggtcacctattgcagagggcaagatctgcactcatgccgtgaagtggaaaatggttcgtaagg

SEQ ID NO: 220459 - DNA, 75 bp, synthetic construct
  source 1..75: mol_type = other DNA
ttcccatatcagcaagccgctgatgcaacgtattaaatacttcagcaacctgggcaggccaaaggcttattcccg

SEQ ID NO: 220460 - DNA, 75 bp, synthetic construct
  source 1..75: mol_type = other DNA
cattcgtgaagaccgcgaggagctgggtaataacacaggaccacgctttaagtctgagctgataaacccgcgcaa

SEQ ID NO: 220461 - DNA, 75 bp, synthetic construct
  source 1..75: mol_type = other DNA
actcgtggcaataactgtccctttgctgaaaatttgtaccaacaagggaaagacaaatcagctgatggagatacc

SEQ ID NO: 220462 - DNA, 75 bp, synthetic construct
  source 1..75: mol_type = other DNA
cgctgtctgcctggtcagcaaaaaagcatctccttatgtcagctatgaagccgtgatgcataaacgtgagcagcg

SEQ ID NO: 220463 - DNA, 75 bp, synthetic construct
  source 1..75: mol_type = other DNA
cgcggaaatacgcggtgactgcgccgttttctacaccatcacctgtccgtcacgtttccattccacgctaaataa

SEQ ID NO: 220464 - DNA, 75 bp, synthetic construct
  source 1..75: mol_type = other DNA
aaatgagtcaggatcaggtgaagcgcctgtctacccttgtcgccgcgcatatgagcatgtgccttgatgcagctt

SEQ ID NO: 220465 - DNA, 75 bp, synthetic construct
  source 1..75: mol_type = other DNA
caaacagcgaattacggaccatcagcgacagcagctcgtctatgaactgaagtccaggggatttgatggcagcga

SEQ ID NO: 220466 - DNA, 75 bp, synthetic construct
  source 1..75: mol_type = other DNA
tgatatcgatttatggatggacgaagaacccgtgccgatgaataaggagctggtcgccaccctgacagaattgtg

SEQ ID NO: 220467 - DNA, 75 bp, synthetic construct
  source 1..75: mol_type = other DNA
cgctggtgctgacctttggcaaggtggagccgcgcccgaatacggtgaatgtggtgccgggtaaaaccacgttca

SEQ ID NO: 220468 - DNA, 75 bp, synthetic construct
  source 1..75: mol_type = other DNA
gcggcgtacagctgaatgtcgatgacaaaggcgcactggactgcattttacgtgcacgactggaagccctgctgg

SEQ ID NO: 220469 - DNA, 75 bp, synthetic construct
  source 1..75: mol_type = other DNA
gcaagcgatggatcgcgccaacagttatgtgattggcgatcgcgcgaccgacattcaactggcggaaaacatggg

SEQ ID NO: 220470 - DNA, 75 bp, synthetic construct
  source 1..75: mol_type = other DNA
gcgatgacccttgcgggcgtattgctgcatccgggcatcggccagatgctggcggcaggtaaaacggtggatttt

SEQ ID NO: 220471 - DNA, 75 bp, synthetic construct
  source 1..75: mol_type = other DNA
atttaaaaaaagaatggcagcaagtgggctggaaacacgtttcgatgaagtggggaatttatacggtcgcctgaa

SEQ ID NO: 220472 - DNA, 75 bp, synthetic construct
  source 1..75: mol_type = other DNA
tctcaccggcgaaattcaggcacttcatgcgcctgtcgtagttaatgccgccgggatctgggggcaacacattgc

SEQ ID NO: 220473 - DNA, 75 bp, synthetic construct
  source 1..75: mol_type = other DNA
tgattatggatcaccgcattaatcagcatgtgatcaaccgctgccgcaaaccttccgacgccgatattctggtgc

SEQ ID NO: 220474 - DNA, 75 bp, synthetic construct
  source 1..75: mol_type = other DNA
acccggcactgattggcgcggtgaaagttccggatggcaccgttgatccatttcgtctgaccgcagcaaatatgc

SEQ ID NO: 220475 - DNA, 75 bp, synthetic construct
  source 1..75: mol_type = other DNA
catcagctctatattccgcatattttcagctacctgaatgaagatattgattttgtgctgaatgagctgaaagcc

SEQ ID NO: 220476 - DNA, 75 bp, synthetic construct
  source 1..75: mol_type = other DNA
ttttgtgctgaatgaactgaaagccaaaggcctgtgccgcgattttctcgcccagcagaaagaccggggagacaa

SEQ ID NO: 220477 - DNA, 75 bp, synthetic construct
  source 1..75: mol_type = other DNA
gttctgcggtttatcgtcatggcgatcgcacgcctgcctggctgagcgaaggccgtctgcaccgtagcctggtat

SEQ ID NO: 220478 - DNA, 75 bp, synthetic construct
  source 1..75: mol_type = other DNA
accataattattagtgctgttggcagcatcattaattatgtcattgaaaattacaaactcaaatttatcacacca

SEQ ID NO: 220479 - DNA, 75 bp, synthetic construct
  source 1..75: mol_type = other DNA
atggcgaacatttcggcatgagcctttctggcttgttgacctttggtggtattggtggtctggctgtcggtatgg

SEQ ID NO: 220480 - DNA, 75 bp, synthetic construct
  source 1..75: mol_type = other DNA
taagttatttctcctgattaatcagtttgaaaggcaacagataaaaaaaggtcgagatatcaccagcgcgcggat

SEQ ID NO: 220481 - DNA, 75 bp, synthetic construct
  source 1..75: mol_type = other DNA
agtgaagccggaagaaatccgccaggcgtgggaactggttgcagcggaagcgatgcgccttgatgttatcccgcc

SEQ ID NO: 220482 - DNA, 75 bp, synthetic construct
  source 1..75: mol_type = other DNA
cctacgagctgaacgatgagccgagtacttatggcgatcatggtatccgtatctatggcgtctggtcccctattc

SEQ ID NO: 220483 - DNA, 75 bp, synthetic construct
  source 1..75: mol_type = other DNA
gaactcgctgttttcgtctatcagcgtagaaaacccggggcgaatgaccaaccgacgtattaccacgacaatcgg

SEQ ID NO: 220484 - DNA, 75 bp, synthetic construct
  source 1..75: mol_type = other DNA
gggggcgtgttcgtggtagaaacgctttctgtcatcctgcaggtcggctcctttaaactgcgcggacaacgtatt

SEQ ID NO: 220485 - DNA, 75 bp, synthetic construct
  source 1..75: mol_type = other DNA
tgcaggtcggctcctttaaactgcgcggacaacgtattttccgcatggcaccgattcatcaccactatgaactga

SEQ ID NO: 220486 - DNA, 75 bp, synthetic construct
  source 1..75: mol_type = other DNA
tctggaggctgatcgtcttcgccgtgatgcaggtattgatgatggcaatggagagcgtgacctcaatgacttcta

SEQ ID NO: 220487 - DNA, 75 bp, synthetic construct
  source 1..75: mol_type = other DNA
attatgcagagagccgcatttctcttgatcagcaactaatcagacatccttccgcgacctacttcatgcgggcgg

SEQ ID NO: 220488 - DNA, 75 bp, synthetic construct
  source 1..75: mol_type = other DNA
atgggattcccatcaccagcagccgattttgctgaaagcagaatttcgcttgacgcacaattcatcaaacgacca

SEQ ID NO: 220489 - DNA, 75 bp, synthetic construct
  source 1..75: mol_type = other DNA
agcgatgaagaaaagtcgctggttaaacaggcagatgcgctgtgtgcgtatctgaaatgcctggaagaactcgca

SEQ ID NO: 220490 - DNA, 75 bp, synthetic construct
  source 1..75: mol_type = other DNA
agtctgagctgataaacccgcgcaaaggaacgccgacaagctacatcgcgaaatatatcagcaagaacattgacg

SEQ ID NO: 220491 - DNA, 75 bp, synthetic construct
  source 1..75: mol_type = other DNA
ttcccatatcagcaagccgctgatacaacgtattgaatacttcagcagcctggacaggccaaaggcttattcccg

SEQ ID NO: 220492 - DNA, 75 bp, synthetic construct
  source 1..75: mol_type = other DNA
tgcgtttgagcaactccgttggaaaagaaaccgccgtaaacccgtgccctatgaactcattccgggttcgctggc

SEQ ID NO: 220493 - DNA, 75 bp, synthetic construct
  source 1..75: mol_type = other DNA
tgaaaccgaaacggcgtagagactacaaacagcgaattacagaccatcaacgacagcagctcgtctatgaactga

SEQ ID NO: 220494 - DNA, 75 bp, synthetic construct
  source 1..75: mol_type = other DNA
tttatggcatctggtcacccattgcagaaggcaagatctgcactcatgcagtgaagtggaaaatggttcgtaaag

SEQ ID NO: 220495 - DNA, 75 bp, synthetic construct
  source 1..75: mol_type = other DNA
ccggtactggataacccgcgtcttgatgccattctggctgctgctgatgcaggttgttttgccacctacatcatg

SEQ ID NO: 220496 - DNA, 75 bp, synthetic construct
  source 1..75: mol_type = other DNA
ggctggagcgcgtgcgtgacagtcaggtgtctgcctctttccggttcatggcaagtcatgacgggctggaggggc

SEQ ID NO: 220497 - DNA, 75 bp, synthetic construct
  source 1..75: mol_type = other DNA
gctactgataacgagcaggagcaactgcgccgtgaggcgttgagtgatgaggtctgggaacgttatttcttcaat

SEQ ID NO: 220498 - DNA, 75 bp, synthetic construct
  source 1..75: mol_type = other DNA
gccatccgtgaagaccgcgaggagctgggtaccaataccgggccgcgcttcaagtctgagctaatcaacccgcgc

SEQ ID NO: 220499 - DNA, 75 bp, synthetic construct
  source 1..75: mol_type = other DNA
agtccagaggatttgatggcagcgagaaagaggtcgatttactccttcgcggtggcagtattccgtcaggagcag

SEQ ID NO: 220500 - DNA, 75 bp, synthetic construct
  source 1..75: mol_type = other DNA
caggtaaaaccgaagcggaaaaaaggatataagcaacaaatttcgcagcagcaacggctgcagcttgaggccgaa

SEQ ID NO: 220501 - DNA, 75 bp, synthetic construct
  source 1..75: mol_type = other DNA
tggttgttttgccacctatatcatgaagcagggtggcgtactggttccccgtaaatatcacctcatcagaaccgc

SEQ ID NO: 220502 - DNA, 75 bp, synthetic construct
  source 1..75: mol_type = other DNA
cccgcaatgttcgcgttaagcctttccgggcttatgttgaagaccactggcggcagttgttcgccggattgaatg

SEQ ID NO: 220503 - DNA, 75 bp, synthetic construct
  source 1..75: mol_type = other DNA
ttccgtggaatacatcccgtgacagtggacgcccgaatactggtcgtggtggttacccgacctgtaatgagtggt

SEQ ID NO: 220504 - DNA, 75 bp, synthetic construct
  source 1..75: mol_type = other DNA
gaagcaccaggatcagggaatgacaacggataaaaatacgctgcgggatattgagtggattggcagcaggacatt

SEQ ID NO: 220505 - DNA, 75 bp, synthetic construct
  source 1..75: mol_type = other DNA
ggggaggatgaggggaataaggggctgctctcgctgccccgtattgaacatgcgctgtacatgggattctttgtg

SEQ ID NO: 220506 - DNA, 75 bp, synthetic construct
  source 1..75: mol_type = other DNA
gcgttgctatgctgaatgatcggatatctcctattgttgataaggaaattcagcagtttttgcaatcagataaaa

SEQ ID NO: 220507 - DNA, 75 bp, synthetic construct
  source 1..75: mol_type = other DNA
ggtatgaaatcaggcactgataaagcaacacaagcaggagaacaaggtggtgaagttgctaaaaatgctggcact

SEQ ID NO: 220508 - DNA, 75 bp, synthetic construct
  source 1..75: mol_type = other DNA
ggtacagattgggggagggatagctcaaagtatgggagatggcaccagacaagctcaaaataccggaggcagtgc

SEQ ID NO: 220509 - DNA, 75 bp, synthetic construct
  source 1..75: mol_type = other DNA
atgtttatggtgttgccggcagtctggcttggtgctctgtcgtgggcgggagtacatgcaggtcacgcggttact

SEQ ID NO: 220510 - DNA, 75 bp, synthetic construct
  source 1..75: mol_type = other DNA
tccatgtgatcagcaaaggcatcaccagcgcaacggttgctaccctgccctgccagccagacctgcgtcagatcc

SEQ ID NO: 220511 - DNA, 75 bp, synthetic construct
  source 1..75: mol_type = other DNA
ggagcagatgagggtaacaaagccgcgctctctctgatatggactgagcatctgatgtacacctcgctgctggtg

SEQ ID NO: 220512 - DNA, 75 bp, synthetic construct
  source 1..75: mol_type = other DNA
atgtttattgtgttgccagcagtgtggctgggggcattatcctgggccggagtaaatgtcggtgcagctatcact

SEQ ID NO: 220513 - DNA, 75 bp, synthetic construct
  source 1..75: mol_type = other DNA
tgcgttttgagatccagcgaacgtttatagaaaacagggcacttgctgatgagctgcaggactttacgaacgact

SEQ ID NO: 220514 - DNA, 75 bp, synthetic construct
  source 1..75: mol_type = other DNA
aaggataaaaaactcctttcagatattgcgtggatagggagtaccacgtttatgaaaggcgattacatgacgctg

SEQ ID NO: 220515 - DNA, 75 bp, synthetic construct
  source 1..75: mol_type = other DNA
tctaaccgtatggcagaagagcttaaggatgtggcagataaggtatacacccgcgatctctttggcagcgactaa

SEQ ID NO: 220516 - DNA, 75 bp, synthetic construct
  source 1..75: mol_type = other DNA
acgaccccatggacgatcgtcagcgtattgctattgaaccaatatacgacccgtcgcgctctgtgtggtttgacc

SEQ ID NO: 220517 - DNA, 75 bp, synthetic construct
  source 1..75: mol_type = other DNA
agagataaatctggcaacattatcgctggagctacccccgcaggatatacacagcctgcggttatgaatcaggca

SEQ ID NO: 220518 - DNA, 75 bp, synthetic construct
  source 1..75: mol_type = other DNA
actaacgaaactgctcaaactcaaatcaaagcatttactgcccagcaggatgcgatggagagtcaggcaaacact

SEQ ID NO: 220519 - DNA, 75 bp, synthetic construct
  source 1..75: mol_type = other DNA
ctattttttgttccgtcccgatcatcattgccgggattgtaaaactattgctacctgtgccagtcatttggcgaa

SEQ ID NO: 220520 - DNA, 75 bp, synthetic construct
  source 1..75: mol_type = other DNA
aaacaattcgataaattgctcaacgttacgctgtgttatccggataatcaccgtcaaccattcttcgatatgcta

SEQ ID NO: 220521 - DNA, 75 bp, synthetic construct
  source 1..75: mol_type = other DNA
gtcatccggagcgacgcggtaaagatgtagaaactactcgtcgttcctgcgaaaaatttcgcctgcatcctacca

SEQ ID NO: 220522 - DNA, 75 bp, synthetic construct
  source 1..75: mol_type = other DNA
ttgaccgaacgcctccggcaacgggtaccataagttatacgagaaatgggtggaactttggcagcgaagcgatct

SEQ ID NO: 220523 - DNA, 75 bp, synthetic construct
  source 1..75: mol_type = other DNA
tgcgatttgcagcgaacgagacgctgaaagttcacgacagtaaatggctaaaaagtaacggtttatctaaccagt

SEQ ID NO: 220524 - DNA, 75 bp, synthetic construct
  source 1..75: mol_type = other DNA
atttatcgtctgattatgaagagcggttcagataacttccgtgcgtcttccattcaggggattatgaaacgtatc

SEQ ID NO: 220525 - DNA, 75 bp, synthetic construct
  source 1..75: mol_type = other DNA
gcatatccccctcatcccggtttatggaaaacgctggttcattgatgacattgagcgtgtcgaaggacatattgc

SEQ ID NO: 220526 - DNA, 75 bp, synthetic construct
  source 1..75: mol_type = other DNA
agaaaccccgacgtattcctggtgagcatatccccctcatcccggtttatggaaaacgctggttcattgatgaca

SEQ ID NO: 220527 - DNA, 75 bp, synthetic construct
  source 1..75: mol_type = other DNA
acagccgtagcactgaaagcaacggacaacacgccgctggccatcatccgaaccagtgtgttgcgtcgtcaggac

SEQ ID NO: 220528 - DNA, 75 bp, synthetic construct
  source 1..75: mol_type = other DNA
ctgcttaaagtctgttaatagtgcaatcactgatcttggtttcataagagtagatcctgttagtttcgctaattg

SEQ ID NO: 220529 - DNA, 75 bp, synthetic construct
  source 1..75: mol_type = other DNA
tcttggtgcccatcgtgcgttagaaattactaatgatccaatattattagttttggctgctgatcactctatttt

SEQ ID NO: 220530 - DNA, 75 bp, synthetic construct
  source 1..75: mol_type = other DNA
tatttatgaacaatgccgaattgctataagccaatctgtgaaagatatgaattttatccgaccagagccaagtac

SEQ ID NO: 220531 - DNA, 75 bp, synthetic construct
  source 1..75: mol_type = other DNA
gaagaagccatcgaagctgaaatggaaaaagagattagctgcgttgattcggcagaactgggtaaagccagccgt

SEQ ID NO: 220532 - DNA, 75 bp, synthetic construct
  source 1..75: mol_type = other DNA
gtgcgttacaccgcaggtagcggcgatccgcttgagcatgagtcagttaaagccgtgaccgcagaggttgaagct

SEQ ID NO: 220533 - DNA, 75 bp, synthetic construct
  source 1..75: mol_type = other DNA
gtggttctggtaccagattatggcctctttcacgtacactttatccgaaacaatttctgtctttgaatagtcgtt

SEQ ID NO: 220534 - DNA, 75 bp, synthetic construct
  source 1..75: mol_type = other DNA
tatcagcaggattgtgcgggcctggtgcgatttgcggcgaacgaggcgctgaaagttcacgacagcaaatggcta

SEQ ID NO: 220535 - DNA, 75 bp, synthetic construct
  source 1..75: mol_type = other DNA
tgcgatttgcggcgaacgaggcgctgaaagttcacgacagtaaatggctaaaaagtaacggtttatctaaccagt

SEQ ID NO: 220536 - DNA, 75 bp, synthetic construct
  source 1..75: mol_type = other DNA
caagacgatttatgagagactcaatcaatctggacgcatagagtgtctttcgcatacagttacctatcggcattg

SEQ ID NO: 220537 - DNA, 75 bp, synthetic construct
  source 1..75: mol_type = other DNA
aatagttgaagtccttaaccaaaacggcagagatgagtcgaaaaaacataaagaagtatatcggccttggggtga

SEQ ID NO: 220538 - DNA, 75 bp, synthetic construct
  source 1..75: mol_type = other DNA
gtcgtaatactgcgcctgctgtagcacttgcagcacttcaggctatggtaactggagatgatcctattctgttgg

SEQ ID NO: 220539 - DNA, 75 bp, synthetic construct
  source 1..75: mol_type = other DNA
acagctacagaatgagatagcccggctcaggcaggcgctggagcaggaaaagaaacggggattctggtccaggtt

SEQ ID NO: 220540 - DNA, 75 bp, synthetic construct
  source 1..75: mol_type = other DNA
acgggtaatcgccgcagcaaaatacacacaccgactcaggctcaagaagcaatttcccgctggactgccacttgt

SEQ ID NO: 220541 - DNA, 75 bp, synthetic construct
  source 1..75: mol_type = other DNA
acgggtaatcgccgcagaaaaatacacacaccgcctcaggctcaagaagcaatttcccgctggactgccacttgt

SEQ ID NO: 220542 - DNA, 75 bp, synthetic construct
  source 1..75: mol_type = other DNA
cgcaggaaaatacacacaccgtctcaggctcaagaagcaattacccgctggtctgccacttgttgcgatccgtca

SEQ ID NO: 220543 - DNA, 75 bp, synthetic construct
  source 1..75: mol_type = other DNA
aggttttgatggcgttgaacttcatggcgcgcatggattccttctgcagaatttcttttctcctctctttaaccg

SEQ ID NO: 220544 - DNA, 75 bp, synthetic construct
  source 1..75: mol_type = other DNA
ttaacagccttgaaaaattagctgctgcagccaaaagtggcggagctccggcaatcctgcagatttttcacgccg

SEQ ID NO: 220545 - DNA, 75 bp, synthetic construct
  source 1..75: mol_type = other DNA
gcgtaatgaccgatggggaggagatcttgaaggacgtatgcgcttcccgctggccgtattacaggaagtaaaaaa

SEQ ID NO: 220546 - DNA, 75 bp, synthetic construct
  source 1..75: mol_type = other DNA
gtatttcgtatatacatacctcgctggtcagtattagcatagctaccctgttgagcctgccaaatggcccccgaa

SEQ ID NO: 220547 - DNA, 75 bp, synthetic construct
  source 1..75: mol_type = other DNA
gtatttcgtatatacatacctcgctggtcagtattaccatagctaccctgttgaggctgccaaatggcccccgaa

SEQ ID NO: 220548 - DNA, 75 bp, synthetic construct
  source 1..75: mol_type = other DNA
cagctacataaagagatagagcagctcaggcaggcactggagcaggaaaaaaaacggggattctgggccagactg

SEQ ID NO: 220549 - DNA, 75 bp, synthetic construct
  source 1..75: mol_type = other DNA
cgcagtaaaatacacacaccgtctcaggctcaagaagcaattacccgctggtctgccacttgttgcgatccgaca

SEQ ID NO: 220550 - DNA, 75 bp, synthetic construct
  source 1..75: mol_type = other DNA
cgcagaaaaatacacacaccgtctcaggctcaagaagcaattacccgctgggctgccacttgttgcgatccgcca

SEQ ID NO: 220551 - DNA, 75 bp, synthetic construct
  source 1..75: mol_type = other DNA
cgcagaaaaatacacacaccgtctcaggctcaagaagcaattacccgctggcctgccacttgttgcgatccggca

SEQ ID NO: 220552 - DNA, 75 bp, synthetic construct
  source 1..75: mol_type = other DNA
cactgaaactgtccggaaaaatccacaaacagcttgaaagtattgcccgaagtcgtggcgaccccccgcccaaaa

SEQ ID NO: 220553 - DNA, 75 bp, synthetic construct
  source 1..75: mol_type = other DNA
gattgccggtcccaaaggaaagccgatgcgcaccgtgcatccggataaaatctaccgtgaaattatatggttctg

SEQ ID NO: 220554 - DNA, 75 bp, synthetic construct
  source 1..75: mol_type = other DNA
ttatgcccctcaacccattccggagatggacagttctgctgttgttccaccaactaatgaaaacacctcgcctcc

SEQ ID NO: 220555 - DNA, 75 bp, synthetic construct
  source 1..75: mol_type = other DNA
cgctgaaactgtccggaaaaatccacaaacagcctgaaagtattgcccgaagtcgtggcgacccccctcccaaaa

SEQ ID NO: 220556 - DNA, 75 bp, synthetic construct
  source 1..75: mol_type = other DNA
ccctgaaactgtccggaaaaatccacaaacagcgtgaaagtattgcccgaagtcgtggcgacccccctcccaaaa

SEQ ID NO: 220557 - DNA, 75 bp, synthetic construct
  source 1..75: mol_type = other DNA
ctctgaaactgtccggaaaaatccacaaacagcatgaaagtattgcccgaagtcgtggcgaccccccgcccaaaa

SEQ ID NO: 220558 - DNA, 75 bp, synthetic construct
  source 1..75: mol_type = other DNA
gggcagtcgccctaaaacaaagttaaacatcatgagggaagcggtgatcgccgaagtatcgactcaactatcaga

SEQ ID NO: 220559 - DNA, 75 bp, synthetic construct
  source 1..75: mol_type = other DNA
ggagcagcaacgatgttacgcagcagggcagtcgccctaaaacaaagttaaacatcatgagggaagcggtgatcg

SEQ ID NO: 220560 - DNA, 75 bp, synthetic construct
  source 1..75: mol_type = other DNA
atggtgccggatacaccacaggttgaagaagttctgttcggtgaaaatggttgtaccaaagcctcgctgaagggc

SEQ ID NO: 220561 - DNA, 75 bp, synthetic construct
  source 1..75: mol_type = other DNA
gatgagctgaaaagtgcccgggagcaacaaaaaaggcgtgatgaacgtgctgatggttccgtcccgctgaaactg

SEQ ID NO: 220562 - DNA, 75 bp, synthetic construct
  source 1..75: mol_type = other DNA
atgtattcagaaacgcgtaatatgaccccgtttggcgacagcgattatgctgtggcaaacaaaacccagaatttt

SEQ ID NO: 220563 - DNA, 75 bp, synthetic construct
  source 1..75: mol_type = other DNA
atgcccccggaacatctgcggtttgccatgggttttccatcgcaaccgaagattgccggtcccagagaaaagccg

SEQ ID NO: 220564 - DNA, 75 bp, synthetic construct
  source 1..75: mol_type = other DNA
gcattacaggtagacgaatggtactcccgcgtacgccgtgccgcaccgtggaaagatctgccaagacgtgttttt

SEQ ID NO: 220565 - DNA, 75 bp, synthetic construct
  source 1..75: mol_type = other DNA
tcgttattgcaggtggagccactaaacgataccgaaaggatgctggcgctggcggaaaatatgctcgaccgctac

SEQ ID NO: 220566 - DNA, 75 bp, synthetic construct
  source 1..75: mol_type = other DNA
aatattcctccgtggctgggggaagaaaatacgcgcgccaatattcaggggctaattaacgaacagcgcaatgct

SEQ ID NO: 220567 - DNA, 75 bp, synthetic construct
  source 1..75: mol_type = other DNA
cccgcaatgttcgcgttaagccgttccgggcttatgttgaaaaccactggcggcggttgttcgctggtctgaatg

SEQ ID NO: 220568 - DNA, 75 bp, synthetic construct
  source 1..75: mol_type = other DNA
ttatacctttggctgggtttctgatattagccacctggcgagtttttgtgggtgaccctccggttttctgcatac

SEQ ID NO: 220569 - DNA, 75 bp, synthetic construct
  source 1..75: mol_type = other DNA
gcctggaactttgagccggatgccggttactggctgaaccggtatatcactcgttatggcatccgcaaatttcct

SEQ ID NO: 220570 - DNA, 75 bp, synthetic construct
  source 1..75: mol_type = other DNA
tcaatttggccatatattgaaaccggcattcttgatgaagtgttgcgccatcgctcgaccattgttttcaccaat

SEQ ID NO: 220571 - DNA, 75 bp, synthetic construct
  source 1..75: mol_type = other DNA
ttgcaacgactggctcctggcagaagagcgaaaggtgaagaaggattgttcgacctgctgcgcgaactggggcca

SEQ ID NO: 220572 - DNA, 75 bp, synthetic construct
  source 1..75: mol_type = other DNA
ttcgccgcccgttttcgcgaatgcgccgcgcgggcattattaatgccggggcgcacgccgggccatcgcaccccg

SEQ ID NO: 220573 - DNA, 75 bp, synthetic construct
  source 1..75: mol_type = other DNA
gtgatgacggcattgttgcgcgcattcctgacaccgatggtaaattgcctgacgccgccattttcttgtttgaac

SEQ ID NO: 220574 - DNA, 75 bp, synthetic construct
  source 1..75: mol_type = other DNA
agtattcccccgtggctggcagaagaaaatacgctcgccaatattaagggactgattgacgagcagcgcaaagca

SEQ ID NO: 220575 - DNA, 75 bp, synthetic construct
  source 1..75: mol_type = other DNA
ctgatcaccacgcccgaatcactctacctgatgctgacctcccgcgcgcgagagacgctgcgcggcgtcgaaacg

SEQ ID NO: 220576 - DNA, 75 bp, synthetic construct
  source 1..75: mol_type = other DNA
tcaggcagtggaaaaacctctgcctgcgcaaaattaatcgctcctgttcatgaaacagaagaagaactacatcag

SEQ ID NO: 220577 - DNA, 75 bp, synthetic construct
  source 1..75: mol_type = other DNA
caggatacgcatgaagttgaactttccggagggcaacgtaccagccttcagatatttatgtgtctttcatcagca

SEQ ID NO: 220578 - DNA, 75 bp, synthetic construct
  source 1..75: mol_type = other DNA
gaatcctcatatgggtacttttgaagacattattgtcagaaaaagagagcaggttgtcaggatagccgcaattct

SEQ ID NO: 220579 - DNA, 75 bp, synthetic construct
  source 1..75: mol_type = other DNA
aagaaatcgttaaaaaattccagatacatcatcgtgttgcaattgaatatggcggcagcgtatacgatattgata

SEQ ID NO: 220580 - DNA, 75 bp, synthetic construct
  source 1..75: mol_type = other DNA
gctgatggagcgcccgattgtggtcgccaatggcaaagcgcggattggacgtccaccggagcaagtgctggaaat

SEQ ID NO: 220581 - DNA, 75 bp, synthetic construct
  source 1..75: mol_type = other DNA
tcatcgtgaatgacgcgacaccagaagggatagctttgaaactcagccagtcaccttctcttctgttgctgtctg

SEQ ID NO: 220582 - DNA, 75 bp, synthetic construct
  source 1..75: mol_type = other DNA
tcagctggcgaaaaactatatggccagcatcaggagtgccgatgtcgccaagctgagagatgaatggttgaaaat

SEQ ID NO: 220583 - DNA, 75 bp, synthetic construct
  source 1..75: mol_type = other DNA
agaacgccagaacaaggcgcctggaaacgcagcgtgtactttcagagaaaaccagtgttacgccagggaaagaaa

SEQ ID NO: 220584 - DNA, 75 bp, synthetic construct
  source 1..75: mol_type = other DNA
atagctgattttcgtgcgctgccgtggttgtctgctttgcatcaaaagcagacattaccagatttagacatctgt

SEQ ID NO: 220585 - DNA, 75 bp, synthetic construct
  source 1..75: mol_type = other DNA
ggcaaaacactctggcaaagtgatgtcatggaatggcgatttacggtgccctcgctgttggtgctccgcttggcc

SEQ ID NO: 220586 - DNA, 75 bp, synthetic construct
  source 1..75: mol_type = other DNA
tcgggaccactccgaccgcgcacagaagctctctcatggctgaaagcaggtatggtctggcagggctggggatgg

SEQ ID NO: 220587 - DNA, 75 bp, synthetic construct
  source 1..75: mol_type = other DNA
gctggctggacaccgttgccgttcgtcgtgcggtacagctgaactccctgtctggcttctgtctgactaaactgg

SEQ ID NO: 220588 - DNA, 75 bp, synthetic construct
  source 1..75: mol_type = other DNA
tgagtcagtatccggagttgatagcgcagttttcaagtggtaatcaaacacgtataaaacaaggattaatcgcaa

SEQ ID NO: 220589 - DNA, 75 bp, synthetic construct
  source 1..75: mol_type = other DNA
agagcagatcattgccgtcagcaatgaaacgcatatttaccgcagcctgcgttatcgcgataaagaaggcaagat

SEQ ID NO: 220590 - DNA, 75 bp, synthetic construct
  source 1..75: mol_type = other DNA
gtgaaatcgatgttatgtataaccattgattttatgaatatgtcgcagctcactgaacaggcatttacaccatct

SEQ ID NO: 220591 - DNA, 75 bp, synthetic construct
  source 1..75: mol_type = other DNA
gcgttaaaccaaaatccagcccttaagaaagcactcaaagccttagaagatgagctgcgcggtaaaggcgtcctg

SEQ ID NO: 220592 - DNA, 75 bp, synthetic construct
  source 1..75: mol_type = other DNA
ctgtaaagtagcaaaccagattatcgtggcgctcaatattgaagcggtttctgaagccctgctgtttgcatcgaa

SEQ ID NO: 220593 - DNA, 75 bp, synthetic construct
  source 1..75: mol_type = other DNA
tgaagggcaaaaccattgttgatatgagctccatttccccgattgaaactaagcgtttcgctcgtcaggtgaatg

SEQ ID NO: 220594 - DNA, 75 bp, synthetic construct
  source 1..75: mol_type = other DNA
gtggcgaccaggtaaattctggcatcgccgtagctttcgccagaaatttttgctgcgctctttgattatgccgcg

SEQ ID NO: 220595 - DNA, 75 bp, synthetic construct
  source 1..75: mol_type = other DNA
gtattatctttgctcgcacttaatgccgctcttccgctgaaagaaaccttagttgaagcttacttaattaatagt

SEQ ID NO: 220596 - DNA, 75 bp, synthetic construct
  source 1..75: mol_type = other DNA
atgtctggaaatataggggcaaatccagcccgatattttatcacccagtatataaaacatcgtgaaggttataat

SEQ ID NO: 220597 - DNA, 75 bp, synthetic construct
  source 1..75: mol_type = other DNA
ttatgattatgtaatggcttacagcgcggagaatgtcgcggcagattataacgcattatttaacagtgaacaggc

SEQ ID NO: 220598 - DNA, 75 bp, synthetic construct
  source 1..75: mol_type = other DNA
ttccataaagcaaaccaattccttggcatggaaccgctgccgacatttatcgctaatgacgtgataaaaatgcct

SEQ ID NO: 220599 - DNA, 75 bp, synthetic construct
  source 1..75: mol_type = other DNA
taccattcgctgcacatttcgagtatggtgctgccgcgtgctgaagctgaaaaaatttattatctctgcaaccct

SEQ ID NO: 220600 - DNA, 75 bp, synthetic construct
  source 1..75: mol_type = other DNA
ctgattacaatgctctaatcaatggcaataattcgccaaaagttatttataagaaagcagagcaaacggcaacag

SEQ ID NO: 220601 - DNA, 75 bp, synthetic construct
  source 1..75: mol_type = other DNA
tggctggcgctggccttctgtggggttggtggcgctgttgcgttaatttctatgcgcaaagtagaaacaccacgc

SEQ ID NO: 220602 - DNA, 75 bp, synthetic construct
  source 1..75: mol_type = other DNA
ataacctttctgccggtctgtctaactttttggcccctgcgatagcggtggtgctgttaccttatttcagtacaa

SEQ ID NO: 220603 - DNA, 75 bp, synthetic construct
  source 1..75: mol_type = other DNA
acgccgcaaaaaaccatgttcatcggttttgtgctgtggtgtattttccatgtgctgtttctggtcttcggtctg

SEQ ID NO: 220604 - DNA, 75 bp, synthetic construct
  source 1..75: mol_type = other DNA
aaactgcgatgccgatgcgaaagaaaaaatacttgaatttgttgagctggatgaaactgagcttgttgatttcgg

SEQ ID NO: 220605 - DNA, 75 bp, synthetic construct
  source 1..75: mol_type = other DNA
atcgaattaaaacgtgatgaaacgggtgcgcatatggagttacaggcactacgatatgcggcgatgatttccaca

SEQ ID NO: 220606 - DNA, 75 bp, synthetic construct
  source 1..75: mol_type = other DNA
cattcctatcgcactatattaaggcgctgggctttacgcctgcggaagcttcatttgctttcacgctgtatggtc

SEQ ID NO: 220607 - DNA, 75 bp, synthetic construct
  source 1..75: mol_type = other DNA
tataaatgtaattgtataaaagactggaaaaaagaagacagatttgctgtatataaagcagattgcacaggaatc

SEQ ID NO: 220608 - DNA, 75 bp, synthetic construct
  source 1..75: mol_type = other DNA
gtaaacatttcgaatctacgccggatacgccggaaatcatcgccaccattcacggtgaatggttatcgcttctgc

SEQ ID NO: 220609 - DNA, 75 bp, synthetic construct
  source 1..75: mol_type = other DNA
cctcgaaatcggtgcagatgactacatcaccaaaccgttcaacccgcgtgaactgactattcgtgcacgcaacct

SEQ ID NO: 220610 - DNA, 75 bp, synthetic construct
  source 1..75: mol_type = other DNA
aaagccttcccgtaagaacctgcgaacgtttctggcgaaagtgagggacatcgtgaaacgtcatccgacgcagcc

SEQ ID NO: 220611 - DNA, 75 bp, synthetic construct
  source 1..75: mol_type = other DNA
gatggtctggaagcggtgcttgaatcccggtttgggatgaagaacaccaaagccagctacaagaccaaggtcaac

SEQ ID NO: 220612 - DNA, 75 bp, synthetic construct
  source 1..75: mol_type = other DNA
cgcaggcggtatctgcatcttcccgcccggaaaggtggcacgccattaactggcgtaaaacctcagaagcggtga

SEQ ID NO: 220613 - DNA, 75 bp, synthetic construct
  source 1..75: mol_type = other DNA
gcagaaaaaatacaccctgccggtactgatcctcaccgctcgcgatacgctgaccgacaaaatcgccgggctgga

SEQ ID NO: 220614 - DNA, 75 bp, synthetic construct
  source 1..75: mol_type = other DNA
tgctgccgatggacgaatgcctggcccgctgtgcgctggatatttccggccgtccgcacctcgagtacaaagccg

SEQ ID NO: 220615 - DNA, 75 bp, synthetic construct
  source 1..75: mol_type = other DNA
gtggagagcctgttcaaagtctttggccgcaccctgcgccaggcgatccgcgtggaaggcgatacccttccctcc

SEQ ID NO: 220616 - DNA, 75 bp, synthetic construct
  source 1..75: mol_type = other DNA
gctgaagtatctgaccgtctgggcgtctctgcacacagcctctacaagtggctacgggctatcaaacctgataac

SEQ ID NO: 220617 - DNA, 75 bp, synthetic construct
  source 1..75: mol_type = other DNA
gtatctgatgctggtggtaaagaggtttcccgcgaccgttggctaactcgcgatgagcttatcaggctattcgag

SEQ ID NO: 220618 - DNA, 75 bp, synthetic construct
  source 1..75: mol_type = other DNA
agctgaagcactggcaaaaatggaggctgagaaaaacgccatgcgcgtttcagatctggccgccgaatacttcga

SEQ ID NO: 220619 - DNA, 75 bp, synthetic construct
  source 1..75: mol_type = other DNA
ggcactagcacagtggactgatttgctggtgaatttagaaaacatgatatgttctgacatcacgcaatctaataa

SEQ ID NO: 220620 - DNA, 75 bp, synthetic construct
  source 1..75: mol_type = other DNA
ggaacttttgttgctgcatttgtgccgatggccgctgtcttcccggcactggaaccaaaacacaaaggtgctgca

SEQ ID NO: 220621 - DNA, 75 bp, synthetic construct
  source 1..75: mol_type = other DNA
acgcccaaagaatatgctctgctatcacggttaatgcttaaagcaggtagtccggtgcatcgggaaattctctac

SEQ ID NO: 220622 - DNA, 75 bp, synthetic construct
  source 1..75: mol_type = other DNA
aacgatatctacaactgggacaacgaaccctcgaccaacaccctggaagtgcatatccataacctgcgcgacaaa

SEQ ID NO: 220623 - DNA, 75 bp, synthetic construct
  source 1..75: mol_type = other DNA
gtttgttggagtcattgtcgcgttaattattgagccattgccgggggctgtaattggattattgggtattgttat

SEQ ID NO: 220624 - DNA, 75 bp, synthetic construct
  source 1..75: mol_type = other DNA
tcgaacaaagtatctcgcctgtgcagcacatcggttacctgacgggggctgcagcagcgcagtatgttgcgcgca

SEQ ID NO: 220625 - DNA, 75 bp, synthetic construct
  source 1..75: mol_type = other DNA
tctactacatgccgcaacatttcggtcataactttgctatggcgctgatacctgcggtggcactggggatctttg

SEQ ID NO: 220626 - DNA, 75 bp, synthetic construct
  source 1..75: mol_type = other DNA
aggggaagccggaagaagtccgggagctgattgacgcgtcgccttacgtgaagaaatacacatccggcgtcctgt

SEQ ID NO: 220627 - DNA, 75 bp, synthetic construct
  source 1..75: mol_type = other DNA
gcggctgagcgaatgggagagcgccttcgtggaattgcagaaaatgttttcgcttacgcaacgggacaacgcgat

SEQ ID NO: 220628 - DNA, 75 bp, synthetic construct
  source 1..75: mol_type = other DNA
acatgcgttatccctggaacgggagcgtcagccggaaatacaggaacgcatactggatggtccttcgttgtcgct

SEQ ID NO: 220629 - DNA, 75 bp, synthetic construct
  source 1..75: mol_type = other DNA
atgatgtctataaatgaagttgttaagcaggactggcaccccgcgcatgttgtcgcggcggtgcatgtaaaaggt

SEQ ID NO: 220630 - DNA, 75 bp, synthetic construct
  source 1..75: mol_type = other DNA
gggtcaaccggccgaacctggacttccgtggtttcgccggcttcgtcaatggcggccgggtccgggtcggcgatg

SEQ ID NO: 220631 - DNA, 75 bp, synthetic construct
  source 1..75: mol_type = other DNA
tgcctggcagaccatcgtgaacggcagactggggctgcacgacccgaacgcgccggaaaaccgccgggcgcttgt

SEQ ID NO: 220632 - DNA, 75 bp, synthetic construct
  source 1..75: mol_type = other DNA
ccgcggtttgcaggaagccggattcacgatgcaaaaacgtaagggctttgggcgcaaacgggaaatgctttgtgg

SEQ ID NO: 220633 - DNA, 75 bp, synthetic construct
  source 1..75: mol_type = other DNA
tgtgccgaaattctggcggcgcagatgagcgacgaaccgattccgatggatgccagtacgctggcggcgttaaat

SEQ ID NO: 220634 - DNA, 75 bp, synthetic construct
  source 1..75: mol_type = other DNA
tacacctgtttcccgagattttgacgacgtttacttttccaatgacaacggactggaagagacgcgttatgtttt

SEQ ID NO: 220635 - DNA, 75 bp, synthetic construct
  source 1..75: mol_type = other DNA
aggaacggctgatacaggagcgcgaacatgcgttatccctggaacgggagcgtcagccggaaatacaggaacgca

SEQ ID NO: 220636 - DNA, 75 bp, synthetic construct
  source 1..75: mol_type = other DNA
ttacgggctgcatgacccgaacgccccggagaaccgcaggacgttgacactccctgataacctgcctgaaacgaa

SEQ ID NO: 220637 - DNA, 75 bp, synthetic construct
  source 1..75: mol_type = other DNA
ttacgggctgcatgaccccaacgccccggagaaccgcaggacgctgacactccctgataacctgccggaaacgaa

SEQ ID NO: 220638 - DNA, 75 bp, synthetic construct
  source 1..75: mol_type = other DNA
cacagttttatctccacgcttctggggatcaaacatctggtagtggcgatcaacaagatggatctggtggattac

SEQ ID NO: 220639 - DNA, 75 bp, synthetic construct
  source 1..75: mol_type = other DNA
tcgcccgcctgaaaaagaaaacatcgacttcgtttactacggcggttactacccggaaatggggcagatgctgcg

SEQ ID NO: 220640 - DNA, 75 bp, synthetic construct
  source 1..75: mol_type = other DNA
ctcgacgcgtttctcctccatgaacaccctgacgctgaaagatctcccggacaatctggcgagcagcggcaacag

SEQ ID NO: 220641 - DNA, 75 bp, synthetic construct
  source 1..75: mol_type = other DNA
ttctaacgctggcgctggatggcagtaaaggtacggggttgtcaccgctgactatcaccggactggtcgctgttg

SEQ ID NO: 220642 - DNA, 75 bp, synthetic construct
  source 1..75: mol_type = other DNA
gggcagcggtaaaagttacatattggcgcggatagaggaagtggtgaaacaggaattcggaaacagcgtcattgt

SEQ ID NO: 220643 - DNA, 75 bp, synthetic construct
  source 1..75: mol_type = other DNA
tcactgtcaccgtgtccggtcctgtgggcagcggtaaaagttacatactggcgcggacagaagaggtgataaaac

SEQ ID NO: 220644 - DNA, 75 bp, synthetic construct
  source 1..75: mol_type = other DNA
gtgaagcgatggttcctcataattactgttttcgcgatcatttatactattttccctgcattaaaagcaccaatg

SEQ ID NO: 220645 - DNA, 75 bp, synthetic construct
  source 1..75: mol_type = other DNA
cacagttttatctccacactgttggggatcaaacatctggtcgtggcgatcaacaaaatggatctggtggattac

SEQ ID NO: 220646 - DNA, 75 bp, synthetic construct
  source 1..75: mol_type = other DNA
actggagcatcgacatgtgaactggcgatcttactgatcgatgcccgtaaaggcgtgctcgatcaaacccgtcgt

SEQ ID NO: 220647 - DNA, 75 bp, synthetic construct
  source 1..75: mol_type = other DNA
tatttctccaccgagaagcgtaaatttattatcgccgacactcctgggcacgaacagtacacccgcaatatggcg

SEQ ID NO: 220648 - DNA, 75 bp, synthetic construct
  source 1..75: mol_type = other DNA
accactatcgttaacactgcgcttccttcaatggcgcaaagcctgggggaaagtccactgcatatgcacatggtc

SEQ ID NO: 220649 - DNA, 75 bp, synthetic construct
  source 1..75: mol_type = other DNA
tttgatcaacattccggtggggattatcggtgcgatcgccacactgatgttaatgccaaactacaccatgcagac

SEQ ID NO: 220650 - DNA, 75 bp, synthetic construct
  source 1..75: mol_type = other DNA
acgccacggcacccagggtgaaaaactggatctggcgctgctggtggatggcctgcaggctgagcgtgaacaagg

SEQ ID NO: 220651 - DNA, 75 bp, synthetic construct
  source 1..75: mol_type = other DNA
agtaaattttttaagggagaaaaagacgatgtcgaaacggtcgatgtcatcttgcgcccaaaagtttatttccgg

SEQ ID NO: 220652 - DNA, 75 bp, synthetic construct
  source 1..75: mol_type = other DNA
agccgtgagggttttttatatccgacgccagtgacctccattcccagagacctgcttgaacctttgccaaaagga

SEQ ID NO: 220653 - DNA, 75 bp, synthetic construct
  source 1..75: mol_type = other DNA
ccagtttgagcgtgaaggttacttctgcctcgacagccgccattctacggcggaaaaaccggtatttaaccgcac

SEQ ID NO: 220654 - DNA, 75 bp, synthetic construct
  source 1..75: mol_type = other DNA
catcagccgtggcgatctgctgctggcggcagacgaagcgttaccggctgtgcagagcgcgtcggtggatgtggt

SEQ ID NO: 220655 - DNA, 75 bp, synthetic construct
  source 1..75: mol_type = other DNA
tatttctctaccgagaagcgtaaatttattatcgccgacaccccagggcacgagcagtacactcgcaatatggcg

SEQ ID NO: 220656 - DNA, 75 bp, synthetic construct
  source 1..75: mol_type = other DNA
gtggtaaaagctttaaaaataggtggatattgctcattgttatgcaatgctgttagttggtttctacattggcgt

SEQ ID NO: 220657 - DNA, 75 bp, synthetic construct
  source 1..75: mol_type = other DNA
ttaaataagcttgcagctgaagacgacttagggcgtcagctccaggattcccgtttgattaaaaaaagagggctt

SEQ ID NO: 220658 - DNA, 75 bp, synthetic construct
  source 1..75: mol_type = other DNA
ggctgcatcgggcagtgattgtcctgttctgtcttgccttgttagtggcgctgatgcagggggcgtcatggttta

SEQ ID NO: 220659 - DNA, 75 bp, synthetic construct
  source 1..75: mol_type = other DNA
ggcttcacctgtctgcgtatttccattgcctgggcgcgaatttttcctcagggcgacgaagccgaaccgaatgaa

SEQ ID NO: 220660 - DNA, 75 bp, synthetic construct
  source 1..75: mol_type = other DNA
agataaaggtgctgctacacctgcaaaaagtattaagcaaatccgtgatctacttggtataaaagcatctgataa

SEQ ID NO: 220661 - DNA, 75 bp, synthetic construct
  source 1..75: mol_type = other DNA
ccgggtctgccaggtattccactctctattgtgcgtcctgaggcccacttcacgttgctggatagcctcggtaaa

SEQ ID NO: 220662 - DNA, 75 bp, synthetic construct
  source 1..75: mol_type = other DNA
gacgaaacgcgagaaagaaggtcatctcaccacggatttaacagcactggcaaaagactcaacgccaactattcc

SEQ ID NO: 220663 - DNA, 75 bp, synthetic construct
  source 1..75: mol_type = other DNA
caaccagctgcgccagttagcctattacgggcaatgtcggttattgccgtccagtatcggctggcaccggaacat

SEQ ID NO: 220664 - DNA, 75 bp, synthetic construct
  source 1..75: mol_type = other DNA
ggcagcgttttaggatcaatacgccactcgtggtgaatgaaaccgatttaccggtgttaacggctgtgccagtaa

SEQ ID NO: 220665 - DNA, 75 bp, synthetic construct
  source 1..75: mol_type = other DNA
gattattggtcggtgctgcgaattactgttttcgttatttaccactgcgtctgcaggcgggcaatgctcgtccag

SEQ ID NO: 220666 - DNA, 75 bp, synthetic construct
  source 1..75: mol_type = other DNA
atgagctatgaggttctgctgcttgggttactggttggcgcggcgaattattgcttccgctatttgccgctgcgc

SEQ ID NO: 220667 - DNA, 75 bp, synthetic construct
  source 1..75: mol_type = other DNA
caggatgccggatttgaaagcgtcgactattacaacctgacggcaggtgttgtggcgctgcatcgtggttataag

SEQ ID NO: 220668 - DNA, 75 bp, synthetic construct
  source 1..75: mol_type = other DNA
atggctcgcacaaaactgaaattccggctgcatcgggcagtgattgtcctgttctgtcttgccttgttagtggca

SEQ ID NO: 220669 - DNA, 75 bp, synthetic construct
  source 1..75: mol_type = other DNA
tttacggttttgctggcctggcgcaggccgcgattaacgacgttacttttcacggcacgctggtttcgccgcccg

SEQ ID NO: 220670 - DNA, 75 bp, synthetic construct
  source 1..75: mol_type = other DNA
ggacgacgacgtgaagattggtattaagtctacggcgatcctgtttggtcaatacgacaaattgattattggtat

SEQ ID NO: 220671 - DNA, 75 bp, synthetic construct
  source 1..75: mol_type = other DNA
ggttggtcgattccaatggcttttgctgccgttagtgaatcagtaccgctaagttgctggttgatgttccttgcc

SEQ ID NO: 220672 - DNA, 75 bp, synthetic construct
  source 1..75: mol_type = other DNA
tactggtactgacgctgaatacgatgaccattctgttgtcgattgccgctctggcgttggcgtgggtgtacccgt

SEQ ID NO: 220673 - DNA, 75 bp, synthetic construct
  source 1..75: mol_type = other DNA
ctattattacagctgcgttgagttttcttggtgtttattttctgatgcctctattactgataggcagagattttt

SEQ ID NO: 220674 - DNA, 75 bp, synthetic construct
  source 1..75: mol_type = other DNA
gagttgctggttaatgttcctcgccaatattctctgggtggtggcttacgacacgcagtatgcgatggttgaccg

SEQ ID NO: 220675 - DNA, 75 bp, synthetic construct
  source 1..75: mol_type = other DNA
tggcttaggctggggatattactggtcaattctggtggctggcgcgctgtttgtttatcaacaaaaactgattgc

SEQ ID NO: 220676 - DNA, 75 bp, synthetic construct
  source 1..75: mol_type = other DNA
ggcgctggcacagtggactgatttgctggtgaatttagaaaacatgatatgttctgacatcacgcaatctaataa

SEQ ID NO: 220677 - DNA, 75 bp, synthetic construct
  source 1..75: mol_type = other DNA
atcaatattttgatgagcgcaaagcggcgctggcacagtggactgatttgctggtgaatttagaaaacatgatat

SEQ ID NO: 220678 - DNA, 75 bp, synthetic construct
  source 1..75: mol_type = other DNA
aaaatggaactctgcgctgctcagtgggctgaatttgatttaaataactcagtctggcatttacctgccgaacgg

SEQ ID NO: 220679 - DNA, 75 bp, synthetic construct
  source 1..75: mol_type = other DNA
gggaggagttcgatcttgatgaagcggtctggcatttacccgcagaacgagttaagaatggtgatgcgatcgaca

SEQ ID NO: 220680 - DNA, 75 bp, synthetic construct
  source 1..75: mol_type = other DNA
ggctgaagcgctgaaaaagatggaggaggagaaacatgcactccgcgtttcagaactggcagcggaatactttga

SEQ ID NO: 220681 - DNA, 75 bp, synthetic construct
  source 1..75: mol_type = other DNA
tgacgaattaatccaattttttcaggccatgcgtaaagccaaaggattcagccgccagaacgaattaacctttaa

SEQ ID NO: 220682 - DNA, 75 bp, synthetic construct
  source 1..75: mol_type = other DNA
atgcaagaaagtatacaactggttattgattccttgccgttcctgctgaaaggggctgggtatacgctgcaactc

SEQ ID NO: 220683 - DNA, 75 bp, synthetic construct
  source 1..75: mol_type = other DNA
aactagatccgattccgtcggcgatgattggcctgtcactgaacaccgctgcctatgctgccgaaacgctgcgtg

SEQ ID NO: 220684 - DNA, 75 bp, synthetic construct
  source 1..75: mol_type = other DNA
tcttgtaacagcaaatgggtattacctgcgcgaaaacaacagcaccgcatgatcccccacattcaggaaagcacc

SEQ ID NO: 220685 - DNA, 75 bp, synthetic construct
  source 1..75: mol_type = other DNA
agcaaaaacggcgaccccatcgatattccactcgtccatcccgttattgaatggctgcgagagttgcgtgtgttg

SEQ ID NO: 220686 - DNA, 75 bp, synthetic construct
  source 1..75: mol_type = other DNA
gattggcctgtcactgaataccgctgcttatgctgctgaaacgctgcgtgcggctatttcgtctattgataaagg

SEQ ID NO: 220687 - DNA, 75 bp, synthetic construct
  source 1..75: mol_type = other DNA
ccgccatttcttctattgataaaggtcagtgggaagcagctgccagtattggtatgacgccgtggcagaccatgc

SEQ ID NO: 220688 - DNA, 75 bp, synthetic construct
  source 1..75: mol_type = other DNA
agcgttagagctgtgggcagacttgcttgtttctttagaaagaggcgagggctataacgtgatgccattgatgaa

SEQ ID NO: 220689 - DNA, 75 bp, synthetic construct
  source 1..75: mol_type = other DNA
tccaggacaaccgtcgcctgtacgactgggtgctggacaacatcaccattcctgttcacccgcgccagtacgaat

SEQ ID NO: 220690 - DNA, 75 bp, synthetic construct
  source 1..75: mol_type = other DNA
tgaattaacccatgccgactggtcggcaagtaataaccgtatttctgaagatattaattggtttcccgggattag

SEQ ID NO: 220691 - DNA, 75 bp, synthetic construct
  source 1..75: mol_type = other DNA
atgcccagctgtttttttaaaggctgggcattcggtttttacaacgttatgttatcaggtgtgtttaaagctgtt

SEQ ID NO: 220692 - DNA, 75 bp, synthetic construct
  source 1..75: mol_type = other DNA
ggctttatttatgtggatcgtgatgataatggcgaaggaagcctcacaagaacgcgggtgatgctgccaacttac

SEQ ID NO: 220693 - DNA, 75 bp, synthetic construct
  source 1..75: mol_type = other DNA
gtggccacaacgaatgcaggagatgttccaacaaatattgcctcatcgaggtgctttattaactaatttttatca

SEQ ID NO: 220694 - DNA, 75 bp, synthetic construct
  source 1..75: mol_type = other DNA
ctgttcagcgtgccgaacccaggtgctgcggatgatttcctgtcggtgattaacccggaatcgctggtgatcaaa

SEQ ID NO: 220695 - DNA, 75 bp, synthetic construct
  source 1..75: mol_type = other DNA
atgccccttttttacaatatttcttgtttacaacatacaatctttcttgtaattttaagccatcagcaggacgca

SEQ ID NO: 220696 - DNA, 75 bp, synthetic construct
  source 1..75: mol_type = other DNA
ccgggagattgaagatttatatgccttctgcgtttccacagccaccatcagcgcggtgaccgataaggtcattcc

SEQ ID NO: 220697 - DNA, 75 bp, synthetic construct
  source 1..75: mol_type = other DNA
attgaagccaaccgcaaaaacggctccggcaaaaagaccattaaaaccccgaccggcagcttcgaactggcgact

SEQ ID NO: 220698 - DNA, 75 bp, synthetic construct
  source 1..75: mol_type = other DNA
gtggcgatcttgccgaaacatttaaatctgaacgggaaacaacaaagaaccagatccgtgtcgccttgcctggca

SEQ ID NO: 220699 - DNA, 75 bp, synthetic construct
  source 1..75: mol_type = other DNA
tggcgataaagcctattgcgaagcgataaagtcagcagcccagttcgagctgccgcccattccttgcaccatccg

SEQ ID NO: 220700 - DNA, 75 bp, synthetic construct
  source 1..75: mol_type = other DNA
cgagtttctttattcatcctgcagaagcgttccatggcgatctgggtatgattacgccctgcgatcttctgatcc

SEQ ID NO: 220701 - DNA, 75 bp, synthetic construct
  source 1..75: mol_type = other DNA
gcgcgtccgggcagcacgctggcgacctttacgtctgccggttttgtccgccgcggtttgcaggaagccggattc

SEQ ID NO: 220702 - DNA, 75 bp, synthetic construct
  source 1..75: mol_type = other DNA
atgatgcaatctgcaggcattgtcgttaatgatgttgctgtcacctggcgtaacgggcacacagcactgcgcgat

SEQ ID NO: 220703 - DNA, 75 bp, synthetic construct
  source 1..75: mol_type = other DNA
gcttcgtcaccggacgatttgttattagccatctcatacacaggtgtacggcgggagttaaacctggcagcagat

SEQ ID NO: 220704 - DNA, 75 bp, synthetic construct
  source 1..75: mol_type = other DNA
ctgctacaaccggacactgcccgccaccttagttcccaacaactggccaacgaagccggagtcagtcagtccagc

SEQ ID NO: 220705 - DNA, 75 bp, synthetic construct
  source 1..75: mol_type = other DNA
accacgctgatgtttgaaggcgtaccgaactggccgacgcctgcccgtatggcgcaggtggtggacaagcatcag

SEQ ID NO: 220706 - DNA, 75 bp, synthetic construct
  source 1..75: mol_type = other DNA
aactggcggtttcatgatcacaccgctgcctggcgctaccgaactgaaagccggttcagcgacgcgtccgttctt

SEQ ID NO: 220707 - DNA, 75 bp, synthetic construct
  source 1..75: mol_type = other DNA
tgccgaagccgccgtagtaggtattccgcacaatattaaaggtcaggcgatctacgcctacgtcacgcttaatca

SEQ ID NO: 220708 - DNA, 75 bp, synthetic construct
  source 1..75: mol_type = other DNA
atttcgtaaggctatgcacaaatccggattgcgctggtatggcgtgcgggtggcggagccgcatcatgacggtac

SEQ ID NO: 220709 - DNA, 75 bp, synthetic construct
  source 1..75: mol_type = other DNA
tccccttgctgaaaatttgaaccaacaggagaaagataaatcagctgatggggacaccagaacggacattacccg

SEQ ID NO: 220710 - DNA, 75 bp, synthetic construct
  source 1..75: mol_type = other DNA
ctggtaaaaccgaagcgaaaaaaagcatacatacagagtatttcggagcagcagcgcctgcagcttgaggcagaa

SEQ ID NO: 220711 - DNA, 75 bp, synthetic construct
  source 1..75: mol_type = other DNA
acgtgagttgaatctcgcggcggatgagatgctgcgcgtgggtggaaaggtgctggcaattaccggtttcacgcc

SEQ ID NO: 220712 - DNA, 75 bp, synthetic construct
  source 1..75: mol_type = other DNA
ccatgtatgcgacactgaacgttaacagtgaagagaaattacatgaatgcgtggtgatgttgcgttctgcacggc

SEQ ID NO: 220713 - DNA, 75 bp, synthetic construct
  source 1..75: mol_type = other DNA
tgatgcgtgagaaagggatgaatcgcagcgaatccgggcagctcgggttttcggtactgctgtttcaggatctgg

SEQ ID NO: 220714 - DNA, 75 bp, synthetic construct
  source 1..75: mol_type = other DNA
acctgtggtggcacgacctggttgagcaagccagcgatcagcaccaggcggaagagatgaacgccgaagatccgc

SEQ ID NO: 220715 - DNA, 75 bp, synthetic construct
  source 1..75: mol_type = other DNA
acattatgggaacaggttttgattttgaactgtttgtccataccggagcagggcgctacatctgcggtgaagaaa

SEQ ID NO: 220716 - DNA, 75 bp, synthetic construct
  source 1..75: mol_type = other DNA
aggcggcgcggggactgacttcctgaccgaagcacaccttgacctgccgatggaattcgaaagtatcggtaaagc

SEQ ID NO: 220717 - DNA, 75 bp, synthetic construct
  source 1..75: mol_type = other DNA
gaccgcctgctgatggagcaactgccgcacctgctggtggaaggtatgctcatctccgcatttgcgctgaaagct

SEQ ID NO: 220718 - DNA, 75 bp, synthetic construct
  source 1..75: mol_type = other DNA
atgaccactcatgaccgcgttcgtctccagttgcaggcgcttgaagcgttactgcgtgaacatcagcactggcga

SEQ ID NO: 220719 - DNA, 75 bp, synthetic construct
  source 1..75: mol_type = other DNA
caccaccgcacgcgagatcctcgaagattacgccggtggtatgcgtgacggtctgaaattcaaagcctggcagcc

SEQ ID NO: 220720 - DNA, 75 bp, synthetic construct
  source 1..75: mol_type = other DNA
ccccccttcccggcaacctccggtgcatggggcaaaccgacctgtgtcaataacgtcgaaaccctgtgtaacgtt

SEQ ID NO: 220721 - DNA, 75 bp, synthetic construct
  source 1..75: mol_type = other DNA
ctttgattatcatccgggcgatatctactggtgcaccgccgatgtgggctgggttaccgggcacagttatttgct

SEQ ID NO: 220722 - DNA, 75 bp, synthetic construct
  source 1..75: mol_type = other DNA
tgccgaagccgccgtcgtcggtattccgcacaatattaaaggtcaggcgatctacgcctacgtcacgcttaatca

SEQ ID NO: 220723 - DNA, 75 bp, synthetic construct
  source 1..75: mol_type = other DNA
aacgttttgaacagacctacttctccatagactggccccctgaatctccagacaaccagtatcacttaaataagt

SEQ ID NO: 220724 - DNA, 75 bp, synthetic construct
  source 1..75: mol_type = other DNA
gttaatcaggtaaaagactctggtctgaaagggcgcggcggcgcgggcttttctactggcctgaagtggagcctg

SEQ ID NO: 220725 - DNA, 75 bp, synthetic construct
  source 1..75: mol_type = other DNA
cgcacctgctggtggaaggtatgctcatctccgcgtttgcgctgaaagcttaccgtggctacatcttcctgcgtg

SEQ ID NO: 220726 - DNA, 75 bp, synthetic construct
  source 1..75: mol_type = other DNA
ggcttctctggtcgggtgaaaaatccgggtctgtgggaactgccgttcggcaccaccgcacgcgagatcctcgaa

SEQ ID NO: 220727 - DNA, 75 bp, synthetic construct
  source 1..75: mol_type = other DNA
aaaaatagagccaagatgtgtcgcctttgtcgaaagtgagattgatgaatggattgagacgactattcgaaactc

SEQ ID NO: 220728 - DNA, 75 bp, synthetic construct
  source 1..75: mol_type = other DNA
gtcgcttttgttgaaagtgagattgatgaatggattgaagcggctattcgaaactcacgccagaacgcagcataa

SEQ ID NO: 220729 - DNA, 75 bp, synthetic construct
  source 1..75: mol_type = other DNA
atgaaagattttttggatagcctaagtaaagctgcatgggaaacatcgtgtgcaagatataattcatcccgtcga

SEQ ID NO: 220730 - DNA, 75 bp, synthetic construct
  source 1..75: mol_type = other DNA
gttttctacactatcccctgtccgtcacgtttccattccacgctcaacaacggcagacccaacccgacctggaca

SEQ ID NO: 220731 - DNA, 75 bp, synthetic construct
  source 1..75: mol_type = other DNA
ccctgcgtctggatgtcatcccacctgcgtttgagcaactccgtcggaaaagaaaccgccgtaaacccgtaccct

SEQ ID NO: 220732 - DNA, 75 bp, synthetic construct
  source 1..75: mol_type = other DNA
ttttggtcattatgaagattgaacaaatcggaatggcagctttcaggcaacaggctgaaagcggtggcgtggatg

SEQ ID NO: 220733 - DNA, 75 bp, synthetic construct
  source 1..75: mol_type = other DNA
tcggtctgccggctgacagcagcaaagcggaagtctaccaggctattcaccatcagctggtggcgagcgcgctgg

SEQ ID NO: 220734 - DNA, 75 bp, synthetic construct
  source 1..75: mol_type = other DNA
accgcgccgccctgaaagagaccgtcgactttatctccttcagctactatatgaccggctgcgtgaccgccgacg

SEQ ID NO: 220735 - DNA, 75 bp, synthetic construct
  source 1..75: mol_type = other DNA
gtgaattattaggtgagattattgaatcatctcctgaatttatctatgcgagagcagaaaaagcattagttgata

SEQ ID NO: 220736 - DNA, 75 bp, synthetic construct
  source 1..75: mol_type = other DNA
actgggctataaaacaccgctacctgccattattaatgcctgcgccgcacgcggtattggcgcgattgcccccct

SEQ ID NO: 220737 - DNA, 75 bp, synthetic construct
  source 1..75: mol_type = other DNA
gtagagagcctgttcaaagcctttggtcgcaccctgcgccaggctatccgcgtggaaggcgataccctgccctcg

SEQ ID NO: 220738 - DNA, 75 bp, synthetic construct
  source 1..75: mol_type = other DNA
ggctgggaaaacgtctgggctttgagcgaatgccggatgatgaggatggcttcatggtgttcaggatagcggtct

SEQ ID NO: 220739 - DNA, 75 bp, synthetic construct
  source 1..75: mol_type = other DNA
gtgaagtggaaaatggttcgtaaggccgttgacgttcaggaggcggtagccgaccagggcgcttgcgccccttgg

SEQ ID NO: 220740 - DNA, 75 bp, synthetic construct
  source 1..75: mol_type = other DNA
tgtctggaacgactggagcatgtacgcgacagtcagctatctgcatctttttgctttatggcaagccatgaaggg

SEQ ID NO: 220741 - DNA, 75 bp, synthetic construct
  source 1..75: mol_type = other DNA
cgcctgtctactcttgtcgctgcgcatatgagcatgtgtcttgatgccgcttgtggtgatttgtacgccaccgat

SEQ ID NO: 220742 - DNA, 75 bp, synthetic construct
  source 1..75: mol_type = other DNA
cccattgcagagggtaagatctgcactcatgcagtgaagtggaaaatggttcgtaaagccgttgacgttcaggag

SEQ ID NO: 220743 - DNA, 75 bp, synthetic construct
  source 1..75: mol_type = other DNA
atgagcatgtgccttgatgcagcttgtggtgatttgtatgccaccgatgacgttaagccggaagaaatccgcaag

SEQ ID NO: 220744 - DNA, 75 bp, synthetic construct
  source 1..75: mol_type = other DNA
cctgtccaccctggtagcagcgcatatgagcatgtgtcttgaggccgcttgtggtgatttgtatgccaccgatga

SEQ ID NO: 220745 - DNA, 75 bp, synthetic construct
  source 1..75: mol_type = other DNA
ttatgcgcaaaaaagatcgccgcgccattactgctttgttgcgtaagtttgccattcgtgaagaccgcgaggagc

SEQ ID NO: 220746 - DNA, 75 bp, synthetic construct
  source 1..75: mol_type = other DNA
tgacaaggagttgcacgattacctgcacagtatgagcaaaaaagagcgccgggaactggctgcaaggttacgcct

SEQ ID NO: 220747 - DNA, 75 bp, synthetic construct
  source 1..75: mol_type = other DNA
tggctggtcaggcggcaaggcaacagggtgacaaaaaagcaggtgcgccggtactggataacccgcgccttgatg

SEQ ID NO: 220748 - DNA, 75 bp, synthetic construct
  source 1..75: mol_type = other DNA
gctggtatggcgtgcgggtggctgagccgcaccatgacggtactgtgcactggcatctcatgtgcttcatgcgta

SEQ ID NO: 220749 - DNA, 75 bp, synthetic construct
  source 1..75: mol_type = other DNA
ggtaaacgccagcagcagcaacccggcacatcgccgcaatgagatgatggcctgcgttaaaggtctggagcttat

SEQ ID NO: 220750 - DNA, 75 bp, synthetic construct
  source 1..75: mol_type = other DNA
ggaggcagtattccgtcaggggctggcctgcgtatcttctatcggaatcagcgtttacaggaagatgataagtgg

SEQ ID NO: 220751 - DNA, 75 bp, synthetic construct
  source 1..75: mol_type = other DNA
atgagcatgtgtcttgatgccgcttgtggtgatttgtacgcctccgatgatgttaagccggaagaaatccgcaag

SEQ ID NO: 220752 - DNA, 75 bp, synthetic construct
  source 1..75: mol_type = other DNA
ccagagtatgcctgaaggtccacgccaaggtattgagaatcaggacagacaggcgagggaacagcagcaggctgc

SEQ ID NO: 220753 - DNA, 75 bp, synthetic construct
  source 1..75: mol_type = other DNA
caacaagagatgaaactggacccaacgccgattgctcaccgtactcacggcctgaatcccaataatctgaataaa

SEQ ID NO: 220754 - DNA, 75 bp, synthetic construct
  source 1..75: mol_type = other DNA
ctatcagcagcattacgctgccgtttgtcgaaaatgagagccgtgcacgggcggtgaaagaccaaatagacgcga

SEQ ID NO: 220755 - DNA, 75 bp, synthetic construct
  source 1..75: mol_type = other DNA
tattctcaccgctcatgaagtcactggactgattcgtgaaggcgcgacggtgtgcggtgttcgtgttcgtaacca

SEQ ID NO: 220756 - DNA, 75 bp, synthetic construct
  source 1..75: mol_type = other DNA
aagaaatcgaagcgatgttccagagtatgcctgaaggtccccgacaaaatatcgaaaagcgggacagcaaggctg

SEQ ID NO: 220757 - DNA, 75 bp, synthetic construct
  source 1..75: mol_type = other DNA
attattgtcactgagcagattaccagaccgaaagaaattgaggctatgttccaaagtatgcctgaaggcccacgc

SEQ ID NO: 220758 - DNA, 75 bp, synthetic construct
  source 1..75: mol_type = other DNA
tctctgaaagagctgggcatggatccgactatccacgatatccgtttcgtggaagataactgggaaaacccgact

SEQ ID NO: 220759 - DNA, 75 bp, synthetic construct
  source 1..75: mol_type = other DNA
ggattactgggctcgccagggctgcaccattgttcaaccattggacatggaagtcggcgcgggaacctctcaccc

SEQ ID NO: 220760 - DNA, 75 bp, synthetic construct
  source 1..75: mol_type = other DNA
gaacacactaaggacgctatcgactggctggaagatgatgactgtaactatcaggaaaaagccgctgaatggttc

SEQ ID NO: 220761 - DNA, 75 bp, synthetic construct
  source 1..75: mol_type = other DNA
aaagcgaagggttttgtcaggatattgttcaggcgctggttgctccgctacaacaagagatgaagctggacccga

SEQ ID NO: 220762 - DNA, 75 bp, synthetic construct
  source 1..75: mol_type = other DNA
cgagcgtcagcgctacattctgcgaattcgcaccctgaccaaagcagtggctgaagcatactacgcttcccgtga

SEQ ID NO: 220763 - DNA, 75 bp, synthetic construct
  source 1..75: mol_type = other DNA
attcgcaccctgaccaaagcagtggcagaagcatattacgcttcccgtgaagccctaggcttcccgatgtgcaac

SEQ ID NO: 220764 - DNA, 75 bp, synthetic construct
  source 1..75: mol_type = other DNA
ggactgattcgtgaaggcgcgacggtgtgcggtgttcgtgttcgtaaccatctcactggcgaaacccaggtactt

SEQ ID NO: 220765 - DNA, 75 bp, synthetic construct
  source 1..75: mol_type = other DNA
cgggagaacgcggcgctgagcgagcgcgtcacgggcttgagcaggcaggtgcagagtttgagcgagcagctgcgc

SEQ ID NO: 220766 - DNA, 75 bp, synthetic construct
  source 1..75: mol_type = other DNA
gttactcagccaatatgggtattcaacctatcgtggcagttaatgcgtaaatatgtaaaagctgatctctgctac

SEQ ID NO: 220767 - DNA, 75 bp, synthetic construct
  source 1..75: mol_type = other DNA
cccgagcaaactgcaactacgggcgattaccgtgtcgtatttaaaaccggggactatttcaagaaacaaaatctt

SEQ ID NO: 220768 - DNA, 75 bp, synthetic construct
  source 1..75: mol_type = other DNA
ggtgatggaacagacattatcacttccctgctccacgccgtggtttaatcgtacgggcagccgcaaacgggaagc

SEQ ID NO: 220769 - DNA, 75 bp, synthetic construct
  source 1..75: mol_type = other DNA
ttgtattggtgccagttatcatcgcggcagcgaagatacggcgtacagtgaggacgatcagcagcagaatcgcca

SEQ ID NO: 220770 - DNA, 75 bp, synthetic construct
  source 1..75: mol_type = other DNA
gtatattcggtggccggtcaagtcagccatattccgacaacgccggaactggcggagctgaagcaggtgctgtgc

SEQ ID NO: 220771 - DNA, 75 bp, synthetic construct
  source 1..75: mol_type = other DNA
cattgtggtgatagtgcctattggtgccaagaaaaaatgatagtccctgcggctggtaatgttgaattacctaat

SEQ ID NO: 220772 - DNA, 75 bp, synthetic construct
  source 1..75: mol_type = other DNA
tggcactgcctggttcacaggaacccgctgaagttaccttgcgtaaagtcatctccctgcctgccccgctgcgcg

SEQ ID NO: 220773 - DNA, 75 bp, synthetic construct
  source 1..75: mol_type = other DNA
gggcgtaatgtcagtcgcggcatcgtgctgctcgatcacgccgaacgcgatggcctggacggatttatcaccatt

SEQ ID NO: 220774 - DNA, 75 bp, synthetic construct
  source 1..75: mol_type = other DNA
gcaaaaatgactgactctcaggacgagaatttgctattcctttatgatgatgctcagtcaatttaccaaaaaaag

SEQ ID NO: 220775 - DNA, 75 bp, synthetic construct
  source 1..75: mol_type = other DNA
tttatgatactttcgccagaaaaaggcattatttttctcgaggtaaaagattggtttattacaaaaataaaaaaa

SEQ ID NO: 220776 - DNA, 75 bp, synthetic construct
  source 1..75: mol_type = other DNA
atttttggcctcactctctggctgataccgaaagagtttgctgtcgtatttaatgcttatactgaaataccctgg

SEQ ID NO: 220777 - DNA, 75 bp, synthetic construct
  source 1..75: mol_type = other DNA
atgaagctgctagtaacatacatcaggtggagtactaaagagcaagactctggagactccctaagacgacaaaca

SEQ ID NO: 220778 - DNA, 75 bp, synthetic construct
  source 1..75: mol_type = other DNA
tacacagctttgtagtcgtctgttcagcaaactatcacagctacacgatgaagctactgacacagctaaattgga

SEQ ID NO: 220779 - DNA, 75 bp, synthetic construct
  source 1..75: mol_type = other DNA
aacgctgatgccgttttttgcggggttgctgttttaggtgttccggacgacggagcgatgctgcaggcacagatg

SEQ ID NO: 220780 - DNA, 75 bp, synthetic construct
  source 1..75: mol_type = other DNA
tgctcagtttaaccttagcgcgcgttttgatttgcaagtgctggaatccttgttgaagtggctggcaacacaccc

SEQ ID NO: 220781 - DNA, 75 bp, synthetic construct
  source 1..75: mol_type = other DNA
cgctgctctctgctgccatgttctttgtcctcgcgggcgtctttatgggcgtgcaactggagctggacggcacca

SEQ ID NO: 220782 - DNA, 75 bp, synthetic construct
  source 1..75: mol_type = other DNA
ttgttgtagagaactttgaccgcttcagtagggctgatatcgacacagctatagatgacgttaggcagatactga

SEQ ID NO: 220783 - DNA, 75 bp, synthetic construct
  source 1..75: mol_type = other DNA
cccctgatctggggcgtttgattcaggatgtctggaacaatccgggctttgtgtcaccgggcgcatcaaagcagt

SEQ ID NO: 220784 - DNA, 75 bp, synthetic construct
  source 1..75: mol_type = other DNA
cgacggatcacccgcaacgagcgcttattctggcggagctggaaaagctggatgccctttttgcggatgatgcta

SEQ ID NO: 220785 - DNA, 75 bp, synthetic construct
  source 1..75: mol_type = other DNA
cgacggaccacccgcaacgcgcgcttattctggctgagctggaaaaactggatgctctttttgcggatgatgcga

SEQ ID NO: 220786 - DNA, 75 bp, synthetic construct
  source 1..75: mol_type = other DNA
tatcgggaacgagccaggctgttaaaggcagatcctgatgaggtgatttactccggtgatgccagacttatagct

SEQ ID NO: 220787 - DNA, 75 bp, synthetic construct
  source 1..75: mol_type = other DNA
gttcgccagcatgagcgggataccgggggcggtgatggagggctcagcaccgctgaacgtcagcgtctgaaagag

SEQ ID NO: 220788 - DNA, 75 bp, synthetic construct
  source 1..75: mol_type = other DNA
gaagaaagcattattactgacgatgaacgcccctttgtggcttatcgaccatcagcggtgcagagggaagaaaga

SEQ ID NO: 220789 - DNA, 75 bp, synthetic construct
  source 1..75: mol_type = other DNA
gcttccgtattgcgattgatgattttggtactggctacgccaattatgagcgcttaaagcgtttgcgggctgata

SEQ ID NO: 220790 - DNA, 75 bp, synthetic construct
  source 1..75: mol_type = other DNA
ttaaaagtagggttgaaaattgaagctgatgagctaatagtattgtgcgagcaacttttagatttatactccagt

SEQ ID NO: 220791 - DNA, 75 bp, synthetic construct
  source 1..75: mol_type = other DNA
gcgcgtgcggttgatctctctgccgagaaatattgttcagtggcgctgatgctggaaaaagcggtgaatattact

SEQ ID NO: 220792 - DNA, 75 bp, synthetic construct
  source 1..75: mol_type = other DNA
aacaataacaaagttggctccttcagtcctgggctgaagaatacgcagaaagaattgtctgacctcagtggctgc

SEQ ID NO: 220793 - DNA, 75 bp, synthetic construct
  source 1..75: mol_type = other DNA
tcttgctctttatcgcacggaaggtgcggtaagttttatagaggatattagcccttctaaagaaagttatagtaa

SEQ ID NO: 220794 - DNA, 75 bp, synthetic construct
  source 1..75: mol_type = other DNA
taagcttaatgagaagtttaagagcactttctctttgccgcacggaaggtgtggtaagtttttatacaagatata

SEQ ID NO: 220795 - DNA, 75 bp, synthetic construct
  source 1..75: mol_type = other DNA
tatctgtttagatcagaaagatatcagtcctgatggacacacacaaatagaaccgtgtgatataattagttacca

SEQ ID NO: 220796 - DNA, 75 bp, synthetic construct
  source 1..75: mol_type = other DNA
tatctttctggcgtggatgccactgtgcgtaatgctgtcaatcttgtttatctttggctggcgcggtgtcgttcc

SEQ ID NO: 220797 - DNA, 75 bp, synthetic construct
  source 1..75: mol_type = other DNA
ccccctgtttgcttcgcgatgcgaataaacttattatttgtgtgcctgaaaaccccgatcagtgagagtagtgta

SEQ ID NO: 220798 - DNA, 75 bp, synthetic construct
  source 1..75: mol_type = other DNA
gatattgtggcgcagggatatcgctccgtcgttgggcaaagagaaacgcgcatttaccttaagctggctggcagc

SEQ ID NO: 220799 - DNA, 75 bp, synthetic construct
  source 1..75: mol_type = other DNA
ctaagccttttcaccgcagtgctgatttacaacatgcttttttactatctcacccgcatgattgtaagtccccac

SEQ ID NO: 220800 - DNA, 75 bp, synthetic construct
  source 1..75: mol_type = other DNA
acgcaacagcagcaggcgttattgcataaacttggggtgcaatatctgcaagggtatttgattggtcgccctcag

SEQ ID NO: 220801 - DNA, 75 bp, synthetic construct
  source 1..75: mol_type = other DNA
agactaccaaacaggtgctattgctgaacaccattcgtaaagcattagataatggtgatttgcttctctacgccc

SEQ ID NO: 220802 - DNA, 75 bp, synthetic construct
  source 1..75: mol_type = other DNA
tgcgattttcggcgaacgaggcgctgaaaattcacgacagcaaatggctaaaaagtaacggtatagcaagtcagt

SEQ ID NO: 220803 - DNA, 75 bp, synthetic construct
  source 1..75: mol_type = other DNA
gctgttcatcagtaactttgtctggctgggtagtcactatcgccgccgcttccgtgcggataacgccattgcagc

SEQ ID NO: 220804 - DNA, 75 bp, synthetic construct
  source 1..75: mol_type = other DNA
gcttttggcggtattgtggcgatgttttccggttatgcctatgcgcgtctgggggcgagctatcccagcaatggc

SEQ ID NO: 220805 - DNA, 75 bp, synthetic construct
  source 1..75: mol_type = other DNA
ttgcgccaggtggtgaaagaacttggcattccggttaacagcgaaccggcggattatcgcgaaattcacattgcg

SEQ ID NO: 220806 - DNA, 75 bp, synthetic construct
  source 1..75: mol_type = other DNA
tgctgctggtactgggcgcgctgttgctggccattatctggacgcgcctggaagagttacgctggcccatttgta

SEQ ID NO: 220807 - DNA, 75 bp, synthetic construct
  source 1..75: mol_type = other DNA
tccgtgcggataacgcgattgctgcggcctgctactttgccggtcacttcctcatcgtccgctcactgtatctct

SEQ ID NO: 220808 - DNA, 75 bp, synthetic construct
  source 1..75: mol_type = other DNA
tccgtgcggataacgcgattgccgccgcttgttattttgccggacatttcctcatcgtccgctcgctgtatctct

SEQ ID NO: 220809 - DNA, 75 bp, synthetic construct
  source 1..75: mol_type = other DNA
ttggtatgaaagatgccgataaacaagaatataccggcgcacgtaacgcgcgtttctccatcttccccggttctg

SEQ ID NO: 220810 - DNA, 75 bp, synthetic construct
  source 1..75: mol_type = other DNA
cgcaaaaacatggctgcgtgcgtgaggcgatgattatcacgtctgcgctctccattcaggatccgcgtgagcgtc

SEQ ID NO: 220811 - DNA, 75 bp, synthetic construct
  source 1..75: mol_type = other DNA
aactgaagccaggccaggacagcattcattacgaaattctgcctggtgggcaagtatttatgtgccgactgggag

SEQ ID NO: 220812 - DNA, 75 bp, synthetic construct
  source 1..75: mol_type = other DNA
cgaaaaacatcgtcgcttccacgacaaagagtccgatttcctggcatttgtgaatctgtggaattatcttggcga

SEQ ID NO: 220813 - DNA, 75 bp, synthetic construct
  source 1..75: mol_type = other DNA
gctatcgcccgattgttgaagaagccgatgataccgagcgcgatcagttgcaggcgatttttgacgccgtagacg

SEQ ID NO: 220814 - DNA, 75 bp, synthetic construct
  source 1..75: mol_type = other DNA
agagcacgtcgtgaaatgccttgtcttctatcacccactggatgcagaatccctccgccttaagcaagaagcact

SEQ ID NO: 220815 - DNA, 75 bp, synthetic construct
  source 1..75: mol_type = other DNA
aaggcagggttaagacgtaagatgcgaaaagcagccatggacagaaactatctggcgtcagttcttgcggggagc

SEQ ID NO: 220816 - DNA, 75 bp, synthetic construct
  source 1..75: mol_type = other DNA
aatccgtcttcatattgtttgcgatgtccctgatgaacttattgatttcacgtttgaatggaaaggtctgaagaa

SEQ ID NO: 220817 - DNA, 75 bp, synthetic construct
  source 1..75: mol_type = other DNA
aggcagggttaagacgtaagatgcgaaaagcagccatggacagaaactatctggcgtcagtccttgctgggagcg

SEQ ID NO: 220818 - DNA, 75 bp, synthetic construct
  source 1..75: mol_type = other DNA
gagttgcgcgtcagctattttgcccaacaactcggtacaccttatccgatttcagataagcgtattctacaggcg

SEQ ID NO: 220819 - DNA, 75 bp, synthetic construct
  source 1..75: mol_type = other DNA
gcggaaacgtcgctgaccgtaccggggattaaatacgttatcgaccccggtacagcgcgtatcagccgctacagc

SEQ ID NO: 220820 - DNA, 75 bp, synthetic construct
  source 1..75: mol_type = other DNA
gctatcgcccgattgttgaagaagccgatgacaccgagcgcgatcagttgcaggcgatttttgacgctgtagacg

SEQ ID NO: 220821 - DNA, 75 bp, synthetic construct
  source 1..75: mol_type = other DNA
gatccacatcgcgaccgtgctcagatgctgaaagtcgaaaacgtccagcaggcatggcagcaatggatcaacaaa

SEQ ID NO: 220822 - DNA, 75 bp, synthetic construct
  source 1..75: mol_type = other DNA
gcataaattatcggatattctactgttgactatttgtggccgtcatttctggtgcagaaggctgggaagatatag

SEQ ID NO: 220823 - DNA, 75 bp, synthetic construct
  source 1..75: mol_type = other DNA
ttcacaaaagttttcgcagccctgttactggcagatttaatttcaccctgactcgcggggatgattacttcggac

SEQ ID NO: 220824 - DNA, 75 bp, synthetic construct
  source 1..75: mol_type = other DNA
tacggcacatcgctattaatattttgacgaatgataaggtattcaaggcagggttaagacgtaagatgcgaaaag

SEQ ID NO: 220825 - DNA, 75 bp, synthetic construct
  source 1..75: mol_type = other DNA
gcttatttaaaaagccgccgaaatgggtaatggtggcggaactggtagaaaccagccgcctgtgggggcgcattg

SEQ ID NO: 220826 - DNA, 75 bp, synthetic construct
  source 1..75: mol_type = other DNA
tgctgaaagtcgaaaatgtccagcaggcgtggcagcagtggatcaacaaactgccgcctgcacgtcgtgaggatg

SEQ ID NO: 220827 - DNA, 75 bp, synthetic construct
  source 1..75: mol_type = other DNA
attacagacaagcctggaaagtggaacataaattgtcggatattctactgttgactatttgtgccgttatttcgg

SEQ ID NO: 220828 - DNA, 75 bp, synthetic construct
  source 1..75: mol_type = other DNA
acccgcagcttaatgcggcgatgaagtcgcaaattgatgccatgtcgcatgtgatgtttggcggtatcacccatg

SEQ ID NO: 220829 - DNA, 75 bp, synthetic construct
  source 1..75: mol_type = other DNA
cctgtgaacatgcagaaatcgcgccggacattttgtgcctcggtaaagccttaaccggcggcacaatgacccttt

SEQ ID NO: 220830 - DNA, 75 bp, synthetic construct
  source 1..75: mol_type = other DNA
cgcatctgctctacgcgctcgcccttcctgtgagaactgcgccggatgcatcggcttcggcgctcagatacgctg

SEQ ID NO: 220831 - DNA, 75 bp, synthetic construct
  source 1..75: mol_type = other DNA
gatgaagtcgcaaattgatgccatgtcgcatgtgatgtttggtggtatcacccatgcgccagccattgagctgtg

SEQ ID NO: 220832 - DNA, 75 bp, synthetic construct
  source 1..75: mol_type = other DNA
caaccgctggagtgcgtttttctcgcggactccggctccgtagcggtggaagtggcgatgaaaatggcgttgcag

SEQ ID NO: 220833 - DNA, 75 bp, synthetic construct
  source 1..75: mol_type = other DNA
ggtcgaaaccactcgtccggtgaatatggcggcgctgcaaaaattctttgtcgaacagggtgtctggatccggcc

SEQ ID NO: 220834 - DNA, 75 bp, synthetic construct
  source 1..75: mol_type = other DNA
tgactatcgcgacaacgccgccattgcgccgaaatgcgtagtggtggttgatcactatgactgggaagatgatgc

SEQ ID NO: 220835 - DNA, 75 bp, synthetic construct
  source 1..75: mol_type = other DNA
gggcacagtggcgacatttggcacggttatctgccggatgcgcgcccgggtttgcgttatggttatcgcgttcat

SEQ ID NO: 220836 - DNA, 75 bp, synthetic construct
  source 1..75: mol_type = other DNA
tggggcgcagaggccattttgctcggtagtagcacgacgtcatttcccgatctgcaaaagcaggtagcaagtctg

SEQ ID NO: 220837 - DNA, 75 bp, synthetic construct
  source 1..75: mol_type = other DNA
tccatctggaatggcaggtgatggagtggcgtgaggaagcctataccctcgatgaactggctgattatcttgatt

SEQ ID NO: 220838 - DNA, 75 bp, synthetic construct
  source 1..75: mol_type = other DNA
ccaagagaggcaggaaaggtggcatcgctaaaggcgaagcctacgatgacaagcgtttcatggcgctatgtatgc

SEQ ID NO: 220839 - DNA, 75 bp, synthetic construct
  source 1..75: mol_type = other DNA
gaacgatcatttccgcgatgccgcccggcgcttctggctgcactataacctgtcgctgggggagtttgccggacg

SEQ ID NO: 220840 - DNA, 75 bp, synthetic construct
  source 1..75: mol_type = other DNA
acgccgcaaccactggagtgcgtttttctcgcggactccggctccgtagcggtagaagtggcgatgaaaatggcg

SEQ ID NO: 220841 - DNA, 75 bp, synthetic construct
  source 1..75: mol_type = other DNA
atgattagatatagtggaatatttctatcgctgttaatgctttcaggttgtgcaaccgatgcattgaataatgaa

SEQ ID NO: 220842 - DNA, 75 bp, synthetic construct
  source 1..75: mol_type = other DNA
atctgcgacaaaaactggagcaagatcccgcccgcccccgccattttattactgaaaccggtattgggtatcggt

SEQ ID NO: 220843 - DNA, 75 bp, synthetic construct
  source 1..75: mol_type = other DNA
tggggcagcgagtgatgattgcaattgcgctcatcaacgatccccgggtattgattgccgatgagccaacatcag

SEQ ID NO: 220844 - DNA, 75 bp, synthetic construct
  source 1..75: mol_type = other DNA
gtgacggatattacaccaacagagcggcaggtatttccgctgacggcaggacggaatatgtttctggccggtctg

SEQ ID NO: 220845 - DNA, 75 bp, synthetic construct
  source 1..75: mol_type = other DNA
cagagcatttcagtgaaccctccgtccgttttatctccgtaacaaggcaactggaagagggtcgtttccgttatc

SEQ ID NO: 220846 - DNA, 75 bp, synthetic construct
  source 1..75: mol_type = other DNA
atgggaagaacatttagagaaaaaacaatcaacacattacaaataatcactctgttgacattctattggctaatt

SEQ ID NO: 220847 - DNA, 75 bp, synthetic construct
  source 1..75: mol_type = other DNA
cagttaacggaaaccgtgatgaattaattgatacaactcaggcaaggccaattcagtattgcattaatggaacgt

SEQ ID NO: 220848 - DNA, 75 bp, synthetic construct
  source 1..75: mol_type = other DNA
ataacctgcaggttgttatcgggccgcaagttcagtctgtaaaagacgaaatggctggtctgatgcgtactgttc

SEQ ID NO: 220849 - DNA, 75 bp, synthetic construct
  source 1..75: mol_type = other DNA
caggcagtgccctgctgttatccggttgtgcaggtgtcaaaagcagtttcgactgcgatgccacaacgtctgata

SEQ ID NO: 220850 - DNA, 75 bp, synthetic construct
  source 1..75: mol_type = other DNA
ttgcaattgcgctcatcaacaatccccgggtattgattgccgatgagccaacatcggcactggatgttcgcctgc

SEQ ID NO: 220851 - DNA, 75 bp, synthetic construct
  source 1..75: mol_type = other DNA
gttcctcaaagaacacgtttccatccttgcgatgaacgaagatgaagccgaagcattgactggagagagcgatcc

SEQ ID NO: 220852 - DNA, 75 bp, synthetic construct
  source 1..75: mol_type = other DNA
aatagcggtgtttatgatgcagatatcaaaggcgcaacagcattaatactccacttcaatatgaatacggggagt

SEQ ID NO: 220853 - DNA, 75 bp, synthetic construct
  source 1..75: mol_type = other DNA
atgaatgaagacgactgcaaaataagaagaggaaacgcagcagaattattttcagggatacggcacatcgctatt

SEQ ID NO: 220854 - DNA, 75 bp, synthetic construct
  source 1..75: mol_type = other DNA
gctgcactggcgtctggacgtggtaatgaatgaagacgactgcaaaataagaagaggaaatgcagcagaattatt

SEQ ID NO: 220855 - DNA, 75 bp, synthetic construct
  source 1..75: mol_type = other DNA
gaacctgattgcacgtaaaggcgggctggatttatgcgtactcggtctggggaaaaacgctcatctggggctgaa

SEQ ID NO: 220856 - DNA, 75 bp, synthetic construct
  source 1..75: mol_type = other DNA
gaaattacagctatcccagaacttcttaacatgctggatattaaaggaaaaatcatcacaactgatgcgatgggt

SEQ ID NO: 220857 - DNA, 75 bp, synthetic construct
  source 1..75: mol_type = other DNA
gacgaatgataaggtattcaaggcagggttaagacgtaagatgcgaaaagcagccatggacagaaactatctggc

SEQ ID NO: 220858 - DNA, 75 bp, synthetic construct
  source 1..75: mol_type = other DNA
cagccgattaaagatgcggtagaaaccgtttatcaacgactggaaggctgggaagggaatggcggcttcgcgcag

SEQ ID NO: 220859 - DNA, 75 bp, synthetic construct
  source 1..75: mol_type = other DNA
acggatgagaaatctaatgagattacagctatcccagaacttcttaacatgctggatattaaaggaaaaatcatc

SEQ ID NO: 220860 - DNA, 75 bp, synthetic construct
  source 1..75: mol_type = other DNA
ctggatgcgtgactgccattcttcagatgataaaggcgtcattgcaattgatggaaaaacgctccggcattctta

SEQ ID NO: 220861 - DNA, 75 bp, synthetic construct
  source 1..75: mol_type = other DNA
cagggttaagacgtaagatgcgaaaagcagccatggacagaaactacctggcgtcagtccttgcagggagcgggc

SEQ ID NO: 220862 - DNA, 75 bp, synthetic construct
  source 1..75: mol_type = other DNA
gttgggcgacggcaaattttgcgtcggtagaaggagactatgatatctggaaggagctgtttggtcgttcattta

SEQ ID NO: 220863 - DNA, 75 bp, synthetic construct
  source 1..75: mol_type = other DNA
ttgcttgcttcttactcaatggttgttgatactatcacaggcgctttttatgcgatatcaaatacactacagaaa

SEQ ID NO: 220864 - DNA, 75 bp, synthetic construct
  source 1..75: mol_type = other DNA
ataaagacgtcatcgcaattgatggaaaaacgctccggcactcttatgacaagagtcgtcgcaggggagcgattc

SEQ ID NO: 220865 - DNA, 75 bp, synthetic construct
  source 1..75: mol_type = other DNA
cgcaagggagcgattcatgtcattagtgcgttctcaacaatgcacagtctggtcatcggacagatcaggacggat

SEQ ID NO: 220866 - DNA, 75 bp, synthetic construct
  source 1..75: mol_type = other DNA
acgtttgaatggaaagggcagccatggacagaaactatctggcgtcagtccttgcggggagcgcgctttcgtaat

SEQ ID NO: 220867 - DNA, 75 bp, synthetic construct
  source 1..75: mol_type = other DNA
tgaaggcgctgaaagggcgctatgagatggttaatattaagctcgataaaaccggggggtctgacggaagcgctg

SEQ ID NO: 220868 - DNA, 75 bp, synthetic construct
  source 1..75: mol_type = other DNA
tcaaaggcaccggtgaatgcacgccgtatccgcgttatggggaaagcgatgcctcggtaatggcgcaaattatga

SEQ ID NO: 220869 - DNA, 75 bp, synthetic construct
  source 1..75: mol_type = other DNA
ttgaaagaattaagtaatccagagcatgacagttacgcaattagtgaaaagagtcacggcagagaagaaatccgt

SEQ ID NO: 220870 - DNA, 75 bp, synthetic construct
  source 1..75: mol_type = other DNA
atgagattacagctatcccagaacttcttaacatgctggatattaaaggaaaaatcatcacaactgatgcgatgg

SEQ ID NO: 220871 - DNA, 75 bp, synthetic construct
  source 1..75: mol_type = other DNA
aaatccgtcttcacattgtttgcgatgtccctgatgaacttattgatttcacgtttgaatggaaagggcagccat

SEQ ID NO: 220872 - DNA, 75 bp, synthetic construct
  source 1..75: mol_type = other DNA
cagcagatgaaagagctggggatgcattcctatctggcagttggtcagggttcacaaaacgaatcgctgatgtcg

SEQ ID NO: 220873 - DNA, 75 bp, synthetic construct
  source 1..75: mol_type = other DNA
gtacgccaggcggtcgagacggcaaaagaaacgctctacagctttgatcaactgaaaaccaacaagagcgaaccg

SEQ ID NO: 220874 - DNA, 75 bp, synthetic construct
  source 1..75: mol_type = other DNA
ttgatgagcgccagtataagcaggtcattcaaaaaaccattaatacgctgaatgataccggttcaatggaagcgg

SEQ ID NO: 220875 - DNA, 75 bp, synthetic construct
  source 1..75: mol_type = other DNA
cgaaaacagcagcaatcgctggctgatttgatcggcataacgcttcccgggacagtcaccactgcacagacggta

SEQ ID NO: 220876 - DNA, 75 bp, synthetic construct
  source 1..75: mol_type = other DNA
tgaaggcgctgaaagggcgctatgagatggttaacattaagctcgataaaaccggtggtctgacggaagcgctgg

SEQ ID NO: 220877 - DNA, 75 bp, synthetic construct
  source 1..75: mol_type = other DNA
atgcctggcgggcgtgcctatcgtccgggcgatgtgttaaccaccatgtccggtcaaaccgttgaagtgctgaac

SEQ ID NO: 220878 - DNA, 75 bp, synthetic construct
  source 1..75: mol_type = other DNA
tgatcccggcacccatggtcgcgatgaactccgcccgactggtgcaacgtcacgtcaatgcattattactgtccg

SEQ ID NO: 220879 - DNA, 75 bp, synthetic construct
  source 1..75: mol_type = other DNA
ctatttacagcgcgccgggcgagccgggcgtagtaaagaatcacgcgcgatctcttataccctatgcaaaggtaa

SEQ ID NO: 220880 - DNA, 75 bp, synthetic construct
  source 1..75: mol_type = other DNA
tgtaatgattgtaatgagcctcatcttctggcacgggacaaaaagggcaaactagtccagtgggaaaataaaggt

SEQ ID NO: 220881 - DNA, 75 bp, synthetic construct
  source 1..75: mol_type = other DNA
ctatttacagcgcgccgggcgagccgggcgtagtaaagagtcgcgtgcgatctcttacaccctatgcaaaggtaa

SEQ ID NO: 220882 - DNA, 75 bp, synthetic construct
  source 1..75: mol_type = other DNA
tagtcaaaatggctcaggcctgcaaggaagggaatgtggccaacagcgaagagagctgggcaacggatgtgctgg

SEQ ID NO: 220883 - DNA, 75 bp, synthetic construct
  source 1..75: mol_type = other DNA
gtatggaagctcactatccaccgcgtccgggtaaagcggatcgcgacagccagaatcatcgtctgatttgccccg

SEQ ID NO: 220884 - DNA, 75 bp, synthetic construct
  source 1..75: mol_type = other DNA
gctctcgcagttgcctgtcgacccacgtctggcgcgtatggtgctggaagcgcagaaacatggctgtgtgcgtga

SEQ ID NO: 220885 - DNA, 75 bp, synthetic construct
  source 1..75: mol_type = other DNA
gtagaagagctggaacacaaatcacgtcgccgcgatattctggttgatgacgaaatgctgtttgagttctacgac

SEQ ID NO: 220886 - DNA, 75 bp, synthetic construct
  source 1..75: mol_type = other DNA
gtttattcaaaaagccgccgaaatgggtaatggtggcggaactggtagaaaccagccgcctgtggggacgcattg

SEQ ID NO: 220887 - DNA, 75 bp, synthetic construct
  source 1..75: mol_type = other DNA
ctaatgcaaaggatcccgcatttcttaaagtcagggcgcatatcttccagcgtaatacccagggaatatgggctt

SEQ ID NO: 220888 - DNA, 75 bp, synthetic construct
  source 1..75: mol_type = other DNA
tgacgccgaatatggaaacctggcgcggttgcgatcaggtggaagtggcggtagcctggcaacaggcgattgagc

SEQ ID NO: 220889 - DNA, 75 bp, synthetic construct
  source 1..75: mol_type = other DNA
atatgtgcacgatctgcaatcccatccggcggcgctggcaacccgtcaggtcagccagaaatgcctcaatcactt

SEQ ID NO: 220890 - DNA, 75 bp, synthetic construct
  source 1..75: mol_type = other DNA
ttgggggcattaaacttgatgacagtgaaattgccattggtgaggtgccgttaaccttcatcgttgatgcagatc

SEQ ID NO: 220891 - DNA, 75 bp, synthetic construct
  source 1..75: mol_type = other DNA
ctggcaagtcaccatgtcacgctggaaatcaaagagatcagctacgatcagtggcacgaaggtgagattgaaagc

SEQ ID NO: 220892 - DNA, 75 bp, synthetic construct
  source 1..75: mol_type = other DNA
caccggtccgtatgcggtaatgcgtaacagcgccaatcaactgaaaattcaggcattcgatgacttcttcggtta

SEQ ID NO: 220893 - DNA, 75 bp, synthetic construct
  source 1..75: mol_type = other DNA
gacgcattgcgaaaaacccgccgggctggaaaacctcaccctgactttttatcaggatcatattgagcatcgagt

SEQ ID NO: 220894 - DNA, 75 bp, synthetic construct
  source 1..75: mol_type = other DNA
ccaggggcggctaaataaagccttcgaggaaaaatttccgctgaaagaattaaataatccagagcatgacagtta

SEQ ID NO: 220895 - DNA, 75 bp, synthetic construct
  source 1..75: mol_type = other DNA
ttctttctccaaccaatctggtctatttcgccgaggaacaataccagcaactgtggttcccggcatatggcctac

SEQ ID NO: 220896 - DNA, 75 bp, synthetic construct
  source 1..75: mol_type = other DNA
tggacgctggatatccatctcacgcagccggaccgctggttgccgttactgctggggcaagttccggcgatgatc

SEQ ID NO: 220897 - DNA, 75 bp, synthetic construct
  source 1..75: mol_type = other DNA
tggcattactttgacttcagcgatgacgtttctttccagttagtcaaaatggctcaggcctgtcaggaagggaat

SEQ ID NO: 220898 - DNA, 75 bp, synthetic construct
  source 1..75: mol_type = other DNA
ctacactaccagatattcaaagcattgatgtaacgcgttacctgagcggaatttcaattgagcgatgtcatatac

SEQ ID NO: 220899 - DNA, 75 bp, synthetic construct
  source 1..75: mol_type = other DNA
tgaaacttatcggattcgcaccggaagagaacaaatcagcatcggaaggtttgctctaaatggaaagcgtgcaag

SEQ ID NO: 220900 - DNA, 75 bp, synthetic construct
  source 1..75: mol_type = other DNA
cgcagtatgcgcggcctgcgtatgaatacccttggctggttcgattttaaatcagcgtggtttgcgccgccggat

SEQ ID NO: 220901 - DNA, 75 bp, synthetic construct
  source 1..75: mol_type = other DNA
ggggaaacacatcccgattttttgaagcaatatggtgattttgaaaatggtattcctgttcacgacaccattgcc

SEQ ID NO: 220902 - DNA, 75 bp, synthetic construct
  source 1..75: mol_type = other DNA
cgcaggggagcgattcatgtcattagtgcgttctcaacaatgcacagtctggtcatcggacagatcaagacggat

SEQ ID NO: 220903 - DNA, 75 bp, synthetic construct
  source 1..75: mol_type = other DNA
atgcgcgtactgctattgttacttctttcccttttcgtgttgcctgtattggcggctgataatctgttgcgctgg

SEQ ID NO: 220904 - DNA, 75 bp, synthetic construct
  source 1..75: mol_type = other DNA
attgatacaattcttaaaccagaacgacttacatcaaattccttttctggaatttattattatcatgcgcatgaa

SEQ ID NO: 220905 - DNA, 75 bp, synthetic construct
  source 1..75: mol_type = other DNA
gtgagctccatcgtatcgcggatgccctgcaggcggttcagaaacgtaacttctggcagttacaggctgaaatca

SEQ ID NO: 220906 - DNA, 75 bp, synthetic construct
  source 1..75: mol_type = other DNA
gtgacctgcatcgtatcgcggatgccctgcaggcggttcagaaacgtaacttctggcagttacaggctgaaatca

SEQ ID NO: 220907 - DNA, 75 bp, synthetic construct
  source 1..75: mol_type = other DNA
gcctgtccacgctctataaaaaattcccctcatcagcgacaaagaataaattgtgtcatcccttagccaaccggg

SEQ ID NO: 220908 - DNA, 75 bp, synthetic construct
  source 1..75: mol_type = other DNA
atatccaacaagagagctactaccatctggtgttgaaccagatgacaccttaatttatacatttgatatcaacag

SEQ ID NO: 220909 - DNA, 75 bp, synthetic construct
  source 1..75: mol_type = other DNA
catcgtctggaatatatccagtttagataaaaaagatatattgtctatctcaagaatggtttacgcactttcgac

SEQ ID NO: 220910 - DNA, 75 bp, synthetic construct
  source 1..75: mol_type = other DNA
caacatatagtcatttgagaaaattaggtcatgatataagtactttacatcaaaatgcagtaaatattgcaatca

SEQ ID NO: 220911 - DNA, 75 bp, synthetic construct
  source 1..75: mol_type = other DNA
tcagacaccgctgtggatgaggcccttctcatcaacgaatataccttcaccgaagccggtctgcgcgccggctga

SEQ ID NO: 220912 - DNA, 75 bp, synthetic construct
  source 1..75: mol_type = other DNA
ttctggcagttgcaggctgaaatcagtcaccggggacgttactgccatccgtacagcatggatatcactgttacc

SEQ ID NO: 220913 - DNA, 75 bp, synthetic construct
  source 1..75: mol_type = other DNA
gtgatctccatcgtatcgcggatgccctgcaggcggtacagaaacgtaacttctggcagttacaggctgaaatca

SEQ ID NO: 220914 - DNA, 75 bp, synthetic construct
  source 1..75: mol_type = other DNA
gtgaacttcatcgtatcgcggatgccctgcaggcggtgcagaaacgtaacttctggcagttacaggctgaaatca

SEQ ID NO: 220915 - DNA, 75 bp, synthetic construct
  source 1..75: mol_type = other DNA
atgcttttttcaactatcaattggtctggaacgttttttaaaattatttatgttgttcagtatatgattgaaaat

SEQ ID NO: 220916 - DNA, 75 bp, synthetic construct
  source 1..75: mol_type = other DNA
cacgaagagatgcagcacaatatcgaccaggcgacgtccgatctgcgtgaaacgctggagcagatggaaattcag

SEQ ID NO: 220917 - DNA, 75 bp, synthetic construct
  source 1..75: mol_type = other DNA
aagcctgggcaccgtttgcggaagggaaaaatggtctgttccagcatcctgttctcacggcaattggcgggaagt

SEQ ID NO: 220918 - DNA, 75 bp, synthetic construct
  source 1..75: mol_type = other DNA
agaagatctggaacctgaattgctggaactgctggacgagatggataacgtggcgcgtgaagccagcaaaattct

SEQ ID NO: 220919 - DNA, 75 bp, synthetic construct
  source 1..75: mol_type = other DNA
gataccggtatcggcattcccgaacgcgatcaatcacgcttgttccaggccttcagacaggcagatgccagtatt

SEQ ID NO: 220920 - DNA, 75 bp, synthetic construct
  source 1..75: mol_type = other DNA
aagttagtaataaccagctggatagctaccttccaatacgtaataagaataacaatattgactggcaaatcgtca

SEQ ID NO: 220921 - DNA, 75 bp, synthetic construct
  source 1..75: mol_type = other DNA
tgaggaaaagcgccctctttggcaggtatatcaagattgcttaggttattcagatacatcgaatcgagtactaaa

SEQ ID NO: 220922 - DNA, 75 bp, synthetic construct
  source 1..75: mol_type = other DNA
gaagatcgtatattgcaagcaatgattgcagcattttttcttcttacgccacttattattcttatcttaagaaaa

SEQ ID NO: 220923 - DNA, 75 bp, synthetic construct
  source 1..75: mol_type = other DNA
accagttatcgcggtaacggcgcacgcgatggccgggcaaaaagagaaactgcttggcgcgggaatgagcgatta

SEQ ID NO: 220924 - DNA, 75 bp, synthetic construct
  source 1..75: mol_type = other DNA
tctggcgaaaccgattgaagaagagcgattgcataatttgttgttgcgctacaagcctggcagcggtatttcctc

SEQ ID NO: 220925 - DNA, 75 bp, synthetic construct
  source 1..75: mol_type = other DNA
tgaaaccattaacacctacgcgcctgttgcctgccctgacggaattttgtcatcacaaacaaaacacgcttttgc

SEQ ID NO: 220926 - DNA, 75 bp, synthetic construct
  source 1..75: mol_type = other DNA
tggtggggaatgcaattaaattcaccgagaatggcaacattgatattctggtagaaaaacgtgcgctgagtaata

SEQ ID NO: 220927 - DNA, 75 bp, synthetic construct
  source 1..75: mol_type = other DNA
cgctcaatattaaaagcgacgtgcctgataacgtgatcggcgacccgctgcgattacagcaaatcatcactaacc

SEQ ID NO: 220928 - DNA, 75 bp, synthetic construct
  source 1..75: mol_type = other DNA
tctggcgaaaccgattgaagaagagcggttgcataatttgctgttacgttacaagcccggcagtggcatttcttc

SEQ ID NO: 220929 - DNA, 75 bp, synthetic construct
  source 1..75: mol_type = other DNA
agcgcgtaccgcaggatggacgtattgcgctgctgctgggcggccgggcgattgacgtgcgtgtctccaccatgc

SEQ ID NO: 220930 - DNA, 75 bp, synthetic construct
  source 1..75: mol_type = other DNA
gacgtactgccatccatgagctgatcgtggtggatgccacattgcgtgatttgatccaccgtcaggccggggaac

SEQ ID NO: 220931 - DNA, 75 bp, synthetic construct
  source 1..75: mol_type = other DNA
gctgctggtatcgcgtattaaggtgatggcacggctggatatcgccgaaaaacgcgtaccgcaggatgggcgcat

SEQ ID NO: 220932 - DNA, 75 bp, synthetic construct
  source 1..75: mol_type = other DNA
gtacgaatggacaacgaaaagagcttcgttgttgccgatattccagggctgattgaaggcgctgcggaaggcgca

SEQ ID NO: 220933 - DNA, 75 bp, synthetic construct
  source 1..75: mol_type = other DNA
atgtattgtgatataacagacttggtttcgaaaactattcagtataagtatgtcaaatcctatggccccctaaat

SEQ ID NO: 220934 - DNA, 75 bp, synthetic construct
  source 1..75: mol_type = other DNA
agcgactggttcgcacgctgtgtcccgattgccgccagtccgcgcctgccactgacgaagaaaaacgcctgctgg

SEQ ID NO: 220935 - DNA, 75 bp, synthetic construct
  source 1..75: mol_type = other DNA
tcacgaaggggcatggtacgatccggataaagacggcgagccaggggcgctgtgcaaatacggtaaccccaatgt

SEQ ID NO: 220936 - DNA, 75 bp, synthetic construct
  source 1..75: mol_type = other DNA
tggcggcgggcgaaatcgaagtcatcagcatcgacccggtggttagttcaacgcatgactatctgggacgcaatc

SEQ ID NO: 220937 - DNA, 75 bp, synthetic construct
  source 1..75: mol_type = other DNA
tttccgacttcactcgcagttatgtgagtcggaaactctgcgtcagcaatatacggtagcgggtaaagagccagt

SEQ ID NO: 220938 - DNA, 75 bp, synthetic construct
  source 1..75: mol_type = other DNA
acattgcgtgatttgatccaccgtcaggccggggaactggagctggaacgttatgtccggcaacactctgcgggt

SEQ ID NO: 220939 - DNA, 75 bp, synthetic construct
  source 1..75: mol_type = other DNA
ggtatccgcagcaacggcattgagaaagtgctcgccggagaaacctctctcgatgaagttctgcgggtaaccatg

SEQ ID NO: 220940 - DNA, 75 bp, synthetic construct
  source 1..75: mol_type = other DNA
ggttcgatggaagtgtatgaacagcaaacctcctggccgctggtattgcagaacagcaaaaccattgtgctgtgg

SEQ ID NO: 220941 - DNA, 75 bp, synthetic construct
  source 1..75: mol_type = other DNA
gaaaagtatattccgaaaggcggcccggatggcggcgacggcggtgacggtggtgacgtatggatggaagccgac

SEQ ID NO: 220942 - DNA, 75 bp, synthetic construct
  source 1..75: mol_type = other DNA
aatgccttctataaaaccaccttcaagacggccaacaatcccgatgaagatatgcaaatagaacggcaatttatt

SEQ ID NO: 220943 - DNA, 75 bp, synthetic construct
  source 1..75: mol_type = other DNA
gccaccggggacactactgccatccgtacagcatggatatcaccgtcacccgggacagtccgaccggacaggcaa

SEQ ID NO: 220944 - DNA, 75 bp, synthetic construct
  source 1..75: mol_type = other DNA
gagcctgttttgaaggacgctggcactggcagtctgcaacagcccggagaatcagggagcatgcaccgcaggagc

SEQ ID NO: 220945 - DNA, 75 bp, synthetic construct
  source 1..75: mol_type = other DNA
atcagggaatatgccccgcagaaccgtgagcttcatcgtatctcggatgccctgcaggtggtgcagaaacgtaac

SEQ ID NO: 220946 - DNA, 75 bp, synthetic construct
  source 1..75: mol_type = other DNA
ttgattgcggccagaaagtcagaagccttagcaaattattggtattacaatagcaatattaggggcgtggtatac

SEQ ID NO: 220947 - DNA, 75 bp, synthetic construct
  source 1..75: mol_type = other DNA
agaactataaatcagatgccagtacgccttatttcggtgaaaccggagagcaggcgataacttcagcgcgtattc

SEQ ID NO: 220948 - DNA, 75 bp, synthetic construct
  source 1..75: mol_type = other DNA
gtacgaatggacaacgaaaagagcttcgttgttgccgatattccaggactgattgaaggcgctgcagaaggcgca

SEQ ID NO: 220949 - DNA, 75 bp, synthetic construct
  source 1..75: mol_type = other DNA
gccgaatgcgggtaaatcgacctttatccgcgcggtctcggcggctaaaccgaaagtggcggattatccgtttac

SEQ ID NO: 220950 - DNA, 75 bp, synthetic construct
  source 1..75: mol_type = other DNA
aggtacgcgtgttattgaccagggcactggcgaaaccatgggcgatatgaccaaacatggtcagcgcctgctggt

SEQ ID NO: 220951 - DNA, 75 bp, synthetic construct
  source 1..75: mol_type = other DNA
agcggattctgcagccagggggacggagcctgttttgaaggacgctggcactggcagccagcgacagtcagaaga

SEQ ID NO: 220952 - DNA, 75 bp, synthetic construct
  source 1..75: mol_type = other DNA
gtgcttaaaaccttccgtgtatttgctcgtgcggttaacccactaggccacacaattggtatcgctcagaacgtg

SEQ ID NO: 220953 - DNA, 75 bp, synthetic construct
  source 1..75: mol_type = other DNA
ttctggtcgttgcaggtgatggcggcaatggttgtgtgagcttccgccgcgaaaaatatattccgaaaggcggcc

SEQ ID NO: 220954 - DNA, 75 bp, synthetic construct
  source 1..75: mol_type = other DNA
acggtaaacacactttaataaacgccaatctattcctgaaaggccaatacagaacattaaatccaataaggaaag

SEQ ID NO: 220955 - DNA, 75 bp, synthetic construct
  source 1..75: mol_type = other DNA
catgcagcatggaaacctgattgccagtatatctcagtcggcactcgcagaagagcttaatatgagcaaatctaa

SEQ ID NO: 220956 - DNA, 75 bp, synthetic construct
  source 1..75: mol_type = other DNA
gatgcaaatgaatcctggcgtgcagaagggttggcggcgcgttgccaactgctcgcggatttaggcgttgcgatg

SEQ ID NO: 220957 - DNA, 75 bp, synthetic construct
  source 1..75: mol_type = other DNA
ttgtcctgccggttgtgccttccaaccttttcactggtatcgacgtagaagcacagggggcgagcaaccagaccg

SEQ ID NO: 220958 - DNA, 75 bp, synthetic construct
  source 1..75: mol_type = other DNA
cgttatggcaatcgtggtctggcgttgctggaccttatcgaagagggcaacctggtggattcgccagacgattga

SEQ ID NO: 220959 - DNA, 75 bp, synthetic construct
  source 1..75: mol_type = other DNA
aggagattaaagaagaattaccggcgtgcatcgatacagacaagaagctgaaagaagtaatcaactttatcgcta

SEQ ID NO: 220960 - DNA, 75 bp, synthetic construct
  source 1..75: mol_type = other DNA
cctggagcgcgtttacgcttgcatggtagcgcccaggcattgcaggcgcttgaagcctcaacgtggcgtaaagga

SEQ ID NO: 220961 - DNA, 75 bp, synthetic construct
  source 1..75: mol_type = other DNA
cagttcaagctttttatccgtcatggtgatttgcttactgaaccggttaaaggggaatttagtagttacggatta

SEQ ID NO: 220962 - DNA, 75 bp, synthetic construct
  source 1..75: mol_type = other DNA
gcaaaactgcatcgggtattaggtgcaagagggcaaggcgatatcggcgtgagtttcccggacgtaaatgttatg

SEQ ID NO: 220963 - DNA, 75 bp, synthetic construct
  source 1..75: mol_type = other DNA
atcacccacgttatccgtggcgaagaccatatcaacaacacgccgcgccagatcaacattcttaaggccctgaaa

SEQ ID NO: 220964 - DNA, 75 bp, synthetic construct
  source 1..75: mol_type = other DNA
cgctggcgaatgaagcgcgcgcgcaaggtttcagtttgatgttgggctgcatgttatgtacctcacgcgctattc

SEQ ID NO: 220965 - DNA, 75 bp, synthetic construct
  source 1..75: mol_type = other DNA
tgaaggcgctgaaagggcgctatgagatggttaatatcaaactcgataaaacgggagggctgaccgaagccctgg

SEQ ID NO: 220966 - DNA, 75 bp, synthetic construct
  source 1..75: mol_type = other DNA
gataaacattacgggatggggcgaaactgccacctgttcgaaatgacgcgcaaatgggcttacagggcgattcgt

SEQ ID NO: 220967 - DNA, 75 bp, synthetic construct
  source 1..75: mol_type = other DNA
gattgccaacttccgcgaaaccgatctgaaaaacattcatgtcggaacgccagcaaccattcgcctgatgagtga

SEQ ID NO: 220968 - DNA, 75 bp, synthetic construct
  source 1..75: mol_type = other DNA
aacttcacgccggaaactttcgcacagtatgtggctgatacgcacacgccagaaatacaggccaagagaggcagg

SEQ ID NO: 220969 - DNA, 75 bp, synthetic construct
  source 1..75: mol_type = other DNA
gtggtgcggatacagactggagcaccgttgattatccaaaactcaccgatatggatagcaacaccgatgcgatgg

SEQ ID NO: 220970 - DNA, 75 bp, synthetic construct
  source 1..75: mol_type = other DNA
tacgacaacccgatttgttttggtgaagagtcgctatttgctcgtgttgatgaaattcgtgtccaggaaaaaacc

SEQ ID NO: 220971 - DNA, 75 bp, synthetic construct
  source 1..75: mol_type = other DNA
agcggcctgatttgcaaaaatccgttccacctggaatggcaggtgatggagtggcgcgaggacgcctataccctc

SEQ ID NO: 220972 - DNA, 75 bp, synthetic construct
  source 1..75: mol_type = other DNA
gtggcgtgaggaagcctataccctcgatgaactggctgattatctcgatttgagcacttcagcgcgccgtagcat

SEQ ID NO: 220973 - DNA, 75 bp, synthetic construct
  source 1..75: mol_type = other DNA
atgaacgcaataattattgatgaccatcctcttgctatcgcagcaattcgtaatttattgatcaaaaacgatatt

SEQ ID NO: 220974 - DNA, 75 bp, synthetic construct
  source 1..75: mol_type = other DNA
gaccagcggtgagcgcgcgatccagcacggtctggcgattgccgccgggattaaagcagcaaaggatcttggcaa

SEQ ID NO: 220975 - DNA, 75 bp, synthetic construct
  source 1..75: mol_type = other DNA
aatacacgcacaggaacttcacgccggaaactttcgcacagtatgtggctgatacgcacacattaacgtacgttt

SEQ ID NO: 220976 - DNA, 75 bp, synthetic construct
  source 1..75: mol_type = other DNA
agaagcgagtaacgggcaccagcgaacgacgagagcagatcattcaacgactacgccagcaaggtagcgtgcagg

SEQ ID NO: 220977 - DNA, 75 bp, synthetic construct
  source 1..75: mol_type = other DNA
tacagggcgattcgtcagggctggccagcattctcacagtggcttgatgccgtgattcagcgtgtcgaaatgtac

SEQ ID NO: 220978 - DNA, 75 bp, synthetic construct
  source 1..75: mol_type = other DNA
cggtacatccagcagaaccagcctcatgcgcagttctggatggtttttgacgttgaccgcgagggggcagcgatt

SEQ ID NO: 220979 - DNA, 75 bp, synthetic construct
  source 1..75: mol_type = other DNA
caacaccgtttccggcaaaggcgagtgtgagatgttcatcatccacgcacgtaaagcctggctttcggggttaag

SEQ ID NO: 220980 - DNA, 75 bp, synthetic construct
  source 1..75: mol_type = other DNA
atattacccggcatatgctgggtctgttccagggtattcctggtgcgcggcagtggcgtcgttatttaagtgaaa

SEQ ID NO: 220981 - DNA, 75 bp, synthetic construct
  source 1..75: mol_type = other DNA
ccgcaatacgttgctgtataccgaaatggtgaccacaggggcgattattcacggtaaaggtgattatctggcgta

SEQ ID NO: 220982 - DNA, 75 bp, synthetic construct
  source 1..75: mol_type = other DNA
ttaagccgagagatatcactacccatgaatgggattcctctaatagagggacagtaggcgatctatacgaataca

SEQ ID NO: 220983 - DNA, 75 bp, synthetic construct
  source 1..75: mol_type = other DNA
cgccatatgctggggctgttccaggggatccctggcgcgcgtcagtggcggcgttatttaagtgaaaatgctcat

SEQ ID NO: 220984 - DNA, 75 bp, synthetic construct
  source 1..75: mol_type = other DNA
ttttccgcatctgaccatggcgattaacggcggcattaagtctctggaagaggccaaagcgcatctgcaatatat

SEQ ID NO: 220985 - DNA, 75 bp, synthetic construct
  source 1..75: mol_type = other DNA
atgaaacgctttccgctatttcttttattcaccctgttcacgctgttcacgctgttcacgctgttcacgctgttc

SEQ ID NO: 220986 - DNA, 75 bp, synthetic construct
  source 1..75: mol_type = other DNA
ctcgatactgaaaaagctagctccgaacgagataaaataaagctcttcggctataagtggtttgcccgccaaagt

SEQ ID NO: 220987 - DNA, 75 bp, synthetic construct
  source 1..75: mol_type = other DNA
ctcgagcagtttcgcgaggattgtaaaactcatctgcaaatattgatcgatgaacctgcgttcttgtccgtgctg

SEQ ID NO: 220988 - DNA, 75 bp, synthetic construct
  source 1..75: mol_type = other DNA
tcatccacgcgcgtaaagcctggctttctggtttaagcccgaaagaaaaccgcgaaatcccgccgctcgattacc

SEQ ID NO: 220989 - DNA, 75 bp, synthetic construct
  source 1..75: mol_type = other DNA
atcccgcataccgtttctccattgccccgatgctcgactggacggacagacattgccgttatttcctgcgtctgc

SEQ ID NO: 220990 - DNA, 75 bp, synthetic construct
  source 1..75: mol_type = other DNA
aaatcaaccaaaccagcgcaatgcctgaaaaaactgacgttcactggagtggtcggtttagcgttgcaccaatgc

SEQ ID NO: 220991 - DNA, 75 bp, synthetic construct
  source 1..75: mol_type = other DNA
cctgtcgttatcggtgcaggcggtggaggcggtgtcggtgcgtcagtgggttacaagggaggtgatagctcgttc

SEQ ID NO: 220992 - DNA, 75 bp, synthetic construct
  source 1..75: mol_type = other DNA
ctgccatcctgttgtttctggtagtggcagtggatttcactgggcggttgatgtcggtactggctgatggtgtgt

SEQ ID NO: 220993 - DNA, 75 bp, synthetic construct
  source 1..75: mol_type = other DNA
aaaaaacacatttaatgaaaaaatcttaaacagcaatgataatttgcaaaaatcatatagcaaaacagaagaaag

SEQ ID NO: 220994 - DNA, 75 bp, synthetic construct
  source 1..75: mol_type = other DNA
aatcatatagcaaaacagaagaaagtagctgggtctcggcttctgttggttctcttctggacaaaggtgcaaaag

SEQ ID NO: 220995 - DNA, 75 bp, synthetic construct
  source 1..75: mol_type = other DNA
gcgccatcaatgtggtgcgccatcgcagtgatgtaaacccacaacgattggtgctgttcggtcaaagtatcggcg

SEQ ID NO: 220996 - DNA, 75 bp, synthetic construct
  source 1..75: mol_type = other DNA
tgatgagagttacagcggcgaaaattacatcgccagcgtcagcccgatcccgcttttactcattcacggtaaagc

SEQ ID NO: 220997 - DNA, 75 bp, synthetic construct
  source 1..75: mol_type = other DNA
gtgaaaagtgcgcgccttgtgctggctgtcatcctgctgtttctggtagtggtggtggatttcaccggacggctg

SEQ ID NO: 220998 - DNA, 75 bp, synthetic construct
  source 1..75: mol_type = other DNA
atggccgacctgaagccagtgtatcgtgcggtgtcggaaacggcgctggatgagctggaagcgaaacgggggcag

SEQ ID NO: 220999 - DNA, 75 bp, synthetic construct
  source 1..75: mol_type = other DNA
cgtcagcggtgaaggcggaacatcgtactggggtggcggtggacgcgcaggcgctggcggtggcgttagaggcag

SEQ ID NO: 221000 - DNA, 75 bp, synthetic construct
  source 1..75: mol_type = other DNA
ccaatggaaaacaacctgccgacgccacactgaccgcactggcaggccttgccactgcggcagacaaactaccgt

SEQ ID NO: 221001 - DNA, 75 bp, synthetic construct
  source 1..75: mol_type = other DNA
gacgtaattgcgatgaccaacggtatgaacgtggctaatgcgttgctggaagcggaaggcgttgagctgctgatg

SEQ ID NO: 221002 - DNA, 75 bp, synthetic construct
  source 1..75: mol_type = other DNA
tcagttgtggcggagaaaatgggccaatctgtcgtgttacttccggtatccggcgacgatccgtaaggtcattta

SEQ ID NO: 221003 - DNA, 75 bp, synthetic construct
  source 1..75: mol_type = other DNA
tcaatcgtaaaaatggttccggaaaaaagaccattaaagccccgactggcagctttgagctggcaactccacgtg

SEQ ID NO: 221004 - DNA, 75 bp, synthetic construct
  source 1..75: mol_type = other DNA
caggatgtgccgccagaacatgctggcgtgtttgtggaggcagtgcatcgcctgtctgcgccttatcatcagtaa

SEQ ID NO: 221005 - DNA, 75 bp, synthetic construct
  source 1..75: mol_type = other DNA
tctgaatgcgcagattaaagccggtgctcaggcagtgatgattttcgacacctggggcggcgtgcttaccgggcg

SEQ ID NO: 221006 - DNA, 75 bp, synthetic construct
  source 1..75: mol_type = other DNA
taaccggcttgttgctggtggcgctggcagtgattgcctgcggcgcagtggcccgcctcggctggcgcaaagggc

SEQ ID NO: 221007 - DNA, 75 bp, synthetic construct
  source 1..75: mol_type = other DNA
gattaaagccggtgctcaggcagtgatgattttcgacacctggggcggcgtgcttaccgggcgcgattatcaaca

SEQ ID NO: 221008 - DNA, 75 bp, synthetic construct
  source 1..75: mol_type = other DNA
cggcgaaggtcatgtctttaaccttggtcacggcattcatcaggatgtgccgccagaacatgctggcgtgtttgt

SEQ ID NO: 221009 - DNA, 75 bp, synthetic construct
  source 1..75: mol_type = other DNA
cctggggcggcgtgctcaccggacgtgactatcaacagttctcgctctactacatgcataaaattgtcgatgggt

SEQ ID NO: 221010 - DNA, 75 bp, synthetic construct
  source 1..75: mol_type = other DNA
tcgcaaaagccgggaggcatttgaagcggtgtaccagttactcgacaggtctgccagccagtgggcgcaggcact

SEQ ID NO: 221011 - DNA, 75 bp, synthetic construct
  source 1..75: mol_type = other DNA
taggaaaagtgaagaagcatttgcatcagtatataatttaatagaattggccggtgagcggtgggctgaaaaact

SEQ ID NO: 221012 - DNA, 75 bp, synthetic construct
  source 1..75: mol_type = other DNA
tatctcacccgaagccagagggaaaacaatgctttatggtcactggtgcaaccagcgagatatcccagatccata

SEQ ID NO: 221013 - DNA, 75 bp, synthetic construct
  source 1..75: mol_type = other DNA
tccccagggcaactactggtatctgctgcacggcgaactggcgggatcgtcgtttgatatgcagcaaacccacca

SEQ ID NO: 221014 - DNA, 75 bp, synthetic construct
  source 1..75: mol_type = other DNA
gcagcaccgcaacggcctgattgaccccgacacccgcgcccgcctgcaaaacggcggcgaagcgcaggcgcagtg

SEQ ID NO: 221015 - DNA, 75 bp, synthetic construct
  source 1..75: mol_type = other DNA
ccagtaaacgccccgcgctgttatgggggctagtctgcctggtcatggcggcggcgttgctgatcctgctgccgc

SEQ ID NO: 221016 - DNA, 75 bp, synthetic construct
  source 1..75: mol_type = other DNA
ccgtcgggttgagcgcctcttgtctgaccgtcctgttctggcatccgtggctgtgccgtggtctgccggtgcgcc

SEQ ID NO: 221017 - DNA, 75 bp, synthetic construct
  source 1..75: mol_type = other DNA
aatatctcctgaagttagagggaaaactatgctattaggacattggcttggatcgcgagaaatagcagatccata

SEQ ID NO: 221018 - DNA, 75 bp, synthetic construct
  source 1..75: mol_type = other DNA
cctagactggcagccctattttgaggcgctgacctatggcggtaatttcggcactgttgcaaatagtcggtggtg

SEQ ID NO: 221019 - DNA, 75 bp, synthetic construct
  source 1..75: mol_type = other DNA
cctcgactggcagccttattttgaggcgctgacctatggcagcaattttcacacggtcggtgcggtgctgacgcc

SEQ ID NO: 221020 - DNA, 75 bp, synthetic construct
  source 1..75: mol_type = other DNA
actgtgctggcccgaaatgtaggtttccaacacactcttcacgttggacgggttatcacgccaaccgttgcgctg

SEQ ID NO: 221021 - DNA, 75 bp, synthetic construct
  source 1..75: mol_type = other DNA
caacgtaaaggatggcaaggatacggtctcactctactacgccgcattggcacggcaacgcgctgactggttggt

SEQ ID NO: 221022 - DNA, 75 bp, synthetic construct
  source 1..75: mol_type = other DNA
aatcggggcatattgggcgcaaaatggcggcaacgtttgccagcaccggtacaccttcatttttcgtccatcctg

SEQ ID NO: 221023 - DNA, 75 bp, synthetic construct
  source 1..75: mol_type = other DNA
tcttaaccggcttgttgctggtggcgctggcggtgattgcctgcggcgcagtggcccgcctcggctggcgcaaag

SEQ ID NO: 221024 - DNA, 75 bp, synthetic construct
  source 1..75: mol_type = other DNA
ggctggcgtctgctgtggctgacgctggaaaacggcgaaagcggcgtactggtgccggttgaaggggttaaaagt

SEQ ID NO: 221025 - DNA, 75 bp, synthetic construct
  source 1..75: mol_type = other DNA
tgaatctcttttcgctgctggcgctggtgctggtgcttggcatcggtatcaactacacgctgtttttcagtaatc

SEQ ID NO: 221026 - DNA, 75 bp, synthetic construct
  source 1..75: mol_type = other DNA
ccgcaccattccgctgaactccctggcgcggcaggaggaagatttacatctgctgaaaacggctgccccgacagt

SEQ ID NO: 221027 - DNA, 75 bp, synthetic construct
  source 1..75: mol_type = other DNA
ggcgatattcctccagcgctgaatgacggctttatgcagcgtctggaccgccaactggtgtggctggtcagcccc

SEQ ID NO: 221028 - DNA, 75 bp, synthetic construct
  source 1..75: mol_type = other DNA
aattgcgcctcatgctcgcggaaaaacaatgttaattgggcgttggattggaaataaagaaattccagatccata

SEQ ID NO: 221029 - DNA, 75 bp, synthetic construct
  source 1..75: mol_type = other DNA
cccgccgcaaccgcaggctgaacagccggagaacgccgccatcgatcatactgaacagatacaggcagagcacgt

SEQ ID NO: 221030 - DNA, 75 bp, synthetic construct
  source 1..75: mol_type = other DNA
atgtggagcgttcgctgtctgcatcacgcccggcggatgcgctggcaccagaatcggtacgccagcaactggccg

SEQ ID NO: 221031 - DNA, 75 bp, synthetic construct
  source 1..75: mol_type = other DNA
gtatcgccgcaattgtacgcaataactggacactcgctccgtcatacatggaatcgtaagttttcagaaagaatg

SEQ ID NO: 221032 - DNA, 75 bp, synthetic construct
  source 1..75: mol_type = other DNA
atgaatgaaacagaactgaagcacattatcgccctgcttctggaagatgccagacaggtttatcgacttagccca

SEQ ID NO: 221033 - DNA, 75 bp, synthetic construct
  source 1..75: mol_type = other DNA
acggggaagacggtaaatatttccacagttttaaccatccgattgtcaataccgtaccctattttcactttgtgt

SEQ ID NO: 221034 - DNA, 75 bp, synthetic construct
  source 1..75: mol_type = other DNA
gctggatgcctttcgccaggcagcagagaccactgagcggctgcaacgccatgcgcgtgaaacgctgaatgacca

SEQ ID NO: 221035 - DNA, 75 bp, synthetic construct
  source 1..75: mol_type = other DNA
ttcagaccaaagatacattcagtgataatgatgaagtgatagctgaacggttggaaagattgagcgcttcactgc

SEQ ID NO: 221036 - DNA, 75 bp, synthetic construct
  source 1..75: mol_type = other DNA
attgatgacccgtcgcaatcactggatgaagtaaacgttgcttccttgactgatctactccgttgcgaactaaag

SEQ ID NO: 221037 - DNA, 75 bp, synthetic construct
  source 1..75: mol_type = other DNA
actgaggttcctgactgctgagaagtctgaacacgacgcagtcatgtccatgagttcaggtcaggtgtctgcgct

SEQ ID NO: 221038 - DNA, 75 bp, synthetic construct
  source 1..75: mol_type = other DNA
gttgataacgggacacagcattcccggctaacaacgtttgccaactatttacactggtatgcgatgcatatctta

SEQ ID NO: 221039 - DNA, 75 bp, synthetic construct
  source 1..75: mol_type = other DNA
catgatgcagttatgtcgatgagtacaggtcaagtctcagcacttagccttgccttcttcctgtcgctcaataaa

SEQ ID NO: 221040 - DNA, 75 bp, synthetic construct
  source 1..75: mol_type = other DNA
atgcgataccgttttaatcgagcaggattggcaactaattctctcaacatgcaacaattagcaaaagaagcgcag

SEQ ID NO: 221041 - DNA, 75 bp, synthetic construct
  source 1..75: mol_type = other DNA
ctgtcttcatggcttttgcatatataatgccagaaaatatcggacataatattatatattttataatgtctattc

SEQ ID NO: 221042 - DNA, 75 bp, synthetic construct
  source 1..75: mol_type = other DNA
tgttatgcaatttgcatatcaaatggttaatttttgcacaggactggtgggttcggaacggactttcccttctga

SEQ ID NO: 221043 - DNA, 75 bp, synthetic construct
  source 1..75: mol_type = other DNA
cagttaaatgacgctacgttgatttttctactttgcaatgttttgacatttaccctgtcatgtttattgacggaa

SEQ ID NO: 221044 - DNA, 75 bp, synthetic construct
  source 1..75: mol_type = other DNA
attgtttggcgcaaagtgtcgctcttttgcaatttcatgatgtattgctggtgtgaaggattagcagcattgttg

SEQ ID NO: 221045 - DNA, 75 bp, synthetic construct
  source 1..75: mol_type = other DNA
ctgttttgatggctatatacatcaaggattctcccctatttctctctgaggctttacaatcaatttataaaaata

SEQ ID NO: 221046 - DNA, 75 bp, synthetic construct
  source 1..75: mol_type = other DNA
atggaattgtgctggttattgagaagatccataagaaaacggctccctgcggtgggagtcgttatagtgcggcag

SEQ ID NO: 221047 - DNA, 75 bp, synthetic construct
  source 1..75: mol_type = other DNA
gttaatttttgcacaggactggtgggttcggaacggactttcccttctgaataaaggtcttcgtggttatacttc

SEQ ID NO: 221048 - DNA, 75 bp, synthetic construct
  source 1..75: mol_type = other DNA
aagctctggcgcaggccgggcttgccggattcgaagatattcccgttaatcagctctctgccgggcaacaacgcc

SEQ ID NO: 221049 - DNA, 75 bp, synthetic construct
  source 1..75: mol_type = other DNA
ttgacgttaacggcgtcgatcgtctgacccagcgtatggcgcagcatacggagcagggggggattgtgattctga

SEQ ID NO: 221050 - DNA, 75 bp, synthetic construct
  source 1..75: mol_type = other DNA
tactttgtgagcgggatgaacgaaccttatttagtggcttgtcatttacgctgaacgcaggagagtgggtacaaa

SEQ ID NO: 221051 - DNA, 75 bp, synthetic construct
  source 1..75: mol_type = other DNA
cggttattgctgttgttgtcattctgggtggtggtacatggttttctggtatgaaaacccaaaccagtgttgagc

SEQ ID NO: 221052 - DNA, 75 bp, synthetic construct
  source 1..75: mol_type = other DNA
acaattgagacagcgcaacaggacatacgtctgatgggctattccttcacctctccggaggtggtcagcgccctt

SEQ ID NO: 221053 - DNA, 75 bp, synthetic construct
  source 1..75: mol_type = other DNA
gccagcaaagcggcgatgaacctgctggtcggtgccggcattccggtgcgtaccgtcggcgcttacaagatcctt

SEQ ID NO: 221054 - DNA, 75 bp, synthetic construct
  source 1..75: mol_type = other DNA
tctacgagccggtgatgaaagaagactcattcttcaactctcgcctggaacgtgatctcgccaccttcaaacaac

SEQ ID NO: 221055 - DNA, 75 bp, synthetic construct
  source 1..75: mol_type = other DNA
caacaatccgtcgtttggttatggtggttattgtctgccgaaagataccaagcagttactggcgaactaccagtc

SEQ ID NO: 221056 - DNA, 75 bp, synthetic construct
  source 1..75: mol_type = other DNA
gtgatgctgtttggtcactgggataacgaatgtgaaatccccgatccgtatcgcaaaagtcgggaaacgtttgca

SEQ ID NO: 221057 - DNA, 75 bp, synthetic construct
  source 1..75: mol_type = other DNA
agcagaagcgattaaactgtttgctaatacctatctggcgatgcgcgtagcatactttaatgaactggatagcta

SEQ ID NO: 221058 - DNA, 75 bp, synthetic construct
  source 1..75: mol_type = other DNA
atcgttgaagctaaccgtacccgcaaagactttatcgccgatgctatcttgttgcgtaaaccaaaagtcgtaggg

SEQ ID NO: 221059 - DNA, 75 bp, synthetic construct
  source 1..75: mol_type = other DNA
ttgatccgcgtatcggcaatcattacaacaatccatcatttggttacggtggttactgtttgccgaaagatacca

SEQ ID NO: 221060 - DNA, 75 bp, synthetic construct
  source 1..75: mol_type = other DNA
atggcgactcccttttttcacgttgatgttcagcagcccgccgagatgcgctttaaccgcgcccgtgtccggcgg

SEQ ID NO: 221061 - DNA, 75 bp, synthetic construct
  source 1..75: mol_type = other DNA
aagagtacactattgccaatcgacacaattatccggcatcaagtgagcgatatcagttaaccgatatagatgggg

SEQ ID NO: 221062 - DNA, 75 bp, synthetic construct
  source 1..75: mol_type = other DNA
tagccatcatcgtggtgcatccggtggcagcggctggcggctggctccacgtaataactttatggtggaaactct

SEQ ID NO: 221063 - DNA, 75 bp, synthetic construct
  source 1..75: mol_type = other DNA
caagcagggtaacgaattcggcgcaactacgggtcgtcgtcgtcgtaccggctggctggacaccgttgccgttcg

SEQ ID NO: 221064 - DNA, 75 bp, synthetic construct
  source 1..75: mol_type = other DNA
cattctggctgtacgaaagagtacactgttgccaatcgacacaattatccggcatcaagtaagcgatatcagtta

SEQ ID NO: 221065 - DNA, 75 bp, synthetic construct
  source 1..75: mol_type = other DNA
aacgggaaggggaaccggatgatctctggtgacttctatccggcgtttctgttttttggtgtccggggaggagca

SEQ ID NO: 221066 - DNA, 75 bp, synthetic construct
  source 1..75: mol_type = other DNA
agaagcttattatcgtcgacgtgttcaggatattgggttggtgattaccggttgtactcatgttcaggaaaatgg

SEQ ID NO: 221067 - DNA, 75 bp, synthetic construct
  source 1..75: mol_type = other DNA
ttgggaatgtggggcaatatatttccagaacgtaatggtagcaacgagcaaaaaggtgatagcacaccgcacata

SEQ ID NO: 221068 - DNA, 75 bp, synthetic construct
  source 1..75: mol_type = other DNA
aatctccgggatactcgacgacgttattgattcttttccgttaccaaagcctgtcaaagagcttacccgtaaggg

SEQ ID NO: 221069 - DNA, 75 bp, synthetic construct
  source 1..75: mol_type = other DNA
gatggttagggctctcccgaagcatgcgcaaagcggtgtagcttcgcaggtaaaggaggaacacaaaacaaaaaa

SEQ ID NO: 221070 - DNA, 75 bp, synthetic construct
  source 1..75: mol_type = other DNA
gcactaaccgcattacgctggtgggcgatgcagcccatccagtggcgcaatatatggcgcaaggtgcctgtatgg

SEQ ID NO: 221071 - DNA, 75 bp, synthetic construct
  source 1..75: mol_type = other DNA
aacgcgttttcggcgctggacagccttggcgtcggcgaaattgcccgtcagcgcgcggtgtttaccgatcacatc

SEQ ID NO: 221072 - DNA, 75 bp, synthetic construct
  source 1..75: mol_type = other DNA
cgggagtagaacgccaggttcgtaacctgctgtggaaagggaaatcgcaggcagagttttatcgcggcatggagt

SEQ ID NO: 221073 - DNA, 75 bp, synthetic construct
  source 1..75: mol_type = other DNA
atgagtcggtacgtattccgcgcaccgcgcgcatcgtctggtcgacccgtgagatgggacgggtgtatcacgccg

SEQ ID NO: 221074 - DNA, 75 bp, synthetic construct
  source 1..75: mol_type = other DNA
cgcgccagatgttggataaaccgacttcatggcgacgctggtcaaccgccgaccgcgaaccggtggcgaagtggg

SEQ ID NO: 221075 - DNA, 75 bp, synthetic construct
  source 1..75: mol_type = other DNA
caggggatcaaagtggtgctgctggaaaaggcgcatgagatcggtgagattggcgcgggcatccagttggggcca

SEQ ID NO: 221076 - DNA, 75 bp, synthetic construct
  source 1..75: mol_type = other DNA
tattccgggggtgggcgaaagtgcagtgcgtgacagtgagtacgagcagctttatcgggaattgctaccgaagct

SEQ ID NO: 221077 - DNA, 75 bp, synthetic construct
  source 1..75: mol_type = other DNA
aaatccagcctgtgtaatgcgatcttcaaagggaatatctgtgctgtcagtgatgtggaggcatgtacacgggaa

SEQ ID NO: 221078 - DNA, 75 bp, synthetic construct
  source 1..75: mol_type = other DNA
cagaatcgttgtttcacagtttggacaggttccgctgggcaacatacttaataccgggctgtttgatttcgagca

SEQ ID NO: 221079 - DNA, 75 bp, synthetic construct
  source 1..75: mol_type = other DNA
aattgctaacattcagaaagtacttgatgcaggttttgactccgtacattttgattgtggtgcgctggtcgttga

SEQ ID NO: 221080 - DNA, 75 bp, synthetic construct
  source 1..75: mol_type = other DNA
gtcgatatggtatatccgagggcgcgattgcgaacattcagaaagtacttgatgtaggctttgactctgtacatt

SEQ ID NO: 221081 - DNA, 75 bp, synthetic construct
  source 1..75: mol_type = other DNA
ggacagtaactaactatgaggtgagggggaagcaagtaacagagggggccttacttaaggttacaaaacacccta

SEQ ID NO: 221082 - DNA, 75 bp, synthetic construct
  source 1..75: mol_type = other DNA
tccattaaagaacgttttggtattgaaaatgtgatcttttcgcctgagtttttgcgtgaaggtaaagcactttat

SEQ ID NO: 221083 - DNA, 75 bp, synthetic construct
  source 1..75: mol_type = other DNA
gaagagtatctggcgaccaaaccgctgaatttccgtgcgaccactgataagcgcgatgcttatcgcgatgcagac

SEQ ID NO: 221084 - DNA, 75 bp, synthetic construct
  source 1..75: mol_type = other DNA
cctgcgtgaaggccgtgcgctgtacgataacctgcacccgtcgcgcattgtcattggtgagcgctctgcacgtgc

SEQ ID NO: 221085 - DNA, 75 bp, synthetic construct
  source 1..75: mol_type = other DNA
cagagttctagcaacacgttacacgattgactgggaagagttgatcggttggatatcaggtaatgattcaaaagc

SEQ ID NO: 221086 - DNA, 75 bp, synthetic construct
  source 1..75: mol_type = other DNA
ggtaaaaaacgagcatctaagttttggggttgtaccgcttatccagactgcaaaggcacaatgccattcaaaaaa

SEQ ID NO: 221087 - DNA, 75 bp, synthetic construct
  source 1..75: mol_type = other DNA
ccggtttcactccctcaccatactggacactaggagtgaacgtgtccgtccagaatgggcaatttgccgcccaat

SEQ ID NO: 221088 - DNA, 75 bp, synthetic construct
  source 1..75: mol_type = other DNA
tacaatgacggtgaaaaggtaagcatccagtctgatggctggtatgggctggatagcctgcaaaaaaccgcagat

SEQ ID NO: 221089 - DNA, 75 bp, synthetic construct
  source 1..75: mol_type = other DNA
aaagcctgtcagcaatatgggaagtctaaagctgtatatcagcatagcgcgaatgctaatccccatctcgctccc

SEQ ID NO: 221090 - DNA, 75 bp, synthetic construct
  source 1..75: mol_type = other DNA
atgaaaaaattattattcctgttaatgattttgccgggtatttcttttgcagatttaagcgactttaaagttgca

SEQ ID NO: 221091 - DNA, 75 bp, synthetic construct
  source 1..75: mol_type = other DNA
acagcgacattattttggctaaccggatggtgcctgaaatcgaagatgtggcggataaagtgtatacccgcgacc

SEQ ID NO: 221092 - DNA, 75 bp, synthetic construct
  source 1..75: mol_type = other DNA
cagtttctttaactcccgcgtcattcgtgaactgaatgaatttaaagccattagcgacgtgatactttgcaacag

SEQ ID NO: 221093 - DNA, 75 bp, synthetic construct
  source 1..75: mol_type = other DNA
cgctcagtctcatgggttagatagccgtcagattatcgaaggtattggtctggatccgcgtattggaacgcacta

SEQ ID NO: 221094 - DNA, 75 bp, synthetic construct
  source 1..75: mol_type = other DNA
attacgatccgaaaactaactactttaacacctcgagcgtcgagtcagtgatccgcgatgtggtcgacatcaacc

SEQ ID NO: 221095 - DNA, 75 bp, synthetic construct
  source 1..75: mol_type = other DNA
tattaccaccctgacgcatactgtcagcccggataacggttttacgaccagtctggagcttgaagtgaagattga

SEQ ID NO: 221096 - DNA, 75 bp, synthetic construct
  source 1..75: mol_type = other DNA
tgccctgtctcatggtcttgacagtcgccagattatcgaggggatttgcttggatccgcgcattggcaattacta

SEQ ID NO: 221097 - DNA, 75 bp, synthetic construct
  source 1..75: mol_type = other DNA
cgctcagtctcatgggttggacagccgtcagattatcgaaggtattggtctggatccgcgtatcggcacgcacta

SEQ ID NO: 221098 - DNA, 75 bp, synthetic construct
  source 1..75: mol_type = other DNA
aacacttatctggctatgcgtgtagcgtatttcaatgaacttgatagttatgctgaaagcctggggcttaattca

SEQ ID NO: 221099 - DNA, 75 bp, synthetic construct
  source 1..75: mol_type = other DNA
cactttcttcaattctcgcctggaacgtaatctcgccaccttcaaacaacaagccgatgtcattatctccaatcg

SEQ ID NO: 221100 - DNA, 75 bp, synthetic construct
  source 1..75: mol_type = other DNA
agcggaagcgatcaaactgttcgcgaacacctatctggcgctgcgcgttgcctatttcaacgagcttgacagcta

SEQ ID NO: 221101 - DNA, 75 bp, synthetic construct
  source 1..75: mol_type = other DNA
tgcctggcggagcttgatcaatacatcaatcagaatttcacactcgcttgtgaaaagatgttttggtgtaaaggt

SEQ ID NO: 221102 - DNA, 75 bp, synthetic construct
  source 1..75: mol_type = other DNA
tgcacagttgcaccaccttgatagccgtcaaattattgaaggtataggtctagacccacgtatagggaatcacta

SEQ ID NO: 221103 - DNA, 75 bp, synthetic construct
  source 1..75: mol_type = other DNA
aagactttattgccgatgctattttggcgagaaaaccacgtgtggtgggtatttaccgactgataatgaaaacgg

SEQ ID NO: 221104 - DNA, 75 bp, synthetic construct
  source 1..75: mol_type = other DNA
gaattgaataatagaatcaatcatcttgctcctgatgagtttctcagaaaccctagctttaagaaaaactgcgac

SEQ ID NO: 221105 - DNA, 75 bp, synthetic construct
  source 1..75: mol_type = other DNA
gaaggtgcttaaggtacctgcctggcggcgtctgatgatgtactgtgctgtacgtctcttcgggcggggtaacta

SEQ ID NO: 221106 - DNA, 75 bp, synthetic construct
  source 1..75: mol_type = other DNA
ttctggctgacggataaccaggatgatgtgatttatgttccggagggatatgtgacggaccttgccagtgtgccc

SEQ ID NO: 221107 - DNA, 75 bp, synthetic construct
  source 1..75: mol_type = other DNA
tgtacgataatgcgctatggacaaagaaagaagcagatctcatttttctggacgggatgcgggtactgggtgtgc

SEQ ID NO: 221108 - DNA, 75 bp, synthetic construct
  source 1..75: mol_type = other DNA
tgctgctgcaactggcggaagaccgccaccgtctcaagggcgttcagtccacggtgaaaaaagcggaaatcaagg

SEQ ID NO: 221109 - DNA, 75 bp, synthetic construct
  source 1..75: mol_type = other DNA
acggtcaaaaaagcggaaatcaaggtggaactgctgccgaaatacgtcgcctgggcagatggtgtcctggctgcc

SEQ ID NO: 221110 - DNA, 75 bp, synthetic construct
  source 1..75: mol_type = other DNA
atatgccggaccagtcacgggctcgtctgcataaagcgattggcgctgtcctgagtgaaagcaacccggcttccg

SEQ ID NO: 221111 - DNA, 75 bp, synthetic construct
  source 1..75: mol_type = other DNA
acggtaacaaaggcacaaatcaaagttgagttgctgcctaagtatgccgcctgggctgagggggtgctggctgcc

SEQ ID NO: 221112 - DNA, 75 bp, synthetic construct
  source 1..75: mol_type = other DNA
accgcctgcgcgtccaggctgaacaggccgcccgtcagggcggcagtgttcgccatgcgtcaggttatgacctga

SEQ ID NO: 221113 - DNA, 75 bp, synthetic construct
  source 1..75: mol_type = other DNA
acgccgtctcaagggcgttcagtccacggtgaaaaaagcggaaatcaaggtggagctgctgccgaagtacgccgc

SEQ ID NO: 221114 - DNA, 75 bp, synthetic construct
  source 1..75: mol_type = other DNA
gaaacgcagcagaattattttcagggatacggcacattgctattagtcttttgacgaatgagcaggtattcgagg

SEQ ID NO: 221115 - DNA, 75 bp, synthetic construct
  source 1..75: mol_type = other DNA
gaaacgcagcagaattattttcagggatacggcacattgctattactcttttgacgaatgagcaggtattccagg

SEQ ID NO: 221116 - DNA, 75 bp, synthetic construct
  source 1..75: mol_type = other DNA
gaaacgcagcagaattattttcagggatacggcacattgctattaatcttttgacgaatgagcaggtattcaagg

SEQ ID NO: 221117 - DNA, 75 bp, synthetic construct
  source 1..75: mol_type = other DNA
gaatacaaagtaggtgctgtaaattatttgatcgttgctcctattgaaatatatttaatagaaacactctggtct

SEQ ID NO: 221118 - DNA, 75 bp, synthetic construct
  source 1..75: mol_type = other DNA
gtttattcaaaaagccaccgaaatgggtaatggtggcggaactggtagaaaccagtcgcctgtgggggcgtattg

SEQ ID NO: 221119 - DNA, 75 bp, synthetic construct
  source 1..75: mol_type = other DNA
ttaacgcccttcagcaacgcctggattcgttaatgttgcgtgacagactgcgtttttctcgccgtctgcatgggg

SEQ ID NO: 221120 - DNA, 75 bp, synthetic construct
  source 1..75: mol_type = other DNA
ctggggctgtactttaacccgtatggcaaagtgctggagctgatcgatgactgtatctcctgcggtgtggataaa

SEQ ID NO: 221121 - DNA, 75 bp, synthetic construct
  source 1..75: mol_type = other DNA
gggtgatcccactgccggaaaatatcgatatagagtccgccgggccgctgctgtgtggtggtatcacggtcttta

SEQ ID NO: 221122 - DNA, 75 bp, synthetic construct
  source 1..75: mol_type = other DNA
atgactggtttagtaaaatggtttaacgcagataaaggttttggctttatcactcctgatgatggcagcaaagac

SEQ ID NO: 221123 - DNA, 75 bp, synthetic construct
  source 1..75: mol_type = other DNA
accggaaaacgacattgtcgctatccgcgaactgcgcccgacacgactgctgattgtcgacgccacggatatggg

SEQ ID NO: 221124 - DNA, 75 bp, synthetic construct
  source 1..75: mol_type = other DNA
acctatcttctgcagacaggtatttgtccggcacccaaacgtattctggccatcagctttaaaaaagatgccgcc

SEQ ID NO: 221125 - DNA, 75 bp, synthetic construct
  source 1..75: mol_type = other DNA
tacataagtttacgcatgaaaataagcatcacttaaaaaattgctctgttactaagataaaagataataaagctc

SEQ ID NO: 221126 - DNA, 75 bp, synthetic construct
  source 1..75: mol_type = other DNA
tctttaaggttaaaaatatcctctcctaaacctagtaaacaacggtatcatttgattaagtggaaaaacgtatca

SEQ ID NO: 221127 - DNA, 75 bp, synthetic construct
  source 1..75: mol_type = other DNA
tgattgcgctgattaaatcgctgccaaaaccggtacgtcgtaattttgtgcctgcgccaaactacgccgaagcgt

SEQ ID NO: 221128 - DNA, 75 bp, synthetic construct
  source 1..75: mol_type = other DNA
tcacgttagtgataacacgatggtcaagctgatgaccgacggtatcctgctggcggagatccagcaagaccgcct

SEQ ID NO: 221129 - DNA, 75 bp, synthetic construct
  source 1..75: mol_type = other DNA
tcgtctggggccacgttgcccgtatgcacaacgagaatgcattgtgacgccacgtttgacgggggcgaaaaatca

SEQ ID NO: 221130 - DNA, 75 bp, synthetic construct
  source 1..75: mol_type = other DNA
cacggcagagaagaaatccgtcttcatattgtttgcgatgtccctgatgagcttattgatttcacgtttgaatag

SEQ ID NO: 221131 - DNA, 75 bp, synthetic construct
  source 1..75: mol_type = other DNA
agagaagaaacccgtcttcatattgtttgcgatgtccctgatgagcttattgatttcacgtttgaatataaaggg

SEQ ID NO: 221132 - DNA, 75 bp, synthetic construct
  source 1..75: mol_type = other DNA
agatattatatcagttctgctgatttaaccgcagagaagttcgccacagcaatccgaaaccactggcacgtgaag

SEQ ID NO: 221133 - DNA, 75 bp, synthetic construct
  source 1..75: mol_type = other DNA
tgaagcaatatggtgattttgaaaatggtattcctgttcacgataccattgccagagttgtatcctgtttcagtc

SEQ ID NO: 221134 - DNA, 75 bp, synthetic construct
  source 1..75: mol_type = other DNA
attcatgtcattagtgcgttctcaacaatgcacagtctggtcatcggacagatcaggacggatgagaaatccaat

SEQ ID NO: 221135 - DNA, 75 bp, synthetic construct
  source 1..75: mol_type = other DNA
atatttctattatccccgattacagacaagccaggaaagtggaacataaattgtcagatattctactgttgacta

SEQ ID NO: 221136 - DNA, 75 bp, synthetic construct
  source 1..75: mol_type = other DNA
acgtttgaatggaaagggctgaagaaattatgcgtggcagtctcctttcggtccataggtgatgctgccaactta

SEQ ID NO: 221137 - DNA, 75 bp, synthetic construct
  source 1..75: mol_type = other DNA
gatcacagctatcccagaacttcttaacatgctggatattaaaggaaaaatcatcacaactgatgcgatgggttg

SEQ ID NO: 221138 - DNA, 75 bp, synthetic construct
  source 1..75: mol_type = other DNA
gatcaggacggatgagaaatccaatgagatcacagctatccctgaacttcttaacatgctggatattaaaggaaa

SEQ ID NO: 221139 - DNA, 75 bp, synthetic construct
  source 1..75: mol_type = other DNA
ggcaatatggtgattttgaaaatggtattcctgtccacgataccattgccagagttgtatcctgtatcagtcctg

SEQ ID NO: 221140 - DNA, 75 bp, synthetic construct
  source 1..75: mol_type = other DNA
cctttcggtccataatagcagaacaaaagaaagagcccgaaatgacggtcagatattatatcagttctgctgatt

SEQ ID NO: 221141 - DNA, 75 bp, synthetic construct
  source 1..75: mol_type = other DNA
gtccataatagcagaacaaaagaaagaacccgaaatgacggtcagatattatatcagctctgctgatttaactgc

SEQ ID NO: 221142 - DNA, 75 bp, synthetic construct
  source 1..75: mol_type = other DNA
acagatcaagacggatgagaaatccaatgagattacagctatcccagaacttcttaacatgctggatattaaagg

SEQ ID NO: 221143 - DNA, 75 bp, synthetic construct
  source 1..75: mol_type = other DNA
caatgcacagtctggtcatcggacagatcaagacggatgagaaatctaatgagattacagctcccgaacttctta

SEQ ID NO: 221144 - DNA, 75 bp, synthetic construct
  source 1..75: mol_type = other DNA
attggcatggggatttcagcggttgtgctgctgatcctcgccgagccgtaccgtattcgtcgtgttaccgcattc

SEQ ID NO: 221145 - DNA, 75 bp, synthetic construct
  source 1..75: mol_type = other DNA
atatcgccaactatctggtgcgtaaaggcgacgaagtacgtaataacctgcgcggcttcctgaaaccgatgggcg

SEQ ID NO: 221146 - DNA, 75 bp, synthetic construct
  source 1..75: mol_type = other DNA
ctggggctgtactttaacccgtatggcaaagtgctggagttgatagacgactgtatctcctgcggtgtggatcaa

SEQ ID NO: 221147 - DNA, 75 bp, synthetic construct
  source 1..75: mol_type = other DNA
tgctcggttatttgaaagagttgctgccgcggcgtcctgacctaaaaatcattatcacttccgcgactatcgacc

SEQ ID NO: 221148 - DNA, 75 bp, synthetic construct
  source 1..75: mol_type = other DNA
agctggaacacaaatcacgtcgccgcgatattctggttgatgacgaaacgctgtttgagttctacgaccagcgca

SEQ ID NO: 221149 - DNA, 75 bp, synthetic construct
  source 1..75: mol_type = other DNA
tgagaaattcgccacagcgatccgaaatcactggcacgtggagaataagctgcactggcgtctggacgtggtaat

SEQ ID NO: 221150 - DNA, 75 bp, synthetic construct
  source 1..75: mol_type = other DNA
ataaagacgtcattgcaattgatggaaaaacgctccggcactcttatgataagagtcgtcgcaggggagctattt

SEQ ID NO: 221151 - DNA, 75 bp, synthetic construct
  source 1..75: mol_type = other DNA
aaccgcagagaagttcgccacagcaatccgaaaccgctggcacgtggagaataagctgcactggcgtctggacgt

SEQ ID NO: 221152 - DNA, 75 bp, synthetic construct
  source 1..75: mol_type = other DNA
taacatgctggatattaaaggaaaaatcatcacaactgatgcgatgggttgccagaaagatattgcagagaagat

SEQ ID NO: 221153 - DNA, 75 bp, synthetic construct
  source 1..75: mol_type = other DNA
cctgttcacgataccattgccagagttgtatcctgtatcagtcctgcaaaatttcacgagtgctttattaactgg

SEQ ID NO: 221154 - DNA, 75 bp, synthetic construct
  source 1..75: mol_type = other DNA
caaaaacagggcggtgattatttattcgcggtaaaaggaaaccaggggcggcttaataaagcctttgaggaaaaa

SEQ ID NO: 221155 - DNA, 75 bp, synthetic construct
  source 1..75: mol_type = other DNA
gagcgatgtacctttctggcaaagtaaaaccctggacgaaatgagcgatgcggaatgggagtcgttgtgtgatgg

SEQ ID NO: 221156 - DNA, 75 bp, synthetic construct
  source 1..75: mol_type = other DNA
accggaagtacctttcggcgaggacaagcaacgattaagccgggtaatggcattgagcaggcaactcactggatg

SEQ ID NO: 221157 - DNA, 75 bp, synthetic construct
  source 1..75: mol_type = other DNA
caggagaacgaggatattgcgctaacggtagggaaactgcgtgttgagcttgaggaagcaaaatcaaaactcaac

SEQ ID NO: 221158 - DNA, 75 bp, synthetic construct
  source 1..75: mol_type = other DNA
aaacggaaaatcccgttcggttcctgtggcggattcggtcgtgcctctgattaaaacccgtcgaatggggttatt

SEQ ID NO: 221159 - DNA, 75 bp, synthetic construct
  source 1..75: mol_type = other DNA
attctttggtgagcaccctatcagagggacaaaaaggcttaaggaggaaaaaccagacacaggctatctcacgca

SEQ ID NO: 221160 - DNA, 75 bp, synthetic construct
  source 1..75: mol_type = other DNA
cgtcagcttaatataaaaacttgtcaatgccggaattacgcacgtcgtttcgaattcgagccggattgcattaaa

SEQ ID NO: 221161 - DNA, 75 bp, synthetic construct
  source 1..75: mol_type = other DNA
cgtttatccagtgggtggtggaagataacttcgtcgctgggcgtcctgcctgggaagtcgcaggtgtacacaggt

SEQ ID NO: 221162 - DNA, 75 bp, synthetic construct
  source 1..75: mol_type = other DNA
gttttcggtgatgacctgccaaataacccgcattttgtgcaggctatcgaacaagcctggcaacaaatcgcgcag

SEQ ID NO: 221163 - DNA, 75 bp, synthetic construct
  source 1..75: mol_type = other DNA
aaatcagcctgttcagtggcgatcagttgatgagccagcttcgcgcgcaggatcatttatacaccgtgttagaga

SEQ ID NO: 221164 - DNA, 75 bp, synthetic construct
  source 1..75: mol_type = other DNA
ggagagagccgatttgatggtgatgatgcgctaattcatcgtgaagttgctggatatattcctatttgcagaatt

SEQ ID NO: 221165 - DNA, 75 bp, synthetic construct
  source 1..75: mol_type = other DNA
caggtggcaattgtttccctgacgattaccgaaaaaggctattgtattgacccggccaccggtgcactcgacacc

SEQ ID NO: 221166 - DNA, 75 bp, synthetic construct
  source 1..75: mol_type = other DNA
gtattcgtattcatctggcgcgccaaacgaactggccgttactggcattaggcgtcgcaggctggatgcgctatg

SEQ ID NO: 221167 - DNA, 75 bp, synthetic construct
  source 1..75: mol_type = other DNA
aaagtggacggtgataataaaaaaattgcgattctttgccttagcaccggcgcgagatggagtgaggcagcaaaa

SEQ ID NO: 221168 - DNA, 75 bp, synthetic construct
  source 1..75: mol_type = other DNA
tgccgaggctctggtcattctgcatggatacgaaaagatccgctggccggatgcaccggagtgggcgagccggga

SEQ ID NO: 221169 - DNA, 75 bp, synthetic construct
  source 1..75: mol_type = other DNA
cgtcgatgaatttgcccgccgcacgggcaagaccgaatcagccgtaagaaagttggtggaacgtcggctcatccc

SEQ ID NO: 221170 - DNA, 75 bp, synthetic construct
  source 1..75: mol_type = other DNA
ataccactattttgcttattagtcatgacttacaaatgcttagtcaatgggcggacaaaatcaacgtgctttact

SEQ ID NO: 221171 - DNA, 75 bp, synthetic construct
  source 1..75: mol_type = other DNA
agttcaggacgcagagccaaacttcgatataaatggcaactctccggtaactccggatggttggataagctgtag

SEQ ID NO: 221172 - DNA, 75 bp, synthetic construct
  source 1..75: mol_type = other DNA
tacatcctcctggttcaggacgcagagccaaacttcgatgtaaatggcaactctccgggaactccggatagttgg

SEQ ID NO: 221173 - DNA, 75 bp, synthetic construct
  source 1..75: mol_type = other DNA
acgaagaagatgttttggtttattgttcagacacaaaagagcagatggtagggtttcacaaaggtaaagggttat

SEQ ID NO: 221174 - DNA, 75 bp, synthetic construct
  source 1..75: mol_type = other DNA
gcgagtatgcgcgagggcactgaattactggctgaccaggttgtcgggccgcttacgccagagcaaaaagaggtg

SEQ ID NO: 221175 - DNA, 75 bp, synthetic construct
  source 1..75: mol_type = other DNA
tggggaggccagcgagcagaccgccgaactttgacagaattgctcgacatctggtggaaataccacgggcaaaac

SEQ ID NO: 221176 - DNA, 75 bp, synthetic construct
  source 1..75: mol_type = other DNA
atggaggtaacataatcacattgcagcgcatcttgggtcattctaacattcagcaaactatgacctacgcacact

SEQ ID NO: 221177 - DNA, 75 bp, synthetic construct
  source 1..75: mol_type = other DNA
ttgatgtcatcaatacaggcacgcccattccgcaagaggaacgcgccatgatcttcgaaccctttttcagggaag

SEQ ID NO: 221178 - DNA, 75 bp, synthetic construct
  source 1..75: mol_type = other DNA
ttgaaacgctggcccgtttttccccgctcattacgacaactggtaatactggcatttttgctaattctactaccc

SEQ ID NO: 221179 - DNA, 75 bp, synthetic construct
  source 1..75: mol_type = other DNA
cgataaactttaccaggcattgcgtcaggacttgaacaatctggcccaacttcagtgtaacaacagtggtcccga

SEQ ID NO: 221180 - DNA, 75 bp, synthetic construct
  source 1..75: mol_type = other DNA
cagtgagctggagagagtacacggcctcaccgaaactacgggtgtaaccggcagtagccgccaggataaaaggaa

SEQ ID NO: 221181 - DNA, 75 bp, synthetic construct
  source 1..75: mol_type = other DNA
ctgacaccctgtcatcccatgacaacaaataccaataaagaacaatcatttaaaaacaacaaccatcctgcacca

SEQ ID NO: 221182 - DNA, 75 bp, synthetic construct
  source 1..75: mol_type = other DNA
gacgcggcgcggcaggaacgctgcctgtggtcagtgtcccgcgtccggccgggcacgggacgggcgcttttaccg

SEQ ID NO: 221183 - DNA, 75 bp, synthetic construct
  source 1..75: mol_type = other DNA
atttctcagaaggctcgcagagcttctcagaagctatgggaagagcattcttcacaaaacccatatgaccttctc

SEQ ID NO: 221184 - DNA, 75 bp, synthetic construct
  source 1..75: mol_type = other DNA
gattttttctgcttcactacttcctatagatctgccatctcttccatctgttgaaaaatccgtgaaaacaaacat

SEQ ID NO: 221185 - DNA, 75 bp, synthetic construct
  source 1..75: mol_type = other DNA
gcttggaaaaaagtatggctggtcttctctgcaaacacagattgattttacaccagagcacctggctttactgaa

SEQ ID NO: 221186 - DNA, 75 bp, synthetic construct
  source 1..75: mol_type = other DNA
tgatatcgaatctgccgggccgctattgtgcggcggtatcacggtctttaagccactgttaatgcaccatatcac

SEQ ID NO: 221187 - DNA, 75 bp, synthetic construct
  source 1..75: mol_type = other DNA
aaggatcaacctgcccaggcgatgctggaacatgtcgagagctttcttctggaaagtaacagcggggaaagcaaa

SEQ ID NO: 221188 - DNA, 75 bp, synthetic construct
  source 1..75: mol_type = other DNA
aaccactgttgatgcaccatatcactgctaccagccgcgttggggtaattggtattggcgggctgggacatatcg

SEQ ID NO: 221189 - DNA, 75 bp, synthetic construct
  source 1..75: mol_type = other DNA
cggcatagccttgccgtcaaacagacgacggctgcggtattccacggtcggcctgacccgttaccggacgcggtg

SEQ ID NO: 221190 - DNA, 75 bp, synthetic construct
  source 1..75: mol_type = other DNA
atgaacgcccttcaagccgctttcgcggcatagccttgccgtcaaacagacgacggctgcggtattccacggtcg

SEQ ID NO: 221191 - DNA, 75 bp, synthetic construct
  source 1..75: mol_type = other DNA
aaaattaacgacgccattcagcatgtacgcgatggtaaagcgcgctaccgagtgatcctgaaagccgacttctga

SEQ ID NO: 221192 - DNA, 75 bp, synthetic construct
  source 1..75: mol_type = other DNA
gagtggtagagattatgcctctcccccaaaaaaatcgcatcgaatcagcacctcaatccagaagagcttcgcttt

SEQ ID NO: 221193 - DNA, 75 bp, synthetic construct
  source 1..75: mol_type = other DNA
agaggaaacgcagcagaattattttcagggatacgagacatcgctattaatattttgacgaatgataaggtatta

SEQ ID NO: 221194 - DNA, 75 bp, synthetic construct
  source 1..75: mol_type = other DNA
agtaccagtcacgtggacgaccataaaatccatctgggataaaggtattgcgcattttgcagcaaaaccgccgca

SEQ ID NO: 221195 - DNA, 75 bp, synthetic construct
  source 1..75: mol_type = other DNA
gacaaacagttattggatggaatggatatgcagttagacaatgcgtatatacaaggaatgaatatgccaagacac

SEQ ID NO: 221196 - DNA, 75 bp, synthetic construct
  source 1..75: mol_type = other DNA
atggaacatatttctattatccccgattacagacaagcctggaaagtggaacataaattgtcgggtattctacgg

SEQ ID NO: 221197 - DNA, 75 bp, synthetic construct
  source 1..75: mol_type = other DNA
atctaatgagattacagctatccctgaacttcttaacatgctggatattaaaggaaaaatcatcacaactgatgc

SEQ ID NO: 221198 - DNA, 75 bp, synthetic construct
  source 1..75: mol_type = other DNA
accgaagctcaaaaaatcccgtaatgaactgatgatggagaaaaggactggtgagctatgcccgaaaaccatcat

SEQ ID NO: 221199 - DNA, 75 bp, synthetic construct
  source 1..75: mol_type = other DNA
tcatgactcctgacgctcctgaaatcacaacagcagccgttaacagccccatagaagcgcttatccatgataacc

SEQ ID NO: 221200 - DNA, 75 bp, synthetic construct
  source 1..75: mol_type = other DNA
catcataaaaaagaccctatcgtgatcggtggaaatataacgatagttggcaatgtcgctaaagatctgatcgct

SEQ ID NO: 221201 - DNA, 75 bp, synthetic construct
  source 1..75: mol_type = other DNA
aagaatggttacatcctcctggttcaggacgcagagccaaacttcgatgtaaatggcaactctccggtaactccg

SEQ ID NO: 221202 - DNA, 75 bp, synthetic construct
  source 1..75: mol_type = other DNA
aatctaacaaaaacgcttcgccctgatgtggataaacctgtttggcacaattcgcttcgtttaccaaaggacgaa

SEQ ID NO: 221203 - DNA, 75 bp, synthetic construct
  source 1..75: mol_type = other DNA
gaatatgctaaccgccccatagaagcacttatcctcgataaccgagctgcttgtcaggacgaattcactaacgct

SEQ ID NO: 221204 - DNA, 75 bp, synthetic construct
  source 1..75: mol_type = other DNA
gaagccgacagcattcaagcgtcaggtgctcgcctctgcagatcaatctctggtgcgctctattgtcggtgatgc

SEQ ID NO: 221205 - DNA, 75 bp, synthetic construct
  source 1..75: mol_type = other DNA
ccagaaacagcaaggtgaagtgtatcgccagcttttgcaaacgcccgcgccgatgcaaaaaccaaaagcgccgga

SEQ ID NO: 221206 - DNA, 75 bp, synthetic construct
  source 1..75: mol_type = other DNA
tggaacgattatgtccgcaacttgtgaaaacgccgccgggtggtctgttacaatctgttgatttacatccggcga

SEQ ID NO: 221207 - DNA, 75 bp, synthetic construct
  source 1..75: mol_type = other DNA
ttgatttccagtcagatgcacagcatgtgaccatcagggccgtgcctttacccttacgccaacaaaatttacaaa

SEQ ID NO: 221208 - DNA, 75 bp, synthetic construct
  source 1..75: mol_type = other DNA
ggtgagctggacgaaaacctgttcctggctgcgcgcaacctgcacaaggttgacgtacgcgatgcaactggtatc

SEQ ID NO: 221209 - DNA, 75 bp, synthetic construct
  source 1..75: mol_type = other DNA
ttgccggagttttacgcagtatgggctataaaacgcaggtttcacctgcgggagccgatcggggtaaagacatca

SEQ ID NO: 221210 - DNA, 75 bp, synthetic construct
  source 1..75: mol_type = other DNA
aagccgaacgctgaagagttactcgccgcgccgcaccgattgctggatattcgcgatccgtcgcaggcttactcg

SEQ ID NO: 221211 - DNA, 75 bp, synthetic construct
  source 1..75: mol_type = other DNA
cctgactttccgcaatatgaacgatttcacgccagagcaggtcgcccgacagattcggcagctgaagctgctccc

SEQ ID NO: 221212 - DNA, 75 bp, synthetic construct
  source 1..75: mol_type = other DNA
taaagttgactgtcggaaaaagcactctcgttatgaattcagacggcactatcaccctcgacggccccactcact

SEQ ID NO: 221213 - DNA, 75 bp, synthetic construct
  source 1..75: mol_type = other DNA
aatctgccgggagtcatggaccagagatcactacgccgccgatagccggagaaagtggtggtatgagcacaggtt

SEQ ID NO: 221214 - DNA, 75 bp, synthetic construct
  source 1..75: mol_type = other DNA
ttactggcagcgacgccgttccgccataaaatcggcacccgggcgaccggcgatattgcaaccgttcatcatctg

SEQ ID NO: 221215 - DNA, 75 bp, synthetic construct
  source 1..75: mol_type = other DNA
attattgcagcccgtgaacaacatattgtatatatgacatctttaacaaatagtatatctacactattaaccgat

SEQ ID NO: 221216 - DNA, 75 bp, synthetic construct
  source 1..75: mol_type = other DNA
agaagactctccgcaacgtcagcagcagattcagcaggctgagcagcacctgcgggctcaagtctatatgctggc

SEQ ID NO: 221217 - DNA, 75 bp, synthetic construct
  source 1..75: mol_type = other DNA
ccgggacccgccggatattttctaatgaatttaaacttcatatggttgaactggcttcgaaaccaaatgccaatg

SEQ ID NO: 221218 - DNA, 75 bp, synthetic construct
  source 1..75: mol_type = other DNA
aataaccttcgggcagctctagattttgcgaagaaagggccgtgcgttcttctgttagatgaaattgattcaatc

SEQ ID NO: 221219 - DNA, 75 bp, synthetic construct
  source 1..75: mol_type = other DNA
ctttcgccaggactgaaagctgcgccagagcagatggccagagggattgctaatataccgtttgatgtaatggac

SEQ ID NO: 221220 - DNA, 75 bp, synthetic construct
  source 1..75: mol_type = other DNA
agaagccaaaatacccacgtaaaaaaaatgctaagaaggcaggggaagagaccgatcaggatactgacccacagc

SEQ ID NO: 221221 - DNA, 75 bp, synthetic construct
  source 1..75: mol_type = other DNA
ggcagcctgagttcacagataaaacactctccaggaaacccggggcggttcagttgccgcatttatcgcaagcat

SEQ ID NO: 221222 - DNA, 75 bp, synthetic construct
  source 1..75: mol_type = other DNA
atacggttgaacgcctttatgaacataagcgggagactgtttcttctgaacatattagcgatttcctgagtgctt

SEQ ID NO: 221223 - DNA, 75 bp, synthetic construct
  source 1..75: mol_type = other DNA
atccaggcttatgaggccgtaaaaacgacgcggacacataaagcccgacgggagagccgaactgccgaccagtta

SEQ ID NO: 221224 - DNA, 75 bp, synthetic construct
  source 1..75: mol_type = other DNA
atacgcgatgctattggtagcgatgaattcaatcgcttgtcgagagctggtattgtcgcctcgttaagcggtatg

SEQ ID NO: 221225 - DNA, 75 bp, synthetic construct
  source 1..75: mol_type = other DNA
ctcaagatctttacactaatagtgaaatgaccccttgtgcttacgttgttaggttcgatctggaagaacctgctt

SEQ ID NO: 221226 - DNA, 75 bp, synthetic construct
  source 1..75: mol_type = other DNA
atggataaacctacagactggcgctctgggacccgccggatattttctaatgaattcaaacttcgtatggttgaa

SEQ ID NO: 221227 - DNA, 75 bp, synthetic construct
  source 1..75: mol_type = other DNA
ccatgccgatgccatttcctatgtagcagtcctgtcccttatcgatgagttcggtgaaacggaagctgttgcgcg

SEQ ID NO: 221228 - DNA, 75 bp, synthetic construct
  source 1..75: mol_type = other DNA
cagaaactcggtgatatcgagttgccggaggtgaccgactccagcgaagatgaagaaattacctttacgctgaac

SEQ ID NO: 221229 - DNA, 75 bp, synthetic construct
  source 1..75: mol_type = other DNA
gaaatggcctttttctatttgtccaaattcggagagcacatttcagaaaattggtcagaaagtcgcactcgaaga

SEQ ID NO: 221230 - DNA, 75 bp, synthetic construct
  source 1..75: mol_type = other DNA
tgctgttgtcggtgtcgattttgatgcacgtagcggaatgcgagccttattgacattagtccataataaagaacg

SEQ ID NO: 221231 - DNA, 75 bp, synthetic construct
  source 1..75: mol_type = other DNA
atcgactacccgcgtgcgattggtattgatgacgaggcgctgcgcaccatgcagtcggtcggcctggtcgatgat

SEQ ID NO: 221232 - DNA, 75 bp, synthetic construct
  source 1..75: mol_type = other DNA
tgttggcttcactgctggcgctgggtacggtgtcgtcattgagcggcatgctaatggcgggatttgtggcgggga

SEQ ID NO: 221233 - DNA, 75 bp, synthetic construct
  source 1..75: mol_type = other DNA
cggacaccagtatgctgcctgacagcgaacaaggctttgcgccagtggttcgtggtattgccaacagcgatgcac

SEQ ID NO: 221234 - DNA, 75 bp, synthetic construct
  source 1..75: mol_type = other DNA
gccagtggttcccggcaaaacagtgatggcgataacctgaattcaaattggttgaatttaaattcagggattaat

SEQ ID NO: 221235 - DNA, 75 bp, synthetic construct
  source 1..75: mol_type = other DNA
ggtgagcagcaattttcattgtcaatcaatattcctctgtctcgctggttgccgggggcatgggcgacgtataat

SEQ ID NO: 221236 - DNA, 75 bp, synthetic construct
  source 1..75: mol_type = other DNA
ctccactacgctgctgatggattcaggctgagtggtggaaatgcaaatttcattgccagaaatatggcatctgtc

SEQ ID NO: 221237 - DNA, 75 bp, synthetic construct
  source 1..75: mol_type = other DNA
ggtcgtatgctcatgaatgttggtctcaacgctgaaattcgcgataatcttctcggttttctgggttacatgcat

SEQ ID NO: 221238 - DNA, 75 bp, synthetic construct
  source 1..75: mol_type = other DNA
tgggttacctgcttctcgggatattaatactagcattcgtatttatcagcaaatttatcaacatataacgggaac

SEQ ID NO: 221239 - DNA, 75 bp, synthetic construct
  source 1..75: mol_type = other DNA
caccatgcatttgtccgcagaggagcacggtgcgtatttgttgctgatgttcaattactggcaaacagggaaacc

SEQ ID NO: 221240 - DNA, 75 bp, synthetic construct
  source 1..75: mol_type = other DNA
gcaagcggtacgcggaaattgccagcggagacttaggatacgttccagacgcgctgggctgcgttttgaaagtgc

SEQ ID NO: 221241 - DNA, 75 bp, synthetic construct
  source 1..75: mol_type = other DNA
cgatctggcatctaaatagccagtcatcaattaatcgtctagaaacaaaagacagtatggtgcgttttactggtg

SEQ ID NO: 221242 - DNA, 75 bp, synthetic construct
  source 1..75: mol_type = other DNA
ggattcccggggcggttcacagcatcatacggggcaattatggccgcattaccatacatgcaactgtacatagct

SEQ ID NO: 221243 - DNA, 75 bp, synthetic construct
  source 1..75: mol_type = other DNA
tcaataccacggtaaaaaacaatgaaacccacacggtcatggtcgatcgcataaaaaccattgtcaaaaatgaaa

SEQ ID NO: 221244 - DNA, 75 bp, synthetic construct
  source 1..75: mol_type = other DNA
catcacaaaaaatgatggtctttccgtcaaactagctcaaaccatcaatgtcgggacgacctatcgtctggatgt

SEQ ID NO: 221245 - DNA, 75 bp, synthetic construct
  source 1..75: mol_type = other DNA
gcggcggacctgtttggtgcgctgccggaaccgtcaggtctggttaaagccgcagtagctgctgcgcaggctgcc

SEQ ID NO: 221246 - DNA, 75 bp, synthetic construct
  source 1..75: mol_type = other DNA
cgccgaggagatggcagaacaggccgcggcggacctgtttggtgcgttgccggaaccgtcaggtctggttaaagc

SEQ ID NO: 221247 - DNA, 75 bp, synthetic construct
  source 1..75: mol_type = other DNA
cgctgtggcgaagcggctcttgttttgcacaaagacggttctattgagttctgcggaaaacaactcctgctgcat

SEQ ID NO: 221248 - DNA, 75 bp, synthetic construct
  source 1..75: mol_type = other DNA
tttgaacacagtgagaacagccacacgctggtgctggctgatgccatcaatggtcataaagcatgcccggactcg

SEQ ID NO: 221249 - DNA, 75 bp, synthetic construct
  source 1..75: mol_type = other DNA
tttaaatggacgaataccaagtgaaatgactggtgaaacattgacaggtaaggagtattttgaatcaaaatgtta

SEQ ID NO: 221250 - DNA, 75 bp, synthetic construct
  source 1..75: mol_type = other DNA
agaaaaatatgcggttggctctttcttatttggttcgatatcgactctcgaaagtgaaagtgcaattaaagagaa

SEQ ID NO: 221251 - DNA, 75 bp, synthetic construct
  source 1..75: mol_type = other DNA
cagtccccggaccgaagggggacaggggggaacctggcgcacctggtgcagtggggcccgcaggcccacggggac

SEQ ID NO: 221252 - DNA, 75 bp, synthetic construct
  source 1..75: mol_type = other DNA
ccggcccggcagggcaggaaatctggacggataaatatggccgggtgaaggtgcagtttggctgggaccgttacc

SEQ ID NO: 221253 - DNA, 75 bp, synthetic construct
  source 1..75: mol_type = other DNA
gcttaaaaccccggataccctgaacctcggatatgtctcccccgcagccaacctgccgctcaagccgatggtggg

SEQ ID NO: 221254 - DNA, 75 bp, synthetic construct
  source 1..75: mol_type = other DNA
atgagttttgtatctacgggtaataaaccagttggaaacggtggacccgtcatcaccacaccaccaatagctcgc

SEQ ID NO: 221255 - DNA, 75 bp, synthetic construct
  source 1..75: mol_type = other DNA
cacgtaaaagataacgaaggtaaggccgttgccggacgtttgtaccagcttgaaaccattgcccgtgtcagcgag

SEQ ID NO: 221256 - DNA, 75 bp, synthetic construct
  source 1..75: mol_type = other DNA
ggaaaaagacgcgacgccaaaatttggttcgatacaggtagatattaccgaagatgcgaacctgatccagacaga

SEQ ID NO: 221257 - DNA, 75 bp, synthetic construct
  source 1..75: mol_type = other DNA
ctgtttattagtgtggcactggtttggtaaacgcggtgtaaagctggcgctagttgttgctggattgctgtcact

SEQ ID NO: 221258 - DNA, 75 bp, synthetic construct
  source 1..75: mol_type = other DNA
gatgaaaaggtgttgcgccagctttctccgaaaacacagcaggagctgctatctgttctggccccgctgatgcag

SEQ ID NO: 221259 - DNA, 75 bp, synthetic construct
  source 1..75: mol_type = other DNA
accgctctatctacaacgtctacggcgatctgtttaagtattttgatgccctccagattggcctgacggccacgc

SEQ ID NO: 221260 - DNA, 75 bp, synthetic construct
  source 1..75: mol_type = other DNA
cgcaacggcgagcctgtgacgcaaagcgagctggatgaactggctaaactggtgctgatccagaaccctaacgtt

SEQ ID NO: 221261 - DNA, 75 bp, synthetic construct
  source 1..75: mol_type = other DNA
tggcgcgacgatcaggcgttacaattgcaactggcacaagagcgccaacgctacagtaaactccagcagtccagc

SEQ ID NO: 221262 - DNA, 75 bp, synthetic construct
  source 1..75: mol_type = other DNA
gcagtcgcgccagcaagcccgtaagtatggcgatggcagctggcaaaatacctttaaacaggggattttgctggc

SEQ ID NO: 221263 - DNA, 75 bp, synthetic construct
  source 1..75: mol_type = other DNA
tattttatttgccagtttggctccgggcggtgctcgaaatcctcacgtactacgtgtacgctccggtttctccgc

SEQ ID NO: 221264 - DNA, 75 bp, synthetic construct
  source 1..75: mol_type = other DNA
accaatctattacgatgatgaccatttgagcgagtatggaaataaactgcttgttccgatgttcaagcaggtatt

SEQ ID NO: 221265 - DNA, 75 bp, synthetic construct
  source 1..75: mol_type = other DNA
agagaacccatctagagtcttttttgggaagataagtctacgtgcacagtcaataagtttttcagttatcgcaac

SEQ ID NO: 221266 - DNA, 75 bp, synthetic construct
  source 1..75: mol_type = other DNA
accgtatcgggttgctcggcatctgcggatggggtggcatggccttaaacgacgccgcgatggacacacgtgtca

SEQ ID NO: 221267 - DNA, 75 bp, synthetic construct
  source 1..75: mol_type = other DNA
aatcacgtggacctgtacgataacgtggccggaaaaatacctttcgcgaagttcgaacaatttttccagaccaaa

SEQ ID NO: 221268 - DNA, 75 bp, synthetic construct
  source 1..75: mol_type = other DNA
cctggtctttgtcaccagataccgacgtcagatttttgaccatgacgcgacagaaaaactacgcacttacttttc

SEQ ID NO: 221269 - DNA, 75 bp, synthetic construct
  source 1..75: mol_type = other DNA
tacattgaacaacagcaaacacctggtcaggtggaaaaccgcgccttatatccccgccctgaaggacggggtttt

SEQ ID NO: 221270 - DNA, 75 bp, synthetic construct
  source 1..75: mol_type = other DNA
aaaagctggacaatccgttcagtttgatgtccaccaggggccaaaaggcaatcacgccaatgttattgtgcccgt

SEQ ID NO: 221271 - DNA, 75 bp, synthetic construct
  source 1..75: mol_type = other DNA
catgtgctggcgctaatttgcagtgccgggctttgtgccgcctctaccgggctatatataaaaagccgcacagtg

SEQ ID NO: 221272 - DNA, 75 bp, synthetic construct
  source 1..75: mol_type = other DNA
gaaaatgactttgccgtttaaaccccatgtgctggcgctaatttgcagtgccgggctttgtgccgcctctaccgg

SEQ ID NO: 221273 - DNA, 75 bp, synthetic construct
  source 1..75: mol_type = other DNA
caaacacctggtcaggtggaaaaccgcgccttatatccccgccctgaaggacggggttttacggcgcaccggata

SEQ ID NO: 221274 - DNA, 75 bp, synthetic construct
  source 1..75: mol_type = other DNA
gggaggctgttaaagccatggggccaggattgacaaccccggatcgcgaatatgattctgctacagataatattg

SEQ ID NO: 221275 - DNA, 75 bp, synthetic construct
  source 1..75: mol_type = other DNA
ttgcacatataacagaactggtctcttcttcttataagcttgcagtatatagcaatacaggtaaggttctcggtc

SEQ ID NO: 221276 - DNA, 75 bp, synthetic construct
  source 1..75: mol_type = other DNA
tgtcacaggctatagcctggggggcgggttgactaacattatggccagactcagtgagtctctggctgatggttt

SEQ ID NO: 221277 - DNA, 75 bp, synthetic construct
  source 1..75: mol_type = other DNA
caactgaatcacatcgacagctttctgatgaataaacacttcatgcgtaagcacggtcccaacgcctattacggg

SEQ ID NO: 221278 - DNA, 75 bp, synthetic construct
  source 1..75: mol_type = other DNA
aaagcgaacgatatggtggtggttgatatgagcggcaaggtggtggaaggggagtatcgtccgtcttccgacact

SEQ ID NO: 221279 - DNA, 75 bp, synthetic construct
  source 1..75: mol_type = other DNA
ccatacccactccactcatgccaccgcatgggcgcaggcggggctggcgatcccggcgttaggcaccacgcacgc

SEQ ID NO: 221280 - DNA, 75 bp, synthetic construct
  source 1..75: mol_type = other DNA
tcatcgcgatgaacaagcgcgacgcggatgccattctgagttctccgcagtgggcaagcgtggacgcggtcattc

SEQ ID NO: 221281 - DNA, 75 bp, synthetic construct
  source 1..75: mol_type = other DNA
ctgcattatgggctgctgtgcatggtctctctgaccattgtggcgacgctgaaagcggtaggtatcattctctcc

SEQ ID NO: 221282 - DNA, 75 bp, synthetic construct
  source 1..75: mol_type = other DNA
ataccctgtgcgctgctgtcggtctttctggtcctgaaaagttgggcactgatgggtgacgcgatgagtcatgcg

SEQ ID NO: 221283 - DNA, 75 bp, synthetic construct
  source 1..75: mol_type = other DNA
gccattgcggtactcctgacacaacgctttcatattgcgctcctactggcgactggcatatcggtaatagtgtca

SEQ ID NO: 221284 - DNA, 75 bp, synthetic construct
  source 1..75: mol_type = other DNA
aaacggcggagggatcgttgagagattattctgggattttgacgggaaaactattgcgttgccgcaggtgcgtaa

SEQ ID NO: 221285 - DNA, 75 bp, synthetic construct
  source 1..75: mol_type = other DNA
aaacagcacggcggcccttgtgaaatccccaatggcctggcgttttgcgcaattcaccataaagcctttgataaa

SEQ ID NO: 221286 - DNA, 75 bp, synthetic construct
  source 1..75: mol_type = other DNA
ggctgaattgctgggcgttagtgtatccaccatcgaccgtaaagtaagaaacggttcactaccacgtccggtaaa

SEQ ID NO: 221287 - DNA, 75 bp, synthetic construct
  source 1..75: mol_type = other DNA
attatacatcgcacaatacaacaagattaaatgtggaagaaattaaagatctattgttgactttagattacataa

SEQ ID NO: 221288 - DNA, 75 bp, synthetic construct
  source 1..75: mol_type = other DNA
ggttgtggatgcaaaccatgatgttttcgattatgtgatgctcagaaaggagtttacagaggataagcaaggtaa

SEQ ID NO: 221289 - DNA, 75 bp, synthetic construct
  source 1..75: mol_type = other DNA
ttactggcatgatgtgggggagttgaaagagcttgtggaagacctgatcaggaaccacgactttcacaataacag

SEQ ID NO: 221290 - DNA, 75 bp, synthetic construct
  source 1..75: mol_type = other DNA
gctaatggcattgttggattgctggcaacccgcggtacggtgaagcgttcttatacccacgagctgatcgcccgt

SEQ ID NO: 221291 - DNA, 75 bp, synthetic construct
  source 1..75: mol_type = other DNA
gggctgctgcatggcggtgcatcggtggtccttgcagagagtatcggttctattgccggttatttatgcactgaa

SEQ ID NO: 221292 - DNA, 75 bp, synthetic construct
  source 1..75: mol_type = other DNA
atataatccagaagatgattattgccgggctggttacacttgttattagcgtcacctggcggggttttttgctgt

SEQ ID NO: 221293 - DNA, 75 bp, synthetic construct
  source 1..75: mol_type = other DNA
atcaccttgaagccggaacaaattgccgaactggaaacgccgtataaaccgcatccggtggtgggatttaaatag

SEQ ID NO: 221294 - DNA, 75 bp, synthetic construct
  source 1..75: mol_type = other DNA
gatttcgcccgtcgtgaagacgtggtcgttgccaccaaagtgttccatcgcgttggtgatttgccggaaggatta

SEQ ID NO: 221295 - DNA, 75 bp, synthetic construct
  source 1..75: mol_type = other DNA
caaaaacagcacggctgggcgcagtttgtcagtatgcaggatcactacaatctgatttatcgcgaagaagagcgc

SEQ ID NO: 221296 - DNA, 75 bp, synthetic construct
  source 1..75: mol_type = other DNA
gctgccatgtctggcattgctgggttgcgtgcagagtcacaataagccagccattgatacgccagcagaagaaaa

SEQ ID NO: 221297 - DNA, 75 bp, synthetic construct
  source 1..75: mol_type = other DNA
tgatgagctgttgaacgcggtggatatcactttaaagccggaacagattgctgaactggaaacgccgtataaacc

SEQ ID NO: 221298 - DNA, 75 bp, synthetic construct
  source 1..75: mol_type = other DNA
tgttatcaggaaggcgtggcggtgattccgtggagtccgctggcgcggggacgtctgacgcgtccgtggggagaa

SEQ ID NO: 221299 - DNA, 75 bp, synthetic construct
  source 1..75: mol_type = other DNA
gagattaaagagattaaagcggttgctaaggaattaggtgttaaaggtttccgtaagctgaaactatcccgcgag

SEQ ID NO: 221300 - DNA, 75 bp, synthetic construct
  source 1..75: mol_type = other DNA
aatgaaagagccgccagataccgttgtattgggttgcacccatttccctctactacaagaagaactgttacaagt

SEQ ID NO: 221301 - DNA, 75 bp, synthetic construct
  source 1..75: mol_type = other DNA
gtagggcttagacaaagtactaatcgttatcatggagattttctgaccatacatgtggtacagcttccggaagaa

SEQ ID NO: 221302 - DNA, 75 bp, synthetic construct
  source 1..75: mol_type = other DNA
gaacgacgtggtaaaagccgggaaagcgcgttatatcggcgcgtcatccatgcacgcttcgcagtttgctcaggc

SEQ ID NO: 221303 - DNA, 75 bp, synthetic construct
  source 1..75: mol_type = other DNA
tcgggttgatggacagtttgttgtaaataatattgttgccgccgtgaaagcagcagaggaaggactcggactggc

SEQ ID NO: 221304 - DNA, 75 bp, synthetic construct
  source 1..75: mol_type = other DNA
tgccggtttggtgaggatcactacaggtcaacatgccgctgatacgcttatctggccagctgtggctgaaacttt

SEQ ID NO: 221305 - DNA, 75 bp, synthetic construct
  source 1..75: mol_type = other DNA
atgagtattataattgatgagtcaaatgaaaaaaataatggggttaatagtgggttacctgcttctcgggatatt

SEQ ID NO: 221306 - DNA, 75 bp, synthetic construct
  source 1..75: mol_type = other DNA
ccggtttctgaataaagatctctcgcaaataccagtatggcaacgtagcgctacgcccatactcaccctgccatg

SEQ ID NO: 221307 - DNA, 75 bp, synthetic construct
  source 1..75: mol_type = other DNA
atgtatgaaaatgtccaccattcccacccttctggggttctgggaccggacggcatgacatcgctgcgtgaatat

SEQ ID NO: 221308 - DNA, 75 bp, synthetic construct
  source 1..75: mol_type = other DNA
atgctggctttcctcaaccaggttcgcaagccgactctggatcttccgctcgaagtgcggcgcaaaatgtggttc

SEQ ID NO: 221309 - DNA, 75 bp, synthetic construct
  source 1..75: mol_type = other DNA
tggacgccgcgtcgtaagcgcgggaccttcctcggtttctggaacatttctcacaaccttggcggtgcaggcgcg

SEQ ID NO: 221310 - DNA, 75 bp, synthetic construct
  source 1..75: mol_type = other DNA
tctacgctttccaggaactcaaactctctaaagcggtagcgattcagggctttacgctgtttgaagcaggcgcac

SEQ ID NO: 221311 - DNA, 75 bp, synthetic construct
  source 1..75: mol_type = other DNA
tcgagccggtggaggacgggcagacccgtggagccaatcagttttacagcgtcatggaacggctgaagatgctgg

SEQ ID NO: 221312 - DNA, 75 bp, synthetic construct
  source 1..75: mol_type = other DNA
ctatcttggcatcaatgaggaggattcacgcgcattttcgcgggatgtagaagccgcctggaacgagtatgccga

SEQ ID NO: 221313 - DNA, 75 bp, synthetic construct
  source 1..75: mol_type = other DNA
atgaaacgaacgcctgtcctgattgatgtgaacggtgttccgcttcgtgagagtctcagctacaacgggggcggc

SEQ ID NO: 221314 - DNA, 75 bp, synthetic construct
  source 1..75: mol_type = other DNA
tggtacatggatatcgataccgacgtgaaatataaatccaacggcgcagtactgccggcaggacattattctgac

SEQ ID NO: 221315 - DNA, 75 bp, synthetic construct
  source 1..75: mol_type = other DNA
ttgttcactaataccggtaccgttcaaataacggctaaatggcaggaagtgagtggtaccgcaatagagaagcta

SEQ ID NO: 221316 - DNA, 75 bp, synthetic construct
  source 1..75: mol_type = other DNA
gtcagttcggtggcgggcgcgtttatcggtacctcgtctgttactgcctatattgaaagtacttctggtgtggca

SEQ ID NO: 221317 - DNA, 75 bp, synthetic construct
  source 1..75: mol_type = other DNA
taaagcgggcttaatagatagtaacggtaaattccccaatatgaataaggcgctgtatgttgatagcgtcagttc

SEQ ID NO: 221318 - DNA, 75 bp, synthetic construct
  source 1..75: mol_type = other DNA
cgtgttaatgacttcaagcctggcacgcgttaactgggatgattttaccgaatcagtaccggcatttattactac

SEQ ID NO: 221319 - DNA, 75 bp, synthetic construct
  source 1..75: mol_type = other DNA
gaaatacgtaagctgaggaaaaagctacaacgcattgaaatggagaatgaaatattaaaaaaggctactgtagat

SEQ ID NO: 221320 - DNA, 75 bp, synthetic construct
  source 1..75: mol_type = other DNA
gatcaggttggttacatcaaagatgatgatgatgtgaaacttcttgccagaagactaatatcattaggtgacgag

SEQ ID NO: 221321 - DNA, 75 bp, synthetic construct
  source 1..75: mol_type = other DNA
gatgggtcaaacaactgcgtgatgagcgtcagggcaaaacacctaaagcctctccgataacaccagaacaaatcg

SEQ ID NO: 221322 - DNA, 75 bp, synthetic construct
  source 1..75: mol_type = other DNA
gacaaaactggttataaaaaaacatttatccggaaacatacccttcttccggagccactttactctttcccgtgc

SEQ ID NO: 221323 - DNA, 75 bp, synthetic construct
  source 1..75: mol_type = other DNA
atctcgcattgtttttactttctgtcaacagggaatataaggtttaccacacataatcaaagtatgatcacggta

SEQ ID NO: 221324 - DNA, 75 bp, synthetic construct
  source 1..75: mol_type = other DNA
cggcggagcaacagaaaacagcgttattgagtgaggcgcaggcaacgatcagtctctggcagacggagctacagt

SEQ ID NO: 221325 - DNA, 75 bp, synthetic construct
  source 1..75: mol_type = other DNA
gtggcgatggttcctccttacgcaaccgccggagcgttaatctttgttggcgtgctgatgacttcgagcctggcg

SEQ ID NO: 221326 - DNA, 75 bp, synthetic construct
  source 1..75: mol_type = other DNA
atagtaacggtaaattccccaatatgaataaggcgctgtatgttgatagcgtcagttcggtggcaggcgcattta

SEQ ID NO: 221327 - DNA, 75 bp, synthetic construct
  source 1..75: mol_type = other DNA
tgagtaatgaatcagggacgctttcgcgattatttaaactgccgcaacatgggaccaccgtccgcacagaattga

SEQ ID NO: 221328 - DNA, 75 bp, synthetic construct
  source 1..75: mol_type = other DNA
cgataacaccagaacaaatcgaaatacgtgagctgaggaaaagctacaacgcattgaaatggagaatgaaatatt

SEQ ID NO: 221329 - DNA, 75 bp, synthetic construct
  source 1..75: mol_type = other DNA
gactgggatgagatgcagaatctggtcgctggcgtgttacgcagcatgggatataaaactcaggtatcgcctgcg

SEQ ID NO: 221330 - DNA, 75 bp, synthetic construct
  source 1..75: mol_type = other DNA
tttcctgctggctggaagaggcgcttcttcgggggattattcgtccgccacgggcgcgttttgatttttatcagg

SEQ ID NO: 221331 - DNA, 75 bp, synthetic construct
  source 1..75: mol_type = other DNA
cagatgagctactcgaccgcacgcgcaagtgctaacgagtcctgggcgtactttatggggcgtcgcaagtttgtg

SEQ ID NO: 221332 - DNA, 75 bp, synthetic construct
  source 1..75: mol_type = other DNA
tctgcgaattattacgctgttaattgatggcgaccggaatgagttatcgaacctattagatactgcgtttgagat

SEQ ID NO: 221333 - DNA, 75 bp, synthetic construct
  source 1..75: mol_type = other DNA
tacgtggaagccaaattgtaaaatacaaaagtccttttccaggcattgttaacttatctaatatatttgaaggtg

SEQ ID NO: 221334 - DNA, 75 bp, synthetic construct
  source 1..75: mol_type = other DNA
attctctcaaccttcagtcggcgcaggataccgataacggctactcgacttttgaacagtccctgctgcgttata

SEQ ID NO: 221335 - DNA, 75 bp, synthetic construct
  source 1..75: mol_type = other DNA
gtgatggagcagatgaaaatgctcgataccctgcaaaatacccagctccagagcgcgatagtgaaggctatgtat

SEQ ID NO: 221336 - DNA, 75 bp, synthetic construct
  source 1..75: mol_type = other DNA
gcgggtgcccggagaactgcccacggggcgtccggggatgctgcatatttttgaacctgtggaggacggacagac

SEQ ID NO: 221337 - DNA, 75 bp, synthetic construct
  source 1..75: mol_type = other DNA
agagaaatatgcagggaatattgtttaccagggattcatgagcattgataacggcaatatgaatgtggggggcgt

SEQ ID NO: 221338 - DNA, 75 bp, synthetic construct
  source 1..75: mol_type = other DNA
accttcagaaaccagatccgcagcgcttcagaggttcagtccatacagaacactgaggaaaaaacggtcctggct

SEQ ID NO: 221339 - DNA, 75 bp, synthetic construct
  source 1..75: mol_type = other DNA
cagctgatgtcgctggttggtacggtaattatcaactgggatgctaaaggtgaaaaagctgggatggaagttcgc

SEQ ID NO: 221340 - DNA, 75 bp, synthetic construct
  source 1..75: mol_type = other DNA
ttatggctgatgatgttcctgtgattctagactggccccctgaatctccagacaaccaatatcacttaaataagt

SEQ ID NO: 221341 - DNA, 75 bp, synthetic construct
  source 1..75: mol_type = other DNA
cgacggcagaagatattgtggctatctgtccgctgggaacgtcactggtggtggcgacaaagggggagccctatc

SEQ ID NO: 221342 - DNA, 75 bp, synthetic construct
  source 1..75: mol_type = other DNA
atgcgtctgactgaagacgtaccggatgcgagacaggaactgcttaaccgtctgctgtccgggaaaaaactgact

SEQ ID NO: 221343 - DNA, 75 bp, synthetic construct
  source 1..75: mol_type = other DNA
gtctcctctctccagagcattaaagggcgcaatcagcttcgataaccttagcggcgcgagtgccagtcaacgcaa

SEQ ID NO: 221344 - DNA, 75 bp, synthetic construct
  source 1..75: mol_type = other DNA
tgaaagtgggactggacggcgtcgagtttctcggtgccagcgcctctgaatggatcaacggagggatacgtattc

SEQ ID NO: 221345 - DNA, 75 bp, synthetic construct
  source 1..75: mol_type = other DNA
ctttggtttgtatgaagatctcgcccacagccagcgtggggtaatcataaaactggaactgccgagcggtgccgg

SEQ ID NO: 221346 - DNA, 75 bp, synthetic construct
  source 1..75: mol_type = other DNA
ccagtttgcgaatgcagtcagttccggtcctgcttcagtgcttggatctcttaatggattgttgtctgattttgg

SEQ ID NO: 221347 - DNA, 75 bp, synthetic construct
  source 1..75: mol_type = other DNA
atgccggagaaaaactctgggacgcggttacaggtcagcacgataaagacgatcaggcgaagaaggtgcaggagc

SEQ ID NO: 221348 - DNA, 75 bp, synthetic construct
  source 1..75: mol_type = other DNA
tacaagaggctaccattactgattcgcgttacctggatggcttaagcattattgttgaagcgccggaagccggtt

SEQ ID NO: 221349 - DNA, 75 bp, synthetic construct
  source 1..75: mol_type = other DNA
gcaggcggagtatggttgcgatggagggttttgtgctgtatgcaggaacaaatggcctggtgtctgttgatgcaa

SEQ ID NO: 221350 - DNA, 75 bp, synthetic construct
  source 1..75: mol_type = other DNA
actctatgctgggacaaacggtctggtatctgttgatgtaaacggtaatacagcactggcaacggaaaagattat

SEQ ID NO: 221351 - DNA, 75 bp, synthetic construct
  source 1..75: mol_type = other DNA
gccgaagaagtatggtggcgatggagggattcgtactctatgccgggacaaacggtctggtatctgttgatgtaa

SEQ ID NO: 221352 - DNA, 75 bp, synthetic construct
  source 1..75: mol_type = other DNA
catgatcaggcatttaagtatatagctgcaacagatttaggaacgactattaccaataccaataaagataagata

SEQ ID NO: 221353 - DNA, 75 bp, synthetic construct
  source 1..75: mol_type = other DNA
taaaacaggcggcgcatggtgtaagaaagtcactggtgcggaagcgcgtttaatattgggtatggcaagcgcgtt

SEQ ID NO: 221354 - DNA, 75 bp, synthetic construct
  source 1..75: mol_type = other DNA
agtttgccgttatcttgttcgaagataaaacgggcggtgcatggtgtaagaaagtcactggtgcagaagcgcgat

SEQ ID NO: 221355 - DNA, 75 bp, synthetic construct
  source 1..75: mol_type = other DNA
acagctcctgtctgtactgttcagcagggcggtgatgtttctgacgataacccgaatgatgatgaaacccggttt

SEQ ID NO: 221356 - DNA, 75 bp, synthetic construct
  source 1..75: mol_type = other DNA
atcttagcattgaaggtactccgaatacggactatcccagtgcaatcagtttagggagttcagatgttggtgcag

SEQ ID NO: 221357 - DNA, 75 bp, synthetic construct
  source 1..75: mol_type = other DNA
gcagatgctggtttctggttttggtcaggttgaacgtatcacactcagtacatcgatgtcggagctgccggtatg

SEQ ID NO: 221358 - DNA, 75 bp, synthetic construct
  source 1..75: mol_type = other DNA
acgtttaagggaagtgtggtgagacttccggcagcaaccgggcaaaactggcaggtgatggtatccggattcggg

SEQ ID NO: 221359 - DNA, 75 bp, synthetic construct
  source 1..75: mol_type = other DNA
aagctggttactttgaacgtaatcgccgcatggtttcagttctcattgatcaagacgcgatagctgaagggctgg

SEQ ID NO: 221360 - DNA, 75 bp, synthetic construct
  source 1..75: mol_type = other DNA
aaaggctggtatacctgagcaggatgccagaggtaaaatcaccagccatcgggcaagagccactatagccagtca

SEQ ID NO: 221361 - DNA, 75 bp, synthetic construct
  source 1..75: mol_type = other DNA
tttatatcgctaaaccttttgttggggaacaaaacattccgcaaactattatagtttctgtgtttggtacaaaaa

SEQ ID NO: 221362 - DNA, 75 bp, synthetic construct
  source 1..75: mol_type = other DNA
gtttaatattaagtgctttgtataaacaagtaacaaaggctgcattgttaactggagaagagtttggttgtaaaa

SEQ ID NO: 221363 - DNA, 75 bp, synthetic construct
  source 1..75: mol_type = other DNA
taccataccctgtgctctttccacgagataatattgttgatgagttggttgaagcaattgctaatctttctaaag

SEQ ID NO: 221364 - DNA, 75 bp, synthetic construct
  source 1..75: mol_type = other DNA
gcagctgaccatccgtgtatctggctacgcagtacgtttcaactcgctgactaaagaacagcagcaggacgttat

SEQ ID NO: 221365 - DNA, 75 bp, synthetic construct
  source 1..75: mol_type = other DNA
aggtaaacgccttacttaaggacgcaaaacaaaaagctgctaaccctggaacgagtgaaaatgaacgtgctatgg

SEQ ID NO: 221366 - DNA, 75 bp, synthetic construct
  source 1..75: mol_type = other DNA
gaaacctacgtgaccgtttttaaagacatttccactcaggaaggagagaaccggacattcatgctttttaacccc

SEQ ID NO: 221367 - DNA, 75 bp, synthetic construct
  source 1..75: mol_type = other DNA
tcgtttaagcaagagtatccgaagcttctggcattgctaattgaaaaatattttttggtcactcaggctgattct

SEQ ID NO: 221368 - DNA, 75 bp, synthetic construct
  source 1..75: mol_type = other DNA
cggggatttatattaaaaatcatgctgacagtgttgaaagaattgattccgcagtttcagaacagttgtcattta

SEQ ID NO: 221369 - DNA, 75 bp, synthetic construct
  source 1..75: mol_type = other DNA
ggggctttccgatctcagtctgaaagactcctggggagctgccgggcaggtgggggttgattatctgattaaccg

SEQ ID NO: 221370 - DNA, 75 bp, synthetic construct
  source 1..75: mol_type = other DNA
gtgcgcttattgagaactacgagcaagttgatattgagaccaaacttttggtgcctctgaagaaaactttcttgc

SEQ ID NO: 221371 - DNA, 75 bp, synthetic construct
  source 1..75: mol_type = other DNA
ccatccgtgtatctggctacgcagtacgtttcaactcgctgactaaagaacagcagcaggacgttattactcgta

SEQ ID NO: 221372 - DNA, 75 bp, synthetic construct
  source 1..75: mol_type = other DNA
ccaatgtgttgatctccctggcagatagccagggtaaaacggtgtatcactcccccgacgcgcccgatatccgcg

SEQ ID NO: 221373 - DNA, 75 bp, synthetic construct
  source 1..75: mol_type = other DNA
ataaagttggcacagccacaaccggggatattgcgacagtccatcatttaccgccaacactgatggcacaatggt

SEQ ID NO: 221374 - DNA, 75 bp, synthetic construct
  source 1..75: mol_type = other DNA
tgaggaatcattacgtaaatcagagcgtgtacaggctgcatggaaccgtaaaaaagaactcatctctgagggtat

SEQ ID NO: 221375 - DNA, 75 bp, synthetic construct
  source 1..75: mol_type = other DNA
ttacgaaacattcttcgctctggtgtagatgtagtcaccttgtccgatggtgaacattacacaagtgagtctctt

SEQ ID NO: 221376 - DNA, 75 bp, synthetic construct
  source 1..75: mol_type = other DNA
tgaggagagtttgaggaagtctgagcgtatacaagctgcatggaaccgtaaaaaagaactcatctctgaaggtat

SEQ ID NO: 221377 - DNA, 75 bp, synthetic construct
  source 1..75: mol_type = other DNA
gtccgctattaccagcaaactaaagcagttaaaaggtgagctatcacaggttgatgcggatatcgagaaggagac

SEQ ID NO: 221378 - DNA, 75 bp, synthetic construct
  source 1..75: mol_type = other DNA
catcgagcctcagcatcgcgaactggtaaaaggcgatagcaaatttgtcgtcaacagccgtgtcgacgtgaaggt

SEQ ID NO: 221379 - DNA, 75 bp, synthetic construct
  source 1..75: mol_type = other DNA
tctgggagattgtcaggactcttaatgatgaaggtcaccagacacttaaccagtacaaagcaggtaagtttggtc

SEQ ID NO: 221380 - DNA, 75 bp, synthetic construct
  source 1..75: mol_type = other DNA
ataacagaaaacccctcagaggacgttacagaggctatacagtcgctttctgaagtcactgagaggggtttaata

SEQ ID NO: 221381 - DNA, 75 bp, synthetic construct
  source 1..75: mol_type = other DNA
aaatcgttagaagattctcagcaagaaaaacaaatgacgaaaatagttctggacgatcatttgttgaaccagatt

SEQ ID NO: 221382 - DNA, 75 bp, synthetic construct
  source 1..75: mol_type = other DNA
gtgttatagttacagaacatggctataaaagacaaataagtgacgagcaaattgagtctttaaatgaaaaataca

SEQ ID NO: 221383 - DNA, 75 bp, synthetic construct
  source 1..75: mol_type = other DNA
ctaattgaatcccgtgtacgtaatgagttaaacaataaaaacttccctttctattatgtaagacgacaagccgaa

SEQ ID NO: 221384 - DNA, 75 bp, synthetic construct
  source 1..75: mol_type = other DNA
atagagatgatgaactcgttaggagcttctcagcaagaaaagatgatgaaccaaatagtattgaacgatcaccta

SEQ ID NO: 221385 - DNA, 75 bp, synthetic construct
  source 1..75: mol_type = other DNA
atttgaaaaaaaggatgaaaattgaaaagttagaatcatcacaacaagaaggtgaacagattattgaacaccaag

SEQ ID NO: 221386 - DNA, 75 bp, synthetic construct
  source 1..75: mol_type = other DNA
agtcagtacagcattaaatcagacacaacaagtattagagaagacagagaaaacggcttcaacaacatcatcaat

SEQ ID NO: 221387 - DNA, 75 bp, synthetic construct
  source 1..75: mol_type = other DNA
acctggccactttctgccagacctgggacgacgagaacgtccataaattgatggatttctcaataaagaaaaact

SEQ ID NO: 221388 - DNA, 75 bp, synthetic construct
  source 1..75: mol_type = other DNA
acctggccactttctgccagacctgggacgacgagaacgtccataaattgatggatttatccataaagaaaaact

SEQ ID NO: 221389 - DNA, 75 bp, synthetic construct
  source 1..75: mol_type = other DNA
acctggccactttctgccagacctgggacgacgagaatgtccataaattgatggatttttcgataaagaaaaact

SEQ ID NO: 221390 - DNA, 75 bp, synthetic construct
  source 1..75: mol_type = other DNA
gcacagtactatgaattcctgcgcctcggtcgtgaaggctatacaaaagtacagaacgcttccaatcgcacgttc

SEQ ID NO: 221391 - DNA, 75 bp, synthetic construct
  source 1..75: mol_type = other DNA
gcacagtactatgaattcctgcgcctcggtcgtgaaggctatacaaaagtacagaacgcatcctatcgcacgttc

SEQ ID NO: 221392 - DNA, 75 bp, synthetic construct
  source 1..75: mol_type = other DNA
acctggccactttctgccagacctgggacgacgagaaggtccataaattgatggatttttctataaagaaaaact

SEQ ID NO: 221393 - DNA, 75 bp, synthetic construct
  source 1..75: mol_type = other DNA
gggtcggtgcgattagcggagctggaagcggaagtgttgcaacgggtgatgcagcgtgggcactctgaacaaccg

SEQ ID NO: 221394 - DNA, 75 bp, synthetic construct
  source 1..75: mol_type = other DNA
ttaccgtcttgctggtaacgcatgatgtgagcgaagcggtggcgatggctgaccgggtgctgttaattgaagaag

SEQ ID NO: 221395 - DNA, 75 bp, synthetic construct
  source 1..75: mol_type = other DNA
gggtcggtgcgattagcggagctggaagcggaagtattgcaacgggtaatgcggcgtgggcattctgaacaactg

SEQ ID NO: 221396 - DNA, 75 bp, synthetic construct
  source 1..75: mol_type = other DNA
acctggccactttctgccagacctgggacgacgagaaagtccataaattgatggatttctccataaagaaaaact

SEQ ID NO: 221397 - DNA, 75 bp, synthetic construct
  source 1..75: mol_type = other DNA
gttcccgacggtgccgcactggatttgggtactgagtgtggtgctgatcatttgcgccgtaaacctgatgagcgt

SEQ ID NO: 221398 - DNA, 75 bp, synthetic construct
  source 1..75: mol_type = other DNA
gtctggaaacgcctaccgcaggcgacgtgttagcgggcaccacaccgctggccgagattcaggatgatacacgga

SEQ ID NO: 221399 - DNA, 75 bp, synthetic construct
  source 1..75: mol_type = other DNA
gcacagtactatgaattcctgcgcctcggtcgtgaaggctatacaaaagtacagaacgcctccgaacgcacgttc

SEQ ID NO: 221400 - DNA, 75 bp, synthetic construct
  source 1..75: mol_type = other DNA
gctgcaggcaaaccaacggataaaccaaacctggtgtgcggtccggtacaaatctgctggcataaattcgcccgc

SEQ ID NO: 221401 - DNA, 75 bp, synthetic construct
  source 1..75: mol_type = other DNA
atctgcagcaatcgacctgcgttgcgtaaacatggttgccgatctgtggcatgcgcctgcaccgaaaaatggtca

SEQ ID NO: 221402 - DNA, 75 bp, synthetic construct
  source 1..75: mol_type = other DNA
aagcctccctgaaatatctcagcgaccacccgaaactgcaggatattgcccagcagaacagctttaaacacacct

SEQ ID NO: 221403 - DNA, 75 bp, synthetic construct
  source 1..75: mol_type = other DNA
aagaccatcaaccctacggggattatttcgattggtccgtggcaggatctcgatgaaccacacggtcgggacgtt

SEQ ID NO: 221404 - DNA, 75 bp, synthetic construct
  source 1..75: mol_type = other DNA
cagattttaggccagcatcgttacctgaccggcaaccagctaaccgaagccgatattcgcctgtggaccacgctg

SEQ ID NO: 221405 - DNA, 75 bp, synthetic construct
  source 1..75: mol_type = other DNA
tcagcttccgcatttcgtaactggctcaccgctgacggcgcaccaggacctaccggcaaaggcggttttgccgca

SEQ ID NO: 221406 - DNA, 75 bp, synthetic construct
  source 1..75: mol_type = other DNA
gttccgaactactcgattcacgttttggcgctaagccgatttcgactatcgcagaatcaaaacggtttccgctgc

SEQ ID NO: 221407 - DNA, 75 bp, synthetic construct
  source 1..75: mol_type = other DNA
gatccgaactactcgattcacgttttggcgctaagccgatttcgactatcgcagaatcaaaacgttttccgctgc

SEQ ID NO: 221408 - DNA, 75 bp, synthetic construct
  source 1..75: mol_type = other DNA
gcacagtactatgaattcctgcgcctcggtcgtgaaggctatacaaaagtacagaacgcgtcccaacgcacgttc

SEQ ID NO: 221409 - DNA, 75 bp, synthetic construct
  source 1..75: mol_type = other DNA
ggatcgacaaagaagaatatccgcaatccgcagcaatcgacctgcgttgcgtaaacatggttgccgatctgtggc

SEQ ID NO: 221410 - DNA, 75 bp, synthetic construct
  source 1..75: mol_type = other DNA
ggtccgaactactcgattcacgttttggcgccaagccgatttcgactatcgcagaatcaaaacgctttccgctgc

SEQ ID NO: 221411 - DNA, 75 bp, synthetic construct
  source 1..75: mol_type = other DNA
gctccgaactactcgattcacgttttggcgcaaagccgatttcgactatcgcagaatcaaaacgatttccgctgc

SEQ ID NO: 221412 - DNA, 75 bp, synthetic construct
  source 1..75: mol_type = other DNA
atccgtttggcacaacagttaccgcacagtcgttacgcgatactttcgcaccgttgacgcagtgggaagagaaat

SEQ ID NO: 221413 - DNA, 75 bp, synthetic construct
  source 1..75: mol_type = other DNA
cagttgtttatggacccgaaacgcatgattgaagcctgtgacgaaaacaccatcggcgtggtgccgactttcggc

SEQ ID NO: 221414 - DNA, 75 bp, synthetic construct
  source 1..75: mol_type = other DNA
agcaagggcgaggcgttggtactgttcaccactgatagcgaactaacgcgcgataagctgcaacagtatgcccgc

SEQ ID NO: 221415 - DNA, 75 bp, synthetic construct
  source 1..75: mol_type = other DNA
aaaacttgtttgcgtccatccgattctctaactcaatcgcagatactaacctgatgaatttatttttcagggatt

SEQ ID NO: 221416 - DNA, 75 bp, synthetic construct
  source 1..75: mol_type = other DNA
gacgctgccagcggtggcttcctggcaccgttcgtcgccccggatatcgtctgggacttccgcctgccgcgtgtg

SEQ ID NO: 221417 - DNA, 75 bp, synthetic construct
  source 1..75: mol_type = other DNA
cgctggataaattccaggccgataccggtatcgacatcgacatgcacatcgacgctgccagcggtggcttcctgg

SEQ ID NO: 221418 - DNA, 75 bp, synthetic construct
  source 1..75: mol_type = other DNA
gcgttggctgaaatcatttatcgactttgttcctctcgacccgacgcaacctatggctattaaacatctggtacg

SEQ ID NO: 221419 - DNA, 75 bp, synthetic construct
  source 1..75: mol_type = other DNA
cggtatcatgcccgggattcttcgcgccatgttaagggagtttcagcccctgatatgcaatatgcgatggtaata

SEQ ID NO: 221420 - DNA, 75 bp, synthetic construct
  source 1..75: mol_type = other DNA
gaagccttcccgaaacaaatctccctcggtggaaaaaacgtggcgtgggcgcactcagaaatcatggcatggatg

SEQ ID NO: 221421 - DNA, 75 bp, synthetic construct
  source 1..75: mol_type = other DNA
agggcgtattctaccaggaatggatgcgcgcctgttgtcggttcctggtatcgaagagggcggacgcctgcaact

SEQ ID NO: 221422 - DNA, 75 bp, synthetic construct
  source 1..75: mol_type = other DNA
gtgcgtccggtatttgccgtttacacctcaataagccaacagtggtatatgcgttggctgaaatcatttatcgac

SEQ ID NO: 221423 - DNA, 75 bp, synthetic construct
  source 1..75: mol_type = other DNA
tttgttcctctcgacccgacgcaacctatggctattaaacatctggtacgtctggtggaacagggccgaccagtg

SEQ ID NO: 221424 - DNA, 75 bp, synthetic construct
  source 1..75: mol_type = other DNA
atcgcggagtcaaaacgatttccgctgcacgaaatgcgcgatgatgtcgcattccagattatcaatgatgaatta

SEQ ID NO: 221425 - DNA, 75 bp, synthetic construct
  source 1..75: mol_type = other DNA
gaagcggatgtcgaaggcggccagcatctcaacgtcaacgttatgaatcgagaaatgctgctcgatgctatcgaa

SEQ ID NO: 221426 - DNA, 75 bp, synthetic construct
  source 1..75: mol_type = other DNA
tccgctatctgcatacgctacacacaatggggccagcgccggaaccgaacctgactattctgtggtcggaagcgt

SEQ ID NO: 221427 - DNA, 75 bp, synthetic construct
  source 1..75: mol_type = other DNA
tgatcgaccacttcatcatgaagattcgtatggtgcgcttcctgcgtacgccggaatttgattcgttgttctccg

SEQ ID NO: 221428 - DNA, 75 bp, synthetic construct
  source 1..75: mol_type = other DNA
gttgggttaggccttaaaggccagtggcgcgatgccgcgcgtcgggcgttggctgcggtaggactggagaatcgc

SEQ ID NO: 221429 - DNA, 75 bp, synthetic construct
  source 1..75: mol_type = other DNA
accctgtacgacctctctgaacgtctgcgtctgcgcggctggcaggttccggccttcactctcggcggtgaagcc

SEQ ID NO: 221430 - DNA, 75 bp, synthetic construct
  source 1..75: mol_type = other DNA
gcttcaaactgaaagatggtgaagatccgggatacaccctgtacgacctctctgaacgtctgcgtctgcgcggct

SEQ ID NO: 221431 - DNA, 75 bp, synthetic construct
  source 1..75: mol_type = other DNA
gatcggcgggatggggctggatggccgcacactggtgaccaaaaactccttccgttatctgcataccctgcacac

SEQ ID NO: 221432 - DNA, 75 bp, synthetic construct
  source 1..75: mol_type = other DNA
gacggtcgtcgcgccggaacaccgttcgcaccgggcgctaacccgatgcatggtcgtgaccgcaaaggtgccgtg

SEQ ID NO: 221433 - DNA, 75 bp, synthetic construct
  source 1..75: mol_type = other DNA
agcccaatggtgattggtaagcaaatgcagttctttggtgcacgcgctaacctggcgaaaacgctgctgtacgca

SEQ ID NO: 221434 - DNA, 75 bp, synthetic construct
  source 1..75: mol_type = other DNA
gatgaaattaatgtccgcgattttattcaacataactatacgccatatgaaggtgatgaatctttcctcgccgaa

SEQ ID NO: 221435 - DNA, 75 bp, synthetic construct
  source 1..75: mol_type = other DNA
taccgatctgcgtaaaacccataatcagggcgtatttgatgcgtactcaccggatatgctgcgctgccgtaaatc

SEQ ID NO: 221436 - DNA, 75 bp, synthetic construct
  source 1..75: mol_type = other DNA
cgctgttgcagattcaggaaatggcggcgaaatacggttttgacatctcccgtccggcgcagaatgcacaggaag

SEQ ID NO: 221437 - DNA, 75 bp, synthetic construct
  source 1..75: mol_type = other DNA
gtgaagcggtgccattactgataagtctgattttactgctgttggtaattacctatattccggcaatatcgttac

SEQ ID NO: 221438 - DNA, 75 bp, synthetic construct
  source 1..75: mol_type = other DNA
aggctattcccgcggctttgctgcagcgataacggcctgtggttcgctgataacgccgattattcctccgggtat

SEQ ID NO: 221439 - DNA, 75 bp, synthetic construct
  source 1..75: mol_type = other DNA
atgggtaatgagtggatattatctttgtgtctcttgctttgtgtgttccagcaatggttttggttcatagaccga

SEQ ID NO: 221440 - DNA, 75 bp, synthetic construct
  source 1..75: mol_type = other DNA
tcgctggcgaaatgctgcatcaaattatgatggaagcgcgtatggctgtgcgcccgcgtgaaacgctgtacgaat

SEQ ID NO: 221441 - DNA, 75 bp, synthetic construct
  source 1..75: mol_type = other DNA
tttggatgttcggtttattctttttcttttacttttttatcatgggggcctacttcccgtttttcccgatttggc

SEQ ID NO: 221442 - DNA, 75 bp, synthetic construct
  source 1..75: mol_type = other DNA
acaatgttccagcgtgccgcacagtggctatatctgttgacgacaacggcatcgttacccatacacaggaaattc

SEQ ID NO: 221443 - DNA, 75 bp, synthetic construct
  source 1..75: mol_type = other DNA
tggtcaggccgttggcaccaacaccattggttcttccgaggcctgtatgctcggcgggatggcgatgaaatggcg

SEQ ID NO: 221444 - DNA, 75 bp, synthetic construct
  source 1..75: mol_type = other DNA
cattggttcttccgaggcctgtatgcttggcgggatggcgatgaaatggcgttggcgcaagcgtatggaagctgc

SEQ ID NO: 221445 - DNA, 75 bp, synthetic construct
  source 1..75: mol_type = other DNA
agataaaaaagcgatcgccgaactggattgcaacgaccgcctcgtaagtccggaaggtctggctcctgaatggga

SEQ ID NO: 221446 - DNA, 75 bp, synthetic construct
  source 1..75: mol_type = other DNA
ccgagaacctctggcgaattttgcgggaacatatgccgagtgatttaatccaacagatatcaatggcagcatacc

SEQ ID NO: 221447 - DNA, 75 bp, synthetic construct
  source 1..75: mol_type = other DNA
cggacacacaatttttgtatcttcaatgagtgaactactaaaaaatatggcgctcaatggacttggtattgcctg

SEQ ID NO: 221448 - DNA, 75 bp, synthetic construct
  source 1..75: mol_type = other DNA
gatgtcgcattccagattatcaatgatgaattatatcttgatggcaacgctcgtcagaacctggccactttctgc

SEQ ID NO: 221449 - DNA, 75 bp, synthetic construct
  source 1..75: mol_type = other DNA
cttttcggctattacggtcacggtcgccgccagctaaccggtaaactggaggtgcctgaaaccagcgtgatcatg

SEQ ID NO: 221450 - DNA, 75 bp, synthetic construct
  source 1..75: mol_type = other DNA
agcgacggcgagcaaaatcgctatcttcggcgtggtgatgcgtttgttcctttacgcaccggtgggtgacagtga

SEQ ID NO: 221451 - DNA, 75 bp, synthetic construct
  source 1..75: mol_type = other DNA
agcgtgactggggtaaccgaaccgatcgtaaaaatgccaaaaccaaatacacgctggagcgagtgggagttgaga

SEQ ID NO: 221452 - DNA, 75 bp, synthetic construct
  source 1..75: mol_type = other DNA
ctgatccgcttccacggcatgtatcagcaggatgaccgcgacattcgcgccgaacgtgctgaacagaagctggag

SEQ ID NO: 221453 - DNA, 75 bp, synthetic construct
  source 1..75: mol_type = other DNA
gagggatcaacacagtacaaagaaaagttcttgattacatcagaaaagccgctcaactggatgcctcagatctgc

SEQ ID NO: 221454 - DNA, 75 bp, synthetic construct
  source 1..75: mol_type = other DNA
cgtggtcagcctgatgtccagcccgtatcgtggcccggatgctgattccctgttctcttaccgcggtctgttctg

SEQ ID NO: 221455 - DNA, 75 bp, synthetic construct
  source 1..75: mol_type = other DNA
caggtattccgatgacgctgggctttatcggtaagttctacgtgctggcagtcggtgttcaggcgcacttatggt

SEQ ID NO: 221456 - DNA, 75 bp, synthetic construct
  source 1..75: mol_type = other DNA
tttgaaagtttattaaatataaaatatgtacgccagaaggattatggatatcaactgtgtgctgttagaaatctt

SEQ ID NO: 221457 - DNA, 75 bp, synthetic construct
  source 1..75: mol_type = other DNA
gcaatgatatgtcatcatttcaggatgttcacagcaagagcatggaacctaactgaaggtttcaacgaatcgatc

SEQ ID NO: 221458 - DNA, 75 bp, synthetic construct
  source 1..75: mol_type = other DNA
ctgaagcgaaagcgcagaatattccagtgctttcttatctggctaaccactttgcgtccatgaccggtaccaaaa

SEQ ID NO: 221459 - DNA, 75 bp, synthetic construct
  source 1..75: mol_type = other DNA
tgcacggtggtcgtcgtctgatgcacatccacgaaaaccgtccgggtgtgctgactgcgctcaacaaaatttttg

SEQ ID NO: 221460 - DNA, 75 bp, synthetic construct
  source 1..75: mol_type = other DNA
tgcgatcccgtacccatctgactgaagacgtgatcaacgccgcagaaaaactggtcgctattggctgtttctgta

SEQ ID NO: 221461 - DNA, 75 bp, synthetic construct
  source 1..75: mol_type = other DNA
gatggtcttagcattgttattccaaccttcaatcgctcaagaatattggaagtgacattggcttgtctttgcaat

SEQ ID NO: 221462 - DNA, 75 bp, synthetic construct
  source 1..75: mol_type = other DNA
cgtgataagcgtggtgattttcgccttgcagggcgtctatgccatgtcgctggagtatctgatcctgacgtttat

SEQ ID NO: 221463 - DNA, 75 bp, synthetic construct
  source 1..75: mol_type = other DNA
attcgctggttgccattgccgaaggcgctaagctggttggcggtttgcgttgtttcgattggtctgatgacggta

SEQ ID NO: 221464 - DNA, 75 bp, synthetic construct
  source 1..75: mol_type = other DNA
ctgatgacacgtaaatacgtcgaaaactggttactgtgggtcattattaacgtgatcagcgtggtgattttcgcc

SEQ ID NO: 221465 - DNA, 75 bp, synthetic construct
  source 1..75: mol_type = other DNA
gatgacggtatttatcaatccggtgtttgcatttttgacccgcgtggcagtcatgatcatgcaagcattaggatt

SEQ ID NO: 221466 - DNA, 75 bp, synthetic construct
  source 1..75: mol_type = other DNA
tgacccgcgtggcggtaatgatcatgcaagcgctgggtttacaggtcgctatgccagacttacaaccggatgcat

SEQ ID NO: 221467 - DNA, 75 bp, synthetic construct
  source 1..75: mol_type = other DNA
tttattgcgctcaacggcagccggatgtggatcaacagcgcacgcgaaagaggttcacgcgcgctgtcccattaa

SEQ ID NO: 221468 - DNA, 75 bp, synthetic construct
  source 1..75: mol_type = other DNA
ggctataccaaagtacagaacgcctcttaccaggttgccgcttatctggcggatgaaatcgccaaactggggccg

SEQ ID NO: 221469 - DNA, 75 bp, synthetic construct
  source 1..75: mol_type = other DNA
agctcaccgaagccgatattcgcctgtggaccacattgatccgttttgatccggtgtatgtcacccacttcaagt

SEQ ID NO: 221470 - DNA, 75 bp, synthetic construct
  source 1..75: mol_type = other DNA
gctggatttacgacaccgttaacaatggcgtctataaggccggtttcgccaccagccaacaggcctatgacgaag

SEQ ID NO: 221471 - DNA, 75 bp, synthetic construct
  source 1..75: mol_type = other DNA
tctctgaacgtctgcgtctgcgcggctggcaggttccggccttcactctcggcggtgaagccaccgacatcgtgg

SEQ ID NO: 221472 - DNA, 75 bp, synthetic construct
  source 1..75: mol_type = other DNA
tacaccctgtatgacctctctgaacgtctgcgtctgcgcggctggcaggttccggccttcactctcggcggtgaa

SEQ ID NO: 221473 - DNA, 75 bp, synthetic construct
  source 1..75: mol_type = other DNA
gcaggttccggccttcactctcggcggtgaagccaccgacatcgtggtgatgcgcattatgtgtcgtcgcggctt

SEQ ID NO: 221474 - DNA, 75 bp, synthetic construct
  source 1..75: mol_type = other DNA
tggagtacctgctcctgacttttattgctctgaatggcagccggatgtggatcaacagcgcacgcgagagaggtt

SEQ ID NO: 221475 - DNA, 75 bp, synthetic construct
  source 1..75: mol_type = other DNA
atcagtgcttcaggccataaattcggtctggctccgctgggctgcggctgggttatctggcgtgatgaagaagcg

SEQ ID NO: 221476 - DNA, 75 bp, synthetic construct
  source 1..75: mol_type = other DNA
atctgcagctatcgacctgcgttgcgtaaacatggttgctgacctgtggcatgcgcctgcgccaaaaaacggtca

SEQ ID NO: 221477 - DNA, 75 bp, synthetic construct
  source 1..75: mol_type = other DNA
ctgcgttgcgtaaatatggttgccgatctgtggcatgcgcctgcgccgaaaaatggtcaggccgttggcaccaac

SEQ ID NO: 221478 - DNA, 75 bp, synthetic construct
  source 1..75: mol_type = other DNA
tgcaaaaccgtaaagtggtcgcttgggctaaacagcacggcatccatattacttcctatatgacgctggcgtatg

SEQ ID NO: 221479 - DNA, 75 bp, synthetic construct
  source 1..75: mol_type = other DNA
cacaaaatttacagctcgatgccaaagataaaaaagcgatcgccgccctggattgcaacgaccgcctggttagcc

SEQ ID NO: 221480 - DNA, 75 bp, synthetic construct
  source 1..75: mol_type = other DNA
gcgactccggcacaagtgattctggcgtgggctatgggggaaggttactcagtaattccttcttctactaaacgt

SEQ ID NO: 221481 - DNA, 75 bp, synthetic construct
  source 1..75: mol_type = other DNA
acccatacagctgctggcgctcggcgcaattatcgccgcttcaatgggttctacgctgacagtacgcaaagagag

SEQ ID NO: 221482 - DNA, 75 bp, synthetic construct
  source 1..75: mol_type = other DNA
ggcactcggcgctatcatcgcagcttcaatgggctccacgctgacagcacgcaaagagagcaaaatagaagaaat

SEQ ID NO: 221483 - DNA, 75 bp, synthetic construct
  source 1..75: mol_type = other DNA
tcagacagtaccgctgggtattgcggtggcgctggagttcaccggaccactggcggtggcgctgttctcttctcg

SEQ ID NO: 221484 - DNA, 75 bp, synthetic construct
  source 1..75: mol_type = other DNA
caaactggggccgtatgagttcatctgtacgggtcgtccggacgaaggcatcccggcggtttgcttcaaactgaa

SEQ ID NO: 221485 - DNA, 75 bp, synthetic construct
  source 1..75: mol_type = other DNA
cgcggcttcgaaatggactttgctgaactgttgctggaagactacaaagcctccctgaaatatctcagcgaccac

SEQ ID NO: 221486 - DNA, 75 bp, synthetic construct
  source 1..75: mol_type = other DNA
tgcggtccggtacaaatctgctggcataaattcgcccgctactgggatgtggagttgcgtgagatccctatgcgc

SEQ ID NO: 221487 - DNA, 75 bp, synthetic construct
  source 1..75: mol_type = other DNA
attactcccccgactaattcaataatgcttaaagctttctttgccaatatctcaatcactgaggtggcaaaatga

SEQ ID NO: 221488 - DNA, 75 bp, synthetic construct
  source 1..75: mol_type = other DNA
atgaatacgttatccacgatacaggagctcgcgcgtgcgattcgcaacctcatccgctcaggtgtggtgactgag

SEQ ID NO: 221489 - DNA, 75 bp, synthetic construct
  source 1..75: mol_type = other DNA
gggctccctcggtcggtgagcaggttctgctgctggcaatcggtggcgagcttgataccgctttcgtgctgccgg

SEQ ID NO: 221490 - DNA, 75 bp, synthetic construct
  source 1..75: mol_type = other DNA
acactcgatacccccgaggtggtctgcaccaacaaactgaccacggccacgcttgaggtgcaaaagggcgggaag

SEQ ID NO: 221491 - DNA, 75 bp, synthetic construct
  source 1..75: mol_type = other DNA
gatccgcaccggcattgtcgtcgaaaccgaccttaacgccggtcgctgccgtgtgcagaccggcggcatgtgcac

SEQ ID NO: 221492 - DNA, 75 bp, synthetic construct
  source 1..75: mol_type = other DNA
attacccattcaggcggatcgctttcgtctaatggtgtcgttgtccattcgcacaaacatagcggcgtccagtcc

SEQ ID NO: 221493 - DNA, 75 bp, synthetic construct
  source 1..75: mol_type = other DNA
accattttaaagtaaaaaccgtgacggaaagcctgcgccgtcacggactgagggcaaaagcttcctggaatttca

SEQ ID NO: 221494 - DNA, 75 bp, synthetic construct
  source 1..75: mol_type = other DNA
cacatcgacagcttcctgatgaataaacacttcatgcgtaagcacggtcctaacgcttattacgggcagaagtag

SEQ ID NO: 221495 - DNA, 75 bp, synthetic construct
  source 1..75: mol_type = other DNA
ccgcaactgaatcccatcgatagttatctgatgaataagcactttatgcgtaagcatggtcccaacgcttattac

SEQ ID NO: 221496 - DNA, 75 bp, synthetic construct
  source 1..75: mol_type = other DNA
aacgacaaaaagaacgaaatccatgaaaaaatgaaacaccctttggataaagttacctacaatgaagcaaaggaa

SEQ ID NO: 221497 - DNA, 75 bp, synthetic construct
  source 1..75: mol_type = other DNA
ccacaactgaatcacatcgacagttatctcatgaacaaacacttcatgcgtaagcacgggcccaacgcctattac

SEQ ID NO: 221498 - DNA, 75 bp, synthetic construct
  source 1..75: mol_type = other DNA
gcatgggcgcaggcggggctggctatcccggcattaggcaccacgcacgctgactacttctttggcgatatcccc

SEQ ID NO: 221499 - DNA, 75 bp, synthetic construct
  source 1..75: mol_type = other DNA
gcccacgatgcggtgcataacgcggtggtgatggaagaagtggcgaaaatggcgtggattgcccgcggcattaac

SEQ ID NO: 221500 - DNA, 75 bp, synthetic construct
  source 1..75: mol_type = other DNA
accctggacacaccggaggtggtctgcaccaacaagctgattaccggcacgctggaagtgcagaagggcgggacg

SEQ ID NO: 221501 - DNA, 75 bp, synthetic construct
  source 1..75: mol_type = other DNA
acgattattccagcgaataacacggtatcgttaggagcagtagggacttcggcggtaagtctgggattaacggca

SEQ ID NO: 221502 - DNA, 75 bp, synthetic construct
  source 1..75: mol_type = other DNA
attacaaatgtaagattaataaaagggtatcagattgcaagaagaactttcggttataggatttatgttttttcg

SEQ ID NO: 221503 - DNA, 75 bp, synthetic construct
  source 1..75: mol_type = other DNA
gtgagaaacaggctcatttttaccttactattgaattgtggtttaagagcaggagagctattaaatctaaaagtt

SEQ ID NO: 221504 - DNA, 75 bp, synthetic construct
  source 1..75: mol_type = other DNA
gccaatcgccggtttcgatcagggctaccgctggtggggacggggcgagctgctcggtatctccattccgatctg

SEQ ID NO: 221505 - DNA, 75 bp, synthetic construct
  source 1..75: mol_type = other DNA
ccgaaccggatgccggaatgctggcggaaaaagagtggcaggcggcggctcagggtaatagcggaccggatgttt

SEQ ID NO: 221506 - DNA, 75 bp, synthetic construct
  source 1..75: mol_type = other DNA
gactgcggcagatctgcgttttgcgccggaatttgttgctcgccatattgccgaatggcagcaccagaatccgat

SEQ ID NO: 221507 - DNA, 75 bp, synthetic construct
  source 1..75: mol_type = other DNA
gtatcaatggtcacgaaagccacgctcactgcactgaaaatggccagcagtgataccagtccaatgattgctgac

SEQ ID NO: 221508 - DNA, 75 bp, synthetic construct
  source 1..75: mol_type = other DNA
cccctctgcctcggcggatgcgtggcaggtggttttccctgatggtgcggtcattgagtacgagcccgagaccag

SEQ ID NO: 221509 - DNA, 75 bp, synthetic construct
  source 1..75: mol_type = other DNA
cggcggtgaactctcatcaaacggtaaggtactgcatacccataaacaccccggcgacagcggcggcacaaccgg

SEQ ID NO: 221510 - DNA, 75 bp, synthetic construct
  source 1..75: mol_type = other DNA
atgggaggtttgccgtgctgctttcttggcggcatccttcccgttatgaacactctcgcaaatattcaggaactc

SEQ ID NO: 221511 - DNA, 75 bp, synthetic construct
  source 1..75: mol_type = other DNA
ttttccgtctattggaaattggtgggattgaaaacccttttcataaggaagtacaggtcaggaacagactaatat

SEQ ID NO: 221512 - DNA, 75 bp, synthetic construct
  source 1..75: mol_type = other DNA
acgctttactgaatagtggattagcgcctcagcctgtatcattgactgtgactttgcctatcagtgagttctaca

SEQ ID NO: 221513 - DNA, 75 bp, synthetic construct
  source 1..75: mol_type = other DNA
atggtctggcatccggcgcattttcatttttctcccattcaggctggtatgggggattccgtgtcgtatccttcc

SEQ ID NO: 221514 - DNA, 75 bp, synthetic construct
  source 1..75: mol_type = other DNA
cgccggtgttgacggttaatatgcgtgctgccagtaagtctgaaccgcaaaccgtggtgaatgccagctatagcg

SEQ ID NO: 221515 - DNA, 75 bp, synthetic construct
  source 1..75: mol_type = other DNA
gaaccagatcacgtccatttgttaattaactatcctcccaaactggcgatatccagtctggtaaacagcctcaaa

SEQ ID NO: 221516 - DNA, 75 bp, synthetic construct
  source 1..75: mol_type = other DNA
caatccgtatctggggcaccatcggttttattatggcgatgtgggtggtgagcctgtcaggcttcgaactaagcc

SEQ ID NO: 221517 - DNA, 75 bp, synthetic construct
  source 1..75: mol_type = other DNA
aacatctctggttcagtgtttgtcgaaaaagaagtcagcccggcaattcgtgccagtgcgcaggggatgttcctg

SEQ ID NO: 221518 - DNA, 75 bp, synthetic construct
  source 1..75: mol_type = other DNA
ggaggcaatgttccttgtgatattgattaactcgtttgcctatatgccaacgcttgggttaatcaacacaatctc

SEQ ID NO: 221519 - DNA, 75 bp, synthetic construct
  source 1..75: mol_type = other DNA
cacgagatacccaacgtcaggcagcggcacagcggtttaatgaagctgaaaactatgggagctatgacgacttcc

SEQ ID NO: 221520 - DNA, 75 bp, synthetic construct
  source 1..75: mol_type = other DNA
tgaccagtgggtcgcgccaattgcgctttatcctgatgctttgctatcacaagtattgatggcagccacttatcc

SEQ ID NO: 221521 - DNA, 75 bp, synthetic construct
  source 1..75: mol_type = other DNA
ccgcgtctccagacttagtagtgagcaacgctcagcagtacgggaacgtctctctgagcgcggagcaaggcgact

SEQ ID NO: 221522 - DNA, 75 bp, synthetic construct
  source 1..75: mol_type = other DNA
agcaatattaatattcacctgcaatgggtcgatatctggcttaaaaatattgtgtttcttcccttcatccaataa

SEQ ID NO: 221523 - DNA, 75 bp, synthetic construct
  source 1..75: mol_type = other DNA
aaaagctggacaatccgttcagtttgatgtccaccaagggccaaaaggcaatcacgccagtgttattgtgcccgt

SEQ ID NO: 221524 - DNA, 75 bp, synthetic construct
  source 1..75: mol_type = other DNA
aaaccggctcgctgaagtcatcaactgaacaaaagatcatcacgacaacgaaaaaagtcgtaccggtaaatcagc

SEQ ID NO: 221525 - DNA, 75 bp, synthetic construct
  source 1..75: mol_type = other DNA
gtagcgccatgccgctgctcaatcggatcgccaaaccgacgctaattattcatgccaaagacgatccgtttatgg

SEQ ID NO: 221526 - DNA, 75 bp, synthetic construct
  source 1..75: mol_type = other DNA
cgattacccagaaaccattacagactatgtcacactgcaacgaggttcggcttatggcggcgtgttatctagttt

SEQ ID NO: 221527 - DNA, 75 bp, synthetic construct
  source 1..75: mol_type = other DNA
aacaagcgttacattacgctggcaccgattgcgactgtgcttggcctggcatttaaactctccgacccggaaaaa

SEQ ID NO: 221528 - DNA, 75 bp, synthetic construct
  source 1..75: mol_type = other DNA
atgaacccagtacccgcgcaacgtgaatatttcctcgactccatccgcgcctggctgatgttgttagggatccct

SEQ ID NO: 221529 - DNA, 75 bp, synthetic construct
  source 1..75: mol_type = other DNA
cgtcgccacttcccgctgaacgtgccgttccagaacggaccgacgcgcggtaaagatgtcttcgtaccgatcgat

SEQ ID NO: 221530 - DNA, 75 bp, synthetic construct
  source 1..75: mol_type = other DNA
ggatttattccggcgataaccctccgccgtctgcgtcggcggatgccctgcacatacgtttccctgacggggcgg

SEQ ID NO: 221531 - DNA, 75 bp, synthetic construct
  source 1..75: mol_type = other DNA
gcagtaccgttgttgtgctgagtttgctgggatttctggtgctgcttctgaaaggacgcgcagtaacgaagactt

SEQ ID NO: 221532 - DNA, 75 bp, synthetic construct
  source 1..75: mol_type = other DNA
atttacgcattccgttgctgaagtttttattctctggcaaaccgaacgtgaagcgtgagaatgataaagcgccag

SEQ ID NO: 221533 - DNA, 75 bp, synthetic construct
  source 1..75: mol_type = other DNA
aatatttcctcgactccatccgcgcatggttgatgttgttagggatcccttttcatatttctttaatctattcaa

SEQ ID NO: 221534 - DNA, 75 bp, synthetic construct
  source 1..75: mol_type = other DNA
ccaatgaattcagcagcagtgctgaattcatccccatgcgcggctttagcaattgtcatctgcaaaccatgctgc

SEQ ID NO: 221535 - DNA, 75 bp, synthetic construct
  source 1..75: mol_type = other DNA
tgaaaatttaaataaaaatttctcgatggttaaactttcggtgatatttttaggcctcggcatcagctatgcggt

SEQ ID NO: 221536 - DNA, 75 bp, synthetic construct
  source 1..75: mol_type = other DNA
atggtaaaactatcggtgatttttttatgcctcggcatcggttatgcggtaataagaagaacgattttttattgt

SEQ ID NO: 221537 - DNA, 75 bp, synthetic construct
  source 1..75: mol_type = other DNA
ctgctcaccttgccgcaattcattatgctgcaatatgtcaagggcaaagcggaaagctggcctgggctatcattg

SEQ ID NO: 221538 - DNA, 75 bp, synthetic construct
  source 1..75: mol_type = other DNA
cgttgctatgcgtgttctgacgctgtggggtaacggcgataaagtgactgatgtccagtgggcgcaccctggctg

SEQ ID NO: 221539 - DNA, 75 bp, synthetic construct
  source 1..75: mol_type = other DNA
cgttgctatgcgtactctgacgctgtggggtaacggggataaagttactgatgtccagtgggcacaccctggctg

SEQ ID NO: 221540 - DNA, 75 bp, synthetic construct
  source 1..75: mol_type = other DNA
cacgatgtggatcacaaaaaatagcgtttgatgttaatgggctgaattgcactagggtttacaatgcattgggcg

SEQ ID NO: 221541 - DNA, 75 bp, synthetic construct
  source 1..75: mol_type = other DNA
gctgagattcaggatgatacgcgaatgatgtttcaggacgcgcgtctgctgccgtggaaatcggtgattgataac

SEQ ID NO: 221542 - DNA, 75 bp, synthetic construct
  source 1..75: mol_type = other DNA
ggtctgtcccggatgaaaaagcttttattagcacgtcatataaatgtagacgaagtcgcctttaaaaaggtatag

SEQ ID NO: 221543 - DNA, 75 bp, synthetic construct
  source 1..75: mol_type = other DNA
aaagatatatcatcccttattgagaaggctttttatcgttcaaaaaattatcaaaatccgtacaaagaaattacc

SEQ ID NO: 221544 - DNA, 75 bp, synthetic construct
  source 1..75: mol_type = other DNA
ctttcacgttaactctgattacggtagtgctgctggcctccttcttcccggcaagaggcggctttgtccccttct

SEQ ID NO: 221545 - DNA, 75 bp, synthetic construct
  source 1..75: mol_type = other DNA
ctgtgaaaacgtcggcgggacatatcttgacggtaagtcactcaagttcaacccgtttgccaacatctctaacat

SEQ ID NO: 221546 - DNA, 75 bp, synthetic construct
  source 1..75: mol_type = other DNA
acgtaaaaatgtgccgttccagcaatacatcaacgctgggtatttttctgtgaaagaagtggtgctggatgatga

SEQ ID NO: 221547 - DNA, 75 bp, synthetic construct
  source 1..75: mol_type = other DNA
taatccatttccgccacagttgcgccaattcagcagaacgaatgacgaagcgcatttggtaggtgatgctgccaa

SEQ ID NO: 221548 - DNA, 75 bp, synthetic construct
  source 1..75: mol_type = other DNA
ctttcaccttaaccctgatcacggtggtgctgctggcctctttctttccggccagaggcgatttcgtccccttct

SEQ ID NO: 221549 - DNA, 75 bp, synthetic construct
  source 1..75: mol_type = other DNA
tatgctgcaactgttgctaccgtttgtgttggggcatctttcccgcccgtggattggtaactgggtggcacgcaa

SEQ ID NO: 221550 - DNA, 75 bp, synthetic construct
  source 1..75: mol_type = other DNA
gagctggaagcggaagtgttgcagcgggtgatgcaacgtgggcactctgaacaaccgattcgacgtcatggttaa

SEQ ID NO: 221551 - DNA, 75 bp, synthetic construct
  source 1..75: mol_type = other DNA
caggccataaattcggtctggctccgctgggctgcggctgggttatctggcgtgacgaagaagcgctgccgcagg

SEQ ID NO: 221552 - DNA, 75 bp, synthetic construct
  source 1..75: mol_type = other DNA
atcaacttctcccgcccggcaggtcaggtgattgcacagtactatgaattcctgcgcctcggtcgtgaaggctat

SEQ ID NO: 221553 - DNA, 75 bp, synthetic construct
  source 1..75: mol_type = other DNA
ggctgcggctgggttatctggcgtgacgaagaagcgctgccgcaggaactggtgttcaacgttgactacctgggt

SEQ ID NO: 221554 - DNA, 75 bp, synthetic construct
  source 1..75: mol_type = other DNA
atttaacgattttctaggcaagcaaggaaaaaaattaagaaactcagggttcttagcccgtttattactaattga

SEQ ID NO: 221555 - DNA, 75 bp, synthetic construct
  source 1..75: mol_type = other DNA
acctcggcggtcagattggtactttcgccatcaacttctcccgcccggcgggtcaggtgattgcacagtactatg

SEQ ID NO: 221556 - DNA, 75 bp, synthetic construct
  source 1..75: mol_type = other DNA
gttatctggcgtgacgaagaagcgctgccgcaggaactggtgttcaacgttgactacctgggtggtcaaattggt

SEQ ID NO: 221557 - DNA, 75 bp, synthetic construct
  source 1..75: mol_type = other DNA
tttgcggggcgaaaggggatgcccgccattgcgcgatattttatggatgagttaaccacgcggcttgccaacggg

SEQ ID NO: 221558 - DNA, 75 bp, synthetic construct
  source 1..75: mol_type = other DNA
gcaggcaaaccaacggataaaccaaacctggtgtgcggtccggtacaaatctgctggcataaattcgcccgctac

SEQ ID NO: 221559 - DNA, 75 bp, synthetic construct
  source 1..75: mol_type = other DNA
ctgcgcctcggtcgtgaaggctataccaaagtacagaacgcttcctaccaggttgccgcttatctggcggatgaa

SEQ ID NO: 221560 - DNA, 75 bp, synthetic construct
  source 1..75: mol_type = other DNA
aacgctcgtcagaacctggccactttctgccagacctgggacgacgaaaacgtccataaattgatggatttgtcg

SEQ ID NO: 221561 - DNA, 75 bp, synthetic construct
  source 1..75: mol_type = other DNA
atggtcaggccgttggcaccaacaccattggttcttccgaggcctgtatgctcggcgggatggcgatgaaatggc

SEQ ID NO: 221562 - DNA, 75 bp, synthetic construct
  source 1..75: mol_type = other DNA
tatctggcggatgaaatcgccaaactggggccgtatgagttcatctgtacgggtcgcccggacgaaggcatcccg

SEQ ID NO: 221563 - DNA, 75 bp, synthetic construct
  source 1..75: mol_type = other DNA
ttgggctgatgatggcgaactatctcggccagatgggcattgacgtgctggtggtggagaaactcgataagttga

SEQ ID NO: 221564 - DNA, 75 bp, synthetic construct
  source 1..75: mol_type = other DNA
ggccttcagccagcaaaatgacgaagtgaccttgcacctgaaaacggcagaagggcagcgggaaatagtcaaagc

SEQ ID NO: 221565 - DNA, 75 bp, synthetic construct
  source 1..75: mol_type = other DNA
cgcgaacttcgcggtaattggctggggatgcaatccactgtgggggatgagcgacgagcaaatccagcagtggcg

SEQ ID NO: 221566 - DNA, 75 bp, synthetic construct
  source 1..75: mol_type = other DNA
gaccaccaccaccagcctcgtgtttcgtaaaatattcgcgcagttaaatctgcatgcacccgaggtggaaggcga

SEQ ID NO: 221567 - DNA, 75 bp, synthetic construct
  source 1..75: mol_type = other DNA
atgactatcaaatcaaatacgccagcacacgacaggactgctggcaaacgccgctcttggcttttttgtattgcg

SEQ ID NO: 221568 - DNA, 75 bp, synthetic construct
  source 1..75: mol_type = other DNA
tggctgctgaattatctgccgccagtaaaacgctacttcctcgaaatgcgcttcaagccgatgccgcaatattac

SEQ ID NO: 221569 - DNA, 75 bp, synthetic construct
  source 1..75: mol_type = other DNA
ggcaaagatgactatctgatttgtatggaaaaaatctatgcctatgcgggatatatcgccatcaatatttcatcg

SEQ ID NO: 221570 - DNA, 75 bp, synthetic construct
  source 1..75: mol_type = other DNA
cggggagtgcattgacgcgttaggcgcgatgggatttggatcgatcgagatcggtaccgtcacgccacgtccaca

SEQ ID NO: 221571 - DNA, 75 bp, synthetic construct
  source 1..75: mol_type = other DNA
gcctgcgaaacctgttaactgcatgggcctgacgtttaaaaatccgcttggtctggcagccggtcttgataaaga

SEQ ID NO: 221572 - DNA, 75 bp, synthetic construct
  source 1..75: mol_type = other DNA
tgctcgatacctatcaacaagaacgtcgcgatcacgccaaagcgatgattgacctgtccgtgacggcgggcaacg

SEQ ID NO: 221573 - DNA, 75 bp, synthetic construct
  source 1..75: mol_type = other DNA
aggaattaaacggtcgcttaccgatcatcggtgttggcggcatcgactcggttatcgctgcgcgtgaaaagattg

SEQ ID NO: 221574 - DNA, 75 bp, synthetic construct
  source 1..75: mol_type = other DNA
tagttcgtcataatattgatggcgtcattgcgactaatactacactcgatcgttctttagttcaggggatgaaaa

SEQ ID NO: 221575 - DNA, 75 bp, synthetic construct
  source 1..75: mol_type = other DNA
ctacttcggtcccgaggccaacgacttcggcctgctggaacaaaccttcactgaatacgggctgagcggcaaagg

SEQ ID NO: 221576 - DNA, 75 bp, synthetic construct
  source 1..75: mol_type = other DNA
tatgtttctcggctcatacccccttcgcgaaaatcctgatgatacatctggcccacaggtggatgatgaaatggt

SEQ ID NO: 221577 - DNA, 75 bp, synthetic construct
  source 1..75: mol_type = other DNA
atggattattcacagttaagtgattttgaaattaacagacgagtatgtgaggctttagatatggaggagcatttc

SEQ ID NO: 221578 - DNA, 75 bp, synthetic construct
  source 1..75: mol_type = other DNA
ttgaaattaacagacgagtatgtgaggctttagatatggaggagcatttcttcatacctgatgacgaagcagact

SEQ ID NO: 221579 - DNA, 75 bp, synthetic construct
  source 1..75: mol_type = other DNA
ggctgaacggtttaacgccattacccgtgcctattatatgaaagcggcagcgacacagttcccgctgccggaggg

SEQ ID NO: 221580 - DNA, 75 bp, synthetic construct
  source 1..75: mol_type = other DNA
ttattcaccagccgcggcttaaccacgtttcagagtgggctctgacggtggaagagctccaggcgttcggtgaac

SEQ ID NO: 221581 - DNA, 75 bp, synthetic construct
  source 1..75: mol_type = other DNA
gcccgcaggtagatgaggaaatggtcgaagccgttggtcgttacgtcgacactgtttgggcgcagggcaatgagc

SEQ ID NO: 221582 - DNA, 75 bp, synthetic construct
  source 1..75: mol_type = other DNA
tgattattgacgcgctggagagcgcgattggtactgacgccatttattttgacggcagacctgcagtgcttgaag

SEQ ID NO: 221583 - DNA, 75 bp, synthetic construct
  source 1..75: mol_type = other DNA
acccacattaacttccagcgcgtccccaccgttgacacctcaaaccccttcgccgcaaaaggcatcccatcgctg

SEQ ID NO: 221584 - DNA, 75 bp, synthetic construct
  source 1..75: mol_type = other DNA
ctgaatacgggctgagcggcaaaggccagtcgcgcaaatatctgcacacctacgatgaagccgtgccgtggaacc

SEQ ID NO: 221585 - DNA, 75 bp, synthetic construct
  source 1..75: mol_type = other DNA
gcaagtaataaaaaagtgcttcgtccttatagcaaggacatgcttcggcttgcagcaaaaggtgttaaaactact

SEQ ID NO: 221586 - DNA, 75 bp, synthetic construct
  source 1..75: mol_type = other DNA
tgctgtagctgagagtttgaaccgaagatggatcggtatagatactgttgaagaatatcttgatggcgcgttata

SEQ ID NO: 221587 - DNA, 75 bp, synthetic construct
  source 1..75: mol_type = other DNA
tttcatcaaaagagaaaaattcaactacaaagttagtcaacgggtttgaaccgttttacgaatctaacttgggtt

SEQ ID NO: 221588 - DNA, 75 bp, synthetic construct
  source 1..75: mol_type = other DNA
cagcagaacagaaaaaagcctcattgctggccgaagcccaaagcacaatcagcctgtggcagactgagctgcagc

SEQ ID NO: 221589 - DNA, 75 bp, synthetic construct
  source 1..75: mol_type = other DNA
caccgaccatgacaccacagctgcaattgcaccagcaagagaggaaatttcacgttcgggactggcgctgaatct

SEQ ID NO: 221590 - DNA, 75 bp, synthetic construct
  source 1..75: mol_type = other DNA
tagctattgttattcttgctgccttcccccaactgcgtccgggttttgatatcggtaaaccaatggaaacacgca

SEQ ID NO: 221591 - DNA, 75 bp, synthetic construct
  source 1..75: mol_type = other DNA
tcattttcgacctcaagcaggttaacccgaaagcgatgatctccgtgaagctggtttccgaaccgggagtaggca

SEQ ID NO: 221592 - DNA, 75 bp, synthetic construct
  source 1..75: mol_type = other DNA
ttcgcgcaaatgacctatgattacggttttgtgccctttacgctcaatacatctgcactggtggacaaaaactat

SEQ ID NO: 221593 - DNA, 75 bp, synthetic construct
  source 1..75: mol_type = other DNA
tacagctttattcgtggagggagtaaggatattcctgaagttttaaacagtaataaagaaaacgtaccaggaaaa

SEQ ID NO: 221594 - DNA, 75 bp, synthetic construct
  source 1..75: mol_type = other DNA
tttatgacctgcacagccatactacggcttccgatggctgcctgacaccggaagcgctggtacaccgtgccgcag

SEQ ID NO: 221595 - DNA, 75 bp, synthetic construct
  source 1..75: mol_type = other DNA
atgagagttttagttcgaatcgttaccagcactgtctatgacgcatttccgctttttatcgtcaaagccgatggc

SEQ ID NO: 221596 - DNA, 75 bp, synthetic construct
  source 1..75: mol_type = other DNA
tacaggtcatgacgctgattcagtgatggttgatgatgatggtgtttgttggcataacggcaactgttggtacgt

SEQ ID NO: 221597 - DNA, 75 bp, synthetic construct
  source 1..75: mol_type = other DNA
cgaccgtgtgggtcgccgaccggtgatcctcgtcggaatgtccatttttatgctggcaacgctggtcgcggtcac

SEQ ID NO: 221598 - DNA, 75 bp, synthetic construct
  source 1..75: mol_type = other DNA
gtctggtggatctgattggtcgcaccgacctgctgaaagagctggacggtttcaccgccaaacagcagaaactgg

SEQ ID NO: 221599 - DNA, 75 bp, synthetic construct
  source 1..75: mol_type = other DNA
tgattttcgacctcaagcaggtcaatccaaaagcgatgatctccgtgaagctggtttccgaaccgggcgtaggca

SEQ ID NO: 221600 - DNA, 75 bp, synthetic construct
  source 1..75: mol_type = other DNA
tcggcggtaactcaaactccggcgaaggcggtgaagacccggcgcgctatggcactaacaaagtgtcgcgcatca

SEQ ID NO: 221601 - DNA, 75 bp, synthetic construct
  source 1..75: mol_type = other DNA
tacagcctgttaaacaacaggcctaaacagcggtatgaatcgattattacctatcaattaccagaaatgaatgtg

SEQ ID NO: 221602 - DNA, 75 bp, synthetic construct
  source 1..75: mol_type = other DNA
cctgaccggcaatggtctggaaggcgcgattaaaggtgctgtgattggtggtacaggtggtgccattctgggtaa

SEQ ID NO: 221603 - DNA, 75 bp, synthetic construct
  source 1..75: mol_type = other DNA
gatcagttactggagccttccgtcaatgacggtgcgtctgtatcatgacgcgatggtggctgaagtgtgttcaag

SEQ ID NO: 221604 - DNA, 75 bp, synthetic construct
  source 1..75: mol_type = other DNA
aaggtgcactacttggtgcaggcgttggtttacttactggcaatggcgttaatggcgtactgaaaggtgcagctg

SEQ ID NO: 221605 - DNA, 75 bp, synthetic construct
  source 1..75: mol_type = other DNA
gtgctgattaagatgtatcctgacgccgatattccgatggtgcagttgagtatcgacagtagcaaacctgccgcc

SEQ ID NO: 221606 - DNA, 75 bp, synthetic construct
  source 1..75: mol_type = other DNA
gcggcgctgcgcgatgaagggataatgttagttgccagtggcaacgtggtgcataacctgcgcacggtgaagtgg

SEQ ID NO: 221607 - DNA, 75 bp, synthetic construct
  source 1..75: mol_type = other DNA
atgaacgtgctggaagataatttgtatacccgcagctggcagaagttggggatgacattgccacgcccgcaagcg

SEQ ID NO: 221608 - DNA, 75 bp, synthetic construct
  source 1..75: mol_type = other DNA
tacagcctgttaaacaacagacctaaacagcggtatgaatcaattattacctatcaattaccggaaatgaatgta

SEQ ID NO: 221609 - DNA, 75 bp, synthetic construct
  source 1..75: mol_type = other DNA
ttagcgtgtttgataaatcgcactatagcttctcgggtataaactatgatcgccgtaacggtaccaatttcaaca

SEQ ID NO: 221610 - DNA, 75 bp, synthetic construct
  source 1..75: mol_type = other DNA
ggtcggtgcaaacttaaatcttagcaagagctttaataatatctcggtctctctgaatgccgggtattccaaact

SEQ ID NO: 221611 - DNA, 75 bp, synthetic construct
  source 1..75: mol_type = other DNA
tcgcaacgagggtattaactataccgcaagccgtcttgctgctgctttcaatcacggatttatcaataagccttt

SEQ ID NO: 221612 - DNA, 75 bp, synthetic construct
  source 1..75: mol_type = other DNA
acgttgccgatgtccatgacattgcaaaaagcagcaaagaagatctggaagcttatgacattctgctgctgggca

SEQ ID NO: 221613 - DNA, 75 bp, synthetic construct
  source 1..75: mol_type = other DNA
atgacattgcaaaaagcagcaaagaagatctggaagcttatgacattctgctgctgggcatcccaacttggtatt

SEQ ID NO: 221614 - DNA, 75 bp, synthetic construct
  source 1..75: mol_type = other DNA
tatgacgttcaggctcaactggggcaccgtagcagtcagtcttcacagcgttatgcacatcttcatcctcagcgc

SEQ ID NO: 221615 - DNA, 75 bp, synthetic construct
  source 1..75: mol_type = other DNA
gaattatctcgaccatgaaggtggcgcgttatcgaacccaacgccagagcactatctgccgttgttgtatgtctt

SEQ ID NO: 221616 - DNA, 75 bp, synthetic construct
  source 1..75: mol_type = other DNA
aacatcctgcaaaccccacaattcaccaaatacactttatggttcatgaccaatcaggtcgctcctgagtccggg

SEQ ID NO: 221617 - DNA, 75 bp, synthetic construct
  source 1..75: mol_type = other DNA
gctatataggatatgctgtattttattttacacgaaagagctttaacttcgtaatgcctgagatgctatctgatt

SEQ ID NO: 221618 - DNA, 75 bp, synthetic construct
  source 1..75: mol_type = other DNA
tggtcgctggcctgaggtggatgtcaccttagcccgtaagattgccatggaacataaacgctcacttgccaccgg

SEQ ID NO: 221619 - DNA, 75 bp, synthetic construct
  source 1..75: mol_type = other DNA
aagtttttgctccgctacctctaccatggaagaaaacgtgccatcgctattggtcgctggcctgaggtggatgtc

SEQ ID NO: 221620 - DNA, 75 bp, synthetic construct
  source 1..75: mol_type = other DNA
tgaaacacttaatggtctgaaaggtattggcggcaacgtatataacggaacattagggataatgtctttaatggc

SEQ ID NO: 221621 - DNA, 75 bp, synthetic construct
  source 1..75: mol_type = other DNA
tttttattccttaggtattcgcctggatgcctcaaccattgaaacacttaatggtctgaaaggtattggcggcaa

SEQ ID NO: 221622 - DNA, 75 bp, synthetic construct
  source 1..75: mol_type = other DNA
gtggtgaaggtgtcagcgtggccaccacagcagactgcaccatcggtgatgaaggcagcgcagaggtgacggtaa

SEQ ID NO: 221623 - DNA, 75 bp, synthetic construct
  source 1..75: mol_type = other DNA
cgaaccgattctgtttggtctgccgattatcatgaatccggtaatgtttatcccgttcgtgctggtgcaaccaat

SEQ ID NO: 221624 - DNA, 75 bp, synthetic construct
  source 1..75: mol_type = other DNA
tcatcgtaactgggtgattaaattacccgacagtgtaccgacatcggtttcgcgctccttctcggcattaattcc

SEQ ID NO: 221625 - DNA, 75 bp, synthetic construct
  source 1..75: mol_type = other DNA
accatgccaaccggtctgggagccttctttaacaccaacggtagcgtcgccgcattgctggtcgcactcttcaac

SEQ ID NO: 221626 - DNA, 75 bp, synthetic construct
  source 1..75: mol_type = other DNA
gcatctggtgcttctactggttttgttagtttattcgcatatcttggtgcgtccgcggctggctatccattgtct

SEQ ID NO: 221627 - DNA, 75 bp, synthetic construct
  source 1..75: mol_type = other DNA
gcaccggcgttggcggcgtaatggcgcgtactttgccgcgagatttatatgaacggacacagttgcgccatgcta

SEQ ID NO: 221628 - DNA, 75 bp, synthetic construct
  source 1..75: mol_type = other DNA
gggcgcggtccagagcgtgatgggcgcttatctgctgacctacggtgtctcacaactgttttacggtccgatttc

SEQ ID NO: 221629 - DNA, 75 bp, synthetic construct
  source 1..75: mol_type = other DNA
atgtatgtcgatgcctatgtaaacaaagcggatggtatgctggttgggccatacagtaattatggacctggcttt

SEQ ID NO: 221630 - DNA, 75 bp, synthetic construct
  source 1..75: mol_type = other DNA
ccgccggcgcgctggtcggcggcctgcaaaatatcggttccggcgtactggcctcgctctctgcaatgctgccac

SEQ ID NO: 221631 - DNA, 75 bp, synthetic construct
  source 1..75: mol_type = other DNA
ctgccgatcccggcagcattcttcggcgcatggtttgccggacgtccgaataaacgcttctcgacgttgatgtgg

SEQ ID NO: 221632 - DNA, 75 bp, synthetic construct
  source 1..75: mol_type = other DNA
tggcggtctggccgggattgccgcctttgaagcctgctccggcgtgctgatgggcgcggtgttagggctgagcag

SEQ ID NO: 221633 - DNA, 75 bp, synthetic construct
  source 1..75: mol_type = other DNA
aacggtgattgttgagggttcagccacagccccagatgatggcgaaaatgattacagcgtaacgtctacctctgc

SEQ ID NO: 221634 - DNA, 75 bp, synthetic construct
  source 1..75: mol_type = other DNA
atgaaatcgttatatgctgccactcgtgtcacccttgccgatccgctgcatctgatcctcggcgcacgttatacc

SEQ ID NO: 221635 - DNA, 75 bp, synthetic construct
  source 1..75: mol_type = other DNA
atggtttctatgctcttctcttaacgttatcacttattcttgttgtccttttactcattgcgatgaaactacaaa

SEQ ID NO: 221636 - DNA, 75 bp, synthetic construct
  source 1..75: mol_type = other DNA
aaagcggtggatgggacagtcagtaaaggggtggaatttgaactcaacggcgcaattaccgacaactggcagctg

SEQ ID NO: 221637 - DNA, 75 bp, synthetic construct
  source 1..75: mol_type = other DNA
ataatcagcatcaagccgcagccacgccgtcgctgctcgcagcctgcattgctctggccttatttccttcctcca

SEQ ID NO: 221638 - DNA, 75 bp, synthetic construct
  source 1..75: mol_type = other DNA
catcagtaaacactctttgcgttcatttttgcactgtgcagaatgtgtctttttggcaccttctggcagtgcaaa

SEQ ID NO: 221639 - DNA, 75 bp, synthetic construct
  source 1..75: mol_type = other DNA
cgtgatggccatcatcctgggtctgatttacggtcttggtgaagtattcaacatcttttctggtgttggtaaaaa

SEQ ID NO: 221640 - DNA, 75 bp, synthetic construct
  source 1..75: mol_type = other DNA
gtgttaaccgccctgctgttttgtatcgtcatcggcctgcctctggggatctggctggcgagaagcccacgggca

SEQ ID NO: 221641 - DNA, 75 bp, synthetic construct
  source 1..75: mol_type = other DNA
atggtggtcatcgcctcgatgattgccgtcggcgggctgggtcagatggtacttcgcggtatcggtcgtctggat

SEQ ID NO: 221642 - DNA, 75 bp, synthetic construct
  source 1..75: mol_type = other DNA
aaaaaggaaggcaaccatatgaaagtagccttgcttggggaagcctgggatatcgtccaacgacaacccaaaaaa

SEQ ID NO: 221643 - DNA, 75 bp, synthetic construct
  source 1..75: mol_type = other DNA
agtctgtgaggtctggagccagtgctgctacggctacttcaggtattaatcagtctgaagtgacttccgcgctgg

SEQ ID NO: 221644 - DNA, 75 bp, synthetic construct
  source 1..75: mol_type = other DNA
aaatgaaggtagctaactatctgaaaaatcaagaatcaaaacggaaaagccagaacatcaccaagacaggaactt

SEQ ID NO: 221645 - DNA, 75 bp, synthetic construct
  source 1..75: mol_type = other DNA
agacgctgatcccgctcgacagttgggtcactgaagggatcgactgggtcgtgactcattttcgcccggtcttcc

SEQ ID NO: 221646 - DNA, 75 bp, synthetic construct
  source 1..75: mol_type = other DNA
tatcctcgatcgcctgacacaggccgttgggcgcgacgcccgcagtcgcggcaaccgtcgctggtataccactgg

SEQ ID NO: 221647 - DNA, 75 bp, synthetic construct
  source 1..75: mol_type = other DNA
aaatccaaacgccgcagccgccgccctgtgagcgacgaactggatagactgctcgcagggcttgaggccagaagc

SEQ ID NO: 221648 - DNA, 75 bp, synthetic construct
  source 1..75: mol_type = other DNA
gtttgtttatctggtaccaatcgtcatgctgtttggtatcggtaacgtgccgggcgtagtggtgacgatcatctt

SEQ ID NO: 221649 - DNA, 75 bp, synthetic construct
  source 1..75: mol_type = other DNA
agggtgtgcgcgttccggtggattatatcctcaacggtttccagcaactgctgctggggatgcccgcgcctgtgg

SEQ ID NO: 221650 - DNA, 75 bp, synthetic construct
  source 1..75: mol_type = other DNA
tgattgccgtcggcgggctgggtcagatggtacttcgcggtatcggtcgtctggatatggggcttgccaccgttg

SEQ ID NO: 221651 - DNA, 75 bp, synthetic construct
  source 1..75: mol_type = other DNA
tctggctatccttatctttctcaggtgaataacgttgaccctcaggccatgatgatgatggtcaccctgttatcc

SEQ ID NO: 221652 - DNA, 75 bp, synthetic construct
  source 1..75: mol_type = other DNA
tgacagtggtatggcccccaccggcgatgcaccggccgcacaggatggacagtgtctgaccgccgcacgtgctgc

SEQ ID NO: 221653 - DNA, 75 bp, synthetic construct
  source 1..75: mol_type = other DNA
gcacaaaaacgggcgaccggatggcatcagctgtattccgctgacagtggtatggcccccaccggcgatgcaccg

SEQ ID NO: 221654 - DNA, 75 bp, synthetic construct
  source 1..75: mol_type = other DNA
cggaagaacaacacgttcaggccgctgaggcccgccgtaatctggccacagtacttaaacgcaacgcagaccggg

SEQ ID NO: 221655 - DNA, 75 bp, synthetic construct
  source 1..75: mol_type = other DNA
acaacggatctgcgtcaggggattgtgcggatccgctacagatatacgccggtaccaccgcttgaagatctggag

SEQ ID NO: 221656 - DNA, 75 bp, synthetic construct
  source 1..75: mol_type = other DNA
tgaccgctgctcgtgctgccatcgatgtcaataaccaggctttccgccagttcggttttggcggaaccccctggg

SEQ ID NO: 221657 - DNA, 75 bp, synthetic construct
  source 1..75: mol_type = other DNA
ccgaaacggtgcttgttgataccgttgatgcagaacgtcccggacatcacatcggcagaatgctctcagcgattg

SEQ ID NO: 221658 - DNA, 75 bp, synthetic construct
  source 1..75: mol_type = other DNA
agtattggttcggtcgattaaacacgttaactcacgaggatattgttggcgtattcaataacgtaccagcggatt

SEQ ID NO: 221659 - DNA, 75 bp, synthetic construct
  source 1..75: mol_type = other DNA
gcaattatgctaaacaatgaaactggtgaaagaatgttgtgcccaacatatgatcatgctgccagccttggccgt

SEQ ID NO: 221660 - DNA, 75 bp, synthetic construct
  source 1..75: mol_type = other DNA
gactgggtactcgccgacagtcgatgtatggatttgctgttgtgaccttagcattgctgtcgttaggcgcactgg

SEQ ID NO: 221661 - DNA, 75 bp, synthetic construct
  source 1..75: mol_type = other DNA
gcatggaggacgaacagttctccgtcaagcattacgaagcacgagtgaaagacggcgtagtacaactgcgcggtt

SEQ ID NO: 221662 - DNA, 75 bp, synthetic construct
  source 1..75: mol_type = other DNA
tgcggcaaagccagttcaatggcggatgtctttaaaaagtatctggcgcgcgggaaaaccggatacgttccgcca

SEQ ID NO: 221663 - DNA, 75 bp, synthetic construct
  source 1..75: mol_type = other DNA
caatattgcaacaaccagcataaataaaaatctggccagtgcacatatccgttactgtgacaaaaacatacatct

SEQ ID NO: 221664 - DNA, 75 bp, synthetic construct
  source 1..75: mol_type = other DNA
aagaaggcgcatgggaaacctactacagtaaactggcccaatatgaggattatctctctgctaaaaatgatgctg

SEQ ID NO: 221665 - DNA, 75 bp, synthetic construct
  source 1..75: mol_type = other DNA
gaccgtccggcgtggatggtatctacgcgttactcggtagatgaactgcgtaaaataatcgccgatgcggcctaa

SEQ ID NO: 221666 - DNA, 75 bp, synthetic construct
  source 1..75: mol_type = other DNA
cgattacattccagttccccgttgagcttgcagacaaggtaaaagctattgctgatgccctgccaaaagtagctg

SEQ ID NO: 221667 - DNA, 75 bp, synthetic construct
  source 1..75: mol_type = other DNA
tcagatgccattctgttcgcaaaaaatgactacaaattgctcccggaaagccagcaacaaatccaaactgtcaac

SEQ ID NO: 221668 - DNA, 75 bp, synthetic construct
  source 1..75: mol_type = other DNA
atggggtagatggagcgaaactcgccattgttcaggctgataaccccctggaatcaccggcagcacagtggatta

SEQ ID NO: 221669 - DNA, 75 bp, synthetic construct
  source 1..75: mol_type = other DNA
gctattcgtaacggagtaatgaaggtcactacaggccagcctggtagagcatggggcggtgaaccaggtattaaa

SEQ ID NO: 221670 - DNA, 75 bp, synthetic construct
  source 1..75: mol_type = other DNA
gtcagcgtaattcgttaccgtccgggcagatctcgccggaagcggctgtagcaggtacggcatcggactttatga

SEQ ID NO: 221671 - DNA, 75 bp, synthetic construct
  source 1..75: mol_type = other DNA
ctggttgagctgttagcgccgatcccggtgacgctggataaagaagcctggggctttgaccacggttcctggggc

SEQ ID NO: 221672 - DNA, 75 bp, synthetic construct
  source 1..75: mol_type = other DNA
gtgaaagcgaatctgacgtggcaaggggcggttgaggagcatccactagtgaactacctcgaccatgaaggtggg

SEQ ID NO: 221673 - DNA, 75 bp, synthetic construct
  source 1..75: mol_type = other DNA
aatagccctattgacgccttcaacatgctgtcaacggtgatccctcagcacgagtggatgcacatggggattatt

SEQ ID NO: 221674 - DNA, 75 bp, synthetic construct
  source 1..75: mol_type = other DNA
gtacctggataaaattgctcaactggaagttagctttaacgactggttacgcactcacccgcaggctgatcagat

SEQ ID NO: 221675 - DNA, 75 bp, synthetic construct
  source 1..75: mol_type = other DNA
gctggcacattacaacggaggggcgagcctgagcttccgttacccgttacctggaccacaaaacgggagaaacgg

SEQ ID NO: 221676 - DNA, 75 bp, synthetic construct
  source 1..75: mol_type = other DNA
tggttttctcttctctgatactggcaggttgccaggctccacaaggcaagtttaccccagagcaagtcgctgcta

SEQ ID NO: 221677 - DNA, 75 bp, synthetic construct
  source 1..75: mol_type = other DNA
gagctgaggcgttgtcagcgtcaccggagacagatatcccccgctcatggtggctgcgccttttacagcgaggac

SEQ ID NO: 221678 - DNA, 75 bp, synthetic construct
  source 1..75: mol_type = other DNA
acctggcctgctggaaagtggaccgtttcagcacagaagctcagttgacagtggatgacggacgggctggcggac

SEQ ID NO: 221679 - DNA, 75 bp, synthetic construct
  source 1..75: mol_type = other DNA
gtcggttcaaaactactggaatcaatgaggatgaagttcatctcggctcgcaaaatatcatgtgagaaaactggt

SEQ ID NO: 221680 - DNA, 75 bp, synthetic construct
  source 1..75: mol_type = other DNA
tatttatcacacagaccaggcgttccggtctgcctgtcgggaaattcacaacctggcagaaccgttgtcccggca

SEQ ID NO: 221681 - DNA, 75 bp, synthetic construct
  source 1..75: mol_type = other DNA
cacagcttcacaatgtggcccagagtgtttatcacacggaccaggcgttccggtctgcctgtcgggaaattcaca

SEQ ID NO: 221682 - DNA, 75 bp, synthetic construct
  source 1..75: mol_type = other DNA
atgaccgtttcactgctggcccgtgtgcaggcaaatgttccggcctgggcacatgaacaactggctgcatgggat

SEQ ID NO: 221683 - DNA, 75 bp, synthetic construct
  source 1..75: mol_type = other DNA
gaaaattgagggtgaatggcgcgcgttgctagtgactgaagatatggcggggtttgtcagtattgctgactggta

SEQ ID NO: 221684 - DNA, 75 bp, synthetic construct
  source 1..75: mol_type = other DNA
tattctgacgaagtacggcaagccatgttgaaagcagtggcgctggcgtttaagaaaatgcatagcgttaatcgt

SEQ ID NO: 221685 - DNA, 75 bp, synthetic construct
  source 1..75: mol_type = other DNA
tgccccggtggctgaagcgattctcagggagagtgtcaacgccaagattattggccgtttttcgccatttttaat

SEQ ID NO: 221686 - DNA, 75 bp, synthetic construct
  source 1..75: mol_type = other DNA
taaagctttccttgtcgttcctatggtcggtgcctttattgttgatatttcaaacagtatcttaattaaaatatt

SEQ ID NO: 221687 - DNA, 75 bp, synthetic construct
  source 1..75: mol_type = other DNA
agcgagagcgtgatgcctctcttcgcgacctttggcgcacaccgcagtggttgtttgtcgccatccaacgttaca

SEQ ID NO: 221688 - DNA, 75 bp, synthetic construct
  source 1..75: mol_type = other DNA
gacgagagtgatgccgacactaatgcaagcgcatcagatgatggtgacggtgccgaacaaccgtcaatcgcgagc

SEQ ID NO: 221689 - DNA, 75 bp, synthetic construct
  source 1..75: mol_type = other DNA
aagccgtgattaatgcgtcaacgtgggaatggttgcgtccgggggatattgatattcagccatttccccgggagg

SEQ ID NO: 221690 - DNA, 75 bp, synthetic construct
  source 1..75: mol_type = other DNA
gtgaatacttacgacatcacaatgccctggcccccgagcaataaccgctagtaccgccataatcgcgggcgcact

SEQ ID NO: 221691 - DNA, 75 bp, synthetic construct
  source 1..75: mol_type = other DNA
gtgaatacttacgacatcacaattccctggcccccgagcaataaccgctagtaccgccataatcgcgggcgcaca

SEQ ID NO: 221692 - DNA, 75 bp, synthetic construct
  source 1..75: mol_type = other DNA
gtgaatacttactacatcacaataccctggcccccgagcaataaccgctagtaccgccataatcgcgggcgcacc

SEQ ID NO: 221693 - DNA, 75 bp, synthetic construct
  source 1..75: mol_type = other DNA
ctaccgccataatcgcgggcgcacgcacatcagcgcagaagggcaggcataccgcgataacgtcgcccgaatcat

SEQ ID NO: 221694 - DNA, 75 bp, synthetic construct
  source 1..75: mol_type = other DNA
gcaggttgactactacagcgtgaagagaatgcctgtcgtcaaaggtgggcggcttgagctaaccattactgaaat

SEQ ID NO: 221695 - DNA, 75 bp, synthetic construct
  source 1..75: mol_type = other DNA
atggaatatctggatgagcgtttcccgcatccgccgttgatgcctgtttacccggtagctcgtggtgaaagccgt

SEQ ID NO: 221696 - DNA, 75 bp, synthetic construct
  source 1..75: mol_type = other DNA
actgctggcggcgctgtttgtttgcctgaaggcggcgaacgtgacgtcaatacgtactgaaccgacctacacgct

SEQ ID NO: 221697 - DNA, 75 bp, synthetic construct
  source 1..75: mol_type = other DNA
gctgaatttagtgcccggtgagcaggtttattacataaagagactgcgattcattgaggataatgcggcacaatt

SEQ ID NO: 221698 - DNA, 75 bp, synthetic construct
  source 1..75: mol_type = other DNA
accaaagtgaccagtaccaacagctacgtgaagctgactatcaatggtgaggtgctctatgaagtggaccttatc

SEQ ID NO: 221699 - DNA, 75 bp, synthetic construct
  source 1..75: mol_type = other DNA
taccgcgttgtgaagatgcccgttaccaaaggtggaaagctggagctgaccatcactgaactgggagatgaatga

SEQ ID NO: 221700 - DNA, 75 bp, synthetic construct
  source 1..75: mol_type = other DNA
gggtaggggtaggaatagtaatcattggtgtgattttactagaggtaatgcccgaacataaaaaaacgcccagga

SEQ ID NO: 221701 - DNA, 75 bp, synthetic construct
  source 1..75: mol_type = other DNA
ggtggcggatattacgctggacccgaaaacctatctgccgcgcgtaacgctggaaattgaacaacgttataacca

SEQ ID NO: 221702 - DNA, 75 bp, synthetic construct
  source 1..75: mol_type = other DNA
accgcgataacgtcgcccgaatcattaaaaacgcaatgctggatatcggcctggctatgcctgtgaaaatccgca

SEQ ID NO: 221703 - DNA, 75 bp, synthetic construct
  source 1..75: mol_type = other DNA
cacacaaaccgtctttatgtacacctggcttagcatggcgtttatcatcgcccttccggcgttcatctttgccag

SEQ ID NO: 221704 - DNA, 75 bp, synthetic construct
  source 1..75: mol_type = other DNA
ctggtggagtacgcgtcgtggcactggatctttttgatcaacattccggtggggattatcggtgcgatcgccaca

SEQ ID NO: 221705 - DNA, 75 bp, synthetic construct
  source 1..75: mol_type = other DNA
ctgatgatgatcccgatggtgcttggcagcatggggatgaagcgaattgtggtacaggtggtgaatcgctttggt

SEQ ID NO: 221706 - DNA, 75 bp, synthetic construct
  source 1..75: mol_type = other DNA
gcggcgcttcgatctctcaggttttttattgctggcggttggcatggcggtattaaccctggcgctggatggcag

SEQ ID NO: 221707 - DNA, 75 bp, synthetic construct
  source 1..75: mol_type = other DNA
catcgcccttccggcgtttgtctttgccagagtgccaaacgatacgcatcaaaatgtcgctatttcgcgacgaaa

SEQ ID NO: 221708 - DNA, 75 bp, synthetic construct
  source 1..75: mol_type = other DNA
tttgatcaacattccggtagggattatcggtgcgatcgccacgctgatgttaatgccaaactacaccatgcagac

SEQ ID NO: 221709 - DNA, 75 bp, synthetic construct
  source 1..75: mol_type = other DNA
cgatacaacagctcggcgtcaatggcactctgttagaagatcgcaatcttagctataacgttcaggaagggtatt

SEQ ID NO: 221710 - DNA, 75 bp, synthetic construct
  source 1..75: mol_type = other DNA
ggcgttccagccctattacttgattacagtttcagcggtagcaacaactcgtatgatgtaaaaaactatcatagc

SEQ ID NO: 221711 - DNA, 75 bp, synthetic construct
  source 1..75: mol_type = other DNA
ggtagtgtggttacaaagcccgtgctggtaaaaggcgtgtatgccggtaatccagccagacttttgagaacgctt

SEQ ID NO: 221712 - DNA, 75 bp, synthetic construct
  source 1..75: mol_type = other DNA
cgcgctttccggcacgctgaacgaactgttgctggcacgcgcgttacagggcgttggcggcgcgatgatggtgcc

SEQ ID NO: 221713 - DNA, 75 bp, synthetic construct
  source 1..75: mol_type = other DNA
ctattggttggtttatgcatgttaagaaaacgaactcattaaaggtcagtgatttatgtcgtggatgcctgggga

SEQ ID NO: 221714 - DNA, 75 bp, synthetic construct
  source 1..75: mol_type = other DNA
catgtttggtttgctcggcggcgcggtaacgtctctggcgctgggaacgccgatgatttctgccgtattttgcca

SEQ ID NO: 221715 - DNA, 75 bp, synthetic construct
  source 1..75: mol_type = other DNA
tacttaaatctgaaattaatggtaatacatggcatgtcggcgatttgttaccatcagaagctgagttgtcacttc

SEQ ID NO: 221716 - DNA, 75 bp, synthetic construct
  source 1..75: mol_type = other DNA
tctgagccgtaaggtgaaaccgaccgcgttcaaacgtgatgtgctggctgccgctgacaaaacactggttcgcca

SEQ ID NO: 221717 - DNA, 75 bp, synthetic construct
  source 1..75: mol_type = other DNA
cattcagcttatcgaagatggcctgcgcgaagtgtcgtgcggctatgacgcggagtacgagcagaccgagccagg

SEQ ID NO: 221718 - DNA, 75 bp, synthetic construct
  source 1..75: mol_type = other DNA
tacttaaatccgagatcaatggcaattcatggcatgttggtgatttgttgccgtcagaagcggaactcgctgttc

SEQ ID NO: 221719 - DNA, 75 bp, synthetic construct
  source 1..75: mol_type = other DNA
tgattctgtttttctgctcgtcaggttttaccaccggattttttattgcacgcgcctggttgctgcgcaagtatt

SEQ ID NO: 221720 - DNA, 75 bp, synthetic construct
  source 1..75: mol_type = other DNA
ctgtatgggtatatatcgtgtttgttgttctgctgtatttaagtatcagggcatgtttttcacatgaagtgaaca

SEQ ID NO: 221721 - DNA, 75 bp, synthetic construct
  source 1..75: mol_type = other DNA
atgacctcaaaacattactgaaagccctgttggctaagctggaaggaaatgcgacgggcgataacgacaataagc

SEQ ID NO: 221722 - DNA, 75 bp, synthetic construct
  source 1..75: mol_type = other DNA
ggtcacgggcacgccgccagcgatattattcacttcaccgattatgtggtggaacgaggcagcgacaaccatatc

SEQ ID NO: 221723 - DNA, 75 bp, synthetic construct
  source 1..75: mol_type = other DNA
tattaattactggcggaggtcgtcgcatcggcctcgccctcgcctggcatttcattaatcaaaagcaaccggtga

SEQ ID NO: 221724 - DNA, 75 bp, synthetic construct
  source 1..75: mol_type = other DNA
gagatagtcgtaacgcgctctcctgatcaggtattccatccggccacgctcgcctcattcgaagggatgagcatc

SEQ ID NO: 221725 - DNA, 75 bp, synthetic construct
  source 1..75: mol_type = other DNA
gaaaacgggaatgtgcggctggtcaaccccgagaactggaaagagcttgcggtcgggcatcttcagaacgttcgg

SEQ ID NO: 221726 - DNA, 75 bp, synthetic construct
  source 1..75: mol_type = other DNA
ctgctgacaaaacgctggttcgccagatagtcggtgatgcggatatccgcaaattaccgaaacaatcggtcgaca

SEQ ID NO: 221727 - DNA, 75 bp, synthetic construct
  source 1..75: mol_type = other DNA
caggatgcttctcctactattgcgactgagctgaatttagtgactggtgagcaggtttattacataaagagactg

SEQ ID NO: 221728 - DNA, 75 bp, synthetic construct
  source 1..75: mol_type = other DNA
atttttgtggtatttgcatttcccagagtgatgattggcgcacactggtttaccgatatcattgtcggttccctg

SEQ ID NO: 221729 - DNA, 75 bp, synthetic construct
  source 1..75: mol_type = other DNA
tgttgttgaatattgtcggcctcgcgctgtttctttcctggtatattcccgttaatcatggattctggttgccga

SEQ ID NO: 221730 - DNA, 75 bp, synthetic construct
  source 1..75: mol_type = other DNA
gataaggcgcgccagcttttcgatatggcttctcaggtctgcgaaattgtcgacggtgttcggcagtgtctgcag

SEQ ID NO: 221731 - DNA, 75 bp, synthetic construct
  source 1..75: mol_type = other DNA
ccgtcgaatggtctgtcggcggcctgcctgatgtggcgctgtgggcgcagtatgccgcgccgggtgctgacgccg

SEQ ID NO: 221732 - DNA, 75 bp, synthetic construct
  source 1..75: mol_type = other DNA
atgctgagtttctggctgaaagaaaatgcccctggcagacgacgtatcgtaattattggtctggtcatgctgtta

SEQ ID NO: 221733 - DNA, 75 bp, synthetic construct
  source 1..75: mol_type = other DNA
ccaacaatcgcgctttcgacggttgttcactgctggcgatgggaatgttgatgctgagtttctggctgaaagaaa

SEQ ID NO: 221734 - DNA, 75 bp, synthetic construct
  source 1..75: mol_type = other DNA
ctgttgcgtgatcagttcgcctgggatttgagactggggcttgcaccggacgagattagcggaatgcgtctgggg

SEQ ID NO: 221735 - DNA, 75 bp, synthetic construct
  source 1..75: mol_type = other DNA
catcgcctggaccgaccgacttccggcgtgttactgatgggattgtccagcgaggccgggcggttgctggcgcaa

SEQ ID NO: 221736 - DNA, 75 bp, synthetic construct
  source 1..75: mol_type = other DNA
ctggctaatggaagaagcggtgctggattatccactggtggaagaactggacaaaatcgctgataaatttgcccg

SEQ ID NO: 221737 - DNA, 75 bp, synthetic construct
  source 1..75: mol_type = other DNA
atggcaggagaaaatgggtcagcacgcccttatatagcgacaaaaccgccgttatcggcggatgtgcgcaactgc

SEQ ID NO: 221738 - DNA, 75 bp, synthetic construct
  source 1..75: mol_type = other DNA
atgacgcgtcagcactggacccacaggacgccacgtaaagccgcgcgctgtgttctgactctgtttctggtgatg

SEQ ID NO: 221739 - DNA, 75 bp, synthetic construct
  source 1..75: mol_type = other DNA
gagcgacttaatatctgccacagtaaactgctggcatatgccggcattcttgccggaacagggcgctcgccggaa

SEQ ID NO: 221740 - DNA, 75 bp, synthetic construct
  source 1..75: mol_type = other DNA
attaatggcgcggtagcaaagccaataacgctgaccgtaccgattgggatctcgttacgtgaagtgctggcgctg

SEQ ID NO: 221741 - DNA, 75 bp, synthetic construct
  source 1..75: mol_type = other DNA
gaaagaaaaataccaacaagcaatcgccgcattaacgccatttctaccttccactatcaggctgcatatattacc

SEQ ID NO: 221742 - DNA, 75 bp, synthetic construct
  source 1..75: mol_type = other DNA
atgacttcgcctcccgtatctggaaaggtgtacatggcttcacaactgactgatgcatttgcgcgtaagttttac

SEQ ID NO: 221743 - DNA, 75 bp, synthetic construct
  source 1..75: mol_type = other DNA
atgaacgaattaaccatttgatgaatcagagaaaaagtgagctggcagacgttgaaagctatatcacgaccaagg

SEQ ID NO: 221744 - DNA, 75 bp, synthetic construct
  source 1..75: mol_type = other DNA
atgacgcctttgctcgaattaaaggatattcgtcgcagctatcctgccggtgatgagcaggttgaggtgttgaag

SEQ ID NO: 221745 - DNA, 75 bp, synthetic construct
  source 1..75: mol_type = other DNA
ggtaagaccccgcgagcaggttgtttgaaagcttattcaccagagccagataatgattattggacttgtccaagg

SEQ ID NO: 221746 - DNA, 75 bp, synthetic construct
  source 1..75: mol_type = other DNA
ccattaccgggcaggataaattcaaccaggtcatggcagggatcgatgctgcatttgaggccggttttgagaagg

SEQ ID NO: 221747 - DNA, 75 bp, synthetic construct
  source 1..75: mol_type = other DNA
acctttctgaactggatccagcatcgccccatccagctgcgtttcatcgaactgatggaaacgggcgagggcagc

SEQ ID NO: 221748 - DNA, 75 bp, synthetic construct
  source 1..75: mol_type = other DNA
ttcagtatgcggagcgggccgcagagaaactacgtggggagcgtcagtattgccagcacaggacagccgggacat

SEQ ID NO: 221749 - DNA, 75 bp, synthetic construct
  source 1..75: mol_type = other DNA
ttacgccgcgactttaccgatatcatcgccgctgtgcgagaaaacgacgctatccgccagattgcggtcaccacc

SEQ ID NO: 221750 - DNA, 75 bp, synthetic construct
  source 1..75: mol_type = other DNA
caataaaggcttcctgaccgtcgatgaaattcgtcgggttacgcgtgccttcgccagtctgggtactgaaaaagt

SEQ ID NO: 221751 - DNA, 75 bp, synthetic construct
  source 1..75: mol_type = other DNA
cgtatttcagcggcgctgcgggagaagaaacagacccatttcctgcatcaaaacaacaccggtattacgcaaaac

SEQ ID NO: 221752 - DNA, 75 bp, synthetic construct
  source 1..75: mol_type = other DNA
aacggttaggtattacggctgaaacgttgaattctacaaacagggaagaatggcagcgcattagcgataagttgc

SEQ ID NO: 221753 - DNA, 75 bp, synthetic construct
  source 1..75: mol_type = other DNA
accggccatcctttgttgtatccggtgatgacgggaaaatcaccatatcagaaaatggaaaagtaacactgccat

SEQ ID NO: 221754 - DNA, 75 bp, synthetic construct
  source 1..75: mol_type = other DNA
aataaccatctcagaaaatggaaaagtaacaccgccatcgcaccagcatagtgaggagctcattgaatttgccat

SEQ ID NO: 221755 - DNA, 75 bp, synthetic construct
  source 1..75: mol_type = other DNA
tgggagtgtaaccggccatcctttgttgtatccggtgatgctgggaaaataaccatctcagaaaatggaaaagta

SEQ ID NO: 221756 - DNA, 75 bp, synthetic construct
  source 1..75: mol_type = other DNA
atgccgtttccagttccgggcgttgctgaaaacacagaacgccagctacgtgatatcgctaacgccctgccggga

SEQ ID NO: 221757 - DNA, 75 bp, synthetic construct
  source 1..75: mol_type = other DNA
aaagtatccaacagtgcgttggcgcaaattcttgaatctgcacagcaggatggcaatgaaatcatggtgtttgtt

SEQ ID NO: 221758 - DNA, 75 bp, synthetic construct
  source 1..75: mol_type = other DNA
agtttgacaacccgccctttaaaaaagtgccggcttactggtttcatccaggactgacttatcttaaaggacgta

SEQ ID NO: 221759 - DNA, 75 bp, synthetic construct
  source 1..75: mol_type = other DNA
gaaggcggtggatttattcccctgaaaattggcataaacaatgatatttcggcatttctggcagaacacccggag

SEQ ID NO: 221760 - DNA, 75 bp, synthetic construct
  source 1..75: mol_type = other DNA
ctgaagcacagagtgccggtcgcagactggtgacattagaacaaaagttgctcaggatgcaggcacagcaggaga

SEQ ID NO: 221761 - DNA, 75 bp, synthetic construct
  source 1..75: mol_type = other DNA
aaacggggcgcttcagtgatgaactggtggaggcatgtgcggaaatggttcgccaacgctggaatccgcatcctg

SEQ ID NO: 221762 - DNA, 75 bp, synthetic construct
  source 1..75: mol_type = other DNA
gccagacgctggctggcagtaagggaaaaacaaaagctaaagatgaaaaccatgcaggaacagaccgcgtcaacc

SEQ ID NO: 221763 - DNA, 75 bp, synthetic construct
  source 1..75: mol_type = other DNA
gcccccattcatgccagtattgatggcacgatcagtgatgtgacagaaaacgctattacggttgtgagaggttaa

SEQ ID NO: 221764 - DNA, 75 bp, synthetic construct
  source 1..75: mol_type = other DNA
aaagagtgacattattactacgccagcacatcggcaccagcgcaattgcgtgtgtacaaaaaggtgatcgtgttg

SEQ ID NO: 221765 - DNA, 75 bp, synthetic construct
  source 1..75: mol_type = other DNA
cgatctacagcggtattctggcgggcgctggttggcaatgggtaaatctcgcctggctggctggcggcctgtggt

SEQ ID NO: 221766 - DNA, 75 bp, synthetic construct
  source 1..75: mol_type = other DNA
aggcttggaagtgcatccgttggctggcgggcatctgccatcgatgagtggctgacgttacatatggcaccagcc

SEQ ID NO: 221767 - DNA, 75 bp, synthetic construct
  source 1..75: mol_type = other DNA
agaaggtaaagcctgcctgcgtgcgaaaatcgacatggcttcgccgtttatcgtgatgcgcgacccggtgctgta

SEQ ID NO: 221768 - DNA, 75 bp, synthetic construct
  source 1..75: mol_type = other DNA
cggttataaaattctctgtaaacctttgctttctggtaactatgaaattaccgaacttgatccggtgaatgaccc

SEQ ID NO: 221769 - DNA, 75 bp, synthetic construct
  source 1..75: mol_type = other DNA
ctctggagcgtttgcgggtggtgtgttggccttggcaaggggcggtggcactgaaagaacagcacccggaaatga

SEQ ID NO: 221770 - DNA, 75 bp, synthetic construct
  source 1..75: mol_type = other DNA
gcccggaggtggtgagcgggcatacggacgttatctattccacctcagtctgccacattctggctgtacgaaaaa

SEQ ID NO: 221771 - DNA, 75 bp, synthetic construct
  source 1..75: mol_type = other DNA
tctttaccctaccgcaaacagcggtgacctcacggtcattattaaagaagcggatggcagcgaacaacgctttat

SEQ ID NO: 221772 - DNA, 75 bp, synthetic construct
  source 1..75: mol_type = other DNA
cccccgttttcctacagattggcctcggcttttcgccgtttcacgccggattgatgatgatcccgatggtgctcg

SEQ ID NO: 221773 - DNA, 75 bp, synthetic construct
  source 1..75: mol_type = other DNA
attgtaccgcgcgagcaatatatggcggcgatgacctttgttacgctgcccggtcaggtcggcccactattgggt

SEQ ID NO: 221774 - DNA, 75 bp, synthetic construct
  source 1..75: mol_type = other DNA
aagtgcgtctgcgtaatgcttacgtgattaaagcggaacgtgtggagaaagatgccgaaggcaatatcaccacca

SEQ ID NO: 221775 - DNA, 75 bp, synthetic construct
  source 1..75: mol_type = other DNA
agtgtggttacaaagcccgtgctggtaaaaggcgtgtatgccggtaatccagccagacttttgagaacgctttaa

SEQ ID NO: 221776 - DNA, 75 bp, synthetic construct
  source 1..75: mol_type = other DNA
ccaatcaacaggttggggtcagcggcacgctgcttgaggatcgcaacctgagctacagtgtccaggaaggctacg

SEQ ID NO: 221777 - DNA, 75 bp, synthetic construct
  source 1..75: mol_type = other DNA
gtaccgcaggcgaaatcggcgctctgctccttgaagcgcgattaatcaaagaacaacagccgctgtttaataaac

SEQ ID NO: 221778 - DNA, 75 bp, synthetic construct
  source 1..75: mol_type = other DNA
tcggccattgagtgatgatttagaatcgctctatgctcgctatccggggaacacgctgacgacacaaatcggttg

SEQ ID NO: 221779 - DNA, 75 bp, synthetic construct
  source 1..75: mol_type = other DNA
aaacagtagatataatatggcgactggcagttagtgatggagggataaaaggaagtaatcctaagttatccccag

SEQ ID NO: 221780 - DNA, 75 bp, synthetic construct
  source 1..75: mol_type = other DNA
tgggcgcggtattagggctgagcagtatgacggtcagtattttgtttattctgccgattccggcggcattttttg

SEQ ID NO: 221781 - DNA, 75 bp, synthetic construct
  source 1..75: mol_type = other DNA
aaccgttgcatctctccggaggtttttggtcatcagctcagggaacaggtaaagagctggacaggactcaccatg

SEQ ID NO: 221782 - DNA, 75 bp, synthetic construct
  source 1..75: mol_type = other DNA
gcgaaatccgcaggttacggctaatcaggacctgatattcacggtagtgaccagcccggattctgcgaaggctaa

SEQ ID NO: 221783 - DNA, 75 bp, synthetic construct
  source 1..75: mol_type = other DNA
cgtatctccttcaaccagaatacgtcggcatggagcggcttcaccggcagtgatggcacgataacgttcaacgtt

SEQ ID NO: 221784 - DNA, 75 bp, synthetic construct
  source 1..75: mol_type = other DNA
ggcgaaagtctggcgattgtttctgcaccgggcgcgcgtggtggacatgtggttaacagcagcggcgtagaagtt

SEQ ID NO: 221785 - DNA, 75 bp, synthetic construct
  source 1..75: mol_type = other DNA
cagtcttatcgtttcctctattcgaaaagttttgagggtggtaccgacctgcgtctgttgggctacaagtactca

SEQ ID NO: 221786 - DNA, 75 bp, synthetic construct
  source 1..75: mol_type = other DNA
atgcattggatgcatttacctctctatcactacagagcgcatttttccttctctctgctggcattaacgattgcc

SEQ ID NO: 221787 - DNA, 75 bp, synthetic construct
  source 1..75: mol_type = other DNA
acgccggtgccgccactcgaacacctgaccttacgccagcgcattactgataaatatctggcgaatcttatctcg

SEQ ID NO: 221788 - DNA, 75 bp, synthetic construct
  source 1..75: mol_type = other DNA
atgggatagtgctcatgaaatggggcataaagtactcgatgaatatggagagggttctagccctgattattcgtg

SEQ ID NO: 221789 - DNA, 75 bp, synthetic construct
  source 1..75: mol_type = other DNA
tataatatggcgactggcagttagtgatggagggataaaaggaagtaatcctaagttatccccagttccttataa

SEQ ID NO: 221790 - DNA, 75 bp, synthetic construct
  source 1..75: mol_type = other DNA
gcatagtgctttcaatagtctctgtaaatcctacagccgccagttcattgcaatgcaataaggataactttgatg

SEQ ID NO: 221791 - DNA, 75 bp, synthetic construct
  source 1..75: mol_type = other DNA
gaggattatatccgtggccagacagtcatcgaggccaaactggacgcgctctacaacaaactggaagtggtacag

SEQ ID NO: 221792 - DNA, 75 bp, synthetic construct
  source 1..75: mol_type = other DNA
agtttaaacgcgaatccgctcaactggtggttgaccagacatacacagtggcagatgccgccaaagctatggatg

SEQ ID NO: 221793 - DNA, 75 bp, synthetic construct
  source 1..75: mol_type = other DNA
gttatctgggtaaaccgtatgacttcagtttttcgtggagcgacgatcgccagtactgttcagaagtggtgtgga

SEQ ID NO: 221794 - DNA, 75 bp, synthetic construct
  source 1..75: mol_type = other DNA
tacaatacaccctgaaaaaagattctggtgaggagtttcatcagatcatgcatgaagtcagtgttccacttcata

SEQ ID NO: 221795 - DNA, 75 bp, synthetic construct
  source 1..75: mol_type = other DNA
tcttcagcgtctgatatttcatccgcagccgtaaattcatgtactagcgatgtagaaaatttcaataagcatttg

SEQ ID NO: 221796 - DNA, 75 bp, synthetic construct
  source 1..75: mol_type = other DNA
tggataccctggaaaataacggcgtgggctgcattgcctttactcctctggctcagggactgctgactggaaaat

SEQ ID NO: 221797 - DNA, 75 bp, synthetic construct
  source 1..75: mol_type = other DNA
gggatgtatcgcctttacccctctggcccagggattgctgaccggaaaatatctcaacggtattccagaagattc

SEQ ID NO: 221798 - DNA, 75 bp, synthetic construct
  source 1..75: mol_type = other DNA
tctgcgctggctcatgcggtacaaagcggtaaggcgctgtatgtcgggatctcctcttactcgccagagcggacg

SEQ ID NO: 221799 - DNA, 75 bp, synthetic construct
  source 1..75: mol_type = other DNA
agtttaaacgcgaatccgctcaactggtcgttgaccagagatacacagtggcagatgccgccaaagctatggatg

SEQ ID NO: 221800 - DNA, 75 bp, synthetic construct
  source 1..75: mol_type = other DNA
agtttaaacgcgaatccgctcaactggttgttgaccagatatacacggtggcagatgccgccaaagctatggatg

SEQ ID NO: 221801 - DNA, 75 bp, synthetic construct
  source 1..75: mol_type = other DNA
agtttaaacgcgaatccgctcaactggttgttgaccagaaatacactgtggcagatgccgccaaagctatggatg

SEQ ID NO: 221802 - DNA, 75 bp, synthetic construct
  source 1..75: mol_type = other DNA
gcaaatacatcgttcgccgcgttgaaggcggactgaataccgaacaacagcaaaaactggcgcaaacggcgaaac

SEQ ID NO: 221803 - DNA, 75 bp, synthetic construct
  source 1..75: mol_type = other DNA
gacagggccgacttttcggcctttatggacagtactggctattatgatgacgagtcgatgcaggatgatattctt

SEQ ID NO: 221804 - DNA, 75 bp, synthetic construct
  source 1..75: mol_type = other DNA
gacagggccgacttttcggcctttatggatagcaatggctattatgatgacgagtcgatgcaggatgatattctt

SEQ ID NO: 221805 - DNA, 75 bp, synthetic construct
  source 1..75: mol_type = other DNA
tatcattagtgatgtgaaaacaccgtcaatattcgataaatatgcggttgttgttgagcatcaacttcgcggttg

SEQ ID NO: 221806 - DNA, 75 bp, synthetic construct
  source 1..75: mol_type = other DNA
tcctcaactccagcaccttcaaagcaggtatgagcgcctgtatttgtatcctgggtgttgcgtggctgggcgata

SEQ ID NO: 221807 - DNA, 75 bp, synthetic construct
  source 1..75: mol_type = other DNA
agtagcgaaggaacaaggcgttaaaccttgccgtccactgtctactgcggtagtttccgcgcagattgcgatcac

SEQ ID NO: 221808 - DNA, 75 bp, synthetic construct
  source 1..75: mol_type = other DNA
gacagggccgacttttcggcctttatggagagaattggctattatgatgacgagtcgatgcaggatgatattctt

SEQ ID NO: 221809 - DNA, 75 bp, synthetic construct
  source 1..75: mol_type = other DNA
aagaagctaccacgcctggactgtatctgccgacagttgccaacaactttatcagcgcaatggcctgtggtgcgt

SEQ ID NO: 221810 - DNA, 75 bp, synthetic construct
  source 1..75: mol_type = other DNA
atcagcgcaatggcctgtggtgcgttgggctacaccgacgccggtctggtgtttttaggcgcaggcgttttctca

SEQ ID NO: 221811 - DNA, 75 bp, synthetic construct
  source 1..75: mol_type = other DNA
atctggggattgttaactagcgcatttattacccgactcatacgctttccgcatagcgtgctggcagaagtgcgc

SEQ ID NO: 221812 - DNA, 75 bp, synthetic construct
  source 1..75: mol_type = other DNA
cgttatccagggcgtatcgagacgatgttcagcgcgatgcagaatgtggtgccgtcgcatctgtgcgataccaac

SEQ ID NO: 221813 - DNA, 75 bp, synthetic construct
  source 1..75: mol_type = other DNA
tcccgctacaacctgctggctggcagcctgaagaagatgaccatcagctggatgagttacggctgaatgtggttg

SEQ ID NO: 221814 - DNA, 75 bp, synthetic construct
  source 1..75: mol_type = other DNA
tgggctggtgattctggcgatgatcatctggggattattaactagcgcatttattacccgactcatacgctttcc

SEQ ID NO: 221815 - DNA, 75 bp, synthetic construct
  source 1..75: mol_type = other DNA
ctggcggtcagcgtggctattccgggatggcagtttctgacacagccatcaccggaggagcagcattttacctag

SEQ ID NO: 221816 - DNA, 75 bp, synthetic construct
  source 1..75: mol_type = other DNA
aattcctgcgcaccgagaaaaccgaatttaaccatatcgatgaaatcatccgccgcatcgcgctggcacgttttg

SEQ ID NO: 221817 - DNA, 75 bp, synthetic construct
  source 1..75: mol_type = other DNA
atgcccgttactgttcacgacaccatcgtttgcaatgatcgacacgccatccgtgaaggtcggcttttctcctga

SEQ ID NO: 221818 - DNA, 75 bp, synthetic construct
  source 1..75: mol_type = other DNA
aaaaatcattaattactgtttttttgagtggtattcttgctgttcttggatattttgttgcattgaacggagtgt

SEQ ID NO: 221819 - DNA, 75 bp, synthetic construct
  source 1..75: mol_type = other DNA
gggcctgaatgcgttcttcgcttttgtcgttgtacaggcgatgggcttgccgtggcaggtcgggatgggcgcaat

SEQ ID NO: 221820 - DNA, 75 bp, synthetic construct
  source 1..75: mol_type = other DNA
cctgcacttgcggcgaacagtcagagttttggtcgggtactgactatcgtccattccgactgtgcgttgctggag

SEQ ID NO: 221821 - DNA, 75 bp, synthetic construct
  source 1..75: mol_type = other DNA
aacggcttacgcttcagaaacgcaaaaagtgaccaaagagaaacctgcacatctggcgcaatccattcgcgttgc

SEQ ID NO: 221822 - DNA, 75 bp, synthetic construct
  source 1..75: mol_type = other DNA
atgaagatgctgatggcgtagcgctgacttttgaattgacgcaaagcgaagagacgaaaaaattctggccgcacg

SEQ ID NO: 221823 - DNA, 75 bp, synthetic construct
  source 1..75: mol_type = other DNA
cttaaaatccatgattcagagatattttaaagaaccactattgcagttaacaggcgaattgggtcgcccggctta

SEQ ID NO: 221824 - DNA, 75 bp, synthetic construct
  source 1..75: mol_type = other DNA
cgtgggtaaagtctgtgaaatcgatcttgaagcacatggcgaatttgaaactacctcagccctgcatacctattt

SEQ ID NO: 221825 - DNA, 75 bp, synthetic construct
  source 1..75: mol_type = other DNA
ctgccgtggacgctgaaatcgcataatgaagataccaatggtgtggcactgacgtttgaactgacacaaagcgaa

SEQ ID NO: 221826 - DNA, 75 bp, synthetic construct
  source 1..75: mol_type = other DNA
gttataaaacctttgtctgcgtagaaaccgcttacgcctctgagacacaaaaaacgaccaaagagcaaccttcac

SEQ ID NO: 221827 - DNA, 75 bp, synthetic construct
  source 1..75: mol_type = other DNA
ccgtaaccagcaaggatgagaattttcatcctgaagtaccatatctgagaaaaacccttggacataagttcaaag

SEQ ID NO: 221828 - DNA, 75 bp, synthetic construct
  source 1..75: mol_type = other DNA
atggtctggttagcgaatcccgaacgttacgggcagatgcaataccgctattgcggaaaaagcggtttacgcctg

SEQ ID NO: 221829 - DNA, 75 bp, synthetic construct
  source 1..75: mol_type = other DNA
ttatatgtagccttaacacgagcacgttatagtgttgcaataatttatcctgatgttattcctaaaaactgtccg

SEQ ID NO: 221830 - DNA, 75 bp, synthetic construct
  source 1..75: mol_type = other DNA
cgcattgaaatggagaatgaatctacagcggctttttttaatatgtcccgttcgtcggtaacccgtttcagctct

SEQ ID NO: 221831 - DNA, 75 bp, synthetic construct
  source 1..75: mol_type = other DNA
atgcaataccgctattgcggaaaaagcggtttacgcctgcccgcgttatcgctcggtttatggcacaatttcggt

SEQ ID NO: 221832 - DNA, 75 bp, synthetic construct
  source 1..75: mol_type = other DNA
agaacgtgcaggcgctgaataatctgacatttagcaccgaggagctggcgcagattgatcagcatatcgccgatg

SEQ ID NO: 221833 - DNA, 75 bp, synthetic construct
  source 1..75: mol_type = other DNA
actttgatttagccaacaattacgggccgcctccaggaagcgcagaagagaactttggtcgcctgctgcgggagg

SEQ ID NO: 221834 - DNA, 75 bp, synthetic construct
  source 1..75: mol_type = other DNA
agggcgtggagatggctatggagcatatgcagtcgagcggttcgttaacatttggagattgctacatatcactta

SEQ ID NO: 221835 - DNA, 75 bp, synthetic construct
  source 1..75: mol_type = other DNA
gtcagttcggtggcgggcgcgtttatcggcacctcgtctgttaccgcctatattgaaagtacttctggtgtggca

SEQ ID NO: 221836 - DNA, 75 bp, synthetic construct
  source 1..75: mol_type = other DNA
agcgggatcggattatttatcgtcttaatgggattaaaaaacactggcgttattgtcgccaataaagacacactg

SEQ ID NO: 221837 - DNA, 75 bp, synthetic construct
  source 1..75: mol_type = other DNA
gcgctgtttacccaaaagtgattggccttgatgcttcaagaattgttccaactgcaaacgaaaaccgacctcgta

SEQ ID NO: 221838 - DNA, 75 bp, synthetic construct
  source 1..75: mol_type = other DNA
ttttcataaacgttggtttgggagaaggctcagcgttacccgttggtgtacctgttccgtggccttcagccacac

SEQ ID NO: 221839 - DNA, 75 bp, synthetic construct
  source 1..75: mol_type = other DNA
tacccgacaaataaattgccagatttacgtggtgagtttttacgaggctgggatgatgggcgcggggtagatagc

SEQ ID NO: 221840 - DNA, 75 bp, synthetic construct
  source 1..75: mol_type = other DNA
ttcaattttgcttaatgagaaacgtcttgccgatacaaaccctgatgaactgaacagaactgattcatgtacccg

SEQ ID NO: 221841 - DNA, 75 bp, synthetic construct
  source 1..75: mol_type = other DNA
ttacatctgttacgactgattttatttgtgaactaaaagatattacaactatcgcaaaatgttgttgtatttttt

SEQ ID NO: 221842 - DNA, 75 bp, synthetic construct
  source 1..75: mol_type = other DNA
ccacatggatttcactcgagggggtaaagcagcaatagagcgaattgttaaggcttacggttacaaaacgcgcca

SEQ ID NO: 221843 - DNA, 75 bp, synthetic construct
  source 1..75: mol_type = other DNA
ttacggctttacccatcaatacccggaactgttggaacaggcagcctacggtctggcggagtggtgcggtaataa

SEQ ID NO: 221844 - DNA, 75 bp, synthetic construct
  source 1..75: mol_type = other DNA
gaactgctggaacaggcagcctacggtctggcggagtggtgcggtaataaattaaaagaagcgaacttgattgcg

SEQ ID NO: 221845 - DNA, 75 bp, synthetic construct
  source 1..75: mol_type = other DNA
caagtaaaaaataaaaacatagtttttgaatgttcaataaacgaaatcgaatttattgcaaagatcgtattatcc

SEQ ID NO: 221846 - DNA, 75 bp, synthetic construct
  source 1..75: mol_type = other DNA
tcacagagcacaatggcgaacaggtatgcgcgtgacactttcccagctgactgggttgttatctgtagtatggaa

SEQ ID NO: 221847 - DNA, 75 bp, synthetic construct
  source 1..75: mol_type = other DNA
attagcaaagaggagtatcttagcgatggtctatggttagtatctattaacggagaatttacttttagagacata

SEQ ID NO: 221848 - DNA, 75 bp, synthetic construct
  source 1..75: mol_type = other DNA
cacatggatttcactcgagggggtaaagcagcaatagagcgaattgttaaggcttacggttacaaaacgcgccaa

SEQ ID NO: 221849 - DNA, 75 bp, synthetic construct
  source 1..75: mol_type = other DNA
gctacaaggtgattcctcttacatttttgataaagatttgctcccggtggatatgattacccccgcaatattttc

SEQ ID NO: 221850 - DNA, 75 bp, synthetic construct
  source 1..75: mol_type = other DNA
cggcccacgaatggcacgagaatttgtaggcctgataagcgtagcgcatcaggcaatttggcgttggtcacaacc

SEQ ID NO: 221851 - DNA, 75 bp, synthetic construct
  source 1..75: mol_type = other DNA
aagcattctgtaaccatctaggtatttcccaaagcacgatggctaacagatatgcccgcgatacatttcctgcag

SEQ ID NO: 221852 - DNA, 75 bp, synthetic construct
  source 1..75: mol_type = other DNA
actggagcatcaattaaatggctagcatttggttcagatgatgacgaacaaatgccatccccttcaccagaacag

SEQ ID NO: 221853 - DNA, 75 bp, synthetic construct
  source 1..75: mol_type = other DNA
gaaatgctgttcgactttatgtccgttcgcctcgatagcgcgaaagccgcgggtaaaaaatatcagcctgaactt

SEQ ID NO: 221854 - DNA, 75 bp, synthetic construct
  source 1..75: mol_type = other DNA
caagccgacgcctctttctacatcagccgtgaagatctgcacgccgtgctgaccggacaggcaaaaatggcggat

SEQ ID NO: 221855 - DNA, 75 bp, synthetic construct
  source 1..75: mol_type = other DNA
taactaccgtaaaacgctgcaacctgaagccaacgcctctttctacatcagccgtgaagatcttcacgccgtgct

SEQ ID NO: 221856 - DNA, 75 bp, synthetic construct
  source 1..75: mol_type = other DNA
ggccagcctgattacgtggatgaaatacattcaggcgctgaacgcggtcgacacttccacggcaccggataccga

SEQ ID NO: 221857 - DNA, 75 bp, synthetic construct
  source 1..75: mol_type = other DNA
gtgagccaggtgcaagtggcgcaagcgttacagcaggcgtatgcccataaaccactggtgcggctgtatgacaaa

SEQ ID NO: 221858 - DNA, 75 bp, synthetic construct
  source 1..75: mol_type = other DNA
aaaggcgcggcggcacaagcggtacagtgcgccaatattcgtttcggctatgcggaaacgcagtctcttatttaa

SEQ ID NO: 221859 - DNA, 75 bp, synthetic construct
  source 1..75: mol_type = other DNA
atcaacctggcgcaagaagcgaacaagcaaggtgattatcgctggtcggcagaactgctgaaacaggtgattgcc

SEQ ID NO: 221860 - DNA, 75 bp, synthetic construct
  source 1..75: mol_type = other DNA
gccatatcaaagaggatgcgaaagccattgttatgcagaatcgtgggggacagaaagtcattgagcgaatactca

SEQ ID NO: 221861 - DNA, 75 bp, synthetic construct
  source 1..75: mol_type = other DNA
caaaaagcacattagccacaagatatatgcgtgatgtttttccttcagactggataattaagtgcgctctcgaaa

SEQ ID NO: 221862 - DNA, 75 bp, synthetic construct
  source 1..75: mol_type = other DNA
tcctgatgactccgggtagcgaagcgccagccgaaatgcacttctatattccggctctgaaagccctgtgtaccg

SEQ ID NO: 221863 - DNA, 75 bp, synthetic construct
  source 1..75: mol_type = other DNA
taactaccgtaaaacactcaatcccaagctgacgcctctttctacatcagccgtgaagatctgcacgccgtgctg

SEQ ID NO: 221864 - DNA, 75 bp, synthetic construct
  source 1..75: mol_type = other DNA
atgtatcaggtgcgcggccaggatatctctaacattacgttcgttgagggcgagaaaggcattattgttatcgac

SEQ ID NO: 221865 - DNA, 75 bp, synthetic construct
  source 1..75: mol_type = other DNA
gctggatgaaaaaagttccgctgtagtggtgctggataaagacggtcgcgtgcaatgggccaaagacgggcgctt

SEQ ID NO: 221866 - DNA, 75 bp, synthetic construct
  source 1..75: mol_type = other DNA
gctggatgaagaaagttccgctgtagtggtgctggataaggatggtcgcgtgcaatgggccaaagacgggcgctc

SEQ ID NO: 221867 - DNA, 75 bp, synthetic construct
  source 1..75: mol_type = other DNA
ggtcagcgcgtaccgccgattggtattaccgatcgtggcgagttggtgtttgataaagatcagtttagctacaaa

SEQ ID NO: 221868 - DNA, 75 bp, synthetic construct
  source 1..75: mol_type = other DNA
aataaaggtccaaaagttgccgttgtcgggcatatggatgaagtcggctttatggtcacccacatcgacgagagc

SEQ ID NO: 221869 - DNA, 75 bp, synthetic construct
  source 1..75: mol_type = other DNA
tggaagtgggtatgggtaaagttggtatgccgctgcgtgtcgccgtaaccggtgcggggcagtctccagcactgg

SEQ ID NO: 221870 - DNA, 75 bp, synthetic construct
  source 1..75: mol_type = other DNA
gttaccgttcacgcaattggtaagacccgcagtatcgagcgtatcaacaaagcgctggattttattgctgaacgc

SEQ ID NO: 221871 - DNA, 75 bp, synthetic construct
  source 1..75: mol_type = other DNA
caggcagcggtatttggtcgcactattcagcaaggctttgaagcggcgaaaaatatcggcactcagccagtggcg

SEQ ID NO: 221872 - DNA, 75 bp, synthetic construct
  source 1..75: mol_type = other DNA
tgctcactgctggccagcttcgccgcttcgctcccgctgcgccggccttccccaattgccacgctggacatggct

SEQ ID NO: 221873 - DNA, 75 bp, synthetic construct
  source 1..75: mol_type = other DNA
ttttgctggcgatcttcttgggcgccagactcgggggaattggtattggttttgctggcggattgggggtactgg

SEQ ID NO: 221874 - DNA, 75 bp, synthetic construct
  source 1..75: mol_type = other DNA
tgataaagatcagtttagctacaatacctggaacagcgcacagttagtggggaaagtgcgggtactgcaacatat

SEQ ID NO: 221875 - DNA, 75 bp, synthetic construct
  source 1..75: mol_type = other DNA
tttaaacccgcatcgaccaacaaaatcgccctgatgttgccactgaatggccaggcagcggtatttggtcgcact

SEQ ID NO: 221876 - DNA, 75 bp, synthetic construct
  source 1..75: mol_type = other DNA
gaaagaaaagcagcagaatattgacgccacctggcaggcgctctcctccatgactcaggaacaggcgaatacgct

SEQ ID NO: 221877 - DNA, 75 bp, synthetic construct
  source 1..75: mol_type = other DNA
ccgctgtcatttgatgagatgttcattgatattggcgcgaacagtcgcgatgaggtggaaaaacgcggtgtggcg

SEQ ID NO: 221878 - DNA, 75 bp, synthetic construct
  source 1..75: mol_type = other DNA
catggtcggcatttggaaaagtgaattttcccgttgctgatgtcggtcgtataattggcggaaatgttgggcaaa

SEQ ID NO: 221879 - DNA, 75 bp, synthetic construct
  source 1..75: mol_type = other DNA
tggtttcctattacgccgacggcaaaaacaccaaacaattcctgccgttcatgctgatcttgtctgccatttgta

SEQ ID NO: 221880 - DNA, 75 bp, synthetic construct
  source 1..75: mol_type = other DNA
cattcctcggtttctggaacatttctcacaaccttggtggcgcgggcgcggcgggtgtggcgctgttcggcgcaa

SEQ ID NO: 221881 - DNA, 75 bp, synthetic construct
  source 1..75: mol_type = other DNA
tggcctatggtttcaaatcacgccaagcattctgtaaccaccttggtatttcacaaagtacaatggctaacagat

SEQ ID NO: 221882 - DNA, 75 bp, synthetic construct
  source 1..75: mol_type = other DNA
gctctctgacctggcgaacggtcgccgtggcctggtggcctgtatcgcgctggcgctgattatcgccacgctcgg

SEQ ID NO: 221883 - DNA, 75 bp, synthetic construct
  source 1..75: mol_type = other DNA
tcgtcgagggtggaaacagagccttcgaatgcaagatagaagacattgaaataattggtaaaattataagtttaa

SEQ ID NO: 221884 - DNA, 75 bp, synthetic construct
  source 1..75: mol_type = other DNA
aattttggatcgggtaatttctcgcatataaaattatctacagttctgagtaagcagggaaggcaacacgcacat

SEQ ID NO: 221885 - DNA, 75 bp, synthetic construct
  source 1..75: mol_type = other DNA
gcttcctgtcagcgttctttgcgctggtcggcacgcacggtcttcacgtcacttccggtcttatctggatggcgg

SEQ ID NO: 221886 - DNA, 75 bp, synthetic construct
  source 1..75: mol_type = other DNA
atctgctggagcaacagccgcgcacgcctggcgagctggcgcaacagactggcgtttcaggcaggaccatcctgc

SEQ ID NO: 221887 - DNA, 75 bp, synthetic construct
  source 1..75: mol_type = other DNA
tggtttcctactacgccgacggcaaaaacaccaaacaattcctgccgttcatgctgatcctgtctgccatttgta

SEQ ID NO: 221888 - DNA, 75 bp, synthetic construct
  source 1..75: mol_type = other DNA
ccagccatatcgagcctagtttcatcacacggatgaacgaaaaatactcattagaactcatggaacgcctgagag

SEQ ID NO: 221889 - DNA, 75 bp, synthetic construct
  source 1..75: mol_type = other DNA
tgcgctgacacctcaatttgaaccccaagataagttttttattgaaaagatccttttttggcaaccgataaagca

SEQ ID NO: 221890 - DNA, 75 bp, synthetic construct
  source 1..75: mol_type = other DNA
tttccatattggctcatttttattattaggaaaaaaacgtcatcttctggaatactggaaagcagaggttatcat

SEQ ID NO: 221891 - DNA, 75 bp, synthetic construct
  source 1..75: mol_type = other DNA
taccgcgctggtcaatactatcgtcgggctagacgacttcgaattgatcaccttcctagtgattcaggaggccgg

SEQ ID NO: 221892 - DNA, 75 bp, synthetic construct
  source 1..75: mol_type = other DNA
tgaagctttcggcgtagacataattggcaatcttcaggccttactggtagataaaatctatggtgatttacgaaa

SEQ ID NO: 221893 - DNA, 75 bp, synthetic construct
  source 1..75: mol_type = other DNA
atggcacaggttaatatgagtttaagaatcgacgctgaactgaaggatgcttttatggggtcagcctggaattcg

SEQ ID NO: 221894 - DNA, 75 bp, synthetic construct
  source 1..75: mol_type = other DNA
accggaatccaagcgtcaacgtcagtcagcacaaccggctacacccttattacctcgtctacattaatcgcgagg

SEQ ID NO: 221895 - DNA, 75 bp, synthetic construct
  source 1..75: mol_type = other DNA
ttcgccgacaccgctgactatctgtatgccaatttggctccggaattgctggctacacagaccttgcacagtgca

SEQ ID NO: 221896 - DNA, 75 bp, synthetic construct
  source 1..75: mol_type = other DNA
actcgcccgagagcatctacttcctgatgctctacaatatcttcaatgagtttctggacgacattaacgaggatg

SEQ ID NO: 221897 - DNA, 75 bp, synthetic construct
  source 1..75: mol_type = other DNA
gatgtactgaatattgccgccgattatgctgatttcgtgacagaggttattttaagaaaagcgacggacggggat

SEQ ID NO: 221898 - DNA, 75 bp, synthetic construct
  source 1..75: mol_type = other DNA
ggaatgtatccgatacatcgcaacgcggtcgctgaatgacgctaaaaatattcttgttgctgattgtgaaaatgg

SEQ ID NO: 221899 - DNA, 75 bp, synthetic construct
  source 1..75: mol_type = other DNA
atgtgcaataacacccgtccggacgcagccgccgaagctatcagaacgctgatggatgcgctgattgatatttct

SEQ ID NO: 221900 - DNA, 75 bp, synthetic construct
  source 1..75: mol_type = other DNA
tagatccgtttcggacagaagaaccggaacaacctccagtggaggacagaggcaatgataatccatttgcatcgt

SEQ ID NO: 221901 - DNA, 75 bp, synthetic construct
  source 1..75: mol_type = other DNA
atcaaattaaaggcgtgatcagtaaaaaacagctcgggccggagtttcagcgtcagctattaatgtgcctgtatg

SEQ ID NO: 221902 - DNA, 75 bp, synthetic construct
  source 1..75: mol_type = other DNA
cttagtattgcgtcggactatgcggaatatgtggcagaggcgcgttacagaagaaaattcacggaggatgtaagc

SEQ ID NO: 221903 - DNA, 75 bp, synthetic construct
  source 1..75: mol_type = other DNA
tcgcctggtgggataaattctcccaacccgctgtacgccctgtttacagcctgggtatcgatacctggtggtatg

SEQ ID NO: 221904 - DNA, 75 bp, synthetic construct
  source 1..75: mol_type = other DNA
cagtctgacattatcacacgtcagcatttgcaggaggcagttagctatcgagcgattgaccgtttgctcatccat

SEQ ID NO: 221905 - DNA, 75 bp, synthetic construct
  source 1..75: mol_type = other DNA
gtttattcaggaaataagatcgacggttatctggaactgctgcgcaaatgcgccgggcaaatatcatatgggctg

SEQ ID NO: 221906 - DNA, 75 bp, synthetic construct
  source 1..75: mol_type = other DNA
ctatgcaatctcactttctggcgatccggtagtttattcaggaaataagatagacagctatctggaattgctccg

SEQ ID NO: 221907 - DNA, 75 bp, synthetic construct
  source 1..75: mol_type = other DNA
tggcgttcccggcgcaatctccagtgcaactgaagccattaagtcgggcagaaaaattatcgtcgcgaaagataa

SEQ ID NO: 221908 - DNA, 75 bp, synthetic construct
  source 1..75: mol_type = other DNA
tggcgttcccggcgcaatatccagcgcaactgaagccattaagtcaggcagaaagattatcgtcgcgaaagacaa

SEQ ID NO: 221909 - DNA, 75 bp, synthetic construct
  source 1..75: mol_type = other DNA
tgcagtatcccgggcgctacaacatgatctcagtgatgttgtcggtcaggaacaaggaaagcgaggactggaaat

SEQ ID NO: 221910 - DNA, 75 bp, synthetic construct
  source 1..75: mol_type = other DNA
ctgcccgtcgcatggagtacacccgcgccaacaaacaggggaaattaacccacaaatgcacggtaaacattatgg

SEQ ID NO: 221911 - DNA, 75 bp, synthetic construct
  source 1..75: mol_type = other DNA
ccgacttatgacgatgcatggcgtgatgcctgtcgtatggcatattcccgcaatgacaaacaggggcgattaacc

SEQ ID NO: 221912 - DNA, 75 bp, synthetic construct
  source 1..75: mol_type = other DNA
tccattgtttgccgatctggccagctgcggttttcccagccctgccgctgactatgtcgagtccgatctggatct

SEQ ID NO: 221913 - DNA, 75 bp, synthetic construct
  source 1..75: mol_type = other DNA
ggcattattagcctggaagacacgagaagaactggattattttttagaagcactcacgttaactccacatacgcg

SEQ ID NO: 221914 - DNA, 75 bp, synthetic construct
  source 1..75: mol_type = other DNA
tgtggtttcttaattaaaaacaaaaacggctactattcactgggaataaaaaactacgaattgggttgtcaggcg

SEQ ID NO: 221915 - DNA, 75 bp, synthetic construct
  source 1..75: mol_type = other DNA
accgccctctgcacaattgtttgcagagcaccttcccatcgagtggatacagcactgtctgacgctttctgcgca

SEQ ID NO: 221916 - DNA, 75 bp, synthetic construct
  source 1..75: mol_type = other DNA
aattcattctgaagatgatggtgaaatgtatgagcgaaacacgttttcacggggcgcgtgtccgggaaagcaccg

SEQ ID NO: 221917 - DNA, 75 bp, synthetic construct
  source 1..75: mol_type = other DNA
tcttcgtgcccgaatcgaccacgaacagggctggcatcgctctctttcaaacatccctgtgaagaatgttctcgg

SEQ ID NO: 221918 - DNA, 75 bp, synthetic construct
  source 1..75: mol_type = other DNA
acgccggtgctgttaacacgagtcaataatgttctgggtaaggctggcacaaaggggacgctctacaaatccctt

SEQ ID NO: 221919 - DNA, 75 bp, synthetic construct
  source 1..75: mol_type = other DNA
aggaaagaatgaaagcttcccgtctgctgcttatgcctgcggtcttcgggcccgtcttgatcatgaacagggctg

SEQ ID NO: 221920 - DNA, 75 bp, synthetic construct
  source 1..75: mol_type = other DNA
gcgtttgtttatgcagggtgtcccggctgcaatactgccacagaagccatgacctggcgtcaggatcttgcttat

SEQ ID NO: 221921 - DNA, 75 bp, synthetic construct
  source 1..75: mol_type = other DNA
atccgatcaggtcagcacaaaggtgattgtcgttcgtgtggcggcagaaaagaaaggtgacaaacagaagactca

SEQ ID NO: 221922 - DNA, 75 bp, synthetic construct
  source 1..75: mol_type = other DNA
ggcggcaaaagagggggctgagaataaaacacaggatcaactggtcattggtaccacggaagaagacggaagcta

SEQ ID NO: 221923 - DNA, 75 bp, synthetic construct
  source 1..75: mol_type = other DNA
aaactggattcactggttactgccgggaaactgattggggcgtcgtgctggtatgacgtggtggatatccgcccg

SEQ ID NO: 221924 - DNA, 75 bp, synthetic construct
  source 1..75: mol_type = other DNA
gatgcgaacaacctgaacaacaaggaaatcaccacgattattcgccgtaacggctttcgcttctgggggaaccgt

SEQ ID NO: 221925 - DNA, 75 bp, synthetic construct
  source 1..75: mol_type = other DNA
acatgcctgtgaaaaatgttcttggggtgtcagcgtctgtttcctggtcacttcaggatgaaaacagcgatgcca

SEQ ID NO: 221926 - DNA, 75 bp, synthetic construct
  source 1..75: mol_type = other DNA
tcttcgtgcccgactcgaccatgaacagggctggcatcgctccctttctaacatgcctgtgaaaaatgttcttgg

SEQ ID NO: 221927 - DNA, 75 bp, synthetic construct
  source 1..75: mol_type = other DNA
accgaccccgcattcttgccgctccgggccttgaatcggatgctgtcacggctgcactggtgactgttgccggaa

SEQ ID NO: 221928 - DNA, 75 bp, synthetic construct
  source 1..75: mol_type = other DNA
atcactcgcgtgattagcgtgctgggtaaggcgggcaaaacaggctcactgtataaatctctcaaggctatttcc

SEQ ID NO: 221929 - DNA, 75 bp, synthetic construct
  source 1..75: mol_type = other DNA
catatacccataaccagcgccagacatcgcgcattatgctgctggtactgctcgcagccgtgcctggaatcgcgg

SEQ ID NO: 221930 - DNA, 75 bp, synthetic construct
  source 1..75: mol_type = other DNA
cgccagtggtggtgatatgaacacgctacgcttaggtattgatggcattagtcaggcgacaccgctggatacatt

SEQ ID NO: 221931 - DNA, 75 bp, synthetic construct
  source 1..75: mol_type = other DNA
tctttattttgactgacccggttaccgcttctacgaccaatcgtggtcgtcttattttcggcgcgcttgcgggct

SEQ ID NO: 221932 - DNA, 75 bp, synthetic construct
  source 1..75: mol_type = other DNA
cagccgccgaagctatcagaacgctgatgcacgcgctgattaatatttctgttatcgcagacatggcgcataaac

SEQ ID NO: 221933 - DNA, 75 bp, synthetic construct
  source 1..75: mol_type = other DNA
gttatcagtgccatcagggcaaaactggattcactggttactgccgggaaactgattggcgcggagtgctggtat

SEQ ID NO: 221934 - DNA, 75 bp, synthetic construct
  source 1..75: mol_type = other DNA
tgtatgccgcatgtcatggttgtaacacgatggctgaggcgattacctaccgccagaaattcaacgaacgtgagg

SEQ ID NO: 221935 - DNA, 75 bp, synthetic construct
  source 1..75: mol_type = other DNA
acggatttacgtcaggggcgtgtgcgtattcgctacaaatatacgcctgttcccccgctggaagacatggagctt

SEQ ID NO: 221936 - DNA, 75 bp, synthetic construct
  source 1..75: mol_type = other DNA
cacgcgtcaaagaaaacaccgaccttgtgaccgcgattaatgacattgattccagtgtcatcggtatcgtggcca

SEQ ID NO: 221937 - DNA, 75 bp, synthetic construct
  source 1..75: mol_type = other DNA
aggagaaaatgccaaaacgcaatcccagctcattatcggtggcacacaggctgacggaagctataccgggatgtt

SEQ ID NO: 221938 - DNA, 75 bp, synthetic construct
  source 1..75: mol_type = other DNA
tgatgatgcggctgatgcgctttcgtcaatgccagagcttattagagcggcttttttcttactttccacgagaga

SEQ ID NO: 221939 - DNA, 75 bp, synthetic construct
  source 1..75: mol_type = other DNA
aggaagaacgggaagaatacacattgttcgccctggaatgtatccgatacaccgccacgcggtcgatgaatgacg

SEQ ID NO: 221940 - DNA, 75 bp, synthetic construct
  source 1..75: mol_type = other DNA
atgacgctaaaaatattcttattgctgattgtgaaaatggggggggttatgcgtgatgatcgttttaattccctg

SEQ ID NO: 221941 - DNA, 75 bp, synthetic construct
  source 1..75: mol_type = other DNA
tggatgcaaaatcattatccgcttacaggcgaagatgtcgttgcccaaaaaacgccgtgtagttttgatgtctcg

SEQ ID NO: 221942 - DNA, 75 bp, synthetic construct
  source 1..75: mol_type = other DNA
cgtttcttggcttgctggatacctggccgccggaaacgcaaaactggcacgaaaaagaagccaacggtctggacc

SEQ ID NO: 221943 - DNA, 75 bp, synthetic construct
  source 1..75: mol_type = other DNA
gatgcgcgttaccagttcagctatcgggaaatgcgcgagcaggtggtggcgctggcgaatctgctgcgtgagcgc

SEQ ID NO: 221944 - DNA, 75 bp, synthetic construct
  source 1..75: mol_type = other DNA
cgatggcttcagtttcccggccattacccgccagatcgccaatatttactgcgcatggctgcgtggcgaaccaac

SEQ ID NO: 221945 - DNA, 75 bp, synthetic construct
  source 1..75: mol_type = other DNA
tccgcacggtactgcgcgggcattaatgcaggcggatttacagcaaaatctacgtgccgacagcggcaaaccgct

SEQ ID NO: 221946 - DNA, 75 bp, synthetic construct
  source 1..75: mol_type = other DNA
atctttacctccggttccaccggcaggccgaaaggggtaatggtcgggcagacggctatcgttaaccgcctgtta

SEQ ID NO: 221947 - DNA, 75 bp, synthetic construct
  source 1..75: mol_type = other DNA
ccagctatcagtacacgttgctgtccgacgacctggcggcactgcgcgaatgggagccgaaaatccgcaaaaaac

SEQ ID NO: 221948 - DNA, 75 bp, synthetic construct
  source 1..75: mol_type = other DNA
ttctgtcgccattggtatttcgttgctggtttccctgacgttaacgccgatgatgtgcggctggatgctaaaagc

SEQ ID NO: 221949 - DNA, 75 bp, synthetic construct
  source 1..75: mol_type = other DNA
ggcggcactgcgcgaatgggagccgaaaatccgcaaaaaactggcgacgttgccggaactggcggacgtgaactc

SEQ ID NO: 221950 - DNA, 75 bp, synthetic construct
  source 1..75: mol_type = other DNA
aatatggcgtaacgaccacgcactttgtgccgtcgatgctggcggcatttgttgcatcgctgacgccgcaaaccg

SEQ ID NO: 221951 - DNA, 75 bp, synthetic construct
  source 1..75: mol_type = other DNA
cgtcggatgcaccaattatgatcctgacgctgacgtccgatacttattcgcagggggaactgtacgattttgcct

SEQ ID NO: 221952 - DNA, 75 bp, synthetic construct
  source 1..75: mol_type = other DNA
tgaatatctggctgtatatctcgatcccgaaaaccttcttcccggagcaggacactggcgtgttgatgggcggga

SEQ ID NO: 221953 - DNA, 75 bp, synthetic construct
  source 1..75: mol_type = other DNA
aggccgttacccatgcctgtgtgattaaccaggcggcagcaaccggcggcgacgcgcgccagttggtcgggtatc

SEQ ID NO: 221954 - DNA, 75 bp, synthetic construct
  source 1..75: mol_type = other DNA
gatgcgcgtcagttggttgggtatctggtgtcgcaatcaggcctgccgctggatacaaccgcattgcaggcgcag

SEQ ID NO: 221955 - DNA, 75 bp, synthetic construct
  source 1..75: mol_type = other DNA
ggattgtgcgcatgtggatattatctctccaggggcgtttgaaaaaattgggccgattattcgcgcaacgctaaa

SEQ ID NO: 221956 - DNA, 75 bp, synthetic construct
  source 1..75: mol_type = other DNA
cccgaacgcgcctggtcgccgtggatagcggagctggatatctatcgtcaggattgtgcgcatgtggatattatc

SEQ ID NO: 221957 - DNA, 75 bp, synthetic construct
  source 1..75: mol_type = other DNA
tggctaatgaaatgtatatatcggggaataaaaaacaacgaaaatgtgcgatcaagataaaaaatgcgcttatgg

SEQ ID NO: 221958 - DNA, 75 bp, synthetic construct
  source 1..75: mol_type = other DNA
ccccttccatgtctgttatggtggatatttattaaatcctggtgtttcagattcagatattagcagaaaaataaa

SEQ ID NO: 221959 - DNA, 75 bp, synthetic construct
  source 1..75: mol_type = other DNA
atgcaatatgcgttgtttgatgggtttgaacgaaaattcttactggatgctcttgaatttggtgtcctgaaggac

SEQ ID NO: 221960 - DNA, 75 bp, synthetic construct
  source 1..75: mol_type = other DNA
ctcgccagagttgcgcgacgttgaaacaggttttctgtagtggtgaagccttaccggctgatttatgccgcgaat

SEQ ID NO: 221961 - DNA, 75 bp, synthetic construct
  source 1..75: mol_type = other DNA
tcggcagtttgcccgccaggtgacgccggggcaagtgatggtcgcgtcaactgtcgccaaactggcaacgattat

SEQ ID NO: 221962 - DNA, 75 bp, synthetic construct
  source 1..75: mol_type = other DNA
gcaggatgccgatgctgatttctttgcgcttggcggtcattcgctactggcaatgaaactggctgcgcagttaag

SEQ ID NO: 221963 - DNA, 75 bp, synthetic construct
  source 1..75: mol_type = other DNA
atagcccttgcgctggcggctttgtggctggggcgattgtgcaaccgcatggactacgccgccggatttatcttt

SEQ ID NO: 221964 - DNA, 75 bp, synthetic construct
  source 1..75: mol_type = other DNA
tgcttcgccgtttacgcctttcgctgatgtagtggaagagtaccagcaataccgcgaaagtgaagcctggcagcg

SEQ ID NO: 221965 - DNA, 75 bp, synthetic construct
  source 1..75: mol_type = other DNA
tgctgccagacgaatatgctcagttggcgcagatcaatgccacccaggtcgatattcctgaaaccacactgagcg

SEQ ID NO: 221966 - DNA, 75 bp, synthetic construct
  source 1..75: mol_type = other DNA
tatcactcagtacggaaaccgaaccactacgtacgtaatattacacacagtatgaaaaaaaatacgtacgtattg

SEQ ID NO: 221967 - DNA, 75 bp, synthetic construct
  source 1..75: mol_type = other DNA
gtaagccgggtactgaccatgcttcggctgaccggctggctgagtctgtgtaaacgggttcgtgatgaaaaaggc

SEQ ID NO: 221968 - DNA, 75 bp, synthetic construct
  source 1..75: mol_type = other DNA
ctggatacgcgcctttctccccttgataaaactgcgtggatgatgattcgtctgcatgccctgaataatgagggc

SEQ ID NO: 221969 - DNA, 75 bp, synthetic construct
  source 1..75: mol_type = other DNA
gactgttgttcaccggcaatgtgcatgatgccattccgcgtcgtctgttgctggatacgcgtctttcaccgctgg

SEQ ID NO: 221970 - DNA, 75 bp, synthetic construct
  source 1..75: mol_type = other DNA
tgcaggcgctgccggaagaactggcgcagggggttctggaacgtctgtcagggatgctgggcagccactcgctgc

SEQ ID NO: 221971 - DNA, 75 bp, synthetic construct
  source 1..75: mol_type = other DNA
tccggtgggctggctgcttgcggtgctgaaacgtgcccgggagggaaatttttatccgccgaaacagaaacagcg

SEQ ID NO: 221972 - DNA, 75 bp, synthetic construct
  source 1..75: mol_type = other DNA
gtggctgagtctgatgaggagggcgggaggcgcgagcttcccgcagtaacagatggcaaaatccagtatctgcag

SEQ ID NO: 221973 - DNA, 75 bp, synthetic construct
  source 1..75: mol_type = other DNA
tatccgtgatgtggcacagccgtgtgcggaggtgctggttcgcctggggaaggcggagtacatcacagtgcgacg

SEQ ID NO: 221974 - DNA, 75 bp, synthetic construct
  source 1..75: mol_type = other DNA
ctcgaccgcttcgatctctcactggagatcccattaccgccccccggcattttgagtaaaacggtagtgccggga

SEQ ID NO: 221975 - DNA, 75 bp, synthetic construct
  source 1..75: mol_type = other DNA
aaaacagcacttcaggggaaaacccctgaccgggccgacgtggtggagcgtcacatcggccagttcaacagcccg

SEQ ID NO: 221976 - DNA, 75 bp, synthetic construct
  source 1..75: mol_type = other DNA
ttacctgggtggcttacatcatggcgacggattcgtgggggtattcccgcgacgtgcgctgtgaagtgctggccg

SEQ ID NO: 221977 - DNA, 75 bp, synthetic construct
  source 1..75: mol_type = other DNA
acaccacctgattaatttggagagcgggagaagggagatgctaccagtagatgatgacggttacggttctgctcc

SEQ ID NO: 221978 - DNA, 75 bp, synthetic construct
  source 1..75: mol_type = other DNA
cagtaaaatcaggggattatgacagagttcggaaaccgaaccattacgtacgtagtttcacacacagtgtgaata

SEQ ID NO: 221979 - DNA, 75 bp, synthetic construct
  source 1..75: mol_type = other DNA
gagccagctcctgacgctgtataccacgccggtggtgtatctctttttcgaccgtctgcgactgcgtttttcgcg

SEQ ID NO: 221980 - DNA, 75 bp, synthetic construct
  source 1..75: mol_type = other DNA
tatttttcaggcctgtctgttgcgttttcgcccgatcatgatgaccacgctggcagcactgtttggcgcattgcc

SEQ ID NO: 221981 - DNA, 75 bp, synthetic construct
  source 1..75: mol_type = other DNA
gatcgctcccccaccattcgcgcctcgctggaagaagtcgagcaaacgctgattatctcggtggcgctggtgatt

SEQ ID NO: 221982 - DNA, 75 bp, synthetic construct
  source 1..75: mol_type = other DNA
aactgaaaaccgccgctgaatatcagccgctgattattcactacaacaacggcggcgcggttcgtctgggcgatg

SEQ ID NO: 221983 - DNA, 75 bp, synthetic construct
  source 1..75: mol_type = other DNA
acgccggtggtgtatctctttttcgaccgtctacggctgcgtttttcgcgtaaacctaaacaaacggtaaccgag

SEQ ID NO: 221984 - DNA, 75 bp, synthetic construct
  source 1..75: mol_type = other DNA
tttcgcccgattatgatgactaccctggcggcgctgtttggtgcgctgccgctggtattgtcgggcggtgacggc

SEQ ID NO: 221985 - DNA, 75 bp, synthetic construct
  source 1..75: mol_type = other DNA
tggcgtcttccgttgccacgccgctggaacgttcgcttggacgcattgccggggtcagtgaaatgacctccagca

SEQ ID NO: 221986 - DNA, 75 bp, synthetic construct
  source 1..75: mol_type = other DNA
gacgctgacgtccgatacttattcccagggtgaactgtacgatttcgcctcgacgcagctggcgccgacgattgc

SEQ ID NO: 221987 - DNA, 75 bp, synthetic construct
  source 1..75: mol_type = other DNA
cgaccgggaaatcgctctcggacgccagtgcggcgatcgatcgcgcaatgacccagccttggtgtgccttcgacg

SEQ ID NO: 221988 - DNA, 75 bp, synthetic construct
  source 1..75: mol_type = other DNA
aaattatccgtgacgatccggcggtggataatgttaccggctttaccggcggttcgcgggtgaacagcgggatga

SEQ ID NO: 221989 - DNA, 75 bp, synthetic construct
  source 1..75: mol_type = other DNA
gcaggatttcatgaaaattatccgtgacgatccggcagtggataatgtcaccggctttacaggcggttcgcgagt

SEQ ID NO: 221990 - DNA, 75 bp, synthetic construct
  source 1..75: mol_type = other DNA
gaagaaaaacgccattatgatggtcgattttgcgcttgaagcccaacggcacggtaacctgacgccgcaggaagc

SEQ ID NO: 221991 - DNA, 75 bp, synthetic construct
  source 1..75: mol_type = other DNA
agcgcaacggtttcattgccactttggtgattaatcgcccggcgaaactcaacgcattaaccccagagatgctcg

SEQ ID NO: 221992 - DNA, 75 bp, synthetic construct
  source 1..75: mol_type = other DNA
caccaaatattggtggacaagagttgcaggcactggagcagatgttggccctcaaggggttgagacacactgttt

SEQ ID NO: 221993 - DNA, 75 bp, synthetic construct
  source 1..75: mol_type = other DNA
cacctaatattggtgggcaggaattacagtcattgatacaaatgactgccctgaaaaatcaagggcattttgtgt

SEQ ID NO: 221994 - DNA, 75 bp, synthetic construct
  source 1..75: mol_type = other DNA
acacgccggttgagggaaaggacaatcttaagtccacgcagatgatgagcgtgattgatgccattggtgaagggc

SEQ ID NO: 221995 - DNA, 75 bp, synthetic construct
  source 1..75: mol_type = other DNA
cgccaaattccgcgataatccgtcgccattaacagtggtgctgggtaaagatatcgccggtgagccggtggttgc

SEQ ID NO: 221996 - DNA, 75 bp, synthetic construct
  source 1..75: mol_type = other DNA
agattaaggggaaactgtcagccaaccagattgaaggcgatatagtcaaaacagtgggtaaggcttttccgcggg

SEQ ID NO: 221997 - DNA, 75 bp, synthetic construct
  source 1..75: mol_type = other DNA
ggatggacacggatatcgcagaagtgacccggaaaatcggggaggcggaaaacagcctcacgcagctggttgcga

SEQ ID NO: 221998 - DNA, 75 bp, synthetic construct
  source 1..75: mol_type = other DNA
agtatcagattgacagtatgggcatgcatgatgatgtttttattgctgacaatgtttttcctgccgcccccgtat

SEQ ID NO: 221999 - DNA, 75 bp, synthetic construct
  source 1..75: mol_type = other DNA
ctagcacagcaatgcaaacttatctaaaatcgaaaaatgtcaggacaccgattacagtcgttactccaggttttg

SEQ ID NO: 222000 - DNA, 75 bp, synthetic construct
  source 1..75: mol_type = other DNA
tgtatggagattactcggaatagttcatagttttcagcctgatgcaatcgtttgtcacagtggacatgatagtaa

SEQ ID NO: 222001 - DNA, 75 bp, synthetic construct
  source 1..75: mol_type = other DNA
gacgtgttcctgaagcgactgtttgcggtgagcatcacgtcatccggcaatcctccgacgttttccctgacgccg

SEQ ID NO: 222002 - DNA, 75 bp, synthetic construct
  source 1..75: mol_type = other DNA
attgaaatctgtgataacgactatgccgggaccctgaccggcggacgtatcctgtccattgatgccgccagccgt

SEQ ID NO: 222003 - DNA, 75 bp, synthetic construct
  source 1..75: mol_type = other DNA
atgcttcagcgctgcgtacggaggtcacgcaactggaagaagatatccgtcagcggatggacacggatatcgcag

SEQ ID NO: 222004 - DNA, 75 bp, synthetic construct
  source 1..75: mol_type = other DNA
ataaatcaatgttcctcgcagcgtataaagaggatgaagtgaacttttacgccgaagctcacttacctaaaatca

SEQ ID NO: 222005 - DNA, 75 bp, synthetic construct
  source 1..75: mol_type = other DNA
ccacctcgcagtacctgatgtcggtgattctgaataatctccctgagcgcccctttaacatccggatggtcaggg

SEQ ID NO: 222006 - DNA, 75 bp, synthetic construct
  source 1..75: mol_type = other DNA
catacagcagatacagcgggtgcagacagacacaaataacgacctggctgcgctgtacatgctgaaggtgcagaa

SEQ ID NO: 222007 - DNA, 75 bp, synthetic construct
  source 1..75: mol_type = other DNA
cactgccggaagcagggacatcgacggtgaacctgattaacggcagcggtaagccggtgcgcgtggacatcactg

SEQ ID NO: 222008 - DNA, 75 bp, synthetic construct
  source 1..75: mol_type = other DNA
gctttactattttgaagaagtggaagagaagcgagcccgtgaacgtgaacaacttgcggcctggtatcaaccgat

SEQ ID NO: 222009 - DNA, 75 bp, synthetic construct
  source 1..75: mol_type = other DNA
ggtgacagtatggatgcccagcatccggtgctgaaaaagaaccatacattgtggtgttggttgacgaatttgccg

SEQ ID NO: 222010 - DNA, 75 bp, synthetic construct
  source 1..75: mol_type = other DNA
ggtggggaaatctgcgtttgtggaagccagtggccgggccagcaatgatgcagaagggtatctggggctgtttcg

SEQ ID NO: 222011 - DNA, 75 bp, synthetic construct
  source 1..75: mol_type = other DNA
ctggattttaaacattctcaccttcgccagtaatcgtacccgtcgcgatgatacctgggtcgatgaagatgaata

SEQ ID NO: 222012 - DNA, 75 bp, synthetic construct
  source 1..75: mol_type = other DNA
gaagaactggatccgttgttcgatcaggcggtgcagtttgtcactgaaaaacgcaaagcgtcaatttctggcgta

SEQ ID NO: 222013 - DNA, 75 bp, synthetic construct
  source 1..75: mol_type = other DNA
gtccgtgagaacgatgacggcacgtatgctgtcaccgccgtgcagcatgtgccggagaaagaggccatcgtggat

SEQ ID NO: 222014 - DNA, 75 bp, synthetic construct
  source 1..75: mol_type = other DNA
ccatggcccagcgcgatacttcagtttccgatctctgcaaggaactcggcatcgagcgcgtcactctctaccgat

SEQ ID NO: 222015 - DNA, 75 bp, synthetic construct
  source 1..75: mol_type = other DNA
gggccctggctgaaatggaacgagaactgattgttgaacgaacaaaagcaggactggaagctgctcgcgcacagg

SEQ ID NO: 222016 - DNA, 75 bp, synthetic construct
  source 1..75: mol_type = other DNA
atgatttacggttatgcccgagtatcaacaaaccaccaggacaccgcattgcaacgaaacgcactggagtgcgca

SEQ ID NO: 222017 - DNA, 75 bp, synthetic construct
  source 1..75: mol_type = other DNA
gcaggatgcgagctgatttttgaagacaagataagcggtacaaagtccgaaaggccgggactgaaaaaactgctc

SEQ ID NO: 222018 - DNA, 75 bp, synthetic construct
  source 1..75: mol_type = other DNA
gcttatcgttgaacgtacacgcgctggacttgatgcagctcgcgcagaaggtcgtataggtgggcgtcggcctaa

SEQ ID NO: 222019 - DNA, 75 bp, synthetic construct
  source 1..75: mol_type = other DNA
caacaaatgaccagaacaccgatttgcaacgcaatgcactgaactgtgcgggatgtgagcggatttttgaggaca

SEQ ID NO: 222020 - DNA, 75 bp, synthetic construct
  source 1..75: mol_type = other DNA
gtgcgtggtcaccgtttttaatcttaacggtactggtcaccatctggaccatgaaaccgtttaaagcgttatttg

SEQ ID NO: 222021 - DNA, 75 bp, synthetic construct
  source 1..75: mol_type = other DNA
gtatgtccaccacgctggcgctggtactggcgggcacaggcgtgatgttcccgttcttctcaccgttccttggct

SEQ ID NO: 222022 - DNA, 75 bp, synthetic construct
  source 1..75: mol_type = other DNA
aacacagtctgatctttgccagcgttattggcattatcacgctgttgcaggcgtatgtgtttaccggaatgttag

SEQ ID NO: 222023 - DNA, 75 bp, synthetic construct
  source 1..75: mol_type = other DNA
gcgtagtatgcggcatctggtcattctggttgaggagctgcgcgaacgcggcattaattttcgcagcctgacgga

SEQ ID NO: 222024 - DNA, 75 bp, synthetic construct
  source 1..75: mol_type = other DNA
atcttgtcggagggagacacgctggtggtctggaaactcgatcggctcggtagaagcatgcggcatcttgtcgtt

SEQ ID NO: 222025 - DNA, 75 bp, synthetic construct
  source 1..75: mol_type = other DNA
cgctacaccgtgaagcacagtctgatttttgccagcgttatcaccctgctgcaggcgtatgtgtttaccgggatg

SEQ ID NO: 222026 - DNA, 75 bp, synthetic construct
  source 1..75: mol_type = other DNA
ctggaatggtcttccccgacagatgacgatgagctgccggaagtcaccggacctgcgtggatagtcgacaatgtg

SEQ ID NO: 222027 - DNA, 75 bp, synthetic construct
  source 1..75: mol_type = other DNA
cgtcatagtgacggcactggtaacgaggaaagacctctgcgaggtggaggtcgctgtcttcacagcttacgaacc

SEQ ID NO: 222028 - DNA, 75 bp, synthetic construct
  source 1..75: mol_type = other DNA
aggaaagacctctgtgaggtacgaatccgaaccgggcagacggaggtcgctgtcttcacagcttacgaacctgag

SEQ ID NO: 222029 - DNA, 75 bp, synthetic construct
  source 1..75: mol_type = other DNA
atgaagcagcaaaaggcgatgttaatcgccctgatcgtcatctgtttaaccgtcgttgtgacggcactggtaacg

SEQ ID NO: 222030 - DNA, 75 bp, synthetic construct
  source 1..75: mol_type = other DNA
atgaagcagcataaggcgatgattgtcgccctgatcgtcatctgtatcaccgccgtagtggcggcgctggtaacg

SEQ ID NO: 222031 - DNA, 75 bp, synthetic construct
  source 1..75: mol_type = other DNA
aggaaagacctctgcgaggtacgaatccgaaccggccagacggaggtcgctgtcttcgtagactacgaatctgag

SEQ ID NO: 222032 - DNA, 75 bp, synthetic construct
  source 1..75: mol_type = other DNA
gacctctgcgaggtacgagtccgaaccggccagacggaggtcgctgtcttcgtagcctacgaacctgaggagtaa

SEQ ID NO: 222033 - DNA, 75 bp, synthetic construct
  source 1..75: mol_type = other DNA
aaaaaacagggagagtctctttcacagagaaaaaggagaaggaaaaaagaacaaaggagggaaaaaggggggatt

SEQ ID NO: 222034 - DNA, 75 bp, synthetic construct
  source 1..75: mol_type = other DNA
gataatgaggaaagacctctgcgaggtacgaatccgaaccggccagacggaggtcgctgtcttcacagcttacga

SEQ ID NO: 222035 - DNA, 75 bp, synthetic construct
  source 1..75: mol_type = other DNA
aaagacctctgcgaggtacgaatccgaaccggtcagacggaggtcgctgtcttcgtagatctgaccatatgttaa

SEQ ID NO: 222036 - DNA, 75 bp, synthetic construct
  source 1..75: mol_type = other DNA
cgtcatagtgacggcactggtaacgaggaaagatctctgcgaggtacgaatccgaaccggccagacggaggtcgc

SEQ ID NO: 222037 - DNA, 75 bp, synthetic construct
  source 1..75: mol_type = other DNA
cgtcataatgacggcactggtaacgaggaaatacctctgcgaggtacgaatccgaaccggccagacggaggtcgc

SEQ ID NO: 222038 - DNA, 75 bp, synthetic construct
  source 1..75: mol_type = other DNA
atgatgcagcaaaaggcgatgttaatcgccctgatcgtcatctgtattaccgttgttgtgacggcactggtaacg

SEQ ID NO: 222039 - DNA, 75 bp, synthetic construct
  source 1..75: mol_type = other DNA
catccaggtgccgtcaaactatgacccggtaaaacgcacgtacagtggtatctgggacggcagtctgaaaccggc

SEQ ID NO: 222040 - DNA, 75 bp, synthetic construct
  source 1..75: mol_type = other DNA
atctggcgctggcgaaatgggacaccccacgggtggtgaagggcgtgcgcttcagtcttcgcctgaccagcggga

SEQ ID NO: 222041 - DNA, 75 bp, synthetic construct
  source 1..75: mol_type = other DNA
ttgaaaccacagcccgttatcttggtaccggaagtcagtggcttgtctccggccagaatattaaacctggccatg

SEQ ID NO: 222042 - DNA, 75 bp, synthetic construct
  source 1..75: mol_type = other DNA
gtcaccatcagcgatgatcataactttgaccgccagattattattccgcccattatttttaacggtatagcgtat

SEQ ID NO: 222043 - DNA, 75 bp, synthetic construct
  source 1..75: mol_type = other DNA
gtgataaagaccgaactgctggaaacgcagacggttgatttcacactcgggtctcaggggctgcggcacacaccc

SEQ ID NO: 222044 - DNA, 75 bp, synthetic construct
  source 1..75: mol_type = other DNA
aatccatcgaaggtgaagaagaagggctgaaaacacgcgtttcatcattcctcggcgctatcgtgcagattatgc

SEQ ID NO: 222045 - DNA, 75 bp, synthetic construct
  source 1..75: mol_type = other DNA
tgcgcctgacctgactgaaatcaggacgtccataacggatgtcagcaatgaaataacacagaccgtcaataagaa

SEQ ID NO: 222046 - DNA, 75 bp, synthetic construct
  source 1..75: mol_type = other DNA
tccactccgttcagctatttcatgaggatggcgtcagggggaggagatgtcaggatcaagttccggattgaggtc

SEQ ID NO: 222047 - DNA, 75 bp, synthetic construct
  source 1..75: mol_type = other DNA
cgcccctgaccggatacaggtcagcgccctgccggatggcgtggagacatacggtgtgtggggactctccctgcc

SEQ ID NO: 222048 - DNA, 75 bp, synthetic construct
  source 1..75: mol_type = other DNA
attgatgccgccagccgtaccctgacgctggaccgtgaggtgacactgccggagacagggacatcgacggtgaac

SEQ ID NO: 222049 - DNA, 75 bp, synthetic construct
  source 1..75: mol_type = other DNA
tccggctgcccgtctggttgccgtgccggatgccatccgttgtgtgaactgccagaacatcatggaggccggtca

SEQ ID NO: 222050 - DNA, 75 bp, synthetic construct
  source 1..75: mol_type = other DNA
ttttgtcatttgcccttgacccgatgccggacaacatggcgtatggtgaacaacaaccttccagcagcgaattgc

SEQ ID NO: 222051 - DNA, 75 bp, synthetic construct
  source 1..75: mol_type = other DNA
acgcgtgctgttcctgggttccggtgggctttcccatcagccgccggtgccagaactggcgaaagccgatgccca

SEQ ID NO: 222052 - DNA, 75 bp, synthetic construct
  source 1..75: mol_type = other DNA
ggccagtgaaacgcgtttacgcgagatggaacgttatgtcacttccgataccttcacactgcgtagccgtttccg

SEQ ID NO: 222053 - DNA, 75 bp, synthetic construct
  source 1..75: mol_type = other DNA
ggacgcctttatattgcgggtatcggtgccggtattgagaacacccccgacggcatgcagagtcaggtgctgctg

SEQ ID NO: 222054 - DNA, 75 bp, synthetic construct
  source 1..75: mol_type = other DNA
agaccagagtgcagcgatccagcagatacagaaggttcaggttgatacaaataataacctgaacagcatgtgggc

SEQ ID NO: 222055 - DNA, 75 bp, synthetic construct
  source 1..75: mol_type = other DNA
ggcaagtgaaaagcgtttacgtgaaatggaacgttatgtgacgtccgatactttttccttacgtagtcgcttccg

SEQ ID NO: 222056 - DNA, 75 bp, synthetic construct
  source 1..75: mol_type = other DNA
catatatcccgggtcatccactccgttcagctatttcatgaggatggcgtcagggggaggtgatgtcaggatcaa

SEQ ID NO: 222057 - DNA, 75 bp, synthetic construct
  source 1..75: mol_type = other DNA
aatgtcgtgatagcggagaactgtaccatcaaaggtactctgagagcggaaaatatcattggcgatgtggtgaaa

SEQ ID NO: 222058 - DNA, 75 bp, synthetic construct
  source 1..75: mol_type = other DNA
tcaaagggtgaccgtaatccgtcctctgtccgtctgctgattcagttacagcgtaacggtaactgggtgacagaa

SEQ ID NO: 222059 - DNA, 75 bp, synthetic construct
  source 1..75: mol_type = other DNA
tgcctgccggacaggggacgctgacactgacattcaccgtatcttcatcaggagcgaataactggacaccaacaa

SEQ ID NO: 222060 - DNA, 75 bp, synthetic construct
  source 1..75: mol_type = other DNA
tcagtggcagtgtgaatgcgaactcagggacgctcaacaacgtcacgattaatgagaactgtcagattaagggga

SEQ ID NO: 222061 - DNA, 75 bp, synthetic construct
  source 1..75: mol_type = other DNA
gtggaggtgaattacaccgacccgcagaacggctggcagacctccacggaactggtggaagacccggaagccata

SEQ ID NO: 222062 - DNA, 75 bp, synthetic construct
  source 1..75: mol_type = other DNA
tggatgaagtcgaccgtgaactggcggcaagggaaacgcgtttacgcgagaggaacgttatgtcacttccgatac

SEQ ID NO: 222063 - DNA, 75 bp, synthetic construct
  source 1..75: mol_type = other DNA
actgtgtcatcagagggaaactgtctgcaaaccagattgaaggcgacctggtgaagacggtggggaaagcctttc

SEQ ID NO: 222064 - DNA, 75 bp, synthetic construct
  source 1..75: mol_type = other DNA
tgccaatccggtacgtgggggacaataggtggaaaactcaaagttactcagctttccaccacaggttatctgggg

SEQ ID NO: 222065 - DNA, 75 bp, synthetic construct
  source 1..75: mol_type = other DNA
taggtggaaaactcaaagttactcagctttccaccacaggttatctggggcaattcgacttctgtgccattgcca

SEQ ID NO: 222066 - DNA, 75 bp, synthetic construct
  source 1..75: mol_type = other DNA
ggctgggcgataaaatcagttgctcgccgaccgctgaaaatgttgctggctgtggtgctggaaccgctgttaagt

SEQ ID NO: 222067 - DNA, 75 bp, synthetic construct
  source 1..75: mol_type = other DNA
agaaagtagaaccggaatttttgatcacaaactatattcaaaataaagaagggggctatatggctcgtttaacag

SEQ ID NO: 222068 - DNA, 75 bp, synthetic construct
  source 1..75: mol_type = other DNA
tgttggtgcagttatctaactatattttcccactgattacattaccatatcttgtcagaactttaggagtagata

SEQ ID NO: 222069 - DNA, 75 bp, synthetic construct
  source 1..75: mol_type = other DNA
gacctggctgaaatcaggacgtccattacgaatgtcagcaatgaaatcacgcagaccgtcaataaaaaactggaa

SEQ ID NO: 222070 - DNA, 75 bp, synthetic construct
  source 1..75: mol_type = other DNA
gggactcccgtgcaccggagcggtggccatcagggaccattaccgtcagggtttatgacgatcagccgtttgacc

SEQ ID NO: 222071 - DNA, 75 bp, synthetic construct
  source 1..75: mol_type = other DNA
aaagcgatacaggagatacgcgaagagctgtcgcccgcgcaggaagacgaacatggcagcggatcgcggcaactg

SEQ ID NO: 222072 - DNA, 75 bp, synthetic construct
  source 1..75: mol_type = other DNA
agtatctctacttcgcgatatttttctcattaagtgttgagacactcaatattatccgtgaaagaaaaaataaaa

SEQ ID NO: 222073 - DNA, 75 bp, synthetic construct
  source 1..75: mol_type = other DNA
gttgagacactcaatattatccgtgaaagaagaaataaaaaagtttcgacattgatcgaaacgcatgaatcgcac

SEQ ID NO: 222074 - DNA, 75 bp, synthetic construct
  source 1..75: mol_type = other DNA
gaaaacaaaaaatggcataccctatgttgccggtattggagcggggattgaggatactgatggccagcccctgag

SEQ ID NO: 222075 - DNA, 75 bp, synthetic construct
  source 1..75: mol_type = other DNA
ggtggtgaagggggtgcgcttcagtctgcgtctgaccagcggaagcggtcaggacagccgtctggtgaccaccgc

SEQ ID NO: 222076 - DNA, 75 bp, synthetic construct
  source 1..75: mol_type = other DNA
atagctatccgggaagtggtaataacccgggaggtacaagatacacgggttatggttttgaagttcgcaaaaacg

SEQ ID NO: 222077 - DNA, 75 bp, synthetic construct
  source 1..75: mol_type = other DNA
ggccatcagggaccattaccgtcaggatttatgacgatcagccgtttgaccggcagattgttattccggcggtgg

SEQ ID NO: 222078 - DNA, 75 bp, synthetic construct
  source 1..75: mol_type = other DNA
agtggaccgggtgagcagtgaaatctcacagactgtcagccaggggcagtcagaaaacgcccgacagatagcaca

SEQ ID NO: 222079 - DNA, 75 bp, synthetic construct
  source 1..75: mol_type = other DNA
ccgattctggtcgctggtcaggtaacgggaatcgatccgtttgatattggcgcaatggcgggacgtcagttaccg

SEQ ID NO: 222080 - DNA, 75 bp, synthetic construct
  source 1..75: mol_type = other DNA
cgtgctgattcaactgttaaccaacggcggcccggatcgtcttggcacgaccacgccagccggttataccgacct

SEQ ID NO: 222081 - DNA, 75 bp, synthetic construct
  source 1..75: mol_type = other DNA
gagctttggtgaaatcaacatgatgctgagcgcgctgtttggcgtgaagcccgcctggttcagcgacccgactac

SEQ ID NO: 222082 - DNA, 75 bp, synthetic construct
  source 1..75: mol_type = other DNA
tattcgtcctcttccctctggtctgcaccatcgccattgccttcaccaactacagcagcactaaccagctgactt

SEQ ID NO: 222083 - DNA, 75 bp, synthetic construct
  source 1..75: mol_type = other DNA
ccttcgccagacttccgcttatatgcagtgaactgcatattgccccgtcaacgtattaccactgtcagcaacagc

SEQ ID NO: 222084 - DNA, 75 bp, synthetic construct
  source 1..75: mol_type = other DNA
attgctggaaaggctgggccatattcctccggcagaagcagaaaaagcttattatgcttccatcggaaacgatga

SEQ ID NO: 222085 - DNA, 75 bp, synthetic construct
  source 1..75: mol_type = other DNA
ctgattttacttacgtcagcacatggcagggggtcgtctatgtggcgttaatcattgatgtgtttgccggataca

SEQ ID NO: 222086 - DNA, 75 bp, synthetic construct
  source 1..75: mol_type = other DNA
ctggtataacaatcgacgattgctggaaaggctgggccatatcccaccggcagaagcagaaaaagcttattatgc

SEQ ID NO: 222087 - DNA, 75 bp, synthetic construct
  source 1..75: mol_type = other DNA
actaacgtgggtggactggtataacaatagacgattgctggaaaggctgggccatattcctccggcagaagcaga

SEQ ID NO: 222088 - DNA, 75 bp, synthetic construct
  source 1..75: mol_type = other DNA
cagataaaaccaaaacatttgctgaaattaaagattattatcgcaaaggttatgtgacagatatcgagatgattg

SEQ ID NO: 222089 - DNA, 75 bp, synthetic construct
  source 1..75: mol_type = other DNA
ggatggcaacaaagtgatgatgagctccctgcgccagttttctggcacgcagccgctctacacactcgacggtga

SEQ ID NO: 222090 - DNA, 75 bp, synthetic construct
  source 1..75: mol_type = other DNA
gcatcaatggtctttacaaagcggaggtaatacaccgtaagagctggaaaaaacgtgcagaagtggaactggcca

SEQ ID NO: 222091 - DNA, 75 bp, synthetic construct
  source 1..75: mol_type = other DNA
atgaaaatacgcaaaggtatcagagtggccagatgcactgtggcacgtctcatggcagttatgggacttgccggt

SEQ ID NO: 222092 - DNA, 75 bp, synthetic construct
  source 1..75: mol_type = other DNA
catccggataaacgcagtgcccgtgcgcagcacgatgactggctgaagagagagatacagcgcgtatacgatgaa

SEQ ID NO: 222093 - DNA, 75 bp, synthetic construct
  source 1..75: mol_type = other DNA
gggtggactggtataacaatcgacgattgctggaaaggctgggccatactcctccggcagaagtaatgccgatca

SEQ ID NO: 222094 - DNA, 75 bp, synthetic construct
  source 1..75: mol_type = other DNA
taccactgtcagcaacagcgacatcatccttataaacgtagtgcctgtgcacagcgcgatgactggctgaagaaa

SEQ ID NO: 222095 - DNA, 75 bp, synthetic construct
  source 1..75: mol_type = other DNA
actctactcagcacatggcggggcttcgtctatgtggcgttcatcattgatgtgtttgccggatacatcgtgggg

SEQ ID NO: 222096 - DNA, 75 bp, synthetic construct
  source 1..75: mol_type = other DNA
aaacacggcagcgggtagctttaatttttgatgtgggtgtctcaacgttataccgcaaatatcctgcgacattgt

SEQ ID NO: 222097 - DNA, 75 bp, synthetic construct
  source 1..75: mol_type = other DNA
actaacaccagaacaatgggcgcaggcgggtaggttaatagcggcaggggaatcgcgccggagggttgccataat

SEQ ID NO: 222098 - DNA, 75 bp, synthetic construct
  source 1..75: mol_type = other DNA
caacaaatgaccaaaacactgcattacagcgtgacgcgctggagcgctcaggatgtaagctgatatttgaagata

SEQ ID NO: 222099 - DNA, 75 bp, synthetic construct
  source 1..75: mol_type = other DNA
ggtaaaaaggtccgtacgaccatcagccggaaaagccgttgccgcaggcgaccgcgtaaaccgtcagttcgtggc

SEQ ID NO: 222100 - DNA, 75 bp, synthetic construct
  source 1..75: mol_type = other DNA
ctatgcagcgaactgcatattgccccgtcaacgtattaccactgtcagcaacagcgacatcatccggataaacgc

SEQ ID NO: 222101 - DNA, 75 bp, synthetic construct
  source 1..75: mol_type = other DNA
ggcctacacgcagcggcttaaggaagccggcttactggcatcaacagggagtactggtgactcgtatgacaacgc

SEQ ID NO: 222102 - DNA, 75 bp, synthetic construct
  source 1..75: mol_type = other DNA
cccgtcaacgtattaccactgtcagcaacagcgacatcatcctgataaacgcagtgcacatgcacagcgcgatga

SEQ ID NO: 222103 - DNA, 75 bp, synthetic construct
  source 1..75: mol_type = other DNA
tctatggaaacgacattcgtgctggatgcactggagcaggcattatggtcccgtcgcccgtccggcacagtccat

SEQ ID NO: 222104 - DNA, 75 bp, synthetic construct
  source 1..75: mol_type = other DNA
agaagcaaaactgctggcatcaacagggagtacaggtgactcgtatgacaacgcgatggcggagagcatcaatgg

SEQ ID NO: 222105 - DNA, 75 bp, synthetic construct
  source 1..75: mol_type = other DNA
catcgtgggatggcaggtctcatcatccatggaaacaacattcgtgctggatgcactggagcaggcgttgtgggc

SEQ ID NO: 222106 - DNA, 75 bp, synthetic construct
  source 1..75: mol_type = other DNA
tacgggaaggtatcagagtggccagatgcactgtggcacgtctcatggcagttatgggacttgccggtgttctcc

SEQ ID NO: 222107 - DNA, 75 bp, synthetic construct
  source 1..75: mol_type = other DNA
tgatgaaccgcctgcgccaccataccaggttaccgataccgatgatgttggcccacttccggaagaagacgagaa

SEQ ID NO: 222108 - DNA, 75 bp, synthetic construct
  source 1..75: mol_type = other DNA
caatcgacgattgctggaaaggctgggccatattcctccggcagaagcagaaaaagcttattatgcttccatcgg

SEQ ID NO: 222109 - DNA, 75 bp, synthetic construct
  source 1..75: mol_type = other DNA
cgcgaaggtatcagggtggccagatgtacagtggcgcgcctcatggcggttatggggacttgccggtgttctccg

SEQ ID NO: 222110 - DNA, 75 bp, synthetic construct
  source 1..75: mol_type = other DNA
tgatgccagctgtcatatctcgttttcatcagcagcatccgcaggtaaaagtacgcattatggaagggcaactgg

SEQ ID NO: 222111 - DNA, 75 bp, synthetic construct
  source 1..75: mol_type = other DNA
catattgccccgtcaacgtattaccactgtcagcaacagcgacatcatcctgataaacgcagtgcccgtgcgcag

SEQ ID NO: 222112 - DNA, 75 bp, synthetic construct
  source 1..75: mol_type = other DNA
tgccgcaggcgaccgcgtaaaccgtcagtttgtggcagaacgttctgaccagttgtgggtggctgattttactta

SEQ ID NO: 222113 - DNA, 75 bp, synthetic construct
  source 1..75: mol_type = other DNA
gaacgacctgaccagctgtgggtggcgttttacttacgtcagcacatggcagggcttcgtctatgtggcgttcat

SEQ ID NO: 222114 - DNA, 75 bp, synthetic construct
  source 1..75: mol_type = other DNA
ggtaaaaaggcccgcactaccgtcagccggaaagccgttgccgcaggcgaccgcgtaaaccgtcagtttgtggca

SEQ ID NO: 222115 - DNA, 75 bp, synthetic construct
  source 1..75: mol_type = other DNA
cgggaaggtatcagagtggccagatgcactgtggcacgtctcatggcggttatgggacttgccagtgttctccgt

SEQ ID NO: 222116 - DNA, 75 bp, synthetic construct
  source 1..75: mol_type = other DNA
tccgcactaccgtcagccggaaagccgttgccgcaggcgaccgcgtaaaccgtcagtttgtagcagaacgtcctg

SEQ ID NO: 222117 - DNA, 75 bp, synthetic construct
  source 1..75: mol_type = other DNA
agcggcttaaggaagccggattactggcatcaacaggaagtactggtgactcgtatgacaacgcgatggcggaga

SEQ ID NO: 222118 - DNA, 75 bp, synthetic construct
  source 1..75: mol_type = other DNA
tggagcaggcgttgtgggcccgtcggccgtccggcacaatccatcacagtgataaaggttctcagtatgtatcgc

SEQ ID NO: 222119 - DNA, 75 bp, synthetic construct
  source 1..75: mol_type = other DNA
gggtgggctggtataacaatcgacgattgctggaaaggctgggccatattcctccggcagaagcagaaaaagctt

SEQ ID NO: 222120 - DNA, 75 bp, synthetic construct
  source 1..75: mol_type = other DNA
ctggagcgtgaaaaccgcgaactgcgccgcagcaacgatatcctgcgccaggcttccgcgtattttgcgaaggcg

SEQ ID NO: 222121 - DNA, 75 bp, synthetic construct
  source 1..75: mol_type = other DNA
tatgggacttgccggtgttctctggggtaaaaaggtccgtacgaccatcagccggaaagccgttgccgcaggcga

SEQ ID NO: 222122 - DNA, 75 bp, synthetic construct
  source 1..75: mol_type = other DNA
gtggcacgtctcatggcggttatggggcttgccggtgttctccggggtaaaaaggtccgcactaccgtcagccgg

SEQ ID NO: 222123 - DNA, 75 bp, synthetic construct
  source 1..75: mol_type = other DNA
cactggcctataaggcgcgactaaaagaagcaaaactgctggcatcaacagggagtactggtgactcgtatgaca

SEQ ID NO: 222124 - DNA, 75 bp, synthetic construct
  source 1..75: mol_type = other DNA
cgaactggtgatcccgattcaggcctatgcataccggatgaatacccgcatgaatcccgttgccgaacgcttctg

SEQ ID NO: 222125 - DNA, 75 bp, synthetic construct
  source 1..75: mol_type = other DNA
tcgcagatccgccatctgttgcaacagttagagagcaaccttgcagaactccgtggtggcagcgattacgcgcaa

SEQ ID NO: 222126 - DNA, 75 bp, synthetic construct
  source 1..75: mol_type = other DNA
gtaatacaccgtaagagctggaaaaaccgtgcagaagtagaactggccacactcacgtgggtggactggtataac

SEQ ID NO: 222127 - DNA, 75 bp, synthetic construct
  source 1..75: mol_type = other DNA
gtaatcgacgaacgcacagaactggttgccagaaccattaccgactacctcaagcgcaccaacccgatggataaa

SEQ ID NO: 222128 - DNA, 75 bp, synthetic construct
  source 1..75: mol_type = other DNA
ggcaaagttgtgggtggctgattttacttacggtgtgcccggaattcagggtgagcacggatgctcaaatgaacc

SEQ ID NO: 222129 - DNA, 75 bp, synthetic construct
  source 1..75: mol_type = other DNA
cagtattgataccagtaccccaatgggacgtttcttttttcatgtcatgggggccctggctgaaatggagcgcga

SEQ ID NO: 222130 - DNA, 75 bp, synthetic construct
  source 1..75: mol_type = other DNA
cgcatccataagtctgctatttgtgaacctttgcagggggaaaacgcctggagttacgcagaaaaactgaaactg

SEQ ID NO: 222131 - DNA, 75 bp, synthetic construct
  source 1..75: mol_type = other DNA
gagcgaattaatgaacatttttatctcaatattgaacaactgcgtaaacaaggggtacggatatcgattgatgac

SEQ ID NO: 222132 - DNA, 75 bp, synthetic construct
  source 1..75: mol_type = other DNA
aaaggcagagtaggtggacgccgtcctaagttgaccagcgaacagtgggcacagattgggcgtttactcgaggcc

SEQ ID NO: 222133 - DNA, 75 bp, synthetic construct
  source 1..75: mol_type = other DNA
tggtctggaagctggaccggctggggcgtagtatgcggcatctggtcattctggttgaggaactgcgcgaacgcg

SEQ ID NO: 222134 - DNA, 75 bp, synthetic construct
  source 1..75: mol_type = other DNA
atgcttattggctatgtacgcgtatcaacaaatgaccagaacaccgatctgcaacgtaatgcactgaactgcgcg

SEQ ID NO: 222135 - DNA, 75 bp, synthetic construct
  source 1..75: mol_type = other DNA
ttttttgagtcagttatcaatgtcctgaaaaatgattacggggtgagtatcgtaaaaaagcggcccggcaagtcc

SEQ ID NO: 222136 - DNA, 75 bp, synthetic construct
  source 1..75: mol_type = other DNA
ctggaggacatcccggaagaccagcgaattgagtccggtatttcttccgccgcggcgatggagattatcagcaac

SEQ ID NO: 222137 - DNA, 75 bp, synthetic construct
  source 1..75: mol_type = other DNA
tgctattacggagaatccagaagtggcgcggtagcgctgtacctccagaacaaacatggattcactccgaataag

SEQ ID NO: 222138 - DNA, 75 bp, synthetic construct
  source 1..75: mol_type = other DNA
gtttatttaatgaccactcgagttttccgtcggcaattttctgaaatgaccgaactggttaatacgctggcgttt

SEQ ID NO: 222139 - DNA, 75 bp, synthetic construct
  source 1..75: mol_type = other DNA
cctctgtgttgagatcactgaaaccgtgatcgagcgaattaatgaacattttggtgatgctgccaacttactgat

SEQ ID NO: 222140 - DNA, 75 bp, synthetic construct
  source 1..75: mol_type = other DNA
gggccctggctgaaatggaacgagaactgattgttgaacgaacaaaagctggactggaagcagctcgcgcacagg

SEQ ID NO: 222141 - DNA, 75 bp, synthetic construct
  source 1..75: mol_type = other DNA
tggccgtctggcggctggatcggctcgggcgctctatgccgcacctaatcgaaacgataggcgcgctggaagcgc

SEQ ID NO: 222142 - DNA, 75 bp, synthetic construct
  source 1..75: mol_type = other DNA
ggtgttgctgattggcttctcttttggcgcactgttagaaggagctgcgggctttggcgcgccggtggcgattac

SEQ ID NO: 222143 - DNA, 75 bp, synthetic construct
  source 1..75: mol_type = other DNA
attcgaccctctctcggctggcggcaccgctatttttattgcggcgattatctctatcttcatcctcggcgtggg

SEQ ID NO: 222144 - DNA, 75 bp, synthetic construct
  source 1..75: mol_type = other DNA
gccggacgacaaattgcatcaggagtttctcgccagaaggtggtgatcatctatgatgttggcgtatcgactttg

SEQ ID NO: 222145 - DNA, 75 bp, synthetic construct
  source 1..75: mol_type = other DNA
tggtgggcctgggcttcaaaccgttatacgcggcggggctgtgtctgattgccaacactgcgccggtggcgtttg

SEQ ID NO: 222146 - DNA, 75 bp, synthetic construct
  source 1..75: mol_type = other DNA
ccactctccgctggcggaactgcgatttttatcgcggcaattatctctatcttcattcttggtgtcgggatcaag

SEQ ID NO: 222147 - DNA, 75 bp, synthetic construct
  source 1..75: mol_type = other DNA
cagttctttacctctaactatattggtccggaactgccggatattacttcggcgctggtgagtatcgtctcactc

SEQ ID NO: 222148 - DNA, 75 bp, synthetic construct
  source 1..75: mol_type = other DNA
cttattgaggaattgcgggaaaaaggtgttaatttccgtagtctgacggacagcattgacacatcaacacccatg

SEQ ID NO: 222149 - DNA, 75 bp, synthetic construct
  source 1..75: mol_type = other DNA
gcaggataggaggacgccgctcaaagctggcaccagagcaatgggaacagatcggaagacttattgcgaatggtg

SEQ ID NO: 222150 - DNA, 75 bp, synthetic construct
  source 1..75: mol_type = other DNA
atagcaaggctgattaaaaacggtcacgacagaaaacaactggcaataatttacggcattggtatatcgacgatt

SEQ ID NO: 222151 - DNA, 75 bp, synthetic construct
  source 1..75: mol_type = other DNA
ttacgacatcggcatatcgacgatttatcgttatcaccctgtaggcgatatacaggctgaagaaacaaccagaca

SEQ ID NO: 222152 - DNA, 75 bp, synthetic construct
  source 1..75: mol_type = other DNA
cggcatggggccagaaactccgctgggcgaaccgaaaaacaaatatatggaactgggtccacgcgacaaagtttc

SEQ ID NO: 222153 - DNA, 75 bp, synthetic construct
  source 1..75: mol_type = other DNA
cgctacaacaccaatggcggtatcgtaactggtgacggtatgggtatggcgctgagccatggcgttccgctgcgt

SEQ ID NO: 222154 - DNA, 75 bp, synthetic construct
  source 1..75: mol_type = other DNA
ggaacgaccaggcctgaaacgcgctttaaagtgccttaaaagaggggatacattggtggtctggaagctggatcg

SEQ ID NO: 222155 - DNA, 75 bp, synthetic construct
  source 1..75: mol_type = other DNA
ggtactgacgggacatggtgcaactatcgatacgacaacacctgccggtaaacttgtatttggtatttttgcagc

SEQ ID NO: 222156 - DNA, 75 bp, synthetic construct
  source 1..75: mol_type = other DNA
gcctgtttgaaagctttacgttctggagacacactacttgtatggaaactggatcgtcttggacgagatctgcgt

SEQ ID NO: 222157 - DNA, 75 bp, synthetic construct
  source 1..75: mol_type = other DNA
agctggactggaagctgctcgcgcacagggacgaattggtggacgtaagccaaaactaacggatgagcagtgggc

SEQ ID NO: 222158 - DNA, 75 bp, synthetic construct
  source 1..75: mol_type = other DNA
gaattaacttccggagtctcactgactccatcgacaccagtacaccaatggggcgctttttctttcacgtaatgg

SEQ ID NO: 222159 - DNA, 75 bp, synthetic construct
  source 1..75: mol_type = other DNA
caaaaggtgtcaattttcgcagtctgacggattcaatcgataccagcactccgatgggaaggttcttttttcata

SEQ ID NO: 222160 - DNA, 75 bp, synthetic construct
  source 1..75: mol_type = other DNA
acgtcaacggcaactctttctctgctacagcaaaagttaaatacgataccggcgttatcgatatcacctttaatg

SEQ ID NO: 222161 - DNA, 75 bp, synthetic construct
  source 1..75: mol_type = other DNA
ggttaccgataccgatgatgtcggcccacttccggaagaagacgagaagaaaatccgcaagtttcacgtcaacgg

SEQ ID NO: 222162 - DNA, 75 bp, synthetic construct
  source 1..75: mol_type = other DNA
gacgaattggtggacgtcgtcccaaacttacaccagaacaatgggagcaggccggacgattaattgcatcaggcg

SEQ ID NO: 222163 - DNA, 75 bp, synthetic construct
  source 1..75: mol_type = other DNA
cagtattgatacgtcatctccaatggggcgttttttcttccacgttatgggtgccctggctgaaatggaacgaga

SEQ ID NO: 222164 - DNA, 75 bp, synthetic construct
  source 1..75: mol_type = other DNA
tcacatctcactgcgtaaattcctggataccttgaatggtgaaagggtcaaaacggttattcgtgttgcgaacca

SEQ ID NO: 222165 - DNA, 75 bp, synthetic construct
  source 1..75: mol_type = other DNA
cggactcgaactggcagcattgcaattctccgcaatgcgcaactggatttcccacgaaatcgatatgatgcgcct

SEQ ID NO: 222166 - DNA, 75 bp, synthetic construct
  source 1..75: mol_type = other DNA
gccgggactgaaaaaactgctcaggacattatcggcaggtgacacgctggtggtctggaaactggaccggctggg

SEQ ID NO: 222167 - DNA, 75 bp, synthetic construct
  source 1..75: mol_type = other DNA
agaaacgacagcgggtggctattatttttgatgtcggaatatcgacactttataaaaagttcccttcaacaagaa

SEQ ID NO: 222168 - DNA, 75 bp, synthetic construct
  source 1..75: mol_type = other DNA
gaaggataggagggaggcgaccaaaactgacagagcagcaatgggaacaggcgggaagactgatcgccgcagggg

SEQ ID NO: 222169 - DNA, 75 bp, synthetic construct
  source 1..75: mol_type = other DNA
ggctataactggcccggaggaagaccaaaaagcgtttaaacaagtcgcaccagatggcactgttgcaaagttagc

SEQ ID NO: 222170 - DNA, 75 bp, synthetic construct
  source 1..75: mol_type = other DNA
aacccgaaaaaacaataccctgttatcgtgacaacgtcagaactgatgacaactggcgtggatgccaaaacctgc

SEQ ID NO: 222171 - DNA, 75 bp, synthetic construct
  source 1..75: mol_type = other DNA
gcgtgtcaacaaatgaccagaacaccgatttgcaacgcaatgcactgaactgtgcgggatgtgagcggatttttg

SEQ ID NO: 222172 - DNA, 75 bp, synthetic construct
  source 1..75: mol_type = other DNA
agcgcggcgtgaatttcagaagtctgactgacagtattgataccagtaccccaatgggccgtttcttttttcatg

SEQ ID NO: 222173 - DNA, 75 bp, synthetic construct
  source 1..75: mol_type = other DNA
gggcgctttttctttcatgtgatgggtgccctggctgaaatggagcgagagtttattgtcgaacgtactagggcg

SEQ ID NO: 222174 - DNA, 75 bp, synthetic construct
  source 1..75: mol_type = other DNA
gccgggactgaaaaaactgctcaggacattatcggagggggatacactggtggtctggaagctggacaggctggg

SEQ ID NO: 222175 - DNA, 75 bp, synthetic construct
  source 1..75: mol_type = other DNA
caagcgtaccaatccgatggataaaaccatcgtcttctgtaacgacatcgatcatgcagaacgtatgcgccgcgc

SEQ ID NO: 222176 - DNA, 75 bp, synthetic construct
  source 1..75: mol_type = other DNA
ggagaatcggcgggcgccgtccaaagttgtcacaggaacaatgggcgcaggccgggcggttactggctgcaggtg

SEQ ID NO: 222177 - DNA, 75 bp, synthetic construct
  source 1..75: mol_type = other DNA
ggattaattttcgcagtctgaccgacagcatagacacatcttctccaatggggcgttttttcttccacgttatgg

SEQ ID NO: 222178 - DNA, 75 bp, synthetic construct
  source 1..75: mol_type = other DNA
atgcttattggccacgtacgcgtatcaacaaatgaccagaacaccgatctacaacgtaatgcgttgaactgtgca

SEQ ID NO: 222179 - DNA, 75 bp, synthetic construct
  source 1..75: mol_type = other DNA
cagcggtcccgcgtcttgcggtgtatgacccgacggtacagtttgagttctggttttcggaggcaaaaatcgcag

SEQ ID NO: 222180 - DNA, 75 bp, synthetic construct
  source 1..75: mol_type = other DNA
cgcagaacggcttcgccatgtaccgggcgatgtcattgaaatctgtgatgatgactatgcggggatcagcatcgg

SEQ ID NO: 222181 - DNA, 75 bp, synthetic construct
  source 1..75: mol_type = other DNA
aaaaacggtgctgaaatttataaccgtaccgcgctggataatacgctgatttacagtggtgttattgatatgcct

SEQ ID NO: 222182 - DNA, 75 bp, synthetic construct
  source 1..75: mol_type = other DNA
tcgcgatgataaatccggagagcggcaacagcacgccgttatttgtggcgcaggggaatcagctgttcatgaacg

SEQ ID NO: 222183 - DNA, 75 bp, synthetic construct
  source 1..75: mol_type = other DNA
aggcccaccgtgccgggctgtgggtgataaagaccggactgctggaaacgcagacggtggatttcacgctcgggt

SEQ ID NO: 222184 - DNA, 75 bp, synthetic construct
  source 1..75: mol_type = other DNA
cagtgcgaactcgggcacgctcaataatgtcgtgatagcggagaactgtacgataaatggcacgctgaaagcgga

SEQ ID NO: 222185 - DNA, 75 bp, synthetic construct
  source 1..75: mol_type = other DNA
cggattaagccggggacggatttctggttttacgtgcgaagcgtcaacctggtgggaaaatctgcttttgtggaa

SEQ ID NO: 222186 - DNA, 75 bp, synthetic construct
  source 1..75: mol_type = other DNA
aacgactatgccgggaccatgaccggcggacgtatcctgtccatcgatgccgccagccgcaccctgacactggac

SEQ ID NO: 222187 - DNA, 75 bp, synthetic construct
  source 1..75: mol_type = other DNA
gataatacgctggtttacagtggtgttattgatatgcctgctggtcgcggccacatgacgctggagttttctgta

SEQ ID NO: 222188 - DNA, 75 bp, synthetic construct
  source 1..75: mol_type = other DNA
ggggcgttacacgctgacggtccgggcggtaaatgcgtggggacagcagggcgatccggcatcggtatcgttccg

SEQ ID NO: 222189 - DNA, 75 bp, synthetic construct
  source 1..75: mol_type = other DNA
tcagaggagatttcgttaaagctgtatcaaaagccttcccgaaaaaagtcggtacgtggggtaacacggaaacac

SEQ ID NO: 222190 - DNA, 75 bp, synthetic construct
  source 1..75: mol_type = other DNA
ccggatacaggtcagtaccctgccggatggcgtggcgacatacggtgtgtggggactctccctgccgtcactgcg

SEQ ID NO: 222191 - DNA, 75 bp, synthetic construct
  source 1..75: mol_type = other DNA
tgatagtgcggaaaaacggtgctgaaatttataaccgtaccgcgctggataatacgctgatttacagtggtgtta

SEQ ID NO: 222192 - DNA, 75 bp, synthetic construct
  source 1..75: mol_type = other DNA
ccggtgctggacagtgaaggtaaggccaatttctccggggtcacggtggtgttccgtgccggtgagcaggagcag

SEQ ID NO: 222193 - DNA, 75 bp, synthetic construct
  source 1..75: mol_type = other DNA
gggaataccaggtgctggcgcgctgggatacgccgaaggtggtgaagggggtgagctttatgcttcgcctgaccg

SEQ ID NO: 222194 - DNA, 75 bp, synthetic construct
  source 1..75: mol_type = other DNA
ataacggtcgggtgatttttcatgagcctgcgacggacactgcgagggttttttcatcggtgattgatatgccgg

SEQ ID NO: 222195 - DNA, 75 bp, synthetic construct
  source 1..75: mol_type = other DNA
aaataggaaaactgcatctggctcaggggctgtgggagctgatagacaacagccagcttgcggataagatggcgg

SEQ ID NO: 222196 - DNA, 75 bp, synthetic construct
  source 1..75: mol_type = other DNA
cagattgataacggtcagcttgcgcctgacctggctgaaatcaggacgtccattacggatgtcagcaatgaaatc

SEQ ID NO: 222197 - DNA, 75 bp, synthetic construct
  source 1..75: mol_type = other DNA
ctggttcagaaacggtgctggggacggaagtgaaatatgacacaccgatcaccaggaccatcacgtcggcaaaca

SEQ ID NO: 222198 - DNA, 75 bp, synthetic construct
  source 1..75: mol_type = other DNA
tgatgatgcatcaggctatctggattttttcaaaggagagatagggaaaacccatctggctcaggagctgtggac

SEQ ID NO: 222199 - DNA, 75 bp, synthetic construct
  source 1..75: mol_type = other DNA
ccagtatcaatattaagccgggttctgattactacttttatatccgtagtgtgaacaccgttggcaaatcggtat

SEQ ID NO: 222200 - DNA, 75 bp, synthetic construct
  source 1..75: mol_type = other DNA
ttgaaatctgcgatgatgactatgcggggatcagcgatcggcgggcgcgtgctggcggtgaacagccagacccgg

SEQ ID NO: 222201 - DNA, 75 bp, synthetic construct
  source 1..75: mol_type = other DNA
ctgtcggtcgggcgagcgatgatgcggaaggttacctggattttttcaaaggagaaatcgggaaaacacatctgg

SEQ ID NO: 222202 - DNA, 75 bp, synthetic construct
  source 1..75: mol_type = other DNA
cgattaagggcatgctggaggcgacccaggtcagaggggatttcgttaaagctgtatcaaaagccttcccgaaaa

SEQ ID NO: 222203 - DNA, 75 bp, synthetic construct
  source 1..75: mol_type = other DNA
ctgggcgtggaagtgacgaaggcaaagccggtaacgcgcaccattacatccgcgaacattgaccgcctgcgggtc

SEQ ID NO: 222204 - DNA, 75 bp, synthetic construct
  source 1..75: mol_type = other DNA
accatcacagaaacccgcaatgaaatcacacagacggtcagtaaaacgctggaggaccagagcgccaccatacag

SEQ ID NO: 222205 - DNA, 75 bp, synthetic construct
  source 1..75: mol_type = other DNA
atgatgagcgtgattgatgcgattggtgagggaccgatagaaggcccggtgaaaggcctgcagagtattctggtg

SEQ ID NO: 222206 - DNA, 75 bp, synthetic construct
  source 1..75: mol_type = other DNA
tcttgcggtgtatgacccgacggtacagtttgagttctggttttcggaggcaaaaatcgcagacacatctcaggt

SEQ ID NO: 222207 - DNA, 75 bp, synthetic construct
  source 1..75: mol_type = other DNA
ggcaggttgaaaccacagcccgctatcttggcacggcgctgtactggatagctgccagtatcaatatcaaaccgg

SEQ ID NO: 222208 - DNA, 75 bp, synthetic construct
  source 1..75: mol_type = other DNA
aagtatctgacggctcccaccattaccagcggcggtaatcctccggcattttccctgacaccggacgggcggctg

SEQ ID NO: 222209 - DNA, 75 bp, synthetic construct
  source 1..75: mol_type = other DNA
gccatgtcaccctgactttcaatgtttcttcatatggtgcaaataactggacgccaacgaccagtatcagcgacc

SEQ ID NO: 222210 - DNA, 75 bp, synthetic construct
  source 1..75: mol_type = other DNA
atgcgaactccgggacgctcaataatgttacgattaaccagaactgtcggattctgggaaaactgtcagctaacc

SEQ ID NO: 222211 - DNA, 75 bp, synthetic construct
  source 1..75: mol_type = other DNA
tggaggtgaattacaccgacccgcagaacggctggcagacctccacggaactggtggaagacccggaagccatac

SEQ ID NO: 222212 - DNA, 75 bp, synthetic construct
  source 1..75: mol_type = other DNA
ggtgcctgtgggacatgctgactcacccgcgctacggcatgggaaaacgtctggtggcggcggatgttgacaagt

SEQ ID NO: 222213 - DNA, 75 bp, synthetic construct
  source 1..75: mol_type = other DNA
gtgcgctgcacggtgcaagcgggattgatgaacccgaagtataaagttgaaattaaaattattgcggcggtttaa

SEQ ID NO: 222214 - DNA, 75 bp, synthetic construct
  source 1..75: mol_type = other DNA
gaaaaacggtgctgaaatttataaccgtaccgcgttggataatacgctgatttacagtggtgttattgatatgcc

SEQ ID NO: 222215 - DNA, 75 bp, synthetic construct
  source 1..75: mol_type = other DNA
tggctttcagcggtgccagacatgaacgggagaatagcgatacttattcgtcatgccgcctgatagtgaagaaaa

SEQ ID NO: 222216 - DNA, 75 bp, synthetic construct
  source 1..75: mol_type = other DNA
ttacaccgacccgcagaacggctggcagacctccacggaactggtggaagacccggaagccatactgcgctacgg

SEQ ID NO: 222217 - DNA, 75 bp, synthetic construct
  source 1..75: mol_type = other DNA
tatgggacacgccgcgggtggtgaagggcgtgcgcttcagtctgcgcctgaccagtggcagtggtgagaacagcc

SEQ ID NO: 222218 - DNA, 75 bp, synthetic construct
  source 1..75: mol_type = other DNA
gcggatatcagtggagccatcacggcgaataccggcacgctcaataatgtcaccattaacgagaactgtgtcatc

SEQ ID NO: 222219 - DNA, 75 bp, synthetic construct
  source 1..75: mol_type = other DNA
ctgctggcggcagacaggattgcgatgattaatcctgcgaatggcaacacaaaaccgatgtttgttggtcagggc

SEQ ID NO: 222220 - DNA, 75 bp, synthetic construct
  source 1..75: mol_type = other DNA
cggctcccaccattaccagtggcggtaatcctccggcattttccctgacaccggacgggcggctgacggcgagaa

SEQ ID NO: 222221 - DNA, 75 bp, synthetic construct
  source 1..75: mol_type = other DNA
acgcgcaccattacatccgcgaacattgaccgcctgcgggtcaccttcggggtgcagtcactggtgcagaccacc

SEQ ID NO: 222222 - DNA, 75 bp, synthetic construct
  source 1..75: mol_type = other DNA
ggccgcggatgtggacaagtgggcgctgtatgccatcgggcagtactgtgaccagcgtgtcccggatggcttcgg

SEQ ID NO: 222223 - DNA, 75 bp, synthetic construct
  source 1..75: mol_type = other DNA
gccgctcggggaatacaccctgacggtgcgggcgataaacagctatggccagcagggtgaacctgccaccaccac

SEQ ID NO: 222224 - DNA, 75 bp, synthetic construct
  source 1..75: mol_type = other DNA
gattgaactgacaccgggctattttcagataacagcggtcccgcgtcttgcggtgtatgacccgacggtacagtt

SEQ ID NO: 222225 - DNA, 75 bp, synthetic construct
  source 1..75: mol_type = other DNA
gccagccgcaccctgacactggaccgtgaggtgaccctgccggagacaggtaccgccactgttaatctgattaac

SEQ ID NO: 222226 - DNA, 75 bp, synthetic construct
  source 1..75: mol_type = other DNA
atatttactcctcatgccgcctgatagtgaagaaaaatggtgctgaaatttataaccgtaccgcgctggataata

SEQ ID NO: 222227 - DNA, 75 bp, synthetic construct
  source 1..75: mol_type = other DNA
aacggtgctgaaatttataaccgtaccgcgctggataatacgctgatttacagtggtgttattgatatgcctgcc

SEQ ID NO: 222228 - DNA, 75 bp, synthetic construct
  source 1..75: mol_type = other DNA
cggacgtgtcctgtccatcgatgccgccagccgcacgcgcagtactgcgaccagacggtcccggatggtttcggg

SEQ ID NO: 222229 - DNA, 75 bp, synthetic construct
  source 1..75: mol_type = other DNA
attcaacctgccggttaagagtgacccgcaatggtcaggagatttttaatcagtccacgacggatgctcagggcg

SEQ ID NO: 222230 - DNA, 75 bp, synthetic construct
  source 1..75: mol_type = other DNA
cggctgacggcgaaaaatgccgatatcagcggtaacgtgaatgcgaactccgggacgctcaataaagtcacgatt

SEQ ID NO: 222231 - DNA, 75 bp, synthetic construct
  source 1..75: mol_type = other DNA
ctgaagcccgctggtctgatgtggtaatccacaacaacacgctctactacactggtgtaccggaaaacctcgacg

SEQ ID NO: 222232 - DNA, 75 bp, synthetic construct
  source 1..75: mol_type = other DNA
ttaagattgtggctgcggtgtcagctttatcgaagcaaaataagtcagacgataatttatcgataatactggtcg

SEQ ID NO: 222233 - DNA, 75 bp, synthetic construct
  source 1..75: mol_type = other DNA
gcaccggagcggtggccatcaggaaccattaccgtcagggtttatgacgatcagccgtttgaccggcagattgtt

SEQ ID NO: 222234 - DNA, 75 bp, synthetic construct
  source 1..75: mol_type = other DNA
tattttcagataacggcggtcccgaaactggctgtatatgacccgacggtgcagtttgagttctggttttcggaa

SEQ ID NO: 222235 - DNA, 75 bp, synthetic construct
  source 1..75: mol_type = other DNA
ctgctggaaacgcagacggtggatttcacgctcgggtcacaggggctgcggcacacgcccggtgacatcattgaa

SEQ ID NO: 222236 - DNA, 75 bp, synthetic construct
  source 1..75: mol_type = other DNA
cggaactggtggaagacccggacgccatcctgcgctacgggcgcaacctgctgaagatggatgcgttcggctgta

SEQ ID NO: 222237 - DNA, 75 bp, synthetic construct
  source 1..75: mol_type = other DNA
agcacctgacggtggaggtgagtgcagctgacggccagtatctggcgcaggctaaatgggacacgccgcgggtgg

SEQ ID NO: 222238 - DNA, 75 bp, synthetic construct
  source 1..75: mol_type = other DNA
ggctcccaccattaccagcggtggcaatcccccaacgttttcactgacacctgatggtcgactttctgcgaaaaa

SEQ ID NO: 222239 - DNA, 75 bp, synthetic construct
  source 1..75: mol_type = other DNA
aggagttgtggacgcagattgataacggtcagcttgcgcctgacctggctgaaatcaggacgtccattacgggtg

SEQ ID NO: 222240 - DNA, 75 bp, synthetic construct
  source 1..75: mol_type = other DNA
aaatccgccggcattttccctgacaccagacggaaagctgactgctaaaaatgcggatatcagcggtaatgtgaa

SEQ ID NO: 222241 - DNA, 75 bp, synthetic construct
  source 1..75: mol_type = other DNA
agtaatgaggagaatgcacgccagatagcgcaggttcgccagtatgtggatcaaaaaagcagtgaaatcatgacg

SEQ ID NO: 222242 - DNA, 75 bp, synthetic construct
  source 1..75: mol_type = other DNA
gcgctggggcgttatatgctgacggtccgggctgtaaatgcccgggggcagcagggtgatccggcgtcggtatcg

SEQ ID NO: 222243 - DNA, 75 bp, synthetic construct
  source 1..75: mol_type = other DNA
cgctggggcgttacacgctgacggtccgggcggtaaatgcgtggggacagcagggcgatccggcatcggtatcgt

SEQ ID NO: 222244 - DNA, 75 bp, synthetic construct
  source 1..75: mol_type = other DNA
cgggcggatcctgtccgtcgacaacgccagccggaccctgacgcttgaccgtgaagtcactctcccggaaaaggg

SEQ ID NO: 222245 - DNA, 75 bp, synthetic construct
  source 1..75: mol_type = other DNA
gggaatacaccctgacggtcagggcgataaacagctatggccagcagggcgaacctgccaccaccacattccgga

SEQ ID NO: 222246 - DNA, 75 bp, synthetic construct
  source 1..75: mol_type = other DNA
acacaccgcgtgaggcgaaggataacctgaagtccacgcagatgatgagcgtgattgatgccattggtgaagggc

SEQ ID NO: 222247 - DNA, 75 bp, synthetic construct
  source 1..75: mol_type = other DNA
aaggtggtgaagggcgtgagcttcctgcttcgcctgactgtaacagcggatgacggcagtgagcggctggtcagc

SEQ ID NO: 222248 - DNA, 75 bp, synthetic construct
  source 1..75: mol_type = other DNA
atccgcgaaaatgcggatggtaccttcgccatcacggcggtgcagcatgtgccggagaaggaggccatcgtggat

SEQ ID NO: 222249 - DNA, 75 bp, synthetic construct
  source 1..75: mol_type = other DNA
accctgcctgatggtgtggagacatacggggtgtggggactctccctgccgtcactgcgccgtcgcctgttccgc

SEQ ID NO: 222250 - DNA, 75 bp, synthetic construct
  source 1..75: mol_type = other DNA
cgctggaccgtgaagtgacacttccggagaccggtgccgccacggtgaacctgattaacggcagcggtaagccgg

SEQ ID NO: 222251 - DNA, 75 bp, synthetic construct
  source 1..75: mol_type = other DNA
accattaacgagaactgtgtcatcagagggaaactgtctgcgaaccagattgaaggcgatctggtgaagacggtg

SEQ ID NO: 222252 - DNA, 75 bp, synthetic construct
  source 1..75: mol_type = other DNA
gagcgcgaccatacagcagatacagcaggtccagtcagacacgaatgatgagctggcagcgctgtacatgctgaa

SEQ ID NO: 222253 - DNA, 75 bp, synthetic construct
  source 1..75: mol_type = other DNA
cctgccagtaccgtgctgcgcgcgctggatattgtaaaacgtgattatgaaaagaaattaacgcgcgatgatgag

SEQ ID NO: 222254 - DNA, 75 bp, synthetic construct
  source 1..75: mol_type = other DNA
tggccggtattggtgcagggattgaggatgttgatggtcagaccctgagtaacattctgctgcaggccgatcgca

SEQ ID NO: 222255 - DNA, 75 bp, synthetic construct
  source 1..75: mol_type = other DNA
cagcagatgcaggatggtcgcctttacattgcgggtatcggtgccggtattgagaatacccctgacggtatgtag

SEQ ID NO: 222256 - DNA, 75 bp, synthetic construct
  source 1..75: mol_type = other DNA
cgttggggcgttacacgctgacagtccgggcggtaaatgcccggggacagcagggcgatccggcgtcggtatcgt

SEQ ID NO: 222257 - DNA, 75 bp, synthetic construct
  source 1..75: mol_type = other DNA
agtcaggtgctgctggcggcagacaggattgcgatgattaatcctgcgaatggcaatacaaagccgatgtttgtt

SEQ ID NO: 222258 - DNA, 75 bp, synthetic construct
  source 1..75: mol_type = other DNA
cccgggcaccggagcggtggccatcagggaccattaccgtcagggtttatgacgatcagccgtttgaccggcaaa

SEQ ID NO: 222259 - DNA, 75 bp, synthetic construct
  source 1..75: mol_type = other DNA
agtgtgaatactgttggcaaatcggcatttgtggaggctgttggccagccgagtgatgatgcatccggctatctg

SEQ ID NO: 222260 - DNA, 75 bp, synthetic construct
  source 1..75: mol_type = other DNA
aaggatgtcaccattaatggcaagaccacctcgcagtttctggcgtcggtgattctggataacctgcctgagcgt

SEQ ID NO: 222261 - DNA, 75 bp, synthetic construct
  source 1..75: mol_type = other DNA
ggaagtgacgaaggcaaagccggtgacgcgcgccattacgtccgcgaacattgaccgcctgcgggtcaccttcgg

SEQ ID NO: 222262 - DNA, 75 bp, synthetic construct
  source 1..75: mol_type = other DNA
gacggcgttgccgaatacagcgtgtgggggctgaagctgccgatgctgcgtcagcgcctgttccgctgtgtgagt

SEQ ID NO: 222263 - DNA, 75 bp, synthetic construct
  source 1..75: mol_type = other DNA
ggtggaaaaatctgcccgttatctggggacaggcagtcagtggactgtccaggggagccggattaagccggggac

SEQ ID NO: 222264 - DNA, 75 bp, synthetic construct
  source 1..75: mol_type = other DNA
gaaggggcaggatttccgtcacgttggtggtgatgagctggataagctgctggcggggaaagatccgaaagagta

SEQ ID NO: 222265 - DNA, 75 bp, synthetic construct
  source 1..75: mol_type = other DNA
gaccagccgggtgctgctgatttgcgatgcaacccatgcgctgccgattcaggtgctacgtaatgacatccgcgt

SEQ ID NO: 222266 - DNA, 75 bp, synthetic construct
  source 1..75: mol_type = other DNA
ggcaagtgaaacgcgtttacgcgagatggaacgttatgtcacttccgacactttcacgctgcgtagccgtttccg

SEQ ID NO: 222267 - DNA, 75 bp, synthetic construct
  source 1..75: mol_type = other DNA
gatgcacaaccaggacagcgatctggcgaagcgcgtcatcgaaggcgacaagaacgtcaacatgatggaagtggc

SEQ ID NO: 222268 - DNA, 75 bp, synthetic construct
  source 1..75: mol_type = other DNA
gcagaagtcaccgcagacagcggggaataccaggtgctggcgcgctgggatacgccgaaggtggtgaagggggtg

SEQ ID NO: 222269 - DNA, 75 bp, synthetic construct
  source 1..75: mol_type = other DNA
cggacacggccatgtcaccctgactttcaatgtttcttcatatggtgcaaataactggacgccaacgaccagtat

SEQ ID NO: 222270 - DNA, 75 bp, synthetic construct
  source 1..75: mol_type = other DNA
gattttccatgaaccggcaacggatgtcagccgggtgttctcatcggtgatagatatgccggcagggcggggtca

SEQ ID NO: 222271 - DNA, 75 bp, synthetic construct
  source 1..75: mol_type = other DNA
aaaactgtccgcgaaccagattgaaggcgatctcgttaaaacagtgggtaaagctttcccccgggactcccgtgc

SEQ ID NO: 222272 - DNA, 75 bp, synthetic construct
  source 1..75: mol_type = other DNA
tgaattctggttctcagaaaaacgcatcacgaacacagcacaggtggaaaaatctgcccgttatctggggaccgg

SEQ ID NO: 222273 - DNA, 75 bp, synthetic construct
  source 1..75: mol_type = other DNA
ggttttatgtgcgcagcgtcaacctggtgggcaagtctgcgtttgtggaagccggcgggcaggccagcaatgatg

SEQ ID NO: 222274 - DNA, 75 bp, synthetic construct
  source 1..75: mol_type = other DNA
tctgcatttggcaactggcgtagcgaagggcgttattaccgcccaatcccggagtggattgccggatttggctcg

SEQ ID NO: 222275 - DNA, 75 bp, synthetic construct
  source 1..75: mol_type = other DNA
gctggaggcgacccaggtcagaggggatttcgttaaagctgtatcaaaagccttcccgaaaaaagtcggtacgtg

SEQ ID NO: 222276 - DNA, 75 bp, synthetic construct
  source 1..75: mol_type = other DNA
ttgaagaagatggggtacgcggcgcacgccgttatcttgatcatctgaaaatggaatatgccttctggatggacg

SEQ ID NO: 222277 - DNA, 75 bp, synthetic construct
  source 1..75: mol_type = other DNA
tatctggattttttcaaaggcgagatagggaaaacccatctggctcaggagctgtggacgcagattgataacggt

SEQ ID NO: 222278 - DNA, 75 bp, synthetic construct
  source 1..75: mol_type = other DNA
gatgcgctgacgcctgccgatcgctatctcgaactgttcgagcatgttcagtcggcgaaaattttccccgacagt

SEQ ID NO: 222279 - DNA, 75 bp, synthetic construct
  source 1..75: mol_type = other DNA
gacccgcaaaattccctgaaagaacatatcgaccagctgtggccggtgcttacccgcgaaccgcaagatcacatt

SEQ ID NO: 222280 - DNA, 75 bp, synthetic construct
  source 1..75: mol_type = other DNA
gggcagggcaatccggtcagcgtggaagtccagtccgtcaccgacggcgtgaaggtgaaagtgagccggtttcct

SEQ ID NO: 222281 - DNA, 75 bp, synthetic construct
  source 1..75: mol_type = other DNA
acgaatcctggcttgaggacgttgaaaccgcgaaacattctggtcgcccgcccaacgaggtgtaccgcgatttac

SEQ ID NO: 222282 - DNA, 75 bp, synthetic construct
  source 1..75: mol_type = other DNA
gacgcattaacaccagccgatcgctatcttgagttgttcgagcatgtccagggcgcgaaaattttcccggacagc

SEQ ID NO: 222283 - DNA, 75 bp, synthetic construct
  source 1..75: mol_type = other DNA
tcctgcaaatggcaacacaaaaccgatgtttgttggtcagggtgatcagatattcatgaatgaagtgttcctgaa

SEQ ID NO: 222284 - DNA, 75 bp, synthetic construct
  source 1..75: mol_type = other DNA
cggtatcagcgtggctggtgaatgactggtatcccacggcaagcatcagcgatttgctggttgtggtgatgaaga

SEQ ID NO: 222285 - DNA, 75 bp, synthetic construct
  source 1..75: mol_type = other DNA
tgctaaaaatgccgatatcagcggtaacgtgaatgcgaactccgggacgctcaacaacgtcacgattaacgagaa

SEQ ID NO: 222286 - DNA, 75 bp, synthetic construct
  source 1..75: mol_type = other DNA
cgttccgttacagcttcagtgccctgaaggaccgtcataatgccgttgaggtgaactgggttgatccggataacg

SEQ ID NO: 222287 - DNA, 75 bp, synthetic construct
  source 1..75: mol_type = other DNA
ccggttgtggatcctgccggaaacgtgaacctgcatggcgtgaccgtggtttaccggaccggagaggaggagcag

SEQ ID NO: 222288 - DNA, 75 bp, synthetic construct
  source 1..75: mol_type = other DNA
cggaggataacgccagcaaactggagcagttttcgaaagagtggaaagacgccagtgataaatggaatgccatgt

SEQ ID NO: 222289 - DNA, 75 bp, synthetic construct
  source 1..75: mol_type = other DNA
tcggtacgtggggtaacacggaaacaccaaacggtacggttacagtcaccactttgaccgccagattattattcc

SEQ ID NO: 222290 - DNA, 75 bp, synthetic construct
  source 1..75: mol_type = other DNA
tgattaatcctgcgaatggcaacacaaagccgatgtttgttgggcagggcgatcagatattcatgaacgacgtgt

SEQ ID NO: 222291 - DNA, 75 bp, synthetic construct
  source 1..75: mol_type = other DNA
acacgtctctggcgtggggggctggcgtgcagtttaacccgaccgaatccgtggccattgatattgcttatgaag

SEQ ID NO: 222292 - DNA, 75 bp, synthetic construct
  source 1..75: mol_type = other DNA
cgcctgcatgggcatctgaacatcagtccacgctgagcgcggggtatcttcatgtctcgacgaacgttcctggca

SEQ ID NO: 222293 - DNA, 75 bp, synthetic construct
  source 1..75: mol_type = other DNA
attttataacccatatacgggcgccagaaatggcgccttttttattgcagaaaagcgagaggtaattatgcgtaa

SEQ ID NO: 222294 - DNA, 75 bp, synthetic construct
  source 1..75: mol_type = other DNA
cgccatgtccccggcgatctcattgaaatctgcgaggatgactctgccggtatcagcaccggtggtcgcgtgctg

SEQ ID NO: 222295 - DNA, 75 bp, synthetic construct
  source 1..75: mol_type = other DNA
tcattgatatgcctgccggacacggtcatgtcaccctgactttcaatgtttcttcatatggtgctaataactgga

SEQ ID NO: 222296 - DNA, 75 bp, synthetic construct
  source 1..75: mol_type = other DNA
tcggtacgtggggtaacacggaaacaccaaacggtacggttacagtcaccatcagcgatgatcataactttgacc

SEQ ID NO: 222297 - DNA, 75 bp, synthetic construct
  source 1..75: mol_type = other DNA
atgggtaaaggcagcagtaaggggcataccccgcgcgaagcgaaggacaacctgaaatcatcccagatactgagc

SEQ ID NO: 222298 - DNA, 75 bp, synthetic construct
  source 1..75: mol_type = other DNA
ataataattgggaaaatttatgggccagaattacttgggaattactctttagcatatagaatgatgttattccct

SEQ ID NO: 222299 - DNA, 75 bp, synthetic construct
  source 1..75: mol_type = other DNA
aacagtcatactggtattcaacctgccggttaagagtgacccgcaatggtcaggagatttttaatcagtccacga

SEQ ID NO: 222300 - DNA, 75 bp, synthetic construct
  source 1..75: mol_type = other DNA
tggcgcaggggaatcagctgttcatgaacgacgtgttcctgaagcgactgtttgcggtgagtatcacgtcatccg

SEQ ID NO: 222301 - DNA, 75 bp, synthetic construct
  source 1..75: mol_type = other DNA
tcaggggctgtgggagctgatagacaacagccagcttgcggatgagatggcggagatgaagaccagcatcacgga

SEQ ID NO: 222302 - DNA, 75 bp, synthetic construct
  source 1..75: mol_type = other DNA
ttgccatcacggcggtgcagcacgtacctgaaaaagaagccatcgtggataacggggcccgctttgagccgcagt

SEQ ID NO: 222303 - DNA, 75 bp, synthetic construct
  source 1..75: mol_type = other DNA
cacaaaaccccgatgaactgcgccgtctggcaacagcgctgctgacggcacaggcatgcgaatatgagcagcgcc

SEQ ID NO: 222304 - DNA, 75 bp, synthetic construct
  source 1..75: mol_type = other DNA
gtaattatcatctgcgcgggcgcattctgcaggtgccgtcgaactatgatccggaaaaacgcacttacagcggta

SEQ ID NO: 222305 - DNA, 75 bp, synthetic construct
  source 1..75: mol_type = other DNA
cggtggtgacaacgaccgtggaggtgcacgataacctgacgggaacaacccgcaaaataccggcataccatctct

SEQ ID NO: 222306 - DNA, 75 bp, synthetic construct
  source 1..75: mol_type = other DNA
atgaaaaaagtgattctaatggccctggctctcggcctgtcactgcctgcaatggcgagtgaaaaagtcattgat

SEQ ID NO: 222307 - DNA, 75 bp, synthetic construct
  source 1..75: mol_type = other DNA
gaaaaacgcatcacgaacacggcacaggtggaaaaatctgcccgttatctggggtccggcagtcagtggactgtc

SEQ ID NO: 222308 - DNA, 75 bp, synthetic construct
  source 1..75: mol_type = other DNA
gcagagtatcctggtgaacaaaaccccgctgacggacacggacggtaatcccgtgatacacggtgtgactgcggt

SEQ ID NO: 222309 - DNA, 75 bp, synthetic construct
  source 1..75: mol_type = other DNA
cggcaatcccccggcgttttccctgacgccggagggcaggctgaccgcaagaaatgctgatatcagcggtaacgt

SEQ ID NO: 222310 - DNA, 75 bp, synthetic construct
  source 1..75: mol_type = other DNA
atccgtgagaacgatgacggcacgtatgccatcactgccgtgcagcatgtaccggaaaaagaagccatcgtggat

SEQ ID NO: 222311 - DNA, 75 bp, synthetic construct
  source 1..75: mol_type = other DNA
taagcatgagaatttcaacagtaataaccaacagtcatactggtattcaacctgccggttaagagtgacccgcaa

SEQ ID NO: 222312 - DNA, 75 bp, synthetic construct
  source 1..75: mol_type = other DNA
aaagcggattaccgatatcaggcaggttgaaaccacagcccgctaccttggcacggggctgtactggatagccgc

SEQ ID NO: 222313 - DNA, 75 bp, synthetic construct
  source 1..75: mol_type = other DNA
caccgtttcagtggcctgcctcccggggaatacaccctgacggtcagggcgattaacagctatggccagcagggc

SEQ ID NO: 222314 - DNA, 75 bp, synthetic construct
  source 1..75: mol_type = other DNA
cggtgagcatcacgtcatccggcaatcctcctacgttttccctgacgccggatggcaggctgacagcccgcaatg

SEQ ID NO: 222315 - DNA, 75 bp, synthetic construct
  source 1..75: mol_type = other DNA
gacggcgttgccgaatacagcgtgtgggggctgaagctgccgacgctgcgccagcgcctgttccgctgtgtgagt

SEQ ID NO: 222316 - DNA, 75 bp, synthetic construct
  source 1..75: mol_type = other DNA
gagaggtggccatcagggaccattaccgtcagggtttatgacgatcagccgtttgaccggcaaattgttattccg

SEQ ID NO: 222317 - DNA, 75 bp, synthetic construct
  source 1..75: mol_type = other DNA
cgccgctgtttgtggcgcaggggaatcagctgttcatgaacgacgtgttcctgaagcgactgtttgcggtgagca

SEQ ID NO: 222318 - DNA, 75 bp, synthetic construct
  source 1..75: mol_type = other DNA
gaacgacctgaccagctgtgggtggctgattttacttacgtccagcacatggcagggcttcgtctgtgtggcgtt

SEQ ID NO: 222319 - DNA, 75 bp, synthetic construct
  source 1..75: mol_type = other DNA
cgctggttggtccggcagcggaagaactgtttgatccggtgccggaacaggacctgtttgaagcgctgaacgaaa

SEQ ID NO: 222320 - DNA, 75 bp, synthetic construct
  source 1..75: mol_type = other DNA
gtgaccatcgaaatttcgaaccaactatcagaggtgctaagcgtcattgagcgccatctcgaaccgacgttgctg

SEQ ID NO: 222321 - DNA, 75 bp, synthetic construct
  source 1..75: mol_type = other DNA
cgcggaagaaaaacacagccaacattgcaaaagaacggttgcagattattgttgctgaacgccgtcgcagcgatg

SEQ ID NO: 222322 - DNA, 75 bp, synthetic construct
  source 1..75: mol_type = other DNA
ccaggcacgtaaatcatatcaggggaaaatcaaaaaacgccgggaaaagcgatgagcttgactggaataacactg

SEQ ID NO: 222323 - DNA, 75 bp, synthetic construct
  source 1..75: mol_type = other DNA
gtgaccgccgaaatttcgacgcaactatccaaggtgcttagtgttatcgagcaccatctggaaccgacgttgctt

SEQ ID NO: 222324 - DNA, 75 bp, synthetic construct
  source 1..75: mol_type = other DNA
ccgccaggcgatggcggaacatggcgaccgctggagctaactgttgtcgctcgaagcgaagtagtgccttggcgc

SEQ ID NO: 222325 - DNA, 75 bp, synthetic construct
  source 1..75: mol_type = other DNA
aagcatccatgaccagcgttgagatcgcagagctggtgggaagccagcattcagatgttaaacgtagtatcgaac

SEQ ID NO: 222326 - DNA, 75 bp, synthetic construct
  source 1..75: mol_type = other DNA
ccgctggcgcgaactggaagaacaaatccgcaaaccaatgagccagattgaaatggttgctgcaatggcgcttga

SEQ ID NO: 222327 - DNA, 75 bp, synthetic construct
  source 1..75: mol_type = other DNA
aggtgaacgaggtaagcgcgacagcatcattgtcgtcgcacagctctgtcctgaattcactgctcgcctggtaga

SEQ ID NO: 222328 - DNA, 75 bp, synthetic construct
  source 1..75: mol_type = other DNA
tcagatgcgaaatgccgcaatctggtgaacgcatatcagatccctaccgacacccatgaatttatgacgccggac

SEQ ID NO: 222329 - DNA, 75 bp, synthetic construct
  source 1..75: mol_type = other DNA
gttgaagggattgacacgtatcttattgaatattcagaaaacaacgtattacgtccttttaatgttgatgtgcct

SEQ ID NO: 222330 - DNA, 75 bp, synthetic construct
  source 1..75: mol_type = other DNA
gaaaacaacttcctgctgccgaatatcgtggtcaacgtgttgtgacgctggcgatgattgatgaagttcaccagc

SEQ ID NO: 222331 - DNA, 75 bp, synthetic construct
  source 1..75: mol_type = other DNA
gttgctgaacgccgtcgcagcgatgcagaaccgcactatctgccgcagttgcgtaaagatattcttgaggtcatt

SEQ ID NO: 222332 - DNA, 75 bp, synthetic construct
  source 1..75: mol_type = other DNA
aattattgtgtgtcagaactcccgtataatacgacgcaaagagcgtattcccggaagcagctgtgaatggaaaga

SEQ ID NO: 222333 - DNA, 75 bp, synthetic construct
  source 1..75: mol_type = other DNA
ctggatttgctggaactgttcttggtctacccaactgctgaccaacttgccagagaacaattattcaatctggta

SEQ ID NO: 222334 - DNA, 75 bp, synthetic construct
  source 1..75: mol_type = other DNA
cgcagcggctttccagcccgaggcatttgtttcgttgctggataaaaccaacaactgcgccagtatggtgttgcg

SEQ ID NO: 222335 - DNA, 75 bp, synthetic construct
  source 1..75: mol_type = other DNA
gaaagtcagttatattcctgcaacagaagatataaacatcgctataatgccatttcagacggcagacaatggctt

SEQ ID NO: 222336 - DNA, 75 bp, synthetic construct
  source 1..75: mol_type = other DNA
gtggcgtatgacttatctgcccatatgctggatgtcgtggcacaagctgccgaagcccggcaactgaaaaatatc

SEQ ID NO: 222337 - DNA, 75 bp, synthetic construct
  source 1..75: mol_type = other DNA
cgcaggtgatccgctccaaaaacgccggaccctatgaactggttttagatattttatttaaaacgaaagaaaact

SEQ ID NO: 222338 - DNA, 75 bp, synthetic construct
  source 1..75: mol_type = other DNA
accagaacaatacacctggatattaaaattgctgaaaacgcgtaaaccgggtgagatccaaccgtataagcgcaa

SEQ ID NO: 222339 - DNA, 75 bp, synthetic construct
  source 1..75: mol_type = other DNA
gatgttatactggagagtgataaactcattataaaacttaaaaaacaatttaactttaagctcattgaacatgaa

SEQ ID NO: 222340 - DNA, 75 bp, synthetic construct
  source 1..75: mol_type = other DNA
aaccaaagtcattagcgactgacaatcatggtataaacaacgttaattttgcgattcttgacatttttggctatc

SEQ ID NO: 222341 - DNA, 75 bp, synthetic construct
  source 1..75: mol_type = other DNA
cctattggctcagtttgctggtgagtgcggggttatctgtgaaattcccccacagattttagaagacagcgggga

SEQ ID NO: 222342 - DNA, 75 bp, synthetic construct
  source 1..75: mol_type = other DNA
gctttgcaatgtgcttgggtcataggcagtgcagaagctgctgtgaaggctgtaagctatctgcaacaactggaa

SEQ ID NO: 222343 - DNA, 75 bp, synthetic construct
  source 1..75: mol_type = other DNA
atttcgcgatcccattctggcgcggctgggacgttttgccggacgattgggtaaaagctcacgtcgtcgtgcgtt

SEQ ID NO: 222344 - DNA, 75 bp, synthetic construct
  source 1..75: mol_type = other DNA
aacagcggcggcgaactcggcgaaagcatcggcagcaagccagacggcagcaaaagcaagtgaagatgctgccag

SEQ ID NO: 222345 - DNA, 75 bp, synthetic construct
  source 1..75: mol_type = other DNA
ggcgaaaacctcagaaacgaatgcagctaacagcgcacaggcggcagcggcctcgcagactgcatcggcaaactc

SEQ ID NO: 222346 - DNA, 75 bp, synthetic construct
  source 1..75: mol_type = other DNA
aaaggcgtccagtggcagccgccatctgttcgggcacgtccgaaatttgcgtatctggcacagggaattaacagc

SEQ ID NO: 222347 - DNA, 75 bp, synthetic construct
  source 1..75: mol_type = other DNA
atagtggtgaatgggaaacaccttttcacttccttctctgtcatttatttagcgtcgctacagattgggcagaac

SEQ ID NO: 222348 - DNA, 75 bp, synthetic construct
  source 1..75: mol_type = other DNA
atattaagaaatctggtgtgctgacagaggctgccattgacgagccacgatttgaacgtgatggcctgcttattg

SEQ ID NO: 222349 - DNA, 75 bp, synthetic construct
  source 1..75: mol_type = other DNA
attcaggcaattgatggggagttaaaaataggctctcagatacagtattctcctaagcagagcggggcaaccgta

SEQ ID NO: 222350 - DNA, 75 bp, synthetic construct
  source 1..75: mol_type = other DNA
agttttggttttatccctgtgacggaggtctatgaagaagatggtatcccacacattgggatggcacgcgaggta

SEQ ID NO: 222351 - DNA, 75 bp, synthetic construct
  source 1..75: mol_type = other DNA
caatttggtttcatccctgtgaccgatatttatgaggaagatggtattccgcatatcgggatggcgcgcgaggtt

SEQ ID NO: 222352 - DNA, 75 bp, synthetic construct
  source 1..75: mol_type = other DNA
cagcgaagaccagcgaaacgaatgccaaagccagcgaaactgcggcgaaaaacagccaggatgcagcagcccaaa

SEQ ID NO: 222353 - DNA, 75 bp, synthetic construct
  source 1..75: mol_type = other DNA
actgcatcagcaaacagtcaaaaagctgcaaaaaccagtgaaaccaatgcaaagacaagcgagactgcagcggcg

SEQ ID NO: 222354 - DNA, 75 bp, synthetic construct
  source 1..75: mol_type = other DNA
ggtaaggttgcgtatccgatttgataaatatgacggtagcgcaacaacttttcttggtgatgcgtatattgatac

SEQ ID NO: 222355 - DNA, 75 bp, synthetic construct
  source 1..75: mol_type = other DNA
catgtcgttttaaaacagaactgcaggtaaggttgcgtatccgatttgataaatatgacggtagcgcaacaactt

SEQ ID NO: 222356 - DNA, 75 bp, synthetic construct
  source 1..75: mol_type = other DNA
taaatgtcctatttactctgggatcacgctgtttgaaatcatggttcatgaaggtattcatcaggggcttcagga

SEQ ID NO: 222357 - DNA, 75 bp, synthetic construct
  source 1..75: mol_type = other DNA
tttactggcgggcggcgcgcttggccttgccggagcgttaatgcaaaccctcacccgaaacccacttgccgatcc

SEQ ID NO: 222358 - DNA, 75 bp, synthetic construct
  source 1..75: mol_type = other DNA
cactccccgcttccgtagtgctggaggcgctctccggcacctgccagagcgccgactgcaccatcgtgctcgacg

SEQ ID NO: 222359 - DNA, 75 bp, synthetic construct
  source 1..75: mol_type = other DNA
gccggggcgctggtggcctcgttgattgttgcctttaccggcagccagggcggcgggcagttaagtccggtgcgt

SEQ ID NO: 222360 - DNA, 75 bp, synthetic construct
  source 1..75: mol_type = other DNA
cggaaaaggacagaccttaagagttaccttcactgaccttccattacccaccgatcgtgagtctgtcttctggtt

SEQ ID NO: 222361 - DNA, 75 bp, synthetic construct
  source 1..75: mol_type = other DNA
acaacctgatgaaatctttacctctgctatttgtgactttattcagcctacattcagaagccagtatagttatta

SEQ ID NO: 222362 - DNA, 75 bp, synthetic construct
  source 1..75: mol_type = other DNA
gaacagtttgagcctcggcagcgacaccgcgacggcgctgggtagccgcgtggcacgcacacagctgattggcct

SEQ ID NO: 222363 - DNA, 75 bp, synthetic construct
  source 1..75: mol_type = other DNA
gtggataccgtttaatgactcgatggatatgattacaggatttggcccgggatataaaaaaataacagtgcgcga

SEQ ID NO: 222364 - DNA, 75 bp, synthetic construct
  source 1..75: mol_type = other DNA
agacggcagcgaagaccagcgaaacgaatgccaaagccagcgaaactgcggcgaaaaacagccaggatgcagcag

SEQ ID NO: 222365 - DNA, 75 bp, synthetic construct
  source 1..75: mol_type = other DNA
catccgttgatgtatgtctggagccagatacaggtgaggttaaggcgtacggtaataaggcgctggtgacattca

SEQ ID NO: 222366 - DNA, 75 bp, synthetic construct
  source 1..75: mol_type = other DNA
cggcggtgctggaaggactgaccagcggcatcgccctgcttaatcctgacgtctacgatcaactgcgtttctggc

SEQ ID NO: 222367 - DNA, 75 bp, synthetic construct
  source 1..75: mol_type = other DNA
aaatcacggcgctgggtaattcgttctctgttaatgacagtattgagaataatggcaactggaatgtccttatca

SEQ ID NO: 222368 - DNA, 75 bp, synthetic construct
  source 1..75: mol_type = other DNA
cggcggatgtgcttcatcttttgttattacgacaactgcacccgcaacccgctccagtgatatggtgacgattcc

SEQ ID NO: 222369 - DNA, 75 bp, synthetic construct
  source 1..75: mol_type = other DNA
gaagatgaaacggccccatcttgtccccctttctacccaagcgctggaaatcgtacagcagctcaaagtgatgac

SEQ ID NO: 222370 - DNA, 75 bp, synthetic construct
  source 1..75: mol_type = other DNA
tcccgcatattgggcacagacctatagctgatcttcagccccttgaactgcttgaagttctgaggttgatagaag

SEQ ID NO: 222371 - DNA, 75 bp, synthetic construct
  source 1..75: mol_type = other DNA
acattggcggcaggccgatcgcagaaattaagccaatggagttgcttgcggttctctcccgtcttaatgaccgtg

SEQ ID NO: 222372 - DNA, 75 bp, synthetic construct
  source 1..75: mol_type = other DNA
gactctgaacacctatgccggtagtgtgcttgtaaagattgcgatgcaattgctcattttaacgggagtaaggcc

SEQ ID NO: 222373 - DNA, 75 bp, synthetic construct
  source 1..75: mol_type = other DNA
ttgtctttacttgtagagccaaatggaagtaaaagctggcgatttcgttatcgctatgcaggtaaacctaaaatg

SEQ ID NO: 222374 - DNA, 75 bp, synthetic construct
  source 1..75: mol_type = other DNA
atgaagctaaatgcacgacaggtagacgctgctaaacccagagagaaagcctacaagctggcagatggtgcaggt

SEQ ID NO: 222375 - DNA, 75 bp, synthetic construct
  source 1..75: mol_type = other DNA
aggttatgcctccgacattatcgaagctttcaataaagatattttcccctatatcggccagcagccggtgaatga

SEQ ID NO: 222376 - DNA, 75 bp, synthetic construct
  source 1..75: mol_type = other DNA
atgaagttaaatgcgcggcaggtagatgctgctaaacccagagaaaaagcctataaactggcagatggtgctggt

SEQ ID NO: 222377 - DNA, 75 bp, synthetic construct
  source 1..75: mol_type = other DNA
ctttctgtgcatgaacattatggtactgtttattattattcacctagtgatggtgttactggtaccgcgtacatt

SEQ ID NO: 222378 - DNA, 75 bp, synthetic construct
  source 1..75: mol_type = other DNA
ccactttcagaacaggcgatcgctattctggaacagttaaaacacatgacggggcagtatccgtttattttccct

SEQ ID NO: 222379 - DNA, 75 bp, synthetic construct
  source 1..75: mol_type = other DNA
gtcgcgcgaagccaaaagagaaagcctatacactcaatgacggcaacgggctttcgttactcattgagccgaacg

SEQ ID NO: 222380 - DNA, 75 bp, synthetic construct
  source 1..75: mol_type = other DNA
gaaaatgcgccgtccccatatcatcccgctatctacccaagcgttagccattatcgaacagatcagagcaatgac

SEQ ID NO: 222381 - DNA, 75 bp, synthetic construct
  source 1..75: mol_type = other DNA
ctggccctcggcgtctatcccgacgtctcccttgctgaggccagaatcaaacgcgacgatgcccgaaaaattatc

SEQ ID NO: 222382 - DNA, 75 bp, synthetic construct
  source 1..75: mol_type = other DNA
atggccaaagaaagggcattaacgctggaagcactacgggttatggatgcgatcgatcgccggggcagttttgcg

SEQ ID NO: 222383 - DNA, 75 bp, synthetic construct
  source 1..75: mol_type = other DNA
tgccctttccagctattctggcagcatgctggtggttttggctgcgcgtttgctgatcatcactgggttaagaac

SEQ ID NO: 222384 - DNA, 75 bp, synthetic construct
  source 1..75: mol_type = other DNA
agaggcaaacgtcagaaacacttttaaggaaatcgcctgcgaatggcatgccagcaagctctacaaatggtcgga

SEQ ID NO: 222385 - DNA, 75 bp, synthetic construct
  source 1..75: mol_type = other DNA
gcccggtgttgaccgtacagctgctggacaaacagccgcgcttaacggtaagcacgattgaagataaacgtcagg

SEQ ID NO: 222386 - DNA, 75 bp, synthetic construct
  source 1..75: mol_type = other DNA
gtccggtattgacggtgcagttgctggacaaacagccgcgcttaacggtcagtaccattgaagataaacgccagg

SEQ ID NO: 222387 - DNA, 75 bp, synthetic construct
  source 1..75: mol_type = other DNA
ctataccttaatgaacgtctacgttgccgcgccggatcacccgattcaccaggagccggaaccgctttctgaggt

SEQ ID NO: 222388 - DNA, 75 bp, synthetic construct
  source 1..75: mol_type = other DNA
ctctacttattggttaaaaccaacgggtcacgctactggcgtttaaagtatcgtatagatggaaaggaaaagtta

SEQ ID NO: 222389 - DNA, 75 bp, synthetic construct
  source 1..75: mol_type = other DNA
tatcccatctcaaaagtttgaaagaactaactgggaactacccgctgatgttccctggacgcaacgatcctagca

SEQ ID NO: 222390 - DNA, 75 bp, synthetic construct
  source 1..75: mol_type = other DNA
catcaagccgttggaattgcttaacgtgcttaaaaagatggaagagcgaggtgcgactgagaaagctaagaaagt

SEQ ID NO: 222391 - DNA, 75 bp, synthetic construct
  source 1..75: mol_type = other DNA
gcagggttacaacaccgcctggatagaaacgcagctcgcacacgtggataagaacagcattcgcggtacatacaa

SEQ ID NO: 222392 - DNA, 75 bp, synthetic construct
  source 1..75: mol_type = other DNA
tgggtatgcctcagatattattgaagcgttccagaatgatatttttccgtatgtgggggcgaggcctgtagggga

SEQ ID NO: 222393 - DNA, 75 bp, synthetic construct
  source 1..75: mol_type = other DNA
atttaagcgaatcggctatacaggacgggttacgggtcacggcttccgtcataccatgagcaccgttcttcatga

SEQ ID NO: 222394 - DNA, 75 bp, synthetic construct
  source 1..75: mol_type = other DNA
ttttgcgatccggatatgcatccctcggacttcagtctgcttgcaccacgacgtgatgatgagcagacggagatg

SEQ ID NO: 222395 - DNA, 75 bp, synthetic construct
  source 1..75: mol_type = other DNA
cgtcgttatctggcgctcggcgtgctggcgggcattgtgaccattccaattggctgtattgccggtggtctggtg

SEQ ID NO: 222396 - DNA, 75 bp, synthetic construct
  source 1..75: mol_type = other DNA
acggtcagccggtggaattcactttcgccctgatcctgatgaacatgatcccggtgatcattgtcgcgattctgg

SEQ ID NO: 222397 - DNA, 75 bp, synthetic construct
  source 1..75: mol_type = other DNA
gctcggcattatcgaaccttctgaccgtcgttatctggcgctcggcgtgctggcgggcattgtgaccattccgat

SEQ ID NO: 222398 - DNA, 75 bp, synthetic construct
  source 1..75: mol_type = other DNA
gttatccccgcttccccggacatgacggaggatgacgcaatgctgatgacagtatcagaagggatcgcaggagga

SEQ ID NO: 222399 - DNA, 75 bp, synthetic construct
  source 1..75: mol_type = other DNA
gttatcggttcgatctcctgcgtcctgcttggcgcgtatccgatggtactgctactgacccgctggtttgaaaaa

SEQ ID NO: 222400 - DNA, 75 bp, synthetic construct
  source 1..75: mol_type = other DNA
tcggtaagttcggtaaaagtatcgaaggatccggcgggcagtttgaagaaggctttatggcgatgggcgcactgg

SEQ ID NO: 222401 - DNA, 75 bp, synthetic construct
  source 1..75: mol_type = other DNA
tctttatggcccctggcgataaacccggtgaagtgatgcgcgccattgaagttatcggttctatctcctgcgttc

SEQ ID NO: 222402 - DNA, 75 bp, synthetic construct
  source 1..75: mol_type = other DNA
tggttcccggaacatgaacgcgcttccgccgttggtttttatacgtctggtcagtttgtcggtctggcgtttctg

SEQ ID NO: 222403 - DNA, 75 bp, synthetic construct
  source 1..75: mol_type = other DNA
aacccaggaaaaagggataacggcgttgaaagcgggctttatgaccacggtgccatttctcgctgcgtttgtcgg

SEQ ID NO: 222404 - DNA, 75 bp, synthetic construct
  source 1..75: mol_type = other DNA
cgtcctgctctctggctgggtagcggatctgctggtacgtaagggcttttcactgggctttgcgcgtaaaacgcc

SEQ ID NO: 222405 - DNA, 75 bp, synthetic construct
  source 1..75: mol_type = other DNA
acgtgcacagtttaagatcacttattacaccgacggtactcatgacgaaggatactatgcaatctataatgcatt

SEQ ID NO: 222406 - DNA, 75 bp, synthetic construct
  source 1..75: mol_type = other DNA
gttaacgtggatatttctggtactcatcctgctttctcctctctcttgttttcagcccccatcatcttttgagtt

SEQ ID NO: 222407 - DNA, 75 bp, synthetic construct
  source 1..75: mol_type = other DNA
cattcagcattgtatccgcagcggtatctgcaaagtgaatgttgcgacagaactgaaaattgcttttgccaatgc

SEQ ID NO: 222408 - DNA, 75 bp, synthetic construct
  source 1..75: mol_type = other DNA
aacgacaacagagccagctactcgtgcatcagatttatgtaaatttccgctgatgaaaaatatgtataccatgcc

SEQ ID NO: 222409 - DNA, 75 bp, synthetic construct
  source 1..75: mol_type = other DNA
acgctggagctggtgttcaccgccggccagtgccacggttactccgaaactgaatggagtggctggcccggcatt

SEQ ID NO: 222410 - DNA, 75 bp, synthetic construct
  source 1..75: mol_type = other DNA
gttcttcacccagaccacagacggcaaactgaatctgatgcatcacaggaaagcaggaaacacaaagttgggcga

SEQ ID NO: 222411 - DNA, 75 bp, synthetic construct
  source 1..75: mol_type = other DNA
acaaacaacccgtcagaagatcctgatattgccgggtctggttattacggttcggcatcccgaacgaacaaaaac

SEQ ID NO: 222412 - DNA, 75 bp, synthetic construct
  source 1..75: mol_type = other DNA
ataagctgatcgataacctgaacaccctgatttgcgaggacagcctgctcacgcgccaggagcgtgaaacgctgg

SEQ ID NO: 222413 - DNA, 75 bp, synthetic construct
  source 1..75: mol_type = other DNA
tggaaaccaggtatcatcaaaccgcccgacacatttcagttcatgggcgcgcaggagcattattccggatcgtct

SEQ ID NO: 222414 - DNA, 75 bp, synthetic construct
  source 1..75: mol_type = other DNA
gtacggagggtataaaaacagggagagtgagggcgtttattttgtgcccttcatgacagacggtaacggcgtcaa

SEQ ID NO: 222415 - DNA, 75 bp, synthetic construct
  source 1..75: mol_type = other DNA
tacgtccgttcgcacaatctccctgctgccgacagccggagaggctgctgcgcagggctggaccattaaggacgg

SEQ ID NO: 222416 - DNA, 75 bp, synthetic construct
  source 1..75: mol_type = other DNA
atggcatttaaacactatgatgttgtcagggcggcgccgccgtcagatcttgcggaaaagctgacacataaactg

SEQ ID NO: 222417 - DNA, 75 bp, synthetic construct
  source 1..75: mol_type = other DNA
attacggtaacgactggcagacgctggagctggtgttcaccgccggcagtgccacggttactccgaaactgaatg

SEQ ID NO: 222418 - DNA, 75 bp, synthetic construct
  source 1..75: mol_type = other DNA
ccctgctgacacagggcggcagactgacctgtaagttccgcctgtcaggcgcactgaccaacaatcagttcgggc

SEQ ID NO: 222419 - DNA, 75 bp, synthetic construct
  source 1..75: mol_type = other DNA
acagccatgctgaagcagtttcgtgctgacctcactgtgtttaacgcgcagtgtcatggtggcagtgctgtaaat

SEQ ID NO: 222420 - DNA, 75 bp, synthetic construct
  source 1..75: mol_type = other DNA
tccgcgtattaagcagttggcacgtcgcagtacggtgacgcctggcggagaggcatgtgtatttaacgatgtgat

SEQ ID NO: 222421 - DNA, 75 bp, synthetic construct
  source 1..75: mol_type = other DNA
aaagcatcaaattctattcggatgggcaacgggatccagtcaagcggacaggcctgaacgtccagtacaccatga

SEQ ID NO: 222422 - DNA, 75 bp, synthetic construct
  source 1..75: mol_type = other DNA
aacctatattaacaaatctggtgtgctgacagaggctgccattgacgagccacgatttgaacgtgatggcctgct

SEQ ID NO: 222423 - DNA, 75 bp, synthetic construct
  source 1..75: mol_type = other DNA
aaagaacgaacttcttccagaacagtacagacccttcgaagtggaataagtcaacttcactggacgttacagaaa

SEQ ID NO: 222424 - DNA, 75 bp, synthetic construct
  source 1..75: mol_type = other DNA
gttgcgtatccgctttgataaatatgacggtagtgcaacaacttttcttggtgatgcatatattgatacacaaac

SEQ ID NO: 222425 - DNA, 75 bp, synthetic construct
  source 1..75: mol_type = other DNA
aaatgaagcaagcaaatggattttctttgaggcaacaattaaggcacttgatacagaaaatatgatcggtgcgat

SEQ ID NO: 222426 - DNA, 75 bp, synthetic construct
  source 1..75: mol_type = other DNA
cggcggcaaagaaatccgaaactgcagcggcatcatcaaagaacgcggcgaaaacctcagaaacgaatgcagcta

SEQ ID NO: 222427 - DNA, 75 bp, synthetic construct
  source 1..75: mol_type = other DNA
ttacttgtttggtcgaggttaacaggaattggggcgatattccccctaatgtagcaccgcgtatttttgattttt

SEQ ID NO: 222428 - DNA, 75 bp, synthetic construct
  source 1..75: mol_type = other DNA
atttccttattgcgatattggaggagctaacagacgggtaaacgaaaacgcatcgcttgaaaaaatggttatggg

SEQ ID NO: 222429 - DNA, 75 bp, synthetic construct
  source 1..75: mol_type = other DNA
caaaagcaagtgaagatgctgccagagaatacgcaaaccagacagcagagccgtacagatatgttttacagccgc

SEQ ID NO: 222430 - DNA, 75 bp, synthetic construct
  source 1..75: mol_type = other DNA
tgcctgatgtgtggataccgtttaacgattcactggatatgattacgggcttttcgccatcatataaaaagattg

SEQ ID NO: 222431 - DNA, 75 bp, synthetic construct
  source 1..75: mol_type = other DNA
agcgaaccaactacatgttgaattcagcaactccagcttcttggggtaaatctgcaaatatgaatgtcgctgagg

SEQ ID NO: 222432 - DNA, 75 bp, synthetic construct
  source 1..75: mol_type = other DNA
aatctggcgaactgaaaacggcggaaattaatgagccgcgatttgagtgtgatggcctgcttattgagggacaaa

SEQ ID NO: 222433 - DNA, 75 bp, synthetic construct
  source 1..75: mol_type = other DNA
gatgcggggatcgtaatggggtttggttcatcaggtgggtacgacggttttccgtattgtgatataggtggttca

SEQ ID NO: 222434 - DNA, 75 bp, synthetic construct
  source 1..75: mol_type = other DNA
tagccgacatcatgaacgagatgttcaccatcgacggcaaaccaaaccagccggtacgcaaaatgatcatgggac

SEQ ID NO: 222435 - DNA, 75 bp, synthetic construct
  source 1..75: mol_type = other DNA
gccggagcaaatcaacgatcgctttaacgtcactgacgatgaaggtgtcgcctggctgtttgccggttccccttc

SEQ ID NO: 222436 - DNA, 75 bp, synthetic construct
  source 1..75: mol_type = other DNA
cgagccgggctggatgtcctggtgatagaacgcggcgacagtgccggatgtaaaaacatgaccggcgggcgtctt

SEQ ID NO: 222437 - DNA, 75 bp, synthetic construct
  source 1..75: mol_type = other DNA
gctattctgaacgcagccgggcgcacctcagccttcatcagtggtaaggcgcctgaaatcaaaccctcgcccggc

SEQ ID NO: 222438 - DNA, 75 bp, synthetic construct
  source 1..75: mol_type = other DNA
tggttcgtgaagacaacaaggtcacaggcgtacaggccggggatgatattctcgaagcaaatgtggtaattctgg

SEQ ID NO: 222439 - DNA, 75 bp, synthetic construct
  source 1..75: mol_type = other DNA
gcgccgttaccctcgattttcaccgcgagcaaccagatgttccgcaacacgcgtcttataccgtattgcgtaatc

SEQ ID NO: 222440 - DNA, 75 bp, synthetic construct
  source 1..75: mol_type = other DNA
ttgagggttcatttttatattcagaaagagaataaacgtggcaaaaaacattcaagccattcgcggcatgaacga

SEQ ID NO: 222441 - DNA, 75 bp, synthetic construct
  source 1..75: mol_type = other DNA
gaccatcgaactggccctgaaacaaggcgcaaaagtgatggtaacttcccacttgggtcgtcctaccgaaggcga

SEQ ID NO: 222442 - DNA, 75 bp, synthetic construct
  source 1..75: mol_type = other DNA
acgcgcgtatccgtgcttctctgccgaccatcgaactggccctgaaacaaggcgcaaaagtgatggtaacttccc

SEQ ID NO: 222443 - DNA, 75 bp, synthetic construct
  source 1..75: mol_type = other DNA
aagatcctgatattgccgggtctggttattacggttcggcatcccgaacgaacaaaaactgggtatcatcaaatc

SEQ ID NO: 222444 - DNA, 75 bp, synthetic construct
  source 1..75: mol_type = other DNA
atattacggtgcggcatcgagaacgaatggaaaccaggtatcatcaaaccgcccgacacatttcagttcatgggc

SEQ ID NO: 222445 - DNA, 75 bp, synthetic construct
  source 1..75: mol_type = other DNA
gtggcaaaaaacattcaagccattcgcttgaacgattacctgcctggcgaaacggccatctggcagcgcattgaa

SEQ ID NO: 222446 - DNA, 75 bp, synthetic construct
  source 1..75: mol_type = other DNA
gcagccggagaggctgctgcgcagggctggagcattaaggatggcggaattcagttgtcagatggtgtatttaag

SEQ ID NO: 222447 - DNA, 75 bp, synthetic construct
  source 1..75: mol_type = other DNA
ggtaatccgttcctgatgtcgtacttcactcagaccactgacggcagggtgaatctgatgcatcacaggaaagcc

SEQ ID NO: 222448 - DNA, 75 bp, synthetic construct
  source 1..75: mol_type = other DNA
ggtagcctggacccttgctactcctgtaccgaccgcatgaccgtggtcgatgtgcgtaagaaaaagagcaaagtg

SEQ ID NO: 222449 - DNA, 75 bp, synthetic construct
  source 1..75: mol_type = other DNA
cgtttccgatgcgccgctgattatcggtagcctggacccttgctactcctgtaccgaccgcatgaccgtggtcga

SEQ ID NO: 222450 - DNA, 75 bp, synthetic construct
  source 1..75: mol_type = other DNA
taaatgcactgacgctgacggatattaccaaaaatgcaacgtatggcgttgagatagaaagtctggtgctggaga

SEQ ID NO: 222451 - DNA, 75 bp, synthetic construct
  source 1..75: mol_type = other DNA
gtatatcccgaataacgcggggatcctgctggtaccatgctgtcgtggtggttcggcattcacccagggcgcgga

SEQ ID NO: 222452 - DNA, 75 bp, synthetic construct
  source 1..75: mol_type = other DNA
gttactccgaaactgaatggagtggctggcccggcattccaggttataaaagacagtctgacactgggactgaat

SEQ ID NO: 222453 - DNA, 75 bp, synthetic construct
  source 1..75: mol_type = other DNA
atttcagttcatgggcgcgcaggtagcattattccggatcgtttggcaaccgctattctgaacgcagccgggcgc

SEQ ID NO: 222454 - DNA, 75 bp, synthetic construct
  source 1..75: mol_type = other DNA
atttcagttcatgggcgcgcaggaagcattattccggatcgtatggcaaccgctattctgaacgcagccgggcgc

SEQ ID NO: 222455 - DNA, 75 bp, synthetic construct
  source 1..75: mol_type = other DNA
actgaatgcgctgacgctgacggatgttacaaaaaatgcagcgtatggcgttgagatagaaagtctggtgctgga

SEQ ID NO: 222456 - DNA, 75 bp, synthetic construct
  source 1..75: mol_type = other DNA
cgcgatacccgcgccgatcacccgtttgttggttatggcctgctgccaatggaagtccacagcgagcagggctgc

SEQ ID NO: 222457 - DNA, 75 bp, synthetic construct
  source 1..75: mol_type = other DNA
atttcagttcatgggcgcgcagggagcattattccggatcgtgtggcaaccgctattctgaacgcagccgggcgc

SEQ ID NO: 222458 - DNA, 75 bp, synthetic construct
  source 1..75: mol_type = other DNA
atttcagttcatgggcgcgcaggcagcattattccggatcgtctggcaaccgctattctgaacgcagccgggcgc

SEQ ID NO: 222459 - DNA, 75 bp, synthetic construct
  source 1..75: mol_type = other DNA
gtgatgaaaaatatgtgaccatttcatgccgtgtcagaagtgatgttgaaaatataaggtgtcgtttaagatttg

SEQ ID NO: 222460 - DNA, 75 bp, synthetic construct
  source 1..75: mol_type = other DNA
cagcggcccaaagcgagagtgccgcagctggttctgcaagtgcggcggcttcttctgccactgcatcagccaaca

SEQ ID NO: 222461 - DNA, 75 bp, synthetic construct
  source 1..75: mol_type = other DNA
atggcagcagtaaaaatctcaggtgtgctgaaagatggcacaggaaaaccagtacagaactgcaccattgcgctg

SEQ ID NO: 222462 - DNA, 75 bp, synthetic construct
  source 1..75: mol_type = other DNA
aggcggcagaccgcgcagaagccgcagcggaagtgactgcagagccctatgcgaatatagtgccgccgctgcctg

SEQ ID NO: 222463 - DNA, 75 bp, synthetic construct
  source 1..75: mol_type = other DNA
ttcttttaattttacttatgggagatttactgtaaaagatactcttattgatcagacaagtgcgattaatatcgt

SEQ ID NO: 222464 - DNA, 75 bp, synthetic construct
  source 1..75: mol_type = other DNA
aagatggtgcgggaaaaccaatacagaactgcactattcaactgaaggcaaagcgtaacagcaccacggtactgg

SEQ ID NO: 222465 - DNA, 75 bp, synthetic construct
  source 1..75: mol_type = other DNA
ctgcaaaaaccagtgaaaccaacgcaaaggcgagcgagactgcggcgactaactcggcgaaagcatccgctgcaa

SEQ ID NO: 222466 - DNA, 75 bp, synthetic construct
  source 1..75: mol_type = other DNA
atattcctcctaatgtagcaccgcgtatttttgatttttctagtgtgccgcctattgagtcaatcacatacgctt

SEQ ID NO: 222467 - DNA, 75 bp, synthetic construct
  source 1..75: mol_type = other DNA
tcggcagcaagccagacggcagctaaagcaagcgaagacgcagccagggagtacgcaagccaggcagcagagccg

SEQ ID NO: 222468 - DNA, 75 bp, synthetic construct
  source 1..75: mol_type = other DNA
ggagtacagcaaccattcgcattggtggacaaactacagcaggattacgccatttatttgggcatgtgaggaatt

SEQ ID NO: 222469 - DNA, 75 bp, synthetic construct
  source 1..75: mol_type = other DNA
actccgcgacagcagccaaaaaatcagaaaccagcgcgaaaaatagcgagacagccacaaaggccagcgaaaaaa

SEQ ID NO: 222470 - DNA, 75 bp, synthetic construct
  source 1..75: mol_type = other DNA
aaagcgagagtgccgcagctggttctgcaagtgcggcggctgcttctgccactgcatcagccaacagtcaaaaag

SEQ ID NO: 222471 - DNA, 75 bp, synthetic construct
  source 1..75: mol_type = other DNA
agcgaagaccagcgaaacgaatgccaaagccagcgaaactgcggcgaaaagcagtcaggaagcagcagcccaaag

SEQ ID NO: 222472 - DNA, 75 bp, synthetic construct
  source 1..75: mol_type = other DNA
ttccttttacggttctttgtgaggtacataagaactggtataaaacgccaaatgcagcaccgcgtgttttttaga

SEQ ID NO: 222473 - DNA, 75 bp, synthetic construct
  source 1..75: mol_type = other DNA
accggcggtcatcaaaccggagcggctattattcttggcttcggttcttcagcagattacgacggatttccttat

SEQ ID NO: 222474 - DNA, 75 bp, synthetic construct
  source 1..75: mol_type = other DNA
gaaggtggatcaagtgcttcgtcatttattgtaactgatataattgcaagcactcgcgcaagcgatatggtgaca

SEQ ID NO: 222475 - DNA, 75 bp, synthetic construct
  source 1..75: mol_type = other DNA
acagatgaatttgagtttaaatatggacgtttcacagtaggaagcgacatagcaggaacgacaacagggagaaat

SEQ ID NO: 222476 - DNA, 75 bp, synthetic construct
  source 1..75: mol_type = other DNA
cccgggctataaaacaataaccatcggcagtgatgaaataacaatgcctgttaatggcatatgccaatttagccg

SEQ ID NO: 222477 - DNA, 75 bp, synthetic construct
  source 1..75: mol_type = other DNA
cggcgaaaaacagtcaggatgcagcagcccaaagcgagagtgctgcagctggttctgcaagcgcggcggctgctt

SEQ ID NO: 222478 - DNA, 75 bp, synthetic construct
  source 1..75: mol_type = other DNA
tgtgtggataccctttaatgattcgctggatatgattacgggctattctccgggttataaaaaagtgaagattgg

SEQ ID NO: 222479 - DNA, 75 bp, synthetic construct
  source 1..75: mol_type = other DNA
acgaaaacgcattgcttgaaaaaatggttatggggatgcgtgtaaagtcagatcagtctacgtgctcagtaagta

SEQ ID NO: 222480 - DNA, 75 bp, synthetic construct
  source 1..75: mol_type = other DNA
gaaagcaacctatattaacaaatctggtgtgctgacagaggctgccattgacgagccacgatttgaacgtgatgg

SEQ ID NO: 222481 - DNA, 75 bp, synthetic construct
  source 1..75: mol_type = other DNA
ctgttaaggatgatgcaactggctggatattttttgaggctacattaaaagcagatacaacagaaaatacggttg

SEQ ID NO: 222482 - DNA, 75 bp, synthetic construct
  source 1..75: mol_type = other DNA
gaacgaacttcttccagaacagtacagacccttcgaagtggaataagtcaacttcactggacgttacagaaacag

SEQ ID NO: 222483 - DNA, 75 bp, synthetic construct
  source 1..75: mol_type = other DNA
agcgcacaggcggcagcggcctcgcagactgcatcggcaaactccgcgacagcagccaaaaaatcagaaaccaac

SEQ ID NO: 222484 - DNA, 75 bp, synthetic construct
  source 1..75: mol_type = other DNA
agaaggctctgcgcgtttgcttaatatctcaattacaggggcgacgactgaagtttctgatgaaagttatatgta

SEQ ID NO: 222485 - DNA, 75 bp, synthetic construct
  source 1..75: mol_type = other DNA
acttaactattaccacgggagttgatgagtatggtttcagttatggtttgtttggcgttaaagaaacatccacaa

SEQ ID NO: 222486 - DNA, 75 bp, synthetic construct
  source 1..75: mol_type = other DNA
cttccttttacagttctggttgaggctcataaaaactggaataaaacaccaaatgcagcaccgcgtgtttttgat

SEQ ID NO: 222487 - DNA, 75 bp, synthetic construct
  source 1..75: mol_type = other DNA
atgacaacacaatcccaccatgaccacgtagaaaagcagtttagctctcaagccagcgaatatctgaccagtacc

SEQ ID NO: 222488 - DNA, 75 bp, synthetic construct
  source 1..75: mol_type = other DNA
gtccagccagacggcagcgaaaaccagcgaaacgaatgccaaagccagcgaaactgcggcgaaaagtagtcaggc

SEQ ID NO: 222489 - DNA, 75 bp, synthetic construct
  source 1..75: mol_type = other DNA
gaacaaaaacagaatataaagcatatgggaatagagagaaaaggaaatttgttactggctttaagtttacagaag

SEQ ID NO: 222490 - DNA, 75 bp, synthetic construct
  source 1..75: mol_type = other DNA
ctggcacgctgaatgattttctcggcgccatgacggaagaggatgtcatgccggaggcattgcgtcgttttgagg

SEQ ID NO: 222491 - DNA, 75 bp, synthetic construct
  source 1..75: mol_type = other DNA
caggcacgctgaatgattttctcggcgccatgacggaagatgatgtcatgccggaggcattgcgtcgttttgagg

SEQ ID NO: 222492 - DNA, 75 bp, synthetic construct
  source 1..75: mol_type = other DNA
tttatgttgcaactcctcaggtcgaaggcggttcgtgcgcttcttcgtttattattactgaggcaacgccagtca

SEQ ID NO: 222493 - DNA, 75 bp, synthetic construct
  source 1..75: mol_type = other DNA
aaaaacagtcaggatgcagcagcccaaagcgagagtgccgcagctggttctgcaagtgcggcggcttcttctgcc

SEQ ID NO: 222494 - DNA, 75 bp, synthetic construct
  source 1..75: mol_type = other DNA
ccggcacgctgaatgattttctcggtgccatgacggaagaggatgtcatgccggaggcattgcgtcgttttgagg

SEQ ID NO: 222495 - DNA, 75 bp, synthetic construct
  source 1..75: mol_type = other DNA
ccggcacgctgaatgattttctcggagccatgacggaagatgatgtcatgccggaggcattgcgtcgttttgagg

SEQ ID NO: 222496 - DNA, 75 bp, synthetic construct
  source 1..75: mol_type = other DNA
tggatatgccattgttaatacgcggtctttattggttgaaatcaccggtgtagctgccgacaggctcaccgcacg

SEQ ID NO: 222497 - DNA, 75 bp, synthetic construct
  source 1..75: mol_type = other DNA
gcagctgaaagcgagagtgccgcagccggatctgcaagcgaggcggctatttctgccactgcatcagccaacagc

SEQ ID NO: 222498 - DNA, 75 bp, synthetic construct
  source 1..75: mol_type = other DNA
agatgaggttactggttggattttctatcaggctacaattaatgcactagatacagagagcatgattggtgcgat

SEQ ID NO: 222499 - DNA, 75 bp, synthetic construct
  source 1..75: mol_type = other DNA
tgccatgacggaggatgatgtccgaccggaggcactgcgccgctttgagcagatggtggaagaagcggcacgcaa

SEQ ID NO: 222500 - DNA, 75 bp, synthetic construct
  source 1..75: mol_type = other DNA
ataagcaaataactgtaggtgatgatgttattaaaatgccatccgataaggttgttagcttcaaacgcgcatcag

SEQ ID NO: 222501 - DNA, 75 bp, synthetic construct
  source 1..75: mol_type = other DNA
ggcggcgaactcggcgaaagcatcggcagcaagccagacagcagctaaagcaagtgaagacgcagccagagagta

SEQ ID NO: 222502 - DNA, 75 bp, synthetic construct
  source 1..75: mol_type = other DNA
taaagctaccgaagatatgagcgtttatgctcgtactgaaatgcttgctaaaagtggcggcgaattggtcgcagg

SEQ ID NO: 222503 - DNA, 75 bp, synthetic construct
  source 1..75: mol_type = other DNA
cgtttaatgattcactggatatgattacgggcttttcgccatcatataaaaaaattgttattggcgacgatgaaa

SEQ ID NO: 222504 - DNA, 75 bp, synthetic construct
  source 1..75: mol_type = other DNA
tatatttatctggccaccccacaagtagaagatgggccttgtgtatcatcttttattatatcaggagcgacggcg

SEQ ID NO: 222505 - DNA, 75 bp, synthetic construct
  source 1..75: mol_type = other DNA
tcttttattatatcaggaacgacggcggcgacgcgcgcaagcgatatggttacagttccgattaagaataatctt

SEQ ID NO: 222506 - DNA, 75 bp, synthetic construct
  source 1..75: mol_type = other DNA
atgcggcaccgcgtgtcattgattcagaaaatcaccagtccggaggcccatttattatggggtttggttcttctg

SEQ ID NO: 222507 - DNA, 75 bp, synthetic construct
  source 1..75: mol_type = other DNA
agcatggatgttgagtatagccagtacagcgtcaccctgctggttgaaggttttccgccttcacatgccggaacc

SEQ ID NO: 222508 - DNA, 75 bp, synthetic construct
  source 1..75: mol_type = other DNA
accaattgggatgaatcgccaaacaaagaaggtagcgcacgtattcttaatatttccactacgggagatacaact

SEQ ID NO: 222509 - DNA, 75 bp, synthetic construct
  source 1..75: mol_type = other DNA
tgatgttgccggttagcgaaattttaccgaaagcggcctattatttgattcagcggcgtgatagtcgccagacac

SEQ ID NO: 222510 - DNA, 75 bp, synthetic construct
  source 1..75: mol_type = other DNA
aaatcgtggcgtgggaaactgcctgcaggcctacagaggagctggtgaagcggatgttaaataaggggctggaaa

SEQ ID NO: 222511 - DNA, 75 bp, synthetic construct
  source 1..75: mol_type = other DNA
taacgaatacataacttactggaatcaaaaaagaataaaactcagtcttgggggactcagcccggtagaataccg

SEQ ID NO: 222512 - DNA, 75 bp, synthetic construct
  source 1..75: mol_type = other DNA
tgcgtgatattggttatctggattacaccgagtttaaacgtggccgagccacctatttcagcgtgcattatcgca

SEQ ID NO: 222513 - DNA, 75 bp, synthetic construct
  source 1..75: mol_type = other DNA
gaaccgatcaaatcttcgctgaaagcaccttctgttgcagcagtacctccagtagaagccgctgccgctgtttct

SEQ ID NO: 222514 - DNA, 75 bp, synthetic construct
  source 1..75: mol_type = other DNA
tgctgcggcagaggctgaactggctcgtcagtttgctcaaactcaacaacaacgttattccggcgaacaaccggc

SEQ ID NO: 222515 - DNA, 75 bp, synthetic construct
  source 1..75: mol_type = other DNA
gttcttccaggtactgcgcgattgcggcgcactgcgcgttttattcccggaaattgacgccctgtttggcgttcc

SEQ ID NO: 222516 - DNA, 75 bp, synthetic construct
  source 1..75: mol_type = other DNA
ggcgcactacgcgttttattcccggagatcgacgcgttgtttggtgtccccgctccggcgaaatggcacccggaa

SEQ ID NO: 222517 - DNA, 75 bp, synthetic construct
  source 1..75: mol_type = other DNA
cccgcttttggcgaggatccgctacgcgtgctacgcgtagcgcgttttgccgcacgttatgctcatctcggtttt

SEQ ID NO: 222518 - DNA, 75 bp, synthetic construct
  source 1..75: mol_type = other DNA
gaggtacggacactgccagtctgacctgttaaaggccgcagggctggccagaagcacgctgtactaccagctgtc

SEQ ID NO: 222519 - DNA, 75 bp, synthetic construct
  source 1..75: mol_type = other DNA
aacttactggaatcaaaaaagaataaaactcagtcttgggggactcagcccggtagaataccggactgagtatca

SEQ ID NO: 222520 - DNA, 75 bp, synthetic construct
  source 1..75: mol_type = other DNA
catccgcaaacgcatgaagagtatgcgctggcacgtaccgaacggaaatccggttccggttacaccggttttacc

SEQ ID NO: 222521 - DNA, 75 bp, synthetic construct
  source 1..75: mol_type = other DNA
ataaatggttttgtttttgatgtggatcatgaatatggggcaattgcgtgggatatggctggactgcctaaacca

SEQ ID NO: 222522 - DNA, 75 bp, synthetic construct
  source 1..75: mol_type = other DNA
gcactttttaacctcgcgcagccacactttccgttactgaattacagccgcaactcctacatggggcgattgatt

SEQ ID NO: 222523 - DNA, 75 bp, synthetic construct
  source 1..75: mol_type = other DNA
tgacactgacaccaaacaataacaacaccgtacagcctgtggcgctgatgcgtctgggcgtctttgtaccgaccc

SEQ ID NO: 222524 - DNA, 75 bp, synthetic construct
  source 1..75: mol_type = other DNA
ggccattaatgccctgaagcgacgggagtccgcccaggcactctacacctttatagagagcctgccccgggatcc

SEQ ID NO: 222525 - DNA, 75 bp, synthetic construct
  source 1..75: mol_type = other DNA
acggaagagctgacacgtctttccctggcccgtgctgagggattcgataaggttgagatcaccggcccccgcctg

SEQ ID NO: 222526 - DNA, 75 bp, synthetic construct
  source 1..75: mol_type = other DNA
acggaagaactgacgcgtctgtctctcgccagagccgaagggtttgataaggtggagatcaccggcccgcggctg

SEQ ID NO: 222527 - DNA, 75 bp, synthetic construct
  source 1..75: mol_type = other DNA
aatgtgttaagtgcggacaccagatgcgagaagctgataaagaagtccgcgatcacgttcgcaaagatgagcaag

SEQ ID NO: 222528 - DNA, 75 bp, synthetic construct
  source 1..75: mol_type = other DNA
ccactggcaattcatctcgaccatcacacgaaatttgacgatatcgctcagaaggttcgttctggcgtgcgctca

SEQ ID NO: 222529 - DNA, 75 bp, synthetic construct
  source 1..75: mol_type = other DNA
ccgcacaacggaaaagcacaccaaagagtacatcacacatctggtgcagtcggcttactatgatacggaaaagga

SEQ ID NO: 222530 - DNA, 75 bp, synthetic construct
  source 1..75: mol_type = other DNA
gatatggataatgacttcaagacctggataggggtgattcattcctttgcccgccataaggttatcggcgataaa

SEQ ID NO: 222531 - DNA, 75 bp, synthetic construct
  source 1..75: mol_type = other DNA
ggcgattaatgccctgaaacggcgggagtctgcccaggctctttacacctttatagaaagtctgccgcgggatcc

SEQ ID NO: 222532 - DNA, 75 bp, synthetic construct
  source 1..75: mol_type = other DNA
ctgaacaacgcgcagcgcggcggttacgcggttccggcattcaatattcacaatctcgaaacgatgcaagtggtg

SEQ ID NO: 222533 - DNA, 75 bp, synthetic construct
  source 1..75: mol_type = other DNA
gtgaacttaccgctggtgctgcatggcgcgtcagggttatcgactaaggatattcagcaaaccatcaaactgggg

SEQ ID NO: 222534 - DNA, 75 bp, synthetic construct
  source 1..75: mol_type = other DNA
tgtgagcttcagaaaagaggtcttaagttcagtggcaaaacggtgagaaaactgatgcaacagctcggcctgaag

SEQ ID NO: 222535 - DNA, 75 bp, synthetic construct
  source 1..75: mol_type = other DNA
cttaatcctcacgagcatcctgttctgcactctgaccagggatggcagtatcgtatgagaagatatcaaaatatt

SEQ ID NO: 222536 - DNA, 75 bp, synthetic construct
  source 1..75: mol_type = other DNA
cgcgtctggctgatttccgtattaaagccgatgtcgtcaattactctccggggccggttatcactcgctttgaac

SEQ ID NO: 222537 - DNA, 75 bp, synthetic construct
  source 1..75: mol_type = other DNA
aaccaccctgctgcgccatattcttaacgaacaacacggctacaagattgccgtgattgaaaacgaattcggcga

SEQ ID NO: 222538 - DNA, 75 bp, synthetic construct
  source 1..75: mol_type = other DNA
ttaccggggaaatatgggactcgctgcagaaaatatccttcagcgacagttcaaagcggaagctccctgtgagaa

SEQ ID NO: 222539 - DNA, 75 bp, synthetic construct
  source 1..75: mol_type = other DNA
gtacagccgcagcagccgtattatgcacctgcagctgaacaaccttactacgctcctgcggcggaacaacctgtt

SEQ ID NO: 222540 - DNA, 75 bp, synthetic construct
  source 1..75: mol_type = other DNA
cagtggtatctctggcagggactcagtcatgctggtcagccctgggattcctggtctgacgctgtcctgtcagat

SEQ ID NO: 222541 - DNA, 75 bp, synthetic construct
  source 1..75: mol_type = other DNA
ttgctatcaacaagggagccgtccagagtcgacacggagataatgctttgagaaccgtcgagatactgcaataca

SEQ ID NO: 222542 - DNA, 75 bp, synthetic construct
  source 1..75: mol_type = other DNA
tcgttggcagcatagaggccagcattaaaacagtgataagtctgccgcaggaaagcgtggaagggctgcgggtgc

SEQ ID NO: 222543 - DNA, 75 bp, synthetic construct
  source 1..75: mol_type = other DNA
acgctgttcaccggttggtcatgggtgaccattgctgaaaaactcggcggctggattttaaatattctcaccttc

SEQ ID NO: 222544 - DNA, 75 bp, synthetic construct
  source 1..75: mol_type = other DNA
caaaacttgatcccgccaactatacggtgcacagggccagaagtatgctggcgcaactaagagcaagacaatttg

SEQ ID NO: 222545 - DNA, 75 bp, synthetic construct
  source 1..75: mol_type = other DNA
ataatgcggtaatggagaatttctttggtcacctgaaagaagaaatgtactatcgccgggactacagaagtgtag

SEQ ID NO: 222546 - DNA, 75 bp, synthetic construct
  source 1..75: mol_type = other DNA
ccgtcacccacggcgacatcgacctgggcctgctgttcaacaccaacggttttatgctggaagaaaacgtcgtca

SEQ ID NO: 222547 - DNA, 75 bp, synthetic construct
  source 1..75: mol_type = other DNA
gtgacggcagatacgccggtcggggaagaccccggctaccacgacgatttcctgcgtatccgcgacgaaatgaac

SEQ ID NO: 222548 - DNA, 75 bp, synthetic construct
  source 1..75: mol_type = other DNA
agcccgacaactgaaactgctgcgtctgcgggcgcaccgctatgcggataaagccctgctgaaccgaaaaatgga

SEQ ID NO: 222549 - DNA, 75 bp, synthetic construct
  source 1..75: mol_type = other DNA
cgaatcacgcaaccagcttaagcggctgtatgcccagcagaactggacggaactgctggagcaggccgacctgat

SEQ ID NO: 222550 - DNA, 75 bp, synthetic construct
  source 1..75: mol_type = other DNA
ccgcagggctggccagaagcacgctgtactaccagctgtcactgcagaaggctaaggacaagtatgctgatgtga

SEQ ID NO: 222551 - DNA, 75 bp, synthetic construct
  source 1..75: mol_type = other DNA
aaccgctgctccacagtgatcaagggtggcattaccggataaaaagttatcagtctgacctggcagacaaagggt

SEQ ID NO: 222552 - DNA, 75 bp, synthetic construct
  source 1..75: mol_type = other DNA
gaagaccagcattccccctccctgatgccgctgattaacgcgctggaatcacgtctggcgcagtcgggtgggatg

SEQ ID NO: 222553 - DNA, 75 bp, synthetic construct
  source 1..75: mol_type = other DNA
ttcgccgacgaggtgacgcgcaactggatagcgcagcaggtcatgatgcgggaagacggcgcatggcttgcgggg

SEQ ID NO: 222554 - DNA, 75 bp, synthetic construct
  source 1..75: mol_type = other DNA
acctaaccgcctgctgttccagggcgtccaacgcctctacagcgccgactgggaccgcccgtggggcgatgaaaa

SEQ ID NO: 222555 - DNA, 75 bp, synthetic construct
  source 1..75: mol_type = other DNA
gcaccaaaccgcgtttccactttatcgcggacaaacaaaacgatatttcgtcgattgtggtggaactggattacc

SEQ ID NO: 222556 - DNA, 75 bp, synthetic construct
  source 1..75: mol_type = other DNA
tgggacaggtggacagccgttatccgtcaggacctggcgttactgctggaacgcctgccggggctggaaaatctg

SEQ ID NO: 222557 - DNA, 75 bp, synthetic construct
  source 1..75: mol_type = other DNA
atgcccagcagaactggacggaactgctggagcaggccgacctgatgttcagcaccggcgtcagccatttctggc

SEQ ID NO: 222558 - DNA, 75 bp, synthetic construct
  source 1..75: mol_type = other DNA
atctgggcgcgactgcaccgcgacggtgagcgcggactggctgaggggctggcgctactgaccggactggtggaa

SEQ ID NO: 222559 - DNA, 75 bp, synthetic construct
  source 1..75: mol_type = other DNA
ctggaaaaaataatgccgctgctgataagctgcgtgagcagtacggggtcggaccggtatgcagtgaactgcata

SEQ ID NO: 222560 - DNA, 75 bp, synthetic construct
  source 1..75: mol_type = other DNA
gaacgacctgaccaactgtgggtggctgattttacttacggtgtgcccggagttcagggcgggcatggatgctta

SEQ ID NO: 222561 - DNA, 75 bp, synthetic construct
  source 1..75: mol_type = other DNA
ccgcgtaaaccgtcagttcgtggcagaacgacctgaccagctgtggggggctgattttacttacgtcagcacatg

SEQ ID NO: 222562 - DNA, 75 bp, synthetic construct
  source 1..75: mol_type = other DNA
aaagattacacccgcaaaacactgctcaaagaatatgcctcgctggatgactttacccgcaagtggcaagacgcc

SEQ ID NO: 222563 - DNA, 75 bp, synthetic construct
  source 1..75: mol_type = other DNA
gccccgtcaacgaattaccactgtcagcaacagcgacatcatcctgataaacgcagttcccgtgcgcagcacgat

SEQ ID NO: 222564 - DNA, 75 bp, synthetic construct
  source 1..75: mol_type = other DNA
catggagacgacattcgtgctggatgcactggtgaggtgtactggcaatagcggacactaccatttgttcttttt

SEQ ID NO: 222565 - DNA, 75 bp, synthetic construct
  source 1..75: mol_type = other DNA
actggtataacaatcgacgattgctggaaaggctggaccatatcccaccggcagaagcagaaaaagcttattatg

SEQ ID NO: 222566 - DNA, 75 bp, synthetic construct
  source 1..75: mol_type = other DNA
acgtattaccactgtcagcaacagcaacatcatcctgataaacgcagtgcccgtgcgcaggctgaagaaagagat

SEQ ID NO: 222567 - DNA, 75 bp, synthetic construct
  source 1..75: mol_type = other DNA
cattcgtgctggatgcactggagcaggcgttgtgggcccgtcggccgtccggcacagtccatcacagtgataaag

SEQ ID NO: 222568 - DNA, 75 bp, synthetic construct
  source 1..75: mol_type = other DNA
ccgtaagcgctggaaaaaccggacagaagtggagctgtccacacttacgtgggtggactggtataacaatcgacg

SEQ ID NO: 222569 - DNA, 75 bp, synthetic construct
  source 1..75: mol_type = other DNA
gtgctggatgcactggagcaggcagtatgggaccgtcgtccgtctggcactatccatcactgtgataaaggttct

SEQ ID NO: 222570 - DNA, 75 bp, synthetic construct
  source 1..75: mol_type = other DNA
acacattcgtgctggatgcactggagcaggcgttgtgggcccgtcggccgtccggcacagtccatcacagtgata

SEQ ID NO: 222571 - DNA, 75 bp, synthetic construct
  source 1..75: mol_type = other DNA
tttcaccgatttactcgataagctcaaccccggcgatcttctggtttttaacaatacccgcgtgatcccggcacg

SEQ ID NO: 222572 - DNA, 75 bp, synthetic construct
  source 1..75: mol_type = other DNA
actactggcatcaacagggagtaccggcgactcgtatgacaacgcgatggcggagagcatcaatggcctttacaa

SEQ ID NO: 222573 - DNA, 75 bp, synthetic construct
  source 1..75: mol_type = other DNA
ctcatcgtctatggaaacgacattcgtgctggatgcgctggagcaggcgttttgggcccgtcgaccgtccggcac

SEQ ID NO: 222574 - DNA, 75 bp, synthetic construct
  source 1..75: mol_type = other DNA
ctcatcgtctatggaaacgacattcgtgctggatgctctggagcaggcgttttgggcccggcgaccgtccggcac

SEQ ID NO: 222575 - DNA, 75 bp, synthetic construct
  source 1..75: mol_type = other DNA
actgctggcatcaacaggaagtacgggcgactcgtatgacaacgcgatggcggagagcatcaatggcctttacaa

SEQ ID NO: 222576 - DNA, 75 bp, synthetic construct
  source 1..75: mol_type = other DNA
actcctggcatcaacagggagtacaggcgactcgtatgacaacgcgatggcggagagcatcaatggcctttacaa

SEQ ID NO: 222577 - DNA, 75 bp, synthetic construct
  source 1..75: mol_type = other DNA
acttctggcatcaacaggcagtactggcgactcgtatgacaacgcgatggcggagagcatcaatggcctttacaa

SEQ ID NO: 222578 - DNA, 75 bp, synthetic construct
  source 1..75: mol_type = other DNA
tcggaccggtatgcagtgaactgcatatcgccccgtcaacgaattaccactgtcagcaacagcgacatcatcctg

SEQ ID NO: 222579 - DNA, 75 bp, synthetic construct
  source 1..75: mol_type = other DNA
tcatggcggttatgggacttgccggtgttctccggggtaaaaaggtccgtactaccgtcagccgatttacgggcc

SEQ ID NO: 222580 - DNA, 75 bp, synthetic construct
  source 1..75: mol_type = other DNA
attgcgtgccaaaggcgtggagatggcatttgtgaccttgcacgttggcgcgggtactttccagccggtgcgcgt

SEQ ID NO: 222581 - DNA, 75 bp, synthetic construct
  source 1..75: mol_type = other DNA
ctcatcgtctatggaaacgacattcgtgctggatgctctggagcaggcgttttgggcccgacggccgtccggcac

SEQ ID NO: 222582 - DNA, 75 bp, synthetic construct
  source 1..75: mol_type = other DNA
ctcatcgtctatggaaacgacattcgtgctggatgcactggagcaggcgttttgggcccgtcggccgtccggcac

SEQ ID NO: 222583 - DNA, 75 bp, synthetic construct
  source 1..75: mol_type = other DNA
tggcggttatgggacttgccggtgttctccggggtaaaaaggtccgcactaccgtcagccggaaaaccgttgctg

SEQ ID NO: 222584 - DNA, 75 bp, synthetic construct
  source 1..75: mol_type = other DNA
acgtattaccactgtcagcaacagcgacatcatcctgataaacgctgtccacatgcgcagcgcgatgactggctg

SEQ ID NO: 222585 - DNA, 75 bp, synthetic construct
  source 1..75: mol_type = other DNA
acgtattaccactgtcagcaacagcgacatcatcctgataaacgcagtccacatgctcagcgcgatgactggctg

SEQ ID NO: 222586 - DNA, 75 bp, synthetic construct
  source 1..75: mol_type = other DNA
acgtattaccactgtcagcaacagcgacatcatcctgataaacgcagttcacatgcccagcgcgatgactggctg

SEQ ID NO: 222587 - DNA, 75 bp, synthetic construct
  source 1..75: mol_type = other DNA
aagagagagatacagagcgtatacgatgaaaatcacaaggtatacggtgtgcgtaaagtctggcgtcagttgtta

SEQ ID NO: 222588 - DNA, 75 bp, synthetic construct
  source 1..75: mol_type = other DNA
tcttttctgttctggtgctttcctccgtattaaccgcctgtaacaccacgcgcggcgtcggtgaagatatttccg

SEQ ID NO: 222589 - DNA, 75 bp, synthetic construct
  source 1..75: mol_type = other DNA
acgtattaccactgtcagcaacagcgacatcatcctgataaacgctgtgcacatgcccagcgcgatgactggctg

SEQ ID NO: 222590 - DNA, 75 bp, synthetic construct
  source 1..75: mol_type = other DNA
tctcgttaaccgtaccactctctggggcagtgccatcaacgaagtacatcctcgcaacggtgaaaactacttcac

SEQ ID NO: 222591 - DNA, 75 bp, synthetic construct
  source 1..75: mol_type = other DNA
cgacgattgctggaaaggctgggccatactcctccggcagaagcagaaaaagcttattatgcttccatcggaaac

SEQ ID NO: 222592 - DNA, 75 bp, synthetic construct
  source 1..75: mol_type = other DNA
tatgggcccgtcgaccgtccggcacggtccatcacagtgataaaggttctcagtatgtatcgctggcctatatgg

SEQ ID NO: 222593 - DNA, 75 bp, synthetic construct
  source 1..75: mol_type = other DNA
tggtataacaatcgacgattgctggaaaggctgggccatactcctccggcagaagcagaagctaatcctgagtaa

SEQ ID NO: 222594 - DNA, 75 bp, synthetic construct
  source 1..75: mol_type = other DNA
caatcctgcccgcttcgcgctggttataacaaactgctgatcaaccgcaaaccgtccaaagttgacgacggcgat

SEQ ID NO: 222595 - DNA, 75 bp, synthetic construct
  source 1..75: mol_type = other DNA
cgggaaggtatcagagtggccagatgcactgtggcacgtctcatggcagttatgggacttgccggtgttctccgt

SEQ ID NO: 222596 - DNA, 75 bp, synthetic construct
  source 1..75: mol_type = other DNA
tatgggacttgccggtattctccggggtaaaaggtccgcactaccgtcagccggaaaaccgttgccgcaggtaac

SEQ ID NO: 222597 - DNA, 75 bp, synthetic construct
  source 1..75: mol_type = other DNA
tcgtgggatggcgggtctcctcgtccatggaaacgacattcgtgctggatgcactggagcaggcgttgtgggccc

SEQ ID NO: 222598 - DNA, 75 bp, synthetic construct
  source 1..75: mol_type = other DNA
tcactggcctatacggagcgattaaaagaagcaaaactgctggcatcaacaggaagtacaggcgactcgtatgac

SEQ ID NO: 222599 - DNA, 75 bp, synthetic construct
  source 1..75: mol_type = other DNA
ggactggtataacaatcgacgattgctggaaaggctgggccatactcctccggcagaagcagaaaaagcttatta

SEQ ID NO: 222600 - DNA, 75 bp, synthetic construct
  source 1..75: mol_type = other DNA
agctggaaaaaccgtgcagaagtggacacactcacgtgggtggactggtataacaatcgacgattgctgggaagg

SEQ ID NO: 222601 - DNA, 75 bp, synthetic construct
  source 1..75: mol_type = other DNA
tggaaaggctgggccatatcccaccggcagaagcagaaaaagcttattatgcttccatcggaaacgatgatctgg

SEQ ID NO: 222602 - DNA, 75 bp, synthetic construct
  source 1..75: mol_type = other DNA
taatacaccgtaagagctggaaaaaccgtgcagaagtggaactggccacactaacgtgggtggactggtataaca

SEQ ID NO: 222603 - DNA, 75 bp, synthetic construct
  source 1..75: mol_type = other DNA
cagaagtggaactggccacactcacgtgggtggactggtataacaatcgaagattgctgggaaggcggggccata

SEQ ID NO: 222604 - DNA, 75 bp, synthetic construct
  source 1..75: mol_type = other DNA
cagaagtggaactggccacactcacgtgggtggactggtataacaatcgaagattgctggcaaggccgggccata

SEQ ID NO: 222605 - DNA, 75 bp, synthetic construct
  source 1..75: mol_type = other DNA
cagaagtggaactggccacactcacgtgggtggactggtataacaatcgaagattgctggaaaggcagggccata

SEQ ID NO: 222606 - DNA, 75 bp, synthetic construct
  source 1..75: mol_type = other DNA
cagaagtggaactggccacactcacgtgggtggactggtataacaatcgaggattgctgggaaggcagggccata

SEQ ID NO: 222607 - DNA, 75 bp, synthetic construct
  source 1..75: mol_type = other DNA
cagaagtggaactggccacactcacgtgggtggactggtataacaatcgacgattgctggcaaggcagggccata

SEQ ID NO: 222608 - DNA, 75 bp, synthetic construct
  source 1..75: mol_type = other DNA
cagaagtggaactggccacactcacgtgggtggactggtataacaatcgatgattgctgggaaggctgggccata

SEQ ID NO: 222609 - DNA, 75 bp, synthetic construct
  source 1..75: mol_type = other DNA
atggcttttgtggatggggttgtgattatgaatgagccgcgttgtattgctcagttattgcgtaacgaaagcccc

SEQ ID NO: 222610 - DNA, 75 bp, synthetic construct
  source 1..75: mol_type = other DNA
tgggtgcgggcagatatcagtcgtatttcgattgagctttttgacgccaccttacaaaaatggtgtggcagcgaa

SEQ ID NO: 222611 - DNA, 75 bp, synthetic construct
  source 1..75: mol_type = other DNA
cctgccgatttttatcacaatttcaaacagctgggcatccgctcagtacagcttattccccatcttgaatttgat

SEQ ID NO: 222612 - DNA, 75 bp, synthetic construct
  source 1..75: mol_type = other DNA
ggcagtaacgttcgcaaagttgacgcccatacctatgaagggatcactgatgctaacggagaggcctctctgacg

SEQ ID NO: 222613 - DNA, 75 bp, synthetic construct
  source 1..75: mol_type = other DNA
tgcatttcgcgtgaactataacgcgaacgccaacaccggccgtaataacacctcggcctttggttctgcggacct

SEQ ID NO: 222614 - DNA, 75 bp, synthetic construct
  source 1..75: mol_type = other DNA
gaaccagtggttctgtatcagtcagcggttcggtactggtcgtcccgatggcgaaagacattatgttcagccgca

SEQ ID NO: 222615 - DNA, 75 bp, synthetic construct
  source 1..75: mol_type = other DNA
gcgttatctggttgacctgtccctgaacgggaaggaggccgggaaacagatactggatgtgacaccacaggacag

SEQ ID NO: 222616 - DNA, 75 bp, synthetic construct
  source 1..75: mol_type = other DNA
tgacctcctttgacagcatttcctgggcccccacatccacgtttggtcagggggctgaagccgtcaacgccctgc

SEQ ID NO: 222617 - DNA, 75 bp, synthetic construct
  source 1..75: mol_type = other DNA
ttttgcatgtacatttcttgcctggtgataaggtttttttgggttggagtgaaggagctggttcgccctatgaga

SEQ ID NO: 222618 - DNA, 75 bp, synthetic construct
  source 1..75: mol_type = other DNA
cggggaacctgggttataaacctgttttcacgggcatagctaacggacccgccagggttacgctggttcagaatg

SEQ ID NO: 222619 - DNA, 75 bp, synthetic construct
  source 1..75: mol_type = other DNA
atgtggggtcatatgcccgatacgctgaaggcccgtgattacacttttagtcgaccaaaactggcggcggaagtc

SEQ ID NO: 222620 - DNA, 75 bp, synthetic construct
  source 1..75: mol_type = other DNA
tccgcacgctcgggaggagacgccagacagcgtgctatgtgcgggctatcaggcgttttattcttactccgcacc

SEQ ID NO: 222621 - DNA, 75 bp, synthetic construct
  source 1..75: mol_type = other DNA
tgggtgcgggcagatatcagtcgtatctcgattgagctttttgacgccaccctacaaaaatggtgtggcagcgaa

SEQ ID NO: 222622 - DNA, 75 bp, synthetic construct
  source 1..75: mol_type = other DNA
gtgaaaaactggatatgtcctttagtccgagggggggggcgggttaatccggaagtctgggcagccctgaacggc

SEQ ID NO: 222623 - DNA, 75 bp, synthetic construct
  source 1..75: mol_type = other DNA
gtatcagctacttttgccagtaccacaagtgctgcaggtgaaaaactggatatgtcttttatccagggcggtgcc

SEQ ID NO: 222624 - DNA, 75 bp, synthetic construct
  source 1..75: mol_type = other DNA
agtggtgaacgtgaaggatacacccggagtgaaggtgacgtccggtgacggacagacaaacagcgacggcaacct

SEQ ID NO: 222625 - DNA, 75 bp, synthetic construct
  source 1..75: mol_type = other DNA
ttgacccgacagagctgtggtcgcagtcaaatcatggtcgccggacgaaggatgaatggaatgccggtgtcagtc

SEQ ID NO: 222626 - DNA, 75 bp, synthetic construct
  source 1..75: mol_type = other DNA
gtggtggtgccagcagttacctgaatgcgtcgtacagcggtgaccgggcttatctgagtggagccctgaaccact

SEQ ID NO: 222627 - DNA, 75 bp, synthetic construct
  source 1..75: mol_type = other DNA
ccgtcgttacagcagcagtacgtctgtgagcaccagtaagaatggtggcacgggcttcagtaccgggctgtccgg

SEQ ID NO: 222628 - DNA, 75 bp, synthetic construct
  source 1..75: mol_type = other DNA
tgcgtcatacggttacggtctggacggagtgacgctgcgttctgggggggtgtttaaccaggactggcagggtat

SEQ ID NO: 222629 - DNA, 75 bp, synthetic construct
  source 1..75: mol_type = other DNA
gattacgggaccagtgcatttcgcgtgaactataacgcgaacgccaacaccggccgtaataacacctcggccttt

SEQ ID NO: 222630 - DNA, 75 bp, synthetic construct
  source 1..75: mol_type = other DNA
gcgggtgagctggtcacggcagagtgaggaatatgaggacatgtcctcctttgacccgacagagctgtggtcgca

SEQ ID NO: 222631 - DNA, 75 bp, synthetic construct
  source 1..75: mol_type = other DNA
tatggcgtgtcactgagtaggaacaacagcatgaagccgggcaacttggggtacaccccggtattcagcggcatt

SEQ ID NO: 222632 - DNA, 75 bp, synthetic construct
  source 1..75: mol_type = other DNA
gtgcgtgcagaagtaaaaacaatcacaaaacaggtttcgtccgtatttttccgtcgggccacacttgcgcttgcc

SEQ ID NO: 222633 - DNA, 75 bp, synthetic construct
  source 1..75: mol_type = other DNA
tcgccgtgctgcactggcgcttgccatatcagcggtgtttgccagtgttgcgacagttgccggtgaaaaactgga

SEQ ID NO: 222634 - DNA, 75 bp, synthetic construct
  source 1..75: mol_type = other DNA
cctcggcctttggctcagcggacctgaaagccaatatcgggcgctgggtggtgagctcttctgccacggccagcg

SEQ ID NO: 222635 - DNA, 75 bp, synthetic construct
  source 1..75: mol_type = other DNA
accggggagtgggtgttgctggtgagtggcagttccgcccgccaggcgcataaaagcgaaacgtcaccggtcgat

SEQ ID NO: 222636 - DNA, 75 bp, synthetic construct
  source 1..75: mol_type = other DNA
gaacggattcgggtcattgcgtgacagtgatttttctaaaagtaccgtgaaccgtccgataaagcgggtttatcc

SEQ ID NO: 222637 - DNA, 75 bp, synthetic construct
  source 1..75: mol_type = other DNA
tatagcagtggcggggtgcagatggtgatcgcgccgcatatcgtccataagttccagcaacaggggaatcactaa

SEQ ID NO: 222638 - DNA, 75 bp, synthetic construct
  source 1..75: mol_type = other DNA
aactcgatctgataaagcggcatcggaaatccttggcaccttcggtggagtcactatcgaatccttccctggatg

SEQ ID NO: 222639 - DNA, 75 bp, synthetic construct
  source 1..75: mol_type = other DNA
tgtattgcgaaaactgcgacgacgacggcatggtcgttaagactgaaaaaggctgcggcttctttctgtatcaag

SEQ ID NO: 222640 - DNA, 75 bp, synthetic construct
  source 1..75: mol_type = other DNA
cgccatcgacaatattggcgcgggaaccggggagtgggtgttgctggtgagtggcagttccgcccgccaggcgca

SEQ ID NO: 222641 - DNA, 75 bp, synthetic construct
  source 1..75: mol_type = other DNA
gatcgatcgccgtggcagttttgcggcagcagcagatgagctgggacgcgtgccttctgcgcttagctacaccat

SEQ ID NO: 222642 - DNA, 75 bp, synthetic construct
  source 1..75: mol_type = other DNA
gttttgctggaagccgcagataaactgactaccgatgcggaagctctcgcgcgcggttgggaaacgcatctcacc

SEQ ID NO: 222643 - DNA, 75 bp, synthetic construct
  source 1..75: mol_type = other DNA
cgagatcgatattattatggcctggcgtcgtgacagtatgggggaagcgaaatcctggtgtctgcgggaaattcc

SEQ ID NO: 222644 - DNA, 75 bp, synthetic construct
  source 1..75: mol_type = other DNA
agcgcggactggagcattgcaaaagaatgcgccttcagatcaacccagcctacagcgatgcggggaactggtggg

SEQ ID NO: 222645 - DNA, 75 bp, synthetic construct
  source 1..75: mol_type = other DNA
tgccttagagagttacaccgggagtaaaattgtccagatagcaacgaaattactgatgattacgggcgtgagaac

SEQ ID NO: 222646 - DNA, 75 bp, synthetic construct
  source 1..75: mol_type = other DNA
gcgcggttgggaaacgcatctcaccgttgtgaccgaggcgctggtgccgacggctgcctttttccctttgatcga

SEQ ID NO: 222647 - DNA, 75 bp, synthetic construct
  source 1..75: mol_type = other DNA
aagattgtcgtaactgaacaaactgggcgcgaagctcttgagctggcagcgcacagctacagagatcttcacatc

SEQ ID NO: 222648 - DNA, 75 bp, synthetic construct
  source 1..75: mol_type = other DNA
tatctgccaatggttctgttctggcactgccaggttctaaggacgtgattttaagtagaactacaggagatacta

SEQ ID NO: 222649 - DNA, 75 bp, synthetic construct
  source 1..75: mol_type = other DNA
atcggtgagtaccagtaaggacggtggcgttggcttcagtacaggggtatccggttcactgaatgaccgtttcag

SEQ ID NO: 222650 - DNA, 75 bp, synthetic construct
  source 1..75: mol_type = other DNA
cagaaaatatagaatgggagtatggaacctcagcatttcgtatgaattataatattaatgcgaatactggacata

SEQ ID NO: 222651 - DNA, 75 bp, synthetic construct
  source 1..75: mol_type = other DNA
aaaatactcctttgggatttgttgcgaataatggcgtcctaatgattaatgctgtagatacgctgggagatatat

SEQ ID NO: 222652 - DNA, 75 bp, synthetic construct
  source 1..75: mol_type = other DNA
aaaataccccgttaggattcgtcgctaataatggcgtattaatgattaacgcagtagatgcactgggagatatta

SEQ ID NO: 222653 - DNA, 75 bp, synthetic construct
  source 1..75: mol_type = other DNA
agcaactcgagctgttcgttcacttaacgcagacttagctgtaggtaaaacgcagacaggcaataatttacttgg

SEQ ID NO: 222654 - DNA, 75 bp, synthetic construct
  source 1..75: mol_type = other DNA
ggcggtggtcgtgacagtgatggcggtaccagcagttatctgaacgcgtcgtacagcggtgaccgggcttatctg

SEQ ID NO: 222655 - DNA, 75 bp, synthetic construct
  source 1..75: mol_type = other DNA
ctcaccgccagcaaaaggacagcggtaaggagagaggggtgaccggcacgctgagcacgcagattgaaggtgttg

SEQ ID NO: 222656 - DNA, 75 bp, synthetic construct
  source 1..75: mol_type = other DNA
tactgcacccgccaggagcgttttgaggcactccgggccgaatgccccggcgtgatgaccctgcacctgtaccgg

SEQ ID NO: 222657 - DNA, 75 bp, synthetic construct
  source 1..75: mol_type = other DNA
tggtgaattaaataaacctgataataacagtatggtgaaagtccggaataaaaaaatggtccggtattatgcaaa

SEQ ID NO: 222658 - DNA, 75 bp, synthetic construct
  source 1..75: mol_type = other DNA
agtggtgaacgtgaaggatacacccggagtgaaggtgacgtccggtgacggacagacaaacagtgatggcaacct

SEQ ID NO: 222659 - DNA, 75 bp, synthetic construct
  source 1..75: mol_type = other DNA
ggagtgaaggtgacgtccggtgacggacagacaaacagcgacggcaacctggtggttccgctgaacagctatgac

SEQ ID NO: 222660 - DNA, 75 bp, synthetic construct
  source 1..75: mol_type = other DNA
ggctgctgaaaaacgataaccaactggggatgttattcaccctggccaacctatttcgggtggaccaaatgatac

SEQ ID NO: 222661 - DNA, 75 bp, synthetic construct
  source 1..75: mol_type = other DNA
gatcgcaccactatcatgaatttccgccacctgctcgagcagcatcaactggcccgtcaattgttcaagaccatc

SEQ ID NO: 222662 - DNA, 75 bp, synthetic construct
  source 1..75: mol_type = other DNA
tcgcctccatgcggctgtttgcccgtttatccctggatagcgccctgccggaacgcaccaccatcatgaatttcc

SEQ ID NO: 222663 - DNA, 75 bp, synthetic construct
  source 1..75: mol_type = other DNA
cctccgcaccgttcccgataacggaaattatgagcatgactatgagggagcagacgatatgccttctcatatcaa

SEQ ID NO: 222664 - DNA, 75 bp, synthetic construct
  source 1..75: mol_type = other DNA
gcaacacacctccgcctctctgacacttaatgagaattgcgaccccactgtacgccatgacatggagcgtttttt

SEQ ID NO: 222665 - DNA, 75 bp, synthetic construct
  source 1..75: mol_type = other DNA
gcccctcactcaccggctcagtctcagggcagaagcattaatacactcagttcatgtcttatacaggaatgggca

SEQ ID NO: 222666 - DNA, 75 bp, synthetic construct
  source 1..75: mol_type = other DNA
gctgctgcattaactgctcagggtttgcagccggtatggaaagactgggacagctatctgggacgtgcctcgcaa

SEQ ID NO: 222667 - DNA, 75 bp, synthetic construct
  source 1..75: mol_type = other DNA
gatggcgctgttatcaccagccgccagtgactacctggaaccactggctcaacgggcgcagcgtctgacccgtca

SEQ ID NO: 222668 - DNA, 75 bp, synthetic construct
  source 1..75: mol_type = other DNA
gatggcgctgttatcgccagccgccagtggctatctggaacaactggcccaacgggcgcagcgtctgacccgtca

SEQ ID NO: 222669 - DNA, 75 bp, synthetic construct
  source 1..75: mol_type = other DNA
gggggacaggcagtgaaaccatcgtcagggatactgttgccaaatggcgtaaaggctggaacccaccggttacta

SEQ ID NO: 222670 - DNA, 75 bp, synthetic construct
  source 1..75: mol_type = other DNA
gcgatttggcaacgtcatcagcttctacgtcccgctttatctctctaatctttgcgctaacgactgcacttactg

SEQ ID NO: 222671 - DNA, 75 bp, synthetic construct
  source 1..75: mol_type = other DNA
gcgttattccgctggcgatcaataacgtcagcgccttctcgaaaacgcaaccaggtggttatgccgacaatcatc

SEQ ID NO: 222672 - DNA, 75 bp, synthetic construct
  source 1..75: mol_type = other DNA
gtcggtgcggcactgcgtgaagtgaatcgggtactgaagcccggtggtctgttgattgtgatggatgtgatgtca

SEQ ID NO: 222673 - DNA, 75 bp, synthetic construct
  source 1..75: mol_type = other DNA
agatgaaccgaagctggggcagttgctcattgattatctgcgtgctgcgagctatgcgccaacgttgattagcca

SEQ ID NO: 222674 - DNA, 75 bp, synthetic construct
  source 1..75: mol_type = other DNA
gacgactaccgcgtagtaaccgaccgcaccatcgacagccacattaaaaacctgcgccgcaagctggaatctctc

SEQ ID NO: 222675 - DNA, 75 bp, synthetic construct
  source 1..75: mol_type = other DNA
actaaatcagtaagttggcaccattaccctattatgaaaaacgtaaaaaccctcatcgctgcggcgattttaagc

SEQ ID NO: 222676 - DNA, 75 bp, synthetic construct
  source 1..75: mol_type = other DNA
gggtcattaacctgcctgcgctgggaagataagcagtattttgtccagccgtcgaaccggcataaggatttgggt

SEQ ID NO: 222677 - DNA, 75 bp, synthetic construct
  source 1..75: mol_type = other DNA
aaccgcatagtacgatggtgtttatcgggattcagctgccggaagaagagattcgggcggcgtttgctgggttga

SEQ ID NO: 222678 - DNA, 75 bp, synthetic construct
  source 1..75: mol_type = other DNA
aaaccgacgtcgcaggcgaagcagaaaaactgcgtgaacgcctggcgcgcatcaacgcccgcgcaccggtctaca

SEQ ID NO: 222679 - DNA, 75 bp, synthetic construct
  source 1..75: mol_type = other DNA
aggcgtgcgactggcatcggctgtgtccgcacgctcgggaggagacgccagacagcgtgctatgtgcgggctatc

SEQ ID NO: 222680 - DNA, 75 bp, synthetic construct
  source 1..75: mol_type = other DNA
gctcattccccatcttgaatttgatgaccggggcgatctgacggccgcttcggtgacagcagagctgtgggggaa

SEQ ID NO: 222681 - DNA, 75 bp, synthetic construct
  source 1..75: mol_type = other DNA
caggactggatgatgccgataccgtaacgcttaaggaagtgacagaagcattgttgcattgtgcagaacagattc

SEQ ID NO: 222682 - DNA, 75 bp, synthetic construct
  source 1..75: mol_type = other DNA
caaaggggaagaagtttctctttggtctgttggcggttttcattattgcggcgtcagttgtgactcgcgcgacta

SEQ ID NO: 222683 - DNA, 75 bp, synthetic construct
  source 1..75: mol_type = other DNA
cgaggggaagaaagtttctcttaggcttgttggcggtttttattattgcggcgtcggtggtgactcgcgcaacca

SEQ ID NO: 222684 - DNA, 75 bp, synthetic construct
  source 1..75: mol_type = other DNA
ccgcaacaaaatcaggcaccgacctgctggccatgctcaccaaagccacgcaggaaggtaaagccgcagttgctg

SEQ ID NO: 222685 - DNA, 75 bp, synthetic construct
  source 1..75: mol_type = other DNA
ctcaaattaaaacactcgatctacctctgggtggctcacgcggtgtgaggttagctcttgatatcttaatagatc

SEQ ID NO: 222686 - DNA, 75 bp, synthetic construct
  source 1..75: mol_type = other DNA
gcaatcatggtgctgtttccgcgcatgatccgcctgattgtcgagggcctaatgcccatctccgacggcgcaaga

SEQ ID NO: 222687 - DNA, 75 bp, synthetic construct
  source 1..75: mol_type = other DNA
tcaatgtatgtgattcagtcatcgatgatttttgtttatagtctggtctttactgtgttgctggcaatcccgttg

SEQ ID NO: 222688 - DNA, 75 bp, synthetic construct
  source 1..75: mol_type = other DNA
cccatccaacgcttccgatccccagctacgccagaatcactaacctggctaacgggcgaatgatcgtggtgcgca

SEQ ID NO: 222689 - DNA, 75 bp, synthetic construct
  source 1..75: mol_type = other DNA
agacagcagaacctgaatacccggatggcctgagcgaaccgatcgggaaatttccgatgactggtgtctggcagc

SEQ ID NO: 222690 - DNA, 75 bp, synthetic construct
  source 1..75: mol_type = other DNA
tcaattgattcaattttgcaggcaatgcaggggcgggtacttgatggagatttaatcaccggatgggaaaaacgc

SEQ ID NO: 222691 - DNA, 75 bp, synthetic construct
  source 1..75: mol_type = other DNA
tggcctgagcgaaccgatcgggaaatttccgatgactggtgtctggcggccgtcgctggattttcgacagcgggc

SEQ ID NO: 222692 - DNA, 75 bp, synthetic construct
  source 1..75: mol_type = other DNA
ggcagtgcgggtctggtgtattccccggtctaccatatcgccattcagaatgacgggactaatggccagataggg

SEQ ID NO: 222693 - DNA, 75 bp, synthetic construct
  source 1..75: mol_type = other DNA
gggcagcacgcgaacagtgggaacgtgacaacggatttatcagcaacggaaacggcctggaagctgtgggagctt

SEQ ID NO: 222694 - DNA, 75 bp, synthetic construct
  source 1..75: mol_type = other DNA
ggaaaaacgccaggtgatgaaggaggataacggtaatgtttcgcaaaccgcaaaatccccggcagagcgcaagag

SEQ ID NO: 222695 - DNA, 75 bp, synthetic construct
  source 1..75: mol_type = other DNA
ctccacagcccgttgttactgctccggcgacaacgcctgcaacaacaccagcaatggtaaccccgcagactgcca

SEQ ID NO: 222696 - DNA, 75 bp, synthetic construct
  source 1..75: mol_type = other DNA
catttgccagcaaagccgaagccagtaccttgcagcaacgtttacaaaccgaagcccaattacagtcatttatta

SEQ ID NO: 222697 - DNA, 75 bp, synthetic construct
  source 1..75: mol_type = other DNA
tgagtcgcatggtgcgccgttgcagacagccgaacctgaatacctggacggcctgagcgaacccatcgggaaatt

SEQ ID NO: 222698 - DNA, 75 bp, synthetic construct
  source 1..75: mol_type = other DNA
gttcaaacaaatgttggtgttgtgtttgaacatgacgcaaacacaaaagcaactaataaagatacagaactaaaa

SEQ ID NO: 222699 - DNA, 75 bp, synthetic construct
  source 1..75: mol_type = other DNA
cgcctgtgcgctgattatagcggcggcgtctggagcttttacacactcagcaatagcggcgcatttatggctccg

SEQ ID NO: 222700 - DNA, 75 bp, synthetic construct
  source 1..75: mol_type = other DNA
gcacctgccgtctgaacggtatcgatccggaagcgtatctgcgccatatcctgagcgtactgccggaatggcctt

SEQ ID NO: 222701 - DNA, 75 bp, synthetic construct
  source 1..75: mol_type = other DNA
aacacagcggaaagagcgcttcgtgcagtctgtcttggaaagaaaaattacgtgttcttcggtagcgatcacggc

SEQ ID NO: 222702 - DNA, 75 bp, synthetic construct
  source 1..75: mol_type = other DNA
cggtacccgttctgaaaaactgcgtcgtgaagttgaactggctgaggctctgctgaaacaacgtgaacaggacag

SEQ ID NO: 222703 - DNA, 75 bp, synthetic construct
  source 1..75: mol_type = other DNA
tcttatgacctttgtcaaatattaagcccaaaaagacctacgcagctccgggagcttcgttatatcgcggattaa

SEQ ID NO: 222704 - DNA, 75 bp, synthetic construct
  source 1..75: mol_type = other DNA
cgaaaacagggcgtatctggacgtatgtccgggatgatcgcaatgtgggttcgtcatctcctccggcggtctggt

SEQ ID NO: 222705 - DNA, 75 bp, synthetic construct
  source 1..75: mol_type = other DNA
atgcaaaagcgcccacctacatcaccacggaagccctgcagcgtatcggtgaactgtatgccatcgaggcagagg

SEQ ID NO: 222706 - DNA, 75 bp, synthetic construct
  source 1..75: mol_type = other DNA
gtgcactgacagaagttgcgtgctgggcccatgcccggcgaaaaatccacgatgtatacatcagcagcaaaagtg

SEQ ID NO: 222707 - DNA, 75 bp, synthetic construct
  source 1..75: mol_type = other DNA
ggaagcgtatctgcgccatattctgagcgtactgccggaatggccttccaaccgagttgacgaactcctgccatg

SEQ ID NO: 222708 - DNA, 75 bp, synthetic construct
  source 1..75: mol_type = other DNA
cagaacgtgaaggtggtgcactgacagaagttgcgtgctgggcccatgcccggcgaaaaatccacgatgtataca

SEQ ID NO: 222709 - DNA, 75 bp, synthetic construct
  source 1..75: mol_type = other DNA
cgaggcagagataaggggaatgacggcggagcagcgccttgccgaacgtcagttgaaaacgaaaccgctgctgaa

SEQ ID NO: 222710 - DNA, 75 bp, synthetic construct
  source 1..75: mol_type = other DNA
aggatattcccggtgtgctggccgtgtttgcagaacgccgtaaggacagttttggtccgtatgtccggctgatga

SEQ ID NO: 222711 - DNA, 75 bp, synthetic construct
  source 1..75: mol_type = other DNA
gacgccctctgttattacagtgatgacggactggcggagacggacaataacacagcggaaagagcgcttcgtgca

SEQ ID NO: 222712 - DNA, 75 bp, synthetic construct
  source 1..75: mol_type = other DNA
cccgtgtcttcggctggatggaccgtctgtgcgaagactactgcggtggtatctggaatctgtacaccctgaaca

SEQ ID NO: 222713 - DNA, 75 bp, synthetic construct
  source 1..75: mol_type = other DNA
tgcgttacgttattgagcatatccaagactggccggcaaaccgggtacgcgatctgttgccctggaaagttgatc

SEQ ID NO: 222714 - DNA, 75 bp, synthetic construct
  source 1..75: mol_type = other DNA
aagcgttcgcatacctgctgaaacagtgggaggccctgaacgtgtactgcagtaatggctgggtggaaatcgaca

SEQ ID NO: 222715 - DNA, 75 bp, synthetic construct
  source 1..75: mol_type = other DNA
atgaacagcgcatcagcttctggccgcagcacttttggcctcattccacagtgggtggccctggagccccgtgtc

SEQ ID NO: 222716 - DNA, 75 bp, synthetic construct
  source 1..75: mol_type = other DNA
gtgaccctggagccccgtatcttcgactggatggaccgtctgtgcgaaaactactgcggtggtatctggaatctg

SEQ ID NO: 222717 - DNA, 75 bp, synthetic construct
  source 1..75: mol_type = other DNA
atgccatgacgtttcattattaccggctgcgggattatgccctgcagcatccggaatgcagcgccattatgcgca

SEQ ID NO: 222718 - DNA, 75 bp, synthetic construct
  source 1..75: mol_type = other DNA
ctgagccgggccttactctccaactgggttgatgcgtgttgccagttaatgacgccgctgaatgatgctctgtac

SEQ ID NO: 222719 - DNA, 75 bp, synthetic construct
  source 1..75: mol_type = other DNA
gatcacggcggcgagcgtggagcactgctgtacgggctgatcggcacctgccgtctgaacggtatcgatccggaa

SEQ ID NO: 222720 - DNA, 75 bp, synthetic construct
  source 1..75: mol_type = other DNA
ggcctcccgcatttttcgctactgcaccggcagataccagtggcatggcagtgtctgttattacagcggcggtga

SEQ ID NO: 222721 - DNA, 75 bp, synthetic construct
  source 1..75: mol_type = other DNA
ggaatgctgtcctgcctgtggtggcgaactcagttctctgggatgtgatgtgtcagagcaactggagcttatcag

SEQ ID NO: 222722 - DNA, 75 bp, synthetic construct
  source 1..75: mol_type = other DNA
gcgtatctgagccatattctgagcgtactgccggaatggccttccaaccgggttgacgaactcctgccatggaac

SEQ ID NO: 222723 - DNA, 75 bp, synthetic construct
  source 1..75: mol_type = other DNA
gacgccgctgaatgatgctctgtaccgttacgtgatgaataccttcaagcttcacactgacgacacaccggtaaa

SEQ ID NO: 222724 - DNA, 75 bp, synthetic construct
  source 1..75: mol_type = other DNA
ttgatgaactcctgccatggaacgtagtactcaccaataaatatgaaccgccccgggtttcctggagagtgtttt

SEQ ID NO: 222725 - DNA, 75 bp, synthetic construct
  source 1..75: mol_type = other DNA
tggccggttacagcggtgtgcttcaggccgatgcttacggtggttaccgggtgttatacgaatccggcagaataa

SEQ ID NO: 222726 - DNA, 75 bp, synthetic construct
  source 1..75: mol_type = other DNA
gtgggtgaccctggagccccgtatcttcggctggatggaccgtctgtgtgaagactactgcggtggtatctggaa

SEQ ID NO: 222727 - DNA, 75 bp, synthetic construct
  source 1..75: mol_type = other DNA
gcggtggtatctggaatctgtacaccctgaacaacggcggggcatttatggcacccgaaccggatgacgatgatg

SEQ ID NO: 222728 - DNA, 75 bp, synthetic construct
  source 1..75: mol_type = other DNA
cggcgaaaaatccacgatgtatacatcagcagcaaaagtgcgacggcagaagaagccctgaagcgaatcagtgaa

SEQ ID NO: 222729 - DNA, 75 bp, synthetic construct
  source 1..75: mol_type = other DNA
ccggcaggggaaacacccggagcaacacctccgccccttccggggtatcctgcaggcggatgcgttcacaggtta

SEQ ID NO: 222730 - DNA, 75 bp, synthetic construct
  source 1..75: mol_type = other DNA
accggcaaataccgctggcacggcagcactgaaatgtataccggtcgtgaagtgcaggatattcccggtgtgctg

SEQ ID NO: 222731 - DNA, 75 bp, synthetic construct
  source 1..75: mol_type = other DNA
tggagctgagtcgttcactgctatcgggctgggtggatgcatgctgccggctactgtcaccgctggaagaagcgc

SEQ ID NO: 222732 - DNA, 75 bp, synthetic construct
  source 1..75: mol_type = other DNA
tgataaaaatgacggaacaggtaatgatgtcatcagtgttgaagggaaatctgctgccgcaggaacatcctccta

SEQ ID NO: 222733 - DNA, 75 bp, synthetic construct
  source 1..75: mol_type = other DNA
aaagcctgtacaaaatgtgactgtattgttgaagcaccggcgccgtcccgcccgatagagcgtggtatcccgggc

SEQ ID NO: 222734 - DNA, 75 bp, synthetic construct
  source 1..75: mol_type = other DNA
aaagatcgaagaagatgaacgggaaatagaacatctgcgggcccagatagaaaaactgcgccggatgctgttcgg

SEQ ID NO: 222735 - DNA, 75 bp, synthetic construct
  source 1..75: mol_type = other DNA
acaactttttacggtccgacacagtattatctgctgaaaaagcccaaatttggcagtgtgctgatggggtcactg

SEQ ID NO: 222736 - DNA, 75 bp, synthetic construct
  source 1..75: mol_type = other DNA
atcgatccggaagcgtatctgcgccatatcctcaacgtcctgccggaatggccttctaaccgtgttgatgaactc

SEQ ID NO: 222737 - DNA, 75 bp, synthetic construct
  source 1..75: mol_type = other DNA
ccatgcgtattcacagtcagcatcctgcatcccgtctttttccgttctgtaccggcaaataccgctggcacggtg

SEQ ID NO: 222738 - DNA, 75 bp, synthetic construct
  source 1..75: mol_type = other DNA
gtgctgaggcgtataccggtcgtgaagtacaggatattcccggcgtgctggccgtgtttgccgaacgccgtaagg

SEQ ID NO: 222739 - DNA, 75 bp, synthetic construct
  source 1..75: mol_type = other DNA
tacaccctgaacaacggtggcgcatttatggcacccgaaccagatgacgatgatgacgaaacatgggtgctgttc

SEQ ID NO: 222740 - DNA, 75 bp, synthetic construct
  source 1..75: mol_type = other DNA
ccatgtgcttggcgtcatagcagactggccggtcaaccgggtcagcgaactgcttccgtggcgcatagcactgcc

SEQ ID NO: 222741 - DNA, 75 bp, synthetic construct
  source 1..75: mol_type = other DNA
ctgtctcggaaagaaaaactcttatgacctttgtcaaatattaagcccaaaaagacctacgcagctccgggagct

SEQ ID NO: 222742 - DNA, 75 bp, synthetic construct
  source 1..75: mol_type = other DNA
cgcctactcaccggaccatcagggtaaacatccggagcaacaccttcgtcccttccggggtatcctgcaggcaga

SEQ ID NO: 222743 - DNA, 75 bp, synthetic construct
  source 1..75: mol_type = other DNA
accgccagtcagaaatataccgtcgtcagggagtggagctgagccgtgccacactggggcgctggtgctgttgct

SEQ ID NO: 222744 - DNA, 75 bp, synthetic construct
  source 1..75: mol_type = other DNA
tcaccgggaagtatgcagaccatctgccgttataccgccagtcagaaatataccgtcgtcagggagtggagctga

SEQ ID NO: 222745 - DNA, 75 bp, synthetic construct
  source 1..75: mol_type = other DNA
gttgcgaaactgcagcgcatgcagttcggtaaaagctcagaaaaacttcgcgcaaaaaccgaacggcagatacag

SEQ ID NO: 222746 - DNA, 75 bp, synthetic construct
  source 1..75: mol_type = other DNA
atcgatgttactcaccgatctccttcacggtaatacgcacggggcttcttgcccatgttgtcaccgggaaatatg

SEQ ID NO: 222747 - DNA, 75 bp, synthetic construct
  source 1..75: mol_type = other DNA
gttgcgtcagacccgcccccgtaagccgttccctgaatcactaccccgtgacgaaaagcgactgttgccagcggc

SEQ ID NO: 222748 - DNA, 75 bp, synthetic construct
  source 1..75: mol_type = other DNA
agtgcaggatattcccggtgtgctggccgtgtttgccgaacgccgtaaggacagttttggcccttatgtccggct

SEQ ID NO: 222749 - DNA, 75 bp, synthetic construct
  source 1..75: mol_type = other DNA
aacggggcgcactttgacggcgacctgagcggcacggtgaatggcgtcacgccgcccgcggtgcagcacctgacc

SEQ ID NO: 222750 - DNA, 75 bp, synthetic construct
  source 1..75: mol_type = other DNA
acacgggttatggttttgaagttcgcaaaaacggcgtattaatcgcatccagagaaactaaaggggccattcccg

SEQ ID NO: 222751 - DNA, 75 bp, synthetic construct
  source 1..75: mol_type = other DNA
tgcgaactccgggacgctcaacaatgtcacgataaatgaaaactgtacgattaagggcatgctggaggcgaccca

SEQ ID NO: 222752 - DNA, 75 bp, synthetic construct
  source 1..75: mol_type = other DNA
aacgacgtgttcctgaaacgcctgacggcccccaccattaccagtggtggaaatccaccggcattttccctgaca

SEQ ID NO: 222753 - DNA, 75 bp, synthetic construct
  source 1..75: mol_type = other DNA
aacaaccaacagtcatactggtattcaacctgtaagctgcaggtactgaagaacggacaggaaatctttcaccaa

SEQ ID NO: 222754 - DNA, 75 bp, synthetic construct
  source 1..75: mol_type = other DNA
gatgtgtcagagcaactggagcttatcagcagcgcctttaaggttatcgaaacacaacgtccgaaactggcctgt

SEQ ID NO: 222755 - DNA, 75 bp, synthetic construct
  source 1..75: mol_type = other DNA
cgcttctgtgatgagtacaacggcggtatctggtccttttacacgctcagcaatggcggcgcgtttatggctccc

SEQ ID NO: 222756 - DNA, 75 bp, synthetic construct
  source 1..75: mol_type = other DNA
tactggtcgtgaagtgcaggatattcccggcgttcttgccgtgtttgcagaacgccgtaaggacagttttggccc

SEQ ID NO: 222757 - DNA, 75 bp, synthetic construct
  source 1..75: mol_type = other DNA
tctgcgccacatcctgagcgttctgcctgagtggccttccaacagggttggtgaacttctgccgtggaacgtggc

SEQ ID NO: 222758 - DNA, 75 bp, synthetic construct
  source 1..75: mol_type = other DNA
aagagacggaggccttcctgcgctctgcactggcacgtgccgaagaaaagatcgaagaagatgagcgagtgtcaa

SEQ ID NO: 222759 - DNA, 75 bp, synthetic construct
  source 1..75: mol_type = other DNA
tgtggggatgcaggtggatgcggagcagtttggtggtcagcagatgacggtgaactaccatatccgcggtcgcat

SEQ ID NO: 222760 - DNA, 75 bp, synthetic construct
  source 1..75: mol_type = other DNA
cattccgctacagcttcagcgccctgaaagaccgccataatgccgttgaagtgaactggattgacccgaataacg

SEQ ID NO: 222761 - DNA, 75 bp, synthetic construct
  source 1..75: mol_type = other DNA
acgttcatcaatgaggcgctgattaagtaccttacagctcccaccattaccagcggcggcaatcctccggtattt

SEQ ID NO: 222762 - DNA, 75 bp, synthetic construct
  source 1..75: mol_type = other DNA
cagcaggcttgatgagttctcgaaacagtggaaagacgctaacgataaatggaatgccatgtggggcgtcaaaat

SEQ ID NO: 222763 - DNA, 75 bp, synthetic construct
  source 1..75: mol_type = other DNA
cccccaccattaccagcggcggtaatcctccggcattttccctgacatcagacgggagactgacggcgaaaaatg

SEQ ID NO: 222764 - DNA, 75 bp, synthetic construct
  source 1..75: mol_type = other DNA
taacgtgaacgcgaactccgggacactcaacaacgtcacgataaatgagaactgccggattctgggaaaactgtc

SEQ ID NO: 222765 - DNA, 75 bp, synthetic construct
  source 1..75: mol_type = other DNA
gtgaaatacgacacgccgatcacccgcaccatcacgtcggcaaacatcgaccgactgcgttttactttcggcgtg

SEQ ID NO: 222766 - DNA, 75 bp, synthetic construct
  source 1..75: mol_type = other DNA
gaaaagtggctgcgttacgtcattgaacatatctaggactggccggcaaaccgggtacgcgatctgttgccctgg

SEQ ID NO: 222767 - DNA, 75 bp, synthetic construct
  source 1..75: mol_type = other DNA
atgaaaatcatcacccgtggtgaagccatgcgtattcaccaacaacatccggcatcccgtctttttccgttctgt

SEQ ID NO: 222768 - DNA, 75 bp, synthetic construct
  source 1..75: mol_type = other DNA
ccccgtgtcttcagctggatggaccgtctgtgcgaagactactgcgggggcatctggaatctgtacaccctgaac

SEQ ID NO: 222769 - DNA, 75 bp, synthetic construct
  source 1..75: mol_type = other DNA
agctgcgtgtatggcccatgcccggagaaaaatccacgatgtgcatgcaagagtgccaaccgacatcaccacgga

SEQ ID NO: 222770 - DNA, 75 bp, synthetic construct
  source 1..75: mol_type = other DNA
gcccgatagagcgtggtatcgcgggccccggattacttgcccgcgtgttaacgggaaaatactgcgaacatctgc

SEQ ID NO: 222771 - DNA, 75 bp, synthetic construct
  source 1..75: mol_type = other DNA
gtctggctcggaaagaaaaattacgtgttcttcggtagcgatcacggcggcgagcgtggtgcactgctgtacggg

SEQ ID NO: 222772 - DNA, 75 bp, synthetic construct
  source 1..75: mol_type = other DNA
acatgggtactgttcaatgccatgaacggtaaccgcgctgaaatgagtccggaagccgccggcattgcagcctgt

SEQ ID NO: 222773 - DNA, 75 bp, synthetic construct
  source 1..75: mol_type = other DNA
aaaaatggctgcgttacgttattgagcatatccaggactggccggcaaaccgggtacgcgatctgttgccctgga

SEQ ID NO: 222774 - DNA, 75 bp, synthetic construct
  source 1..75: mol_type = other DNA
cgcaaagcacttccggcaacacttccccatgacaggcaggttatctccccggcagaaaccgaatgctccgtctgc

SEQ ID NO: 222775 - DNA, 75 bp, synthetic construct
  source 1..75: mol_type = other DNA
cagcattttggcctcattccacagtgggtgaccctggagccccgtgtcttcggctggatggaccgtctgtgcgaa

SEQ ID NO: 222776 - DNA, 75 bp, synthetic construct
  source 1..75: mol_type = other DNA
aacagcgcatcagtttctggccgcagcattttggcctcattccacagtgggtgaccctggagccccgtgtcttcg

SEQ ID NO: 222777 - DNA, 75 bp, synthetic construct
  source 1..75: mol_type = other DNA
ggaagccgccggcattgcagcctgtctgatggcatacagtcatcatgcctgtcgtacggagaattatgccatgac

SEQ ID NO: 222778 - DNA, 75 bp, synthetic construct
  source 1..75: mol_type = other DNA
atagaacatctgcgggctcagatagaaaaactgcgccggatgctgttcggtacccgttctgaaaaactgcgtcgt

SEQ ID NO: 222779 - DNA, 75 bp, synthetic construct
  source 1..75: mol_type = other DNA
cattccacagtgggttaccctggatccccgtgtcttcggctggatggaccgtctctgcgaaaactactgcggtgg

SEQ ID NO: 222780 - DNA, 75 bp, synthetic construct
  source 1..75: mol_type = other DNA
cattccacagtgggtaaccctggacccccgtgtcttcggctggatggaccgtctgtgcgaaaactactgcggtgg

SEQ ID NO: 222781 - DNA, 75 bp, synthetic construct
  source 1..75: mol_type = other DNA
gcttctggccgcagcattttggcctcattccacagtgggtaaccctggagccccgtgtcttcggctggatggacc

SEQ ID NO: 222782 - DNA, 75 bp, synthetic construct
  source 1..75: mol_type = other DNA
actcagaactggcgaaagcgttcgcatacgccctgaaccagtggccggcgctgatgtactatgcagatgatggct

SEQ ID NO: 222783 - DNA, 75 bp, synthetic construct
  source 1..75: mol_type = other DNA
cattccacagtgggtgaccctggagccccgtgtcttcggctggatggaccgtctatgcgaaaactactgcggtgg

SEQ ID NO: 222784 - DNA, 75 bp, synthetic construct
  source 1..75: mol_type = other DNA
cattccacagtgggtcaccctggaaccccgtgtcttcggctggatggaccgtctgtgcgaaaactactgcggtgg

SEQ ID NO: 222785 - DNA, 75 bp, synthetic construct
  source 1..75: mol_type = other DNA
tggaccgtctgtgtgaagactactgcggtggtatctggaatctgtacaccctgaacaacggcggggcatttatgg

SEQ ID NO: 222786 - DNA, 75 bp, synthetic construct
  source 1..75: mol_type = other DNA
gcctgtcgtacggagaattatgccatgacggtcattattaccggttgcgggattacgccctgcagcatccggaat

SEQ ID NO: 222787 - DNA, 75 bp, synthetic construct
  source 1..75: mol_type = other DNA
ctgtcgtacggagtgttatgccatgacggtccattattaccggctgcgggattacgccctgcagcatccggaatg

SEQ ID NO: 222788 - DNA, 75 bp, synthetic construct
  source 1..75: mol_type = other DNA
ggcattgctgcctgtctgatgacgtacagtcatcatgcctgtcgtacggagtgttatgccatgacggtccattat

SEQ ID NO: 222789 - DNA, 75 bp, synthetic construct
  source 1..75: mol_type = other DNA
cggtgccttcaaaacccattgcacgcagctatgccggagcggggcttctggcccatgtcgtcaccgggaagtatg

SEQ ID NO: 222790 - DNA, 75 bp, synthetic construct
  source 1..75: mol_type = other DNA
tcagtgcagaacgtgaaggtggtgcactgacagaagttgcgtgctgggcccatgcccggcgaaaaatccacgatg

SEQ ID NO: 222791 - DNA, 75 bp, synthetic construct
  source 1..75: mol_type = other DNA
gcaccgggcaggaagaaggcgaaaacaggatatatctggacgtatgtccgggatgaccggaatgccggttcgcca

SEQ ID NO: 222792 - DNA, 75 bp, synthetic construct
  source 1..75: mol_type = other DNA
gcatcagcttctggccgcagcactttggcctcattccacagtgggtgaccctggatccccgtgtcttcggctgga

SEQ ID NO: 222793 - DNA, 75 bp, synthetic construct
  source 1..75: mol_type = other DNA
gcatcagcttctggccgcagcactttggcctcattccacagtgggttaccctggaaccccgtgtcttcggctgga

SEQ ID NO: 222794 - DNA, 75 bp, synthetic construct
  source 1..75: mol_type = other DNA
tggaccgtctgtgcgaagactactgcggaggcatctggaatctgtacaccctgaacaacggtggcgcatttatgg

SEQ ID NO: 222795 - DNA, 75 bp, synthetic construct
  source 1..75: mol_type = other DNA
aaatgagtccggaagctgccggcattgccgcctgtctgatggcgtacagtcatcacgcctgtcgtacagagaatt

SEQ ID NO: 222796 - DNA, 75 bp, synthetic construct
  source 1..75: mol_type = other DNA
ccatcaatacatgacctggggaatgtaaaaatgacggcgtcaaatgccaccctgacggcaggtaattatgcaatg

SEQ ID NO: 222797 - DNA, 75 bp, synthetic construct
  source 1..75: mol_type = other DNA
gcatcagcttctggccgcagcagtttggcctcattccacagtgggtcaccctggatccccgtgtcttcggctgga

SEQ ID NO: 222798 - DNA, 75 bp, synthetic construct
  source 1..75: mol_type = other DNA
ccatgcgtattcaccgtcagcatccggcatcccgtctttttcctttctgtaccggcaaataccgctggcacggtg

SEQ ID NO: 222799 - DNA, 75 bp, synthetic construct
  source 1..75: mol_type = other DNA
ggatattcccggtgtgctggccgtgtttgcagaacgccgtaaggacagttttggtccgtatgtccggctgatgag

SEQ ID NO: 222800 - DNA, 75 bp, synthetic construct
  source 1..75: mol_type = other DNA
tttaaaggaagtgaacaggcgataggtttcagtaatgtaacgccggtcattacaacccaggaaaccgatgacaaa

SEQ ID NO: 222801 - DNA, 75 bp, synthetic construct
  source 1..75: mol_type = other DNA
tggaccgtctgtgcgaagactactgcggaggtatctggaatctgtacaccctgaacaacggaggggcatttatgg

SEQ ID NO: 222802 - DNA, 75 bp, synthetic construct
  source 1..75: mol_type = other DNA
tggaccgtctgtgcgaagactactgcggaggaatctggaatctgtacaccctgaacaacggcggtgcatttatgg

SEQ ID NO: 222803 - DNA, 75 bp, synthetic construct
  source 1..75: mol_type = other DNA
ctgtctgatgacgtacagccatcatgcctgtcgtacggagaattatgccatgacggtccattattaccggttgcg

SEQ ID NO: 222804 - DNA, 75 bp, synthetic construct
  source 1..75: mol_type = other DNA
ggtccagcctctatttttggcggtattgagtatcaaacgccgtggaatcctctgcgtctgaaactcgaatacgac

SEQ ID NO: 222805 - DNA, 75 bp, synthetic construct
  source 1..75: mol_type = other DNA
agagatgcgttccggtatatcagaaagcactgggttgcgttgtgcaacttctgtgatgatggtctggctgaggcg

SEQ ID NO: 222806 - DNA, 75 bp, synthetic construct
  source 1..75: mol_type = other DNA
aagcgtataccggtcgtgaagtgcaggatattcccggtgtgctggccgtgtttgctgaacgccgtaaggacagtt

SEQ ID NO: 222807 - DNA, 75 bp, synthetic construct
  source 1..75: mol_type = other DNA
aagtgcaggatattcccggtgtgctggccgtgtttgctgaacgccgtaaggacagttttggtccgtatgtccggc

SEQ ID NO: 222808 - DNA, 75 bp, synthetic construct
  source 1..75: mol_type = other DNA
cgcctggagcctgaagaaagctgttgcccggagtgtggcggtgagctggattatctgggggaagtcagtgcagaa

SEQ ID NO: 222809 - DNA, 75 bp, synthetic construct
  source 1..75: mol_type = other DNA
gttgaatggtatcgatccggaagcgtatctgcgccatattctgagcgtactgccggaatggccttccaaccgggt

SEQ ID NO: 222810 - DNA, 75 bp, synthetic construct
  source 1..75: mol_type = other DNA
agctatgtcctgaatcagtgggacgccctctgttattacagtgatgacggtctggcggaggcggacaataacaca

SEQ ID NO: 222811 - DNA, 75 bp, synthetic construct
  source 1..75: mol_type = other DNA
gacgcaacaggacaccatccgtcagatggcagaatacaaccgcctgctctcacagcgggtggcgacttatgcttc

SEQ ID NO: 222812 - DNA, 75 bp, synthetic construct
  source 1..75: mol_type = other DNA
ggtggcgaacatgcggcggtgttgtactcgctgatcggcacatgccgtctgaacaatgtagagccagaaaaatgg

SEQ ID NO: 222813 - DNA, 75 bp, synthetic construct
  source 1..75: mol_type = other DNA
cacctgaaccggatgacgatgatgacgaaacatgggtgctgtttaacgtcatgaacggtaaccgcgctgaaatga

SEQ ID NO: 222814 - DNA, 75 bp, synthetic construct
  source 1..75: mol_type = other DNA
atgacgccgctgaatgatgccctgtatcgttatgtgatgaatacccgcaagcttcacactgacgacacaccggta

SEQ ID NO: 222815 - DNA, 75 bp, synthetic construct
  source 1..75: mol_type = other DNA
aacttaccgcgctgaagtacaacgcaggttttgaagcaccggaaattcagctgcgcgataagacgctgtatatgt

SEQ ID NO: 222816 - DNA, 75 bp, synthetic construct
  source 1..75: mol_type = other DNA
aaccggattctggtgaataacctgccgcaaggcgttgagaagattagcgtgacgcaaaagcgcgagcatatggcg

SEQ ID NO: 222817 - DNA, 75 bp, synthetic construct
  source 1..75: mol_type = other DNA
ataggtgtgctgggtagcctggtatttggcctgctgacgtacctgacaaacctttatttcaagattaaagaagat

SEQ ID NO: 222818 - DNA, 75 bp, synthetic construct
  source 1..75: mol_type = other DNA
cactggcggtttttttgtttttctttactttcattttctgtcggcggtgacggagacatacatcagatggaaaaa

SEQ ID NO: 222819 - DNA, 75 bp, synthetic construct
  source 1..75: mol_type = other DNA
ctggggagtctgctgtttgggctgctgacatatctgacgaacctgtatttcaagattaaagaagaccgtcgtaag

SEQ ID NO: 222820 - DNA, 75 bp, synthetic construct
  source 1..75: mol_type = other DNA
ggcctgctgacgtacctgacaaacctttatttcaagattaaagaagacaagcgtaaggctgcacggggagagtaa

SEQ ID NO: 222821 - DNA, 75 bp, synthetic construct
  source 1..75: mol_type = other DNA
aggtagtgccggttactggtttttacagctgctcgataaagtcactccctcacagtgggcagcaataggtgtgct

SEQ ID NO: 222822 - DNA, 75 bp, synthetic construct
  source 1..75: mol_type = other DNA
gacaaagtctctccgtcccagtgggtggcaatcggtgtgctggggagtctgctgtttggcctgctgacgtatctg

SEQ ID NO: 222823 - DNA, 75 bp, synthetic construct
  source 1..75: mol_type = other DNA
gctgggaagtctgctgtttggcctgctgacgtatctgacaaatctttatttcaagattaaagaagataagcgtaa

SEQ ID NO: 222824 - DNA, 75 bp, synthetic construct
  source 1..75: mol_type = other DNA
gggtagtctggtatttggcatgctgacgtatctgacaaacctttatttcaagattaaagaagacaggcgtaaggc

SEQ ID NO: 222825 - DNA, 75 bp, synthetic construct
  source 1..75: mol_type = other DNA
agtatatccgaaagcatttctattgatatgcccgtgattgggaatatcgcaaatggaagtgtttctacaggaact

SEQ ID NO: 222826 - DNA, 75 bp, synthetic construct
  source 1..75: mol_type = other DNA
cggtgggaacgggctactggttcctgcagttgctggacagggtttccccgtctcagtgggcggcaataggcgtgc

SEQ ID NO: 222827 - DNA, 75 bp, synthetic construct
  source 1..75: mol_type = other DNA
atatcgcaacgggggtttcttacaccacctcctcggtcagtggtggttactggctgctccagttgctggatgcgg

SEQ ID NO: 222828 - DNA, 75 bp, synthetic construct
  source 1..75: mol_type = other DNA
cgggtgtcgcctatggcacctccgcaggcagtgctggctactggtttttacagctgctcgataaagtcacgccct

SEQ ID NO: 222829 - DNA, 75 bp, synthetic construct
  source 1..75: mol_type = other DNA
gggaagtctgctgtttgggctgctgacatatctgactaacctgtatttcaaaatcagagaggaccggcgtaaggc

SEQ ID NO: 222830 - DNA, 75 bp, synthetic construct
  source 1..75: mol_type = other DNA
cagtccagcgacgaatacattgattattttgccgtttcgctacgcatcattggcgttttggcgctcatccttacc

SEQ ID NO: 222831 - DNA, 75 bp, synthetic construct
  source 1..75: mol_type = other DNA
tggttgaagagacgaagaccttcctgcgctctgcactggcacgtgccgaagaaaagatcgaagaggaggagcggg

SEQ ID NO: 222832 - DNA, 75 bp, synthetic construct
  source 1..75: mol_type = other DNA
cagctggaactggtgagtagcgccctgaaagtgatccgcactgttcgggtaaaaaaagcctgtacaaaatgtgac

SEQ ID NO: 222833 - DNA, 75 bp, synthetic construct
  source 1..75: mol_type = other DNA
cttgctttaattgcattcaaactatagataaagcattgcaatcagtatacgatcaaaactacaaatttatagaga

SEQ ID NO: 222834 - DNA, 75 bp, synthetic construct
  source 1..75: mol_type = other DNA
tcgcatctgctaacgagtccgaatttgaactgaccgtaacacaggtacctgacgaacagcgcattcgcttctggc

SEQ ID NO: 222835 - DNA, 75 bp, synthetic construct
  source 1..75: mol_type = other DNA
tatcggtaaagttattcatagcgactcatcagaattacatgaagggcaaacggtagccattaatccgtctaaacc

SEQ ID NO: 222836 - DNA, 75 bp, synthetic construct
  source 1..75: mol_type = other DNA
gtactgaatcagtgggatgccctctgttattacagtgatgacggtctggcggaggcggataataatgctgcggaa

SEQ ID NO: 222837 - DNA, 75 bp, synthetic construct
  source 1..75: mol_type = other DNA
gaggcgagcgcggagctctgctgtacggactaatcgggagctgtcggttgaacggtatcgatccagaagcgtatc

SEQ ID NO: 222838 - DNA, 75 bp, synthetic construct
  source 1..75: mol_type = other DNA
gtgccggtggtcttttttattgttgtgagcttccggattgcgggaggcggggtatgtaccagatggaaaaaatca

SEQ ID NO: 222839 - DNA, 75 bp, synthetic construct
  source 1..75: mol_type = other DNA
ccacagtatgttgatggcatcacttccgacagtgaaagcgaaggtggcgcgggcggtttcgatggcgctgaagaa

SEQ ID NO: 222840 - DNA, 75 bp, synthetic construct
  source 1..75: mol_type = other DNA
attccgcgataatccgtcgccattaacagtggtgctgggtaaagatatcgccggtgagccggtggttgccgatct

SEQ ID NO: 222841 - DNA, 75 bp, synthetic construct
  source 1..75: mol_type = other DNA
tgcatcccgtctttttccgttctgtaccggtaagtatcgctggcacggcagtgctgaagcgtatactggtcgtga

SEQ ID NO: 222842 - DNA, 75 bp, synthetic construct
  source 1..75: mol_type = other DNA
ttgcacgcagttatgccggagcggggcttctggcccatgttgtcaccggaaaatatgcagaccatctgccgttat

SEQ ID NO: 222843 - DNA, 75 bp, synthetic construct
  source 1..75: mol_type = other DNA
aaagtggcgaaggatcatctcgatgttgccgtcaccgagccgttagcaaatggcgatggtctgaatgtgatgatt

SEQ ID NO: 222844 - DNA, 75 bp, synthetic construct
  source 1..75: mol_type = other DNA
atgcgtattcaccaacaacatccgacatcccgtctttttccgttctgcaccggtaagtaccgctggcacggcagt

SEQ ID NO: 222845 - DNA, 75 bp, synthetic construct
  source 1..75: mol_type = other DNA
ccaaaaagtgctgccgctgctggcgtcactggaggggtggctgcgggagaaacagaaaaccctctcaaggcactc

SEQ ID NO: 222846 - DNA, 75 bp, synthetic construct
  source 1..75: mol_type = other DNA
tatcggtgaactgtatgccatcgaagcagaagtccggggatgttcagcagaacagcgtctggcggcaagaaaagc

SEQ ID NO: 222847 - DNA, 75 bp, synthetic construct
  source 1..75: mol_type = other DNA
accgccagtcagaaatataccgtcgtcagggcgtggagctgagtcgtgccacgctggggcgctggactggtgccg

SEQ ID NO: 222848 - DNA, 75 bp, synthetic construct
  source 1..75: mol_type = other DNA
gtatctggaatctgtacaccctgaacaacggcggggcatttatggcacccgaaccggatgacgatgatgtcgaaa

SEQ ID NO: 222849 - DNA, 75 bp, synthetic construct
  source 1..75: mol_type = other DNA
gtatctggaatctgtacactctgaacaacggcggggcatttatggcgcccgaaccggatgacgatgatggcgaaa

SEQ ID NO: 222850 - DNA, 75 bp, synthetic construct
  source 1..75: mol_type = other DNA
gtatctggaatctgtacacactgaacaacggcggggcatttatggctcccgaaccggatgacgatgatggcgaaa

SEQ ID NO: 222851 - DNA, 75 bp, synthetic construct
  source 1..75: mol_type = other DNA
tcattcgctgaaaatggaatgtctccacggagaacactattatccatcgggaaatagtgcgggcaacagtgttta

SEQ ID NO: 222852 - DNA, 75 bp, synthetic construct
  source 1..75: mol_type = other DNA
ccatctgcactgcgccagtcttcagcccgtaaaccgttaccggcctcacttccccgagaaacccgggttatccgg

SEQ ID NO: 222853 - DNA, 75 bp, synthetic construct
  source 1..75: mol_type = other DNA
tatcggtgaactgtatgccatcgaggcagaagtccggggatgttcagcagaacagcgtctggcagcaagaaaagc

SEQ ID NO: 222854 - DNA, 75 bp, synthetic construct
  source 1..75: mol_type = other DNA
tgatgaacacccgcaaggttcacactgatgacacacctgaaccgccccgggaatcctggagactaaacttcctga

SEQ ID NO: 222855 - DNA, 75 bp, synthetic construct
  source 1..75: mol_type = other DNA
cccccgaaccggatgacgatgatgacgaaacatgggtactgttcaatgccatgaacggtaaccgcgctgaaatga

SEQ ID NO: 222856 - DNA, 75 bp, synthetic construct
  source 1..75: mol_type = other DNA
acgttgacgataaatggcatctgttcaacggcatgaacggcaatggtgcgcaaatgagcgcggaagccgcaggta

SEQ ID NO: 222857 - DNA, 75 bp, synthetic construct
  source 1..75: mol_type = other DNA
acccgcaaggttcacactgatgacacaccagtaaaagtgctggcaccgggcaggaagaaggcgaaaacaggatat

SEQ ID NO: 222858 - DNA, 75 bp, synthetic construct
  source 1..75: mol_type = other DNA
ggaaatagaacatctgagggcccagatagaaaaactgcgccggatgttgttcggtacccgttctgaaaaactgca

SEQ ID NO: 222859 - DNA, 75 bp, synthetic construct
  source 1..75: mol_type = other DNA
cccggagcaacacctccgccccttccggggtatcctgcaggcggatgcgttcacaggttatgacaggctgttcag

SEQ ID NO: 222860 - DNA, 75 bp, synthetic construct
  source 1..75: mol_type = other DNA
cgataatgacgaaacatgggtactgttcaatgtcatgaacggtaaccgcgctgaaatgagcccggaagccgccgg

SEQ ID NO: 222861 - DNA, 75 bp, synthetic construct
  source 1..75: mol_type = other DNA
tgatgacgaaacatgggtactgttcaataccatgaacggtaaccgcgctgaaatgagcccggaagccgccggcat

SEQ ID NO: 222862 - DNA, 75 bp, synthetic construct
  source 1..75: mol_type = other DNA
cgagtcttcggctggatggaccgtctttgcgaagactactgtggtggtatctggaatctgtataccctgaacaac

SEQ ID NO: 222863 - DNA, 75 bp, synthetic construct
  source 1..75: mol_type = other DNA
tcaggaagcactgggttgcgttgtgcaacttctgtgatgacggtctggcggaggcggacaataacacagcggaaa

SEQ ID NO: 222864 - DNA, 75 bp, synthetic construct
  source 1..75: mol_type = other DNA
gcaaccaggttttctcctttgccgaacatggtctgctttaacccttcacaaccacatcacacctgttttcacttt

SEQ ID NO: 222865 - DNA, 75 bp, synthetic construct
  source 1..75: mol_type = other DNA
gtgcaggatattcccggtgtgctggctgtatttgcagaacgccgtaaagacagttttggcccgtatgtccggctg

SEQ ID NO: 222866 - DNA, 72 bp, synthetic construct
  source 1..72: mol_type = other DNA
gccgtgtttgctgaacgccgtaaggacagttttggcccgtatgtccgactgatgagcgtcaccctgaactga

SEQ ID NO: 222867 - DNA, 75 bp, synthetic construct
  source 1..75: mol_type = other DNA
gtctgtgcgaagactactgcggtggtatctggaatctgtacaccctgaacaacggcggggcatttatagcacccg

SEQ ID NO: 222868 - DNA, 75 bp, synthetic construct
  source 1..75: mol_type = other DNA
gtgaccctggagccccgtatcttcggctggatggaccgtctgtgcgaaaactactgcggtggtatctggaatcta

SEQ ID NO: 222869 - DNA, 75 bp, synthetic construct
  source 1..75: mol_type = other DNA
cactgattgtgcaggatatggggattctggaacttgatattccaccgattgaactgcacgccagcacgcagtgtg

SEQ ID NO: 222870 - DNA, 75 bp, synthetic construct
  source 1..75: mol_type = other DNA
aaagatcgaagaagatgaacgggaaacagaacatctgcgggctcagatagaaaaactgcgccggatgctgttcgg

SEQ ID NO: 222871 - DNA, 75 bp, synthetic construct
  source 1..75: mol_type = other DNA
tacagtgggcgtgaggatgccccgctggttccccgccagttgcgacagtcgcgccatcgtcgtccgttaccggca

SEQ ID NO: 222872 - DNA, 75 bp, synthetic construct
  source 1..75: mol_type = other DNA
caccatagtccctgatgaacagcgcatcagtttctggccgcagcattttggcctcattccacagtgggtgaccct

SEQ ID NO: 222873 - DNA, 75 bp, synthetic construct
  source 1..75: mol_type = other DNA
ggcccgttcgatttcaccctcgggatggcctggggctacgccggtaatgcgggcaatattaccaacccgttttgt

SEQ ID NO: 222874 - DNA, 75 bp, synthetic construct
  source 1..75: mol_type = other DNA
ttgcacgcagttatgccggagcagggcttctggcccatgttgtcaccgggaaatatgcagaccatctgccgttat

SEQ ID NO: 222875 - DNA, 75 bp, synthetic construct
  source 1..75: mol_type = other DNA
cgctggacaggtgctgttgctgaactgctggagccgctgtatgacgtcctgcgccagtatgtgctgatgcccggt

SEQ ID NO: 222876 - DNA, 75 bp, synthetic construct
  source 1..75: mol_type = other DNA
ccgatcatttgctgcttgatggcggcattttcaccaatatttacaacaactacgacaaatttaagtcgtcgttgt

SEQ ID NO: 222877 - DNA, 75 bp, synthetic construct
  source 1..75: mol_type = other DNA
gcctgtgcaccggagactgacctgcaacaactggttgccaccctcgtccctgatgaacagcgcatcagcttctgg

SEQ ID NO: 222878 - DNA, 75 bp, synthetic construct
  source 1..75: mol_type = other DNA
gttattacagtgatgacggtcgtggcggaggtggacaataacacagcggaaagagcgcttcgtgcagtctgtctc

SEQ ID NO: 222879 - DNA, 75 bp, synthetic construct
  source 1..75: mol_type = other DNA
ctggatgccattattgaagaacgtagcgatttggcgcgagcttcatccggtcgtactgagcacttcttcgtaccg

SEQ ID NO: 222880 - DNA, 75 bp, synthetic construct
  source 1..75: mol_type = other DNA
ttatgccatgacggtccattattaccggttgcgggattacgccctgcagcatccggaatgcagcgccattatgcg

SEQ ID NO: 222881 - DNA, 75 bp, synthetic construct
  source 1..75: mol_type = other DNA
atgaacggtaaccgcgctgaaatgagcccggaagctgccggcattgctgcctgtctgatggcgtacagtcatcac

SEQ ID NO: 222882 - DNA, 75 bp, synthetic construct
  source 1..75: mol_type = other DNA
catctattacgcccgcgatgtgcaaattaacctgcctggtgcgctgtttgtaccgaacagtctgttaaatcagtt

SEQ ID NO: 222883 - DNA, 75 bp, synthetic construct
  source 1..75: mol_type = other DNA
gtctgtctcggaaagaaaaattacgtgttcttcggtagcgatcacggcggcgagcgaggtgcactgctgtacggg

SEQ ID NO: 222884 - DNA, 75 bp, synthetic construct
  source 1..75: mol_type = other DNA
ccatattctgagcatactgccggaatggctctccaaccgtgttgacgaactcctgccatggaacgtagttctcac

SEQ ID NO: 222885 - DNA, 75 bp, synthetic construct
  source 1..75: mol_type = other DNA
atgttcttcggcaacgatcatggaggcgagcgcggagctctgctgtacggactaatcgggagctgtcggttgaac

SEQ ID NO: 222886 - DNA, 75 bp, synthetic construct
  source 1..75: mol_type = other DNA
atgaaaattatcacccgtggtgaagccatgcgtattcaccaacaacatccgacatcccgtcttttccgttctgta

SEQ ID NO: 222887 - DNA, 75 bp, synthetic construct
  source 1..75: mol_type = other DNA
gcaacgcgaacaggacagcgatcgttacagtgggcgggaagacgatcctcaggttccccgccagttgcgacagtc

SEQ ID NO: 222888 - DNA, 75 bp, synthetic construct
  source 1..75: mol_type = other DNA
tggagcctgaagaaagcggttgcccggagtgtggcggtgagctggattatctgggggaagtcagcgcagaacaac

SEQ ID NO: 222889 - DNA, 75 bp, synthetic construct
  source 1..75: mol_type = other DNA
aacatccggagcagcaccttagtcccttccggggtatcctgcaggcagatgcgtttaatggttacgatcggctgt

SEQ ID NO: 222890 - DNA, 75 bp, synthetic construct
  source 1..75: mol_type = other DNA
gctggatggaccgtctgtgcgaagactactgcggtggtatctggaatctgtacaccctgaacaacggtggcgcat

SEQ ID NO: 222891 - DNA, 75 bp, synthetic construct
  source 1..75: mol_type = other DNA
ctgtctgatgacgtacagccatcatgcctgtcgtacggaatgttatgccatgacggtccattattaccggctgcg

SEQ ID NO: 222892 - DNA, 75 bp, synthetic construct
  source 1..75: mol_type = other DNA
attgcgcgatccccttgacgatgaatattacttacagggacctgggaccacattagtggttgaactgattgaaca

SEQ ID NO: 222893 - DNA, 75 bp, synthetic construct
  source 1..75: mol_type = other DNA
tggcgcaaagccataattcttgagccacgcggcaacgacgtgctggtcggcgcgctactgtgtgagccgctttcc

SEQ ID NO: 222894 - DNA, 75 bp, synthetic construct
  source 1..75: mol_type = other DNA
aatatgatcaagtcattgtttcaagagaacttgagaaagcagagcaagatattgaatcatcgaaagatatattga

SEQ ID NO: 222895 - DNA, 75 bp, synthetic construct
  source 1..75: mol_type = other DNA
gtgcggatgcctccggcgcaggccggattattcagtaaaggtcactctcagggtgaggctgtggccagccgtgtg

SEQ ID NO: 222896 - DNA, 75 bp, synthetic construct
  source 1..75: mol_type = other DNA
acggaagaaatagcccccactgtcatgatgcaagaacaactcaaaccaatgctacgcctcgttcttataaacgaa

SEQ ID NO: 222897 - DNA, 75 bp, synthetic construct
  source 1..75: mol_type = other DNA
ggtcggtcagtcatcaatgcaaaaatccctattaagcacctatggtaatcaaggcggctatgtcctggtgccgca

SEQ ID NO: 222898 - DNA, 75 bp, synthetic construct
  source 1..75: mol_type = other DNA
tgccttacagcaataattatattgccaaatgtaatctatacttattggataagaaaggattcggcgaatagactt

SEQ ID NO: 222899 - DNA, 75 bp, synthetic construct
  source 1..75: mol_type = other DNA
tatagaattaataaaagaaaagaattaaatttaaacgatgaggatgtattattactagccgttggtcgattaact

SEQ ID NO: 222900 - DNA, 75 bp, synthetic construct
  source 1..75: mol_type = other DNA
taagcatctgtttgcccatggtgagtatataaaaggcataacttcattaattaagtacaagcttaagaataaatt

SEQ ID NO: 222901 - DNA, 75 bp, synthetic construct
  source 1..75: mol_type = other DNA
gattaattgaatcaatcggatctaatgttcgcgaacatgaattaattatgttaagaaaaaatgatgttaatgaaa

SEQ ID NO: 222902 - DNA, 75 bp, synthetic construct
  source 1..75: mol_type = other DNA
caagaatccagacggtataccagccgggaagcttcacgccgctcctgagaatcgaaacagagaatggtgaacagg

SEQ ID NO: 222903 - DNA, 75 bp, synthetic construct
  source 1..75: mol_type = other DNA
tgatgaactcgttgctgccggaggaacgccaaaaaaacaaaaatataatctgcacgtggttcctgatgaccccat

SEQ ID NO: 222904 - DNA, 75 bp, synthetic construct
  source 1..75: mol_type = other DNA
gaactgtttgcactggctggtctggatgcgcagcatctgcaactgctggttcatagcggctcgaggggattgggg

SEQ ID NO: 222905 - DNA, 75 bp, synthetic construct
  source 1..75: mol_type = other DNA
ttagtaaattctatccacctgcagtaggcggaatagagcaagtggtttatgatattgtccaaggatgctcaaaat

SEQ ID NO: 222906 - DNA, 75 bp, synthetic construct
  source 1..75: mol_type = other DNA
attccgaatcgcaaacgacttggccagacactcgaagatgggctgatgcccgtgtcgaataaggatcgagaggct

SEQ ID NO: 222907 - DNA, 75 bp, synthetic construct
  source 1..75: mol_type = other DNA
ggataatgcacagagaacttttgtcccctcatgtagtgctttggcgggataagccatatgtcgtcaaattctttg

SEQ ID NO: 222908 - DNA, 75 bp, synthetic construct
  source 1..75: mol_type = other DNA
tatcaagcgcctgcggatgattgaacgcgatctacacagccagttagcaagcatcgacgcagacgtaggcgaggg

SEQ ID NO: 222909 - DNA, 75 bp, synthetic construct
  source 1..75: mol_type = other DNA
gatatagcgcactttttctttccgggttgctcttatccgggggcgcgagtgcaggctttaattccgcgcagaacg

SEQ ID NO: 222910 - DNA, 75 bp, synthetic construct
  source 1..75: mol_type = other DNA
gctcacaatagacttttagaactttttactgtggataggatgagttctcagttatctgaattatattgtcactta

SEQ ID NO: 222911 - DNA, 75 bp, synthetic construct
  source 1..75: mol_type = other DNA
cggcgtaacgccaccggatacacccgaccccatcaataatccccctgttgtggatccggaaggcccatcagttta

SEQ ID NO: 222912 - DNA, 75 bp, synthetic construct
  source 1..75: mol_type = other DNA
ttgaaacggaaggcgacggaaacgtgcaaacgcgacttggggtgaaaacctacctgaacagccatcaccagcgtg

SEQ ID NO: 222913 - DNA, 75 bp, synthetic construct
  source 1..75: mol_type = other DNA
agcaaataaacaaagtattgcgaacagagcatatggtggtcgagaagggaacgatgatattgcaagtggagatgg

SEQ ID NO: 222914 - DNA, 75 bp, synthetic construct
  source 1..75: mol_type = other DNA
cgttgcctggcgggtatgcagggattacgagagtgccgcgattgaatggcgtggtgaaaaattgttcgcatcgac

SEQ ID NO: 222915 - DNA, 75 bp, synthetic construct
  source 1..75: mol_type = other DNA
ctactaaggaatacacaaaatataaccatcattggcaaaaaggggcagcgttatcaattacctatagtgcaacgg

SEQ ID NO: 222916 - DNA, 75 bp, synthetic construct
  source 1..75: mol_type = other DNA
tatgaacgtattaaggaaggaagttttccagacagagtgaaaatagggttaaggtctgtggcctttgttgaaagt

SEQ ID NO: 222917 - DNA, 75 bp, synthetic construct
  source 1..75: mol_type = other DNA
aggggcaagatctgtagcctttgtggaaagtgagattgatgcttggattgaaaatactatttcagattcacgcaa

SEQ ID NO: 222918 - DNA, 75 bp, synthetic construct
  source 1..75: mol_type = other DNA
tggagctgcatcttttgatgtgatgtcatcaacaaatgattttaagtcacaacaatttgaatctgagaaaatgtt

SEQ ID NO: 222919 - DNA, 75 bp, synthetic construct
  source 1..75: mol_type = other DNA
gttttttctgcgcttctccaagcggtacgcttttctgggcaaggctttttttgcaggaaatcgatctgtttttct

SEQ ID NO: 222920 - DNA, 75 bp, synthetic construct
  source 1..75: mol_type = other DNA
ttctgaacaggacgcaatgaaacctgttgccgatttatacggtgatttgacgtcaaaactcaccgattacgctaa

SEQ ID NO: 222921 - DNA, 75 bp, synthetic construct
  source 1..75: mol_type = other DNA
ctatgctgattatatggctgaccagcgactttcaggagtgaatacttctgatgcattcactaatgctgtatcagg

SEQ ID NO: 222922 - DNA, 75 bp, synthetic construct
  source 1..75: mol_type = other DNA
agcattttggaatgtgtctcaagaatacaataatgcggaaactaatgcttcagtaagcagtttacttggtggtta

SEQ ID NO: 222923 - DNA, 75 bp, synthetic construct
  source 1..75: mol_type = other DNA
gaaatcgcagcggcgaatgttccatcaccagattgaacgtggcaacccgagacggacatttacagggatggcttt

SEQ ID NO: 222924 - DNA, 75 bp, synthetic construct
  source 1..75: mol_type = other DNA
gggaataagatggcttttgtggacaaagacggcgtcgaagtagagagctcaactcactggatgccgctaccggaa

SEQ ID NO: 222925 - DNA, 75 bp, synthetic construct
  source 1..75: mol_type = other DNA
ttgcctgaaggcagtgacgatgcgctacggtacattgcggaacatgacgatgcgctggcatttgcgcgtattaat

SEQ ID NO: 222926 - DNA, 75 bp, synthetic construct
  source 1..75: mol_type = other DNA
ggcgaatgttccatcaccagattgaacgtggcaacccgcgacgaacgtttacagggatggcttttatcgaaggat

SEQ ID NO: 222927 - DNA, 75 bp, synthetic construct
  source 1..75: mol_type = other DNA
atttcggagcaatttcttatgctgtgactgcatcagaaactaacataaaaagcagtaaaataaataatacatctt

SEQ ID NO: 222928 - DNA, 75 bp, synthetic construct
  source 1..75: mol_type = other DNA
atgagcatgtggcgttaccggataacatggttgctgtcacggaaataccctgacctggtgataccggatgcgctg

SEQ ID NO: 222929 - DNA, 75 bp, synthetic construct
  source 1..75: mol_type = other DNA
gcccatgttgtcaccgggaaatatgcagaccatctgccgttataccgccagtcagaaatataccgtcgtcaggga

SEQ ID NO: 222930 - DNA, 75 bp, synthetic construct
  source 1..75: mol_type = other DNA
gcaatggtgcagcattttcttctgaaaagtacccaaatctggcaaaggtttacccaacgttaaaattacctgatt

SEQ ID NO: 222931 - DNA, 75 bp, synthetic construct
  source 1..75: mol_type = other DNA
tcattagcagacaaagttgctcgtagtacggcaactcatacaatcgatgaaattgctcatgagatagccgagcta

SEQ ID NO: 222932 - DNA, 75 bp, synthetic construct
  source 1..75: mol_type = other DNA
ctgacatggattcttatgtccagatgtctctgacccgtggtgacaccagtttgcgaaacaaagtatttggcgatg

SEQ ID NO: 222933 - DNA, 75 bp, synthetic construct
  source 1..75: mol_type = other DNA
aggtaactattcagcatcgtaaggatatctctcttgcacttaacgcaggcaagaaatatgcaattgtgctgaagg

SEQ ID NO: 222934 - DNA, 75 bp, synthetic construct
  source 1..75: mol_type = other DNA
tgcaagttcgctggcagttaaaaaagcctacgatctggcgaaaagcaagtatacggcgcaggatgcaagcacaac

SEQ ID NO: 222935 - DNA, 75 bp, synthetic construct
  source 1..75: mol_type = other DNA
acgctatcgggcgatttggccgcatttcggaggtggcgtctcgcctcactggtcagctttccggcgaaggcaact

SEQ ID NO: 222936 - DNA, 75 bp, synthetic construct
  source 1..75: mol_type = other DNA
agatctgaaatatagaatatccaataatcaaattatatcttattacgaatttggtttccccaaagatgccgtttc

SEQ ID NO: 222937 - DNA, 75 bp, synthetic construct
  source 1..75: mol_type = other DNA
acctctggtgataaaaatggatatgtcaaaagttaataaggtaggtataaagagttggtcgtacaaagggacttg

SEQ ID NO: 222938 - DNA, 75 bp, synthetic construct
  source 1..75: mol_type = other DNA
catgcctcagaggataaagatgattttgttcgctctctggcaaactcattaatcagtcacggccttaacgtatgg

SEQ ID NO: 222939 - DNA, 75 bp, synthetic construct
  source 1..75: mol_type = other DNA
accgccagaaggctggttaaagtgcgacgggcgcgcctttacaaaagaacaatatcctgttctggccagagccta

SEQ ID NO: 222940 - DNA, 75 bp, synthetic construct
  source 1..75: mol_type = other DNA
gattaccagcgcacacagtatgaagtgtatgactaccccggacgtttcaagggggcccacgggcagaactttgcc

SEQ ID NO: 222941 - DNA, 75 bp, synthetic construct
  source 1..75: mol_type = other DNA
gccttccggagggttaggcgcagttggtgtcgggggaacaattaatacatcgcttgggcctggttctccaggttc

SEQ ID NO: 222942 - DNA, 75 bp, synthetic construct
  source 1..75: mol_type = other DNA
gccacataatcctccctcctccaccggggaggataacttaagtcacaaacaattaaatgcagcaataaacaactg

SEQ ID NO: 222943 - DNA, 75 bp, synthetic construct
  source 1..75: mol_type = other DNA
ccgtcgctttccgtggtcgaactgaccacggatcaccaacaaatgaagcaaagtgatacgctgaaagagtttcag

SEQ ID NO: 222944 - DNA, 75 bp, synthetic construct
  source 1..75: mol_type = other DNA
atgaaaaacaaaaagaaaagcttatcagtgcagctcgtgactctcagcagtcagtagagatcagcttgtcaggta

SEQ ID NO: 222945 - DNA, 75 bp, synthetic construct
  source 1..75: mol_type = other DNA
ttagtgcattatttgtgagtactctgttagccagtgcaccagcattcgctgacattattatttccggaacacgta

SEQ ID NO: 222946 - DNA, 75 bp, synthetic construct
  source 1..75: mol_type = other DNA
ggtgtgggggggcagataaatacgtctcttggcccaggctctcctggtgcatcaatgatagcaggcactgattcg

SEQ ID NO: 222947 - DNA, 75 bp, synthetic construct
  source 1..75: mol_type = other DNA
aagccggtgtggcgggcaatcttgctgccggtgccgtgctgaccctgctgtccccgttgcccggaacgggcagca

SEQ ID NO: 222948 - DNA, 75 bp, synthetic construct
  source 1..75: mol_type = other DNA
tcaacatcggggaagacaccaccagtgatgtggatgaacttatcaccatcggggaggtgacatggctcacagcgt

SEQ ID NO: 222949 - DNA, 75 bp, synthetic construct
  source 1..75: mol_type = other DNA
ctgatgcggttgcaaagttaagaatggatgctattcgttcagaaatccaaggttattcccctgatttatttatcg

SEQ ID NO: 222950 - DNA, 75 bp, synthetic construct
  source 1..75: mol_type = other DNA
accgccagttaacggcgcagtacccggatggcgtacctgaagccgcgctggatgaggtgatggtcaccctgacca

SEQ ID NO: 222951 - DNA, 75 bp, synthetic construct
  source 1..75: mol_type = other DNA
gtattacctcaaaaatccggccaaaagggcaaaaggggacaccgggctgcgcgtcatgagcgcggcagagttcaa

SEQ ID NO: 222952 - DNA, 75 bp, synthetic construct
  source 1..75: mol_type = other DNA
taatcaggttcgtgatttatacgaccatcagagctggattaaagaccagattattccgtctgttaaatctgatga

SEQ ID NO: 222953 - DNA, 75 bp, synthetic construct
  source 1..75: mol_type = other DNA
ggcaacggtgcaacggtcgcttcgacggtgaccacaaagccggacggcacggtggagatctctgtcaccagccag

SEQ ID NO: 222954 - DNA, 75 bp, synthetic construct
  source 1..75: mol_type = other DNA
aaaccttccgctacgtagtgttgccgaatctcagttcggcgttactggcaggaggaatgctggcgtttgccttgt

SEQ ID NO: 222955 - DNA, 75 bp, synthetic construct
  source 1..75: mol_type = other DNA
aactaacgtggtggcactgctggttatgttggtaacaaccttgccgatcctgggggcctggtggctaacccgcga

SEQ ID NO: 222956 - DNA, 75 bp, synthetic construct
  source 1..75: mol_type = other DNA
ctttagatgagcacatagactttaatgaatatcatgtttacaacttcaatggttctttagtcgatgacctggaaa

SEQ ID NO: 222957 - DNA, 75 bp, synthetic construct
  source 1..75: mol_type = other DNA
ttgtttgttaacgagagtatctgcgtcatcgaaccagtttagaaactctaatggttacttacctgagaatagtta

SEQ ID NO: 222958 - DNA, 75 bp, synthetic construct
  source 1..75: mol_type = other DNA
tggccggaaaaaacaaccaggaacaggtcgaatttttgtttgatcgcttactgcaggtggagaatgagcagcagg

SEQ ID NO: 222959 - DNA, 75 bp, synthetic construct
  source 1..75: mol_type = other DNA
tggcagggaaaagtaaccaggagcaggtcgaatttttatttgatcgcttactgcaggtagagaatgaacaggtgg

SEQ ID NO: 222960 - DNA, 75 bp, synthetic construct
  source 1..75: mol_type = other DNA
gcaaagctattagggccgcacttccatcgttttcactgtcaccagcagcatctgatgttctggccgagcgccagc

SEQ ID NO: 222961 - DNA, 75 bp, synthetic construct
  source 1..75: mol_type = other DNA
taaacaatcatggacagaggctactataagtgaagttgctcagttttgtcatgccaaacaatatattctggcttt

SEQ ID NO: 222962 - DNA, 75 bp, synthetic construct
  source 1..75: mol_type = other DNA
atgattgatgaaaaaaaaaaaagcggcagagaagatctccaccgcttgtcattgttggatgcgacgctcaagcgt

SEQ ID NO: 222963 - DNA, 75 bp, synthetic construct
  source 1..75: mol_type = other DNA
tttgattacctgctgagggaagattcgttaacgggagtacgggaagggaagtttgcagacagggggattgcatga

SEQ ID NO: 222964 - DNA, 75 bp, synthetic construct
  source 1..75: mol_type = other DNA
tattactggcagtggagatctaatatcattaggtggtcatgcaggacttggcgttgcgtttgctaaaaagaaagg

SEQ ID NO: 222965 - DNA, 75 bp, synthetic construct
  source 1..75: mol_type = other DNA
gaaggtgagctggccgcagcggctatcagttacatagagcctttggcggctgaagaatactggcctgctgactgg

SEQ ID NO: 222966 - DNA, 75 bp, synthetic construct
  source 1..75: mol_type = other DNA
ggacttctgacggacggttttattttgcgtgaggacgaatttgtcacatcattacgggttttgaaagagattggt

SEQ ID NO: 222967 - DNA, 75 bp, synthetic construct
  source 1..75: mol_type = other DNA
atgattttgctggcgtggatcagcaacgagttatgcattgtcgtaaagcatttagtgatgcaaaggtattcaaat

SEQ ID NO: 222968 - DNA, 75 bp, synthetic construct
  source 1..75: mol_type = other DNA
ctacacgagagaatgagggagaaaatggtggtatagggccactacgcccctttacgcttaatctcagaactggtc

SEQ ID NO: 222969 - DNA, 75 bp, synthetic construct
  source 1..75: mol_type = other DNA
ttcagggtccggtagtgattggcgcaaactgcctgataggtaattatgcgtttattcgtcctggcacaataatca

SEQ ID NO: 222970 - DNA, 75 bp, synthetic construct
  source 1..75: mol_type = other DNA
gccagaatcacgccgaccgcaagttcatgataggtggactggggaacaagcaatttggcatctacatgattaata

SEQ ID NO: 222971 - DNA, 75 bp, synthetic construct
  source 1..75: mol_type = other DNA
gtaagaaaaaagatgaaccgtcactgtatacatcctggacgctaagttttaccgcgccaaccagtaaagaggcgc

SEQ ID NO: 222972 - DNA, 75 bp, synthetic construct
  source 1..75: mol_type = other DNA
caaaacccatttacaaatgctgattaaacaagccgttgccgatctccacgctaaaggtttagccatccgcgtggt

SEQ ID NO: 222973 - DNA, 75 bp, synthetic construct
  source 1..75: mol_type = other DNA
cccacgcaacttctgatatcaggcgatgactatgtggtgcatcgccaaccgcagattgatttttatcagcgttta

SEQ ID NO: 222974 - DNA, 75 bp, synthetic construct
  source 1..75: mol_type = other DNA
aatttttactggcaagggaaggcttgaagcagcgggatttggctgaggctttgtcgactagcccacagaccgtca

SEQ ID NO: 222975 - DNA, 75 bp, synthetic construct
  source 1..75: mol_type = other DNA
atcacagcgcgtggttcactcgggatgatgcgttaacgttaagtgctgattattatgactttctgctacgggtag

SEQ ID NO: 222976 - DNA, 75 bp, synthetic construct
  source 1..75: mol_type = other DNA
agaaaatagattatctttctgacagtgggcataaggttgaagcctctttacgtgtcttgctaagggagataacgg

SEQ ID NO: 222977 - DNA, 75 bp, synthetic construct
  source 1..75: mol_type = other DNA
gaccacgaaggcgtcagaagctgccacctcggcacggggtgcggcggcctcaaaagaggcagcgaaatcttcaga

SEQ ID NO: 222978 - DNA, 75 bp, synthetic construct
  source 1..75: mol_type = other DNA
cgaccaacacgccagaactcgacaagtactcgcgcgacctgaccaagatggcgcgcgacggcaagctcgacccgg

SEQ ID NO: 222979 - DNA, 75 bp, synthetic construct
  source 1..75: mol_type = other DNA
ggagcctgtaatactggtggtggtggtgcactggcaatggctattgcaattttgggggccagtcaatgtattacc

SEQ ID NO: 222980 - DNA, 75 bp, synthetic construct
  source 1..75: mol_type = other DNA
agaaagatattgcagagaagatacataaatatggaggtgattatttattcgctataaaagggaatcaggggcggc

SEQ ID NO: 222981 - DNA, 75 bp, synthetic construct
  source 1..75: mol_type = other DNA
ttttgaaaaaaaaatacgaggtattttcaggattttctacacaagaatctttactgcatttatcaaaatgtgtct

SEQ ID NO: 222982 - DNA, 75 bp, synthetic construct
  source 1..75: mol_type = other DNA
ttctttggttgggcatggggaacttgtttctattgaggatggttatggtatcgagattagttcttggatggtaaa

SEQ ID NO: 222983 - DNA, 75 bp, synthetic construct
  source 1..75: mol_type = other DNA
gtggaaccgcacaagtgagtgtaaaacagaacggatacgatgtttatcagactactgttccacccggccctttta

SEQ ID NO: 222984 - DNA, 75 bp, synthetic construct
  source 1..75: mol_type = other DNA
actggttactgacccctaaagataaaaccagaggattaacgggtagcattgcggtaaatattgcgccttcccggt

SEQ ID NO: 222985 - DNA, 75 bp, synthetic construct
  source 1..75: mol_type = other DNA
tgcggtgcaggagattgcacatttgactgaagaggttgacccgtccaccacgatgcaggagcagctccgcccgat

SEQ ID NO: 222986 - DNA, 75 bp, synthetic construct
  source 1..75: mol_type = other DNA
ggatgatattgtcgacactgttgccagaaggccaattcagaaattgattgggggaatatggtacaacgtggggag

SEQ ID NO: 222987 - DNA, 75 bp, synthetic construct
  source 1..75: mol_type = other DNA
gtcgatggtgttaatctcactaaactgattaacaaggtcgctgaaaacggttattcactccgcgtggtggaggaa

SEQ ID NO: 222988 - DNA, 75 bp, synthetic construct
  source 1..75: mol_type = other DNA
agcaggatcttcggaaactatttaagcaagtcgaacaggaacatggtatagctggatttttctgggtaattgaat

SEQ ID NO: 222989 - DNA, 75 bp, synthetic construct
  source 1..75: mol_type = other DNA
atgattgcatttaatattcctgatatttacggacgctttcacctggtgaatttcgataacgtcaaagcagtctcc

SEQ ID NO: 222990 - DNA, 75 bp, synthetic construct
  source 1..75: mol_type = other DNA
tcaaaattgcactggcatcactggaagcagagccggtggcgtggaaggcaaccttcacgcaaattaaccatgaat

SEQ ID NO: 222991 - DNA, 75 bp, synthetic construct
  source 1..75: mol_type = other DNA
gcagcattgatttttgaccgtgtattatctgatacggaaataaattcaatttacgagtacttcaaggactactac

SEQ ID NO: 222992 - DNA, 75 bp, synthetic construct
  source 1..75: mol_type = other DNA
cagtggctggctgaaagggcagttcagcttacgtcactatcgtcgtactggttttgtgctggtggcgattggggt

SEQ ID NO: 222993 - DNA, 75 bp, synthetic construct
  source 1..75: mol_type = other DNA
ctcggtttgtttatgcagtttgaccgtctggaattgctggcgtttgttattccggtatggctggcgaatattctt

SEQ ID NO: 222994 - DNA, 75 bp, synthetic construct
  source 1..75: mol_type = other DNA
gttgacaccactggcggcagtacgaagtggattctggatggtttcaggacggaagctgataaagcggctgcagcg

SEQ ID NO: 222995 - DNA, 75 bp, synthetic construct
  source 1..75: mol_type = other DNA
ggaatataaggcttaatgataactcaatcctgaatattggaagcagatttactggtggtattgaagcttataaca

SEQ ID NO: 222996 - DNA, 75 bp, synthetic construct
  source 1..75: mol_type = other DNA
tttgccaacagttcgctgagagttcatgatggcggacatctgaccgcgctgaacggccttttcagtgacgggcat

SEQ ID NO: 222997 - DNA, 75 bp, synthetic construct
  source 1..75: mol_type = other DNA
tgttttacgcgtatgacaggctccggaggacagttgtggcgcacgttttcggtgaacgcactctggccacactgg

SEQ ID NO: 222998 - DNA, 75 bp, synthetic construct
  source 1..75: mol_type = other DNA
gtatcggtgaactgtatgccatcgaggcagaagtccggggatgttcagcagaacagcgtctggcggcaagaaaag

SEQ ID NO: 222999 - DNA, 75 bp, synthetic construct
  source 1..75: mol_type = other DNA
ccatgcgtattcaccaacagcatcctgcatcccgtctttttccgttctgcaccggtaagtaccgctggcacggca

SEQ ID NO: 223000 - DNA, 75 bp, synthetic construct
  source 1..75: mol_type = other DNA
gccgtgtttgcagaacgccgtaaggacagttttggtccgtatgtccggctgatgagcgtcacccttgcgtattac

SEQ ID NO: 223001 - DNA, 75 bp, synthetic construct
  source 1..75: mol_type = other DNA
tgttcaatgccatgaacggcaaccgcgctgaaatgagcccggaagccgccggcattgctgcctgtctgatgacgt

SEQ ID NO: 223002 - DNA, 75 bp, synthetic construct
  source 1..75: mol_type = other DNA
ttgcacgcagttatgccggagcgggacttctggcccatgttgtcaccgggaaatatgcagaccatctgccgttat

SEQ ID NO: 223003 - DNA, 75 bp, synthetic construct
  source 1..75: mol_type = other DNA
acatcaccacggaagccctgcagcgtatcggtgaactgtatgctatcgaggcagaggtccggggctgtgcagcag

SEQ ID NO: 223004 - DNA, 75 bp, synthetic construct
  source 1..75: mol_type = other DNA
aagcgttcgcatacgccctgaaccagtggccggcgctgacgtactatgcagatgatggctgggctgagacggaca

SEQ ID NO: 223005 - DNA, 75 bp, synthetic construct
  source 1..75: mol_type = other DNA
ggtctggcggaggcggataataatgctgcggaaagagcgcttcgtgcagtctgtctcggaaagaaaaactttatg

SEQ ID NO: 223006 - DNA, 75 bp, synthetic construct
  source 1..75: mol_type = other DNA
atggacacctcacttgctcatgagaacacccgcctgcgggcactgttgcagacgcaacaggacaccatccgccgg

SEQ ID NO: 223007 - DNA, 75 bp, synthetic construct
  source 1..75: mol_type = other DNA
gctgaaatgagcccggaagccgccggcattgccgcctgtctgatgacgtacagtcatcacgcctgccgtacggag

SEQ ID NO: 223008 - DNA, 75 bp, synthetic construct
  source 1..75: mol_type = other DNA
gccagaaagctacctccgttatgtccttgacgtcattgctgactggccgataaaccgggtcagcgaactactccc

SEQ ID NO: 223009 - DNA, 75 bp, synthetic construct
  source 1..75: mol_type = other DNA
ctcagaactggcgaaagcgttcacgtacgtactgaaccagtggccggcgctggcttactatactgacgacggctg

SEQ ID NO: 223010 - DNA, 75 bp, synthetic construct
  source 1..75: mol_type = other DNA
tgcatcagggaataaccagtctcagttggttgccaccatagtccctgatgaacagcgcatcagcttctggccgca

SEQ ID NO: 223011 - DNA, 75 bp, synthetic construct
  source 1..75: mol_type = other DNA
taacacagcagaaagagcgcttcgtgccgtctgtctcgggaaaaagaattacatgttcttcggcaacgatcatgg

SEQ ID NO: 223012 - DNA, 75 bp, synthetic construct
  source 1..75: mol_type = other DNA
gctgggtggagatcgacaataatctgtgtgaaaacgccctccgggtagttgcactggggcggcgtaactacatgt

SEQ ID NO: 223013 - DNA, 75 bp, synthetic construct
  source 1..75: mol_type = other DNA
ttgaacaggctgaggcccagctgaagcaacgcgaacaggacagcgatcgttacagtgggcgagaggatgacccgc

SEQ ID NO: 223014 - DNA, 75 bp, synthetic construct
  source 1..75: mol_type = other DNA
atcgcctgcgtcggacggatggcactgaccaactatctattgcaaacgctgatttgtaccacgcttttttaccac

SEQ ID NO: 223015 - DNA, 75 bp, synthetic construct
  source 1..75: mol_type = other DNA
gctcagggagggctgtttacaagtggaagcattgatattggtgacgcttcccttctgcttaccggtacaccagtg

SEQ ID NO: 223016 - DNA, 75 bp, synthetic construct
  source 1..75: mol_type = other DNA
gcgtcgtgaagttgaactggctgaggccctgctgaaacaacgtgaacaggacagcgatcgttacagtgggcggga

SEQ ID NO: 223017 - DNA, 75 bp, synthetic construct
  source 1..75: mol_type = other DNA
taaaacaacgcgaacaggacagcgatcgttacagtgggcgtgaagacgatccacaggttccccgccagttgcggc

SEQ ID NO: 223018 - DNA, 75 bp, synthetic construct
  source 1..75: mol_type = other DNA
tcgctacaacggacgggaagacgatccgcaggtacctcgccagttgcgtcagtcccgccatcgtcgcccgttacc

SEQ ID NO: 223019 - DNA, 75 bp, synthetic construct
  source 1..75: mol_type = other DNA
ttatcgaaaaaatgtcgtctgagagatgcgttccggtatatcaggaagcactgggttgcgttgtgcaacttctgt

SEQ ID NO: 223020 - DNA, 75 bp, synthetic construct
  source 1..75: mol_type = other DNA
agccggaagaaagctgttgcccggcgtgtggcggtgaactggattatctgggggaagtcagcgcagaacagctgg

SEQ ID NO: 223021 - DNA, 75 bp, synthetic construct
  source 1..75: mol_type = other DNA
atacggcaaaagcgttcgcatacctgatgaaacagtgggaggccctgaacgtatactgcagtaatggctgggtgg

SEQ ID NO: 223022 - DNA, 75 bp, synthetic construct
  source 1..75: mol_type = other DNA
ctctggccacactggagcgtcttctgagcctgctgtcggcctttgaggtcgtggtatggacggatggctggccgc

SEQ ID NO: 223023 - DNA, 75 bp, synthetic construct
  source 1..75: mol_type = other DNA
gtggcgcacgtattcggtgaacgcacgctggccacgctggagcgtcttccgggcctgctgtcggcctttgaggtc

SEQ ID NO: 223024 - DNA, 75 bp, synthetic construct
  source 1..75: mol_type = other DNA
gttttacgcgtatgacaggatacagaagacggttgtggcgcacgtcttcggtgaacgcactctggccacactgga

SEQ ID NO: 223025 - DNA, 75 bp, synthetic construct
  source 1..75: mol_type = other DNA
acagttgtggcgcacgttttcggtgaacgcactctggccacactggcgcgtcttctgagcctgctgtcggccttt

SEQ ID NO: 223026 - DNA, 75 bp, synthetic construct
  source 1..75: mol_type = other DNA
gttgtggcgcacgttttcggtgaacgcactctggccacactggcgcgtcttctgagcctgctgtcggcctttgag

SEQ ID NO: 223027 - DNA, 75 bp, synthetic construct
  source 1..75: mol_type = other DNA
atgccgggcaaccgcccgcattatgagcgttggcctcaacacgattttccgccatttaaaaaactcaggccgcag

SEQ ID NO: 223028 - DNA, 75 bp, synthetic construct
  source 1..75: mol_type = other DNA
aacatctggcaaggctgggacggaagtcactgtcgttctcaaatcggtggagctgcatgacaaggtcatcgggca

SEQ ID NO: 223029 - DNA, 75 bp, synthetic construct
  source 1..75: mol_type = other DNA
ttttgcccggcgagtttcgcgatatcatctacagacacattattttgctttgccagttgttggtaactcgcttta

SEQ ID NO: 223030 - DNA, 75 bp, synthetic construct
  source 1..75: mol_type = other DNA
agcgacataatctgaatctgagacaatatctggcaaggctgggacggaagtcactgtcgttctcaaaatcggtgg

SEQ ID NO: 223031 - DNA, 75 bp, synthetic construct
  source 1..75: mol_type = other DNA
tctgaatctgagacaacatctggcaaggctgggacggaagttactgtcgttctcaaaatcggtggagttgcatga

SEQ ID NO: 223032 - DNA, 75 bp, synthetic construct
  source 1..75: mol_type = other DNA
agctgcatgacaaagtcatcgggcattatctgaacataaaacactatcagacattaaaagtaacttttttgaaat

SEQ ID NO: 223033 - DNA, 75 bp, synthetic construct
  source 1..75: mol_type = other DNA
gtggcgcacgtcttcggtgaacacactctggccacactggagcgtcttctgagcctgctatcggcctttgaggtc

SEQ ID NO: 223034 - DNA, 75 bp, synthetic construct
  source 1..75: mol_type = other DNA
taaggataatattctgctggttgattttctgaacaaacccaccggagaaaaactggatattgaactggtgagtgc

SEQ ID NO: 223035 - DNA, 75 bp, synthetic construct
  source 1..75: mol_type = other DNA
acatctggcaaggctgggacggaagtcactgtcgttctcaaaatcggtgaagctgcatgacaaagtcatcgggca

SEQ ID NO: 223036 - DNA, 75 bp, synthetic construct
  source 1..75: mol_type = other DNA
gcgcacgtattcggtgaacgcactctggccacactggagcgtcttctaagcctgctgtcggcctttgaggtcgtg

SEQ ID NO: 223037 - DNA, 75 bp, synthetic construct
  source 1..75: mol_type = other DNA
gtcatgctggaagatttcgattctcctgtaaatctggcttccgaacagggacctcttaactggacatatgacaaa

SEQ ID NO: 223038 - DNA, 75 bp, synthetic construct
  source 1..75: mol_type = other DNA
atgtgattgtctgcgctgaaatggacgaacagtggggctacgtcggtgctaaatcacgtcagcgctggctgtttt

SEQ ID NO: 223039 - DNA, 75 bp, synthetic construct
  source 1..75: mol_type = other DNA
gttttacgcgtatgacaggatacggaggacggttgtggcgcacgtcttcggtgaacgcactctggccacactgga

SEQ ID NO: 223040 - DNA, 75 bp, synthetic construct
  source 1..75: mol_type = other DNA
cgcagtcggtaacctcgcgcatacaaccgggcagtgatgtgattgtctgcgctgaaatgggcgaacagtggggct

SEQ ID NO: 223041 - DNA, 75 bp, synthetic construct
  source 1..75: mol_type = other DNA
ggcgcacgtcttcggtgaacgcactctggccacactggagcgtcttctgagcctgctgtcggcctttgaggtcgt

SEQ ID NO: 223042 - DNA, 75 bp, synthetic construct
  source 1..75: mol_type = other DNA
cgttatcagcaagcgttacactcagcgcattgagcgacataatctgaagctgagacaacatctggcaaggctggg

SEQ ID NO: 223043 - DNA, 75 bp, synthetic construct
  source 1..75: mol_type = other DNA
tgaatcacgcctgaagggaaagctgcacgttatcagcaagcgttacactcagcgcattgagcgacataatctgaa

SEQ ID NO: 223044 - DNA, 75 bp, synthetic construct
  source 1..75: mol_type = other DNA
gaatcacgcctgaagggaaagctgcacgttatcagcaagcgttacactcagcgcattgagcgacataatctgaat

SEQ ID NO: 223045 - DNA, 75 bp, synthetic construct
  source 1..75: mol_type = other DNA
tttatgaacgggaatatcagggccgttaaccagagcactgttattatcggcggagatacagtctttactgataaa

SEQ ID NO: 223046 - DNA, 75 bp, synthetic construct
  source 1..75: mol_type = other DNA
tggcctgctgacgtacctgacaaacctttatttcaagattaaagaagataagcgcaaggctgcgagaggtgaata

SEQ ID NO: 223047 - DNA, 75 bp, synthetic construct
  source 1..75: mol_type = other DNA
agtggagcgtctccggcagccggattaagccggggacggatttctggttttacgtgcgcagcgtcaacctggtgg

SEQ ID NO: 223048 - DNA, 75 bp, synthetic construct
  source 1..75: mol_type = other DNA
acagaaaacaaaaaatggcataccctatgttgccggtattggagcggggattgaggatactgatggccagcccct

SEQ ID NO: 223049 - DNA, 75 bp, synthetic construct
  source 1..75: mol_type = other DNA
cgtcgcctgttccgctgtgtctccatccgggaaaacacggacggcacctttgccatcacggcggtgcagcacgta

SEQ ID NO: 223050 - DNA, 75 bp, synthetic construct
  source 1..75: mol_type = other DNA
tcagggcaattaacagttatggccagcagggggaaccggccaccaccacgttcaggattaatgcacctgcggtac

SEQ ID NO: 223051 - DNA, 75 bp, synthetic construct
  source 1..75: mol_type = other DNA
tggaccgtgaggtgaccctgccggagacaggtgccgccacggtgaacctgattaacggcagcggtaagccggtga

SEQ ID NO: 223052 - DNA, 75 bp, synthetic construct
  source 1..75: mol_type = other DNA
gatatttatgaatgaagtgttcctgaaatatctgacggctcccaccattaccagcggcggtaatcctccggcatt

SEQ ID NO: 223053 - DNA, 75 bp, synthetic construct
  source 1..75: mol_type = other DNA
gaccagcggaagcggagaagacagccgtctggtgaccaccgccatcactgcggatacagagcatcgtttcagtgg

SEQ ID NO: 223054 - DNA, 75 bp, synthetic construct
  source 1..75: mol_type = other DNA
gaagccagtggccgggccagcaatgatgcagaagggtatctggggctgtttcgggaaaaaataggaaaactgcat

SEQ ID NO: 223055 - DNA, 75 bp, synthetic construct
  source 1..75: mol_type = other DNA
agcgaataactggacaccaacaaccagtatcagcgatctgctggttgtggtgatgaaaaaatccacagcaggtat

SEQ ID NO: 223056 - DNA, 75 bp, synthetic construct
  source 1..75: mol_type = other DNA
atgattaatcctgcgaatggcaacacaaagccgatgtttgttggtcagggcgatcagatatttatgaatgaagtg

SEQ ID NO: 223057 - DNA, 75 bp, synthetic construct
  source 1..75: mol_type = other DNA
cagggattgaggatactgatggccagccactgagcaacatactgctgctggctgaccgtattgcgatgattaacc

SEQ ID NO: 223058 - DNA, 75 bp, synthetic construct
  source 1..75: mol_type = other DNA
gtgagccagaaagtggaccgggtgagcagtgaaatctcacagactgtcagccaggggcagtcagaaaacgcccga

SEQ ID NO: 223059 - DNA, 75 bp, synthetic construct
  source 1..75: mol_type = other DNA
atcggtgatagatatgccggcagggcggggtcatgtcaccctgacgtttaatgtgtcgtcggccggtgcgaacaa

SEQ ID NO: 223060 - DNA, 75 bp, synthetic construct
  source 1..75: mol_type = other DNA
tcgtcgcctgttccgctgtgtctccatccgggaaaacacggacggcacctttgccatcacggcagtgcagcatgt

SEQ ID NO: 223061 - DNA, 75 bp, synthetic construct
  source 1..75: mol_type = other DNA
ggccgcggatgtggacaagtgggcactgtatgccatcgggcagtactgtgaccagacggtcccggatggtttcgg

SEQ ID NO: 223062 - DNA, 75 bp, synthetic construct
  source 1..75: mol_type = other DNA
ctggacgccgacaacgtacatcagtgatttactggttgtggtcatgaaaaaatccacagcagggatcagtatcag

SEQ ID NO: 223063 - DNA, 75 bp, synthetic construct
  source 1..75: mol_type = other DNA
accacgctgataagcctggctgacggacaggggaatccggtcagcgtggaggtccagtccgtcaccgacggcgtg

SEQ ID NO: 223064 - DNA, 75 bp, synthetic construct
  source 1..75: mol_type = other DNA
cgatccagcagatacagaaggttcaggttgatacaaataataacctgaacagcatgtgggctgtgaagctgcagc

SEQ ID NO: 223065 - DNA, 75 bp, synthetic construct
  source 1..75: mol_type = other DNA
aatgcagatatcagtggcagtgtgaatgcgaacgccgggacgctcaacaatgtcacaattaatgagaactgtcag

SEQ ID NO: 223066 - DNA, 75 bp, synthetic construct
  source 1..75: mol_type = other DNA
ctgtccgactgctgattcagctgcagcgtaacggtaactgggtgacggaaaaggatgtcaccattaacggcaaga

SEQ ID NO: 223067 - DNA, 75 bp, synthetic construct
  source 1..75: mol_type = other DNA
tcatgtcaccctgacgtttaatgtgtcgtcggccggtgcgaacaactggacgccgacaacgtacatcagtgattt

SEQ ID NO: 223068 - DNA, 75 bp, synthetic construct
  source 1..75: mol_type = other DNA
ggttaccgtgctggcagaacgatgtactggttgtcatgggtggcgggtattgtgacgctggctggtctctggtgt

SEQ ID NO: 223069 - DNA, 75 bp, synthetic construct
  source 1..75: mol_type = other DNA
gctggataatacgctgatttacagtggcgttattgatatgcctgccggtcacggtcacatgacgctggagttttc

SEQ ID NO: 223070 - DNA, 75 bp, synthetic construct
  source 1..75: mol_type = other DNA
gtgttcctgaaacgactgtttgcggtgagcatcacatcatccggcaatcctccggcattttccctgacgccggac

SEQ ID NO: 223071 - DNA, 75 bp, synthetic construct
  source 1..75: mol_type = other DNA
aaggacacaaatgatgacctggctgcgctgtacatgctgaaggttcaaaaaacgaaagacggcattccctatgtg

SEQ ID NO: 223072 - DNA, 75 bp, synthetic construct
  source 1..75: mol_type = other DNA
tggacgcatcctgtccatcgatgccgccagccgcacactgacgctggaccgtgaggtgacactgccggaagcagg

SEQ ID NO: 223073 - DNA, 75 bp, synthetic construct
  source 1..75: mol_type = other DNA
cgtggaggtccagtccgtcaccgacggcgtgaaggtgaaagtgagccgggttcctgacggcgttgccgagtacag

SEQ ID NO: 223074 - DNA, 75 bp, synthetic construct
  source 1..75: mol_type = other DNA
tatctggaacttttccgggaaaagataggaaaaacgcatctggcagaggcgctgtgggcagagattgacaacagt

SEQ ID NO: 223075 - DNA, 75 bp, synthetic construct
  source 1..75: mol_type = other DNA
ccggaaaaagaagccatcgtggataacggggcccgctttgagccgcagtcaggcaccctgaacagcgttatccca

SEQ ID NO: 223076 - DNA, 75 bp, synthetic construct
  source 1..75: mol_type = other DNA
gattaacggcagcggtaagccggtgcgcgtggacatcactgcacaaccggcccctgaccggatacaggtcagcgt

SEQ ID NO: 223077 - DNA, 75 bp, synthetic construct
  source 1..75: mol_type = other DNA
ttaacgcaccggcagcgcctgccggtgttgaactgacgccggggtattttcagataacggcggtaccgcgtcttg

SEQ ID NO: 223078 - DNA, 75 bp, synthetic construct
  source 1..75: mol_type = other DNA
ttggtgatatcgtcaagggatacacggttgatatggggcagggcgtaatgactcagaaccagctgacttttcaga

SEQ ID NO: 223079 - DNA, 75 bp, synthetic construct
  source 1..75: mol_type = other DNA
ggtcagggtaatccggtcagcgtggaggtccagtccgtcaccgacggcgtgaaggtgaaagtgagccgtgttcct

SEQ ID NO: 223080 - DNA, 75 bp, synthetic construct
  source 1..75: mol_type = other DNA
cagccgcctgctgaccaccgccatcactgccgatacggagcaccgtttcagtggcctgcctctcggggaatacac

SEQ ID NO: 223081 - DNA, 75 bp, synthetic construct
  source 1..75: mol_type = other DNA
aaaatgattttgctgaaagacaacatgccgtttgatcgcaagcttatgcttatggcgtattcattttccagaggt

SEQ ID NO: 223082 - DNA, 75 bp, synthetic construct
  source 1..75: mol_type = other DNA
tgacgctggagttttcggtgtcagcatggctggtaaataactggtatcccacagcaagtatcagcgatttgctgg

SEQ ID NO: 223083 - DNA, 75 bp, synthetic construct
  source 1..75: mol_type = other DNA
tagtgcggaaaaacggtgctgaaatttataaccgtaccgcgctggataatacgctgatttacagtggcgttattg

SEQ ID NO: 223084 - DNA, 75 bp, synthetic construct
  source 1..75: mol_type = other DNA
aacggggccagctttgagccgcagtcaggcaccctgaacagcgttatcccaccggcagtgcagcacctgacggtg

SEQ ID NO: 223085 - DNA, 75 bp, synthetic construct
  source 1..75: mol_type = other DNA
tcaggagatttttaatcagtccacgacggatgttcagggcgtattttcctcagttatagatatgcctgccggaca

SEQ ID NO: 223086 - DNA, 75 bp, synthetic construct
  source 1..75: mol_type = other DNA
caggcaccctgaacagcgtcatccctccggcagtgcagcatctcacggtggaggtgagcgccgctgacgggcagt

SEQ ID NO: 223087 - DNA, 75 bp, synthetic construct
  source 1..75: mol_type = other DNA
acagttatgccagtggcaccatcacggtaagaatcagtgatgatcagaagtttgaccggcaggtcatgatacctc

SEQ ID NO: 223088 - DNA, 75 bp, synthetic construct
  source 1..75: mol_type = other DNA
ccgggaccatgaccggcggacgtatcctgtccatcgatgccgccagccgcaccctgacactggaccgtgaggtga

SEQ ID NO: 223089 - DNA, 75 bp, synthetic construct
  source 1..75: mol_type = other DNA
ggcggctgacggcgaaaaatgcggatatcagcggtaacgtgaatgcgaacgccgggacactcaacaacgtcacga

SEQ ID NO: 223090 - DNA, 75 bp, synthetic construct
  source 1..75: mol_type = other DNA
aaacgcctgacggctccgaccattaccagcggcggtaatcctccggcattttccctgacaccggacgggcggctg

SEQ ID NO: 223091 - DNA, 75 bp, synthetic construct
  source 1..75: mol_type = other DNA
ccatcagggaccattaccgtcagggtttatgacgatcagccgtttgaccggcaaattgttattccggcggtggca

SEQ ID NO: 223092 - DNA, 75 bp, synthetic construct
  source 1..75: mol_type = other DNA
ctgcccgttatctggggaccggcagtcagtggagtgtatccggcccgcacattaagcccgggaaggatttctggt

SEQ ID NO: 223093 - DNA, 75 bp, synthetic construct
  source 1..75: mol_type = other DNA
acggtgctgaaatttataaccgtaccgcgctggataatacgctgatttacagtggtgttattgatatgcctgccg

SEQ ID NO: 223094 - DNA, 75 bp, synthetic construct
  source 1..75: mol_type = other DNA
cggaaagctgactgctaaaaatgcggatatcagtggcagtgtgaatgcgaactccgggacgctcaacaacgtcac

SEQ ID NO: 223095 - DNA, 75 bp, synthetic construct
  source 1..75: mol_type = other DNA
cgatagaaggcccggtgaaaggcctgcagagtattctggtgaacaaaaccccgctgacgggcacggacggtaatc

SEQ ID NO: 223096 - DNA, 75 bp, synthetic construct
  source 1..75: mol_type = other DNA
gtaagctgcaggtgctgaagaacggggttgagatttccatgaaccggcaacggatgtcagccgggtgttctcatc

SEQ ID NO: 223097 - DNA, 75 bp, synthetic construct
  source 1..75: mol_type = other DNA
agattgataacggtcagcttgcgcctgacctggctgaaatcaggacgtccattacgggtgtcagcaatgaaatca

SEQ ID NO: 223098 - DNA, 75 bp, synthetic construct
  source 1..75: mol_type = other DNA
aatatcaggtgctggcgcgctgggacacgccgaaggtggtgaagggtgtgagctttatgcttcgcctgaccgtaa

SEQ ID NO: 223099 - DNA, 75 bp, synthetic construct
  source 1..75: mol_type = other DNA
ggtaaatgactggtatcccacagcaagtatcagcgatttgctggttgtggtgatgaagaaagccaccgcaggcat

SEQ ID NO: 223100 - DNA, 75 bp, synthetic construct
  source 1..75: mol_type = other DNA
taataactggacgccaacgaccagtatcagcgaccttcttgttgttgtgatgaagaaatctacagccggtatcag

SEQ ID NO: 223101 - DNA, 75 bp, synthetic construct
  source 1..75: mol_type = other DNA
gcgtcggtgattctggataatctgcctccccgtccttttaacatccggatggtccgggagacggcggacagcacc

SEQ ID NO: 223102 - DNA, 75 bp, synthetic construct
  source 1..75: mol_type = other DNA
cggtgtatgacccgacggtgcagtttgagttctggttctcagaaaaacgcatcacgaacacggcacaggtggaaa

SEQ ID NO: 223103 - DNA, 75 bp, synthetic construct
  source 1..75: mol_type = other DNA
cgttatctggggacaggcagccagtggagtgtctccggcccgcacattaagccggggaaggatttctggttttat

SEQ ID NO: 223104 - DNA, 75 bp, synthetic construct
  source 1..75: mol_type = other DNA
ttattgatatgcctgccggtcacggtcacatgacgctggagttttcggtgtcagcatggctggtaaataactggt

SEQ ID NO: 223105 - DNA, 75 bp, synthetic construct
  source 1..75: mol_type = other DNA
cagataacggtggtcccgcatcctgcggtgtatgacccgacggtacagtctgaattctggttctcagaaaaacgc

SEQ ID NO: 223106 - DNA, 75 bp, synthetic construct
  source 1..75: mol_type = other DNA
catcagacaggagagggggacagagtgggtaaagggggcggcaaggggcacacaccgcgtgaggcgaaggacaat

SEQ ID NO: 223107 - DNA, 75 bp, synthetic construct
  source 1..75: mol_type = other DNA
aacgtcacgattaacgagaactgtcgggttctgggaaaattgtccgccaaccagattgaaggcgatctcgttaaa

SEQ ID NO: 223108 - DNA, 75 bp, synthetic construct
  source 1..75: mol_type = other DNA
ggacgcagattgataacggtcagcttgcgccggacctggctgaaatcaggacgtccattacgaatgtcagcaatg

SEQ ID NO: 223109 - DNA, 75 bp, synthetic construct
  source 1..75: mol_type = other DNA
acgggcgactgacggcgaaaaatgcggatatcagtggcagtgtgaatgcgaactcagggacgctcaacaacgtca

SEQ ID NO: 223110 - DNA, 75 bp, synthetic construct
  source 1..75: mol_type = other DNA
tcagtggtctgccgctcggggaatacaccctgacagtcagggcaattaacagttatggccagcagggggaaccgg

SEQ ID NO: 223111 - DNA, 75 bp, synthetic construct
  source 1..75: mol_type = other DNA
atctggcggaggcgaaatgggacacgccacgggtggtgaagggcgtgcgcttcagccttcgcctgaccagcggaa

SEQ ID NO: 223112 - DNA, 75 bp, synthetic construct
  source 1..75: mol_type = other DNA
ctccgggacgctcaacaacgtcacgattaacgagaactgtcgggttctgggaaaattgtccgcgaaccagattga

SEQ ID NO: 223113 - DNA, 75 bp, synthetic construct
  source 1..75: mol_type = other DNA
gctggtgaataactggtatcccacagcaagtatcagcgatttgctggttgtggtgatgaagaaagccaccgcagg

SEQ ID NO: 223114 - DNA, 75 bp, synthetic construct
  source 1..75: mol_type = other DNA
atctggcgcaggcgaaatgggacacgccgcgggtggtgaagggcgtgcgcttcagtctgcgcctgaccagcggaa

SEQ ID NO: 223115 - DNA, 75 bp, synthetic construct
  source 1..75: mol_type = other DNA
gaactgtcagattaaagggaaactgtcagccaaccagattgaaggcgatattgtcaaaacagtgggtaaggcttt

SEQ ID NO: 223116 - DNA, 75 bp, synthetic construct
  source 1..75: mol_type = other DNA
gcatcacgtcatccggtaatcctccggcattttccctgacaccggacgggcggctgacggcgagaaatgctgata

SEQ ID NO: 223117 - DNA, 75 bp, synthetic construct
  source 1..75: mol_type = other DNA
gatggcgttgccgagtacagcgtgtgggggctgaagctgccgacgctgcgccagcgcctgttccgctgcgtgagt

SEQ ID NO: 223118 - DNA, 75 bp, synthetic construct
  source 1..75: mol_type = other DNA
cctgaacagcatgtgggcagtgaagctgcagcagatgcaggacggacgcctttatattgcgggtatcggtgccgg

SEQ ID NO: 223119 - DNA, 75 bp, synthetic construct
  source 1..75: mol_type = other DNA
ctgtcggtcagccgagtgatgatgcatcaggctatctggattttttcaaaggcgagatagggaaaacccatctgg

SEQ ID NO: 223120 - DNA, 75 bp, synthetic construct
  source 1..75: mol_type = other DNA
gttacagtcaccatcagcgatgatcataactttgaccgtcaaatcattattccgcccattatctttaacggaata

SEQ ID NO: 223121 - DNA, 75 bp, synthetic construct
  source 1..75: mol_type = other DNA
aatgtcagcaatgaaatcacgcagaccgtcaataaaaaactggaaaatcagagtgcggcaatccagcagatacag

SEQ ID NO: 223122 - DNA, 75 bp, synthetic construct
  source 1..75: mol_type = other DNA
cgctacggcatggggaagcgtctcggtgcggcggatgtggacaaatgggcgctgtatgtcatcggccagaattgc

SEQ ID NO: 223123 - DNA, 75 bp, synthetic construct
  source 1..75: mol_type = other DNA
gacggaaagctgaccgctaaaaatgccgatatcagcggtaacgtgaatgcgaactccgggacgctcaacaacgtc

SEQ ID NO: 223124 - DNA, 75 bp, synthetic construct
  source 1..75: mol_type = other DNA
gcaacacaaaaccgatgtttgttggtcagggtgatcagatattcatgaatgaagtgttcctgaaatatctgacgg

SEQ ID NO: 223125 - DNA, 75 bp, synthetic construct
  source 1..75: mol_type = other DNA
gttccgggcaggtgagcaggagcaggcaccgccggagggatttgaatcctccggttccgagacggtgctgggtac

SEQ ID NO: 223126 - DNA, 75 bp, synthetic construct
  source 1..75: mol_type = other DNA
cggcaatcccccgacgttctccctgacgccggagggcaggctgacggcccgcaatgcggacatcagtggagctgt

SEQ ID NO: 223127 - DNA, 75 bp, synthetic construct
  source 1..75: mol_type = other DNA
gcgactgtttgcggtgagtatcacgtcatccggcaaccccccgacgttttccctgacgccggaagggaagctgac

SEQ ID NO: 223128 - DNA, 75 bp, synthetic construct
  source 1..75: mol_type = other DNA
acacaaatgatgacctggctgcgctgtacatgctgaaggttcaaaaaacgaaagacggcattccctatgtggccg

SEQ ID NO: 223129 - DNA, 75 bp, synthetic construct
  source 1..75: mol_type = other DNA
atgacacaggcaccctccggggtgcctgttgtttttgggcataaacagattcagacatcagacatcagacatcag

SEQ ID NO: 223130 - DNA, 75 bp, synthetic construct
  source 1..75: mol_type = other DNA
tgctggaaacgcagacggtggatttcacgctcgggtcacaggggctgcggcacacgcccggtgacatcattgaaa

SEQ ID NO: 223131 - DNA, 75 bp, synthetic construct
  source 1..75: mol_type = other DNA
gtgtcgtcggccggtgcgaacaactggacgccggcaacgtacatcagtgatttactggttgtggtcatgaaaaaa

SEQ ID NO: 223132 - DNA, 75 bp, synthetic construct
  source 1..75: mol_type = other DNA
acggtggaggtgagcgcagctgacggccagtatctggcacaggcgaaatgggacacgccgcgggtggtgaagggg

SEQ ID NO: 223133 - DNA, 75 bp, synthetic construct
  source 1..75: mol_type = other DNA
ctggaagaccagagtgcagcgatccagcagatacagaaggttcaggttgatacaaataataacctgaacagcatg

SEQ ID NO: 223134 - DNA, 75 bp, synthetic construct
  source 1..75: mol_type = other DNA
gagcggtggccatcagggaccattaccgtcagggtttatgacgatcagccgtttgaccggcagattgttattccc

SEQ ID NO: 223135 - DNA, 75 bp, synthetic construct
  source 1..75: mol_type = other DNA
atcaccgaaacccgcaatgaaatcacacagacggtcagtaaaacgctggaggaccagagcgccaccatacagcag

SEQ ID NO: 223136 - DNA, 75 bp, synthetic construct
  source 1..75: mol_type = other DNA
gaccggcagtcagtggagtgtatccggcccgcacattaagcccgggaaggatttctggttttacgtgcgcagcgt

SEQ ID NO: 223137 - DNA, 75 bp, synthetic construct
  source 1..75: mol_type = other DNA
ctgtggctgattaaaacggaactgctggagacgcagaccgtggatttcagcgtgggtgctgaagggcttcgccat

SEQ ID NO: 223138 - DNA, 75 bp, synthetic construct
  source 1..75: mol_type = other DNA
tcagcgcctgttccgctgtgtgagtatccgtgagaacgatgacggtacgtatgccatcactgccgtgcagcatgt

SEQ ID NO: 223139 - DNA, 75 bp, synthetic construct
  source 1..75: mol_type = other DNA
ttttgaagttcgcaaaaacggtgtattaatcgcatccagagaaactaaaggggccattcccggtagttacagtgc

SEQ ID NO: 223140 - DNA, 75 bp, synthetic construct
  source 1..75: mol_type = other DNA
atgaatgcacccgtgcggagcagtcggccagcgtggtgctctgggaaggtgaaagtgagccgggttcctgacggc

SEQ ID NO: 223141 - DNA, 75 bp, synthetic construct
  source 1..75: mol_type = other DNA
atttctggttttacgtgcgaagcgtcaacctggtgggaaaatctgcttttgtggaagccagcgggcagcccagca

SEQ ID NO: 223142 - DNA, 75 bp, synthetic construct
  source 1..75: mol_type = other DNA
tctggctgctgaccggattgcgatgattaatcctgcgaatggcaacacaaagccgatgtttgttggtcagggcga

SEQ ID NO: 223143 - DNA, 75 bp, synthetic construct
  source 1..75: mol_type = other DNA
atgatgcatccggctatctggattttttcaaaggagagatagggaaaacccatctggctcaggagttgtggacgc

SEQ ID NO: 223144 - DNA, 75 bp, synthetic construct
  source 1..75: mol_type = other DNA
cggttgaaggtccggtggatggattaaaaagcgtgctgctgaacagtacaccggtgctggacagtgaggggaata

SEQ ID NO: 223145 - DNA, 75 bp, synthetic construct
  source 1..75: mol_type = other DNA
ccggtggaaaaaccgctgtatgcccggaccagcacagcacaatgtctgctgcgggtgacagatcgtccacaggaa

SEQ ID NO: 223146 - DNA, 75 bp, synthetic construct
  source 1..75: mol_type = other DNA
ctcaacaatgtcacgattaatcagaactgccggattctgggaaaactgtcagccaaccagattgaaggcgatatt

SEQ ID NO: 223147 - DNA, 75 bp, synthetic construct
  source 1..75: mol_type = other DNA
ctgattaaaactgaactgctggagacgcagaccgtggatttcagcgttggtgcagaagggcttcgccatgtaccg

SEQ ID NO: 223148 - DNA, 75 bp, synthetic construct
  source 1..75: mol_type = other DNA
ctgattaaaactgaactgctggagacgcagaccgtggatttcagcgtaggagcagaagggcttcgccatgtaccg

SEQ ID NO: 223149 - DNA, 75 bp, synthetic construct
  source 1..75: mol_type = other DNA
taatccacctgcattttccctgacgccggacggcaagctgaccgcaaaaaatgcggatatcagcggaaatattaa

SEQ ID NO: 223150 - DNA, 75 bp, synthetic construct
  source 1..75: mol_type = other DNA
ccggtgctggacagtgaggggaatgccaatatatccggcgtcacggtggtgttccgggcaggtgagcaggagcag

SEQ ID NO: 223151 - DNA, 75 bp, synthetic construct
  source 1..75: mol_type = other DNA
gaatactgttggcaaatcggcattcgtggaggctgtcggtcaggcgagcgatgatgcttccggctatctggattt

SEQ ID NO: 223152 - DNA, 75 bp, synthetic construct
  source 1..75: mol_type = other DNA
ctgattaaaactgaactgctggagacgcagaccgtggatttcagcgtcggagccgaagggcttcgccatgtaccg

SEQ ID NO: 223153 - DNA, 75 bp, synthetic construct
  source 1..75: mol_type = other DNA
tcttcatcaggagcgaataactggacaccaacaaccagtatcagcgatctgctggttgtagtgatgaaaaaatcc

SEQ ID NO: 223154 - DNA, 75 bp, synthetic construct
  source 1..75: mol_type = other DNA
taccacgctgataagcctggttgacgggcagggcagtccggtcagcgtggaggtacagtccgtcaccgacggcgt

SEQ ID NO: 223155 - DNA, 75 bp, synthetic construct
  source 1..75: mol_type = other DNA
ttcttcatatggtgctaataactggacgccaacgaccagtatcagcgaccttcttgttgttgtgatgaagaaatc

SEQ ID NO: 223156 - DNA, 75 bp, synthetic construct
  source 1..75: mol_type = other DNA
ctgattaaaactgaactgctggagacgcagaccgtggatttcagcgtgggggcagaagggcttcgccatgtaccg

SEQ ID NO: 223157 - DNA, 75 bp, synthetic construct
  source 1..75: mol_type = other DNA
ctgattaaaactgaactgctggagacgcagaccgtggatttcagcgtgggagcggaagggcttcgccatgtaccg

SEQ ID NO: 223158 - DNA, 75 bp, synthetic construct
  source 1..75: mol_type = other DNA
taccacgctgataagcctggttgacggccagggtattccggtcagcgtggaggtacagtccgtcaccgacggcgt

SEQ ID NO: 223159 - DNA, 75 bp, synthetic construct
  source 1..75: mol_type = other DNA
taccacgctgataagcctggttgacggtcagggtactccggtcagcgtggaggtacagtccgtcaccgacggcgt

SEQ ID NO: 223160 - DNA, 75 bp, synthetic construct
  source 1..75: mol_type = other DNA
taccacgctgataagcctggttgacggacaggggaatccggtcagcgtggaggtacagtccgtcaccgacggcgt

SEQ ID NO: 223161 - DNA, 75 bp, synthetic construct
  source 1..75: mol_type = other DNA
gcgaaaaatgcggatatcagcggtaacgtgaacgcgaactccgggacgctcaacaacgtcacgattaatcagaac

SEQ ID NO: 223162 - DNA, 75 bp, synthetic construct
  source 1..75: mol_type = other DNA
tcaaagggtgaccgtaacccggcatccgtccgcctgctgattcagttgcagcgtaacggtaactgggtgacggaa

SEQ ID NO: 223163 - DNA, 75 bp, synthetic construct
  source 1..75: mol_type = other DNA
tcaaagggcgaccgtaatccctcttctgtccgactgctgattcagatgcagcgtaacggtaactgggtgacggaa

SEQ ID NO: 223164 - DNA, 75 bp, synthetic construct
  source 1..75: mol_type = other DNA
aagcggattgcggatatcaggcaggttgaaaccacagcccgctatcttggcacggcgctgtactgggtagcctcc

SEQ ID NO: 223165 - DNA, 75 bp, synthetic construct
  source 1..75: mol_type = other DNA
gtcaaaacagtgggtaaggcttttccgcgggactcccgggcaccggagcggtggccatcagggaccattaccgtc

SEQ ID NO: 223166 - DNA, 75 bp, synthetic construct
  source 1..75: mol_type = other DNA
ttgatacaaataataacctgaacagcatgtgggcagtgaagctgcagcagatgcaggacggacgcctttatattg

SEQ ID NO: 223167 - DNA, 75 bp, synthetic construct
  source 1..75: mol_type = other DNA
gtgattgacgccattggtgaagggccgattgaaggtccggtgaaggggctgcagagtatcctggtgaacaaaacc

SEQ ID NO: 223168 - DNA, 75 bp, synthetic construct
  source 1..75: mol_type = other DNA
ggaatcccgcaccagtaatgacatctggacagagtgcttcctgcatgttgatcagaatggacgccggatttattc

SEQ ID NO: 223169 - DNA, 75 bp, synthetic construct
  source 1..75: mol_type = other DNA
gaacccgccaccacctcattccggattaacgccccggcagcgcctgccacaattgaactgataccggggtatttt

SEQ ID NO: 223170 - DNA, 75 bp, synthetic construct
  source 1..75: mol_type = other DNA
tcggaaaagcggattgcggatatcaggcaggttgaaaccacagcacgctatcttggcacggcgctgtactggata

SEQ ID NO: 223171 - DNA, 75 bp, synthetic construct
  source 1..75: mol_type = other DNA
gtgaattacactgacccgcagaacggctggcagacttccacggaactggtggaagacccggacgccatcctgcgc

SEQ ID NO: 223172 - DNA, 75 bp, synthetic construct
  source 1..75: mol_type = other DNA
cgcgcaggtgagtcagcaggtggaccgggtgagcagtgaaatcacacagaccgtcagccagagcacggaggaaaa

SEQ ID NO: 223173 - DNA, 75 bp, synthetic construct
  source 1..75: mol_type = other DNA
gaagccatcgtggataacggggccagctttgagccgcagtcaggcaccctgaacagcgttattccaccggcagtg

SEQ ID NO: 223174 - DNA, 75 bp, synthetic construct
  source 1..75: mol_type = other DNA
atgattaatcctgcgaatggcaacacaaaaccgatgtttgttggtcagggcgatcagatattcatgaacgacgtg

SEQ ID NO: 223175 - DNA, 75 bp, synthetic construct
  source 1..75: mol_type = other DNA
agtgtggcagcgaagttcagggggtttttgacgatcagccgtttgaccggcagattgttattccggcggtggcat

SEQ ID NO: 223176 - DNA, 75 bp, synthetic construct
  source 1..75: mol_type = other DNA
tatggccagcagggcgaaccggccaccaccaccttccggattaacgcgccagcaaaacccgccaccattgaactg

SEQ ID NO: 223177 - DNA, 75 bp, synthetic construct
  source 1..75: mol_type = other DNA
taaggttttccataaaggcaatcagtgggcaggtaatatcaccgactgtacggtgattgtgaccaaaaaagccgc

SEQ ID NO: 223178 - DNA, 75 bp, synthetic construct
  source 1..75: mol_type = other DNA
cgggacgctcaacaatgtcacggtaaatgaaaactgtacgattaagggcatgctggaggcgactcaggtcagagg

SEQ ID NO: 223179 - DNA, 75 bp, synthetic construct
  source 1..75: mol_type = other DNA
gcagtcaggcaccctgaacagcgttattccaccggcagtgcagcacctgacggtggaggtgagcgcggctgacgg

SEQ ID NO: 223180 - DNA, 75 bp, synthetic construct
  source 1..75: mol_type = other DNA
gtcggatgtggtgtggccgtacaccaacagcgatgtggtggtggatgataacggcgtggggtttcgctacagctt

SEQ ID NO: 223181 - DNA, 75 bp, synthetic construct
  source 1..75: mol_type = other DNA
tggctggtgaataactggtatcccacagcaagtatcagcgatttgctggttgtggtgatgaagaaatccacagca

SEQ ID NO: 223182 - DNA, 75 bp, synthetic construct
  source 1..75: mol_type = other DNA
gctgctggcggcagacaggattgcgatgattaatcctgcgaatggcaacacaaagccgatgtttgttggtcaggg

SEQ ID NO: 223183 - DNA, 75 bp, synthetic construct
  source 1..75: mol_type = other DNA
gctgacggccagtatctggcgcaggcgaaatgggacacgccgcgggtggtgaagggtgtgcgcttcagtctgcgc

SEQ ID NO: 223184 - DNA, 75 bp, synthetic construct
  source 1..75: mol_type = other DNA
aaaatgcagatatcagtggcagtgtgaatgcgaacgccgggacgctcaacaatgtcacaattaatgagaactgtc

SEQ ID NO: 223185 - DNA, 75 bp, synthetic construct
  source 1..75: mol_type = other DNA
accgttatggtaccggcgcaatggtgttgtgctggcactgcgacaaccagctgcgtgaccagacatccgaatcac

SEQ ID NO: 223186 - DNA, 75 bp, synthetic construct
  source 1..75: mol_type = other DNA
tcgctggctgaattatcctggtgggcagtctgcaatcaggtggtggacgcattacctgaggcagtatcgcgtcgc

SEQ ID NO: 223187 - DNA, 75 bp, synthetic construct
  source 1..75: mol_type = other DNA
gcgcggtctgccgtcaggaactgttcctgccgtgcgccagccgctcgcggaagataaatcattactgccattttt

SEQ ID NO: 223188 - DNA, 75 bp, synthetic construct
  source 1..75: mol_type = other DNA
atgaacgttctgcccgtcctcgatgcagtactgacccggttacgggagaagctgccgcagctgcaggtggagtac

SEQ ID NO: 223189 - DNA, 75 bp, synthetic construct
  source 1..75: mol_type = other DNA
cacgcaatgaatggcatacaggaacgggaattatcgctggctgaattatcctggtgggcagtctgcaatcaggtg

SEQ ID NO: 223190 - DNA, 75 bp, synthetic construct
  source 1..75: mol_type = other DNA
cgccacaggaaaagacggtggtcagcattgccgttgatccggagtcaccggaatcattcatgaagcggcctaaac

SEQ ID NO: 223191 - DNA, 75 bp, synthetic construct
  source 1..75: mol_type = other DNA
tatcatcacagcgaaaccgtcattcaccgttatggtaccggcgcaatggtgttgtgctggcactgcgacaaccag

SEQ ID NO: 223192 - DNA, 75 bp, synthetic construct
  source 1..75: mol_type = other DNA
gtgctggcactgtgacaaccagctgcgcgaccagacatcagaatcactcgatcaacttgctcagcagaatctggt

SEQ ID NO: 223193 - DNA, 75 bp, synthetic construct
  source 1..75: mol_type = other DNA
gtatacacgcgctgggtaaaaacgcagaaatgcatgacgtgtggcaatcaggcagatgatccgcatcacatcatt

SEQ ID NO: 223194 - DNA, 75 bp, synthetic construct
  source 1..75: mol_type = other DNA
atcctggatgattgacgtcatccgccacgcaataaacggtacacaggagcgggagttatcgctggctgaattatc

SEQ ID NO: 223195 - DNA, 75 bp, synthetic construct
  source 1..75: mol_type = other DNA
agagcgccaccagcatactgaagcagcgcacaaaaaatcttgcgccgttgccttacgcccaccagcaacagaacc

SEQ ID NO: 223196 - DNA, 75 bp, synthetic construct
  source 1..75: mol_type = other DNA
gcatggatgattgacgtcatcggtcacgcaataagcggtacgcaggagcgtgaattatctctggctgaattatcc

SEQ ID NO: 223197 - DNA, 75 bp, synthetic construct
  source 1..75: mol_type = other DNA
tgggtgaagacacagccgtgtgcgtgttgtggtaagccagccgacgatccccatcacctgattggtcatggtcag

SEQ ID NO: 223198 - DNA, 75 bp, synthetic construct
  source 1..75: mol_type = other DNA
ccatgccggtattccacaatacccgggtactggtggagccggaaccgaaaagcatgcgtaatctgccgtccgggg

SEQ ID NO: 223199 - DNA, 75 bp, synthetic construct
  source 1..75: mol_type = other DNA
gatcagttcacggaacgtctggagtcaatggcaacggataactgtgcccgctgggtgttgtccgtagtccgtcgt

SEQ ID NO: 223200 - DNA, 75 bp, synthetic construct
  source 1..75: mol_type = other DNA
ccagctgcgcgatcagttcacggaacggctggaatcaatggcaacggataactgtgcccgctgggtgttgtctgt

SEQ ID NO: 223201 - DNA, 75 bp, synthetic construct
  source 1..75: mol_type = other DNA
tgtgcgtgttgtggtaagccagccgacgatccccatcacctgattggtcacggtcagggagggatgggaacaaaa

SEQ ID NO: 223202 - DNA, 75 bp, synthetic construct
  source 1..75: mol_type = other DNA
tgcgtcgttctctggggttacgtgcggaaaaaatccgctcggtgtaccgcgaaagcgacatcataccgggagagc

SEQ ID NO: 223203 - DNA, 75 bp, synthetic construct
  source 1..75: mol_type = other DNA
ccagtggcctcatggagactatcaccacagtgaaaccgtcatacatcgttacggtaccggcgcaatggtgttgtg

SEQ ID NO: 223204 - DNA, 75 bp, synthetic construct
  source 1..75: mol_type = other DNA
ttcattgcggcagggtgctggtggagccggaaccgaaaaacatgcgggcgctgccatccggagcggttcccactg

SEQ ID NO: 223205 - DNA, 75 bp, synthetic construct
  source 1..75: mol_type = other DNA
agcatggatgattgacgtcatccgtcacgcaataagcggtgcgcaggagcgggaattatcgctggctgaattgta

SEQ ID NO: 223206 - DNA, 75 bp, synthetic construct
  source 1..75: mol_type = other DNA
gtacctgccgttcaccagccgctggcggaagataaatcactactgccatttttcagcgatgagcgggtgagccgt

SEQ ID NO: 223207 - DNA, 75 bp, synthetic construct
  source 1..75: mol_type = other DNA
tcacctgattggtcatggtcagggcggaatggggacaaaatctcacgatattttcacgctaccgctgtgtcggga

SEQ ID NO: 223208 - DNA, 75 bp, synthetic construct
  source 1..75: mol_type = other DNA
cgcgtcgttcgctgggattaccagcggaaaaaatccgctcagtataccgtgagagcgacatcgtaccgggagagc

SEQ ID NO: 223209 - DNA, 75 bp, synthetic construct
  source 1..75: mol_type = other DNA
gtgctggcactgcgacaaccagctgcgcgaccagacatccgaatcacttgagcaacttgctcaacagaatctggc

SEQ ID NO: 223210 - DNA, 75 bp, synthetic construct
  source 1..75: mol_type = other DNA
tccgctggcattcgaagaaaagcatggttcccaggttgatttaatttttcattttcttgatcacgcctttgcaac

SEQ ID NO: 223211 - DNA, 75 bp, synthetic construct
  source 1..75: mol_type = other DNA
tgtgctggcactgcgataaccagctgcgcgatcagttcacggaacggctggaatcaatggcaacggataactgtg

SEQ ID NO: 223212 - DNA, 75 bp, synthetic construct
  source 1..75: mol_type = other DNA
atcacgacgagctgcatgcggataccgtggcatttgaagagaagtatggctcccagctggagctgatatttcgtt

SEQ ID NO: 223213 - DNA, 75 bp, synthetic construct
  source 1..75: mol_type = other DNA
gctaccgctgtgtcgggagcatcacaacgagcttcatgcggatccgctggcgttcgaagaaaagcatggttccca

SEQ ID NO: 223214 - DNA, 75 bp, synthetic construct
  source 1..75: mol_type = other DNA
ttgagagcactactgccccctgaaattgccccacgtatggggatcgtgttgttcaggccaggttcagagctgatg

SEQ ID NO: 223215 - DNA, 75 bp, synthetic construct
  source 1..75: mol_type = other DNA
agaccgccaccagcatattgaaacaacgcacaaaaaatcttgcaccgttgccttacgcccaccagcaacaaaaat

SEQ ID NO: 223216 - DNA, 75 bp, synthetic construct
  source 1..75: mol_type = other DNA
tgctggagcctgagccggaacgttattcatctttcgccagtggtgccgttcccgcggcatcacaaccgctggcgg

SEQ ID NO: 223217 - DNA, 75 bp, synthetic construct
  source 1..75: mol_type = other DNA
tgttgtgccgtctgtcacccgggaaagtgaccttgtgccttcggttcctgccaccagcatcatccaggataaagc

SEQ ID NO: 223218 - DNA, 75 bp, synthetic construct
  source 1..75: mol_type = other DNA
gaaaaaggtgctggcgctgaaagtggagccggagtcgccggagtcttttatgttacgccccaaacgtcgccgctg

SEQ ID NO: 223219 - DNA, 75 bp, synthetic construct
  source 1..75: mol_type = other DNA
agacagccaccagcatactgaagcagcgcacaaaaaatattgcgctaccacttcacgcccaccagcaacaaatcc

SEQ ID NO: 223220 - DNA, 75 bp, synthetic construct
  source 1..75: mol_type = other DNA
cccgcgaggtgtttatcggtgaggtcaaggggctgtggcagtacgccctcgactttgccactgaaagcgtcttta

SEQ ID NO: 223221 - DNA, 75 bp, synthetic construct
  source 1..75: mol_type = other DNA
ccagtggcctcattccgactggcacagcgagaacatgaccacaatgcgacacgcgccgggcgcaatccgtctgtg

SEQ ID NO: 223222 - DNA, 75 bp, synthetic construct
  source 1..75: mol_type = other DNA
gttacggtaccggcgcgatggtgttgtgctggcactgtgacaaccagctgcgcgaccagacatcagaatcactcg

SEQ ID NO: 223223 - DNA, 75 bp, synthetic construct
  source 1..75: mol_type = other DNA
acacagccgtgtgcatgttgtggaaagcccgctgatgatccccaccacctgataggtcacggtcagggtggaatg

SEQ ID NO: 223224 - DNA, 75 bp, synthetic construct
  source 1..75: mol_type = other DNA
agtctccggaatctttcatgaagctgcctaaacgtcaccggtgggttaaggagaaatacacacgctgggttaaga

SEQ ID NO: 223225 - DNA, 75 bp, synthetic construct
  source 1..75: mol_type = other DNA
gtgctggcactgcgataaccagctgcgcgaccagacctccgaatcactcgggcaacttgctcaccaaaacctgtc

SEQ ID NO: 223226 - DNA, 75 bp, synthetic construct
  source 1..75: mol_type = other DNA
accagctgcgcgaccagacatccgaatcactcgggcagcttgctcaacaaaatctgacagcctggatgattgacg

SEQ ID NO: 223227 - DNA, 75 bp, synthetic construct
  source 1..75: mol_type = other DNA
ctgctgggcttctgtaaatgatgtagtggatgccatgaccgaaaatatggcgcgtcgaatcctgaagcttccgag

SEQ ID NO: 223228 - DNA, 75 bp, synthetic construct
  source 1..75: mol_type = other DNA
agtctccggaatctttcatgaagctgcctaaacgtcgccgctgggttaaggagaaatacactcgttgggttaaga

SEQ ID NO: 223229 - DNA, 75 bp, synthetic construct
  source 1..75: mol_type = other DNA
taatctgccgtccggggtcgttcctgccgttcgccagccgctggaggatgataaagcattactgccctttttcag

SEQ ID NO: 223230 - DNA, 75 bp, synthetic construct
  source 1..75: mol_type = other DNA
taatctgccgtccggggtcgttcctgccgttcgccagccgctggaggaagataaagcatttctgccctttttcag

SEQ ID NO: 223231 - DNA, 75 bp, synthetic construct
  source 1..75: mol_type = other DNA
gctgatgcgcttccggagtctgtattgcgtcgttcgctgggattaccggtggaaaaaatccgctccgtataccgt

SEQ ID NO: 223232 - DNA, 75 bp, synthetic construct
  source 1..75: mol_type = other DNA
actgggagggatgggaacaaaggctgatgatttgtttgttattccgctgtgccgtaaatgtcataacgaactgca

SEQ ID NO: 223233 - DNA, 75 bp, synthetic construct
  source 1..75: mol_type = other DNA
gcgcacaaaaaatcttgcgccgctgcctcacgcccaccagcaaaacccgccacaggaaaagatggtggtcagcat

SEQ ID NO: 223234 - DNA, 75 bp, synthetic construct
  source 1..75: mol_type = other DNA
taatctgccgtccggggtcgttcctgccgttcgccagccgctggaggaggataaagcattgctgccttttttcag

SEQ ID NO: 223235 - DNA, 75 bp, synthetic construct
  source 1..75: mol_type = other DNA
accgtggcatttgaagagaagtatggctcccagctggagctgatatttcgttttatcgaccgtgcgttggcaatt

SEQ ID NO: 223236 - DNA, 75 bp, synthetic construct
  source 1..75: mol_type = other DNA
gtgagagcactactgactcctgaaattgccccgcgtatggggatcgtattgttcaggccaggttcagagctgatg

SEQ ID NO: 223237 - DNA, 75 bp, synthetic construct
  source 1..75: mol_type = other DNA
gcgctgggttaagacgcagccgtgcgcatgttgtggaaagtctgctgatgatcctcaccacctgataggtcacgg

SEQ ID NO: 223238 - DNA, 75 bp, synthetic construct
  source 1..75: mol_type = other DNA
gtccgttgcagtcttccctgctggtcagtgaacgcatggcgttcaagctgcaccgtcagggcatgattatggaaa

SEQ ID NO: 223239 - DNA, 75 bp, synthetic construct
  source 1..75: mol_type = other DNA
ggcgagccggatgcccaggggcgtcggcgtccagtgccggtggaaggcagtgaatttgtcatgccagccgacgcg

SEQ ID NO: 223240 - DNA, 75 bp, synthetic construct
  source 1..75: mol_type = other DNA
tcgagaattgcccggcagacgcgctgcaactggtcactgatgccgcactctccggcatggcgaaatcccgccgct

SEQ ID NO: 223241 - DNA, 75 bp, synthetic construct
  source 1..75: mol_type = other DNA
atgaaaggatacgcggctgtaattgttactttttatcctgacaaagagcatgttaagtcgatgtatcatgcactt

SEQ ID NO: 223242 - DNA, 75 bp, synthetic construct
  source 1..75: mol_type = other DNA
cttccgataattttttcaataaaaggtcctgaaaggatggctagactaggctatatgattaaaggattattaaat

SEQ ID NO: 223243 - DNA, 75 bp, synthetic construct
  source 1..75: mol_type = other DNA
gttgtggtaagccagccgacgatccccatcacctgattggtcatggtcagggcggaatggggacaaaatctcacg

SEQ ID NO: 223244 - DNA, 75 bp, synthetic construct
  source 1..75: mol_type = other DNA
gtgctggtggcgtggaatgtccttgaaagctggttacttcgtgaaaagggctgtcagtggcctcattccgactgg

SEQ ID NO: 223245 - DNA, 75 bp, synthetic construct
  source 1..75: mol_type = other DNA
gtaaggccctgagattaccgaagcctgttttgccgtctgtcacccgggagagtgaccttgtgccttcggttactg

SEQ ID NO: 223246 - DNA, 75 bp, synthetic construct
  source 1..75: mol_type = other DNA
tgacctttttgtgttgcctttgtgcagaaagcatcacgacgagctgcatgcggataccgtggcatttgaagagaa

SEQ ID NO: 223247 - DNA, 75 bp, synthetic construct
  source 1..75: mol_type = other DNA
caggtctgttggggcgggatatgtatcagatggaaaaaatatcaacaggcattgcctacggcacctccgcaggca

SEQ ID NO: 223248 - DNA, 75 bp, synthetic construct
  source 1..75: mol_type = other DNA
caggggtgtcatacaccacgtcagcggcgggaacggggtactggttactgcagttgctggacagggtctccccgt

SEQ ID NO: 223249 - DNA, 75 bp, synthetic construct
  source 1..75: mol_type = other DNA
ggggagtctgctgtttggcctgctgacgtacctgacaaacctttatttcaagattaaagaagataagcgcaaggc

SEQ ID NO: 223250 - DNA, 75 bp, synthetic construct
  source 1..75: mol_type = other DNA
gctgtttgggctgctgacgtacctgacaaacctgtatttcaaaatcagagaggaccggcgtaaggcggcgcgggg

SEQ ID NO: 223251 - DNA, 75 bp, synthetic construct
  source 1..75: mol_type = other DNA
gggtagcttggtgtttggcttgctgacgtatctgacgaacctgtatttcaagattaaagaagaccggcgtaaggc

SEQ ID NO: 223252 - DNA, 75 bp, synthetic construct
  source 1..75: mol_type = other DNA
aattcagcccacaacagtcgtcggtgctgttatcggagcgtatggcattcaagctgcaccgtcaggggatgatcc

SEQ ID NO: 223253 - DNA, 75 bp, synthetic construct
  source 1..75: mol_type = other DNA
gctgttatcggagcgtatggcgttcaaactgcatcgtcaggggatgatcctgaacagcatcggtgaggatcagaa

SEQ ID NO: 223254 - DNA, 75 bp, synthetic construct
  source 1..75: mol_type = other DNA
cacagtgggctgcaatcggtgtgctgggtagtctggtttttggcctgctgacgtacctgacaaacctggtaatga

SEQ ID NO: 223255 - DNA, 75 bp, synthetic construct
  source 1..75: mol_type = other DNA
cgggggtcgcttatggcacatctgcgggtaatgcaggtttttgggcattacagctacttgataaagtgaccccat

SEQ ID NO: 223256 - DNA, 75 bp, synthetic construct
  source 1..75: mol_type = other DNA
tgtgaggggcgtttcgtcaacccgatcaccgatatctgctggacctgcattttcccgctgtcgctgggcagcaca

SEQ ID NO: 223257 - DNA, 75 bp, synthetic construct
  source 1..75: mol_type = other DNA
ggtggggacgggctactggttcctgcagctgctggacagggtttccccgtctcagtgggcggcaataggcgtgct

SEQ ID NO: 223258 - DNA, 75 bp, synthetic construct
  source 1..75: mol_type = other DNA
gtgataagaaagacgctgacagctgcgctgattgcactggggctgtgcgccggaaatgtgctggcagaagacaag

SEQ ID NO: 223259 - DNA, 75 bp, synthetic construct
  source 1..75: mol_type = other DNA
gagcctgctgtttggtctgctgacatacctgacgaacctgtatttcaaaattaaagaagaccgacgcaaggcggc

SEQ ID NO: 223260 - DNA, 75 bp, synthetic construct
  source 1..75: mol_type = other DNA
gaaaagcatggttcccaggttgatttaattttcgttttcttgatcacgcctttgcaaccggcgtgctcgggtaaa

SEQ ID NO: 223261 - DNA, 75 bp, synthetic construct
  source 1..75: mol_type = other DNA
ctggtgatcgttaagccgggccgtgaatccatgccggtattccacaatacccgggtactggtggagccggaaccg

SEQ ID NO: 223262 - DNA, 75 bp, synthetic construct
  source 1..75: mol_type = other DNA
gtgcgggtattacttcgacctgttccggtaccggaactcgggctggtggtccttaagccggggcgtgaatccatg

SEQ ID NO: 223263 - DNA, 75 bp, synthetic construct
  source 1..75: mol_type = other DNA
cgtctgatggctacatacggcggtcagtttacgcttacatgaatggcacacaggagcgggaattatctctggctg

SEQ ID NO: 223264 - DNA, 75 bp, synthetic construct
  source 1..75: mol_type = other DNA
cacgcgataagcggtgcgcaggagcgggaattatctctcgctgaattatcctggtgggcggtctgcaatcaggtg

SEQ ID NO: 223265 - DNA, 75 bp, synthetic construct
  source 1..75: mol_type = other DNA
gaatctttcatgaaacgacctaaacgtcgccgttgggtcaatgagaaatacactcgctgggtaaagacacagccg

SEQ ID NO: 223266 - DNA, 75 bp, synthetic construct
  source 1..75: mol_type = other DNA
cgccagccgctggtggaagacaaaacattgctgccgtttttcagtaacgcacgggtgattcgtgctgctggtggt

SEQ ID NO: 223267 - DNA, 75 bp, synthetic construct
  source 1..75: mol_type = other DNA
gaatctttcatgaagcgacctaaacgtcgccgttgggtaaatgagaaatacacacgctgggtaaagacacagtcg

SEQ ID NO: 223268 - DNA, 75 bp, synthetic construct
  source 1..75: mol_type = other DNA
tggttgagccggaaccgaaaaacatgcgggcgctgccatccggagcggttcccactgttcgccagccgctggtgg

SEQ ID NO: 223269 - DNA, 75 bp, synthetic construct
  source 1..75: mol_type = other DNA
ggtgaagacacagccgtgtgcgtgttgtggtcaaccagccgacgatccccatcacctgattggtcacggtcaggg

SEQ ID NO: 223270 - DNA, 75 bp, synthetic construct
  source 1..75: mol_type = other DNA
gcgcgggctgccgtctggagtcgttcctgccgttcgccagccgctggcggaagataaatcattactgtcattttt

SEQ ID NO: 223271 - DNA, 75 bp, synthetic construct
  source 1..75: mol_type = other DNA
catgcaatgaatggcacgcaggagcgggaattatcgctggctgaattatcttggtgggcaaccataaataacgta

SEQ ID NO: 223272 - DNA, 75 bp, synthetic construct
  source 1..75: mol_type = other DNA
tggtaccggaacttgggctggtggtgctaaagccgggctttgaatccatacagatatttcataatcctcgagtgc

SEQ ID NO: 223273 - DNA, 75 bp, synthetic construct
  source 1..75: mol_type = other DNA
tgtgcgtgttgtggtaagccagctgacgatccgcatcacctgattggtcatggtcaggggggagtgggaacaaag

SEQ ID NO: 223274 - DNA, 75 bp, synthetic construct
  source 1..75: mol_type = other DNA
gaatcgttcatgaagcggcctaaacgtcgccgttgggtaaatgagaaatacacgcgctgggtaaagacacagccg

SEQ ID NO: 223275 - DNA, 75 bp, synthetic construct
  source 1..75: mol_type = other DNA
gggttaatgaaaagtacacgcgctgggttaagacacagccgtgtgcatgttgtggaaagcctgctgatgatcccc

SEQ ID NO: 223276 - DNA, 75 bp, synthetic construct
  source 1..75: mol_type = other DNA
gcgcacaaagaatattgcgctaccgcctcacgcccaccagcaacagaccccaccacaggaaaaggcggtggtcag

SEQ ID NO: 223277 - DNA, 75 bp, synthetic construct
  source 1..75: mol_type = other DNA
tagtgcctgaactcgggctggtggtccttaagccggaccgtgaatccatgctggtattccataatccccgggtgc

SEQ ID NO: 223278 - DNA, 75 bp, synthetic construct
  source 1..75: mol_type = other DNA
agcatcacaacgaacttcatgctgatccgctggcatttgaagaaaagcatggttcccagattgatttaatttttc

SEQ ID NO: 223279 - DNA, 75 bp, synthetic construct
  source 1..75: mol_type = other DNA
tggtaccggagctcgggctggtggtccttaagccaggtcgtgaatccatgcaggtatttcacaatcctcgagtgc

SEQ ID NO: 223280 - DNA, 75 bp, synthetic construct
  source 1..75: mol_type = other DNA
agcatggatgattgacgtcatcggtcacgcaataagcggtacgcaggagcgtgaattatctctggctgaattatc

SEQ ID NO: 223281 - DNA, 75 bp, synthetic construct
  source 1..75: mol_type = other DNA
cggtaccggagcttggggtggttatcgttaagcctggccgtgaatcaatgtcggtattccataacggcagggtac

SEQ ID NO: 223282 - DNA, 75 bp, synthetic construct
  source 1..75: mol_type = other DNA
ataccgtggcatttgaagagatgtatggctcccagctggagctgatatttcgttttatcgatcgtgcgctggcaa

SEQ ID NO: 223283 - DNA, 75 bp, synthetic construct
  source 1..75: mol_type = other DNA
catcgccgttgatccggagtcaccggctcagtatctacagcgccagaaaccacaacgggaagagatgcctgtata

SEQ ID NO: 223284 - DNA, 75 bp, synthetic construct
  source 1..75: mol_type = other DNA
tcgtaccgggagagcagaccgccaccagcatactgaagcagcgcacaaaaaatcttgcgccgctgcctcacgccc

SEQ ID NO: 223285 - DNA, 75 bp, synthetic construct
  source 1..75: mol_type = other DNA
acacgccgggcgcaatccgtctgtgctggcactgcgataaccagctgcgcgatcagttcacggaacggctggaat

SEQ ID NO: 223286 - DNA, 75 bp, synthetic construct
  source 1..75: mol_type = other DNA
ggttaatgaaaagtacacgcgctgggttaagacacagtcgtgtgcatgttgtggaaagcccgctgatgatcccca

SEQ ID NO: 223287 - DNA, 75 bp, synthetic construct
  source 1..75: mol_type = other DNA
ggaagtgacgaaggcaaaaccggtgacgcgcaccattacgtccgcgaacattgaccgcctgcgggtcaccttcgg

SEQ ID NO: 223288 - DNA, 75 bp, synthetic construct
  source 1..75: mol_type = other DNA
ggtgcgaacaactggacgccgacaacgtacatcagtgatttactggttgtggtcatgaaaaaatccacggcaggg

SEQ ID NO: 223289 - DNA, 75 bp, synthetic construct
  source 1..75: mol_type = other DNA
gttaagacgcagccgtgtgcatgttgtggtaagccagccgacgatccccatcacctgattggtcatggtcagggc

SEQ ID NO: 223290 - DNA, 75 bp, synthetic construct
  source 1..75: mol_type = other DNA
gctggcgcacctggcagcaggacccgctgcaggctcatttttttggtacgctcaatgccggtgaagagctctggg

SEQ ID NO: 223291 - DNA, 75 bp, synthetic construct
  source 1..75: mol_type = other DNA
acaaaagcgcatgacctctttgtgttgcctttgtgcagaaagcatcacgacgagctgcatgcggataccgtggca

SEQ ID NO: 223292 - DNA, 75 bp, synthetic construct
  source 1..75: mol_type = other DNA
gggttctgggaaaactgtccgccaaccagattgaaggcgatctactgaagctttacgtcttcactttgaagaaca

SEQ ID NO: 223293 - DNA, 75 bp, synthetic construct
  source 1..75: mol_type = other DNA
aacggtgcccgctttgagccgcagtcaggcaccctgaacagcgtcatcccaccggcagtgcagcacctgacggtg

SEQ ID NO: 223294 - DNA, 75 bp, synthetic construct
  source 1..75: mol_type = other DNA
ggaagtgacgaaggcaaagccggtgacgcgcaccatcacatcagcgaacattgaccgtctgcgggtgaccttcgg

SEQ ID NO: 223295 - DNA, 75 bp, synthetic construct
  source 1..75: mol_type = other DNA
tcaccgcccccaccattaccagcggcggcaatccccccgcattctccctgacgccggacggcaggctgacggccc

SEQ ID NO: 223296 - DNA, 75 bp, synthetic construct
  source 1..75: mol_type = other DNA
gcaccacaacgaacttcatgcagacccgctgaagtttgagaaaaagtacggctctcagattgagttaatttttcg

SEQ ID NO: 223297 - DNA, 75 bp, synthetic construct
  source 1..75: mol_type = other DNA
agccaaccagattgaaggtgatattgtcaaaacggtgggaaaagcctttccgagaaatggcagttatgccagcgg

SEQ ID NO: 223298 - DNA, 75 bp, synthetic construct
  source 1..75: mol_type = other DNA
cggcgaaaaatgcggatatcagcggtaacgtgaacgcgaactccgggacgctcaacaacgtcacgattaatcaga

SEQ ID NO: 223299 - DNA, 75 bp, synthetic construct
  source 1..75: mol_type = other DNA
aaacgggacagaaatttttaaccagtcaacaacggatgctccggcggttttttcttccgttattgatatgcctgc

SEQ ID NO: 223300 - DNA, 75 bp, synthetic construct
  source 1..75: mol_type = other DNA
ccgggcggtaaatgcgtggggacagcagggcgatccggcatcggtatcgttcaggattgccgcaccggcagcgcc

SEQ ID NO: 223301 - DNA, 75 bp, synthetic construct
  source 1..75: mol_type = other DNA
gctggttacttcgtgaaaagggctgtcagtggcctcattccggatggcacagcgagaacatgaccacaatgcggc

SEQ ID NO: 223302 - DNA, 75 bp, synthetic construct
  source 1..75: mol_type = other DNA
gcaccacaacgaacttcatgctgacccgctggagtttgagaaaaagtacgggtcccaggttgagttaatttttca

SEQ ID NO: 223303 - DNA, 75 bp, synthetic construct
  source 1..75: mol_type = other DNA
gttaagacgcagccgtgtgcatgctgtggaaagccagctgatgatccgcatcacctgattggccatgggcagggc

SEQ ID NO: 223304 - DNA, 75 bp, synthetic construct
  source 1..75: mol_type = other DNA
gctggcactgcgataaccagctgcgcgatcagttcacggaacggctggaatcaatggcaacggataactgtgccc

SEQ ID NO: 223305 - DNA, 75 bp, synthetic construct
  source 1..75: mol_type = other DNA
ggtggaatgggtacaaaagcgcatgacctttttgtgttgcctttgtgcagaaagcatcacgacgagctgcatgcg

SEQ ID NO: 223306 - DNA, 75 bp, synthetic construct
  source 1..75: mol_type = other DNA
ctgaaagatggttaatcgcgtctggtgttgcggttattttactgaccttattagcttttatgagttttccggatc

SEQ ID NO: 223307 - DNA, 75 bp, synthetic construct
  source 1..75: mol_type = other DNA
aaatttgaccggcaggtcatgataccgccagtgttattccgcggtggtaagcatgagaatttcaacagtaataac

SEQ ID NO: 223308 - DNA, 75 bp, synthetic construct
  source 1..75: mol_type = other DNA
ctatgtggccgggattggtgcagggattgaggatactgatggccagccactgagcaacatactgctgctggctga

SEQ ID NO: 223309 - DNA, 75 bp, synthetic construct
  source 1..75: mol_type = other DNA
aacggtcagcaagtctttcccccgcacgaacagttatgccagtggcaccatcacggtaagaatcagtgatgatca

SEQ ID NO: 223310 - DNA, 75 bp, synthetic construct
  source 1..75: mol_type = other DNA
ccacctcacagttcctggcctcggtgattctgggtaatctgcctccccgtccttttaacatccggatggtccggg

SEQ ID NO: 223311 - DNA, 75 bp, synthetic construct
  source 1..75: mol_type = other DNA
ctgtccgcctgctgattcagcttgagcgtggtggtaaatgggtgacggaaaaggatgtcaccattaacggcaaga

SEQ ID NO: 223312 - DNA, 75 bp, synthetic construct
  source 1..75: mol_type = other DNA
atgatgagcgtgattgatgccatcggtgagggaccggtggaaggtccggtgaaggggttgcagagtatcctggtg

SEQ ID NO: 223313 - DNA, 75 bp, synthetic construct
  source 1..75: mol_type = other DNA
tctgggactgtttcgggaaaaaataggaaaactgcatctggctcaggggctgtgggagctgatagacaacagcca

SEQ ID NO: 223314 - DNA, 75 bp, synthetic construct
  source 1..75: mol_type = other DNA
tggagttttcggtgtcagcatggctggtaaataactggtatcccacagcaagtatcagcgatttgctggttgtgg

SEQ ID NO: 223315 - DNA, 75 bp, synthetic construct
  source 1..75: mol_type = other DNA
ccgtaccgcgctggataatacgctgatttacagtggtgttattgatatgcctgccggtcacggtcacatgacact

SEQ ID NO: 223316 - DNA, 75 bp, synthetic construct
  source 1..75: mol_type = other DNA
gcggggattgaggatactgatggccagcccctgagcaacatactgctgctggctgaccgtattgcgatgattaac

SEQ ID NO: 223317 - DNA, 75 bp, synthetic construct
  source 1..75: mol_type = other DNA
ttatggaactgcaccgggttttatgaccacagggatacagatcacaacgatgaaggcgtcagcttcaggatttgt

SEQ ID NO: 223318 - DNA, 75 bp, synthetic construct
  source 1..75: mol_type = other DNA
tgggaaaactgtcagccaaccagattgaaggcgatattgttaaaacggtgggcaaagctttcccccgggactccc

SEQ ID NO: 223319 - DNA, 75 bp, synthetic construct
  source 1..75: mol_type = other DNA
gggaatacaccctgacggtcagggcgattaacagctatggccagcagggcgaaccggccaccaccaccttccgga

SEQ ID NO: 223320 - DNA, 75 bp, synthetic construct
  source 1..75: mol_type = other DNA
atgacggaaaaggatgtcaccattaacggcaagaccacctcgcagttcctggcgtcggtgattctggataatctg

SEQ ID NO: 223321 - DNA, 75 bp, synthetic construct
  source 1..75: mol_type = other DNA
tgatcataactttgaccgccaaatcattattccgcccattatttttaacggtgtggcgtatgacgatccggggag

SEQ ID NO: 223322 - DNA, 75 bp, synthetic construct
  source 1..75: mol_type = other DNA
agagcggcaacagcacgccgttatttgtggcgcaggggaatcagctgttcatgaacgacgtgttcctgaaacgac

SEQ ID NO: 223323 - DNA, 75 bp, synthetic construct
  source 1..75: mol_type = other DNA
gtggccatcaggaaccattaccgtcagggtttatgacgatcagccgtttgaccgcagattgtattccggcggtgg

SEQ ID NO: 223324 - DNA, 75 bp, synthetic construct
  source 1..75: mol_type = other DNA
gacgccggggtattttcagataacggcggtaccggtgctggcggtgtatgacccgacggtacagtttgaattctg

SEQ ID NO: 223325 - DNA, 75 bp, synthetic construct
  source 1..75: mol_type = other DNA
ttttccagaaaggcaatcagggggcaggcaatatcaccgactgtacggtgattgtgaccaaaaaagccgcttccg

SEQ ID NO: 223326 - DNA, 75 bp, synthetic construct
  source 1..75: mol_type = other DNA
tcagcaatgaaatcacgcagaccgtcaataagaaactggaagaccagagtgcagcgatccagcagatacagaagg

SEQ ID NO: 223327 - DNA, 75 bp, synthetic construct
  source 1..75: mol_type = other DNA
atcgcattgcgatgattaccccggagaacggcaacaccacgccgctgtttgtggcgcaggggaatcagctgttca

SEQ ID NO: 223328 - DNA, 75 bp, synthetic construct
  source 1..75: mol_type = other DNA
aacgcatcacgaacacggcacaggtggaaaaatctgcccgttatctggggtccggcagtcagtggactgtccagg

SEQ ID NO: 223329 - DNA, 75 bp, synthetic construct
  source 1..75: mol_type = other DNA
atctggctcaggagttgtggacgcagattgataacggtcagcttgcgcctgacctggctgaaatcaggacgtcca

SEQ ID NO: 223330 - DNA, 75 bp, synthetic construct
  source 1..75: mol_type = other DNA
cagcagatgcaggacggacgcctttatattgcgggtatcggtgccggtattgagaacacccctgacggcatgcag

SEQ ID NO: 223331 - DNA, 75 bp, synthetic construct
  source 1..75: mol_type = other DNA
gaaagaccgccataatgccgtggaggtgaactggattgacccggataacggctgggagacggcgacggagctggt

SEQ ID NO: 223332 - DNA, 75 bp, synthetic construct
  source 1..75: mol_type = other DNA
aggtcagaggtgacttcgttaaagctgtatccaaatcattcccgaaacaggctggtacgtggggtaatacggaaa

SEQ ID NO: 223333 - DNA, 75 bp, synthetic construct
  source 1..75: mol_type = other DNA
tcagcttgcgcctgacctggctgaaatcaggacgtccattacggatgtcagcaatgaaatcacgcagaccgtcaa

SEQ ID NO: 223334 - DNA, 75 bp, synthetic construct
  source 1..75: mol_type = other DNA
ttctccacgaccaattaaaaattatattaccacttctgaaagtggtgttaattggataaaaataggagatgctcg

SEQ ID NO: 223335 - DNA, 75 bp, synthetic construct
  source 1..75: mol_type = other DNA
ggacagtggcaatccggtcagcgtggaggtccagtccgtcaccgacggcgtgaaggtgaaagtgagccgtgttcc

SEQ ID NO: 223336 - DNA, 75 bp, synthetic construct
  source 1..75: mol_type = other DNA
ctgtgggatatgctgacccacccgcgctacggtatggggaaacgtcttggcgcggcggacgtggacaaatgggcg

SEQ ID NO: 223337 - DNA, 75 bp, synthetic construct
  source 1..75: mol_type = other DNA
attttccctgacaccggacgggcggctgacggcgaaaaatgccgatatcagcggtaacgtgaatgcgaactccgg

SEQ ID NO: 223338 - DNA, 75 bp, synthetic construct
  source 1..75: mol_type = other DNA
gtaaggcactgagattaccgaagcctgttgtgccgtctgtcacccgggagagtgaccttgttccttcggttcctg

SEQ ID NO: 223339 - DNA, 75 bp, synthetic construct
  source 1..75: mol_type = other DNA
gatctcggttttgatgatagtcacgttgtgacaatgccggaactgtgctggtggctggttcgtaatgacctggcg

SEQ ID NO: 223340 - DNA, 75 bp, synthetic construct
  source 1..75: mol_type = other DNA
catcacagcgaaaccgtcattcaccgttacggtaccggcgcgatggtgttgtgctggcactgcgacaaccacctg

SEQ ID NO: 223341 - DNA, 75 bp, synthetic construct
  source 1..75: mol_type = other DNA
cgtgaccagacctctgaatcactcgggcaacttgctcatcaaaacctgtcagcatggatgattgacgtcatacgc

SEQ ID NO: 223342 - DNA, 75 bp, synthetic construct
  source 1..75: mol_type = other DNA
attttgaagaaaaacacggcagccagctgttgttgctgattcgttttttaatgcacgcgagaaattcgggtgtcc

SEQ ID NO: 223343 - DNA, 75 bp, synthetic construct
  source 1..75: mol_type = other DNA
ggttttccatcaccggccgcggactataccgaagacgaactagatctaaatgcctactgtatccgtcgccccagt

SEQ ID NO: 223344 - DNA, 75 bp, synthetic construct
  source 1..75: mol_type = other DNA
tacgtcgttctctggggttacgtgtggaaaaaatccgctccttgtaccgcgaaagcgacatcgtaccgggagagc

SEQ ID NO: 223345 - DNA, 75 bp, synthetic construct
  source 1..75: mol_type = other DNA
atattttcacgctaccgctgtgtcgggagcatcacaacgagcttcatgcggatccgctggcgttcgaagaaaagc

SEQ ID NO: 223346 - DNA, 75 bp, synthetic construct
  source 1..75: mol_type = other DNA
gcgctgggtgaagacacagccgtgtgcgtgttgtggtcaaccagccgacgatccccatcacctgattggtcacgg

SEQ ID NO: 223347 - DNA, 75 bp, synthetic construct
  source 1..75: mol_type = other DNA
cacacgctgggtgaagacacagccgtgtgcgtgttgtggtaagccagccgacgatccccatcacctgattggtca

SEQ ID NO: 223348 - DNA, 75 bp, synthetic construct
  source 1..75: mol_type = other DNA
acaaacggctcaaccgttcacgggcagtttgtatgaggttttgagcagggatattgattcggctaagctggacgc

SEQ ID NO: 223349 - DNA, 75 bp, synthetic construct
  source 1..75: mol_type = other DNA
agacagccaccagcatactgaagcagcgcacaaaaaatattgcgctgccacctcacgtccaccagcaacaaatcc

SEQ ID NO: 223350 - DNA, 75 bp, synthetic construct
  source 1..75: mol_type = other DNA
gttttttttgatccggaaaatagaaaaccttttgaaagtataaaaaaacatttcggggataaaccacagttactg

SEQ ID NO: 223351 - DNA, 75 bp, synthetic construct
  source 1..75: mol_type = other DNA
tggtaccggaactcgggctggtgatcgttaagccgggccgtgaatccatgccggtattccacaatacccggttac

SEQ ID NO: 223352 - DNA, 75 bp, synthetic construct
  source 1..75: mol_type = other DNA
gatcagttcacggaacggctggaatcaatggcaacggataactgtgcccgctgggtgttatctgttgtgcgccgt

SEQ ID NO: 223353 - DNA, 75 bp, synthetic construct
  source 1..75: mol_type = other DNA
gccgtaaatgtcataacgaactgcacgccggggtaaaagattttgaagaaaaacacggcagccagctgttgttgc

SEQ ID NO: 223354 - DNA, 75 bp, synthetic construct
  source 1..75: mol_type = other DNA
tgttattccggcggtggcgtttcgtggcgctaaacatgagagagagcatactgatatttactcctcatgccgtct

SEQ ID NO: 223355 - DNA, 75 bp, synthetic construct
  source 1..75: mol_type = other DNA
agcaacttgctcatcaaaacctgtcagcatggatgattgacgtcatacgccatgcaatgaatggcacgcaggagc

SEQ ID NO: 223356 - DNA, 75 bp, synthetic construct
  source 1..75: mol_type = other DNA
cgcagtgtgaataccgttggtaaatcggcattcgtggaggctgtcggtcaggcgagtgatgatgcatcaggctat

SEQ ID NO: 223357 - DNA, 75 bp, synthetic construct
  source 1..75: mol_type = other DNA
actgtcagattaaggggaaactgtccgccaaccagattgaaggcgatattgtcaaaacggtcagcaagtctttcc

SEQ ID NO: 223358 - DNA, 75 bp, synthetic construct
  source 1..75: mol_type = other DNA
gaaatgacggaaaagtacctgatgcctgcagccgggagacactacaaaaagaggaaaactgccaggagtggaagt

SEQ ID NO: 223359 - DNA, 75 bp, synthetic construct
  source 1..75: mol_type = other DNA
taatctgccgtccggggtcgttcctgccgttcgccagccgctgggggatgagaaagcatttctgccgtttttcag

SEQ ID NO: 223360 - DNA, 75 bp, synthetic construct
  source 1..75: mol_type = other DNA
taatctgccgtccggggtcgttcctgccgttcgccagccgctgggggatgagaaaccatttctgccctttttcag

SEQ ID NO: 223361 - DNA, 75 bp, synthetic construct
  source 1..75: mol_type = other DNA
taatctgccgtccggggtcgttcctgccgttcgccagccgctgggggatgagaaatcatttctgccttttttcag

SEQ ID NO: 223362 - DNA, 75 bp, synthetic construct
  source 1..75: mol_type = other DNA
taatcagcggagaaaacagcgctgccgcgttgctggaaaaaatcaaagctgaacgcgcagccagcgggggtaaaa

SEQ ID NO: 223363 - DNA, 75 bp, synthetic construct
  source 1..75: mol_type = other DNA
gagatgtatgtggtactttctgttgtaatgacaattcttttctttactaacaaaaatagcacaggtagcagcaaa

SEQ ID NO: 223364 - DNA, 75 bp, synthetic construct
  source 1..75: mol_type = other DNA
tacgtcgttctctggggttacgtgcggaaaaaatccgctcggtgtaccgcgaaagcgacatcgtaccgggagagc

SEQ ID NO: 223365 - DNA, 75 bp, synthetic construct
  source 1..75: mol_type = other DNA
taatctgccgtccggggtcgttcctgccgttcgccagccgctgggggatgataaatcatttctgccatttttcag

SEQ ID NO: 223366 - DNA, 75 bp, synthetic construct
  source 1..75: mol_type = other DNA
taatctgccgtccggggtcgttcctgccgttcgccagccgctgggggatgaaaaagcatttctgccatttttcag

SEQ ID NO: 223367 - DNA, 75 bp, synthetic construct
  source 1..75: mol_type = other DNA
tgctgattccgcgtaatatccggagaaaagtggatggattcaggcaatcagaaggtaaaacaacaaaaaaaccga

SEQ ID NO: 223368 - DNA, 75 bp, synthetic construct
  source 1..75: mol_type = other DNA
taatctgccgtccggggtcgttcctgccgttcgccagccgctgggggatgagaaaacatttctgccatttttcag

SEQ ID NO: 223369 - DNA, 75 bp, synthetic construct
  source 1..75: mol_type = other DNA
taatctgccgtccggggtcgttcctgccgttcgccagccgctgggggatgacaaagcatttctgccctttttcag

SEQ ID NO: 223370 - DNA, 75 bp, synthetic construct
  source 1..75: mol_type = other DNA
taatctgccgtccggggtcgttcctgccgttcgccagccgctgggggatgataaagcatttctgccttttttcag

SEQ ID NO: 223371 - DNA, 75 bp, synthetic construct
  source 1..75: mol_type = other DNA
aagatgcatccgtacgcacaatctccctgttgccgacagccggagacgctgctgcgcagggctggagcattaaga

SEQ ID NO: 223372 - DNA, 75 bp, synthetic construct
  source 1..75: mol_type = other DNA
agatatgcacggacagagccggataccccgtggtgattactcgcatcactgagcactcagtgttctttcgacgga

SEQ ID NO: 223373 - DNA, 75 bp, synthetic construct
  source 1..75: mol_type = other DNA
gaacatattgaccaccaggagtaccgcaaaattctcgcggacactgagcaggaaaagcacctgaaaaattacgag

SEQ ID NO: 223374 - DNA, 75 bp, synthetic construct
  source 1..75: mol_type = other DNA
aaccgggctggaagccgagcggttgatggaagttgaacaggtgctggagtcggcgcgcaaagcgaaagcggcggg

SEQ ID NO: 223375 - DNA, 75 bp, synthetic construct
  source 1..75: mol_type = other DNA
ctcaacgcattgcagcgaggctctcttccagccaaagggatgaccattatctgcataatgatttccacgcgttga

SEQ ID NO: 223376 - DNA, 75 bp, synthetic construct
  source 1..75: mol_type = other DNA
ttgcgtgatacggctatacagcacctggttgaaggtagttcatgtatcgtcagcgataatcgacaaaaaggtggc

SEQ ID NO: 223377 - DNA, 75 bp, synthetic construct
  source 1..75: mol_type = other DNA
ttgcttctcttaaatatgaagctgagaaatggagaaggattggcgggtggggaacattaatatcactctctgctt

SEQ ID NO: 223378 - DNA, 75 bp, synthetic construct
  source 1..75: mol_type = other DNA
ggaatggtgtggtggatcaaccgctctattgcccgactcacccgttatgctgattccgttacagacaataagccc

SEQ ID NO: 223379 - DNA, 75 bp, synthetic construct
  source 1..75: mol_type = other DNA
tgcgctggatctgggggggaggattgttgatgattgcgggtgcattgctaagcggatggcgggggagaaatcgcg

SEQ ID NO: 223380 - DNA, 75 bp, synthetic construct
  source 1..75: mol_type = other DNA
gaacaacagcaacgtcttgaacaggcgctgatgaccccggacactgacgaatattacaacgcggcagcactatga

SEQ ID NO: 223381 - DNA, 75 bp, synthetic construct
  source 1..75: mol_type = other DNA
agttttacggcaatatcatcaccacacgcacttatcaggaacgtctcgacacgctggaaaaagtgcgcgatgccg

SEQ ID NO: 223382 - DNA, 75 bp, synthetic construct
  source 1..75: mol_type = other DNA
atgttctctttgattaatcagggacaactgtataccgacaatgccgattacccggtaaaaattgttcgctgcata

SEQ ID NO: 223383 - DNA, 75 bp, synthetic construct
  source 1..75: mol_type = other DNA
ctgatgcctggcaagaccgtggtagtgactttgtgaaattccgcgaggagaataagggacgattgagttacttac

SEQ ID NO: 223384 - DNA, 75 bp, synthetic construct
  source 1..75: mol_type = other DNA
cttccgtgtgcacacgcgtttgcggttgcgtctggaaactggacgtacgcaccagatccgcgtgcatatggccca

SEQ ID NO: 223385 - DNA, 75 bp, synthetic construct
  source 1..75: mol_type = other DNA
ttgtccatcgtctggataaagacaccactggcctgatggttgtggcaaaaaccgttccggctcagacgcgtttag

SEQ ID NO: 223386 - DNA, 75 bp, synthetic construct
  source 1..75: mol_type = other DNA
ttgcgtctggaaactggacgtacgcatcagatccgcgtgcatatggcgcatatcacccatccgctggtgggcgat

SEQ ID NO: 223387 - DNA, 75 bp, synthetic construct
  source 1..75: mol_type = other DNA
gcaaccgcggccatccgcggagacattacgcgcactttatgatcagcctggacaacgttttaatgaacagcagct

SEQ ID NO: 223388 - DNA, 75 bp, synthetic construct
  source 1..75: mol_type = other DNA
aagagatggatgaagatgacttcgatagtagtgagtcaagtccagttgagttgtggcaggcattgtctgacacag

SEQ ID NO: 223389 - DNA, 75 bp, synthetic construct
  source 1..75: mol_type = other DNA
atggcacaacgagtacagctcactgcaacggtgtccgaaaaccaactcggacaacgcttagatcaggctttggcc

SEQ ID NO: 223390 - DNA, 75 bp, synthetic construct
  source 1..75: mol_type = other DNA
tgaagaacttgaaaagatgggatgttcattttactcatacgatgttcgttctacttcaatttatctgactgtatc

SEQ ID NO: 223391 - DNA, 75 bp, synthetic construct
  source 1..75: mol_type = other DNA
agtttctggaaaaaattagctggttgttaggtttagctgcgcagtgggtacgtttccgtgatgacatcatgactg

SEQ ID NO: 223392 - DNA, 75 bp, synthetic construct
  source 1..75: mol_type = other DNA
acttgcaggtgagaacaattcactctcatcattagagaaaatcgcgcaaatccctgatagcagttggttatggaa

SEQ ID NO: 223393 - DNA, 75 bp, synthetic construct
  source 1..75: mol_type = other DNA
aatggcatgcgcctattccacaagatatggtggagctgattgaggtgatgcgcgccgatttcgaagagcataagg

SEQ ID NO: 223394 - DNA, 75 bp, synthetic construct
  source 1..75: mol_type = other DNA
cccgaccaaacgtacccatatggcggtgcatccaatgggcaaaccggcggtcactcactatcgcattatggaaca

SEQ ID NO: 223395 - DNA, 75 bp, synthetic construct
  source 1..75: mol_type = other DNA
caacagtgtccgaaaaccaactcggtcaacgcttagatcaagctttggccgaaatgttcccggattattcacgtt

SEQ ID NO: 223396 - DNA, 75 bp, synthetic construct
  source 1..75: mol_type = other DNA
cttattggtaaagtatggcctgtcgttgttgctgtagttggtgctggccttgccattcgtatttttaaaaaattc

SEQ ID NO: 223397 - DNA, 75 bp, synthetic construct
  source 1..75: mol_type = other DNA
aaagcgatggcgtatgcgcaaggggcggattatctggagcaggatttagtgatgaccaaagacgaccatctggtc

SEQ ID NO: 223398 - DNA, 75 bp, synthetic construct
  source 1..75: mol_type = other DNA
tgagctgaagcgtattaagaatgagctggaacccaaaatgggcatggagctcaatctggtacagctgattgccta

SEQ ID NO: 223399 - DNA, 75 bp, synthetic construct
  source 1..75: mol_type = other DNA
cgatcatgaatctgtcgtttcgccagtacaactacaagatcggaatgcaaatccgctccccccttgcacggtaca

SEQ ID NO: 223400 - DNA, 75 bp, synthetic construct
  source 1..75: mol_type = other DNA
acctggagaaactcgacgtaatcaaagactcaccgcaaatgagcctgtttgagatcattgaatctccggccaaga

SEQ ID NO: 223401 - DNA, 75 bp, synthetic construct
  source 1..75: mol_type = other DNA
agagaatcagagaaaccactgaacgcgcccgccgcaaagcaaacctgctgaggactggcctgaccagtggaaaca

SEQ ID NO: 223402 - DNA, 75 bp, synthetic construct
  source 1..75: mol_type = other DNA
tgtgaatcagttatatgatgctctgtataacaaagcgggtgtaaatgggctgtttactgatttccctgataaggc

SEQ ID NO: 223403 - DNA, 75 bp, synthetic construct
  source 1..75: mol_type = other DNA
ctgtggcgcattgcccgagcaattgctggagtcggagctgtttggtcatgcgcgtggcgcgtttactggcgctgt

SEQ ID NO: 223404 - DNA, 75 bp, synthetic construct
  source 1..75: mol_type = other DNA
gctgtcagcaatcgcgaaggtttattccaggcggcggaaggcggtacgctatttctcgatgagattggcgatatg

SEQ ID NO: 223405 - DNA, 75 bp, synthetic construct
  source 1..75: mol_type = other DNA
tgtataacaaagcaggtgttaatgggttgtttacggacttcccggataaggcagtaaaattcctcaataaagagt

SEQ ID NO: 223406 - DNA, 75 bp, synthetic construct
  source 1..75: mol_type = other DNA
cgctactacgcgatagatttcacgctggatgaaattaagtctctgaaatttaccgaaggtttcgatattgtaaac

SEQ ID NO: 223407 - DNA, 75 bp, synthetic construct
  source 1..75: mol_type = other DNA
ggtaaaaaagtgcagacttatccggggcgtttcccaatgggtaagtccgacttccgggtgcacacctttgaagaa

SEQ ID NO: 223408 - DNA, 75 bp, synthetic construct
  source 1..75: mol_type = other DNA
aagcgtaagcagcagacagagctacgggccatcaagcacggcatgatcgaccacgacatcattgatgaaccccaa

SEQ ID NO: 223409 - DNA, 75 bp, synthetic construct
  source 1..75: mol_type = other DNA
ggctctgtatggctggcgagcgcgggacggtggcccggcggtgcgtttttcggggttatcgcgggaaatgttaat

SEQ ID NO: 223410 - DNA, 75 bp, synthetic construct
  source 1..75: mol_type = other DNA
tgttgatgttcctggcgttgtcaccgcgctggcaaaccagctttctccctctcgcctgcaggctatactggggga

SEQ ID NO: 223411 - DNA, 75 bp, synthetic construct
  source 1..75: mol_type = other DNA
tgtgcgtgaagtcactgaaaaattgaatgagcacgcacgcttaggcggtgcaaaagttgtctgggtcaccgatgc

SEQ ID NO: 223412 - DNA, 75 bp, synthetic construct
  source 1..75: mol_type = other DNA
gtttggtctgttgatgttggtggtgattgtgctggcgacgtttgtctctggcaaacgcgcgcagcttccggcgct

SEQ ID NO: 223413 - DNA, 75 bp, synthetic construct
  source 1..75: mol_type = other DNA
atttccgctcacgttaacggttttatcgctgatacttgccgcactgctgctgtttgttgtcggatggtccgatcc

SEQ ID NO: 223414 - DNA, 75 bp, synthetic construct
  source 1..75: mol_type = other DNA
atagttactctgatgctgtcgctgctgggcaccttaattgtccgttctggcattctggtttcggttcatgcgttc

SEQ ID NO: 223415 - DNA, 75 bp, synthetic construct
  source 1..75: mol_type = other DNA
ctgcagggaaaatgtaccagattgacccgctgttactggaggccatcgcccggcacgaaagcggtctgaatcccc

SEQ ID NO: 223416 - DNA, 75 bp, synthetic construct
  source 1..75: mol_type = other DNA
gccaaaattcatgaaggggagagtgggcgtcggctgtgggctgagtgcgttgagttgggtattgagtcgcgcaag

SEQ ID NO: 223417 - DNA, 75 bp, synthetic construct
  source 1..75: mol_type = other DNA
ggtgcgttctttaaaaagcatcctgctggtcgtcatttttatgatttctttggcgagaacgtctttcgtgccgat

SEQ ID NO: 223418 - DNA, 75 bp, synthetic construct
  source 1..75: mol_type = other DNA
caagctccggcgcgtttacactggctggcaacgttgctgatggatgcgctaaaacgccatcatggcgctgcgcag

SEQ ID NO: 223419 - DNA, 75 bp, synthetic construct
  source 1..75: mol_type = other DNA
cagggcaaagtattgttcgattcggcaaataaagccgttgggcaggattattcgcgctggaatgacgtctggcta

SEQ ID NO: 223420 - DNA, 75 bp, synthetic construct
  source 1..75: mol_type = other DNA
ggcgcggcggaaattttacgcgaaggtccgccgcctgaagtagtggctcgttttactgacaacattctgacgcaa

SEQ ID NO: 223421 - DNA, 75 bp, synthetic construct
  source 1..75: mol_type = other DNA
atccatgagcgtggacgaggtgcttaaccatgtccgcaaagcggtgctgtttattgaagggataacggtaagcgg

SEQ ID NO: 223422 - DNA, 75 bp, synthetic construct
  source 1..75: mol_type = other DNA
cacgccggaagacgttgagccgttggctgatgcgttaaaggtgcgcggggtgagccggttgatatttccggcgct

SEQ ID NO: 223423 - DNA, 75 bp, synthetic construct
  source 1..75: mol_type = other DNA
cggtgttgtttattgaagggataacggtgagcggtggcgaagccacgacccaactgccgtttgtggtggcgctgt

SEQ ID NO: 223424 - DNA, 75 bp, synthetic construct
  source 1..75: mol_type = other DNA
ttaaccggacgcgataatcagcagattaagcgcagcatctgtttgcttgccgagcgcggcaagctggcggaactg

SEQ ID NO: 223425 - DNA, 75 bp, synthetic construct
  source 1..75: mol_type = other DNA
gacagtaacggtatgttgagcgaaaccggctgggaaaaattactcccggtgtgcgacggcgcaatgctcgatctc

SEQ ID NO: 223426 - DNA, 75 bp, synthetic construct
  source 1..75: mol_type = other DNA
atcaggcgttgcagattgccgacggcaaagtaatgtggaacgttgcagtctgcgagcagtgcgacacctgcctga

SEQ ID NO: 223427 - DNA, 75 bp, synthetic construct
  source 1..75: mol_type = other DNA
ataccggatttaaacagaatggagacggtattcttgatgtttatgctaatagtcagcgtgtattccgctttcaga

SEQ ID NO: 223428 - DNA, 75 bp, synthetic construct
  source 1..75: mol_type = other DNA
actgactgggcgaagattggatttaaaaatgatgccgacagcgatactgattcatacatgtggtttgaaacaggc

SEQ ID NO: 223429 - DNA, 75 bp, synthetic construct
  source 1..75: mol_type = other DNA
gatgaatttattgatacattaaccagaaggcctattcagaagttgattggtgggacatattataacgttgtgagt

SEQ ID NO: 223430 - DNA, 75 bp, synthetic construct
  source 1..75: mol_type = other DNA
actgcgccacctcacctgcctcgtggacagtaacggtatgttgagcgaaaccggctgggaaaaattactcccggt

SEQ ID NO: 223431 - DNA, 75 bp, synthetic construct
  source 1..75: mol_type = other DNA
gcgccacgccggaagatgttgagcagttggctggcgcgttaaaggagcgtgaggtgagtcgattgatatttccgg

SEQ ID NO: 223432 - DNA, 75 bp, synthetic construct
  source 1..75: mol_type = other DNA
gacaccgcgacgaaattgaaaacagcacgcactattggcggtgtggcatttgatggtactgcgaatattaattta

SEQ ID NO: 223433 - DNA, 75 bp, synthetic construct
  source 1..75: mol_type = other DNA
gtgccacagtgtccgcatcaagcgttgcagattgtcggcggcaaagtggcgtggaacgcggcgctctgcgagcag

SEQ ID NO: 223434 - DNA, 75 bp, synthetic construct
  source 1..75: mol_type = other DNA
gatgggcttagggattggccttacgccatcagccgacgattatttaacaggtctggcgcttattttatttatttc

SEQ ID NO: 223435 - DNA, 75 bp, synthetic construct
  source 1..75: mol_type = other DNA
atatcgcctcagcggtcgccagtatgatggggttagggattggccttacgccatcagccgatgattatctgaccg

SEQ ID NO: 223436 - DNA, 75 bp, synthetic construct
  source 1..75: mol_type = other DNA
attacatatcaggcgacgtgctgttattcatgcattaaacgataaacaaaatatcgcgtcagcggtcgctaatat

SEQ ID NO: 223437 - DNA, 75 bp, synthetic construct
  source 1..75: mol_type = other DNA
atgacggagacgggcgggcaaccgcccgtttcttttccggtaaaggatgtcgccgggctcctctttttactgcgc

SEQ ID NO: 223438 - DNA, 75 bp, synthetic construct
  source 1..75: mol_type = other DNA
ttgccctggttttggtactggaaggtttagggccgatgctttacccgaaggcatggaagaagatgatctctgcga

SEQ ID NO: 223439 - DNA, 75 bp, synthetic construct
  source 1..75: mol_type = other DNA
ttatctcggtctgcaacgcggcagaaataataccacgttattaagtgccataacgctggaagccgcattacaaca

SEQ ID NO: 223440 - DNA, 75 bp, synthetic construct
  source 1..75: mol_type = other DNA
gtgccgcagtgtccgcatcaggcgttgcagattgtcgacggcaaagtggcgtggagcgcggctgcctgcgagcaa

SEQ ID NO: 223441 - DNA, 75 bp, synthetic construct
  source 1..75: mol_type = other DNA
aaagcgtgggggagcgaatgtcatcagcaattaaccggacgcgataatcagcagattaagcgcagcatctgtttg

SEQ ID NO: 223442 - DNA, 75 bp, synthetic construct
  source 1..75: mol_type = other DNA
tacgctaatagtcagagagtattccgctttaagaatgatgcagctttttctttaaaaaaattgctggtcggagat

SEQ ID NO: 223443 - DNA, 75 bp, synthetic construct
  source 1..75: mol_type = other DNA
ttgaatggcaaacagcactggaaactgcgcctggcctgatagtctggctgcttgttgtcggggcggggatctttt

SEQ ID NO: 223444 - DNA, 75 bp, synthetic construct
  source 1..75: mol_type = other DNA
atcaatgtcagtgccttatgcagaatgctttcaattgatgcaaataatgtgcggcagcgtgtgtttcagactggg

SEQ ID NO: 223445 - DNA, 75 bp, synthetic construct
  source 1..75: mol_type = other DNA
cggaagacgttgagccgttggctgatgcgttaaaggtgcgcggggtgagccgcttaatattcccggcgctgtatt

SEQ ID NO: 223446 - DNA, 75 bp, synthetic construct
  source 1..75: mol_type = other DNA
cttggtgattgtccgtcagcacctggagatattgtaggcaagatacttgataaatacggaaaattacgctggtaa

SEQ ID NO: 223447 - DNA, 75 bp, synthetic construct
  source 1..75: mol_type = other DNA
tgacaccacggcgttatgaatcaggtagcagtgtgagaggggcgagccggatgagtaaggccggacatgtgtcgc

SEQ ID NO: 223448 - DNA, 75 bp, synthetic construct
  source 1..75: mol_type = other DNA
tggcggctaatggcaagaaaggaaaggtgattctcggcgcgatgatgcgcaagctggcacaggtggcgtatggcg

SEQ ID NO: 223449 - DNA, 75 bp, synthetic construct
  source 1..75: mol_type = other DNA
gccgccttatattgcctttgcctgtccggtaaaaatggccgcccttcctgaacagagactgcggcaggatgcgga

SEQ ID NO: 223450 - DNA, 75 bp, synthetic construct
  source 1..75: mol_type = other DNA
acacatctgaaatttgacgcgattgtcgccaacccgccattctccgccaagtggagcgccagcccgctgtttatg

SEQ ID NO: 223451 - DNA, 75 bp, synthetic construct
  source 1..75: mol_type = other DNA
gtgaatattctggtgaatgcagtggggcaaagaaaaaatttttcagcattatcagaaggaagcatggcagttttc

SEQ ID NO: 223452 - DNA, 75 bp, synthetic construct
  source 1..75: mol_type = other DNA
tcgccgtccggtaacggtgttgagcctcggttgtgtggtgattattgtcgccgccaacatcgtcggcatcggcat

SEQ ID NO: 223453 - DNA, 75 bp, synthetic construct
  source 1..75: mol_type = other DNA
gcaaaaccgctgatcattcacaatgtgttactctcagcactgggcgggttgatgtggtatctgcaattctttttc

SEQ ID NO: 223454 - DNA, 75 bp, synthetic construct
  source 1..75: mol_type = other DNA
gtactggcggtgatgtgcggcattttctctgcagggatgtcctttgcgatgaacgccgcaaaaccaatgcatgaa

SEQ ID NO: 223455 - DNA, 75 bp, synthetic construct
  source 1..75: mol_type = other DNA
gacgccaattatcaacggcaatttcgatttgttgatcaataccgaaggtggacgcatgacattgctcggcgttct

SEQ ID NO: 223456 - DNA, 75 bp, synthetic construct
  source 1..75: mol_type = other DNA
caagctatgttgtcatcatgggcggcggcgcgatcatcaacctcggtttctgttttattcgtctggcaaaagtga

SEQ ID NO: 223457 - DNA, 75 bp, synthetic construct
  source 1..75: mol_type = other DNA
atgaatatgatgatctcatatcaggaacttgttcgcaccttccttagtctctctacgctactgcctgtttttctg

SEQ ID NO: 223458 - DNA, 75 bp, synthetic construct
  source 1..75: mol_type = other DNA
gactggtatccggcacaactaccgcctgtgaaaattattcttggcgaagccgtgctggctgtgggtaaacagggc

SEQ ID NO: 223459 - DNA, 75 bp, synthetic construct
  source 1..75: mol_type = other DNA
cgcgcaggccgtgggctttaatcgcgacatcacctatttaatgccgtttaaacagccggtcggcctgatggcagg

SEQ ID NO: 223460 - DNA, 75 bp, synthetic construct
  source 1..75: mol_type = other DNA
cgcgcgtcttcccggaagaaaaagcccacgacatcctgattggcgaaagctggttaggccgcgtggtgaatggcc

SEQ ID NO: 223461 - DNA, 75 bp, synthetic construct
  source 1..75: mol_type = other DNA
tgtgggcttaggcgaaacggtaaaagatcgcgccggattattgctgcaactggcaaacctgccgacgccgccgga

SEQ ID NO: 223462 - DNA, 75 bp, synthetic construct
  source 1..75: mol_type = other DNA
aaatgggatttccaattccatgtgttcatatgcgtggcgatggcggtaatgatgttttatggcagtttaacccaa

SEQ ID NO: 223463 - DNA, 75 bp, synthetic construct
  source 1..75: mol_type = other DNA
ctgtgatgccagtctgaacaaaaaaggactcgttcagctaaccagtgccactgacagccccagtgaaacgctggc

SEQ ID NO: 223464 - DNA, 75 bp, synthetic construct
  source 1..75: mol_type = other DNA
tggttaggccgcgtggttaacggcctcggcgaaccgctggatggcaaaggccgcctgaacggcaacgaccttctg

SEQ ID NO: 223465 - DNA, 75 bp, synthetic construct
  source 1..75: mol_type = other DNA
gttaacggtcagatacagcccagcaactgggggaattttgattcacgctatgtaaaagatgttcgcctgggtacg

SEQ ID NO: 223466 - DNA, 75 bp, synthetic construct
  source 1..75: mol_type = other DNA
cggtattctggatgtttacgctaatagtcagcgagtattccgctttcagaatggagttgctattgcttttaaaaa

SEQ ID NO: 223467 - DNA, 75 bp, synthetic construct
  source 1..75: mol_type = other DNA
ggcgagacttgctcagcagggggcatcgattctcacaaaagaaaaacgcccagctgttggtagcagtctggacgc

SEQ ID NO: 223468 - DNA, 75 bp, synthetic construct
  source 1..75: mol_type = other DNA
ggggcctgcccggaagattgcaaatattgcccgcaaagctcgcgctataaaaccggactggaagcagaacgttta

SEQ ID NO: 223469 - DNA, 75 bp, synthetic construct
  source 1..75: mol_type = other DNA
ggatcaaagtctgttctggcggcattgttggtttaggtgaaacggtgaaagatcgcgccggattattgctacaac

SEQ ID NO: 223470 - DNA, 75 bp, synthetic construct
  source 1..75: mol_type = other DNA
ctcgacgcgcttctgcatgggcgcggcgtggaaaaatccgcacgagcgcgatatgccgtacctggaacaaatggt

SEQ ID NO: 223471 - DNA, 75 bp, synthetic construct
  source 1..75: mol_type = other DNA
tgtccttggtgtagtgcagttttctttaaacaggtacaaggtgcgaaggtaaaagccagcgtagttattcagaat

SEQ ID NO: 223472 - DNA, 75 bp, synthetic construct
  source 1..75: mol_type = other DNA
tcctggtcgtgggaggcgtggcggaacagattctggggaaatggcgactcctgattacctggttattctccggcg

SEQ ID NO: 223473 - DNA, 75 bp, synthetic construct
  source 1..75: mol_type = other DNA
tgacgcgaaggaaatcaccgcaactcagaaagaaatgactttgcaactttctgagctttcggaaaagctggcaaa

SEQ ID NO: 223474 - DNA, 75 bp, synthetic construct
  source 1..75: mol_type = other DNA
attgcgttttgctcgttggaatgaaattgattttgataaatcaatgtgggtaataccagcagaacgcgaaaaaat

SEQ ID NO: 223475 - DNA, 75 bp, synthetic construct
  source 1..75: mol_type = other DNA
aaagcgatggcgtatgcgcagggggcggattatctggagcaagatctggtaatgactaaggacgaccatctggtc

SEQ ID NO: 223476 - DNA, 75 bp, synthetic construct
  source 1..75: mol_type = other DNA
catttgctgatgaatatgtttgcacttctggtggtgggggcagtggcggagcggatactggggaaatggcgactt

SEQ ID NO: 223477 - DNA, 75 bp, synthetic construct
  source 1..75: mol_type = other DNA
atcggtcattaacgtggcgacgggggagattattcagtcgattaccaccggtgcacatcctgacagccttatcct

SEQ ID NO: 223478 - DNA, 75 bp, synthetic construct
  source 1..75: mol_type = other DNA
cctggtacgacgccgaaaccggtaaatatcatgtgaatcaatataccggcgatgaaagccgcacccgcgtcactc

SEQ ID NO: 223479 - DNA, 75 bp, synthetic construct
  source 1..75: mol_type = other DNA
ctgaacatgatgaaccaggacggcgtacgtaacggttatgacctggaacaactgaaaaaagtgcgtgacgtttgc

SEQ ID NO: 223480 - DNA, 75 bp, synthetic construct
  source 1..75: mol_type = other DNA
caatcaatacaccggcgatgaaagccgcacccgcgtcacccaatgggaaaccctcgactgggtgcaggaagtaca

SEQ ID NO: 223481 - DNA, 75 bp, synthetic construct
  source 1..75: mol_type = other DNA
cgtgatggctacatctatgcgctgacggagcaccagagctctgcggatcgttttatggccctgcgcatgatgcat

SEQ ID NO: 223482 - DNA, 75 bp, synthetic construct
  source 1..75: mol_type = other DNA
taactatatggtgaaagaatgtgattcagcttcacctgaatttatacgggcgatggcagaacgtctgccaagaca

SEQ ID NO: 223483 - DNA, 75 bp, synthetic construct
  source 1..75: mol_type = other DNA
gccttgctccctaccggctgattttcagttccggtgagtggtttctggcaggagaacacctcggcaggataacca

SEQ ID NO: 223484 - DNA, 75 bp, synthetic construct
  source 1..75: mol_type = other DNA
tatctatccagaaattaaagcgccgtggttccatcatcaggaagggaaggatattgcggctaaaacgctggaagt

SEQ ID NO: 223485 - DNA, 75 bp, synthetic construct
  source 1..75: mol_type = other DNA
ccgctgccaatgccggaattgaaattgttggcgatatcgaactgttctgccgcgaagcacaagcgcctgtcgtgg

SEQ ID NO: 223486 - DNA, 75 bp, synthetic construct
  source 1..75: mol_type = other DNA
accattctgaacgtgactgaagatcatatggatcgctatccatttggtttacagcagtatcgtgcggcaaaactg

SEQ ID NO: 223487 - DNA, 75 bp, synthetic construct
  source 1..75: mol_type = other DNA
aacaatgccgattcgcggtgcggatgaacgctgcgtcagctttggcgtcaacatgggtgactatcacctgaatca

SEQ ID NO: 223488 - DNA, 75 bp, synthetic construct
  source 1..75: mol_type = other DNA
acgccaccgcgcaatctcgtgaaaccggaattgcctccgttaaagccaatggcacaagccagacggtaaaagata

SEQ ID NO: 223489 - DNA, 75 bp, synthetic construct
  source 1..75: mol_type = other DNA
atgtctgatcattggtttgaactcagtaagagcagtgataatcagttccggtttgtgctaaaagcgggcaatggt

SEQ ID NO: 223490 - DNA, 75 bp, synthetic construct
  source 1..75: mol_type = other DNA
tgaaagaaatgaaattttccgggcagcataactacaccaatgcgctggcggcgctggcgctggcagatgccgcag

SEQ ID NO: 223491 - DNA, 75 bp, synthetic construct
  source 1..75: mol_type = other DNA
tgcctgctggactggcttcgctggtgttacaggcacaggcgttttttactatcgtacttggcgcatttactttcg

SEQ ID NO: 223492 - DNA, 75 bp, synthetic construct
  source 1..75: mol_type = other DNA
ggtagctatcgcggcgtgctgaatggtattcacccgtgggcggaactgataaacctgatgcgcgggcttgtcgaa

SEQ ID NO: 223493 - DNA, 75 bp, synthetic construct
  source 1..75: mol_type = other DNA
tattaagaatgagctggaaccgaaaatgggtatggatctcaatctggtacagctaatcgcctacaccgactggaa

SEQ ID NO: 223494 - DNA, 75 bp, synthetic construct
  source 1..75: mol_type = other DNA
cgccagcagcctgaaagcgttaaccaccttcaccggtctgccgcatcgctttgaagtggtgctggagcacaatgg

SEQ ID NO: 223495 - DNA, 75 bp, synthetic construct
  source 1..75: mol_type = other DNA
atggctgattaccagggtaaaaatgtcgttattatcggcctgggcctcaccgggctttcttgcgtggactttttc

SEQ ID NO: 223496 - DNA, 75 bp, synthetic construct
  source 1..75: mol_type = other DNA
ggacgctatgaaacctggcgggttgcaccgttatcgttactggtgcccgtagtcggactggcaagtgcggcacta

SEQ ID NO: 223497 - DNA, 75 bp, synthetic construct
  source 1..75: mol_type = other DNA
ttattgaaaaacagattgaatacctggttaatcaactcaggcaatcagggttattaaaaactcattcagagctag

SEQ ID NO: 223498 - DNA, 75 bp, synthetic construct
  source 1..75: mol_type = other DNA
cggacaaaacggactgaaccgccccgggtttcctggagagtattttatctgtgaactcaggctgccagatcatcg

SEQ ID NO: 223499 - DNA, 75 bp, synthetic construct
  source 1..75: mol_type = other DNA
cactcatttcacaacggatttcccggggagaactgagggaatttgaactggcagacggaaactggctactggaca

SEQ ID NO: 223500 - DNA, 75 bp, synthetic construct
  source 1..75: mol_type = other DNA
ctttaccgataatattttgacgcaaaatgcgcgaatgcaggcactggtggaaacgttattacgtcaggcaagact

SEQ ID NO: 223501 - DNA, 75 bp, synthetic construct
  source 1..75: mol_type = other DNA
gccggaaagccgttgccgcatgcgaccgcgtaaaccgtcagttcgtggcagaacgtccagaccagttgtgggtgg

SEQ ID NO: 223502 - DNA, 75 bp, synthetic construct
  source 1..75: mol_type = other DNA
atgagttagctcttgaaaaggtacgctcagacaatttcagagataaagtttcccgcctaaccggaatatatctat

SEQ ID NO: 223503 - DNA, 75 bp, synthetic construct
  source 1..75: mol_type = other DNA
catcggcgctgctgcttcgtctcaggcatggctgaatactggcgattcaggacaatcgttatccacatcgtcatt

SEQ ID NO: 223504 - DNA, 75 bp, synthetic construct
  source 1..75: mol_type = other DNA
tcgctggccgcaacgccaaaggcagttaaagcagcaaatgacaatgcgaacagcagggtgccatctgaccgaaaa

SEQ ID NO: 223505 - DNA, 75 bp, synthetic construct
  source 1..75: mol_type = other DNA
gcaggcgtatttctgacgattgccggaatgatcatcagcttcatgtggggacttgatggtaaacatatcgcgctg

SEQ ID NO: 223506 - DNA, 75 bp, synthetic construct
  source 1..75: mol_type = other DNA
atcagcacggcttctgcgctggcagggcttatattgctgtgtctgttcggcccggccttactggctggctatatc

SEQ ID NO: 223507 - DNA, 75 bp, synthetic construct
  source 1..75: mol_type = other DNA
atgtttacgcattaactcatgagctaaaaagcccactggcggcgattcgtggcgcggcggaaattttacgcgaag

SEQ ID NO: 223508 - DNA, 75 bp, synthetic construct
  source 1..75: mol_type = other DNA
cacctgcgtggttagcgtctcttactacgctgaagccagaaacctcggtaacggttaactcgctgcttgattcat

SEQ ID NO: 223509 - DNA, 75 bp, synthetic construct
  source 1..75: mol_type = other DNA
cctgcaccaaaacccgcaacaccacccgcacctgaagtcgtacgctatgaccgttacctgctgatcaacacccac

SEQ ID NO: 223510 - DNA, 75 bp, synthetic construct
  source 1..75: mol_type = other DNA
actttgaaatacctgaagcctttgtcaccaaagaattaccgataaagctcgcacagttgcgtgaacgctgggagc

SEQ ID NO: 223511 - DNA, 75 bp, synthetic construct
  source 1..75: mol_type = other DNA
tgtcgaggcgtcatttgctaacggcctctttgaagatgttgctgccgcctttgaagaaatccgcgacgcagaagg

SEQ ID NO: 223512 - DNA, 75 bp, synthetic construct
  source 1..75: mol_type = other DNA
tgcgtaacggttacgacctcgaacaactgaaaaaagtgcgtgaagtttgccacgtcccgctaattgcctccggtg

SEQ ID NO: 223513 - DNA, 75 bp, synthetic construct
  source 1..75: mol_type = other DNA
cgctcgactgggtacaggaagtgcaaaaacgcggtgccggagaaatcgtcctcaacatgatgaatcaggacggcg

SEQ ID NO: 223514 - DNA, 75 bp, synthetic construct
  source 1..75: mol_type = other DNA
gaaagaggcgctgaaaacgctggccgggccaggctggctaatgcagaccgacgtactgaacgcgaggtctgtttt

SEQ ID NO: 223515 - DNA, 75 bp, synthetic construct
  source 1..75: mol_type = other DNA
gctgattgtgatcgatcctcgctttacacgtacggcggcggtggctgactactatgcccctatccgttccggtac

SEQ ID NO: 223516 - DNA, 75 bp, synthetic construct
  source 1..75: mol_type = other DNA
tattaccgatccggcaaccggtgcggttatcgtcaagaaaggccaacaacttagctcgttcgcccaactgcgcga

SEQ ID NO: 223517 - DNA, 75 bp, synthetic construct
  source 1..75: mol_type = other DNA
ctgcgtgctcctaagaccaataccgatgatgaggaaaggcaaactgccgtcggtggcccttctcttgaagatctg

SEQ ID NO: 223518 - DNA, 75 bp, synthetic construct
  source 1..75: mol_type = other DNA
acgcgtacggcggcggtggctgactactatgcccctattcgttccggtactgacattgctttcctgtcaggcgta

SEQ ID NO: 223519 - DNA, 75 bp, synthetic construct
  source 1..75: mol_type = other DNA
aggtcgctggttgcagtggcactggaaaggtgcggacgccccggggattgcgctgactgatggcgagatcctctc

SEQ ID NO: 223520 - DNA, 75 bp, synthetic construct
  source 1..75: mol_type = other DNA
tgctggattttcgccggtagctggacgccagaaggcaaccagatggcgcgtcgtgataacgccgatccgtctggc

SEQ ID NO: 223521 - DNA, 75 bp, synthetic construct
  source 1..75: mol_type = other DNA
tggtttcatgccgacggtgcagcgccggggaccatccatgaaatggagtcgtatcacggtatgttagcctgtgtg

SEQ ID NO: 223522 - DNA, 75 bp, synthetic construct
  source 1..75: mol_type = other DNA
ggttaacaacctggctggtctggcgtcgcggtgcgaaaacgcgcccgctagaggcgtttattgaactgctggatg

SEQ ID NO: 223523 - DNA, 75 bp, synthetic construct
  source 1..75: mol_type = other DNA
gaaaatcaacgtttacgtctctctcctgccggacataactttttacgctacagccaacaaattctggcgctggta

SEQ ID NO: 223524 - DNA, 75 bp, synthetic construct
  source 1..75: mol_type = other DNA
ggtatcccgtggcatgagctgccagcttcacacaggggaaacaatcagatgagcttgcctttacctcagaattaa

SEQ ID NO: 223525 - DNA, 75 bp, synthetic construct
  source 1..75: mol_type = other DNA
ggggatcatgatagatgatattgtcgccggggtgatctccgctggcatcctgtactttattggtcatcactggcc

SEQ ID NO: 223526 - DNA, 75 bp, synthetic construct
  source 1..75: mol_type = other DNA
ggggatcatgattgacgatattgtcgccggggtgatctccgctggcatcctgtattttatcggtcatcactggcc

SEQ ID NO: 223527 - DNA, 75 bp, synthetic construct
  source 1..75: mol_type = other DNA
taagcgaaagtaataaacaattaaatgccctgggctggattatggagatgattcaggatacgccctttatgcgcg

SEQ ID NO: 223528 - DNA, 75 bp, synthetic construct
  source 1..75: mol_type = other DNA
gggcggcgaccctgatcccgtacctgtcagggtgatttttttgctcgccttaggcgaaagtaacaaacaattaaa

SEQ ID NO: 223529 - DNA, 75 bp, synthetic construct
  source 1..75: mol_type = other DNA
gcagtggtcttgggctggcgtttgtcagcgaagttgcccgtttgctcaatggcgaagtcacgctgcacaacatgc

SEQ ID NO: 223530 - DNA, 75 bp, synthetic construct
  source 1..75: mol_type = other DNA
catctgcccgtatccgcaccagtcgtccggaaaatgattcaaacaccgtgcgacaaaagtattaccagtgtaaca

SEQ ID NO: 223531 - DNA, 75 bp, synthetic construct
  source 1..75: mol_type = other DNA
acgtacccaacggggctgcctaccgaaccaccgtgtgtcgccattccgcacacggaccataaacatgtcaggcac

SEQ ID NO: 223532 - DNA, 75 bp, synthetic construct
  source 1..75: mol_type = other DNA
gggcggcgatcctgaccccgtacctgtcagggtgatttttttgctcgccttaagtgaaagtaataaacaattaaa

SEQ ID NO: 223533 - DNA, 75 bp, synthetic construct
  source 1..75: mol_type = other DNA
catcgtcgttcaccgctggagcatctctggcagttaaaagaccaactggtgaatgaaggtgaactagtgctggaa

SEQ ID NO: 223534 - DNA, 75 bp, synthetic construct
  source 1..75: mol_type = other DNA
cctcgctggcagcggaagagcgtgacgggcagacactgcaggataccggacgtctgatggggtcagtatcaaccg

SEQ ID NO: 223535 - DNA, 75 bp, synthetic construct
  source 1..75: mol_type = other DNA
ctatctgccggttgatgaacagggtgagctgtctgtcgaggccaaactgtcggttttagatactattctgcgtca

SEQ ID NO: 223536 - DNA, 75 bp, synthetic construct
  source 1..75: mol_type = other DNA
acgcagcctttacgcgtattacgtaatgatgtggtcgcgaacgtctggccgctcaagttttatctgccgattgtc

SEQ ID NO: 223537 - DNA, 75 bp, synthetic construct
  source 1..75: mol_type = other DNA
ttgaatgggttaaacactgtcagcaccacagagtaccgttgacgacatataaatgccctggatgtggtgaacaga

SEQ ID NO: 223538 - DNA, 75 bp, synthetic construct
  source 1..75: mol_type = other DNA
ttatgacgcaatgctcacccgaaaaggaaattcgggattccctgacatgttgtccgtggtgcagcgcggttttct

SEQ ID NO: 223539 - DNA, 75 bp, synthetic construct
  source 1..75: mol_type = other DNA
ggggacggtgagctgcagcctgaagtggttgtccctatcctcgatacgattgtccgccatcttgaagcagcggcc

SEQ ID NO: 223540 - DNA, 75 bp, synthetic construct
  source 1..75: mol_type = other DNA
atgaatctggcggatgttgataaaaccggagccgtgcagccggggagtcgggtcacctggcgctataaattcggc

SEQ ID NO: 223541 - DNA, 75 bp, synthetic construct
  source 1..75: mol_type = other DNA
agcagcacggtctgtttaaacagtggtccaatgcggtggaatttctgcctgaaattaaaccgtatcgtcttgatt

SEQ ID NO: 223542 - DNA, 75 bp, synthetic construct
  source 1..75: mol_type = other DNA
ttgttaccgttaggtattgaacagcttccggcactgaaagcctttgataccgtcttttcgatgggcgtgctttat

SEQ ID NO: 223543 - DNA, 75 bp, synthetic construct
  source 1..75: mol_type = other DNA
aacaacgctggtacggtctggaacaggacgaaggcgcgctggggcgatcgatggaacgctcgcaacagttcctgc

SEQ ID NO: 223544 - DNA, 75 bp, synthetic construct
  source 1..75: mol_type = other DNA
tttccgctgggagaatggcaacggcatgttgacgcaactcaaccgccagttcccgaccattagcctgttagacat

SEQ ID NO: 223545 - DNA, 75 bp, synthetic construct
  source 1..75: mol_type = other DNA
atcctcaagacgctgggggcagggcgagcgcaactgcgtaagctaatcgtcggtcagtggttgatggtgctggcg

SEQ ID NO: 223546 - DNA, 75 bp, synthetic construct
  source 1..75: mol_type = other DNA
gctcagacaattaaaaataaggtcgctacgtttcgtgaggatattatcgaaagcaataaaggtaaagttcgtgaa

SEQ ID NO: 223547 - DNA, 75 bp, synthetic construct
  source 1..75: mol_type = other DNA
aggagaatccggaacgggtattcagggatactcacccggaaggtaaccctgcgagtgatattctgtacttactgg

SEQ ID NO: 223548 - DNA, 75 bp, synthetic construct
  source 1..75: mol_type = other DNA
aattcgttggctgcatggatacatttctgtggatggcaaaaagagctggctacacgattattccaccagcaaagg

SEQ ID NO: 223549 - DNA, 75 bp, synthetic construct
  source 1..75: mol_type = other DNA
gtgccggtatttggcctgatcgcgatgggcaagggcagctttatgcagggcattgagcaactcaccaccgttcac

SEQ ID NO: 223550 - DNA, 75 bp, synthetic construct
  source 1..75: mol_type = other DNA
ccattgagctttatttcaaatatggtaagaagctggctcccgtcgtacgcgaactgggctacccttcgaaaagga

SEQ ID NO: 223551 - DNA, 75 bp, synthetic construct
  source 1..75: mol_type = other DNA
ttcgctaattgcttcaaaagaaaaagaattaatcatttcaaatgctggaaaattacgttctggaaattttgataa

SEQ ID NO: 223552 - DNA, 75 bp, synthetic construct
  source 1..75: mol_type = other DNA
gtattttattcgtgatggctattcatttcatagttcgctgaacgtggagatctttatttgcagattccggcggga

SEQ ID NO: 223553 - DNA, 75 bp, synthetic construct
  source 1..75: mol_type = other DNA
atggctggttggtttgaactcaataagagcagtgaaaatcagttccggtttgtgctaaaagcgggcaatggcgag

SEQ ID NO: 223554 - DNA, 75 bp, synthetic construct
  source 1..75: mol_type = other DNA
aggtgctgaacgcggttaaccaacatgctttgttctttgccgcggccttgccgcgtaccctttccacgccgctgt

SEQ ID NO: 223555 - DNA, 75 bp, synthetic construct
  source 1..75: mol_type = other DNA
tgctcttgagttcagtggtatggcatccgtacagccaagtggaagggcgcaaataacaaacgctccggtggagaa

SEQ ID NO: 223556 - DNA, 75 bp, synthetic construct
  source 1..75: mol_type = other DNA
tggaaataataaaggctcgatgctcattatctggcacccataccccgtacacactgccactttacgaccgttgat

SEQ ID NO: 223557 - DNA, 75 bp, synthetic construct
  source 1..75: mol_type = other DNA
gggcaatctgctgttttgtcctcttcattgtggtgtgcctttttctggcgacgcacatgaaaggcgcttttcggg

SEQ ID NO: 223558 - DNA, 75 bp, synthetic construct
  source 1..75: mol_type = other DNA
aatagcttaatgtggtgtctgtatggtgagactgcacatggcgtcaaaggcgatgacgtgctgtcgacgggccat

SEQ ID NO: 223559 - DNA, 75 bp, synthetic construct
  source 1..75: mol_type = other DNA
tcattaatggctaaatattccgcaccaaataaaacggatcaacaacaagataatgaaaatgacgacagttatttt

SEQ ID NO: 223560 - DNA, 75 bp, synthetic construct
  source 1..75: mol_type = other DNA
agcgccgtcttgagattgcccgctgcatggtgacgcagccggagattttaatgctcgacgaaccggcagcaggtc

SEQ ID NO: 223561 - DNA, 75 bp, synthetic construct
  source 1..75: mol_type = other DNA
gcccagagcgaagccctcgaccgtgccgcaacctggcttgagcgcattggtttgctcgaacacgctaaccgtcag

SEQ ID NO: 223562 - DNA, 75 bp, synthetic construct
  source 1..75: mol_type = other DNA
atatcagtaaatacattaaggatgatattggctttagttatcaaggatatttccgctcaggctggggaacaagta

SEQ ID NO: 223563 - DNA, 75 bp, synthetic construct
  source 1..75: mol_type = other DNA
tttactctcgtgattttacgcgtaccagtcagatgaataccaattctgtggatgttcgttatcgcaatatcccgt

SEQ ID NO: 223564 - DNA, 75 bp, synthetic construct
  source 1..75: mol_type = other DNA
aaaatatcatgcagttcagtgatatttatctgacaacgcgaggttttttacccttcgcacgagaggcagaattct

SEQ ID NO: 223565 - DNA, 75 bp, synthetic construct
  source 1..75: mol_type = other DNA
ggatgtggttaaaaccaaattggagtcgacaatctcgaccattgaggcaacacagtcagaaattgagtcagcgaa

SEQ ID NO: 223566 - DNA, 75 bp, synthetic construct
  source 1..75: mol_type = other DNA
actgatggataccaccgggctgttatgtcacctggggattattgataacggcagcgcttattacattttgaaagt

SEQ ID NO: 223567 - DNA, 75 bp, synthetic construct
  source 1..75: mol_type = other DNA
catctacgccagtcaggaagcgatgccagatctgcccggtatgtccgacaagagcctcaaaaccatcgttgaaga

SEQ ID NO: 223568 - DNA, 75 bp, synthetic construct
  source 1..75: mol_type = other DNA
cttgaactgtacccgcaggagatcgtctcgttaatcggccctaacggtgccggaaaaaccacggtctttaactgc

SEQ ID NO: 223569 - DNA, 75 bp, synthetic construct
  source 1..75: mol_type = other DNA
tgcggattattattttgatcacacgccaccggatgtggatctgctcggttccattgccaaagtagcagcctcagc

SEQ ID NO: 223570 - DNA, 75 bp, synthetic construct
  source 1..75: mol_type = other DNA
gaaggcatcccgccggaatttctgtcacattacctgcctgatgcaccctttgcatgtcttaaacaaaatgacggg

SEQ ID NO: 223571 - DNA, 75 bp, synthetic construct
  source 1..75: mol_type = other DNA
tatttttgttcagcatcagccagatgcagtgatgcacctcgcggctgagagccacgttgatcgttcaataactgg

SEQ ID NO: 223572 - DNA, 75 bp, synthetic construct
  source 1..75: mol_type = other DNA
ccgcctatgcgccgagtagtccttattcggcttcaaaagcctccagcgaccatctcgttcgtgcctggctgcgta

SEQ ID NO: 223573 - DNA, 75 bp, synthetic construct
  source 1..75: mol_type = other DNA
gcagtgatgcacctggctgctgaaagccatgttgaccgttcaattacaggccctgcggcatttattgaaaccaat

SEQ ID NO: 223574 - DNA, 75 bp, synthetic construct
  source 1..75: mol_type = other DNA
caggatttattggttctgctgtagttcgtcacattataaataatacgcaggacagtgttgttaatgtcgataaat

SEQ ID NO: 223575 - DNA, 75 bp, synthetic construct
  source 1..75: mol_type = other DNA
gggattcgtaaaacaattaactggtatttgaataataatgattggtgccgacgagttcaagatggctcttatcaa

SEQ ID NO: 223576 - DNA, 75 bp, synthetic construct
  source 1..75: mol_type = other DNA
ttgaataataatgattggtgccggcgagttcaagatggctcttatcaacgtgagcgtttgggggtaattagatga

SEQ ID NO: 223577 - DNA, 75 bp, synthetic construct
  source 1..75: mol_type = other DNA
caacaccggcactgacacccctgatgctggatgaggccaccgggaaactggtggtctgggacggacagaaagccg

SEQ ID NO: 223578 - DNA, 75 bp, synthetic construct
  source 1..75: mol_type = other DNA
atggtgacgaaaaccatcactgaacaacgtgcggaagtacgtatttttgccggtaatgatccggctcacactgcc

SEQ ID NO: 223579 - DNA, 75 bp, synthetic construct
  source 1..75: mol_type = other DNA
tccgtcagaactccttgctgcgactggctcctggcgacgatgcggaagtggtgtttaatgctctgccaggtaagg

SEQ ID NO: 223580 - DNA, 75 bp, synthetic construct
  source 1..75: mol_type = other DNA
gaaaccacaggaaacgtttgagagcgggattcgtaaaacagtggaatggtacctgtccaatacaaaatgggttga

SEQ ID NO: 223581 - DNA, 75 bp, synthetic construct
  source 1..75: mol_type = other DNA
ttccgcatccaaagcatccagcgatcatttagtccgcgcgtggaaacgtacctatggtttaccgaccattgtgac

SEQ ID NO: 223582 - DNA, 75 bp, synthetic construct
  source 1..75: mol_type = other DNA
gggcgcgggtattggtgcgctctcttcttcgaagaaagatcgcggtaaaggcgcgctgattggcgcagcagcagg

SEQ ID NO: 223583 - DNA, 75 bp, synthetic construct
  source 1..75: mol_type = other DNA
tccggatgaagtaaataacaatgaaacattgccgttatttacagaaacaaaagcctatgcgccaagtagtccgta

SEQ ID NO: 223584 - DNA, 75 bp, synthetic construct
  source 1..75: mol_type = other DNA
ataacaacggccacctggcaggtcaacgtgccggagcggcctccttttgatatacagcatgtcattcactggctc

SEQ ID NO: 223585 - DNA, 75 bp, synthetic construct
  source 1..75: mol_type = other DNA
aatggccggtgatctgattattgtcacggacagtgacaagaacaccaaaaacaaaaacaacgcagtcagcacgga

SEQ ID NO: 223586 - DNA, 75 bp, synthetic construct
  source 1..75: mol_type = other DNA
gtggtctgggacggacagaaggcaggccatgtggttggcatactggtactgccgcttgaaggtacagagacggtg

SEQ ID NO: 223587 - DNA, 75 bp, synthetic construct
  source 1..75: mol_type = other DNA
agcggcggcggtcacgggattgatatcaccggcgacagcgcgacggtggacaacaaaggcggcatgactgtcacc

SEQ ID NO: 223588 - DNA, 75 bp, synthetic construct
  source 1..75: mol_type = other DNA
gacctgtggcttattgcaggtattaccgcatggtcagggttatataacgccatatggtgtgtgttgctgggcaca

SEQ ID NO: 223589 - DNA, 75 bp, synthetic construct
  source 1..75: mol_type = other DNA
cctgcccggagagacaggcacgctgataacaacggccacctggcaggttaacgtgccggagcgaccgccttttga

SEQ ID NO: 223590 - DNA, 75 bp, synthetic construct
  source 1..75: mol_type = other DNA
cctgaaagtgtggatgaacacaaaaaggccaatgcctttgtcggcacagccctgagtcacgcggcgctgccgtaa

SEQ ID NO: 223591 - DNA, 75 bp, synthetic construct
  source 1..75: mol_type = other DNA
ttaagaaccgacagaaggataaatggcgcgacaaggttgatcacgagctaacaggcaaagacggcggcgcaatcc

SEQ ID NO: 223592 - DNA, 75 bp, synthetic construct
  source 1..75: mol_type = other DNA
caacaccggcactgacgcccctgatgctggatgaggccaccgggaaactggtggtctgggacggacaaaaagccg

SEQ ID NO: 223593 - DNA, 75 bp, synthetic construct
  source 1..75: mol_type = other DNA
gatattctgcagaatccggacattcgtgcggaactgccgaaatatgctaactggccgaccttcccgcaactgtgg

SEQ ID NO: 223594 - DNA, 75 bp, synthetic construct
  source 1..75: mol_type = other DNA
caacaccggcactgacgcccctgatgctggatgaagccagcgggaaactggtggtctgggacggacagaaagccg

SEQ ID NO: 223595 - DNA, 75 bp, synthetic construct
  source 1..75: mol_type = other DNA
cggcggtgccggatgagatgattgctgtcttccctgttgccagcgatctcgccctgcctgattaccagttgctgc

SEQ ID NO: 223596 - DNA, 75 bp, synthetic construct
  source 1..75: mol_type = other DNA
taatatctgcaatatacgcctttatattgacaatctcttttggtatgagaggagcattgattgctgtagtttcaa

SEQ ID NO: 223597 - DNA, 75 bp, synthetic construct
  source 1..75: mol_type = other DNA
tatcctgattttttcacagcaagttacctggttgcaggaaagtgggatgcggaacaggttgctccaatagctaaa

SEQ ID NO: 223598 - DNA, 75 bp, synthetic construct
  source 1..75: mol_type = other DNA
ggcgactggtttattgcgctggcagataatcaacagaaacaagcgaaaacggcgctggaaaaatgtcagcatttg

SEQ ID NO: 223599 - DNA, 75 bp, synthetic construct
  source 1..75: mol_type = other DNA
atgaattcggaggtttgtttgcatctggtgaaagagcggtccgggattctgctgcccggggaagtatcagaaagg

SEQ ID NO: 223600 - DNA, 75 bp, synthetic construct
  source 1..75: mol_type = other DNA
ggcgatgtgaaaacctttactctcaaatctggtaaacaggccaaatttgtgaaaacggttgtgctaagcggtgag

SEQ ID NO: 223601 - DNA, 75 bp, synthetic construct
  source 1..75: mol_type = other DNA
atagcggtagaattcgaaaaaactgtaaataaaaaagacctttcaacagcagcatttgacgtaaaagatcatcat

SEQ ID NO: 223602 - DNA, 75 bp, synthetic construct
  source 1..75: mol_type = other DNA
cattcctgaatggtctgatttacgaaaaacgcggcagggatgagtctgcaccggcactggagccggaacgtcgta

SEQ ID NO: 223603 - DNA, 75 bp, synthetic construct
  source 1..75: mol_type = other DNA
taaagagatggtaatggatttctttcgtgagaataattcctgttctacattacgattttttatggctggttatcg

SEQ ID NO: 223604 - DNA, 75 bp, synthetic construct
  source 1..75: mol_type = other DNA
gcaaacacaaataacaaagcaataaatgctacagctattacacaagtttttggtgacggagttcgacttattgcg

SEQ ID NO: 223605 - DNA, 75 bp, synthetic construct
  source 1..75: mol_type = other DNA
tcacgagaaggtgcaagcggacatcgtaacacatggcgtattgcttacagcatcgagcctgttcgggaatggtta

SEQ ID NO: 223606 - DNA, 75 bp, synthetic construct
  source 1..75: mol_type = other DNA
atcctgaacgtatttatgttactggtcagtcagggggatgtatgctggccatcgccatgaatatcaaatatcctg

SEQ ID NO: 223607 - DNA, 75 bp, synthetic construct
  source 1..75: mol_type = other DNA
ataatcaacagaaacaagcgaaaacggcgctggaaaaatgtcagcatttgccctttattcttgaagtacacagtc

SEQ ID NO: 223608 - DNA, 75 bp, synthetic construct
  source 1..75: mol_type = other DNA
atggtaacgaaaaacatcactgagcagcgtgcggaagtacgtatttttgccggtaatgatccggctcataccgcc

SEQ ID NO: 223609 - DNA, 75 bp, synthetic construct
  source 1..75: mol_type = other DNA
agttgctggtgcggatttggtatacgtcggtgtcgagccgccaaaaccaaaagccgaagtcattctggtgccaga

SEQ ID NO: 223610 - DNA, 75 bp, synthetic construct
  source 1..75: mol_type = other DNA
ttcagaaaggttccagttcacacaaccttttactgcgtgcactgcgtcaggccggacttaagtttaccgatatcc

SEQ ID NO: 223611 - DNA, 75 bp, synthetic construct
  source 1..75: mol_type = other DNA
ggcgcaggaagcctccgtgaagtcatcggcggcggaacaaaaacagatccagagccagctggatagcctggtgtt

SEQ ID NO: 223612 - DNA, 75 bp, synthetic construct
  source 1..75: mol_type = other DNA
actcagcaggcaaaggccacgcgggataaattcgctaaagagtatcagcgttacgcacgcggcagccaggcgaaa

SEQ ID NO: 223613 - DNA, 75 bp, synthetic construct
  source 1..75: mol_type = other DNA
ggcggtttactctgatcatttcagccatgtctcggtgatgcgcaaagtgctattacgcatgaccagctgggtgca

SEQ ID NO: 223614 - DNA, 75 bp, synthetic construct
  source 1..75: mol_type = other DNA
agagtcactagaaagccaaaaaataaattttacaactgaagtcattacgtcgcgtattgaaccagcaaaccgtta

SEQ ID NO: 223615 - DNA, 75 bp, synthetic construct
  source 1..75: mol_type = other DNA
ccaagaagcacgggcgtgctttatcccccggaaaaatgtcggagcatcatttctggttgctggctgaaatctctc

SEQ ID NO: 223616 - DNA, 75 bp, synthetic construct
  source 1..75: mol_type = other DNA
tcgcgtggatattggcaacctgcattatattgataccggtgctgtctttgggggagaactgactcttgtgcaatt

SEQ ID NO: 223617 - DNA, 75 bp, synthetic construct
  source 1..75: mol_type = other DNA
agcccgatcaaaaccgtagccgatcttaaaggtcacaaagttgcctttcagaaaggttccagttcacacaacctt

SEQ ID NO: 223618 - DNA, 75 bp, synthetic construct
  source 1..75: mol_type = other DNA
gtgttgagttacgtaatatcctcaatagcttaaatggcgaagcctcacgttggcctggtgactcagaatttctca

SEQ ID NO: 223619 - DNA, 75 bp, synthetic construct
  source 1..75: mol_type = other DNA
atatattctggcatccattcgattatcattgcgtgctacaggcctttctgatttggaagggttagtattgacttg

SEQ ID NO: 223620 - DNA, 75 bp, synthetic construct
  source 1..75: mol_type = other DNA
tgtttgttgccgtgcagcgcgcacgaaccttcggtgaactggagcgtatctcaggcatgatttcggtgcttaccg

SEQ ID NO: 223621 - DNA, 75 bp, synthetic construct
  source 1..75: mol_type = other DNA
gatattgagcttatcaaagtcgtcggggttcatggtccggtgaaagcggtgtatctgattattgaggattgttga

SEQ ID NO: 223622 - DNA, 75 bp, synthetic construct
  source 1..75: mol_type = other DNA
tgagtttattgatgagcggaaattacgaggtgaatcacatgaaacagtaatagcaatttttaattgtgaactaca

SEQ ID NO: 223623 - DNA, 75 bp, synthetic construct
  source 1..75: mol_type = other DNA
agcaggcgcatcggtttactcggcttccgagctggcagcgcaggagttcccggagctcgatgtttcgctgcgtgg

SEQ ID NO: 223624 - DNA, 75 bp, synthetic construct
  source 1..75: mol_type = other DNA
cgaaaccgaacgtttctatctcgacgtgcagaagcagttcccgaaagtgaccgcacagaaagtgatcgtcagcga

SEQ ID NO: 223625 - DNA, 75 bp, synthetic construct
  source 1..75: mol_type = other DNA
aatataacggtgtgaccctcacgctgtcggagctgtccgcgctgcagcgtattgagcatctggctttgctgaaac

SEQ ID NO: 223626 - DNA, 75 bp, synthetic construct
  source 1..75: mol_type = other DNA
gccagcagtagtggaaaggatcaacaacactttccgtcgtgccgatcagatccagtggtctactggtattgagcc

SEQ ID NO: 223627 - DNA, 75 bp, synthetic construct
  source 1..75: mol_type = other DNA
tgaccaggtgcaaaagctactgtatgcagcagagccggagatcaggaacattatagtaatgggactgttttcagg

SEQ ID NO: 223628 - DNA, 75 bp, synthetic construct
  source 1..75: mol_type = other DNA
tatataagcgaaaagacgggatctggatgtttcaaatcttcgttcctaagtatcttcgattcttatatccgtgtc

SEQ ID NO: 223629 - DNA, 75 bp, synthetic construct
  source 1..75: mol_type = other DNA
atgctgatgcggcggatctgatcacctccgattgcgacccgtatgacagcgaatttattaccggcgagcgtacca

SEQ ID NO: 223630 - DNA, 75 bp, synthetic construct
  source 1..75: mol_type = other DNA
tggaactggcgcgtcgctttgcacaagctatccacgcgaaatatccgggcaaactgctggcttataactgctcgc

SEQ ID NO: 223631 - DNA, 75 bp, synthetic construct
  source 1..75: mol_type = other DNA
atgccgatgcggcggatctgattacctccgattgcgacccatatgacagcgaatttattaccggcgagcgtacca

SEQ ID NO: 223632 - DNA, 75 bp, synthetic construct
  source 1..75: mol_type = other DNA
gaagacctctatctgccctacaaacccaaacgccgtacccgtggacaaatcgccattgaagcaggtcttgaacca

SEQ ID NO: 223633 - DNA, 75 bp, synthetic construct
  source 1..75: mol_type = other DNA
tttatcagaacgataaaaccaccaaagttgattatctacactcccttggggcgaagtacgacttcaaaaataact

SEQ ID NO: 223634 - DNA, 75 bp, synthetic construct
  source 1..75: mol_type = other DNA
atgatctggcagcctgagttcacagataaaatactctccaggaaacccggggcggttcaatttgaatataacgga

SEQ ID NO: 223635 - DNA, 75 bp, synthetic construct
  source 1..75: mol_type = other DNA
gatttatataagagatgagtttattgatgagcgaaaattacgaggtaaatcaccagaaactataatggaaatttt

SEQ ID NO: 223636 - DNA, 75 bp, synthetic construct
  source 1..75: mol_type = other DNA
ggatgagcggggctgttcatgtggatacggatatcaccgaagtggcgaaaaataacgcgctgactgatgatgatt

SEQ ID NO: 223637 - DNA, 75 bp, synthetic construct
  source 1..75: mol_type = other DNA
atgttcaaactgcacttcaccgaatacgacaaccactccgacatcccaagctggggcggtggttacggcaacatt

SEQ ID NO: 223638 - DNA, 75 bp, synthetic construct
  source 1..75: mol_type = other DNA
tgcgtttacggcgattgaaatggcggaaaacggcgacagctctcacccgaacgaaatcgcgttttcaaaaagtaa

SEQ ID NO: 223639 - DNA, 75 bp, synthetic construct
  source 1..75: mol_type = other DNA
tactgacagcaccgaagtggcgaaaaataacacgctgactgatgatgatttttctgcgggaaagtcttcgacggc

SEQ ID NO: 223640 - DNA, 75 bp, synthetic construct
  source 1..75: mol_type = other DNA
atcgagcatcttgccctgctgaaacggcgggcagaagaggctgaagccagcggcaacctgcaggtgagtgtggaa

SEQ ID NO: 223641 - DNA, 75 bp, synthetic construct
  source 1..75: mol_type = other DNA
atgatcgtgcaaaaagagctggtcgctacttatgattatgaagtccctgtacctgaagatccgttttccttcaga

SEQ ID NO: 223642 - DNA, 75 bp, synthetic construct
  source 1..75: mol_type = other DNA
ctatttacgattatgaggcccctgtacctgaagagccgttttccttcaggcttgagatccataaacgctctgaat

SEQ ID NO: 223643 - DNA, 75 bp, synthetic construct
  source 1..75: mol_type = other DNA
gtatgtatgagtttgtggtgaatgatgcccctgaacaggcagaggactccgggcctgcagagcctgtttctgcgg

SEQ ID NO: 223644 - DNA, 75 bp, synthetic construct
  source 1..75: mol_type = other DNA
gcccggcaggcatactcccgggaatacgacaaggaatcagctgaaaccgctgattttggctcttatgaaataaag

SEQ ID NO: 223645 - DNA, 75 bp, synthetic construct
  source 1..75: mol_type = other DNA
atccagtttgccagcgatgttatgttgacgcgctgtgaactgaccagcgaggcgaaggcggcagaagctgcaata

SEQ ID NO: 223646 - DNA, 75 bp, synthetic construct
  source 1..75: mol_type = other DNA
agcttcggacaaaaatggcctcattcacggtttggtttatgtcgtgttggtgcttattcgttgtcgcaatgttta

SEQ ID NO: 223647 - DNA, 75 bp, synthetic construct
  source 1..75: mol_type = other DNA
gcttgcgaaagggtacgaggtaaaggcgtatgatatagaaagaacgagcatctggctgctgaaacaccttcagta

SEQ ID NO: 223648 - DNA, 75 bp, synthetic construct
  source 1..75: mol_type = other DNA
gtatgacttatctgcccatatgctggatgtcgtggcacaagctgccttgccttgcagaatgatggctctttcacc

SEQ ID NO: 223649 - DNA, 75 bp, synthetic construct
  source 1..75: mol_type = other DNA
tgccggtttttccccgaaacagacgtccgtcataaataaagactccgtactgcaggccgcccggcaggcatactc

SEQ ID NO: 223650 - DNA, 75 bp, synthetic construct
  source 1..75: mol_type = other DNA
aagaagggaataagccgccgaaatccgcgcgccagattttccagtatctgcgtgagttagcggaaaacgaagggt

SEQ ID NO: 223651 - DNA, 75 bp, synthetic construct
  source 1..75: mol_type = other DNA
aaacccggtgaaaggctttggtggattgatgatcaaccagatgaaaggactctaccattagaggtcagattatat

SEQ ID NO: 223652 - DNA, 75 bp, synthetic construct
  source 1..75: mol_type = other DNA
agcaggcggttaagttctttggtgaattagatgctgatattatctgcgggaaaaaacgttctgcttttttacctg

SEQ ID NO: 223653 - DNA, 75 bp, synthetic construct
  source 1..75: mol_type = other DNA
caaaccgcgttaatccgggtgatgatgttgaaaatgttttcaacccgattttcgacttcgtgaagcaaactaaag

SEQ ID NO: 223654 - DNA, 75 bp, synthetic construct
  source 1..75: mol_type = other DNA
attcctgtcaccccggatgataaagcatggcaggaaagtattaagaccgccctcgcgttaagtgccgctggcgtt

SEQ ID NO: 223655 - DNA, 75 bp, synthetic construct
  source 1..75: mol_type = other DNA
ccgtacgcacccggattaagttttttttccgtcctgatggtctgcctttttctcctgatgatgcatataagaaag

SEQ ID NO: 223656 - DNA, 75 bp, synthetic construct
  source 1..75: mol_type = other DNA
atgaataccagaaatctttttcccctgatttttactgttgcatcattctccgcctccgccggtaactgggccgtc

SEQ ID NO: 223657 - DNA, 75 bp, synthetic construct
  source 1..75: mol_type = other DNA
attatctttacgtaaacagtgacgggatttatatcatccagcttcatattcccgtttacatgcgccacctctgga

SEQ ID NO: 223658 - DNA, 75 bp, synthetic construct
  source 1..75: mol_type = other DNA
acagattgcctaatggacaggggtttataagcaaccttgcaggttttcatcatttcattggtgagcaagacctta

SEQ ID NO: 223659 - DNA, 75 bp, synthetic construct
  source 1..75: mol_type = other DNA
tcacagttgaagggatacggtgcttctacgtcagcaaatctaaaactaaagcgggcgtaaggcacgtccccatac

SEQ ID NO: 223660 - DNA, 75 bp, synthetic construct
  source 1..75: mol_type = other DNA
ttgttccctcactcgaacaaagtaaaaagaatcgacggtaagaaaggcccgttctattctcaagcattctcacgt

SEQ ID NO: 223661 - DNA, 75 bp, synthetic construct
  source 1..75: mol_type = other DNA
agttgtggagaaaaagcacatctacacgagatctgaatgaggcgagaagattcagaaaccatctattattagaat

SEQ ID NO: 223662 - DNA, 75 bp, synthetic construct
  source 1..75: mol_type = other DNA
aatacatgactgtttatagtgaacgccgggcattctctaccctaagcaaatcagcgagggccgtagaagtgtttc

SEQ ID NO: 223663 - DNA, 75 bp, synthetic construct
  source 1..75: mol_type = other DNA
acttgatggtatctgtgatttatttgagcaaaaggtttctgataatattgattcatctattgatacaagggtttc

SEQ ID NO: 223664 - DNA, 75 bp, synthetic construct
  source 1..75: mol_type = other DNA
agcactgcgtatacagcgatcctggtccaggagggcatcacgtagtaacgaacgtgatcaagatatggagcgttg

SEQ ID NO: 223665 - DNA, 75 bp, synthetic construct
  source 1..75: mol_type = other DNA
caaatcaggaatgtccgctctggcattatatgaagctacgcgtggcgtatgggcaaaggttccaagagacgagaa

SEQ ID NO: 223666 - DNA, 75 bp, synthetic construct
  source 1..75: mol_type = other DNA
tgccggggctgactttgcaggtgctgccggtgcccccgcgtcagattccgttccagtccgggtacatctattacg

SEQ ID NO: 223667 - DNA, 75 bp, synthetic construct
  source 1..75: mol_type = other DNA
cccggaatcgctggcgcgcttttcggtgcatgaaaatgaaattcgcgatgccaactcgctggggcgtggcgcaca

SEQ ID NO: 223668 - DNA, 75 bp, synthetic construct
  source 1..75: mol_type = other DNA
aatgcgccgggccatacgccgctgccgacgccgttggccattctgccggagcatcttaaccagcagatttgcctg

SEQ ID NO: 223669 - DNA, 75 bp, synthetic construct
  source 1..75: mol_type = other DNA
atgcaagaaaaaatgaaatttgactctgcattcgatacacccaatcatgaaatagttaatatgtatgaattaaaa

SEQ ID NO: 223670 - DNA, 75 bp, synthetic construct
  source 1..75: mol_type = other DNA
ttgtcattacgctgtttgcccatgcacacgccagtggttttcgtttccagacgttcctcggtgcatggaagtttt

SEQ ID NO: 223671 - DNA, 75 bp, synthetic construct
  source 1..75: mol_type = other DNA
ctctattacattcgcctgcgtcagatggcgctggaaggcactgaaattgaaggctgcgtctcctgtgcactttaa

SEQ ID NO: 223672 - DNA, 75 bp, synthetic construct
  source 1..75: mol_type = other DNA
tggcgctggacggtgcgacatttagtgcacaaacaaccctgaataacggaaccaacaccattccgttccaggcgc

SEQ ID NO: 223673 - DNA, 75 bp, synthetic construct
  source 1..75: mol_type = other DNA
cgatgttgctggcgcgcgaacgcggtgaaaccttcgccgggttcaaacagtcacgctatgccagtggtgaatatt

SEQ ID NO: 223674 - DNA, 75 bp, synthetic construct
  source 1..75: mol_type = other DNA
gagatgctgtcaggacgctttcagcctgcaacaccgacattcctcaactgcggtaagcagcagcgcggcgaactg

SEQ ID NO: 223675 - DNA, 75 bp, synthetic construct
  source 1..75: mol_type = other DNA
aatcaatcttctggcgtgattccggtgatgaaaatgctggaagacgcattttcctatgccaaccaactcggcgcg

SEQ ID NO: 223676 - DNA, 75 bp, synthetic construct
  source 1..75: mol_type = other DNA
ggcatgacgctcaacagttttgccttcgaccgtccggttgagtggatgaataactggacgctcttcttctgggca

SEQ ID NO: 223677 - DNA, 75 bp, synthetic construct
  source 1..75: mol_type = other DNA
ataaaaatcaataaagataatataaaaatacaggatctttcctccatggaggaagatacagttttcttcttatca

SEQ ID NO: 223678 - DNA, 75 bp, synthetic construct
  source 1..75: mol_type = other DNA
caggctcgctatattgctgttgatggacaagccactgctggtacagccaacgccgacgccacctttaaagttcag

SEQ ID NO: 223679 - DNA, 75 bp, synthetic construct
  source 1..75: mol_type = other DNA
gctctgtccctcagttctacagcggctctggccgctgccacgacggttaatggtgggaccgttcactttaaaggg

SEQ ID NO: 223680 - DNA, 75 bp, synthetic construct
  source 1..75: mol_type = other DNA
ctttgtggtctgtatcgcttgttcgcgttttggttcggtgaagctcgggccagaacaatcaaaaccggaattcag

SEQ ID NO: 223681 - DNA, 75 bp, synthetic construct
  source 1..75: mol_type = other DNA
cgctcggtatcggtgtggtgcagcttaactatggcttgagcgtactgtttgatattcccgattcgatggcggcga

SEQ ID NO: 223682 - DNA, 75 bp, synthetic construct
  source 1..75: mol_type = other DNA
ggcgtaaggggatcaaaacgctctattacattcgcctgcgtcagatggcgctggaaggtactgaaattgaaggct

SEQ ID NO: 223683 - DNA, 75 bp, synthetic construct
  source 1..75: mol_type = other DNA
agaagaacgtgaagccgctccgattgaagaagaaaaaatcgaagtggctgaacgttccgaagaagacgaattaga

SEQ ID NO: 223684 - DNA, 75 bp, synthetic construct
  source 1..75: mol_type = other DNA
gaagtagttacttctggcgttattccggcagatacgatcgttctgggcgatttcagcggcattatcgttggggaa

SEQ ID NO: 223685 - DNA, 75 bp, synthetic construct
  source 1..75: mol_type = other DNA
ccagatgcgttacgtataggctatcagaaaggcagtattggtatggtgctggcaaaaagccaccagttactggaa

SEQ ID NO: 223686 - DNA, 75 bp, synthetic construct
  source 1..75: mol_type = other DNA
ctctgttgcacgcacggttctgcgtgccgtccgtgactccgtggtctctgttgcccgcgccgtatggaactggat

SEQ ID NO: 223687 - DNA, 75 bp, synthetic construct
  source 1..75: mol_type = other DNA
gtcgcgttactaagaaagccgctttcagctacaaagacttcctgaaagaaattgcagcactgaccgacgctggcg

SEQ ID NO: 223688 - DNA, 75 bp, synthetic construct
  source 1..75: mol_type = other DNA
ggaatccgttctgggtcgtcttggtgtgaaagtcctgtctggtctgacttcgccgaccgctattcctaaaatgac

SEQ ID NO: 223689 - DNA, 75 bp, synthetic construct
  source 1..75: mol_type = other DNA
gaagccgcctgtcagcaagagctggaggcctttttagcccaccgtgaccagattaccgcacttgatttagccggt

SEQ ID NO: 223690 - DNA, 75 bp, synthetic construct
  source 1..75: mol_type = other DNA
tgtatcaggacgcttacgaaatcggcgcagaaaagatcatcgacacctacgcggaagcgactcgccatgtcgatc

SEQ ID NO: 223691 - DNA, 75 bp, synthetic construct
  source 1..75: mol_type = other DNA
cacgatggtggcgctgacgctggcacaaggcgatgagacgctggcgttgcaactgaccgatgaaatgctgtcagg

SEQ ID NO: 223692 - DNA, 75 bp, synthetic construct
  source 1..75: mol_type = other DNA
tggcgggtttacttagcgtctctacacttgctgttgccgcggagtcttcgccagaggcgttacgaattggctatc

SEQ ID NO: 223693 - DNA, 75 bp, synthetic construct
  source 1..75: mol_type = other DNA
tggcgggattacttagcgtctctacgattgcggttgctgcagaatcctctcctgaagcgttacgtataggctatc

SEQ ID NO: 223694 - DNA, 75 bp, synthetic construct
  source 1..75: mol_type = other DNA
tgctgccactgctgctggcctgtctgccactgttaaccagctgcgcaccgaagcaacaaagcttgccgcccgcct

SEQ ID NO: 223695 - DNA, 75 bp, synthetic construct
  source 1..75: mol_type = other DNA
caagcaataatgctaatccaggaacgccgcaccgcccttatctccgccgccgtcaccggcaaaatcgacctacgc

SEQ ID NO: 223696 - DNA, 75 bp, synthetic construct
  source 1..75: mol_type = other DNA
tagtaaaaaatgctgcagatagaatcgttaagtggaatgctgatagcattgtcgctgctataagagaaatatcat

SEQ ID NO: 223697 - DNA, 75 bp, synthetic construct
  source 1..75: mol_type = other DNA
cacgccaagcgttttgtcaaaccggccttttttgttccgtgcatgatttatctgtcctggccgtctgccatttac

SEQ ID NO: 223698 - DNA, 75 bp, synthetic construct
  source 1..75: mol_type = other DNA
acccaaaaaatcgataccctaatcaagaaacaacaacaactcattgaactactgaaagaaaaacgtcaggccgta

SEQ ID NO: 223699 - DNA, 75 bp, synthetic construct
  source 1..75: mol_type = other DNA
tccgccgccgtcaccggcaaaatcgacctacgcaactggaccgcccccatctccgaagcggaaacacccacggag

SEQ ID NO: 223700 - DNA, 75 bp, synthetic construct
  source 1..75: mol_type = other DNA
gcctagtatgactcaagaacacttaggtaattactcattttcattgtcattcaacctcagtgagcaaaaactaat

SEQ ID NO: 223701 - DNA, 75 bp, synthetic construct
  source 1..75: mol_type = other DNA
atccagttttgtttatcaccatgccagaaagtccattaaaccggcgatatacattccctgtattctttatatgtc

SEQ ID NO: 223702 - DNA, 75 bp, synthetic construct
  source 1..75: mol_type = other DNA
gtttccgatggaagcataataagctttttctgcttctgcccccagcctttccagcaatcgtcgattgttatacca

SEQ ID NO: 223703 - DNA, 75 bp, synthetic construct
  source 1..75: mol_type = other DNA
ggtcgccgatcttgattactactggctacaggagcggggaagtatgtgccagccagcgtatatggtacttgatcg

SEQ ID NO: 223704 - DNA, 75 bp, synthetic construct
  source 1..75: mol_type = other DNA
aacccccgcgtcacccggcaaaagaacccggtttgctggctaaattgctgtggcactggccgtgggccatcaccg

SEQ ID NO: 223705 - DNA, 75 bp, synthetic construct
  source 1..75: mol_type = other DNA
ctgctgatatggccggcggccatgctgctgggtgtggccatcaccgtgaccatggcgtcattcaaaaaatacctc

SEQ ID NO: 223706 - DNA, 75 bp, synthetic construct
  source 1..75: mol_type = other DNA
ctgctgatatggccggcggccatgcttctgggggtggccatcactgtgaccatggcatctttcaagaagtattta

SEQ ID NO: 223707 - DNA, 75 bp, synthetic construct
  source 1..75: mol_type = other DNA
ttctgggattgagtggttgggagaagttccgaaacactggcacatatgcaagttaaaatggtttgctaatttgaa

SEQ ID NO: 223708 - DNA, 75 bp, synthetic construct
  source 1..75: mol_type = other DNA
tgacgctgaaatcgctacctctgcgcctggcggttagccgcctgttacgtcagccgtggtcaacattaagccagc

SEQ ID NO: 223709 - DNA, 75 bp, synthetic construct
  source 1..75: mol_type = other DNA
ctgtcgctttgcggcggctggctgggcgcgcgactggttaaggggaaggcgctgttcaggcagtttgcggggtga

SEQ ID NO: 223710 - DNA, 75 bp, synthetic construct
  source 1..75: mol_type = other DNA
atttcccgtgggagccagactggcgattgtggattgttctgccgtgcagcggtgcgctgctgctgtcgcttttcg

SEQ ID NO: 223711 - DNA, 75 bp, synthetic construct
  source 1..75: mol_type = other DNA
ctctggtagccaaatgtctgggcataacaatattttagcagttcagggaggggctggtacagcaacgaatgttgg

SEQ ID NO: 223712 - DNA, 75 bp, synthetic construct
  source 1..75: mol_type = other DNA
aaccgacttgattgatggcacgaatatactaccattccaggctcgttatattgctctcgggcagtccgtagctgg

SEQ ID NO: 223713 - DNA, 75 bp, synthetic construct
  source 1..75: mol_type = other DNA
ttcgttcttctcgcctggctaaagcgggtgacctcagctccgccgttggcttcaatatcaagctgaatgattgtg

SEQ ID NO: 223714 - DNA, 75 bp, synthetic construct
  source 1..75: mol_type = other DNA
caaataaagccgttgggcaggattattcgcgctggaatgacgtctggctaacgttgcgtggtcagtatggtgcgc

SEQ ID NO: 223715 - DNA, 75 bp, synthetic construct
  source 1..75: mol_type = other DNA
actatcagccgctgttacgtgcaatggcaaacgtgccatgtattagcgtcgataatgctcgtgaaatcctgaaca

SEQ ID NO: 223716 - DNA, 75 bp, synthetic construct
  source 1..75: mol_type = other DNA
tacccatttaaataaaatattaaaaagaaatagcaatatagttaatgacgtttacggcgaatcaaatgttaaaag

SEQ ID NO: 223717 - DNA, 75 bp, synthetic construct
  source 1..75: mol_type = other DNA
tcggcggctggctgggtgccgactggttaagggtaaggcgctgttcaggcagtttgcggggtgatgacaggtgtt

SEQ ID NO: 223718 - DNA, 75 bp, synthetic construct
  source 1..75: mol_type = other DNA
gcccgcaagccgtatcagcaggcatggcatacgatggcagaaagccgggcgatgaccgcgacatcgatcgcatac

SEQ ID NO: 223719 - DNA, 75 bp, synthetic construct
  source 1..75: mol_type = other DNA
atggcaatcaatgaagacatcatggcgctaccgctggcgagtaaatttaagaccgaagcgcgggcaatggctgac

SEQ ID NO: 223720 - DNA, 75 bp, synthetic construct
  source 1..75: mol_type = other DNA
gcggatatttgcgataaagatgctatggatcgcattttagcaaagcataagcctgatgcggtgatgcatttggcg

SEQ ID NO: 223721 - DNA, 75 bp, synthetic construct
  source 1..75: mol_type = other DNA
cccggccgcgtttattgaaaccaatatcgtcggtacctatgtattgctcgaagcggctcgtgcttactggtccac

SEQ ID NO: 223722 - DNA, 75 bp, synthetic construct
  source 1..75: mol_type = other DNA
catctggttcgcgcatggctgcgtacctatggtttaccaaccattatcaccaactgctcaaataattacggtcca

SEQ ID NO: 223723 - DNA, 75 bp, synthetic construct
  source 1..75: mol_type = other DNA
tgagaatggcattgtgccggaaaagtgcgatctcaactctattctgttcttattaaccccggcggagagccacga

SEQ ID NO: 223724 - DNA, 75 bp, synthetic construct
  source 1..75: mol_type = other DNA
ggtgaatttgttgccgggattttcgccggagctgcaaggtgtttatagcgaaaccgatgcggatggcatgaaacg

SEQ ID NO: 223725 - DNA, 75 bp, synthetic construct
  source 1..75: mol_type = other DNA
atgtgcaacgccgatgtgaaactgggcgatctgcttattcatgaaggctcagcgaaggatgcgcagaagtttgcg

SEQ ID NO: 223726 - DNA, 75 bp, synthetic construct
  source 1..75: mol_type = other DNA
tggcgcatccgcggatattattgtccttgcccttatcggcgagcgtggtcgcgaagtaaatgaattcctcgcgct

SEQ ID NO: 223727 - DNA, 75 bp, synthetic construct
  source 1..75: mol_type = other DNA
tggaaagatacccacgtatccagaaagtgctcaatagcactgtgccgacattatcattaaattcgtctaccagat

SEQ ID NO: 223728 - DNA, 75 bp, synthetic construct
  source 1..75: mol_type = other DNA
aaaatgtattattaatgatggattctgtaactcgttatgcccgagccgcgcgtgatgttgggcttgcatcgggag

SEQ ID NO: 223729 - DNA, 75 bp, synthetic construct
  source 1..75: mol_type = other DNA
ccccgcagccttcatagaaactaatattctggggacttacgtccttctggaagctgcacgccagtattggtgcac

SEQ ID NO: 223730 - DNA, 75 bp, synthetic construct
  source 1..75: mol_type = other DNA
gatcgtcgttatgctattgatgcagataaaattatgcgtgagttaggatggaaacctgtggaaacattcgaaagc

SEQ ID NO: 223731 - DNA, 75 bp, synthetic construct
  source 1..75: mol_type = other DNA
gctggccgacgtggccgcaagtgaccgctacgcctttgagcaggtggacatctgcaaccgtgccgagctggatcg

SEQ ID NO: 223732 - DNA, 75 bp, synthetic construct
  source 1..75: mol_type = other DNA
tggtgcggatacgtgatgccgaagggcgaattgcggctgaaggggcgctgccgtatccgccgggggtgctttgcg

SEQ ID NO: 223733 - DNA, 75 bp, synthetic construct
  source 1..75: mol_type = other DNA
ggtatctacaaaataaagcttgggttgagtcagttaaaaatggaaattataaaaaatggcttactcagcagtatg

SEQ ID NO: 223734 - DNA, 75 bp, synthetic construct
  source 1..75: mol_type = other DNA
tatcactttccagaaaaattgattccgttggtcattcttaatgcgctggaaggtaaggcattacctatttatggt

SEQ ID NO: 223735 - DNA, 75 bp, synthetic construct
  source 1..75: mol_type = other DNA
tccggatgaggttgcgcaggggagtattcttcctctcttcacggaacaaaccgcctatgcgccgagtagtcctta

SEQ ID NO: 223736 - DNA, 75 bp, synthetic construct
  source 1..75: mol_type = other DNA
tgtggcaatcgacatattttttcattatcgagatcatgacagctattggcatgcgggttcaaagctgagatggaa

SEQ ID NO: 223737 - DNA, 75 bp, synthetic construct
  source 1..75: mol_type = other DNA
taccgtggtgaaagcgggcgacattgtgaaggtgaaagtgctggaagtggatcttcagcgtaaacgtatcgccct

SEQ ID NO: 223738 - DNA, 75 bp, synthetic construct
  source 1..75: mol_type = other DNA
cggatctcgacgtttcgctgcgtggcgcggtgtctatcgcccgtcgtttgcaggatccgctggcggagctggtga

SEQ ID NO: 223739 - DNA, 75 bp, synthetic construct
  source 1..75: mol_type = other DNA
atctcgatgttgtggaaaccatttgcgagctgctggaagaactggctccgaacaagccgcacggcgtggcgcact

SEQ ID NO: 223740 - DNA, 75 bp, synthetic construct
  source 1..75: mol_type = other DNA
gcctatattcgtggtgaagttgagctggtgcgcattcgtgatgctaaaggacgaattgccgcagaaggcgcgctt

SEQ ID NO: 223741 - DNA, 75 bp, synthetic construct
  source 1..75: mol_type = other DNA
gccagggtatttcatgccgataaaacctactttgtgcttaacggcacctcggcagcgaataaggttgtgactaac

SEQ ID NO: 223742 - DNA, 75 bp, synthetic construct
  source 1..75: mol_type = other DNA
tcctgacgaagtaaataataaagaacaattacccctctttactgagacgacagcttacgcgcctagtagtcctta

SEQ ID NO: 223743 - DNA, 75 bp, synthetic construct
  source 1..75: mol_type = other DNA
gtggacataacgagaagaaaaatctggatgttgtgcacaccatctgcgacctgctggatgagatcgtgccaaaag

SEQ ID NO: 223744 - DNA, 75 bp, synthetic construct
  source 1..75: mol_type = other DNA
cgctaccgcttcgaacatgcagatatttgtgatgctgaagcgatggcgcgcatttttgtagaacatcagcctgat

SEQ ID NO: 223745 - DNA, 75 bp, synthetic construct
  source 1..75: mol_type = other DNA
aacgcgaccagttccaggagcgcataaagtgggtgtatgaactgtttccacgtctgcatgagcgccgtgttcagc

SEQ ID NO: 223746 - DNA, 75 bp, synthetic construct
  source 1..75: mol_type = other DNA
atggaaaaagtcatgttgtcctttgacaaagtcagcgcccactacggcaaaatccaggcgctgcatgaggtgagc

SEQ ID NO: 223747 - DNA, 75 bp, synthetic construct
  source 1..75: mol_type = other DNA
acggagaaattccttagctggctgctgtatgacctgatcaactatttcgcagcggaaatgaaagccccgcgctgg

SEQ ID NO: 223748 - DNA, 75 bp, synthetic construct
  source 1..75: mol_type = other DNA
gctgctctgtgactactgtctggcgctgacgcaggtattaagcgggcggtcgctgctgccggaaaccgaaaccac

SEQ ID NO: 223749 - DNA, 75 bp, synthetic construct
  source 1..75: mol_type = other DNA
aacgtgaccagtttcaggagcgcataaagtgggtgtatgaactgtttccacgtctgcatgagcgccgtgttcagc

SEQ ID NO: 223750 - DNA, 75 bp, synthetic construct
  source 1..75: mol_type = other DNA
tcttgcgccgattatcatccagcaaattttcgacaccatcgagcagctgcgtgagcaggggatgaccatcttcct

SEQ ID NO: 223751 - DNA, 75 bp, synthetic construct
  source 1..75: mol_type = other DNA
gatcttaaaggtcacaaagttgcctttcagaaaggttccagttcgcacaaccttttactacgcgcactacgccag

SEQ ID NO: 223752 - DNA, 75 bp, synthetic construct
  source 1..75: mol_type = other DNA
ctctgttgcacgcacggttctgcgggccgtccgtgactctgtggtctctgttgcccgcgcggtatggaactggat

SEQ ID NO: 223753 - DNA, 75 bp, synthetic construct
  source 1..75: mol_type = other DNA
ctctgttgcacgcacggttctgcgcgccgtccgtgactccgtggtctctgttgcccgcgctgtatggaactggat

SEQ ID NO: 223754 - DNA, 75 bp, synthetic construct
  source 1..75: mol_type = other DNA
tgctgccacagattttaccgtactggcagaccactgcgaaaacgtcgccgaaaccctgatcgaaagcgaagatcc

SEQ ID NO: 223755 - DNA, 75 bp, synthetic construct
  source 1..75: mol_type = other DNA
gacggcaccgatctcaatcaaactggatcgttttatctggcagctcgtccgtatgcagaaaaaacggcgctttta

SEQ ID NO: 223756 - DNA, 75 bp, synthetic construct
  source 1..75: mol_type = other DNA
gccgggcttaaattcacggatattcagcccacttacctgacgcctgccgatgcccgcgccgcgttccagcaaggt

SEQ ID NO: 223757 - DNA, 75 bp, synthetic construct
  source 1..75: mol_type = other DNA
gtctggtattttgccgccgaccttaaagcgccgcagtggctgcgcaccgctgatggcttacaggttattgacggg

SEQ ID NO: 223758 - DNA, 75 bp, synthetic construct
  source 1..75: mol_type = other DNA
atttaagttcaatccgttgtttttaaaattgtttttccgtgagacctacacgtttacgagcgaagaggtttttct

SEQ ID NO: 223759 - DNA, 75 bp, synthetic construct
  source 1..75: mol_type = other DNA
aaaaattctggacggcactggatacgcgccgtggctcaaacagccagctcgaggtcgcgctgaaaaacctgggcg

SEQ ID NO: 223760 - DNA, 75 bp, synthetic construct
  source 1..75: mol_type = other DNA
aagtctggaccactaccggtgatccggcagtgacgcaaacaatgacgcaatccgcgccagcaatggtcctcacgg

SEQ ID NO: 223761 - DNA, 75 bp, synthetic construct
  source 1..75: mol_type = other DNA
cttgctcttatcggcgaacgtggtcgcgaagtaaatgaattcctcgcgcttttacctcaatccacgctttctaaa

SEQ ID NO: 223762 - DNA, 75 bp, synthetic construct
  source 1..75: mol_type = other DNA
atattggtttaagtgccagtcgtgttatgcataacgttgttacatcggagcatttgcgtgcggcggcagaatgca

SEQ ID NO: 223763 - DNA, 75 bp, synthetic construct
  source 1..75: mol_type = other DNA
cagaggacggtaccgaaaaacgttatctgccagagggcacgctggtcctgggaaatacgtcagcagaggggatcc

SEQ ID NO: 223764 - DNA, 75 bp, synthetic construct
  source 1..75: mol_type = other DNA
gtgacactactgttgcagacaaagcagctattgccttccttggtaccgcaattgatggcactcatcctaacgtat

SEQ ID NO: 223765 - DNA, 75 bp, synthetic construct
  source 1..75: mol_type = other DNA
tggctctgcagagttctgctgcgggtagcgcaacaaacgttggtgtgcagatcctggataaaacaggggctgcgt

SEQ ID NO: 223766 - DNA, 75 bp, synthetic construct
  source 1..75: mol_type = other DNA
agatcatcatcactcactggaggctgcccctatggcaactaccctcacttctgaatgcaatttactcgtcattcc

SEQ ID NO: 223767 - DNA, 75 bp, synthetic construct
  source 1..75: mol_type = other DNA
cgtttacgagcgaagaggtttttctggataaaatcccgggcaaagtcaatatggcggtatattgcgcgccgatga

SEQ ID NO: 223768 - DNA, 75 bp, synthetic construct
  source 1..75: mol_type = other DNA
cactgcgccaggtgtgcaagctgtcggcgcgtaaacaaaaacaggtgcaggattttattggggtgattagtagca

SEQ ID NO: 223769 - DNA, 75 bp, synthetic construct
  source 1..75: mol_type = other DNA
cgctgcgccaggtgtgcaaactgtcggcgcgtaaacaaaggcaggtgcaggattttattggggtgattagtagca

SEQ ID NO: 223770 - DNA, 75 bp, synthetic construct
  source 1..75: mol_type = other DNA
gggcggaggatattgcatccgccgtggggcttgaggatgcgagcacgacgaaaaaggggatcgttcagctcagta

SEQ ID NO: 223771 - DNA, 75 bp, synthetic construct
  source 1..75: mol_type = other DNA
gaaagtgttgtgctacagacaagtaaaaaaactcagcatcagagaaacagcagatgcaacgggctacagcacttt

SEQ ID NO: 223772 - DNA, 75 bp, synthetic construct
  source 1..75: mol_type = other DNA
gctgagtcgtcgccaacgccaaaaacagggaattgaacgagctcatacgttgggtaaataccggggaaaacaagc

SEQ ID NO: 223773 - DNA, 75 bp, synthetic construct
  source 1..75: mol_type = other DNA
attgctggaatatttcacctttcgggaaaagtttatgtttgttcatctgaacggactggagaatatttctttgcc

SEQ ID NO: 223774 - DNA, 75 bp, synthetic construct
  source 1..75: mol_type = other DNA
tgcgcttaacttttagcccgcgcgattttattcaggtcaatgcgggtgtgaaccaaaaaatggtagcgcgtgcgt

SEQ ID NO: 223775 - DNA, 75 bp, synthetic construct
  source 1..75: mol_type = other DNA
gaagttactgttactgaagataaaaaacagtacgcccgcgctaaggtcgtgcgcaggttaagcgacagcccggaa

SEQ ID NO: 223776 - DNA, 75 bp, synthetic construct
  source 1..75: mol_type = other DNA
aaaaggccagcagaatgcgcgtcttaatggcttacagaatgtgacgttttatcacgaaaatcttgaagaagatgt

SEQ ID NO: 223777 - DNA, 75 bp, synthetic construct
  source 1..75: mol_type = other DNA
acggtctggcgcaggcatttatcatcggtgaaactttcctcaacggcgagccttcttgtctggtgctgggagata

SEQ ID NO: 223778 - DNA, 75 bp, synthetic construct
  source 1..75: mol_type = other DNA
ctgctgaggcagtgaaggaagtcctgcgctctgaagaagtccggagtgcactgaaacagaaactccgccagaacc

SEQ ID NO: 223779 - DNA, 75 bp, synthetic construct
  source 1..75: mol_type = other DNA
cggggatgtacagcagaacagagtctggcggcaagaaaagccagagctgcgccactgatgcagtcactgtatgac

SEQ ID NO: 223780 - DNA, 75 bp, synthetic construct
  source 1..75: mol_type = other DNA
cggcagatttacctgtgacagatgatgccctgtgtctgcattgtgtgccggtgattaacctttttacgcttgaag

SEQ ID NO: 223781 - DNA, 75 bp, synthetic construct
  source 1..75: mol_type = other DNA
tcacgcaaagtgtgattcttgaggcgctgtttgacccgtggttaagccctgttcaggcgcgggcgttattacaac

SEQ ID NO: 223782 - DNA, 75 bp, synthetic construct
  source 1..75: mol_type = other DNA
tgctatcccccggcgcgtgaccgcttccactggcgggtgctcagtcaccttggttctaactttttatcgatgatg

SEQ ID NO: 223783 - DNA, 75 bp, synthetic construct
  source 1..75: mol_type = other DNA
attataaaactggaacctattcgtatagtttatgtatcctgtaaccctgcaacgctggctcgggatagcgaagcg

SEQ ID NO: 223784 - DNA, 75 bp, synthetic construct
  source 1..75: mol_type = other DNA
attgtggatatgaagcgggaccagcgggagcatttgaacagaaacttacggtttcactatttgtggagcatgaaa

SEQ ID NO: 223785 - DNA, 75 bp, synthetic construct
  source 1..75: mol_type = other DNA
ggttcgataaagacgcgttgatcaatgagctggacatgatgactgctcgcgttcgtcagcagtgggaagatggcc

SEQ ID NO: 223786 - DNA, 75 bp, synthetic construct
  source 1..75: mol_type = other DNA
taggccggataaggcgctcgtgccgcatccggcagtgtttacccacgctggctcaaaatcgctttctcataagcc

SEQ ID NO: 223787 - DNA, 75 bp, synthetic construct
  source 1..75: mol_type = other DNA
aggttgtgcgcagacttatggtggaggaacagcttgtcgtcagccgtaaccgtcgtcgccgctacagctcatatt

SEQ ID NO: 223788 - DNA, 75 bp, synthetic construct
  source 1..75: mol_type = other DNA
aatgctactcagtaatgagaatgttgatgtgcaaaacggctggcgcgatcagcaagaaactctgcttaattacct

SEQ ID NO: 223789 - DNA, 75 bp, synthetic construct
  source 1..75: mol_type = other DNA
gccatttgtctggcctcggcacgtaaaaaacagggcaaagatgcgctggtcgtcggctggaatattcaggacacc

SEQ ID NO: 223790 - DNA, 75 bp, synthetic construct
  source 1..75: mol_type = other DNA
aaggcgaacctatccgcttcaatactgatggctggattaatgccactgatattgcaaaacgtttcgggaagcgtc

SEQ ID NO: 223791 - DNA, 75 bp, synthetic construct
  source 1..75: mol_type = other DNA
aacaggctacagcacttcacaggtttgccgaatccaggcatatcatcgagataagttagattttaaatcaataag

SEQ ID NO: 223792 - DNA, 75 bp, synthetic construct
  source 1..75: mol_type = other DNA
actcttcctgtcgctactcgtgcgacaagcgtcgtcggcgtggaaggtgtgcctgcgctggtggaaaaaggtcag

SEQ ID NO: 223793 - DNA, 75 bp, synthetic construct
  source 1..75: mol_type = other DNA
cgaccgggcagaacgcctgttccagcaggcgcgcaatgtcgataacgccgacagctatgcggtgctggggctggg

SEQ ID NO: 223794 - DNA, 75 bp, synthetic construct
  source 1..75: mol_type = other DNA
tgggccaggcatattctcagaaaggcgatcgtgctaatgcggtggcgaatctggaaaaagccctcgcgctggatc

SEQ ID NO: 223795 - DNA, 75 bp, synthetic construct
  source 1..75: mol_type = other DNA
gtggcggctgcgcaatcgcaactggcagaacaacaaaagcaactggccgatcctaatttccgcgcccgtgcgcaa

SEQ ID NO: 223796 - DNA, 75 bp, synthetic construct
  source 1..75: mol_type = other DNA
gaagacatctgttctaagccgattaaatacaggcgaacataatttcagtcatattgaaatgcaagggaaaatata

SEQ ID NO: 223797 - DNA, 75 bp, synthetic construct
  source 1..75: mol_type = other DNA
agtacttggatgaaagtcgtcaggaatatttcagccactttataatggctatcgcaagggagcgtaatgattcac

SEQ ID NO: 223798 - DNA, 75 bp, synthetic construct
  source 1..75: mol_type = other DNA
cggaatgaaacgtcaaatagaacaatttgatctcatgttacgtatatacctgatttctgttcttaataacagtca

SEQ ID NO: 223799 - DNA, 75 bp, synthetic construct
  source 1..75: mol_type = other DNA
ttcagagagtctctttataaaagcaccagatttgataccagtcctgtttcatggcgcgttgctgaatataagaaa

SEQ ID NO: 223800 - DNA, 75 bp, synthetic construct
  source 1..75: mol_type = other DNA
aaaggataagcttgaaagtttacaaatgaatctgagtaataaactgcttaccacacatagctgggataaaagagg

SEQ ID NO: 223801 - DNA, 75 bp, synthetic construct
  source 1..75: mol_type = other DNA
aatcagttatggtcatgacggtactatgctttattggatatagtgcatattgttcatatcatatatatgatgtta

SEQ ID NO: 223802 - DNA, 75 bp, synthetic construct
  source 1..75: mol_type = other DNA
cataattacttttcgtcaggtaaatacagaaagctggtgaggttattttccagaaaaaaaagaacaataacactt

SEQ ID NO: 223803 - DNA, 75 bp, synthetic construct
  source 1..75: mol_type = other DNA
caaaggacttttctccggaatcaagaagttttcttgaatcaatggggataacaggtatcctcgtccgttacaaac

SEQ ID NO: 223804 - DNA, 75 bp, synthetic construct
  source 1..75: mol_type = other DNA
cccaacaattccggacaattcgttggtggtttttcagagatttaagcgtgctggagttgtcaggaaagatatatg

SEQ ID NO: 223805 - DNA, 75 bp, synthetic construct
  source 1..75: mol_type = other DNA
aacagtcaaatgaacaggacaacggatcatgtaacagcatggagaaactggcagaatgtgctacgtaatgccgta

SEQ ID NO: 223806 - DNA, 75 bp, synthetic construct
  source 1..75: mol_type = other DNA
aaatatgaagacaaagttaggtctaacatgcggtatttcccttttaagcctgcactagatgataaatatctattt

SEQ ID NO: 223807 - DNA, 75 bp, synthetic construct
  source 1..75: mol_type = other DNA
ttatctggtgaacccgtgttgggtaaggataaaagttgtactttttctgatgtcttagtttctgagatcctgcca

SEQ ID NO: 223808 - DNA, 75 bp, synthetic construct
  source 1..75: mol_type = other DNA
tttcgcttgctatagaaagagatgagatacaaaaaaacaatggaagtaaaaatattgatgtgttcagaaaactcc

SEQ ID NO: 223809 - DNA, 75 bp, synthetic construct
  source 1..75: mol_type = other DNA
tgatcctgttcccgttcgccgccacgctggaagtgactaacgccaccatcgccatctacgatgaagataacggcg

SEQ ID NO: 223810 - DNA, 75 bp, synthetic construct
  source 1..75: mol_type = other DNA
atgtttcatcgcttatggacgttaatccgcaaagagttgcagtcgttgctgcgcgaaccgcaaacccgcgcgatt

SEQ ID NO: 223811 - DNA, 75 bp, synthetic construct
  source 1..75: mol_type = other DNA
ccactatcggcgtaatgatcgtcacttcactttctgtcgcccgcgaacgtgaacaaggtacgctcgatcagttac

SEQ ID NO: 223812 - DNA, 75 bp, synthetic construct
  source 1..75: mol_type = other DNA
atgtgcatgcaagagtgcccaccgatatcacccctgcagcgtatcggtgaactgtatgccatcgaggcagaagtc

SEQ ID NO: 223813 - DNA, 75 bp, synthetic construct
  source 1..75: mol_type = other DNA
aagcagatttatttgaaggatgcgagtctggatattgtgtggaatagtttgtggccgctactggtgataacggcc

SEQ ID NO: 223814 - DNA, 75 bp, synthetic construct
  source 1..75: mol_type = other DNA
ccactatcggcgtaatgatcgtcacttcgctttctgttgcccgcgaacgtgaacagggaacgctcgatcagttgc

SEQ ID NO: 223815 - DNA, 75 bp, synthetic construct
  source 1..75: mol_type = other DNA
aaattcatgcaggcttccccatcaggaaagcgagagttgattctgtcactttcctcatcactcatcagctgggat

SEQ ID NO: 223816 - DNA, 75 bp, synthetic construct
  source 1..75: mol_type = other DNA
aattcagataaacacaatttcagtcattctgaaatgcaaggtaaaatatataaaaaaattattggttttttaaaa

SEQ ID NO: 223817 - DNA, 75 bp, synthetic construct
  source 1..75: mol_type = other DNA
aatgaataggacaatggatcaccttacagcatggagagagtggcaaaatgtattacgtaatgctgtgagttctga

SEQ ID NO: 223818 - DNA, 75 bp, synthetic construct
  source 1..75: mol_type = other DNA
gcgctacaggcgatggtgtgtctgctgcgcccggtacttcatcagcgggaatctgttcaacctcgtcgtgaacgt

SEQ ID NO: 223819 - DNA, 75 bp, synthetic construct
  source 1..75: mol_type = other DNA
tttacaggtgaaacagcctggattgattttatcaacaagttttcggatggtgaggatgagttaatgacaaaagat

SEQ ID NO: 223820 - DNA, 75 bp, synthetic construct
  source 1..75: mol_type = other DNA
ttcatcattggtatgagaatatcaaagaggcatatggacgtgatacgattccggaagcattttcatcttttgtgc

SEQ ID NO: 223821 - DNA, 75 bp, synthetic construct
  source 1..75: mol_type = other DNA
aaatttttaagtaaatatcaaatagaagcgtggcagcttatctttgaggtaaccgagagtaataccctgaccaat

SEQ ID NO: 223822 - DNA, 75 bp, synthetic construct
  source 1..75: mol_type = other DNA
tttgcctgatggctcagccgattacaggggtgcgcggtgatgtttatcatgaaattctgctgcgcatgaaaggag

SEQ ID NO: 223823 - DNA, 75 bp, synthetic construct
  source 1..75: mol_type = other DNA
gtggcagagtacgttgaaaacgaagagatccgcgaggcggtgctctctttgtactgcacccattttgttggacga

SEQ ID NO: 223824 - DNA, 75 bp, synthetic construct
  source 1..75: mol_type = other DNA
gcactgatgatcagcatgatgatgtttttcagttgggcagccatacccggtatcgcgttagggatttttgttcgc

SEQ ID NO: 223825 - DNA, 75 bp, synthetic construct
  source 1..75: mol_type = other DNA
agatagtggcgtcaatttgtcatctggcgcgaatgaagaaaatgcaagtggttgcggaatatgttgaaaatgaag

SEQ ID NO: 223826 - DNA, 75 bp, synthetic construct
  source 1..75: mol_type = other DNA
aattgcaattgatgatttcggcaccggctacgccagttatgcgcggctaaaaaatgtgaatgccaatttattaaa

SEQ ID NO: 223827 - DNA, 75 bp, synthetic construct
  source 1..75: mol_type = other DNA
cctggggctgtttaccgccgcccgtgtttgcgaacaggtacgcgccgcgatccagtcgctgccgcgagggcaaaa

SEQ ID NO: 223828 - DNA, 75 bp, synthetic construct
  source 1..75: mol_type = other DNA
ggcattttacgtaccgttccaaaccgttttctctccggtctgggtacgttgtatgtcgaactgttccgcaacgtg

SEQ ID NO: 223829 - DNA, 75 bp, synthetic construct
  source 1..75: mol_type = other DNA
tccagtcgctgccgcgtgggcaaaaaaatgccgcgctggcaatgggtctgacgctaccgcaggcttaccgctacg

SEQ ID NO: 223830 - DNA, 75 bp, synthetic construct
  source 1..75: mol_type = other DNA
gccgttaaatgaaaaaagcacaatttttagcaccaattataccttgtcattattgctgcccctgatgatgtgggg

SEQ ID NO: 223831 - DNA, 75 bp, synthetic construct
  source 1..75: mol_type = other DNA
caattatcaggccttactggtgggcaatctgattggtgtcccgctgtgctacttcatcattcgggtagtgcgaaa

SEQ ID NO: 223832 - DNA, 75 bp, synthetic construct
  source 1..75: mol_type = other DNA
tgtgggtcattgagcatacgctgcaatttatggctgaaaacagagcgaagatgccggtaatgctgccaacttact

SEQ ID NO: 223833 - DNA, 75 bp, synthetic construct
  source 1..75: mol_type = other DNA
tttggcttatcgtccagtatcgatatgtgggtcattgagcatacgttgcaatttatggctgaaaacagagagaag

SEQ ID NO: 223834 - DNA, 75 bp, synthetic construct
  source 1..75: mol_type = other DNA
ccgatgcaatactacggtttcagtctgattacgaagaaaccgctgctgttccattgttcccattcgctgagagag

SEQ ID NO: 223835 - DNA, 75 bp, synthetic construct
  source 1..75: mol_type = other DNA
cgtggtatccgtattctgcgtgcctccaactctacctacaaacccttgccacaagcgggtgcttttggcgaagag

SEQ ID NO: 223836 - DNA, 75 bp, synthetic construct
  source 1..75: mol_type = other DNA
acatgcgaatctgatgatcaacgctggtgcgacgatcattgacgttggcggcgagtccacgcgtccaggggctgc

SEQ ID NO: 223837 - DNA, 75 bp, synthetic construct
  source 1..75: mol_type = other DNA
atggcaggacaggtacaaggggaatacgtggagttgagcgacggcactttatcgtggttagggaacgccttgttc

SEQ ID NO: 223838 - DNA, 75 bp, synthetic construct
  source 1..75: mol_type = other DNA
aggatggcttggagatgacatcagcctacgtaattgcgatgtaatcagatggatgccgattcctgaaccaccgca

SEQ ID NO: 223839 - DNA, 75 bp, synthetic construct
  source 1..75: mol_type = other DNA
gctgctgttccattgttcccattcgctgagagagaatccttttgttcctctgttttaatcattgatgatagttag

SEQ ID NO: 223840 - DNA, 75 bp, synthetic construct
  source 1..75: mol_type = other DNA
ccgaacaacgacaaccgagcgcctggcaacatcgtgcggtagcctatcaggcgtatcaggttgaggactacgcca

SEQ ID NO: 223841 - DNA, 75 bp, synthetic construct
  source 1..75: mol_type = other DNA
ctgccaataccgcccaggcggcaggaaatggtgcggctcgcgatcgctggctacaacaggcagaaaaacgtggac

SEQ ID NO: 223842 - DNA, 75 bp, synthetic construct
  source 1..75: mol_type = other DNA
tagcgcaaggggagtaccgtatttccacattgctggcggtattgtttgctgcggggtttgctatcggttggttga

SEQ ID NO: 223843 - DNA, 75 bp, synthetic construct
  source 1..75: mol_type = other DNA
cgtggagtattacagagaccatgagcaggcggcacaggcgctggaaaacggcacctggacgcagcggacgtgtgc

SEQ ID NO: 223844 - DNA, 75 bp, synthetic construct
  source 1..75: mol_type = other DNA
aacgacaaccggacgcctggcaacatcgtgcggtagcctatcaggcgtatcaggttgaggactacgccaccgcac

SEQ ID NO: 223845 - DNA, 75 bp, synthetic construct
  source 1..75: mol_type = other DNA
taacaataatgtcggcggcgcagcgccagggaaaagctatcgtagctacgggcaactggaagccgagtaccgcat

SEQ ID NO: 223846 - DNA, 75 bp, synthetic construct
  source 1..75: mol_type = other DNA
gatggttgaagaatatcaggtcgatggcgtagttgatgtgattttgcaggcgtgccatacctacgcggtggaatc

SEQ ID NO: 223847 - DNA, 75 bp, synthetic construct
  source 1..75: mol_type = other DNA
cgattgaagagaatggcggctgggttgtcggttatgaaaactgcaccggggcgaaagccaccgagcaatgcgtgg

SEQ ID NO: 223848 - DNA, 75 bp, synthetic construct
  source 1..75: mol_type = other DNA
ttagttcgaataaagaattgtctcacgtcaacgtattacattcaaaacttgatatatacggaaaggttgtggtta

SEQ ID NO: 223849 - DNA, 75 bp, synthetic construct
  source 1..75: mol_type = other DNA
aacactgttaatggcgacaagtcggtaggagaagccacgaaggagacgtccagttcggtaactggattggggcaa

SEQ ID NO: 223850 - DNA, 75 bp, synthetic construct
  source 1..75: mol_type = other DNA
gcaaaccctataggggcagcatttacagttgccactgtagctgttgctggcctaatcacgtacatgaccatgctc

SEQ ID NO: 223851 - DNA, 75 bp, synthetic construct
  source 1..75: mol_type = other DNA
cgatgcaggcgttaacagattccttcgtgaagtttcgttctgctggcttagatccaaccgatggttctctgaagg

SEQ ID NO: 223852 - DNA, 75 bp, synthetic construct
  source 1..75: mol_type = other DNA
tgcttttttgccgaaccaacgcactccccttgtatgttgttaggcgtccatacaggattacacgatcagatttct

SEQ ID NO: 223853 - DNA, 75 bp, synthetic construct
  source 1..75: mol_type = other DNA
gaagtggaagacctcgccgacgcaatacgccagagtatgataaccgaatacaaaactgataaaattactcacatg

SEQ ID NO: 223854 - DNA, 75 bp, synthetic construct
  source 1..75: mol_type = other DNA
tgtcatacagcaaaacggcggcgcggcgggagaagaggcgataacccgtgactattttcgcatcctggttatttc

SEQ ID NO: 223855 - DNA, 75 bp, synthetic construct
  source 1..75: mol_type = other DNA
ttttgccgaaccaacgcactccccttgtatgctgttaggcgtccatacaggattacacgatcagatttctgttca

SEQ ID NO: 223856 - DNA, 75 bp, synthetic construct
  source 1..75: mol_type = other DNA
tacagtaaccctgtttgtagcaaattccatcttacctgacctcacccagacaaagacaaaagagaatgattgtta

SEQ ID NO: 223857 - DNA, 75 bp, synthetic construct
  source 1..75: mol_type = other DNA
atgatcaaagataacagcaaagttgatgacagtgctgaccgactgtcatttacagaaaccctgtttgtagcaaat

SEQ ID NO: 223858 - DNA, 75 bp, synthetic construct
  source 1..75: mol_type = other DNA
ctcgatgcagaacctcagctctgttaccggcgctctgtctgccgcgtttgcaatgcttggagctaatgcttccgg

SEQ ID NO: 223859 - DNA, 75 bp, synthetic construct
  source 1..75: mol_type = other DNA
atgaaaaacctgaaaaaattcattccccctgttaaaaaacctcgcctcagcggctggctgctgacctcagtgctg

SEQ ID NO: 223860 - DNA, 75 bp, synthetic construct
  source 1..75: mol_type = other DNA
tatccggctggctggtggcatcggtggtgctgttcgcactgattgccctgatttccccgcagcaactcccggttg

SEQ ID NO: 223861 - DNA, 75 bp, synthetic construct
  source 1..75: mol_type = other DNA
cgcgctgtttgtcgtgatcggctggacctcttcagcacagatcccggtcgtcatttataaactaagcctggtttc

SEQ ID NO: 223862 - DNA, 75 bp, synthetic construct
  source 1..75: mol_type = other DNA
tggtttgccaaagcctacgttaacgtattccgctcgattcctttagttatggttttgctgtggttttacctgatc

SEQ ID NO: 223863 - DNA, 75 bp, synthetic construct
  source 1..75: mol_type = other DNA
gccggaaaaaatcggcatgtggtttaaggcggaactggacccaaatattcagtttttcctctcctccatgctctg

SEQ ID NO: 223864 - DNA, 75 bp, synthetic construct
  source 1..75: mol_type = other DNA
gctgctgtactgggctactggcttgaccggtcacttttccccaaagcccgtccgggtcagtacctgctacacgat

SEQ ID NO: 223865 - DNA, 75 bp, synthetic construct
  source 1..75: mol_type = other DNA
cgacagcgtgacatcaagctctgctaaaaccgcaaccagcagtgtggctgacggaactaaaggcattcctgcaat

SEQ ID NO: 223866 - DNA, 75 bp, synthetic construct
  source 1..75: mol_type = other DNA
caggctgccgagggactaaaaaaagttcgtgagcagatggacgaagttatcggacgtcagcaactgattaacaag

SEQ ID NO: 223867 - DNA, 75 bp, synthetic construct
  source 1..75: mol_type = other DNA
tatgggggaactgaccaaagcagtctccagcggtactgtggaagcgaaacaggcgttatcgctgatgttcgttgg

SEQ ID NO: 223868 - DNA, 75 bp, synthetic construct
  source 1..75: mol_type = other DNA
gacttagcgccactggcagcagccgttggtaacttggttagcagagcgatgatggcgcaaatggtgcaacagagt

SEQ ID NO: 223869 - DNA, 75 bp, synthetic construct
  source 1..75: mol_type = other DNA
ttgtcggttagttggttagggaaaatgtcagagaaacaatacgtggatggagttaccccaataacagtaatgagg

SEQ ID NO: 223870 - DNA, 75 bp, synthetic construct
  source 1..75: mol_type = other DNA
cgtatgttccattgcctgatggtcgaacaatccctgtaacgctcagtaccgatggtatgagtggaggcggaaatg

SEQ ID NO: 223871 - DNA, 75 bp, synthetic construct
  source 1..75: mol_type = other DNA
ctactatttttctttgctgtttttttatgattctggtaactctttctttaaagttttttttggggtgggtccatg

SEQ ID NO: 223872 - DNA, 75 bp, synthetic construct
  source 1..75: mol_type = other DNA
tgtccgccactcaggattgccagcaggcgacgcacgcatttgccgaaaaagccggcgtgagcttccacaatcaat

SEQ ID NO: 223873 - DNA, 75 bp, synthetic construct
  source 1..75: mol_type = other DNA
cgccccggcgcgaaattctctaacccggaagtgatgctcggcatggtgcctggctggatgggcattgaacgcgtg

SEQ ID NO: 223874 - DNA, 75 bp, synthetic construct
  source 1..75: mol_type = other DNA
atgtcatcacccgcaatattgcagggcggctatgtgctgcctgtctcccggtcattcacccaaatgcttctggat

SEQ ID NO: 223875 - DNA, 75 bp, synthetic construct
  source 1..75: mol_type = other DNA
gaaatgcttatgcactggataagggtcgcgtatgaggctggcaactctccggtaactccggatggtcatattcag

SEQ ID NO: 223876 - DNA, 75 bp, synthetic construct
  source 1..75: mol_type = other DNA
ccacagccatcgtcgcgatatggatgtaacaatcgttgttcattcgcctggcagcattggttcaacaccttcagt

SEQ ID NO: 223877 - DNA, 75 bp, synthetic construct
  source 1..75: mol_type = other DNA
tgtccgccacccacgattgccagcaagccacgcgcgcatttgccgaaaaaggcagcgtcagcttccataatcaat

SEQ ID NO: 223878 - DNA, 75 bp, synthetic construct
  source 1..75: mol_type = other DNA
tttgatatcgtcgttagcgattgctgcccggaagatgaatatgtgaaatacgcgcaagcacagcgtattaagttg

SEQ ID NO: 223879 - DNA, 75 bp, synthetic construct
  source 1..75: mol_type = other DNA
ggcacgctggtgccaatgcgctacatgaatgaagacaagcacttcaaagtggtctccatctccgcattctgtacc

SEQ ID NO: 223880 - DNA, 75 bp, synthetic construct
  source 1..75: mol_type = other DNA
cagattacgggttatggaagtatgggtgagcgctggatagttgaccgttacaacatccggcattcgctgcgctgc

SEQ ID NO: 223881 - DNA, 75 bp, synthetic construct
  source 1..75: mol_type = other DNA
tgtacgaactggcgaccaccggcgatgtggtgatcccttccggcacggccagcgcattgctgccggtgaaagcca

SEQ ID NO: 223882 - DNA, 75 bp, synthetic construct
  source 1..75: mol_type = other DNA
gacgtcaccgcatacatcagaagttccaccaccctgccaccggacggcgcggaagggctgaaacaggatatcggc

SEQ ID NO: 223883 - DNA, 75 bp, synthetic construct
  source 1..75: mol_type = other DNA
tgatacgccaacaaatatgttgttcactcagggggcaatacatcgtacagacgatcgtactcagtcaaatattgg

SEQ ID NO: 223884 - DNA, 75 bp, synthetic construct
  source 1..75: mol_type = other DNA
cactgtggtgagtattttcagccctgcggcgatgtggttgctggtttccgtgatattgccgatcctgtgctggca

SEQ ID NO: 223885 - DNA, 75 bp, synthetic construct
  source 1..75: mol_type = other DNA
aacccggtacagattgccgccgatgcggctgaagcggggatccgtggtttttcagaacaggaaacgacggtcggg

SEQ ID NO: 223886 - DNA, 75 bp, synthetic construct
  source 1..75: mol_type = other DNA
ggtggatatccacgtcagccgggaagagattgttgctattaccaccgctatcaccccggcgaaagcggtggaggt

SEQ ID NO: 223887 - DNA, 75 bp, synthetic construct
  source 1..75: mol_type = other DNA
atgaagaagtcgaagctgctacttatgctcacggcagcaaagatatgcccgcgcgcaatgtggtggaagatctgg

SEQ ID NO: 223888 - DNA, 75 bp, synthetic construct
  source 1..75: mol_type = other DNA
caacaccgactggggattaccttatcttccccgcgccagcatggagcaacgaaaaagtgaactgcttgagcagcg

SEQ ID NO: 223889 - DNA, 75 bp, synthetic construct
  source 1..75: mol_type = other DNA
ggcggcggcggtgttctggtgtttcaactgcctgaacaccctgacgctgacgcagcaacagacacaacgccagat

SEQ ID NO: 223890 - DNA, 75 bp, synthetic construct
  source 1..75: mol_type = other DNA
ccgccgtggaagagatgatgaagcgcaatatcaccgggctggatatcgtcggcgcgctaagccgtagcggcttcg

SEQ ID NO: 223891 - DNA, 75 bp, synthetic construct
  source 1..75: mol_type = other DNA
gatgctggttccgggaaagatgctgttttgcagcttttgcgtgatgcttatgaagcaagtacgcaaaattgcgtc

SEQ ID NO: 223892 - DNA, 75 bp, synthetic construct
  source 1..75: mol_type = other DNA
accagtattcggcggatccgtgctgcgggtaaagcggctggttttctggctgtggctcctgatatggcgcagcaa

SEQ ID NO: 223893 - DNA, 75 bp, synthetic construct
  source 1..75: mol_type = other DNA
gcattgagaattacatggcgcacgtcaacgattcgctttgtctgttggtgcaggtggaaagtaaaacggcactgg

SEQ ID NO: 223894 - DNA, 75 bp, synthetic construct
  source 1..75: mol_type = other DNA
ggtggatattcacgtcagccgggaggagatcattgccatcactaccgccatcacgccggccaaagcggtcgaggt

SEQ ID NO: 223895 - DNA, 75 bp, synthetic construct
  source 1..75: mol_type = other DNA
aaagacgttggcattcttaacgatttgaaaagtcgcggcattaaggctgttttccagaccatcccggaagataaa

SEQ ID NO: 223896 - DNA, 75 bp, synthetic construct
  source 1..75: mol_type = other DNA
ttttgcagcttttgcgtgatgcttatgaagcaagtacgcaaaattgtatcggttggcgaacccttcttctttgga

SEQ ID NO: 223897 - DNA, 75 bp, synthetic construct
  source 1..75: mol_type = other DNA
atatgtttaatggtgatcgcttaaccttcatgaaaacttattacttgaaggacaaaaataaaaaaccaaaaaata

SEQ ID NO: 223898 - DNA, 75 bp, synthetic construct
  source 1..75: mol_type = other DNA
taagatactgtatcttgctattagagataataaagatacagatacgatattaatgtcattcgatattgttgatca

SEQ ID NO: 223899 - DNA, 75 bp, synthetic construct
  source 1..75: mol_type = other DNA
taatggcatcggggctggtagcttgtgcgcaatcaaccgcgccacaggaagacagtcgtctgaaagaggcataca

SEQ ID NO: 223900 - DNA, 75 bp, synthetic construct
  source 1..75: mol_type = other DNA
tccgccttatccgctggccgctgatgagtcaggaagaatatgccctcagtaacggtagcggggagttgccagggg

SEQ ID NO: 223901 - DNA, 75 bp, synthetic construct
  source 1..75: mol_type = other DNA
gggttctgcccctggtcaggatgaaggcggtctatgagtctgactcgttcggtgacgagcggccggtggcgctgg

SEQ ID NO: 223902 - DNA, 75 bp, synthetic construct
  source 1..75: mol_type = other DNA
taatgtcattcgatattgttgatcaagagattgtaaaaatatcaagaacgacatatttcaaagggatgaaagaac

SEQ ID NO: 223903 - DNA, 75 bp, synthetic construct
  source 1..75: mol_type = other DNA
acagcacccagcaggggtatctcacgcaactggaagcggtactgagcgacgataacagcagcctgagcggcggct

SEQ ID NO: 223904 - DNA, 75 bp, synthetic construct
  source 1..75: mol_type = other DNA
gaaattgcagctcgtatgggagtcagccagccagctgtgagccgactggagagaaatgcatcaagcgcgagcctt

SEQ ID NO: 223905 - DNA, 75 bp, synthetic construct
  source 1..75: mol_type = other DNA
cagaatgtggtggcgaagtctttgacacatcctttaaaccgcatggctctgacagtttcgcgggagccatctgca

SEQ ID NO: 223906 - DNA, 75 bp, synthetic construct
  source 1..75: mol_type = other DNA
tatgccgccagcgattacggctattacagcacccaacaagggtatctcacacaactggaagcggtactgagcgac

SEQ ID NO: 223907 - DNA, 75 bp, synthetic construct
  source 1..75: mol_type = other DNA
gcggtgaacctgatcacctatcaacaaatttatgaagccaatctgaaagtcatttccgccggggccgagattttc

SEQ ID NO: 223908 - DNA, 75 bp, synthetic construct
  source 1..75: mol_type = other DNA
gataacagcagcctgagcggcggcttcgataacttcttcgccgcccttaacgaagcgaccaccagccccgatgat

SEQ ID NO: 223909 - DNA, 75 bp, synthetic construct
  source 1..75: mol_type = other DNA
aatgcagcctgaacggcagcggcagaaacatgctgtcacgcattcttcatgtggggtattcaggtttaccgaaag

SEQ ID NO: 223910 - DNA, 75 bp, synthetic construct
  source 1..75: mol_type = other DNA
gttccggatggcgttaatttccttgtggcgacagtggatgtgcaggcgggacgtcatcgccgttttgtggttcag

SEQ ID NO: 223911 - DNA, 75 bp, synthetic construct
  source 1..75: mol_type = other DNA
ggtgcactggagcgcatgcgccatccagaaaaaacggacgacacaatgcccgcaatgactgaccagcctgtaaac

SEQ ID NO: 223912 - DNA, 75 bp, synthetic construct
  source 1..75: mol_type = other DNA
aaaaaacagtacaaaccgaacaaaaggcaccggagcgaaaggtacttttctggtatgacccgatgaaaccggata

SEQ ID NO: 223913 - DNA, 75 bp, synthetic construct
  source 1..75: mol_type = other DNA
tgtctgcgatccggcagatatgcttgtaattcaggtatctgaggaaaaagcgcgcgagcattccaaaaaacgcct

SEQ ID NO: 223914 - DNA, 75 bp, synthetic construct
  source 1..75: mol_type = other DNA
gcagcttatttataagtttctgaccgccgagcaggaatatgaatccacgcgcagcgaagaaaccctgaagacggt

SEQ ID NO: 223915 - DNA, 75 bp, synthetic construct
  source 1..75: mol_type = other DNA
acaactgatttttaaactgctggcggcagaagaagagtatgagcgaaccggcagtgaagagaccctgaaagcggt

SEQ ID NO: 223916 - DNA, 75 bp, synthetic construct
  source 1..75: mol_type = other DNA
aaggtggtttccagcggcctgttcctgattgattccgaagccaatatttctggcgcactggagcggatgcgctct

SEQ ID NO: 223917 - DNA, 75 bp, synthetic construct
  source 1..75: mol_type = other DNA
gcagagcggcggcttcttgccgtctgacattgaaccgtgaagataaatgtcatgctattaatgaagaaatgatcg

SEQ ID NO: 223918 - DNA, 75 bp, synthetic construct
  source 1..75: mol_type = other DNA
tcaggtagaggccgatgtaaagcgtttttttctatacttgactgagtataagatgtgggacgttgaagtcctgat

SEQ ID NO: 223919 - DNA, 75 bp, synthetic construct
  source 1..75: mol_type = other DNA
ggtggctcagattcaggggatggacccggtctggatcagcgctgcagtgccagaatctatcgcctatctgctgaa

SEQ ID NO: 223920 - DNA, 75 bp, synthetic construct
  source 1..75: mol_type = other DNA
ggcggatattcgccgcctgatcgccacgcaaaaaatccagactcgctttacgctcaaagcgcccattgatggcgt

SEQ ID NO: 223921 - DNA, 75 bp, synthetic construct
  source 1..75: mol_type = other DNA
ctcgacctgaccattcctgactgggtggaagcgcagagtgagtatttactgctgcgcgaaaccggcggtacggcg

SEQ ID NO: 223922 - DNA, 75 bp, synthetic construct
  source 1..75: mol_type = other DNA
ttattttattccatttcatgaaaggaaataactctatttcaattggcggcatgatgtggatagcatatgcaagta

SEQ ID NO: 223923 - DNA, 75 bp, synthetic construct
  source 1..75: mol_type = other DNA
ttttagcatcgattcgtgatgtggcgaaaatagtggaagtcgctcgctccggtgtcgtcggactttcgcgcggcg

SEQ ID NO: 223924 - DNA, 75 bp, synthetic construct
  source 1..75: mol_type = other DNA
gccccactaatcagcattgagcgctttgtgtggttggtggggtatttaaacaaccgttggggaacgaaacaggat

SEQ ID NO: 223925 - DNA, 75 bp, synthetic construct
  source 1..75: mol_type = other DNA
taaaaaacagtgataatgatatcgatcataagatttatacagaggcagcaagtaaaattgaaaatgattacaatc

SEQ ID NO: 223926 - DNA, 75 bp, synthetic construct
  source 1..75: mol_type = other DNA
caatacagagaaaagttaacagatgcactaaatgctgggtatgctgtgcttaatagtggaggaagtagccttgat

SEQ ID NO: 223927 - DNA, 75 bp, synthetic construct
  source 1..75: mol_type = other DNA
tagagtcaactaagttacgcaaaaatgaaaacgaaataatgaaaaataacactgcagaaagagaactatcatctt

SEQ ID NO: 223928 - DNA, 75 bp, synthetic construct
  source 1..75: mol_type = other DNA
aagttaagtgcgttacctgacgatacattggtatgttgtgctcatgaatataccttatcaaatatgaagtttgct

SEQ ID NO: 223929 - DNA, 75 bp, synthetic construct
  source 1..75: mol_type = other DNA
gaacagaaaaaacattaaagcaaaaggttgcttttgctcagcttgaacttaatcgtcttaagtctctggagaaat

SEQ ID NO: 223930 - DNA, 75 bp, synthetic construct
  source 1..75: mol_type = other DNA
gcgtggcgctggcagatgcactgaataagctggttgagaatggcaaactgaaaaccaatccgatgaaaggcatgg

SEQ ID NO: 223931 - DNA, 75 bp, synthetic construct
  source 1..75: mol_type = other DNA
ctgcatggtgataacttcaacgacactatcgctaaagtgagcgaaattgtcgaaatggaaggccgtatttttatc

SEQ ID NO: 223932 - DNA, 75 bp, synthetic construct
  source 1..75: mol_type = other DNA
gcgaccaagctgggtatcaaaccggatcaagtcgagcagtattacatcgataaagtaccgctcaaacgcggctgc

SEQ ID NO: 223933 - DNA, 75 bp, synthetic construct
  source 1..75: mol_type = other DNA
atgaatcttaacagtatttccgcctttgatgacaattacatctgggttttgtctgatgaagcaggtcgttgcctg

SEQ ID NO: 223934 - DNA, 75 bp, synthetic construct
  source 1..75: mol_type = other DNA
agacgacttgctcaataaaatcaccttagataaaatcaatgcaaataaaatttacaccaacatcaaagatataaa

SEQ ID NO: 223935 - DNA, 75 bp, synthetic construct
  source 1..75: mol_type = other DNA
tttgataccacatatcttaggaattttttgtttaagcgcattggatagggttttaattaatggagtattaggtgc

SEQ ID NO: 223936 - DNA, 75 bp, synthetic construct
  source 1..75: mol_type = other DNA
tggtattttttgatgcaataaataaagcattgattccgtggttatttagagtgttgtcagaaaatgataagagaa

SEQ ID NO: 223937 - DNA, 75 bp, synthetic construct
  source 1..75: mol_type = other DNA
tttaatggtcaccaattatatattttatgcaaagaaaactgtgcatttatctgttgtgacaatactttgcggtgc

SEQ ID NO: 223938 - DNA, 75 bp, synthetic construct
  source 1..75: mol_type = other DNA
tcagagttacatgcagcatcatctgttgaacttatcagaaatgctatacgtttagatccaaaaaataatttagtt

SEQ ID NO: 223939 - DNA, 75 bp, synthetic construct
  source 1..75: mol_type = other DNA
agtatccatgagtcactaaaaataactaaaccactagagaaaatttcatcaatagcttcacttgctatagaaaga

SEQ ID NO: 223940 - DNA, 75 bp, synthetic construct
  source 1..75: mol_type = other DNA
tgataaattgaatgatctaaagaattcattagatgcatttatttccacgttctgtatagataatatgtttttttc

SEQ ID NO: 223941 - DNA, 75 bp, synthetic construct
  source 1..75: mol_type = other DNA
ggtactgaaggcactggtcagccatccgcgtgagccgctctcccgcgataagctgatgaaccttgcccgtggtcg

SEQ ID NO: 223942 - DNA, 75 bp, synthetic construct
  source 1..75: mol_type = other DNA
gcgcatgcgagattgctatagatggtaatagtgagtttgagataaaaaaaacaaaaacgattcggtttatatcta

SEQ ID NO: 223943 - DNA, 75 bp, synthetic construct
  source 1..75: mol_type = other DNA
tctaagtagtaatacttatgcagggcagcaagcggcaacttatggaaaggccagcggtgatacgacaggagtttt

SEQ ID NO: 223944 - DNA, 75 bp, synthetic construct
  source 1..75: mol_type = other DNA
atgttttggttgtcatggtgaaaatattaaaactatcccaccacatttcttttcttcctcacacgaagaagtctc

SEQ ID NO: 223945 - DNA, 75 bp, synthetic construct
  source 1..75: mol_type = other DNA
atggacgaaatcaccaccgtggacatcgccgcatatcgcgatatgcgactcgctgaaatcaacccgcggacagga

SEQ ID NO: 223946 - DNA, 75 bp, synthetic construct
  source 1..75: mol_type = other DNA
ggggaacatgccgcgataaccccgttgaactggtgcgtaagccccgtgtctctccggggcgcgaacgacgtctga

SEQ ID NO: 223947 - DNA, 75 bp, synthetic construct
  source 1..75: mol_type = other DNA
tgacctgaaggttgatggcggcctgcgaccggtgcgcgaagaagatgttatcgccatccgcaataaagccgcacg

SEQ ID NO: 223948 - DNA, 75 bp, synthetic construct
  source 1..75: mol_type = other DNA
gccgaagaagtcatcgcaatggattcggttaaacttgccaatatgttgtgcgatccaaatgtcagacgtagcgat

SEQ ID NO: 223949 - DNA, 75 bp, synthetic construct
  source 1..75: mol_type = other DNA
cggtaaaacttgccaatatgttgtgcgatcccaatgtcaaacgtagcgatatcgttccccttaccacagcaatga

SEQ ID NO: 223950 - DNA, 75 bp, synthetic construct
  source 1..75: mol_type = other DNA
gctcgttatgcacctttcaatgctatcgccctgttggtaggttcgcaggtgggacgccctggcgtcttaacccag

SEQ ID NO: 223951 - DNA, 75 bp, synthetic construct
  source 1..75: mol_type = other DNA
cgaccggtgcgcgaagaagatgttgtcgccatccgcaataaagctgcacgcgctttacaggctgtctttgccggt

SEQ ID NO: 223952 - DNA, 75 bp, synthetic construct
  source 1..75: mol_type = other DNA
agctgcgtcggcgttccttccgccgtaccatcaggtatccgcgctattctggcagaaaacctgatctgttcagca

SEQ ID NO: 223953 - DNA, 75 bp, synthetic construct
  source 1..75: mol_type = other DNA
tctctgcgccattttatggtggggaaatcggaggcggaaattgctgcagagtttacgcgtctggagcaaatcgag

SEQ ID NO: 223954 - DNA, 75 bp, synthetic construct
  source 1..75: mol_type = other DNA
ggtggatttggttcttcatagtctggagcagattaaagtaaccaaacagccaaatggcgacgttatttttcagtg

SEQ ID NO: 223955 - DNA, 75 bp, synthetic construct
  source 1..75: mol_type = other DNA
tacattctgcggctgaaagatctggattttgaagtgccggtcagccgcagcaaagttaaagaattccgccagtta

SEQ ID NO: 223956 - DNA, 75 bp, synthetic construct
  source 1..75: mol_type = other DNA
tggcaaaacgcccggtcaaccaggacggtttcgttaaagagtggattgaagaaggcttcattgcgatggaaagcc

SEQ ID NO: 223957 - DNA, 75 bp, synthetic construct
  source 1..75: mol_type = other DNA
agatagtaaaacaacttcataaacttataccgacttataaagttatagatagcggtgagttcgtagaaaaagaga

SEQ ID NO: 223958 - DNA, 75 bp, synthetic construct
  source 1..75: mol_type = other DNA
tgccatgttattgcggttaatgccccggcagacactccacgtctgaatgaggtagatttggttctccatagtctg

SEQ ID NO: 223959 - DNA, 75 bp, synthetic construct
  source 1..75: mol_type = other DNA
tatctccatacctcagccatcatcgtcgatgacggacaagtgctctctgcggtcaatgacgtcaatgattacgcc

SEQ ID NO: 223960 - DNA, 75 bp, synthetic construct
  source 1..75: mol_type = other DNA
acactcaacatccgttttcgtcggtctgattatgtcgggcttgcagtgatcagcagcggtctgggcgtagtttcc

SEQ ID NO: 223961 - DNA, 75 bp, synthetic construct
  source 1..75: mol_type = other DNA
cgccatctggcacaacatcgagtcggtgatgatagaagagatgaatcagacaccgccacaatggccaatgatttt

SEQ ID NO: 223962 - DNA, 75 bp, synthetic construct
  source 1..75: mol_type = other DNA
cgccatctggcacaacatcgagtcggtgatgatggagcagatgaatcagacaccaccacagtggccaatgatttt

SEQ ID NO: 223963 - DNA, 75 bp, synthetic construct
  source 1..75: mol_type = other DNA
gaatacgttgaagactctgccgcagagaccgacatgaacgtagtgatgaccgaagacgggcgcatcattgaagtg

SEQ ID NO: 223964 - DNA, 75 bp, synthetic construct
  source 1..75: mol_type = other DNA
gtgttcagggaaaagattattacttataatcctaaaaaagggattaaaactacggctttactcaaaagtagattt

SEQ ID NO: 223965 - DNA, 75 bp, synthetic construct
  source 1..75: mol_type = other DNA
gtcctggaaaccttgttactggtggacctgagttgttacatcagtttgtacatcaattacggttaaattacattg

SEQ ID NO: 223966 - DNA, 75 bp, synthetic construct
  source 1..75: mol_type = other DNA
ggaaattatggaagatctttatgatgtcgataacgtcattgtgccaattggcggtggcggtttaattgccggtat

SEQ ID NO: 223967 - DNA, 75 bp, synthetic construct
  source 1..75: mol_type = other DNA
ttgctattgatgacattattgaagcgaaacaacgactggctgggcgaatttataaaacaggcatgcctcgctcaa

SEQ ID NO: 223968 - DNA, 75 bp, synthetic construct
  source 1..75: mol_type = other DNA
accggcatcgcgcaggcaggaacggcgtcggaaaaactgctcgcaaggcttaaaaatatcggcgtaaatgactga

SEQ ID NO: 223969 - DNA, 75 bp, synthetic construct
  source 1..75: mol_type = other DNA
aatcccagcagacgttacaggaagaataccgggtccgggccagaatcatccgcgagcgaacggcgttgcgtaatg

SEQ ID NO: 223970 - DNA, 75 bp, synthetic construct
  source 1..75: mol_type = other DNA
ctgcgcgaaatcgaagaaggtctgatcaacaaccagatcctcgacgttcgcgaacgccaggaacagcaagagcag

SEQ ID NO: 223971 - DNA, 75 bp, synthetic construct
  source 1..75: mol_type = other DNA
tgaaatattcctgaagtttgaaaacatgcagcgtactggttcatttaaaattcgaggtgcatttaataaattaag

SEQ ID NO: 223972 - DNA, 75 bp, synthetic construct
  source 1..75: mol_type = other DNA
ggcaccaacattgacgatagcaaccagcaagcatttacccataaatatagccgggcagcaggcaatgttgatgag

SEQ ID NO: 223973 - DNA, 75 bp, synthetic construct
  source 1..75: mol_type = other DNA
gggagaactgagggaatttgaactggcagacggaaactggctactgaacaatgcctggtatgaaagaaacatggc

SEQ ID NO: 223974 - DNA, 75 bp, synthetic construct
  source 1..75: mol_type = other DNA
cggcgctgtggaaaccatgaagaataagatccgcgaaggtaaagtacccggtgtaaccgatcccgcagaagcgtc

SEQ ID NO: 223975 - DNA, 75 bp, synthetic construct
  source 1..75: mol_type = other DNA
ggcaccaacattgacgacagcaaccagcaagcatttgcacggaaatatagccgcgcggcaggtaatgtcgatgac

SEQ ID NO: 223976 - DNA, 75 bp, synthetic construct
  source 1..75: mol_type = other DNA
cttgttcaatcctgaacgccgtcattactgggtaaccgctgcggataacgatacgctggcaattaccacaccaaa

SEQ ID NO: 223977 - DNA, 75 bp, synthetic construct
  source 1..75: mol_type = other DNA
ttactgattgacagcgaagtctttacccgtttccacctccatcttaatcccatcgtctggcaactggtcatcaac

SEQ ID NO: 223978 - DNA, 75 bp, synthetic construct
  source 1..75: mol_type = other DNA
atggcgaccgttggcggaaaaggcgtttacaccaacccgaattacggcgatgaaggttatgccgcagcggtagga

SEQ ID NO: 223979 - DNA, 75 bp, synthetic construct
  source 1..75: mol_type = other DNA
atgaaaaaattggcgctgccagttctggctggaatgctattggtttctgcatcggcaaatgcgatgagtatcagc

SEQ ID NO: 223980 - DNA, 75 bp, synthetic construct
  source 1..75: mol_type = other DNA
tgaaaaccctcttccggaaccgcctgaatttatcaccggaagcgaatgacgattttctcgatcgttgcctggacg

SEQ ID NO: 223981 - DNA, 75 bp, synthetic construct
  source 1..75: mol_type = other DNA
cggacaaaacggacagtatcgttacatgggaaatcatggtcccatgcaactggaagtcccccgtgatcagtatgc

SEQ ID NO: 223982 - DNA, 75 bp, synthetic construct
  source 1..75: mol_type = other DNA
cgaatcatcaaacacagtacggcaccgttggccaggcactgcatatagcacggaaattactgccctttattcctg

SEQ ID NO: 223983 - DNA, 75 bp, synthetic construct
  source 1..75: mol_type = other DNA
cagagttatcaccatcctctggcaacgaatcatcaaacacagtacggcaccgttggccaggcactgcatattgca

SEQ ID NO: 223984 - DNA, 75 bp, synthetic construct
  source 1..75: mol_type = other DNA
cgatggcctgaattactcacgcttcgagaagcagatgcctgcgctggcaggttttgctgagcaaaatatttcgtt

SEQ ID NO: 223985 - DNA, 75 bp, synthetic construct
  source 1..75: mol_type = other DNA
aacaccacccgaaccggtttatccagacttccactatcgcgccactgacccgaatggcattgtcgaaaatgaagt

SEQ ID NO: 223986 - DNA, 75 bp, synthetic construct
  source 1..75: mol_type = other DNA
tgggcacccacaactgggagaaagcaacgcagaggcggtgatccgccgttgccgttatgagcttggcgtagaaat

SEQ ID NO: 223987 - DNA, 75 bp, synthetic construct
  source 1..75: mol_type = other DNA
accactgctctcgccggtggtctgctggctgttcccctgcagatcaaaaacattcagcagaacgggatcacacca

SEQ ID NO: 223988 - DNA, 75 bp, synthetic construct
  source 1..75: mol_type = other DNA
tcagaatgctctggagatcattttcgccgccggtatacaacatgaaccgccccgggaatcctggagactaaactt

SEQ ID NO: 223989 - DNA, 75 bp, synthetic construct
  source 1..75: mol_type = other DNA
taattaaaagttatttctgttttcacctgtacaatatttttttctccctgtcattagaccagtttgcaattaatt

SEQ ID NO: 223990 - DNA, 75 bp, synthetic construct
  source 1..75: mol_type = other DNA
cgagtggcattgtcgaaaatgaagtgtgcccggtatttgccgctcgcgtaatcagcgagttacagcccaacaatg

SEQ ID NO: 223991 - DNA, 75 bp, synthetic construct
  source 1..75: mol_type = other DNA
cgacgtttgtgcgagtgggtaaaagaggccggtacaacgacgcagaacgcaccactggcggtggataccgccctc

SEQ ID NO: 223992 - DNA, 75 bp, synthetic construct
  source 1..75: mol_type = other DNA
tgggtaaaagaggccggtacaacgacgcagaacgcaccactggcggtggataccgccctcaatggtgaggcatat

SEQ ID NO: 223993 - DNA, 75 bp, synthetic construct
  source 1..75: mol_type = other DNA
attcagcagaacgggatcacaccagaagatatcagcaaggaaattaacgggtattactgctgtttttatactgcc

SEQ ID NO: 223994 - DNA, 75 bp, synthetic construct
  source 1..75: mol_type = other DNA
agtccactgggaccatttggtgcactgacagggcgtgtggttggtggtgttctggggggaatgattgcctccgct

SEQ ID NO: 223995 - DNA, 75 bp, synthetic construct
  source 1..75: mol_type = other DNA
atctgacttatacccaggcccgtaatatcacccggttcgggaccatcgaatcggtcacttatgatattgccgagg

SEQ ID NO: 223996 - DNA, 75 bp, synthetic construct
  source 1..75: mol_type = other DNA
ttgatgcggcgctagttctgcgttccgtatttcaggacagccagcgctgctggatacaagcgggggcgggaatca

SEQ ID NO: 223997 - DNA, 75 bp, synthetic construct
  source 1..75: mol_type = other DNA
ctgccctatattccggttaatgcggggatcctgattgtgccgtgcagtcgtggcggctctgcgtttaccgatcgt

SEQ ID NO: 223998 - DNA, 75 bp, synthetic construct
  source 1..75: mol_type = other DNA
tcatatcgacagcgtatttggtccagatgaaagtaagttacacggttaccctggtcacccggaaattgaactggc

SEQ ID NO: 223999 - DNA, 75 bp, synthetic construct
  source 1..75: mol_type = other DNA
cctcggtcagtaccaacaactggtccgcgacgtggtgattccttatcagtgggatgccttgaacgatcgtatccc

SEQ ID NO: 224000 - DNA, 75 bp, synthetic construct
  source 1..75: mol_type = other DNA
gtgaaccgccccgggtttcctggagagtgttttatctgtgaactcaggctgccagatcatcgtttccgatggaag

SEQ ID NO: 224001 - DNA, 75 bp, synthetic construct
  source 1..75: mol_type = other DNA
tccgcagaataaattcctcggcgtatgctggatgcagggcgaatttgacttaatgaccagtgactacgcgttaca

SEQ ID NO: 224002 - DNA, 75 bp, synthetic construct
  source 1..75: mol_type = other DNA
aattcctcggcgtatgctggatgcagggagaatttgacttaatgacgagtgactacgcgttacaccctcaatatt

SEQ ID NO: 224003 - DNA, 75 bp, synthetic construct
  source 1..75: mol_type = other DNA
cgagttggcgcagttggcacgcgaaaacgacgccatggtgattgccctcacctctgcgggtaccccgctcgcccg

SEQ ID NO: 224004 - DNA, 75 bp, synthetic construct
  source 1..75: mol_type = other DNA
aatggcactccctatgttaatcgcaatgtcaatgaagatgacagcgttgaatcatacacagggaaaatatttgag

SEQ ID NO: 224005 - DNA, 75 bp, synthetic construct
  source 1..75: mol_type = other DNA
ggagatccacaggtcggcccttcatctgagccggactggttctacgtggttgtgcttgccggacagtccaacgcc

SEQ ID NO: 224006 - DNA, 75 bp, synthetic construct
  source 1..75: mol_type = other DNA
ctgccgaatgacacggtatacgctgaaagttgcgcctccatcggcctgatgatgtttgcccgacgaatgctggaa

SEQ ID NO: 224007 - DNA, 75 bp, synthetic construct
  source 1..75: mol_type = other DNA
tgcgggttagcgggaactatccgtggcaggagcaggtgacaattgcggttgaatcgccccagccggtacgtcata

SEQ ID NO: 224008 - DNA, 75 bp, synthetic construct
  source 1..75: mol_type = other DNA
ggtgcgtcacgtcgccggaaaagtggcgattcagcgcggcccgctggtgtattgcctggaacaggccgacaatgg

SEQ ID NO: 224009 - DNA, 75 bp, synthetic construct
  source 1..75: mol_type = other DNA
gcagaagataatatagagccattgctcaaccttaatccatcatctcatcctgaatttaatgaaaattatcgccgc

SEQ ID NO: 224010 - DNA, 75 bp, synthetic construct
  source 1..75: mol_type = other DNA
gattttctcgatcgttgcctggacggcggtgactggtatcccttttcagaaggtcgccgttttgtatcattccat

SEQ ID NO: 224011 - DNA, 75 bp, synthetic construct
  source 1..75: mol_type = other DNA
atattggtgtcggttttgggactgaatcgacgggcctggcgttaagcggtaactggacacataacgacgacgacg

SEQ ID NO: 224012 - DNA, 75 bp, synthetic construct
  source 1..75: mol_type = other DNA
cggagagctgagggaatttgaactggcagacggaaactggctactggacaatgcctggtatgaaagaaacatggc

SEQ ID NO: 224013 - DNA, 75 bp, synthetic construct
  source 1..75: mol_type = other DNA
gctgcattagtgacgctgctatgggcggccagccagatccaggcgctgaaaaaactgacctgtgccatcagccag

SEQ ID NO: 224014 - DNA, 75 bp, synthetic construct
  source 1..75: mol_type = other DNA
cactcgactgggtgcaggaagtgcaaaaacgcggtgccggagaaatcgtcctcaacatgatgaatcaggacggcg

SEQ ID NO: 224015 - DNA, 75 bp, synthetic construct
  source 1..75: mol_type = other DNA
agaagccttccgcgatgcgaacgttgacggcgcgctggcggcttccgtgttccacaaacagattatcaatattgg

SEQ ID NO: 224016 - DNA, 75 bp, synthetic construct
  source 1..75: mol_type = other DNA
atcctgctgctggacgatacgcgctttgatgcggcgctagttctgcgttccgtatttcaggatagccagcgctgc

SEQ ID NO: 224017 - DNA, 75 bp, synthetic construct
  source 1..75: mol_type = other DNA
atgtcaccgtttatgcggactccgccgacgggtgccgacgtttgtgcgagtgggtaaaagaggccggtacaacga

SEQ ID NO: 224018 - DNA, 75 bp, synthetic construct
  source 1..75: mol_type = other DNA
gctgctgacgttaaccgttccccgtgaagaacttatttttgaaaagggaaatgtcaccgtttatgcggactccgc

SEQ ID NO: 224019 - DNA, 75 bp, synthetic construct
  source 1..75: mol_type = other DNA
ggcgcgtattgccggtaatgcctatgtgatggatgctgcggcatcgctgattacctacggcattatgctcggtga

SEQ ID NO: 224020 - DNA, 75 bp, synthetic construct
  source 1..75: mol_type = other DNA
gaccgctttcgttgagctttataatgttggcactgactctgaaactgaaccgccccggttttccgggagagtgtt

SEQ ID NO: 224021 - DNA, 75 bp, synthetic construct
  source 1..75: mol_type = other DNA
atgtcaccgtttatgcggactccgccgacgggggccgacgtttgtgtgagtgggtaaaagaggccagtacaacga

SEQ ID NO: 224022 - DNA, 75 bp, synthetic construct
  source 1..75: mol_type = other DNA
tgttgcctggcacaccgatggtgcccaacaaacccacgatcgtcatctggtatcgcaatcctttattaaaaaata

SEQ ID NO: 224023 - DNA, 75 bp, synthetic construct
  source 1..75: mol_type = other DNA
tatgttcacggtcgcggaaggggtcgaaacacctgaacaggcacgctggttacgtgaacgcggcgttaatttcct

SEQ ID NO: 224024 - DNA, 75 bp, synthetic construct
  source 1..75: mol_type = other DNA
tgccagcaagctaacccggagctgactgcacgcgcagcatttagcatgaacgtgcgaacgtttgtgctggtaaag

SEQ ID NO: 224025 - DNA, 75 bp, synthetic construct
  source 1..75: mol_type = other DNA
ggcagtaaatacggtgtgccttttgccatgatcctgcgtgcttcttacggtgtacgtggtgcactgtttccctga

SEQ ID NO: 224026 - DNA, 75 bp, synthetic construct
  source 1..75: mol_type = other DNA
ttaaagaggaggccagcgccaaattgttcaaggtcgattatgagaagttttgcgggattttacgcagagtaaaac

SEQ ID NO: 224027 - DNA, 75 bp, synthetic construct
  source 1..75: mol_type = other DNA
gttgccaatattaaaggtgaacacataattggtgggaaggttattttcatggagacaaagaatggatcgcggcgg

SEQ ID NO: 224028 - DNA, 75 bp, synthetic construct
  source 1..75: mol_type = other DNA
atgttcatacgcgctcccaattctggacgtaagctcctgcttacctgcattgttgcaggcgtgatgattgcgata

SEQ ID NO: 224029 - DNA, 75 bp, synthetic construct
  source 1..75: mol_type = other DNA
gtttcatctgcatcatgtcaactggatcggcgaaattcaggagttggtggtgatgccgcaggcgcgcggtctgaa

SEQ ID NO: 224030 - DNA, 75 bp, synthetic construct
  source 1..75: mol_type = other DNA
ctggcgctgcttgatggcgaagttgtcggcatgatcggcctgcatttgcagtttcatctgcatcatgtcaactgg

SEQ ID NO: 224031 - DNA, 75 bp, synthetic construct
  source 1..75: mol_type = other DNA
atgattgcgatactggttagctgccttcagtttttagtggcctggcataagcacgaagtcaaatacgacacactg

SEQ ID NO: 224032 - DNA, 75 bp, synthetic construct
  source 1..75: mol_type = other DNA
gcgtacgtatgcgccccggcagagaaatcatgaccgccatcaagcgcgaacaattttacgtggcgtatcaaccgg

SEQ ID NO: 224033 - DNA, 75 bp, synthetic construct
  source 1..75: mol_type = other DNA
ggtgaaatccccccggatgccttcattaactttgccgaagcgcaaaagatgattgtgccactgactcagcacctg

SEQ ID NO: 224034 - DNA, 75 bp, synthetic construct
  source 1..75: mol_type = other DNA
ttctgggttatcgaatggacagaagaccatcactatcatgcccacgtcgtgttctggctggatggtagtaaaact

SEQ ID NO: 224035 - DNA, 75 bp, synthetic construct
  source 1..75: mol_type = other DNA
ttggataacgttaacttcacgctcaataaaggcgaagttcgtgcgctgttaggtaaaaacggcgcgggcaaatcg

SEQ ID NO: 224036 - DNA, 75 bp, synthetic construct
  source 1..75: mol_type = other DNA
ctgttattacagcacggcacgttctcgcaggagtttcacgctccggtcaatgtggatgagctgatgtccgccatt

SEQ ID NO: 224037 - DNA, 75 bp, synthetic construct
  source 1..75: mol_type = other DNA
cattctcgacaacaacgacgccagactttaccacctggaaggcgtgatcaggacgcaggcgatattgctgaagga

SEQ ID NO: 224038 - DNA, 75 bp, synthetic construct
  source 1..75: mol_type = other DNA
atggacgttgagtacggtcagtacagcgtcatcctgttggtggagggattcccgccgtcacatgccgggaccatc

SEQ ID NO: 224039 - DNA, 75 bp, synthetic construct
  source 1..75: mol_type = other DNA
tctgccttggtcagtggccccgccgcaacggcatgattgattacctgcaaatggcgcaggatgcccaacgttgct

SEQ ID NO: 224040 - DNA, 75 bp, synthetic construct
  source 1..75: mol_type = other DNA
ggcgcgatcacgttgatattgcgccggtagcccctcaggaaattgtggatcaggccgtgctggaagtccgtgcgt

SEQ ID NO: 224041 - DNA, 75 bp, synthetic construct
  source 1..75: mol_type = other DNA
gcttgatgtggatatatatcctgatgtttttttattcgaaaaatatagaaataaaatagaaaaaggagaaaagcc

SEQ ID NO: 224042 - DNA, 75 bp, synthetic construct
  source 1..75: mol_type = other DNA
caagagaagagaattatcgtatttttagagataaatataaaaacgccattagtgatgaataccattacgacacaa

SEQ ID NO: 224043 - DNA, 75 bp, synthetic construct
  source 1..75: mol_type = other DNA
acctaaaacgcagacctaaagatattattcagaaagcaatcagtattgccgaagcaactaggtataataatttta

SEQ ID NO: 224044 - DNA, 75 bp, synthetic construct
  source 1..75: mol_type = other DNA
atggctaacctacgcaaagaagcgcgcaacagagaatgccaggtacgtatttacggcgtatgcaatggtaatcct

SEQ ID NO: 224045 - DNA, 75 bp, synthetic construct
  source 1..75: mol_type = other DNA
cctcgacaacaaagacgccagactttaccacctcgaaggcgtaatcaggacgcaggcggtattgctgaaggaggg

SEQ ID NO: 224046 - DNA, 75 bp, synthetic construct
  source 1..75: mol_type = other DNA
ctagaactgaaaattatcatatattcaaacagaagcacaaaaaaaatataagcaatgaacgatattacgattcaa

SEQ ID NO: 224047 - DNA, 75 bp, synthetic construct
  source 1..75: mol_type = other DNA
agaagtgttacccagaagtcttatctcgtcactggtctggaatataaattttgacagtgatacgaatgtgataga

SEQ ID NO: 224048 - DNA, 75 bp, synthetic construct
  source 1..75: mol_type = other DNA
tatttagatataagcaattacaccctaagcacgttgattataaagatgcattcaaagatgttttgggtaaagagg

SEQ ID NO: 224049 - DNA, 75 bp, synthetic construct
  source 1..75: mol_type = other DNA
ggcaacgccccgtcatggaatatgatgcatcccatctcggcaatatggttaaccggctggaagaagcattacccc

SEQ ID NO: 224050 - DNA, 75 bp, synthetic construct
  source 1..75: mol_type = other DNA
tattcctagtcgaggcgctttggttaaaactgagttctatacgagcgttggatataaggttttagcaacacttaa

SEQ ID NO: 224051 - DNA, 75 bp, synthetic construct
  source 1..75: mol_type = other DNA
aaaggggttcatattccttttggtagtattgtttcaatcgatggaacggagaaaaaatcaggatttatcgttgac

SEQ ID NO: 224052 - DNA, 75 bp, synthetic construct
  source 1..75: mol_type = other DNA
tagattcatacattcatcttttgcttatgggttaggatataattatacattatacggaggggggattttctccga

SEQ ID NO: 224053 - DNA, 75 bp, synthetic construct
  source 1..75: mol_type = other DNA
tgacagaagtacatcatgccccggaaaatcataagccggatccggaatggtactgctcctctctttgtcgcgaaa

SEQ ID NO: 224054 - DNA, 75 bp, synthetic construct
  source 1..75: mol_type = other DNA
ccacggggcgggtcggcgcggaaaaaggcgcattttttgatttttatggcaccatcaccaccactataagctatt

SEQ ID NO: 224055 - DNA, 75 bp, synthetic construct
  source 1..75: mol_type = other DNA
atggcttgccggcagtttcctgctgaccggacatgagattgaaaatctgaacgagaatctggcccgtgttatcga

SEQ ID NO: 224056 - DNA, 75 bp, synthetic construct
  source 1..75: mol_type = other DNA
gctcttcagaaggggaccggtgcaggaaatatcagtgccctgaacaaagtgatgaagggtacgctggtgacatct

SEQ ID NO: 224057 - DNA, 75 bp, synthetic construct
  source 1..75: mol_type = other DNA
tgaggcgtggtttcgggatgagttatcagatggggcggcgtggttcaacataccgttattaacgcctgtagggct

SEQ ID NO: 224058 - DNA, 75 bp, synthetic construct
  source 1..75: mol_type = other DNA
atccgaatgattaccttccgattccattacaggaagggttcgggttaaagcctgttagtccattgctgagaacag

SEQ ID NO: 224059 - DNA, 75 bp, synthetic construct
  source 1..75: mol_type = other DNA
acagccgtggcctggcaaaacaggtcgcggagaaaggtattcgggtgaatattgtcgcgccaggcccgatctgga

SEQ ID NO: 224060 - DNA, 75 bp, synthetic construct
  source 1..75: mol_type = other DNA
ttcaccccagttatttcgcctgagcttaagctgatggacgaaaggttatttatcgatgcggcgatgggttttgtc

SEQ ID NO: 224061 - DNA, 75 bp, synthetic construct
  source 1..75: mol_type = other DNA
gtatctcgacgcattggttattgcccaggcggtgcacaataacggcggtattgtgatgatgcaggtgcagaaaat

SEQ ID NO: 224062 - DNA, 75 bp, synthetic construct
  source 1..75: mol_type = other DNA
gtctgaacggtcagcatgtggcgatgctcggctttatgttgaccctggcggcagcatttagttgggcgtgtggca

SEQ ID NO: 224063 - DNA, 75 bp, synthetic construct
  source 1..75: mol_type = other DNA
gaagacaaagaacggctcaaggcgggtcgttccaatcgctaaagatcttgaatcactggtcaaagtaaaggcgac

SEQ ID NO: 224064 - DNA, 75 bp, synthetic construct
  source 1..75: mol_type = other DNA
tgacgtcccagttcgatttttatcacggcggtggtctggatgtttgttatttgagttttgccgaagtcgaccagc

SEQ ID NO: 224065 - DNA, 75 bp, synthetic construct
  source 1..75: mol_type = other DNA
aacgtttgtcgaccctcgccaacaaggcggcaaactgaatgaagtgactaaagaagatctgattaaactggtcga

SEQ ID NO: 224066 - DNA, 75 bp, synthetic construct
  source 1..75: mol_type = other DNA
ctgataaacagcaatacaacgacattgtgattaatagcggatggctggacgccaactggtcaaccgtatttgttg

SEQ ID NO: 224067 - DNA, 75 bp, synthetic construct
  source 1..75: mol_type = other DNA
ggtcgcggagaaaggtattcgggtgaatattgtcgcgccaggcccgatctggacagcactgcaaatttccggcgg

SEQ ID NO: 224068 - DNA, 75 bp, synthetic construct
  source 1..75: mol_type = other DNA
tggtcgccgggaaacaggttgccattcctgatattgcagacctcaccagcgaacagtttcaaaagacctttgcca

SEQ ID NO: 224069 - DNA, 75 bp, synthetic construct
  source 1..75: mol_type = other DNA
atttcaagtggtggtgcggaacagtaatcattggagcaatccctatctttattagatttattgcttatttcatca

SEQ ID NO: 224070 - DNA, 75 bp, synthetic construct
  source 1..75: mol_type = other DNA
gattctggatgaatccggtgtgaggcctgaccccaagatggttcgtgactgccagggtacttacactccggcaca

SEQ ID NO: 224071 - DNA, 75 bp, synthetic construct
  source 1..75: mol_type = other DNA
agaaaaaccagcagattatgcccgacagctcgaattactgcgggaacgtctggatgtgctgaaatggcaaattaa

SEQ ID NO: 224072 - DNA, 75 bp, synthetic construct
  source 1..75: mol_type = other DNA
cggaaattactgccctttattcctgataacgcgggggttctcatcgttccatgttgccgtggcggatcggctttt

SEQ ID NO: 224073 - DNA, 75 bp, synthetic construct
  source 1..75: mol_type = other DNA
tcaatccaaaccgaatggaaaaagcaggaaaaagatttccagcagtttggcaaagatgtttgtagccgcgttgtg

SEQ ID NO: 224074 - DNA, 75 bp, synthetic construct
  source 1..75: mol_type = other DNA
ctgactgaaataaccaatgtactggatgaaagaatatcagaaatagataaagacaagcattttgccacctacatg

SEQ ID NO: 224075 - DNA, 75 bp, synthetic construct
  source 1..75: mol_type = other DNA
aggaacaaaaacaatacgcccagaagcgctttgtcctcggcgctgacggtgaagatctttccatgcctaacgtaa

SEQ ID NO: 224076 - DNA, 75 bp, synthetic construct
  source 1..75: mol_type = other DNA
tctgcttttcttcgcgaattaattccgcttcgcaatttatccataaaataaatttaaaatcacaaaacataatta

SEQ ID NO: 224077 - DNA, 75 bp, synthetic construct
  source 1..75: mol_type = other DNA
ggagattattaaaaaatgatggtgaagcaattattgttaatcaatacaaaagctcttatttcaaaaagtatgaga

SEQ ID NO: 224078 - DNA, 75 bp, synthetic construct
  source 1..75: mol_type = other DNA
gctggcgattaaacgtcatgtgcgtcagcagcacaacattccttatatcgctattgaaacagactactccacctc

SEQ ID NO: 224079 - DNA, 75 bp, synthetic construct
  source 1..75: mol_type = other DNA
cttaaaagccagctgcaaacgcagaaaaatatgtatgagtcgatggcaaagacaaccaacctgggcgatctgctg

SEQ ID NO: 224080 - DNA, 75 bp, synthetic construct
  source 1..75: mol_type = other DNA
atggacgcatttgaggtactggcaaataaaggcgcggaactggtagcacagcgtgataaaaccgccaacgaaggg

SEQ ID NO: 224081 - DNA, 75 bp, synthetic construct
  source 1..75: mol_type = other DNA
gaaccagaaatggccgccgatcctgaagctgagcaacggaaacgcgtattcaatgcgatagggattcggtactga

SEQ ID NO: 224082 - DNA, 75 bp, synthetic construct
  source 1..75: mol_type = other DNA
tgctgaccaccggcctgattctgggaggcgcgcaaagcgcttccgcaggcatcatcgtgaccaaccctactgagc

SEQ ID NO: 224083 - DNA, 75 bp, synthetic construct
  source 1..75: mol_type = other DNA
ggtgtacagcgacgcgatgaactccagttcgtcggtcacgccttctgttaacagcatgatgggccagtttaatgc

SEQ ID NO: 224084 - DNA, 75 bp, synthetic construct
  source 1..75: mol_type = other DNA
gatctacagcgacgccatgaactccagttcttccgtcacgccttcagttaacagcatgatgggccagtttaatgc

SEQ ID NO: 224085 - DNA, 75 bp, synthetic construct
  source 1..75: mol_type = other DNA
ctggcgcagtattgccgctggcggcctcactcagtggaaataactcagtggatgagaagacaggagtgattaaag

SEQ ID NO: 224086 - DNA, 75 bp, synthetic construct
  source 1..75: mol_type = other DNA
tgggtggttttctgatcaataaatcacttggctatgtttctacacattatggagccacggggatatttattgttg

SEQ ID NO: 224087 - DNA, 75 bp, synthetic construct
  source 1..75: mol_type = other DNA
gaaattcctctctatacggaagcgtttaaacatcttccaggcatcctgaccggaattgggatcatcggcaccttt

SEQ ID NO: 224088 - DNA, 75 bp, synthetic construct
  source 1..75: mol_type = other DNA
ccagcacgccagagcaggtcagcgccagcgtcgctaaccttttacgcgacgttctgtatgcgtttttaggttcgg

SEQ ID NO: 224089 - DNA, 75 bp, synthetic construct
  source 1..75: mol_type = other DNA
tggcgcttacctcggtgcaaccttatatggtaccggcaaccgttatcggcctcgtcagttttgcattcctctgtt

SEQ ID NO: 224090 - DNA, 75 bp, synthetic construct
  source 1..75: mol_type = other DNA
tggtgcttacctcagtacaaccttatatggtaccggcaaccgttatcggcattgtcagtgttgcatttatcattt

SEQ ID NO: 224091 - DNA, 75 bp, synthetic construct
  source 1..75: mol_type = other DNA
gatcgtccggaaaaagcccgctggcttacaccatcgcaagtcaccgcattggtcgataaacttaattctgataac

SEQ ID NO: 224092 - DNA, 75 bp, synthetic construct
  source 1..75: mol_type = other DNA
tgaaagccatgcttagcccatcccaatcccttcaataccagaaagaaagcgtcgagcgagctttaacgtgcgcta

SEQ ID NO: 224093 - DNA, 75 bp, synthetic construct
  source 1..75: mol_type = other DNA
cccgtcgtggcctgatggatgtagccgaagcgcatgagcgcggcggcgctggtggcggtgctcctgctggagaca

SEQ ID NO: 224094 - DNA, 75 bp, synthetic construct
  source 1..75: mol_type = other DNA
ggcttaggaatcgcagccggtgtattaggtggcgtaactactgttgccggcggattagcgatgaaatatgcctaa

SEQ ID NO: 224095 - DNA, 75 bp, synthetic construct
  source 1..75: mol_type = other DNA
ttaaccaaatcagaatgcgaaaaaatgctctcaggtaaaaaagaagcaggcggttccagagagcagaaagtaaaa

SEQ ID NO: 224096 - DNA, 75 bp, synthetic construct
  source 1..75: mol_type = other DNA
ctggacaagatattcaaaatctaaactaacgaaatcagaatacgaaaaaatgctctcaggtaaaaaagaagcagg

SEQ ID NO: 224097 - DNA, 75 bp, synthetic construct
  source 1..75: mol_type = other DNA
cagtaaacgagattgtaagcgtaaacgtgaatatttacgtttaagcgcattaatcggaaaactgcaaaattctat

SEQ ID NO: 224098 - DNA, 75 bp, synthetic construct
  source 1..75: mol_type = other DNA
cccgctggagctggctaaagctatcagaaaaggtcctgacatgcccgaattcgatggaccaactccggtaacgcc

SEQ ID NO: 224099 - DNA, 75 bp, synthetic construct
  source 1..75: mol_type = other DNA
gaagtttcagagaagcgatatggccttgttatggatggaacggtagaccttggcgggaaatcaacttatcgcatc

SEQ ID NO: 224100 - DNA, 75 bp, synthetic construct
  source 1..75: mol_type = other DNA
ttgagcaaggcaatccagacgccgtttccgttcagtatccgttaagcgaactgcgctatcgcgatatgggcaccg

SEQ ID NO: 224101 - DNA, 75 bp, synthetic construct
  source 1..75: mol_type = other DNA
tacctgagaatgagctagcatctttacgttatattgtgcagcaaaatcaaaatgatactataatcataaaagaac

SEQ ID NO: 224102 - DNA, 75 bp, synthetic construct
  source 1..75: mol_type = other DNA
tatgtgttattttgacaccataagtcagtatttcataattatggatgcagatcaacagaaacagcattgtaaata

SEQ ID NO: 224103 - DNA, 75 bp, synthetic construct
  source 1..75: mol_type = other DNA
ttccgtggacggaatggaaagaacgaagtcgtgagtgctacgaagacgatttgcgctttacagacacgcctgacc

SEQ ID NO: 224104 - DNA, 75 bp, synthetic construct
  source 1..75: mol_type = other DNA
ctgacgctaatgatggttggataattcctggtgcgtcgtggaaaccgtcacactggatgcctctaccagaacctc

SEQ ID NO: 224105 - DNA, 75 bp, synthetic construct
  source 1..75: mol_type = other DNA
tagcaaaacagctgttcttgttgccaaggagtttgataggaaaggtgactggcgaatgaaatgggcgacttacat

SEQ ID NO: 224106 - DNA, 75 bp, synthetic construct
  source 1..75: mol_type = other DNA
tcgctggaagcagagccagtggcaaagattatagctcactacccattaggaattgacgtaggcaaacaaaagttc

SEQ ID NO: 224107 - DNA, 75 bp, synthetic construct
  source 1..75: mol_type = other DNA
acgcacccaatccgacgagcagaccgccacgcagtggatcaactggctgggccgctacgcacaagaagataaccg

SEQ ID NO: 224108 - DNA, 75 bp, synthetic construct
  source 1..75: mol_type = other DNA
tgcgctgaggcttatcaggttgtaggagttatggcagatgcgcttggtgtattcggtgatgcagcagtacagaaa

SEQ ID NO: 224109 - DNA, 75 bp, synthetic construct
  source 1..75: mol_type = other DNA
aagcaattgaaaatctcaagcagaagttagtggaatgcaatcgctataactactgctcagatgcagttaaaggcg

SEQ ID NO: 224110 - DNA, 75 bp, synthetic construct
  source 1..75: mol_type = other DNA
gttgttgccggacaaccctgtgccgggaaaacaaaattaatgactgaattaatttctgctgttttgggtggtaac

SEQ ID NO: 224111 - DNA, 75 bp, synthetic construct
  source 1..75: mol_type = other DNA
actcctccctttgggccagctgcgatgagctgcgtggcggtatggatgccagccagtacaaagactatgtactga

SEQ ID NO: 224112 - DNA, 75 bp, synthetic construct
  source 1..75: mol_type = other DNA
atatcattcactgagcggcggacaaaatgccgattacattccctttctggcgaatgtccccagccaactggcggc

SEQ ID NO: 224113 - DNA, 75 bp, synthetic construct
  source 1..75: mol_type = other DNA
aatgccgattacattccctttctggcgaatgtaccaggtcaactggcggcagtggctatcgtgacctgcgatggc

SEQ ID NO: 224114 - DNA, 75 bp, synthetic construct
  source 1..75: mol_type = other DNA
tgagtttgaagcagacacgccagaggatgccgaagaaataggcagagacatattctatgaagaatgcaactacgg

SEQ ID NO: 224115 - DNA, 75 bp, synthetic construct
  source 1..75: mol_type = other DNA
aagagcgttatagcgagccactgccagcccttacccaatcggtagaaaacttgagcgataaagtcgcaggtcacc

SEQ ID NO: 224116 - DNA, 75 bp, synthetic construct
  source 1..75: mol_type = other DNA
caaggagctggaagagcgttatagcgagccactgcctgctcttacccaatcagtagaaaacttgagcgataaagt

SEQ ID NO: 224117 - DNA, 75 bp, synthetic construct
  source 1..75: mol_type = other DNA
cttctccgggaaatacagtagtctccggacaaccctgtgcagggaaaacaaatctgacagcagagttaatttctg

SEQ ID NO: 224118 - DNA, 75 bp, synthetic construct
  source 1..75: mol_type = other DNA
aattttaatatggctgctgtcggcgtgatgaagaagggaatgtcgatgcgtttattttcttctccggggcatatt

SEQ ID NO: 224119 - DNA, 75 bp, synthetic construct
  source 1..75: mol_type = other DNA
atgtttatttccctgatgacagggcaaacagaaacaacggagataaaaatgaacatgcgtaatattaatattatt

SEQ ID NO: 224120 - DNA, 75 bp, synthetic construct
  source 1..75: mol_type = other DNA
cacccgccagtgctccacgcttatcaataccgttgaactggctacgcttggcgcgacgctggcggcgggcggtgt

SEQ ID NO: 224121 - DNA, 75 bp, synthetic construct
  source 1..75: mol_type = other DNA
attgccgcgttctcgccaccgttggatgaagaaggcaacagtgttcgtggacaaaaaatggtggcatcggtcgct

SEQ ID NO: 224122 - DNA, 75 bp, synthetic construct
  source 1..75: mol_type = other DNA
caaagaaacaccggacctggtaataggtaagaaaaagtataaggcagaactattgccgccagctcttatagttgc

SEQ ID NO: 224123 - DNA, 75 bp, synthetic construct
  source 1..75: mol_type = other DNA
atgaaagatgttatcgctgaaccctaccgtgaacggttactgcctggcttccggcaggcgcggcaggcggtcgcg

SEQ ID NO: 224124 - DNA, 75 bp, synthetic construct
  source 1..75: mol_type = other DNA
cgttggcgcaggcaccagcaccattgagtccgtgccgtgcgccattgcactggttgaactggcacaaaccgaccc

SEQ ID NO: 224125 - DNA, 75 bp, synthetic construct
  source 1..75: mol_type = other DNA
ggttggggcaggtaccagtactattgagtccgttccgtgcgccattgcgctggttgaactggcacaaaccgaccc

SEQ ID NO: 224126 - DNA, 75 bp, synthetic construct
  source 1..75: mol_type = other DNA
cactgtctaagctgtcgccggaaatggtgagcgccagcactctggctggcgacccgatcaccgcgcgtctgaccg

SEQ ID NO: 224127 - DNA, 75 bp, synthetic construct
  source 1..75: mol_type = other DNA
cgaatggcattgtggaaaatgaagtgtgtccggtatttgccgcacgcaccaccagtgcgttacagatcaacgatg

SEQ ID NO: 224128 - DNA, 75 bp, synthetic construct
  source 1..75: mol_type = other DNA
accgtgaacgtttactgccgggcttcaggcaggcacggcaggcggtagcggaaatcggcgcagtagcgagcggta

SEQ ID NO: 224129 - DNA, 75 bp, synthetic construct
  source 1..75: mol_type = other DNA
ttattaaaatactaacaagaaaacaatcaggaatatatacctacacattacctgaaaagtggagtgatgagagca

SEQ ID NO: 224130 - DNA, 75 bp, synthetic construct
  source 1..75: mol_type = other DNA
gaaattaccgacggcaaattaaatatcgtccaggaaggacgggtgaagaaatttattcgggaactaccggaaata

SEQ ID NO: 224131 - DNA, 75 bp, synthetic construct
  source 1..75: mol_type = other DNA
agtcgattccagcaaccggtaccacccacgccgactatttctacggcaccattccctgcacccgcaaaatgaccg

SEQ ID NO: 224132 - DNA, 75 bp, synthetic construct
  source 1..75: mol_type = other DNA
aggagtttcactcgccggtcaatgtggatgagctgatgtccgccattctgtccactgatgaattttaccgaggaa

SEQ ID NO: 224133 - DNA, 75 bp, synthetic construct
  source 1..75: mol_type = other DNA
ttatagcatttggaaaaatacgcaagagcaagcattattccgagctacgaggaaaaccgggtggaatggtagaaa

SEQ ID NO: 224134 - DNA, 75 bp, synthetic construct
  source 1..75: mol_type = other DNA
agtcctcgacaaggaaaatctggcgtgggatgaggatctaacaaagcactgtctggatttttctctgctggaaaa

SEQ ID NO: 224135 - DNA, 75 bp, synthetic construct
  source 1..75: mol_type = other DNA
aacctgcacaacagagtgatttgattaatgtcgcccaactgacggcgcaatactatgtactgaaaccagaagcag

SEQ ID NO: 224136 - DNA, 75 bp, synthetic construct
  source 1..75: mol_type = other DNA
gagccgatgtacaaggttggagagcagaacagcgtctgtatgtcctgtcatctgccggaacagttgcaaaaagcg

SEQ ID NO: 224137 - DNA, 75 bp, synthetic construct
  source 1..75: mol_type = other DNA
gactgtcataagccagataccgaaggtatgcatggcaaacatgcttccgttatcaacccgaataacaaactgccg

SEQ ID NO: 224138 - DNA, 75 bp, synthetic construct
  source 1..75: mol_type = other DNA
gcactacctgcgtaagcatggggccaatgtgaagtggtcaacaaaaactggccaccgagttagagtttttccagt

SEQ ID NO: 224139 - DNA, 75 bp, synthetic construct
  source 1..75: mol_type = other DNA
catcccggaggcccgtcatgtcactttaacgacattattccactgactcactgcccacacgatgttcaggatatg

SEQ ID NO: 224140 - DNA, 75 bp, synthetic construct
  source 1..75: mol_type = other DNA
aaacaaaacggaaaagaatatccatttcgtaccgttcatgacggatgagaacggggtgaatgtgccgacgaacaa

SEQ ID NO: 224141 - DNA, 75 bp, synthetic construct
  source 1..75: mol_type = other DNA
ggattaagatttgcgtcgattgccatagcgatcaacgtaccaatccgaactttaacccggcgtctgttccattgc

SEQ ID NO: 224142 - DNA, 75 bp, synthetic construct
  source 1..75: mol_type = other DNA
aacggctggttcgccgcgcgtccgtcaggcacggaagacgcatataagatctactgcgaaagcttccttggtgaa

SEQ ID NO: 224143 - DNA, 75 bp, synthetic construct
  source 1..75: mol_type = other DNA
agaagtaccggtaggtttcaaatggtttgttgatggtctgttcgacggcagcttcggctttggcggcgaagagag

SEQ ID NO: 224144 - DNA, 75 bp, synthetic construct
  source 1..75: mol_type = other DNA
gccatcctggttcacaataaaaaaggtggcccgctggcagacggtatcgttattacaccgtcccataacccgccg

SEQ ID NO: 224145 - DNA, 75 bp, synthetic construct
  source 1..75: mol_type = other DNA
accgtcgctttgcggagattggcggcatagtgcatacccactcgcgccacgccaccatctggtcgcaggccggac

SEQ ID NO: 224146 - DNA, 75 bp, synthetic construct
  source 1..75: mol_type = other DNA
gaaaccttcgaagaacgtggcaggagtccggcacaaatcccggcggtgctggtgcattctcacggcccgttcgca

SEQ ID NO: 224147 - DNA, 75 bp, synthetic construct
  source 1..75: mol_type = other DNA
ggtaagaacccgcaggaacactacaacgaactggcgaaacgctttggtgcgccgagctacaaccgtttgcaggca

SEQ ID NO: 224148 - DNA, 75 bp, synthetic construct
  source 1..75: mol_type = other DNA
acatctggaatttactgcgtgataaaaatagtctttggcataaggggcactggttgggaagcgctgacggatttc

SEQ ID NO: 224149 - DNA, 75 bp, synthetic construct
  source 1..75: mol_type = other DNA
aatggctgcgttataacttaggtgtgggagggtggtcatcggtgaagcaacctccgagcggacttaaacccttat

SEQ ID NO: 224150 - DNA, 75 bp, synthetic construct
  source 1..75: mol_type = other DNA
tgttctgtactgtcgtacctgaagcgcttcccggtcagttatataaaaatggacaagagcttcacacaggacatt

SEQ ID NO: 224151 - DNA, 75 bp, synthetic construct
  source 1..75: mol_type = other DNA
cagcaatcagggtatggccccggccatcgccagtacgacacccaataccgcgctctggttgcgcagcgctctgct

SEQ ID NO: 224152 - DNA, 75 bp, synthetic construct
  source 1..75: mol_type = other DNA
cagcaatcagggtatggccccggccatcgccagtacgacgaacaataccgtgctctcgttgcgcagcgctccgct

SEQ ID NO: 224153 - DNA, 75 bp, synthetic construct
  source 1..75: mol_type = other DNA
gcaagaccagaacgctgacagcgccggggcgcaggtgggcgatactatccctctgatggacggaactgctgtcga

SEQ ID NO: 224154 - DNA, 75 bp, synthetic construct
  source 1..75: mol_type = other DNA
tgtcactcccgctgtggcgcattacggagccgacgcgaacagcgactatcccgcatgttccggcgttaggttatg

SEQ ID NO: 224155 - DNA, 75 bp, synthetic construct
  source 1..75: mol_type = other DNA
caggtattgcaggtgtaacagcaatatcatcaatcccgtatgttgctgagaatagtttctcatatggtattggtg

SEQ ID NO: 224156 - DNA, 75 bp, synthetic construct
  source 1..75: mol_type = other DNA
ataataacaacaacagaattataggtcataataattacctcaattataaagcatataacaacactattatccgtg

SEQ ID NO: 224157 - DNA, 75 bp, synthetic construct
  source 1..75: mol_type = other DNA
aatccaggaacgttacggttaccagaaagatcaggcagagaaagaggttgatagctgggaaaaacgccatgatta

SEQ ID NO: 224158 - DNA, 75 bp, synthetic construct
  source 1..75: mol_type = other DNA
aagaaagaaaccgcctaggatttagtcagtctgagtttgctgaattggtgggggcatcctataaaagccaattgc

SEQ ID NO: 224159 - DNA, 75 bp, synthetic construct
  source 1..75: mol_type = other DNA
attcagaatattccgcaaacaactgagaaatttttaattcgctctgaaactgatggcgtagaagcgaagaaataa

SEQ ID NO: 224160 - DNA, 75 bp, synthetic construct
  source 1..75: mol_type = other DNA
gcagtgggcgctgcaatcggggtatggccccggtcatcgccagtacgacgaacaataccgcgatctggttgcgca

SEQ ID NO: 224161 - DNA, 75 bp, synthetic construct
  source 1..75: mol_type = other DNA
gcgccattttctgttgaaaagcgccattttgcgttccatgaatgacgcgctgatttcccgtgttactggcgaaga

SEQ ID NO: 224162 - DNA, 75 bp, synthetic construct
  source 1..75: mol_type = other DNA
tgataaccagcaagagcgtttcgccagctatctcattgccgccgtgcagcaggcaaccaacggtcactgtgcgat

SEQ ID NO: 224163 - DNA, 75 bp, synthetic construct
  source 1..75: mol_type = other DNA
cagcgctttcagtaacggcaatgaccgcgcacgctgactacaagtgcagcgtcacgccgcgtgatgatgtgattg

SEQ ID NO: 224164 - DNA, 75 bp, synthetic construct
  source 1..75: mol_type = other DNA
tgtcatcgaaggcgaagcgatggcgcagcagttacgccagctgattcaactcaatacgctgccggaactggaaca

SEQ ID NO: 224165 - DNA, 75 bp, synthetic construct
  source 1..75: mol_type = other DNA
gaatcgcaccggatttatcagtcattttgtcatcgaaggcgaagcgatggcgcaacaactgcgccagctgattca

SEQ ID NO: 224166 - DNA, 75 bp, synthetic construct
  source 1..75: mol_type = other DNA
gctggaagagtcgcttaaggccctgccgtgggacagtttgctggaaaatccgcagttggtgttattgcaggcgtg

SEQ ID NO: 224167 - DNA, 75 bp, synthetic construct
  source 1..75: mol_type = other DNA
caacgtgcgggaaatcaacaaagcctttaactggcatctaccggaagatgatgcccgcacggttaatggcgtcat

SEQ ID NO: 224168 - DNA, 75 bp, synthetic construct
  source 1..75: mol_type = other DNA
ggcgccgctacaagtcctgatgatgccgctagtctggttactaaatgccatcacccgaattttgatgcgtatgat

SEQ ID NO: 224169 - DNA, 75 bp, synthetic construct
  source 1..75: mol_type = other DNA
gcagcaatcgccatacatggctgcacctgttggcgctgacaatggcgcatcccgctttagctctgcgcctgctga

SEQ ID NO: 224170 - DNA, 75 bp, synthetic construct
  source 1..75: mol_type = other DNA
aaaagaaagttggtctggtcgtcaacgaatacggagatattcaggggctggtcacagttgaagatattcttgaag

SEQ ID NO: 224171 - DNA, 75 bp, synthetic construct
  source 1..75: mol_type = other DNA
aaaagaaagtcggcctggtcgtcaacgagtacggagacattcaggggctggtgacggttgaagatattctggaag

SEQ ID NO: 224172 - DNA, 75 bp, synthetic construct
  source 1..75: mol_type = other DNA
gagttcaccaaagaaaccatgctgcgcgccgcggacgagatctattttgtgcccgaaggtacgccgctcagcacg

SEQ ID NO: 224173 - DNA, 75 bp, synthetic construct
  source 1..75: mol_type = other DNA
gcgttgggcaagcgatctcaatactgtcattgacaatgtgctgcgtatttttccgctgttgttgtcgtggatctc

SEQ ID NO: 224174 - DNA, 75 bp, synthetic construct
  source 1..75: mol_type = other DNA
ctttattactggtcgagttggccagcgtgtaaggttgcgcgatcccttcatgaacggcaggccggtactgattga

SEQ ID NO: 224175 - DNA, 75 bp, synthetic construct
  source 1..75: mol_type = other DNA
tgaacgacaggccggtactgattgaagcaatgcagatttacaaggagctggaacgccagaaagcgatcaagttac

SEQ ID NO: 224176 - DNA, 75 bp, synthetic construct
  source 1..75: mol_type = other DNA
ttatgctgcttcgcaacggaatataacaacgttgcaagcgccgactacattagggaaggtgcgaacaagttcctg

SEQ ID NO: 224177 - DNA, 75 bp, synthetic construct
  source 1..75: mol_type = other DNA
tgactggcgtgaggatttcggcaagtcgaaatatgtttacgtccatgtcggacatttgcaccataaatcagtaac

SEQ ID NO: 224178 - DNA, 75 bp, synthetic construct
  source 1..75: mol_type = other DNA
aaaatttattgtctgcttgcgtctctgactggcgggaagactttggcaagtcaaaatatgtttacgtacatgtgg

SEQ ID NO: 224179 - DNA, 75 bp, synthetic construct
  source 1..75: mol_type = other DNA
cgccgcgcgcctggttttagcgttactggcgagtcagtgcttgttgacaataacgggaatacagtcatgcgctgg

SEQ ID NO: 224180 - DNA, 75 bp, synthetic construct
  source 1..75: mol_type = other DNA
cattcctgcacatgcttcgatattggtaagaagtacgacctgcacagcatgagtgctaatggtgtcataaacgga

SEQ ID NO: 224181 - DNA, 75 bp, synthetic construct
  source 1..75: mol_type = other DNA
aaaatatataatgagagaaaggagttgttaaaacaggtagctatcgatatatctctggaggatttgattcgctat

SEQ ID NO: 224182 - DNA, 75 bp, synthetic construct
  source 1..75: mol_type = other DNA
cgtttgtcacgacatggtcactctgtcttgaatccagcctctttgcctaatggtctgacacaacgtgaatacatg

SEQ ID NO: 224183 - DNA, 75 bp, synthetic construct
  source 1..75: mol_type = other DNA
cagggcaatggctggagaagttgaggcccgccaggaaccatcgttactaagccctctgattaacataattcgcgg

SEQ ID NO: 224184 - DNA, 75 bp, synthetic construct
  source 1..75: mol_type = other DNA
tgcagacttttttgctacatataaagctacgttacctgttactgagcgccttaggaggatctgtagagcgcggat

SEQ ID NO: 224185 - DNA, 75 bp, synthetic construct
  source 1..75: mol_type = other DNA
tgtccgctctgtccggcagggatactggggatattatcttccggatcaggatcatggcccggaattcagtgagtt

SEQ ID NO: 224186 - DNA, 75 bp, synthetic construct
  source 1..75: mol_type = other DNA
cggcaaaacattccttgcctatcatcacgggcacactatcaaaaaacccgaaaatttgttggcggcctgcatctc

SEQ ID NO: 224187 - DNA, 75 bp, synthetic construct
  source 1..75: mol_type = other DNA
tctcagtattgcgcagcaattctttggtgtcgagcttaaaggcaacccgattcgcctcagcaatggtgcgatact

SEQ ID NO: 224188 - DNA, 75 bp, synthetic construct
  source 1..75: mol_type = other DNA
tgacctggtattttgcatgggaggcgttcgaagatgcggtggtgaccggtgataaccagattttcttttctgcgt

SEQ ID NO: 224189 - DNA, 75 bp, synthetic construct
  source 1..75: mol_type = other DNA
cggatggtcagtggcgctatgtggttacgctggaagatgccattgccggcggctttaaccttgctgacatcaacg

SEQ ID NO: 224190 - DNA, 75 bp, synthetic construct
  source 1..75: mol_type = other DNA
caggcggaatacttccggtcttacatcgtcaacattgcagaacagtattttggcatcacgctgaccggcaacccg

SEQ ID NO: 224191 - DNA, 75 bp, synthetic construct
  source 1..75: mol_type = other DNA
aggcagctgcgcgggacagcaacagcgatgaaccgcgccccaaacgcaaaaacaggaaaaacgatatttcttctc

SEQ ID NO: 224192 - DNA, 75 bp, synthetic construct
  source 1..75: mol_type = other DNA
agctttgaaagtacagaggaggcaattgaacgccgctaccagctgctggccagccgcgataataaaaccgatctc

SEQ ID NO: 224193 - DNA, 75 bp, synthetic construct
  source 1..75: mol_type = other DNA
ccgtagccaggtatcgatctcgccggaggcgctggagccgcgtgtattgcggaagggcattttcaccaaagacgt

SEQ ID NO: 224194 - DNA, 75 bp, synthetic construct
  source 1..75: mol_type = other DNA
ggatggcaatgtgattatgcgctggattaaaacagcccgtgatcgcgatgaaatggaaaggctaatgcaatctgc

SEQ ID NO: 224195 - DNA, 75 bp, synthetic construct
  source 1..75: mol_type = other DNA
gcggtcacgtcgtatggcagcggtgattatttacagccaggattatggtgagatcgggcgctttgtttattaccc

SEQ ID NO: 224196 - DNA, 75 bp, synthetic construct
  source 1..75: mol_type = other DNA
gcctgcgtgaaaacaaattccgccgtgtacgcaacctgcttaaatcccgccagattggggcgacgtattacttcg

SEQ ID NO: 224197 - DNA, 75 bp, synthetic construct
  source 1..75: mol_type = other DNA
aagggtattttcaccaaagacgtggaagatcaggcagccatagccaaacgtttaagccaggcagtgaacgatggc

SEQ ID NO: 224198 - DNA, 75 bp, synthetic construct
  source 1..75: mol_type = other DNA
actgctctgtgtctcagtcggcagatgaggcgatgggaaagctgcgggagctgttgcctgaaaaacgccgtaaag

SEQ ID NO: 224199 - DNA, 75 bp, synthetic construct
  source 1..75: mol_type = other DNA
actcatgctcaccagcggtgaactgaatccccgccatcagcataccgtcacactgtatgcgaatggactgacctg

SEQ ID NO: 224200 - DNA, 75 bp, synthetic construct
  source 1..75: mol_type = other DNA
actcatgctcaccagcggtgaactgaatccccgccatcagcataccgtaaccctgtatgcgaatggactgacctg

SEQ ID NO: 224201 - DNA, 75 bp, synthetic construct
  source 1..75: mol_type = other DNA
actcatgctcaccagcggtgaactgaatccccgccatcagcataccgtaactctgtatgcgaacggactgacctg

SEQ ID NO: 224202 - DNA, 75 bp, synthetic construct
  source 1..75: mol_type = other DNA
aaacggtcagccgaaaacagtagcgttaattcgtggcgtgcaatttaaaggtgagatccgcaaactggaaggtga

SEQ ID NO: 224203 - DNA, 75 bp, synthetic construct
  source 1..75: mol_type = other DNA
gaatccccgccatcagcataccgtgacactgtatgcgaaggggctgacctgtgaagccgacaccctcggctcctg

SEQ ID NO: 224204 - DNA, 75 bp, synthetic construct
  source 1..75: mol_type = other DNA
actcatgctcaccagcggtgaactgaatccccgccatcagcataccgtcactctgtatgcgaaaggactgacctg

SEQ ID NO: 224205 - DNA, 75 bp, synthetic construct
  source 1..75: mol_type = other DNA
agaggccggttcagcgacgcggatgcgtaccacctggaccaggcctttccgctgctgatgaaacaactggagctc

SEQ ID NO: 224206 - DNA, 75 bp, synthetic construct
  source 1..75: mol_type = other DNA
tggtacaggagggtaaccgcctgcattaccttgcagaccgcgccagtatcagaggcaggttcagcgacgcagatg

SEQ ID NO: 224207 - DNA, 75 bp, synthetic construct
  source 1..75: mol_type = other DNA
tgtatcgggcctgggttcaaatacctccgcgaaagaagctatccgcgtcggtttcgattacttcaaaggcaattt

SEQ ID NO: 224208 - DNA, 75 bp, synthetic construct
  source 1..75: mol_type = other DNA
cacaatcagcggcaatatcgcaacaaattattgataacgccaggtttgactaccagcaggtcgcagcaaaggagc

SEQ ID NO: 224209 - DNA, 75 bp, synthetic construct
  source 1..75: mol_type = other DNA
tatcagaggccggttcagcgatgcagatgcgtaccacctggaccaggcctttccgctgctgatgaaacaactgga

SEQ ID NO: 224210 - DNA, 75 bp, synthetic construct
  source 1..75: mol_type = other DNA
gacctgcgaagccgataccctcggcagctgtggttgcgtttatctggctgtttatccgacacccgaaacgaaaaa

SEQ ID NO: 224211 - DNA, 75 bp, synthetic construct
  source 1..75: mol_type = other DNA
aaattcaccgacaacacgctgggctttggtaaaaaaatgatttggctacgtaactcaggcaccgagcaggcgtaa

SEQ ID NO: 224212 - DNA, 75 bp, synthetic construct
  source 1..75: mol_type = other DNA
cgcttcccgacgacaacaaagaccgcccctggtggggactgccctgcaccgtgacgccctgtttcggagctcgtc

SEQ ID NO: 224213 - DNA, 75 bp, synthetic construct
  source 1..75: mol_type = other DNA
tgcgaagccgataccctgggctcctgtggttacgtttatctggctgtttatccgacgcccgaaacgaaaaagtaa

SEQ ID NO: 224214 - DNA, 75 bp, synthetic construct
  source 1..75: mol_type = other DNA
ccgtcacgctgtatgccagagggctgacctgcgaagccgacaccctcggcagttgtggctacgtttatatggctg

SEQ ID NO: 224215 - DNA, 75 bp, synthetic construct
  source 1..75: mol_type = other DNA
cgccatcagcataccgtcacgctgtatgcaaaagggctgacctgcaaagccgataccctcagcagttgtggttac

SEQ ID NO: 224216 - DNA, 75 bp, synthetic construct
  source 1..75: mol_type = other DNA
ttaccttgcagaccgtgccggtatcagagggcagttcagcgacgcggatgtataccatctggaccaggcctttcc

SEQ ID NO: 224217 - DNA, 75 bp, synthetic construct
  source 1..75: mol_type = other DNA
cgcttcccgacgacaacaaagaccgcccctggtggggactgccctgcaccgtgacgccctgtttcggtgcgcgtc

SEQ ID NO: 224218 - DNA, 75 bp, synthetic construct
  source 1..75: mol_type = other DNA
acctgcaaagctgacaccctcggtagcggtggttacgtttatctggctgtttatccgacgcccgaaacgaaaaag

SEQ ID NO: 224219 - DNA, 75 bp, synthetic construct
  source 1..75: mol_type = other DNA
cgcaggcggcagttgccggaacggtaaacggtcagccgaaaacggtagcgttaattcgcggcgtgcagtttaaag

SEQ ID NO: 224220 - DNA, 75 bp, synthetic construct
  source 1..75: mol_type = other DNA
acgcgtcatgcgcagatgagcggcccacaagctcatgttgccggaacggtaaatggtcagccgaaaacggtggca

SEQ ID NO: 224221 - DNA, 75 bp, synthetic construct
  source 1..75: mol_type = other DNA
gctgacccgtcatcgttaaactatcattcaccgattttctgtgaggattttatcgtgtcagacacactttccggg

SEQ ID NO: 224222 - DNA, 75 bp, synthetic construct
  source 1..75: mol_type = other DNA
gacgcggatgcgtaccatctggaccaggcctttccgctgctgatgaaacaactggagctcatgctcaccagcggt

SEQ ID NO: 224223 - DNA, 75 bp, synthetic construct
  source 1..75: mol_type = other DNA
tcagcataccgtcacgctgtatgcaaaaggtctgacctgcaaagctgacactctcggtagcggtggttacgttta

SEQ ID NO: 224224 - DNA, 75 bp, synthetic construct
  source 1..75: mol_type = other DNA
cgcggtcgggccgggcggctgtgccgatcactttcacagcgggctggccgccgatgaacctggctaccagcgcag

SEQ ID NO: 224225 - DNA, 75 bp, synthetic construct
  source 1..75: mol_type = other DNA
tgcagcacacccgctacccgaatatcgaaatcatggtgatggataaccagagcgacgatcccgacacgctggctt

SEQ ID NO: 224226 - DNA, 75 bp, synthetic construct
  source 1..75: mol_type = other DNA
caaaatccgcgacgacaggccgctgcacgcctatgaacactggctggcgaatttcgatatcgtgcagcccggtga

SEQ ID NO: 224227 - DNA, 75 bp, synthetic construct
  source 1..75: mol_type = other DNA
atgcaatcagagcgcgaacgcaagcgcggtgaacgcattgccgttaccaacctgcgtacacctgacgagatttaa

SEQ ID NO: 224228 - DNA, 75 bp, synthetic construct
  source 1..75: mol_type = other DNA
tctcttcattctggttggcttctgattcgggggcgcgtgttgacgactcaaactcgaggtgaaactcgtctgcgc

SEQ ID NO: 224229 - DNA, 75 bp, synthetic construct
  source 1..75: mol_type = other DNA
ccaaaactatattagttggtgtggtttgtggcgtgaacaaggtgctggccgtgttccctttgatgcggcggcatg

SEQ ID NO: 224230 - DNA, 75 bp, synthetic construct
  source 1..75: mol_type = other DNA
atgacctcttttgcctatgaccacactgcagcaggggatcgtttttcaagccaagttcaagctatttatcaaagt

SEQ ID NO: 224231 - DNA, 75 bp, synthetic construct
  source 1..75: mol_type = other DNA
ctgctgatattattatacagttcggtcccgatacgctggaggaggaactagaaacatggaaagacttgtacggta

SEQ ID NO: 224232 - DNA, 75 bp, synthetic construct
  source 1..75: mol_type = other DNA
aagcgccactgcgttcgataagtggggagtgattcccgtcgagcgtaagggccgcgaggcgttttatgatgtcgc

SEQ ID NO: 224233 - DNA, 75 bp, synthetic construct
  source 1..75: mol_type = other DNA
ctttccagacgattttaaattatcagtaacatttaagtctttaacttctcgcgagggtaatgaatgtctgcataa

SEQ ID NO: 224234 - DNA, 75 bp, synthetic construct
  source 1..75: mol_type = other DNA
acccatactttagtgacaaacaaagatggtggaatgtatttatttcattacttagcgttagtgctaataactctt

SEQ ID NO: 224235 - DNA, 75 bp, synthetic construct
  source 1..75: mol_type = other DNA
atcaaccagatgaccaaaacgacgattgctgaacaggccagtctgcaacaagaggcattatttgatcaggtgctg

SEQ ID NO: 224236 - DNA, 75 bp, synthetic construct
  source 1..75: mol_type = other DNA
tctgttttagtgatcaggatgatatttggtataaaggcaaaataaaaaatgcaattgactgcttggcattaaata

SEQ ID NO: 224237 - DNA, 75 bp, synthetic construct
  source 1..75: mol_type = other DNA
gctatgaagcaactaatcagtgactatgaaacgcagaagaagattgctatgcaggctgatattgagcagcttacg

SEQ ID NO: 224238 - DNA, 75 bp, synthetic construct
  source 1..75: mol_type = other DNA
gcttatgatgttgtcaaaaacttcgaagaaactcagaaaccttcagaatatgatattgaatatgagcttaagaca

SEQ ID NO: 224239 - DNA, 75 bp, synthetic construct
  source 1..75: mol_type = other DNA
gagcgatgaagaactcgctgaacttgccagacagaacatcttggcatcacgtaacaagcaacttgaaaatgttaa

SEQ ID NO: 224240 - DNA, 75 bp, synthetic construct
  source 1..75: mol_type = other DNA
gctgaagctaatttgactaagcattactccgataaactggataagttaaagcaaaagcttaaaaaagaacttgat

SEQ ID NO: 224241 - DNA, 75 bp, synthetic construct
  source 1..75: mol_type = other DNA
atgacaaatgatttatttattaacggcagaaagattgatagcttcggggactggtcaccacagactgaacatcca

SEQ ID NO: 224242 - DNA, 75 bp, synthetic construct
  source 1..75: mol_type = other DNA
actatgaaacgcagaagaagattgctatgcaggctgatattgagcagcttactaagatttctcagaagtatagca

SEQ ID NO: 224243 - DNA, 75 bp, synthetic construct
  source 1..75: mol_type = other DNA
aatccgttgccgaagggcatcccgataaaatggcggaccaaatttctgatgccattttggatgcgatactcctac

SEQ ID NO: 224244 - DNA, 75 bp, synthetic construct
  source 1..75: mol_type = other DNA
aatcaattggataaaggttatataggcaatttgatcttggctttaagtttttggaagttaaggcggaaaaaggct

SEQ ID NO: 224245 - DNA, 75 bp, synthetic construct
  source 1..75: mol_type = other DNA
accaagtgggagcaaacattagttttaaagcaaaatacaaacggcttggtttggtgagaaacaaatggtatcgaa

SEQ ID NO: 224246 - DNA, 75 bp, synthetic construct
  source 1..75: mol_type = other DNA
taagagcgatgaagaactccgtgaaattgccagacagaacatcttagcatcacgtaacaagcaacttgaaaatgt

SEQ ID NO: 224247 - DNA, 75 bp, synthetic construct
  source 1..75: mol_type = other DNA
atcatctttgtgtctcctgagcctcaagaaatgccagatatctgcaagggtgaagcactacttaatcttgaaaag

SEQ ID NO: 224248 - DNA, 75 bp, synthetic construct
  source 1..75: mol_type = other DNA
actattgttgccggagaaatatctacccatgccgccgtggatattgagaagattgtccgcaacaccataaaagag

SEQ ID NO: 224249 - DNA, 75 bp, synthetic construct
  source 1..75: mol_type = other DNA
actggatcgctttatcgacgcgatgctggctattcgcgcagaaatcgaccaggtgaaagccggtgtctggccgct

SEQ ID NO: 224250 - DNA, 75 bp, synthetic construct
  source 1..75: mol_type = other DNA
tggtgatgaaaatgctggatgtggtggatgcccggcgcatcgaatgggatgaagaggcaaaggatattccggctt

SEQ ID NO: 224251 - DNA, 75 bp, synthetic construct
  source 1..75: mol_type = other DNA
tttgttatcgtggcaatccctgttaccgcggctgaattattccgcgtgttagaaaaataccactggcgcggattg

SEQ ID NO: 224252 - DNA, 75 bp, synthetic construct
  source 1..75: mol_type = other DNA
gcagccgaactctggcgctcagggcgaatacgcgggcctgctggcgattcgtcattatcatgaaagccgcaacga

SEQ ID NO: 224253 - DNA, 75 bp, synthetic construct
  source 1..75: mol_type = other DNA
gtaaacagggcgcggatattgtctttggttcggcgcaacgcttcggtgtgccgatgggctacggtggcccacacg

SEQ ID NO: 224254 - DNA, 75 bp, synthetic construct
  source 1..75: mol_type = other DNA
tgccagccgcctgcaggatgccttcccggtgctgtataccggtcgcgacggtcgcgtggcgcacgaatgtattct

SEQ ID NO: 224255 - DNA, 75 bp, synthetic construct
  source 1..75: mol_type = other DNA
ttcgccatttcgcacgccataattaacgaacctattgatcacgaatatgaccgcccatcgggttggtactttggg

SEQ ID NO: 224256 - DNA, 75 bp, synthetic construct
  source 1..75: mol_type = other DNA
ccagagcaataaacataaagaaaagctggcctccagccagggggaacggcaagcagctgcgcgaggggacgacga

SEQ ID NO: 224257 - DNA, 75 bp, synthetic construct
  source 1..75: mol_type = other DNA
acatccagcattttgccatgcgcgtggccgtcgccattcgttacgacatgaacacgaaaaatcagctggtactga

SEQ ID NO: 224258 - DNA, 75 bp, synthetic construct
  source 1..75: mol_type = other DNA
gcgtcaggcagtggcgatccgctacggcgtcgagaccaaaaatcgtctggtgatgaagatgatcgacgttatcga

SEQ ID NO: 224259 - DNA, 75 bp, synthetic construct
  source 1..75: mol_type = other DNA
ggacgacctacttttcgacgcccagcgcgaaaacgcaccaggcttacccggtatggactggcgaagcctggcgcg

SEQ ID NO: 224260 - DNA, 75 bp, synthetic construct
  source 1..75: mol_type = other DNA
gcgcttcattctgaaaagccgccaggtgggtatgacctattatttcgcctgggaagcattcgaagacgccgtcat

SEQ ID NO: 224261 - DNA, 75 bp, synthetic construct
  source 1..75: mol_type = other DNA
actggcggaactcaaggctattgccagtcgcaataaacgcttcacgtcttacatcggcatgggttacaccgccgt

SEQ ID NO: 224262 - DNA, 75 bp, synthetic construct
  source 1..75: mol_type = other DNA
aaagggtatcttcctttgggagtgtgataactggtgctgttggaatattagttgtctacttctatgattcttata

SEQ ID NO: 224263 - DNA, 75 bp, synthetic construct
  source 1..75: mol_type = other DNA
attggttttttctgaaatattttatgccattggtatttgttgtatatctggggctatagagggatgggtgttaag

SEQ ID NO: 224264 - DNA, 75 bp, synthetic construct
  source 1..75: mol_type = other DNA
cctgccgcttgccatgacaaggaagtttcccgacatgaagccgtctatgctggatggactgaaaaaagaagttat

SEQ ID NO: 224265 - DNA, 75 bp, synthetic construct
  source 1..75: mol_type = other DNA
atgaaattgcacctgatgaacaaaaaaaacatggcaaaaagttgccgtgtaagcgccactgcgttcgataagtgg

SEQ ID NO: 224266 - DNA, 75 bp, synthetic construct
  source 1..75: mol_type = other DNA
tctgtaatgccagtgccagagttgccgacaacctcccacagatactggctgattacttgaaagaaacaaccggaa

SEQ ID NO: 224267 - DNA, 75 bp, synthetic construct
  source 1..75: mol_type = other DNA
caggtaatttatcatttttggcagccaattatgctatctggggaaagtattggctcattatcaaaaagagagctt

SEQ ID NO: 224268 - DNA, 75 bp, synthetic construct
  source 1..75: mol_type = other DNA
tgcagcttttcagcgtgctgttgggcgataaccacgggctggacatcgacacgctggacaaagacgtggctcacg

SEQ ID NO: 224269 - DNA, 75 bp, synthetic construct
  source 1..75: mol_type = other DNA
gaacgcggttgggatcacccttgatgaaaccaccacgcgcgaaaacgtgatgcagcttttcagcgtgctgctggg

SEQ ID NO: 224270 - DNA, 75 bp, synthetic construct
  source 1..75: mol_type = other DNA
tgtggaagtggccgacaaagcgggcgtactggcgcgtgccgaagcggctgaaatcaacctgcgtagcgatatcct

SEQ ID NO: 224271 - DNA, 75 bp, synthetic construct
  source 1..75: mol_type = other DNA
tcattgctgaactggattatctggcatcttcactacaaatgatggatgcaatgggtaacaaactcagccctaaat

SEQ ID NO: 224272 - DNA, 75 bp, synthetic construct
  source 1..75: mol_type = other DNA
ccgcacattcagaacgaactggtcgccgagtgggtgcatccgtacagccgcgaagttgcggtattcccggcaggc

SEQ ID NO: 224273 - DNA, 75 bp, synthetic construct
  source 1..75: mol_type = other DNA
gtggcagacaaatactggccgacagtgaaacgtctggatgatgtttacggcgaccgtaatctgttctgctcctgc

SEQ ID NO: 224274 - DNA, 75 bp, synthetic construct
  source 1..75: mol_type = other DNA
gccgagaccctcggctcctgtggttacgtttatctggctgtttatcctgcgaccgaaacggaaaatgtagtggtc

SEQ ID NO: 224275 - DNA, 75 bp, synthetic construct
  source 1..75: mol_type = other DNA
tggccgctgacatcatcatcagccagaagcggatcggcaacctgcctgccgtgcgcgtgccgtacttcccggcga

SEQ ID NO: 224276 - DNA, 75 bp, synthetic construct
  source 1..75: mol_type = other DNA
cgacctgtgggcgcgttttcaggacttccagcgccgcatccgcgacgccattgtcaaacgtcaggcactggattt

SEQ ID NO: 224277 - DNA, 75 bp, synthetic construct
  source 1..75: mol_type = other DNA
acgtcttaacggtgtggcagttgaagaactgtccagcaagttcactgtagagccgtctgtgcagcagaagctgga

SEQ ID NO: 224278 - DNA, 75 bp, synthetic construct
  source 1..75: mol_type = other DNA
gcgtgttgccgagaaaatgatgcagtttatgacgatggacggaacctttggtaacccggcctctcgttctcaccg

SEQ ID NO: 224279 - DNA, 75 bp, synthetic construct
  source 1..75: mol_type = other DNA
atgaaattaccgatttatctcgactactccgcaaccacgccggtggacccgtgtgttgccgagaaaatgatgcag

SEQ ID NO: 224280 - DNA, 75 bp, synthetic construct
  source 1..75: mol_type = other DNA
gacgcacaccgccgcgccatcattgaagagccgaaaaaagaccgtatcgaaaactacgagtcaatgaatattgac

SEQ ID NO: 224281 - DNA, 75 bp, synthetic construct
  source 1..75: mol_type = other DNA
aacgatcgtattctgatcaaactggcttctacctggcagggtatccgtgctgcagaacagctggaaaaagaaggt

SEQ ID NO: 224282 - DNA, 75 bp, synthetic construct
  source 1..75: mol_type = other DNA
gagctggcggagagcgaaggggctatcgaacgtaaactgtcttacaccggcgaagtgaaagcgcgtccggcgcgt

SEQ ID NO: 224283 - DNA, 75 bp, synthetic construct
  source 1..75: mol_type = other DNA
ttgattgatgatgctgttgcctgggcgaaacagcagagcaacgatcgcgcacagcagatcgttgatgccactgat

SEQ ID NO: 224284 - DNA, 75 bp, synthetic construct
  source 1..75: mol_type = other DNA
tgattgtgggacgtcagctactggcggacaagtattttccccatcgtcaacaaggagcaggacaacagcgaaatg

SEQ ID NO: 224285 - DNA, 75 bp, synthetic construct
  source 1..75: mol_type = other DNA
ccgatgatgagcgtaagaccgctgatttcactgcgctcgaatccaacaaatatgaatgcgcgcaaatcaactttg

SEQ ID NO: 224286 - DNA, 75 bp, synthetic construct
  source 1..75: mol_type = other DNA
taacctgtcgatttacttcatggatgatgcacaccgccgcgccatcatcgaggagccgaaaaaggaccgtgtcga

SEQ ID NO: 224287 - DNA, 75 bp, synthetic construct
  source 1..75: mol_type = other DNA
actccgcaactacgccggtggacctgcgtgttgccgagaaaatgatgcagtttatgacgatggacggaacctttg

SEQ ID NO: 224288 - DNA, 75 bp, synthetic construct
  source 1..75: mol_type = other DNA
tacattggcttttcctgagcgtatgagcggtacacaacatgctgcaactaagaatacttcaccatctctaatggc

SEQ ID NO: 224289 - DNA, 75 bp, synthetic construct
  source 1..75: mol_type = other DNA
gtgaaagagctgtgctatggatctgtttgcagtggaattgaagccgcgagtattgcctgggaaccgttgggtatg

SEQ ID NO: 224290 - DNA, 75 bp, synthetic construct
  source 1..75: mol_type = other DNA
aaatggcgagttcaacgtggggtatggcaaatacaaagcgccctacttcccacatgcagagatggaggcattttt

SEQ ID NO: 224291 - DNA, 75 bp, synthetic construct
  source 1..75: mol_type = other DNA
cggtggccttggcaccatgggttttggtttacctgcggcactgggcgtcaaaatggcgctgccggaagaaacagt

SEQ ID NO: 224292 - DNA, 75 bp, synthetic construct
  source 1..75: mol_type = other DNA
ctccattcccttggttgttctttccgggcaggtagcaacttcgttgataggctacgatgcttttcaggagtgcga

SEQ ID NO: 224293 - DNA, 75 bp, synthetic construct
  source 1..75: mol_type = other DNA
ggtttacctgcggcactgggcgtcaaaatggcgctgccagaagaaaccgtggtttgcgtcactggcgacggcagt

SEQ ID NO: 224294 - DNA, 75 bp, synthetic construct
  source 1..75: mol_type = other DNA
catgggtggcctgcaggccgtgcgtgcgccgttcttcccgccgaatgcactgctgatcacccgtctggataacct

SEQ ID NO: 224295 - DNA, 75 bp, synthetic construct
  source 1..75: mol_type = other DNA
tggctgtttcttaatcatgatcatcatcctcgccgtcctggcgctgattgtggttaaagccctggccgaaagtcc

SEQ ID NO: 224296 - DNA, 75 bp, synthetic construct
  source 1..75: mol_type = other DNA
gcgtctgaacggtgttgcagttgaagaactgtccagcaagttcaccgtcgaaccgtccgtgcagcagacgctgga

SEQ ID NO: 224297 - DNA, 75 bp, synthetic construct
  source 1..75: mol_type = other DNA
aaccaatagaaaatgtttgccctggtgattacgtagtcagtcatctcgggcggttacaacaagtaaaaagagttg

SEQ ID NO: 224298 - DNA, 75 bp, synthetic construct
  source 1..75: mol_type = other DNA
cggatacagagggatttaccagctattcaggaaatagcttccgtttcgacgaacagaaacggcttgtatcactgt

SEQ ID NO: 224299 - DNA, 75 bp, synthetic construct
  source 1..75: mol_type = other DNA
ggcgtttttgttcctgaaccgacattgttttaacggattgacgcgttacaaccaggccggtgagttcaatgtcgg

SEQ ID NO: 224300 - DNA, 75 bp, synthetic construct
  source 1..75: mol_type = other DNA
atgaacccgatcttcaccatgaaacggcggtcgcattttgtattcatgccggaaaggatgaattgaccagtcctg

SEQ ID NO: 224301 - DNA, 75 bp, synthetic construct
  source 1..75: mol_type = other DNA
ttcaggtcctgtttgatgaactccctcagcagccacaacaacagctgcacttgcccgtttcttctcatcctaaaa

SEQ ID NO: 224302 - DNA, 75 bp, synthetic construct
  source 1..75: mol_type = other DNA
ggaacggatgagttaaccagtcctgtacatcagcaccgcaaaggacagctgatactggcgctacatggtgcaatt

SEQ ID NO: 224303 - DNA, 75 bp, synthetic construct
  source 1..75: mol_type = other DNA
atgaccacaacgcaaaaaacgactgacgttacagcccgtcgacgcagccactggtggtggacggtgtcgggatgc

SEQ ID NO: 224304 - DNA, 75 bp, synthetic construct
  source 1..75: mol_type = other DNA
gtggtacagggggcaccggatatcacccgggaaatccagcaggatatcgcccggcgaatgagggcggaaccatga

SEQ ID NO: 224305 - DNA, 75 bp, synthetic construct
  source 1..75: mol_type = other DNA
tggtggagatgatggcgaaagagcccgtcgagtgggggtcattggggcaatgggctggcttttttgcgatgagtg

SEQ ID NO: 224306 - DNA, 75 bp, synthetic construct
  source 1..75: mol_type = other DNA
gtatgctgtactgccttatgcaacagactatcgtgaaaaccgggtggcactggataccaacacccttgcagataa

SEQ ID NO: 224307 - DNA, 75 bp, synthetic construct
  source 1..75: mol_type = other DNA
agcagacgggggaatcgtcaacgttgtatctgagtggcagccaccagagttactggggaacggacaggacggacc

SEQ ID NO: 224308 - DNA, 75 bp, synthetic construct
  source 1..75: mol_type = other DNA
tgaccgttcctcagatatatatgagtaatcaggcccgtggttatattgcgccggaatactgggataacggaatta

SEQ ID NO: 224309 - DNA, 75 bp, synthetic construct
  source 1..75: mol_type = other DNA
attcaacaacggcctttattactatgtttaagaaaggcctggggcaaacgccaggccgatatattgcgggattaa

SEQ ID NO: 224310 - DNA, 75 bp, synthetic construct
  source 1..75: mol_type = other DNA
ttctggtactggttgtgtttggctgctgattttattttttcgctcagtgtgggggctgacatgttttccggagat

SEQ ID NO: 224311 - DNA, 75 bp, synthetic construct
  source 1..75: mol_type = other DNA
atgtttttcggagatggcggacaactcctgtctgataaatcactgaccggctctgctggcgggggtaataacaga

SEQ ID NO: 224312 - DNA, 75 bp, synthetic construct
  source 1..75: mol_type = other DNA
aatatgaaacagaccgtggatgccttttttgaccgtgccagccagaaaaaactgtcggaagaacaggcgaaagcc

SEQ ID NO: 224313 - DNA, 75 bp, synthetic construct
  source 1..75: mol_type = other DNA
ctccgttagcgcgcgggttgatgattgttatctggagcctggcattgctgggtattctgtttaaactgaccatcg

SEQ ID NO: 224314 - DNA, 75 bp, synthetic construct
  source 1..75: mol_type = other DNA
atggaaagagtccccctaaagcagactgacagacatcacaaatccccgggtggggatttgtgtataagagacagc

SEQ ID NO: 224315 - DNA, 75 bp, synthetic construct
  source 1..75: mol_type = other DNA
tatatcctgaggtcaaccgacttcaacccacatcaagttgtttttgggggtgcattcgggggtgccatttccctc

SEQ ID NO: 224316 - DNA, 75 bp, synthetic construct
  source 1..75: mol_type = other DNA
gagctggcggagagcgaaggggctatcgaacgtaaactgtcttacactggtgaagtgaaagcgcgtccggcgcgt

SEQ ID NO: 224317 - DNA, 75 bp, synthetic construct
  source 1..75: mol_type = other DNA
ggtgacctatctggcgatgggctggctgtcgctggtggtgatttatgaaatggcagttaagctcgcggcgggcag

SEQ ID NO: 224318 - DNA, 75 bp, synthetic construct
  source 1..75: mol_type = other DNA
ctgtcgttggtggtgatttatgaaatggcagttaagctcgcggcgggcagcgttaccttactggccgtaggcggt

SEQ ID NO: 224319 - DNA, 75 bp, synthetic construct
  source 1..75: mol_type = other DNA
cgacggtgttctcgtcagtgacctggtgggaagcggggaagaggtccgggaagcccgggatacctttctttccat

SEQ ID NO: 224320 - DNA, 75 bp, synthetic construct
  source 1..75: mol_type = other DNA
tcatatcagtatcgtgataatgaaagtaaagacagtaatacaatggtagccattttccgtagaaaagaagcggat

SEQ ID NO: 224321 - DNA, 75 bp, synthetic construct
  source 1..75: mol_type = other DNA
ctggcagagcgcttcagcgagccatctgtccgttttctctccgtcactagacaactggaaaatggtcgtttccgt

SEQ ID NO: 224322 - DNA, 75 bp, synthetic construct
  source 1..75: mol_type = other DNA
tatttcaagagatacgagcaaaccagaaacgataaagaaaaatctccgcgagcgtatgaaaaatgctaaacaggt

SEQ ID NO: 224323 - DNA, 75 bp, synthetic construct
  source 1..75: mol_type = other DNA
tggcttttgcaagcgaagatataaagttttatcgtctaatggaggcatggaaagcaaatgaaaacatagacttta

SEQ ID NO: 224324 - DNA, 75 bp, synthetic construct
  source 1..75: mol_type = other DNA
acgcttgctcagtcaatgccactgacgctggactggcaggaggtcagtaacagcgtcaccgatgaaaacggaaat

SEQ ID NO: 224325 - DNA, 75 bp, synthetic construct
  source 1..75: mol_type = other DNA
gacaatgattgcggaagtgcttcgcaagagtcgccggcagaggagcaacagttcgttaagtacgaaggcagcctg

SEQ ID NO: 224326 - DNA, 75 bp, synthetic construct
  source 1..75: mol_type = other DNA
atagaagtggggcgtgactgggatgcggactggggaattattgaaccgagttctatgcgttcgattattcaattt

SEQ ID NO: 224327 - DNA, 75 bp, synthetic construct
  source 1..75: mol_type = other DNA
gcacaaaaaatgctcgtgttgagagttgccgtattattgatcagtttgccgaacgcacaggtgatgccgcatggc

SEQ ID NO: 224328 - DNA, 75 bp, synthetic construct
  source 1..75: mol_type = other DNA
aacaaactggcggagctagaacatagtcgtttatccgccgaattgatgagcagtaaaagcaaacatgtggtggcg

SEQ ID NO: 224329 - DNA, 75 bp, synthetic construct
  source 1..75: mol_type = other DNA
acttaatgctgactggaatgccgttaaccaccgcagagatgactggtcacaacaggattttgcgcacgtctggca

SEQ ID NO: 224330 - DNA, 75 bp, synthetic construct
  source 1..75: mol_type = other DNA
tggcttgtcactggctgaagaagaatgggcaaacggagctgatgtggattgtcggcaatattcgtcgctttaatg

SEQ ID NO: 224331 - DNA, 75 bp, synthetic construct
  source 1..75: mol_type = other DNA
ggcgcccgtctggtgcaggagggtaacagcctgcattaccttgccgaacgcgccggtatcagaggccgcttcagc

SEQ ID NO: 224332 - DNA, 75 bp, synthetic construct
  source 1..75: mol_type = other DNA
cgcccatacaggcagttgggtggaaggcggcacatcgttagtttcactagtaccagtcagtgagttgtgggttga

SEQ ID NO: 224333 - DNA, 75 bp, synthetic construct
  source 1..75: mol_type = other DNA
ctgcaccgtgatgccctgtttcggggcacgtctggtgcaggagggtaaccggttgcattaccttgcagaccgcgc

SEQ ID NO: 224334 - DNA, 75 bp, synthetic construct
  source 1..75: mol_type = other DNA
ccgtcacactgtatgcgaaaggactgacctgcgaagccgataccctgggctcctgtggttacgtttatctggctg

SEQ ID NO: 224335 - DNA, 75 bp, synthetic construct
  source 1..75: mol_type = other DNA
acatgaggagcaaaagcgcctgcgagatactgaacgttatgaaaaactcgcacaatcagcggcaatatcgcaaca

SEQ ID NO: 224336 - DNA, 75 bp, synthetic construct
  source 1..75: mol_type = other DNA
agaggccgcttcagcgacgtagatgcataccatctggaccaggcctttccgctgctgatgaaacaactggaactc

SEQ ID NO: 224337 - DNA, 75 bp, synthetic construct
  source 1..75: mol_type = other DNA
tggaatcgatgctgaccaccggtgaactcagcccccaccatgcccactgcgttaccctgtaccacaacgatttaa

SEQ ID NO: 224338 - DNA, 75 bp, synthetic construct
  source 1..75: mol_type = other DNA
aagcgccgatttagacgcattgctcaaccaatattttaaaggccgtgtcgttcgaaaagatctgacaaagcaatt

SEQ ID NO: 224339 - DNA, 75 bp, synthetic construct
  source 1..75: mol_type = other DNA
aaagatggcgtgcagatcatgaaggattacatggcgtcaggttcgttctctcgcggacgtgactccatcgaagga

SEQ ID NO: 224340 - DNA, 75 bp, synthetic construct
  source 1..75: mol_type = other DNA
gcggcgaaagaagctgttcgtgttggtttcgactatttcaaaggcaacttgagccgtattagtgcagcagcaaaa

SEQ ID NO: 224341 - DNA, 75 bp, synthetic construct
  source 1..75: mol_type = other DNA
aatacgttattactggaacaaaacacgacctgattcttaatgaaagaggaattatcaaagaaggtgagaatgcag

SEQ ID NO: 224342 - DNA, 75 bp, synthetic construct
  source 1..75: mol_type = other DNA
ctggctgccgcggggaaggacgtcgcggcactgaacggggtggatgtccgggccttcaccggaaaagcgaagttc

SEQ ID NO: 224343 - DNA, 75 bp, synthetic construct
  source 1..75: mol_type = other DNA
gacgtgttctgtctcgatggtgaatgcgataaagcggccagcggcaaaaacaatgattttggtcaggcagtggcg

SEQ ID NO: 224344 - DNA, 75 bp, synthetic construct
  source 1..75: mol_type = other DNA
cccgccatcagcataccgtcacgctgtatgcaaaagggctgacctgcgatgccgacaccctcggctcctgtggtt

SEQ ID NO: 224345 - DNA, 75 bp, synthetic construct
  source 1..75: mol_type = other DNA
atcaccctgtaccacaacagttttatctgtgaagccgatacccttggcagttgcggctacgtatacatcaccatt

SEQ ID NO: 224346 - DNA, 75 bp, synthetic construct
  source 1..75: mol_type = other DNA
agcgtgatatcacgccacgcctgggagctcgtctggtgcaggaggggaaccggctgcattatctggctgatcggg

SEQ ID NO: 224347 - DNA, 75 bp, synthetic construct
  source 1..75: mol_type = other DNA
agaggccggttcagcgatgcggatgcataccatctggaccaggcctttccgctgctgatgaaacaactggaactc

SEQ ID NO: 224348 - DNA, 75 bp, synthetic construct
  source 1..75: mol_type = other DNA
ttaccttgcagaccgcgccggtatcaggggccggttcagcaatgcggatgcataccatctggaccaggcttttcc

SEQ ID NO: 224349 - DNA, 75 bp, synthetic construct
  source 1..75: mol_type = other DNA
catcggcggagaacgcatcctgccttcagtggggtttaaaacgtaatatcacgccatgcttcggcgctcgcctgg

SEQ ID NO: 224350 - DNA, 75 bp, synthetic construct
  source 1..75: mol_type = other DNA
gacaaacgtactgacaaagaaactccgtacgttccaatcccggaaggcggcgtgaagatctcttcgcaccactaa

SEQ ID NO: 224351 - DNA, 75 bp, synthetic construct
  source 1..75: mol_type = other DNA
ttactccggcatggaggttataaatcttttttttggcgcccgccgggtgttaacagaaatataagagtggtgtgt

SEQ ID NO: 224352 - DNA, 75 bp, synthetic construct
  source 1..75: mol_type = other DNA
gttgaggcgaatgaacgtgattcattcgaaaattttttagcacggcatgaaggctataaatcttttttttggcgt

SEQ ID NO: 224353 - DNA, 75 bp, synthetic construct
  source 1..75: mol_type = other DNA
caatcacgaccgcccctggtgggggcttccctgcacagtgaggccctgttttggcgcccgtctggtgcaggaggg

SEQ ID NO: 224354 - DNA, 75 bp, synthetic construct
  source 1..75: mol_type = other DNA
ccgtgacactgtatgcgaaggggctgacctgtgaagccgacaccctcggctcctgtggttacgtttatctggctg

SEQ ID NO: 224355 - DNA, 75 bp, synthetic construct
  source 1..75: mol_type = other DNA
attggcatacgttgatccctacggaaaagcgtaaaaaagttaattcagatgaactggcatatctgcacaatcact

SEQ ID NO: 224356 - DNA, 75 bp, synthetic construct
  source 1..75: mol_type = other DNA
ctaccggatttcgtccgtctggcggaagcctatggtcatgtcggtattcagatttcccatccacaagatctggaa

SEQ ID NO: 224357 - DNA, 75 bp, synthetic construct
  source 1..75: mol_type = other DNA
tggcagcagattgagcattggcgtgcgcgtcagtgtctgaaatatgacacccacagtgaaaagattaaaccacag

SEQ ID NO: 224358 - DNA, 75 bp, synthetic construct
  source 1..75: mol_type = other DNA
tggcagaaaattgaacagtggcgcgctcgccagtgcctgaaatacgacactcagagcgaaaagattaaaccgcag

SEQ ID NO: 224359 - DNA, 75 bp, synthetic construct
  source 1..75: mol_type = other DNA
cgcaatgaagccccggcgcgcgtgatgagcaaggtcactgacgaggaagggcacaccacctctgaggtcatccgc

SEQ ID NO: 224360 - DNA, 75 bp, synthetic construct
  source 1..75: mol_type = other DNA
tgagcaaggtactgacgaggaaggcacacacctctgaggtcatccgcgtgggtaagggcggtgattatgccagcc

SEQ ID NO: 224361 - DNA, 75 bp, synthetic construct
  source 1..75: mol_type = other DNA
tgattacgtggtggaagactacgccgccggttgtctggtggaaaaaattaaggtcggtgatttctccacaccggc

SEQ ID NO: 224362 - DNA, 75 bp, synthetic construct
  source 1..75: mol_type = other DNA
gggtcgccagccaaaccaaccagagcctgggtgacctggaacgcgtagtgaataaagagtcgggattattaggta

SEQ ID NO: 224363 - DNA, 75 bp, synthetic construct
  source 1..75: mol_type = other DNA
agaggcctgttcagcgatgcagatgcgtaccctctggaccaggcttttcccctgctgatgaaacaactggaactc

SEQ ID NO: 224364 - DNA, 75 bp, synthetic construct
  source 1..75: mol_type = other DNA
agaggcctgttcagcgatgcagatgcgtaccctctggaccaggcatttcccctgctgatgaaacaactgtaactc

SEQ ID NO: 224365 - DNA, 75 bp, synthetic construct
  source 1..75: mol_type = other DNA
agaagaaaatagccgtcttgccggtgaaaaaattaaagtactggattatcccgatggcaccctcgccttccacta

SEQ ID NO: 224366 - DNA, 75 bp, synthetic construct
  source 1..75: mol_type = other DNA
atgttggtgaccatgtcagataaagagattcatcgcttaccagtgatacaggctgtttgtgaaaagcgtctacgc

SEQ ID NO: 224367 - DNA, 75 bp, synthetic construct
  source 1..75: mol_type = other DNA
agaggcctgttcagcgatgcagatgcgtaccctctggaccaggcgtttcctctgctgatgaaacaactgaaactc

SEQ ID NO: 224368 - DNA, 75 bp, synthetic construct
  source 1..75: mol_type = other DNA
agaggcctgttcagcgatgcagatgcgtaccctctggaccaggcttttccgctgctgatgaaacaactgcaactc

SEQ ID NO: 224369 - DNA, 75 bp, synthetic construct
  source 1..75: mol_type = other DNA
acgctgtggctgctggcgggggtagtactggccggtgcggttcaggactttatggtgctgtttatctcctctcgc

SEQ ID NO: 224370 - DNA, 75 bp, synthetic construct
  source 1..75: mol_type = other DNA
caatctgcgcagttcgcaacggtcagagtgttgacacttcaatgggaatgacgccgctggaaggcttgatgatgg

SEQ ID NO: 224371 - DNA, 75 bp, synthetic construct
  source 1..75: mol_type = other DNA
tggaacgcgtagtgaataaagagtcgggattattagggaaggtgcgaataagtcaccaaacgcaaaaaaacgcct

SEQ ID NO: 224372 - DNA, 75 bp, synthetic construct
  source 1..75: mol_type = other DNA
attatcccgacgacaacaacgaccgcccttggtgggggctaccctgcaccgtgacgccctgttttggcgcccgtc

SEQ ID NO: 224373 - DNA, 75 bp, synthetic construct
  source 1..75: mol_type = other DNA
ttaccttgcagaccgcgccggtatcagaggccggttcagcgacgcggatgcgtaccatctggaccaggcctttcc

SEQ ID NO: 224374 - DNA, 75 bp, synthetic construct
  source 1..75: mol_type = other DNA
atcgttgataacaaacgtcttggggctgttttaaaactggctcaaagcaaaatggatgaacttgaacgcgatggc

SEQ ID NO: 224375 - DNA, 75 bp, synthetic construct
  source 1..75: mol_type = other DNA
tatatgatggaaatttttttcaggctacgcatgatataatattacgggcaattgaaaaatcaacatcaggtatgt

SEQ ID NO: 224376 - DNA, 75 bp, synthetic construct
  source 1..75: mol_type = other DNA
tatgggcagaaatgccggtattggtgcatggaaaggtctgcgtcgtcaggaaggcgggtttggacagtctccggg

SEQ ID NO: 224377 - DNA, 75 bp, synthetic construct
  source 1..75: mol_type = other DNA
ttgatggcgacacggttcatgtccgtggtccaaaagtcattaacggcgaggagcgcattacgcgaacgccgctgg

SEQ ID NO: 224378 - DNA, 75 bp, synthetic construct
  source 1..75: mol_type = other DNA
accgcatttccgccagcgcccgtcgctgcttgctcctctgtggtgcgaaaatcgatggacgggaatggtcgagct

SEQ ID NO: 224379 - DNA, 75 bp, synthetic construct
  source 1..75: mol_type = other DNA
agttactgaagagcagccgggtgaaactgtcagatgtaaaggtactgacggagaatggtgaagtctttcttatgg

SEQ ID NO: 224380 - DNA, 75 bp, synthetic construct
  source 1..75: mol_type = other DNA
tatatgatggaaatttcttccaggctacacacggcatcgtgttgacagccattgagaaatcgacgtctggaatgt

SEQ ID NO: 224381 - DNA, 75 bp, synthetic construct
  source 1..75: mol_type = other DNA
tatagtgttcgatttaatgaaaaattagtccatcacccttattatgattcttgggcttttggcccatatattcgt

SEQ ID NO: 224382 - DNA, 75 bp, synthetic construct
  source 1..75: mol_type = other DNA
ttaatgttaaactagtccatcacccttattatgattcttgggcttttggcccatatattcgtaagggaaatgatt

SEQ ID NO: 224383 - DNA, 75 bp, synthetic construct
  source 1..75: mol_type = other DNA
taaaaatataaaaaaattaacttatagtgttcgatttaatgaaaaattagtccatcacccggctttgttgaataa

SEQ ID NO: 224384 - DNA, 75 bp, synthetic construct
  source 1..75: mol_type = other DNA
attccggtataactcagaagcattttgctgaaattgttggggtaacccaggggatggtaagccatgtcattaccg

SEQ ID NO: 224385 - DNA, 75 bp, synthetic construct
  source 1..75: mol_type = other DNA
cactgaacctgccacttggcccactggcggtgagttatctgctggttggtctggtcaccaacttcttccgcggct

SEQ ID NO: 224386 - DNA, 75 bp, synthetic construct
  source 1..75: mol_type = other DNA
ggtattgcgtatcgcagaggctacgaatttcgaggttacacctcatgaactccggcctgatatctacccgaatcc

SEQ ID NO: 224387 - DNA, 75 bp, synthetic construct
  source 1..75: mol_type = other DNA
tcgagctggatcgctatcttactgaacacggcgtgcagggatcggcgttgggacgcccgtggatgccaccttcct

SEQ ID NO: 224388 - DNA, 75 bp, synthetic construct
  source 1..75: mol_type = other DNA
ggtggagtttaccggcaaagtgcaacgtattgcacagattcatcagctcggactcaaagacaggcctaaccctca

SEQ ID NO: 224389 - DNA, 75 bp, synthetic construct
  source 1..75: mol_type = other DNA
actgtcaccatcagggcgtcggcgactgagcaccgaactggcgaaacgtctgcggcagagtcagcagcgtcgggt

SEQ ID NO: 224390 - DNA, 75 bp, synthetic construct
  source 1..75: mol_type = other DNA
aatatcaatattactttgcagataaacaaatgtctgccaggggtttgtatgagtatcgatgcactacgatgggct

SEQ ID NO: 224391 - DNA, 75 bp, synthetic construct
  source 1..75: mol_type = other DNA
aaaatactattgctgacattctcacataccttggtattaaagacgcatcaacaacacaggtgggtttagtccggt

SEQ ID NO: 224392 - DNA, 75 bp, synthetic construct
  source 1..75: mol_type = other DNA
tttgtaagcgtcaatgcggtgctgtctgacggtagttcatttctgagcgccaacgttaatgtgaatggtaattcg

SEQ ID NO: 224393 - DNA, 75 bp, synthetic construct
  source 1..75: mol_type = other DNA
tattgaatccagcatgatgacgccggtcacttttgaaaccgctaccctgccgcgcggcctgacgaccgttatttg

SEQ ID NO: 224394 - DNA, 75 bp, synthetic construct
  source 1..75: mol_type = other DNA
atggtggtccgggggtttacaggcagtgaaaccattgtcagggatgctattgccaaatggcgtaaaggctggaac

SEQ ID NO: 224395 - DNA, 75 bp, synthetic construct
  source 1..75: mol_type = other DNA
tcgaccaggaatgacacaggagcaggcgacgatattaatcacggaagcattctgggctctgaaagaacgcccgaa

SEQ ID NO: 224396 - DNA, 75 bp, synthetic construct
  source 1..75: mol_type = other DNA
gttcttcgttctgaccatcctggttgtaaaacgtatatcatcccttccgcttcgcctgcttgttgccgcaccatt

SEQ ID NO: 224397 - DNA, 75 bp, synthetic construct
  source 1..75: mol_type = other DNA
aaaaagcattacgtacatgatcgccgggttaaacaaagaatatggcgatgtggtggagtccgggctgctttttgc

SEQ ID NO: 224398 - DNA, 75 bp, synthetic construct
  source 1..75: mol_type = other DNA
aaagcattacgtacatgatcgccgggttaaacaaagaatatggcgatgtggtggagtccgggctgctttttgcag

SEQ ID NO: 224399 - DNA, 75 bp, synthetic construct
  source 1..75: mol_type = other DNA
gcgatgccctggatgcctggataagccgaccaggaatgacgcaggagcaggcgacgatattaattactgaagcct

SEQ ID NO: 224400 - DNA, 75 bp, synthetic construct
  source 1..75: mol_type = other DNA
atgtcattatccctcccgaagtgaaagatgtcttaaactcaatacactcaatcccaggccgtcgagtggccggaa

SEQ ID NO: 224401 - DNA, 75 bp, synthetic construct
  source 1..75: mol_type = other DNA
aactcagtgcacagcaaaatcagactcctggcgaaaccactaaccagttgggatgggccgctatccgcaaatgtg

SEQ ID NO: 224402 - DNA, 75 bp, synthetic construct
  source 1..75: mol_type = other DNA
cgctatcgctggttgatgattcacagctttgggcactggcatcctggcttgaacaacttgctgaagaagactatc

SEQ ID NO: 224403 - DNA, 75 bp, synthetic construct
  source 1..75: mol_type = other DNA
ttgatgccgcaactgaatgctgaaaataagatcgcggaggttacgctggtacttgaacctgtttcacctgttccc

SEQ ID NO: 224404 - DNA, 75 bp, synthetic construct
  source 1..75: mol_type = other DNA
tgaagtactgcctttacgcgcaagcctgagttcacgtggtgcgttaagcgatagcgattttcgcgtatggatttc

SEQ ID NO: 224405 - DNA, 75 bp, synthetic construct
  source 1..75: mol_type = other DNA
catacagcaactcggtattagcgtcgctgcacagatgcctgccggttcatggcaaggttacgagctggaattaag

SEQ ID NO: 224406 - DNA, 75 bp, synthetic construct
  source 1..75: mol_type = other DNA
gcgggatgtttactggcggacgatatggggttgggtaaaaccttacagattttaacctttctcatctggcatcga

SEQ ID NO: 224407 - DNA, 75 bp, synthetic construct
  source 1..75: mol_type = other DNA
aaatacagcgaccgggttatcgggatcggtgaatttgaaaaaataagttcgccttatctggtcaaaagtgaaagt

SEQ ID NO: 224408 - DNA, 75 bp, synthetic construct
  source 1..75: mol_type = other DNA
aaacgcaagccgattaaattctctggtcgacatcggtcacgagaagacagtcatcaaataccgtgaggttctgct

SEQ ID NO: 224409 - DNA, 75 bp, synthetic construct
  source 1..75: mol_type = other DNA
atgctgaaacgtctgttaagtaaactgacgggaaaccgtcagcagatagaactccacctaaagaatcagtatcag

SEQ ID NO: 224410 - DNA, 75 bp, synthetic construct
  source 1..75: mol_type = other DNA
catcggttgaaacttatttgcgcatggccttattccgtaagtgcagatttgcgcttacgtaacgatgctccgaaa

SEQ ID NO: 224411 - DNA, 75 bp, synthetic construct
  source 1..75: mol_type = other DNA
gcgggatgtttactcgcagacgatatggggctgggtaaaaccttacagattctaacttttctcatctggcatcgt

SEQ ID NO: 224412 - DNA, 75 bp, synthetic construct
  source 1..75: mol_type = other DNA
ctcgtgaaggttacgatcgtagttttgctgctgcggtaaatattgcctctgcaccaacaggcatgttaattccgc

SEQ ID NO: 224413 - DNA, 75 bp, synthetic construct
  source 1..75: mol_type = other DNA
gagttcgtgaaggcaagcttgatctggatattttaaaaagcataaaaggtataggtgctaagacgcttagtaata

SEQ ID NO: 224414 - DNA, 75 bp, synthetic construct
  source 1..75: mol_type = other DNA
tggatggggctattcagtctgatagtaataaagaccttgccaaagcacatatagattttctcggatcatggttag

SEQ ID NO: 224415 - DNA, 75 bp, synthetic construct
  source 1..75: mol_type = other DNA
accaaaggcggtgttcaggttgaggttgcgaccgaaactctgaaagttaccgtagaccagctagggcaaaccacc

SEQ ID NO: 224416 - DNA, 75 bp, synthetic construct
  source 1..75: mol_type = other DNA
tcaagcaagtaaagggcgatttcatgagcaacaatttataaaacaagttcgtgatgcggggattaaagcttctcc

SEQ ID NO: 224417 - DNA, 75 bp, synthetic construct
  source 1..75: mol_type = other DNA
gcatgatataaataattcttactttgctgctacaaaatgtgctggtatttggcgtaaaaatacaaaaaaatcaca

SEQ ID NO: 224418 - DNA, 75 bp, synthetic construct
  source 1..75: mol_type = other DNA
cataaaaagccgtgagagttggttatcattctttcaacgtaaggggattgcagcagatgcagcaaaaaaaactga

SEQ ID NO: 224419 - DNA, 75 bp, synthetic construct
  source 1..75: mol_type = other DNA
cacatctgcacagggcgtaaatctgatcaacgtggcgaaggaactcgtcctgacaccgcaggacaccaccgacta

SEQ ID NO: 224420 - DNA, 75 bp, synthetic construct
  source 1..75: mol_type = other DNA
accgtaaaagtgggcactaaagttcaattgagcgcaaccttcaccccggccgatgcaaccaataagactggcgtg

SEQ ID NO: 224421 - DNA, 75 bp, synthetic construct
  source 1..75: mol_type = other DNA
ccgttattattggtgtattactactgataacttatataccaggaatgacgttattcctgcctcgccttctcggcg

SEQ ID NO: 224422 - DNA, 75 bp, synthetic construct
  source 1..75: mol_type = other DNA
cgtgacgattacacctgaatctccgagtgtaaaggtcggggcgacagttcaactgactgctaatttcaccccaga

SEQ ID NO: 224423 - DNA, 75 bp, synthetic construct
  source 1..75: mol_type = other DNA
ctctgttcagttcagcgcataccctgatgacgaaggcgttctgggaagaatgagcggccctaaaccggtaaaaac

SEQ ID NO: 224424 - DNA, 75 bp, synthetic construct
  source 1..75: mol_type = other DNA
acgtggtgtggcgcagggttctacaaatatctccttcaccagcaatagcggtggtaagaaggcaactaagtcagt

SEQ ID NO: 224425 - DNA, 75 bp, synthetic construct
  source 1..75: mol_type = other DNA
atacggtgcaaagagtgatgataatttctaaaaaacagcttattggagtggttgcgatcggtattcttttggctg

SEQ ID NO: 224426 - DNA, 75 bp, synthetic construct
  source 1..75: mol_type = other DNA
ggtactgccgctgtgggtactaaagcggcgaccgacccccgcagtgtcggcacccaggtggacgatggtactctg

SEQ ID NO: 224427 - DNA, 75 bp, synthetic construct
  source 1..75: mol_type = other DNA
gaaagcggcggcagatattgccagccgggtgagcggcgtgaagcgggtaaccacggcgtttacgtttattaaata

SEQ ID NO: 224428 - DNA, 75 bp, synthetic construct
  source 1..75: mol_type = other DNA
ggcgtaccaagtgggccgcgtgaaataccattaccgatgatgcaacgtttcgagcgtgacttgctcaactctggc

SEQ ID NO: 224429 - DNA, 75 bp, synthetic construct
  source 1..75: mol_type = other DNA
accgtgtatatgccggaggcaccgtcgtgtgcatgggcgtaccaagtgggccgcgtgaaataccattaccgatga

SEQ ID NO: 224430 - DNA, 75 bp, synthetic construct
  source 1..75: mol_type = other DNA
ggcaacacgccatcgggtccgtctgcagataaccgcgattatctccgctctggttatttgcatcatcctctgcct

SEQ ID NO: 224431 - DNA, 75 bp, synthetic construct
  source 1..75: mol_type = other DNA
tggcagtgctgcagatgtgccgtggatttgtggtgacacgacgtattactggaaaaatacatacgctacccagta

SEQ ID NO: 224432 - DNA, 75 bp, synthetic construct
  source 1..75: mol_type = other DNA
atgagtacgctgaatcatccgaaggcagacctgagcaaagggcagtacggctgtgtcggccagggcttacatatt

SEQ ID NO: 224433 - DNA, 75 bp, synthetic construct
  source 1..75: mol_type = other DNA
atattccggcatcaggatattacggtgcggcatcgagaacgaatggaaaccatgaaccgccccgggtttcctgga

SEQ ID NO: 224434 - DNA, 75 bp, synthetic construct
  source 1..75: mol_type = other DNA
gaaagcggcggcagatattgccagccgggtgagcggcgtaaagcgggtaaccacagcgtttacgtttattaaata

SEQ ID NO: 224435 - DNA, 75 bp, synthetic construct
  source 1..75: mol_type = other DNA
ctgcgcggcctgcgtcaatgcctgcccgtcaaacgccttaacggttgaaactgacctcgccacaggagagctggc

SEQ ID NO: 224436 - DNA, 75 bp, synthetic construct
  source 1..75: mol_type = other DNA
agctttgagacttgcccggaatgtaagcgccagaaatgcctggtgccgtccgaccgtattgaactgactcgccat

SEQ ID NO: 224437 - DNA, 75 bp, synthetic construct
  source 1..75: mol_type = other DNA
cctggatgccgaatccgtggcttggctggaacgcttcctgcacgacttcgaaggcaccgttgtggcgattaccca

SEQ ID NO: 224438 - DNA, 75 bp, synthetic construct
  source 1..75: mol_type = other DNA
atgtgcaggatatgagtacgctgaatcatccgaaggcagacctgagcaaagggcagtacggctgtgtcggccagg

SEQ ID NO: 224439 - DNA, 75 bp, synthetic construct
  source 1..75: mol_type = other DNA
ggtgtatttaagatcaccaagcagagcaataaagcctggtccctgacgcgcccggtggatgacgcagtctccctg

SEQ ID NO: 224440 - DNA, 75 bp, synthetic construct
  source 1..75: mol_type = other DNA
atattccggcatcaggatattacggtgcggcatcgagaacgaatggaaaccaggtatcatcaaccgccgaacaca

SEQ ID NO: 224441 - DNA, 75 bp, synthetic construct
  source 1..75: mol_type = other DNA
tcgttcttcacccagaccacagacggcaaactgaatctgatgcatcacaagaaagccggaaacacaaagttgggt

SEQ ID NO: 224442 - DNA, 75 bp, synthetic construct
  source 1..75: mol_type = other DNA
gcgcagggctggagcattaaggatggcggaattcagttgtcagatggtgtatttaagatcaccaagcagagcaat

SEQ ID NO: 224443 - DNA, 75 bp, synthetic construct
  source 1..75: mol_type = other DNA
acgaagctgacctggttgacgaagctaaacgtctgctgaccacctgcaacatcccggttccgtctgatgttcgcg

SEQ ID NO: 224444 - DNA, 75 bp, synthetic construct
  source 1..75: mol_type = other DNA
aactttaccgagtacgaagagtacaaaaaacgtacgctaggcgcagacgcgctggagccgaagcgtatcaagtac

SEQ ID NO: 224445 - DNA, 75 bp, synthetic construct
  source 1..75: mol_type = other DNA
aaatcgctaacctttccggtggtgagcgtcgtcgcgtggcgttgtgccgcctgctgctggaaaaaccagacatgc

SEQ ID NO: 224446 - DNA, 75 bp, synthetic construct
  source 1..75: mol_type = other DNA
attatggcgggcatcgataaagacatcgaaggcgaagcgcgtccgcagccggatatcaagattggttatctgccg

SEQ ID NO: 224447 - DNA, 75 bp, synthetic construct
  source 1..75: mol_type = other DNA
tgggactgaatgcgctgacgctgacggatgttaccaaaaatgcagcgtatggcgttgagatagaaagtctggtgc

SEQ ID NO: 224448 - DNA, 75 bp, synthetic construct
  source 1..75: mol_type = other DNA
caacgtttgtcgctgcgcaaaacgtgagcacggtggtggcgtatgacttatctgcccacatgctggatgtcgtgg

SEQ ID NO: 224449 - DNA, 75 bp, synthetic construct
  source 1..75: mol_type = other DNA
cagggtaaacgcgttggcgaactctccggcggtgagcgcggtcgtctgcatctggcgaagctgctgcaggttggc

SEQ ID NO: 224450 - DNA, 75 bp, synthetic construct
  source 1..75: mol_type = other DNA
cttccaggagccagtcggcaatatcctgtcgaatatcccgattgtcggcgcgctgttctccggcccggcatttgg

SEQ ID NO: 224451 - DNA, 75 bp, synthetic construct
  source 1..75: mol_type = other DNA
ctgatggaactgggcctgatcctgtttgtgattaccttcatcgtcctcgccgcatcgaagtttatgattatgcga

SEQ ID NO: 224452 - DNA, 75 bp, synthetic construct
  source 1..75: mol_type = other DNA
tgggtggcattattgtctctctgatcatctcctcctggccgagcattcagaaatttggtctggctttcctatgga

SEQ ID NO: 224453 - DNA, 75 bp, synthetic construct
  source 1..75: mol_type = other DNA
cctcgaaattcttgaggaaattcgacacaataacagaaatgtgatttttctggttccccatggctggagcgtgga

SEQ ID NO: 224454 - DNA, 75 bp, synthetic construct
  source 1..75: mol_type = other DNA
ttgtgccacatgcctggggagtggatattcccgcaatgctgatggctgcgtcgggcagaaaaatggcagcgatgt

SEQ ID NO: 224455 - DNA, 75 bp, synthetic construct
  source 1..75: mol_type = other DNA
gatcctgtttgtaattaccttcatcgtactggccgcatcgaagtttatgattattcgcctggctaagaatgaggg

SEQ ID NO: 224456 - DNA, 75 bp, synthetic construct
  source 1..75: mol_type = other DNA
cggctactacataccgagcgaccgaccgggccacggcattattctcgatcgtgactacctcgccgcacacaaaat

SEQ ID NO: 224457 - DNA, 75 bp, synthetic construct
  source 1..75: mol_type = other DNA
ttgaaaatattgaactgatgaccgcccgcgttccgttgccggaaggcccgtggggcgaccagatccaccacgtta

SEQ ID NO: 224458 - DNA, 75 bp, synthetic construct
  source 1..75: mol_type = other DNA
gttgcaggaagaactctgcagcgtggtggaggcatccggtgccagtctggagaaggcgcggcacgaccagttgct

SEQ ID NO: 224459 - DNA, 75 bp, synthetic construct
  source 1..75: mol_type = other DNA
tggcgaactcttgggtaaggttaacaatgtcctttcaatcagttcagcaaggtccaaagcgttaacagcttccat

SEQ ID NO: 224460 - DNA, 75 bp, synthetic construct
  source 1..75: mol_type = other DNA
atgagaaaggatttcaacatcgacggaaaatatgtagtgctgtctgtaagcactaatattcagtcgccagccgtc

SEQ ID NO: 224461 - DNA, 75 bp, synthetic construct
  source 1..75: mol_type = other DNA
acgctggaagaggacgtggagcggctgcgtaagattcaggaggcggtgcaaggcttcccgctggcggtggacgcc

SEQ ID NO: 224462 - DNA, 75 bp, synthetic construct
  source 1..75: mol_type = other DNA
cacaataacagaaatgtgatttttctggttccccatggctggagcgtggatattcctgcaatgttgctggcagct

SEQ ID NO: 224463 - DNA, 75 bp, synthetic construct
  source 1..75: mol_type = other DNA
gcaacagcaggctcagaatcaggaggcggggccggcaccgcaggctgatgcccatcatcagtcaggcggcggtat

SEQ ID NO: 224464 - DNA, 75 bp, synthetic construct
  source 1..75: mol_type = other DNA
aagtcattatctttgcgctgagtaataaacttttccgccgttgtagtgcacgcgatatgctgttgatctcggcga

SEQ ID NO: 224465 - DNA, 75 bp, synthetic construct
  source 1..75: mol_type = other DNA
gtttcctgtatcaatatctgggccacggcgtgttctgggtaatggcgctggtggcgcttccggcaatgtttttgc

SEQ ID NO: 224466 - DNA, 75 bp, synthetic construct
  source 1..75: mol_type = other DNA
ctgagccggagtggtactacgtcatcgtactggccgggcatccggtgtggaggtggacaaggttgcagaggcttt

SEQ ID NO: 224467 - DNA, 75 bp, synthetic construct
  source 1..75: mol_type = other DNA
aaggaggggtggcagccatttggcagtccggtggccatcacgccctataccctgatgcaggccattgcggcggaa

SEQ ID NO: 224468 - DNA, 75 bp, synthetic construct
  source 1..75: mol_type = other DNA
atgactacacaaaaggaaatggaagaaatcagggcagcgttatcttggtttgatgtacgccgatatgatggcctt

SEQ ID NO: 224469 - DNA, 75 bp, synthetic construct
  source 1..75: mol_type = other DNA
ctgttatcagactgcagacccgctctgcttaccataatggtgagcgctcctccgttcgcaagaaacgtccgcgcc

SEQ ID NO: 224470 - DNA, 75 bp, synthetic construct
  source 1..75: mol_type = other DNA
ttattgctcgacaaataaatatggtagtggagaattgcgtttacaataatattgaacaatatacttggatactca

SEQ ID NO: 224471 - DNA, 75 bp, synthetic construct
  source 1..75: mol_type = other DNA
acaaatgaacaaaacagtggaaattttggtggggtcacatccggaacagtatatctgggttttaaaattgttaaa

SEQ ID NO: 224472 - DNA, 75 bp, synthetic construct
  source 1..75: mol_type = other DNA
cacaacaaatgctctcataaaaacgaagatccttcttttctctatcgggaaaaaggagcttgctgcatgggtaaa

SEQ ID NO: 224473 - DNA, 75 bp, synthetic construct
  source 1..75: mol_type = other DNA
agctttgagacctgcccggactgtaagcgccagaaatgcctggtgccgtctgaccgtattgaactgactcgccat

SEQ ID NO: 224474 - DNA, 75 bp, synthetic construct
  source 1..75: mol_type = other DNA
gtatcgatagaggctatgagttaacatgctgttataaagagatcgcgctacataacttcacttccatcttaactc

SEQ ID NO: 224475 - DNA, 75 bp, synthetic construct
  source 1..75: mol_type = other DNA
taccaggcgctgttaacccgactggactacctgaccaaagttgaaagcaaagtgtttggtgaaggagaccgtaac

SEQ ID NO: 224476 - DNA, 75 bp, synthetic construct
  source 1..75: mol_type = other DNA
atgagttcctacctgctggagacgctgattctggactattacgccggcagggcagcctgctcatcgtttgtcgat

SEQ ID NO: 224477 - DNA, 75 bp, synthetic construct
  source 1..75: mol_type = other DNA
taatcaccctgatctggtcaaaacgttcgtgaaaatcggaaaggcgatgtctgaagatggcatggtcaccggtgg

SEQ ID NO: 224478 - DNA, 75 bp, synthetic construct
  source 1..75: mol_type = other DNA
tgctccagttggtgatccatcacaacaggaaggtgataagccacaacctgttgctgatggcgataaacctgctga

SEQ ID NO: 224479 - DNA, 75 bp, synthetic construct
  source 1..75: mol_type = other DNA
aggttcagttatggaaacgtttgtacaggattcaccattttatagtggaagagatctttattggttacgtcctaa

SEQ ID NO: 224480 - DNA, 75 bp, synthetic construct
  source 1..75: mol_type = other DNA
gagaaagattcttcaggaatcaattttgtttcaagaacgtcaaaaaataatggtgtttccgccagggttaaatta

SEQ ID NO: 224481 - DNA, 75 bp, synthetic construct
  source 1..75: mol_type = other DNA
tatccagcgatccatattgcctttggatcctttgccagaagaaccaaaatccgtcctctggacgatatcgatctg

SEQ ID NO: 224482 - DNA, 75 bp, synthetic construct
  source 1..75: mol_type = other DNA
acatatcctcgatctcggctgcggacccggcttttatacacaccgcttagcggagcgcggatttcactgcaccgg

SEQ ID NO: 224483 - DNA, 75 bp, synthetic construct
  source 1..75: mol_type = other DNA
catcatgcgacaatataaagttcaaatattatctttattttttatctttgtggattttatttctatctgtttcaa

SEQ ID NO: 224484 - DNA, 75 bp, synthetic construct
  source 1..75: mol_type = other DNA
agccgtcagtgaagtcaaaaatgccttaacgcgtttagacgaaatttatgcggcatacgcagaaccggatgcaga

SEQ ID NO: 224485 - DNA, 75 bp, synthetic construct
  source 1..75: mol_type = other DNA
gcggttatctggtattgaatatgacgccaactaatatgtttgtgaatgaggcaaatcaggctgctgaagtcctta

SEQ ID NO: 224486 - DNA, 75 bp, synthetic construct
  source 1..75: mol_type = other DNA
ataaaaataatggtgcacttctcggagacagcgttgtacgtacaattcaaagcggcatccgcgcacaatttgcaa

SEQ ID NO: 224487 - DNA, 75 bp, synthetic construct
  source 1..75: mol_type = other DNA
gacaaaaagcaacgataaagcaaccgaagcaattaaaggctgggtggattcatataactccctcattgacacctt

SEQ ID NO: 224488 - DNA, 75 bp, synthetic construct
  source 1..75: mol_type = other DNA
gaacaacctgtcgaatacagcctgtacctgttcagtggtgacggttccaaggtaaaagttgggtctggctctcag

SEQ ID NO: 224489 - DNA, 75 bp, synthetic construct
  source 1..75: mol_type = other DNA
cgaggccgcgaacaaagctgttggcagtgcaagccgcacctgtctgttcgagtggcagcagatccccgatggact

SEQ ID NO: 224490 - DNA, 75 bp, synthetic construct
  source 1..75: mol_type = other DNA
tttgagcattccggttaaaccggctgttcctgatgtggtcggctcttccagtcttcttgtcatgacctccgcgcc

SEQ ID NO: 224491 - DNA, 75 bp, synthetic construct
  source 1..75: mol_type = other DNA
ctcctgctgctggcgcatatacaatcagagcggaaattcttgcatctgacggttctaccgttcagagcgatgatt

SEQ ID NO: 224492 - DNA, 75 bp, synthetic construct
  source 1..75: mol_type = other DNA
gaccttcgacaagggggagtaccaggttcgggccaaggtggtgaacgtcaactcaggtgcggaaaagtacaccga

SEQ ID NO: 224493 - DNA, 75 bp, synthetic construct
  source 1..75: mol_type = other DNA
ctatctttggacgaccgtcaggatctccgggctaccggccaggttgtgtgggaaaccagtaaggacgacggtaaa

SEQ ID NO: 224494 - DNA, 75 bp, synthetic construct
  source 1..75: mol_type = other DNA
acccgcttcaagtcgatacgacagcgccaagtttggcaaacgtgacagtaaaaggggaatggaaccgggcgcttt

SEQ ID NO: 224495 - DNA, 75 bp, synthetic construct
  source 1..75: mol_type = other DNA
ttgccatatcgcgcaactctgatgttcttgagtctgagaccttcactccgggatggggtgccaccaataaggtgt

SEQ ID NO: 224496 - DNA, 75 bp, synthetic construct
  source 1..75: mol_type = other DNA
gcaatacacccgtggtaatcagacccgtgctgcgctgatgatgggcatcaaccgtggtacactgcgtaaaaaact

SEQ ID NO: 224497 - DNA, 75 bp, synthetic construct
  source 1..75: mol_type = other DNA
catgaagctgagggcgaggtgaacatcaatgtggcagagaacaagttgcctgcatgtagcctgagctcacgagag

SEQ ID NO: 224498 - DNA, 75 bp, synthetic construct
  source 1..75: mol_type = other DNA
acaattcgccaggtcattgacccagtgaaaatctatgccctgccagagtcgggtgtgccttgccggttcaccacg

SEQ ID NO: 224499 - DNA, 75 bp, synthetic construct
  source 1..75: mol_type = other DNA
cggttagcttggctcccatcggtaagtatgttgaatatcttagggatgatggtcagtgggtccgcggtgaaacca

SEQ ID NO: 224500 - DNA, 75 bp, synthetic construct
  source 1..75: mol_type = other DNA
cacaggcagtaagaaatatactttactgaaccgccccgggtttcctggagagtgttttatctgtgaactcaggct

SEQ ID NO: 224501 - DNA, 75 bp, synthetic construct
  source 1..75: mol_type = other DNA
tgctttttattatcatatttataattttttacagaaatcgtattgtccttgtcttgatcacgctgatacagaaag

SEQ ID NO: 224502 - DNA, 75 bp, synthetic construct
  source 1..75: mol_type = other DNA
cgttcaggtgcgtgggcgcttctctatctggtaccgatcattggctggttagttctgtttgtatttgcctgttta

SEQ ID NO: 224503 - DNA, 75 bp, synthetic construct
  source 1..75: mol_type = other DNA
cagacgcttctcctgtgggcgctaccagtggtgctgttactgctgatggtgctgatcctctggcgggtgagggtg

SEQ ID NO: 224504 - DNA, 75 bp, synthetic construct
  source 1..75: mol_type = other DNA
ccgctataacccaccgctgaccagccagacgctgctcctgtgggcgctgccagtggtgttgttactgctgatggc

SEQ ID NO: 224505 - DNA, 75 bp, synthetic construct
  source 1..75: mol_type = other DNA
agtgttttatctgtgaactcaggctgccagatcatcgtttccgatggaagcataataagctttttctgcttctgc

SEQ ID NO: 224506 - DNA, 75 bp, synthetic construct
  source 1..75: mol_type = other DNA
atataaagccatgacggaagtactggaggccggaaatattgagtccatgattgattatctggagtatcttgatag

SEQ ID NO: 224507 - DNA, 75 bp, synthetic construct
  source 1..75: mol_type = other DNA
aaagtagtaaacagtaatggggatgtttcctttactgaacaggattataagtttacttatccttcctcgttttat

SEQ ID NO: 224508 - DNA, 75 bp, synthetic construct
  source 1..75: mol_type = other DNA
gaaagtggactggcccgcccactcggcgatgagcagccacgacgcgctgatggtggcgagcggcatcaccaccgt

SEQ ID NO: 224509 - DNA, 75 bp, synthetic construct
  source 1..75: mol_type = other DNA
tttactctgattaacgccatcgtcggcgctattatcaatgtcattcaattgattttaggtttagagtttccgttc

SEQ ID NO: 224510 - DNA, 75 bp, synthetic construct
  source 1..75: mol_type = other DNA
cgatgaggctgccgttaaacgttatctccgggagtatcttgctgaactgggatttaacagagaagattttcggga

SEQ ID NO: 224511 - DNA, 75 bp, synthetic construct
  source 1..75: mol_type = other DNA
ctgaagctgccgttaatgccgattataacggcttaccgtttaaagaggtttcaccggctgaagtaacttctgcga

SEQ ID NO: 224512 - DNA, 75 bp, synthetic construct
  source 1..75: mol_type = other DNA
gatgaagcgggcgtacgtgacctggtatatgaaatgcgggggcaaaatactggcaatgctaaagcaagaaaaggt

SEQ ID NO: 224513 - DNA, 75 bp, synthetic construct
  source 1..75: mol_type = other DNA
tgttgcagtaaatcttgatgttgaaagcaatatcaatattactaacaactcccgtgtagctggtattgcgctgtc

SEQ ID NO: 224514 - DNA, 75 bp, synthetic construct
  source 1..75: mol_type = other DNA
ctgccgatggtcgctttatcactggcttatatcgccagtattgcgcgtattacccgtggttcaatgatcgaagtt

SEQ ID NO: 224515 - DNA, 75 bp, synthetic construct
  source 1..75: mol_type = other DNA
cagtttcccggtttctgcaaaactcggggccgctgcatttttccttgcggtggtactgggcgttagcgcaggtgt

SEQ ID NO: 224516 - DNA, 75 bp, synthetic construct
  source 1..75: mol_type = other DNA
tcatgccaatggtccagcagcagcaggcagaagcctggcagaagaccaccgagcagtgggctgctgacgtgaagg

SEQ ID NO: 224517 - DNA, 75 bp, synthetic construct
  source 1..75: mol_type = other DNA
gtctgcacagatggcgcgtcgtctgcaagtcacttcagagaaagtgggcaacctggcgttcctcgacgtgacggg

SEQ ID NO: 224518 - DNA, 75 bp, synthetic construct
  source 1..75: mol_type = other DNA
tatctttattatcaacatgatggctggcttccggtcctgtttggcaacgacgagcggacacttaacggtcattac

SEQ ID NO: 224519 - DNA, 75 bp, synthetic construct
  source 1..75: mol_type = other DNA
gaaaactgggggatccctcaacatcattctatggaaaaggttggggcggtatcaaaagataaatgggttagcgat

SEQ ID NO: 224520 - DNA, 75 bp, synthetic construct
  source 1..75: mol_type = other DNA
tgctggtggggacattggctatctcgaaaactgggggatccctcaacatcattctatggaaaaggttggggcggt

SEQ ID NO: 224521 - DNA, 75 bp, synthetic construct
  source 1..75: mol_type = other DNA
tgctcagggcataccgttaaatgctgtggaagggaagagtgagcagactggtggtgatctggttaagctggggaa

SEQ ID NO: 224522 - DNA, 75 bp, synthetic construct
  source 1..75: mol_type = other DNA
tattacactccaactttattcgtactgcccgggcgaaagggttacctatgcggcggatcattttacgccacgcat

SEQ ID NO: 224523 - DNA, 75 bp, synthetic construct
  source 1..75: mol_type = other DNA
tcggtccatcgtttaaatataaagattattcggtcaacgacctggttgcatccagttttcccgtttctgccaaac

SEQ ID NO: 224524 - DNA, 75 bp, synthetic construct
  source 1..75: mol_type = other DNA
cctgaacgcgtgaaatttgaggcaatgcgtaaactgctcggtgccgtaactgaagaagttgatatggctgttatt

SEQ ID NO: 224525 - DNA, 75 bp, synthetic construct
  source 1..75: mol_type = other DNA
gatagtgaccataaaaacacacagtgccccgccactgatgatgagatggaccccttcgatgattaccttgatgat

SEQ ID NO: 224526 - DNA, 75 bp, synthetic construct
  source 1..75: mol_type = other DNA
ttcggtactggcctcggcatcgcggtacgtcagggcaacactgaactgcagcagaaactcaacactgcgctggaa

SEQ ID NO: 224527 - DNA, 75 bp, synthetic construct
  source 1..75: mol_type = other DNA
caaaactggatctgcaaaacggtcgtatcgacagcgtatttggtgacaccgcagtggtcaccgagtggctgaaag

SEQ ID NO: 224528 - DNA, 75 bp, synthetic construct
  source 1..75: mol_type = other DNA
acgcgccatttcacaccaaggtcgtgaacgtcggcgtgcgcgattcgacctacgtgctcgacggcctgctgtacc

SEQ ID NO: 224529 - DNA, 75 bp, synthetic construct
  source 1..75: mol_type = other DNA
ctggtcaacgctcagtttcggcatccctttgccgggcactggggcgatggcaccacatcatcatcggacggacag

SEQ ID NO: 224530 - DNA, 75 bp, synthetic construct
  source 1..75: mol_type = other DNA
cagaatttggttacctacccaaccagaatttggttacatgtaatactgaatataaagacaaaaatataaatactg

SEQ ID NO: 224531 - DNA, 75 bp, synthetic construct
  source 1..75: mol_type = other DNA
tatgttgaaagcgcatagcgacagttctgttgttccgttcagtaaaagcacgccggatgttgaagcacccagcct

SEQ ID NO: 224532 - DNA, 75 bp, synthetic construct
  source 1..75: mol_type = other DNA
attacccagtgggatcaggtgctggatatgctggaggcacatagcgatagttccatattagctctcgagccatga

SEQ ID NO: 224533 - DNA, 75 bp, synthetic construct
  source 1..75: mol_type = other DNA
gtgcctgctgccgctgctgaccggttgcggaagtacgcggacggtttacgtgagcgatccggtggcaccgctgcc

SEQ ID NO: 224534 - DNA, 75 bp, synthetic construct
  source 1..75: mol_type = other DNA
ggataagcacccggaaatcactaccgttccgtatgacagctaccagaacgcaaaactggatctgcaaaacgggcg

SEQ ID NO: 224535 - DNA, 75 bp, synthetic construct
  source 1..75: mol_type = other DNA
gatcgtcgggtttgacgttgacctggcgcaggcgttgtgtaaagagatcgatgcgacctgtactttctctaacca

SEQ ID NO: 224536 - DNA, 75 bp, synthetic construct
  source 1..75: mol_type = other DNA
gataacaaacaacttccctacttggctcaggcatggattgagaatgataagcacgaaaaaatccttacggggccg

SEQ ID NO: 224537 - DNA, 75 bp, synthetic construct
  source 1..75: mol_type = other DNA
gttccacaccaaggtcgtgaacgtcggcgtgcgcgactcgacctacgtgctcgacggcctgctgtatcacgaatc

SEQ ID NO: 224538 - DNA, 75 bp, synthetic construct
  source 1..75: mol_type = other DNA
acggtctacctggagcgtgcggcgcatgcgttgcgcggcaatggtcatgccgtcgatgactcgctattgcagtac

SEQ ID NO: 224539 - DNA, 75 bp, synthetic construct
  source 1..75: mol_type = other DNA
ttgccgagagcgtcaccgaggcgcagaagctcgcgcaacccgatgacttcgatttcctgcatcgcatcggcgaga

SEQ ID NO: 224540 - DNA, 75 bp, synthetic construct
  source 1..75: mol_type = other DNA
acgcagccgttgaggcaaatggaggaaaatcgcccccgtttgcaggggacgacggatgtgacgcctaaacggtga

SEQ ID NO: 224541 - DNA, 75 bp, synthetic construct
  source 1..75: mol_type = other DNA
cgacgaaacctattcggcggccttggccgagctggtcaaccaccagtatcgccacgcctttgccgcccactgggg

SEQ ID NO: 224542 - DNA, 75 bp, synthetic construct
  source 1..75: mol_type = other DNA
gggcgtgcaagcctacccgacgttgcgcccgctgatcggcggcaccctgaacatcaagcacgtgcgtgcccactg

SEQ ID NO: 224543 - DNA, 75 bp, synthetic construct
  source 1..75: mol_type = other DNA
gggctgaccaagatggccgagtcgagccccggcctgacctacgccaagctgtcctggctgcaagcctggcacatc

SEQ ID NO: 224544 - DNA, 75 bp, synthetic construct
  source 1..75: mol_type = other DNA
cgggcctggtaatggacggtgtcgttgaccttggcatcatcggtgaaaacgtactggaagaagagcttctgaccc

SEQ ID NO: 224545 - DNA, 75 bp, synthetic construct
  source 1..75: mol_type = other DNA
cggggttgattatggatggcgtggtcgatctcggcattatcggtgaaaacgttctggaagaagagctgctgagcc

SEQ ID NO: 224546 - DNA, 75 bp, synthetic construct
  source 1..75: mol_type = other DNA
ggtcagtagcgaaaccctgttctgggaaacgatggaaaaactgaaagcgctgggtgccagttcaattctggtcct

SEQ ID NO: 224547 - DNA, 75 bp, synthetic construct
  source 1..75: mol_type = other DNA
tgcatcgttacatgaaacgcagccactgaggcaaatggaggaaaatcgcccccgtttgcaggggacgacggatgt

SEQ ID NO: 224548 - DNA, 75 bp, synthetic construct
  source 1..75: mol_type = other DNA
attgttgatgcgcaatgtctggattgcttcgcaggtagcggggctctggggctggaagccttgtcacgctacgct

SEQ ID NO: 224549 - DNA, 75 bp, synthetic construct
  source 1..75: mol_type = other DNA
ttgtttaactggctggctccggtcattgttgacgcccaatgtctggattgcttcgccgggagcggcgcgctgggg

SEQ ID NO: 224550 - DNA, 75 bp, synthetic construct
  source 1..75: mol_type = other DNA
gacgccctgcgctatcttagccaacagatagatgtctggcgtcgtcagctgatgctggacgagacgcaatccgcc

SEQ ID NO: 224551 - DNA, 75 bp, synthetic construct
  source 1..75: mol_type = other DNA
atcgctgcctgtacgttttatcccgatcctggccaccctattcatcaactggccgatcagcagcctacgatttca

SEQ ID NO: 224552 - DNA, 75 bp, synthetic construct
  source 1..75: mol_type = other DNA
gtgctggaaggctgtttaagccgaatgctggtgaatcgtagccaggcggatgtcgacaccgcacatcggctggcg

SEQ ID NO: 224553 - DNA, 75 bp, synthetic construct
  source 1..75: mol_type = other DNA
ttctggtgtctgaaatacgccgtcattctgccactggccacaatggccctgatggctctgtttgttttatggaag

SEQ ID NO: 224554 - DNA, 75 bp, synthetic construct
  source 1..75: mol_type = other DNA
gctggcgttactggttttatggaaggacaacaccacaccggggaaattgctggttcaggagatcgagtttgtaag

SEQ ID NO: 224555 - DNA, 75 bp, synthetic construct
  source 1..75: mol_type = other DNA
ttctggtgtctgaagtacaccgtcattctgccactggccacaatggccctgatggctctgtttgttttatggaag

SEQ ID NO: 224556 - DNA, 75 bp, synthetic construct
  source 1..75: mol_type = other DNA
taattcttgtcacaggtcatcgtcgtgaaagttttggcagaggatttgaaaacatttgtgaagcattagcattaa

SEQ ID NO: 224557 - DNA, 75 bp, synthetic construct
  source 1..75: mol_type = other DNA
gggaggtattcaggaagaagctccatctttaggtaaacctgtgttggttatgcgggacaccacagagcgtccaga

SEQ ID NO: 224558 - DNA, 75 bp, synthetic construct
  source 1..75: mol_type = other DNA
acatttgcagttagcttggctgcatattatgaacaaatagtcattgggcatatagaggctgggttgcggacagga

SEQ ID NO: 224559 - DNA, 75 bp, synthetic construct
  source 1..75: mol_type = other DNA
aaaacaagagagagatttaacaggtgttcaaacaaatgttggtgttgtgtttgaacatgacgcaaacacaaaagc

SEQ ID NO: 224560 - DNA, 75 bp, synthetic construct
  source 1..75: mol_type = other DNA
tgttcaaacaaatgttggtgtggtgtttgaacatgacgcaaacacaaaagcaactaataaagatacagatacaga

SEQ ID NO: 224561 - DNA, 75 bp, synthetic construct
  source 1..75: mol_type = other DNA
atgactactgtctggcagccgtcgccggattttcgacaacgggcagcagtgtggggtatggctctgcctgagccg

SEQ ID NO: 224562 - DNA, 75 bp, synthetic construct
  source 1..75: mol_type = other DNA
ggcactgatgtatatgtcgtttgcggcaggcaccgggaaatatccgatgtggcccggaaaaatgaaatgtgtccg

SEQ ID NO: 224563 - DNA, 75 bp, synthetic construct
  source 1..75: mol_type = other DNA
gtgcctgctaccgctgctgaccggttgcggaagtacgcggacagtttacgtgagcgatccggtggcacccctgcc

SEQ ID NO: 224564 - DNA, 75 bp, synthetic construct
  source 1..75: mol_type = other DNA
gaatgatgattgcgcttcacgtcctgtgcctgctaccgctgctgaccggttgcggaagtacgcggacagtttacg

SEQ ID NO: 224565 - DNA, 75 bp, synthetic construct
  source 1..75: mol_type = other DNA
ccctgccggaaaaaatcaggaaatgccctgtttattttcctgatgacagaacaaacagaaataacggagataaaa

SEQ ID NO: 224566 - DNA, 75 bp, synthetic construct
  source 1..75: mol_type = other DNA
tgcaaatcgtcaatacagttctggaggctagccagcatgcaaaacagcagattgcactggagtcacagagaaccc

SEQ ID NO: 224567 - DNA, 75 bp, synthetic construct
  source 1..75: mol_type = other DNA
atgcagcagtcgataattcaaagtgccagtgaaacatggcaggcagtaaaacatgaggagcaaaagcgcctgcga

SEQ ID NO: 224568 - DNA, 75 bp, synthetic construct
  source 1..75: mol_type = other DNA
attaccaataacgtcctgcaatcactacaaatcgtcaatacagttctggaggctaaccagcatgcaaaacagcag

SEQ ID NO: 224569 - DNA, 75 bp, synthetic construct
  source 1..75: mol_type = other DNA
cctgccgggaaaaatcaggaaatgccctgtttatcttcctgatgacagaacaaacagaaacaacggagataaaaa

SEQ ID NO: 224570 - DNA, 75 bp, synthetic construct
  source 1..75: mol_type = other DNA
tgatgctgcagattatgtcagggagactgaccggtcactgatgcaactggtcaccgcattctgggcaacgctggc

SEQ ID NO: 224571 - DNA, 75 bp, synthetic construct
  source 1..75: mol_type = other DNA
atggctctgtttgttttatggaaggacaacaccacgccggggaaattactggttaaggagattaacttcgtaaga

SEQ ID NO: 224572 - DNA, 75 bp, synthetic construct
  source 1..75: mol_type = other DNA
ctgcatgaccttccggggggagcagagaaaatctgccgttaccgtgctgctgatgctgcagattatgtcagggag

SEQ ID NO: 224573 - DNA, 75 bp, synthetic construct
  source 1..75: mol_type = other DNA
aagacaaacagcccctgacgggcaattcccggtccgtgactgcccgacagtggtcgacggtaaatacactgaacc

SEQ ID NO: 224574 - DNA, 75 bp, synthetic construct
  source 1..75: mol_type = other DNA
cttatgtatatgtcgtttgcggcaggcaccgggaaatatccgatgtggcccggaaaaatgaaatgtgtccgggtg

SEQ ID NO: 224575 - DNA, 75 bp, synthetic construct
  source 1..75: mol_type = other DNA
ggcccggtaaaagcgttctgggcatcgggcagcgaattgtcaccatcatggtcgaaatggtggagacacgtctgc

SEQ ID NO: 224576 - DNA, 75 bp, synthetic construct
  source 1..75: mol_type = other DNA
gtacgctggcgctggcgctggcgctggctatcgccggtgttacagcaatgtcgggctttatggcaatgccggagg

SEQ ID NO: 224577 - DNA, 75 bp, synthetic construct
  source 1..75: mol_type = other DNA
cagctacaaatttgatatcgccggtagcccgttaaccaccagctaccagttctacggtacccgcgataaagttga

SEQ ID NO: 224578 - DNA, 75 bp, synthetic construct
  source 1..75: mol_type = other DNA
aaaaccgccgcgacttccgatgaaatggtcagtctgatgaccaaagggggttacgatctggttacggcatccggc

SEQ ID NO: 224579 - DNA, 75 bp, synthetic construct
  source 1..75: mol_type = other DNA
ctgaatctgccagctctgcgagtggtccgtgtacttgacaggatcgcggtaaaccgcggttatccggtcatgctg

SEQ ID NO: 224580 - DNA, 75 bp, synthetic construct
  source 1..75: mol_type = other DNA
tttgtcaaagccagctataaatttgatatcgctggtagcccattaactaccacctatcagttctatggtacgcgc

SEQ ID NO: 224581 - DNA, 75 bp, synthetic construct
  source 1..75: mol_type = other DNA
aagccggggcgaattttgattacggcgatgctggtgcgttgagtttctcctacatgtggaccaacgaatacaaag

SEQ ID NO: 224582 - DNA, 75 bp, synthetic construct
  source 1..75: mol_type = other DNA
cggttaccgcattcatgacggttatctcgaacggttagcctggccgctgaccgatgcagcaggcagcgtgaagcc

SEQ ID NO: 224583 - DNA, 75 bp, synthetic construct
  source 1..75: mol_type = other DNA
ttgtttactcgcatcctgaatcagcaagctgataaccatgtttcgacgccaattacgtcaatgctaaaattgcgt

SEQ ID NO: 224584 - DNA, 75 bp, synthetic construct
  source 1..75: mol_type = other DNA
tgcattatctcgggaatcgttctgggttctttgtatggtctgatgcctctgtacctcaatcataaagggattagc

SEQ ID NO: 224585 - DNA, 75 bp, synthetic construct
  source 1..75: mol_type = other DNA
ggaatgatgatgccctatcagcgcggatatctttcggcgattagtaagctggaagtattgaagagtgaattatga

SEQ ID NO: 224586 - DNA, 75 bp, synthetic construct
  source 1..75: mol_type = other DNA
taagtccgaactaaagaaaaactttattatctacggccctcagctcatttcttgctctaataatagtatgctgat

SEQ ID NO: 224587 - DNA, 75 bp, synthetic construct
  source 1..75: mol_type = other DNA
atgccgctatcaatttcagcatatcataagataatcaaactaatcagaaactctcatccagagctatcgggttta

SEQ ID NO: 224588 - DNA, 75 bp, synthetic construct
  source 1..75: mol_type = other DNA
aaagaagtaagaaatttagcttactccataattacagagcaaaataatgaaattaacatcatgaataaactggtc

SEQ ID NO: 224589 - DNA, 75 bp, synthetic construct
  source 1..75: mol_type = other DNA
aatgccatacggcctgaaatttgagctggcggcggagtcgccgttgatgatgattatgcttaatgctttgtctca

SEQ ID NO: 224590 - DNA, 75 bp, synthetic construct
  source 1..75: mol_type = other DNA
gcggaatggatgcaaatgagcaacctgctgctggataaaccgcaccaccagacaccgcgcggcctgaagtttgag

SEQ ID NO: 224591 - DNA, 75 bp, synthetic construct
  source 1..75: mol_type = other DNA
atgaagaaatccatcaccactcttgaccttaatttgctgctctgcctgcaactactgatgcaggagcgcagcgta

SEQ ID NO: 224592 - DNA, 75 bp, synthetic construct
  source 1..75: mol_type = other DNA
ctgcttaaccagaacgacgttaccacgcttatccgcaaagacggttttcgcttctggggttcccgctgtctgagt

SEQ ID NO: 224593 - DNA, 75 bp, synthetic construct
  source 1..75: mol_type = other DNA
aaagcagggaaactcgtgattgattatgactacacgcctgtgccgccacttgaaaacctgatgctgcgccagcgc

SEQ ID NO: 224594 - DNA, 75 bp, synthetic construct
  source 1..75: mol_type = other DNA
ggccgagaacgcacgattgctatgagtctgccagaatttgagcaggcgctatttatggcggcgcagcccgacaat

SEQ ID NO: 224595 - DNA, 75 bp, synthetic construct
  source 1..75: mol_type = other DNA
ctgcgtgggtttgcctacctgtcagcgtatggttgcaagacggtgcaggaagcaatcacttaccgtgaaaacttc

SEQ ID NO: 224596 - DNA, 75 bp, synthetic construct
  source 1..75: mol_type = other DNA
atggctcaggattaccaccacggcgtgcgcgttgaagaaatcaacgaaggcacccgaacgattaccacggtgagc

SEQ ID NO: 224597 - DNA, 75 bp, synthetic construct
  source 1..75: mol_type = other DNA
actcaccattccatttgctaagtctgttattgatgaaatattgagtaaagaaaatctgtcatggtgttcgaaaaa

SEQ ID NO: 224598 - DNA, 75 bp, synthetic construct
  source 1..75: mol_type = other DNA
aacgccgcgcggccttaagtttgagttagcggcggagtcaccgctgatgatgatcatgtttaacgcgttatcgaa

SEQ ID NO: 224599 - DNA, 75 bp, synthetic construct
  source 1..75: mol_type = other DNA
aggccggtaaaaaaggtacgctggcggcgtcgttgcaggccatcgctgaccagtcaaaaccggtcaccgttgtcg

SEQ ID NO: 224600 - DNA, 75 bp, synthetic construct
  source 1..75: mol_type = other DNA
tcggtaaccggtgttaaaccgcgtattcttggtgtgccggggctggataccaaagaggtggctgttgcactggca

SEQ ID NO: 224601 - DNA, 75 bp, synthetic construct
  source 1..75: mol_type = other DNA
cgtatgcagcgaaaaatccggcccttgccgcagagctggccttcaacacccgcatgagtgtgaaacaggccagag

SEQ ID NO: 224602 - DNA, 75 bp, synthetic construct
  source 1..75: mol_type = other DNA
ttcgcgatgcgatgtcctgtatgggcgcggcggtcaatatcatcactacggacggtccagccgggcgcgccgggt

SEQ ID NO: 224603 - DNA, 75 bp, synthetic construct
  source 1..75: mol_type = other DNA
tgattatgttcaatacgctggctaagcagatctaccagcgttacccccaggcgacgatcaaattgcgcaactggg

SEQ ID NO: 224604 - DNA, 75 bp, synthetic construct
  source 1..75: mol_type = other DNA
attactcaagacaacaatactacaaaatgcaatgctttacaggatggcaaataaaccctcccatatgatatttgc

SEQ ID NO: 224605 - DNA, 75 bp, synthetic construct
  source 1..75: mol_type = other DNA
atattaccatctggaagtgaatactggtttatcctacttttattttttgagcacttatcacaagagattaataga

SEQ ID NO: 224606 - DNA, 75 bp, synthetic construct
  source 1..75: mol_type = other DNA
acgatgttataaggacagttgaaaccgccagcgcgaaagagctggaagagcttgcaggtattcgggaagctgttg

SEQ ID NO: 224607 - DNA, 75 bp, synthetic construct
  source 1..75: mol_type = other DNA
aaatgtcttagatcttggaatgtgtggtactgaagagatatatttttccacttggtatttaggaattgatggtgg

SEQ ID NO: 224608 - DNA, 75 bp, synthetic construct
  source 1..75: mol_type = other DNA
cgttgatgtgatgcctgaatcattgccagctgtgttttctcgtctggtcatggataaagtgatcctacccacgta

SEQ ID NO: 224609 - DNA, 75 bp, synthetic construct
  source 1..75: mol_type = other DNA
ttttatggtggatggaacagagtgaagaagccagaaaatcgctaaccagcaacactcaagagctttcaacggctc

SEQ ID NO: 224610 - DNA, 75 bp, synthetic construct
  source 1..75: mol_type = other DNA
tttagtgatgtaccctgcgtctggttacgcaaagatcatccggcactgcatgaaacgtggaatctggacaccttt

SEQ ID NO: 224611 - DNA, 75 bp, synthetic construct
  source 1..75: mol_type = other DNA
ccagtctgggggagcaagtagtcaatgagctcggtgattttcatcatgtgaatcgtgtttatgttgtcggtggtg

SEQ ID NO: 224612 - DNA, 75 bp, synthetic construct
  source 1..75: mol_type = other DNA
gcctcagcctgtatcattgactgtgactttgcctatcagtgagttctacacgaaagagtgtcaaaaaaatgaact

SEQ ID NO: 224613 - DNA, 75 bp, synthetic construct
  source 1..75: mol_type = other DNA
gtgcagcagacgatgagttttttaaatcacgatctgacacaaatgatgccgcgtccggtaagaggcgagcagggc

SEQ ID NO: 224614 - DNA, 75 bp, synthetic construct
  source 1..75: mol_type = other DNA
agccgtatctggagctgtgcgagattatgaatcagaaggtgccgggcgattttgccaagaaaacgctgctggtca

SEQ ID NO: 224615 - DNA, 75 bp, synthetic construct
  source 1..75: mol_type = other DNA
gggcgaaggcggtttctacgccgcgacgccagcctttatgcagcgtttacgcgcgctgtgtgacgagcacgggat

SEQ ID NO: 224616 - DNA, 75 bp, synthetic construct
  source 1..75: mol_type = other DNA
gcactacacgctggcgctgaccggcaaggtaaatccgtactctgcgggtatggggctgatgccgggtcatgttta

SEQ ID NO: 224617 - DNA, 75 bp, synthetic construct
  source 1..75: mol_type = other DNA
cttgcttcctttatttttgctgcgggttgtgccgggcttggcttgatgattggtttctggagctggttagcctgg

SEQ ID NO: 224618 - DNA, 75 bp, synthetic construct
  source 1..75: mol_type = other DNA
acacaatcggaactaagagtatagataatcaaaaaacaatggacagttttattgataagctaaaaattaaaagac

SEQ ID NO: 224619 - DNA, 75 bp, synthetic construct
  source 1..75: mol_type = other DNA
gatgatgcgcaagctggcacaggtggcgtatggagtgctgaagtcaggcgtgccgttcgatgcgtcacggcataa

SEQ ID NO: 224620 - DNA, 75 bp, synthetic construct
  source 1..75: mol_type = other DNA
ggaattatgagttttcgaaagcaatagacaagaatcaggacatatccgatgaaaaagagcaacaaatccgttctt

SEQ ID NO: 224621 - DNA, 75 bp, synthetic construct
  source 1..75: mol_type = other DNA
tgttatatcgattctttatgaggaaagagatcaatattgatgaaagaattcagaaaaagatatttctggctcctc

SEQ ID NO: 224622 - DNA, 75 bp, synthetic construct
  source 1..75: mol_type = other DNA
acgtccggtaagaggcgatcagggccagcgtgaacctgcgttactggcaggcgctggcgtgctggcgtctgagag

SEQ ID NO: 224623 - DNA, 75 bp, synthetic construct
  source 1..75: mol_type = other DNA
gctgccatcgtgattgagccggttcagggcgaaggtggtttctacgccgcgacgccagcctttatgcagcgttta

SEQ ID NO: 224624 - DNA, 75 bp, synthetic construct
  source 1..75: mol_type = other DNA
tggggctgatgccggggcatgtttatcgcgcgctttatccttgcccgctgcacggcatcagtgaagatgacgcta

SEQ ID NO: 224625 - DNA, 75 bp, synthetic construct
  source 1..75: mol_type = other DNA
caataaggaggagagcaaatgataaaacagatccgcgagtttatcagccattagtgaagacttgtgagaggaagt

SEQ ID NO: 224626 - DNA, 75 bp, synthetic construct
  source 1..75: mol_type = other DNA
gctggaatatatccctggctggtgaagagtttattgttaaaggtggttcaacaccaagtacagccaatgaagatt

SEQ ID NO: 224627 - DNA, 75 bp, synthetic construct
  source 1..75: mol_type = other DNA
ttttaacagatcattacatcattagttctggcctttccaaacccgctaaagattttggtacagggtatccattct

SEQ ID NO: 224628 - DNA, 75 bp, synthetic construct
  source 1..75: mol_type = other DNA
gactcactaaccaacctccgcgacaccctgctcccgaaactcatctccggtgagctatccctggaagatcttccg

SEQ ID NO: 224629 - DNA, 75 bp, synthetic construct
  source 1..75: mol_type = other DNA
aaatataattgatgctggttttgagatttgttctcatgaacctgattttatcgtgttaggatatgatactgagct

SEQ ID NO: 224630 - DNA, 75 bp, synthetic construct
  source 1..75: mol_type = other DNA
ttcggagacaaatcgattcccagaggaacagcaattgcgacttttgtgaatgggaaatatccatcgggggacaat

SEQ ID NO: 224631 - DNA, 75 bp, synthetic construct
  source 1..75: mol_type = other DNA
tctccagaaaaggtgggatgcgcagtgatgggacatatcatgatgccagtaataacgctgaagctttttatgtta

SEQ ID NO: 224632 - DNA, 75 bp, synthetic construct
  source 1..75: mol_type = other DNA
cacttacagggcggtattccggcacgcgatgtggatgctttgcaagattactggcgggtattccctgccctgcgc

SEQ ID NO: 224633 - DNA, 75 bp, synthetic construct
  source 1..75: mol_type = other DNA
cagggatcaaggcggagattgagcgtattacccagcaactggcgtcgcgcgtaaaggagctggaagagcgttatg

SEQ ID NO: 224634 - DNA, 75 bp, synthetic construct
  source 1..75: mol_type = other DNA
attactcccgatactccgcaagatgcaacggtttatgacccaacctgtggctctggttcgctgctgttgaaagtg

SEQ ID NO: 224635 - DNA, 75 bp, synthetic construct
  source 1..75: mol_type = other DNA
tgccttttctcccgcaggcttttgcgttgacgacgccgcgctctatttctcatttgaagaaaaatgccgcgattt

SEQ ID NO: 224636 - DNA, 75 bp, synthetic construct
  source 1..75: mol_type = other DNA
tacactgaagttgcttaaatcgagaaagctgaaggcagcggaatatcactttcagctgactgcggaaatgttata

SEQ ID NO: 224637 - DNA, 75 bp, synthetic construct
  source 1..75: mol_type = other DNA
catcaccggctgatgagcaacgatgcagccacggttcaacatttttcctgtgatatcgcgatgctgaagcggaac

SEQ ID NO: 224638 - DNA, 75 bp, synthetic construct
  source 1..75: mol_type = other DNA
atgaaaactccgagaggcattcgtaataacaaccccggtaatcttgataaaggagcgccgtggcagggcttagtc

SEQ ID NO: 224639 - DNA, 75 bp, synthetic construct
  source 1..75: mol_type = other DNA
gtgatattcacgttgagataacggatgccagtcggcaacctgtctgtagcgcgcttaaacttcagccagacgaag

SEQ ID NO: 224640 - DNA, 75 bp, synthetic construct
  source 1..75: mol_type = other DNA
tgatgtcacccaccagcgcggacgaaaattttgttgtagaagaagatcgagcaccggttgaactgaccgggagtg

SEQ ID NO: 224641 - DNA, 75 bp, synthetic construct
  source 1..75: mol_type = other DNA
tgagcgacgggaacgtgcaaattgttaagacaggcgaggtcgtcggtgcgactcaacttacggacggtgagttga

SEQ ID NO: 224642 - DNA, 75 bp, synthetic construct
  source 1..75: mol_type = other DNA
atactgtcggtattggtgctcatacgcactcggttgcgattggttcacatggacacaccatcaccgttaacgctg

SEQ ID NO: 224643 - DNA, 75 bp, synthetic construct
  source 1..75: mol_type = other DNA
tggttcgtggcgtatgggaaacgctggcaatgaccttcgtatccggtttttttggctttgtgattggtctgccgg

SEQ ID NO: 224644 - DNA, 75 bp, synthetic construct
  source 1..75: mol_type = other DNA
gctaaaacttacctgctgcttaccaatcaaggtgatgtttatggtggctggaatacattaagaccgtttgctatt

SEQ ID NO: 224645 - DNA, 75 bp, synthetic construct
  source 1..75: mol_type = other DNA
cgaaattgagccggaagagcgcaaggtgctggaagagattgccggtgttctgggtcttcgtctggagaatcacct

SEQ ID NO: 224646 - DNA, 75 bp, synthetic construct
  source 1..75: mol_type = other DNA
atgaaaactccgagaggcattcgtaataacaaccctggcaacctcgacaaaggttcgccgtggcaggggctaatc

SEQ ID NO: 224647 - DNA, 75 bp, synthetic construct
  source 1..75: mol_type = other DNA
agcctgatttgcgacgccttccgcgaggtggttggcgagtctgtcacgcccgcagaaaacttctttgaggcgggc

SEQ ID NO: 224648 - DNA, 75 bp, synthetic construct
  source 1..75: mol_type = other DNA
agaatggatccatttatcgtctggggacggatggccttcagctctacagttccggtaagacgcaaaacttgtccg

SEQ ID NO: 224649 - DNA, 75 bp, synthetic construct
  source 1..75: mol_type = other DNA
cactggtgcggcaacgcatgtgcaactgaaagtgaaacgcctgcgcggagagggagcgatttgcctgcaaaccag

SEQ ID NO: 224650 - DNA, 75 bp, synthetic construct
  source 1..75: mol_type = other DNA
tggctgaaagtggaaactggtgggatcgtcagaggcacacaatatggcaacaatggcacgttatcagtcggtgac

SEQ ID NO: 224651 - DNA, 75 bp, synthetic construct
  source 1..75: mol_type = other DNA
tgcgtgccaaaattgatgagcagacagggtggcacaaaagcctgtccaatgtgggcgtgaacggtgtcaccggaa

SEQ ID NO: 224652 - DNA, 75 bp, synthetic construct
  source 1..75: mol_type = other DNA
cggatggcacaaaagcttgtccaacgtgggcgttaacggtgtcaccggaatttctgctgatgtgttctgggatct

SEQ ID NO: 224653 - DNA, 75 bp, synthetic construct
  source 1..75: mol_type = other DNA
ggtaatggataagctgcatcaggcaggttacctgaagattggtctggttggcgaagaaacagccaaagcgaagta

SEQ ID NO: 224654 - DNA, 75 bp, synthetic construct
  source 1..75: mol_type = other DNA
agcaatcacttaccgtaaaaacttcagtcagcgtgaaggaatgctgatctggcccgactttactggctgggacac

SEQ ID NO: 224655 - DNA, 75 bp, synthetic construct
  source 1..75: mol_type = other DNA
acccgtcgctggcccgcgacattatcgaggtatccgcgccaaaatacgcagcctggtcagtcagggctatctcat

SEQ ID NO: 224656 - DNA, 75 bp, synthetic construct
  source 1..75: mol_type = other DNA
atgactacacgccagtgccgccacttgaaaatctgatgctgcggcagcgcatcaccgatcagtatctggtgaatt

SEQ ID NO: 224657 - DNA, 75 bp, synthetic construct
  source 1..75: mol_type = other DNA
agcaaaaaactgactcgcttcgatactacgctgacaggctgttttgagcgagatatctctcgtgtcgggcatcga

SEQ ID NO: 224658 - DNA, 75 bp, synthetic construct
  source 1..75: mol_type = other DNA
atctgctcaatcacagctcggcgttaaaccgcgcattctgggtgtaccaggtcacgacaccaaggcggtagctac

SEQ ID NO: 224659 - DNA, 75 bp, synthetic construct
  source 1..75: mol_type = other DNA
gatggacacaatggcagaagcgcacatgtgggcggtggacaaaccgctgaacccgtcgctggcgcgcgacattat

SEQ ID NO: 224660 - DNA, 75 bp, synthetic construct
  source 1..75: mol_type = other DNA
ggtaatggatacgctgcatcaggcgggttacctgaagataggtctggttggcgaagaaactgccaaagcgaagta

SEQ ID NO: 224661 - DNA, 75 bp, synthetic construct
  source 1..75: mol_type = other DNA
atttttacatcattccctatatgcactttgccaccaaggatggtggcgttacagccaatggttacattatttcct

SEQ ID NO: 224662 - DNA, 75 bp, synthetic construct
  source 1..75: mol_type = other DNA
acaaccaatggtcacattatctcctataacaatatccatgtcattaaattccccgcgaagtccaatagttactcc

SEQ ID NO: 224663 - DNA, 75 bp, synthetic construct
  source 1..75: mol_type = other DNA
tgcgcgccaaaatcgacgaacagaccggatggcacaaaaccctgtccaacgtgggtgtgaatggcgtcaccggtc

SEQ ID NO: 224664 - DNA, 75 bp, synthetic construct
  source 1..75: mol_type = other DNA
cggttttgtatcgccatttggtgataattccgaagttatcgctatgcatggaaatggttttatccttgttgaagc

SEQ ID NO: 224665 - DNA, 75 bp, synthetic construct
  source 1..75: mol_type = other DNA
gatttcttcctgttaaccagtgaaatttcgtgcctggttgatgctctggtaaatgcccttggtggagaggctaag

SEQ ID NO: 224666 - DNA, 75 bp, synthetic construct
  source 1..75: mol_type = other DNA
gctggcaaaggaaatcggggcagaggtcgatagtggtggggggctcaagcacatacaggactgcatcgagcgcct

SEQ ID NO: 224667 - DNA, 75 bp, synthetic construct
  source 1..75: mol_type = other DNA
cccaattatgcaaggggtatttaaatggaaggctttggatgattttaaattaaaaaataaagatatgctatggaa

SEQ ID NO: 224668 - DNA, 75 bp, synthetic construct
  source 1..75: mol_type = other DNA
aggccgttgccgcaccttttaatgttactcataaacatgaaattgatgccgccgttgaacatatcgaaaaggaca

SEQ ID NO: 224669 - DNA, 75 bp, synthetic construct
  source 1..75: mol_type = other DNA
agaacaagcgcgtaaactgaagaaaacagagaaggactccctgaaagacgaagttctgcattctcttctgccacg

SEQ ID NO: 224670 - DNA, 75 bp, synthetic construct
  source 1..75: mol_type = other DNA
tgtggcgatggggcgtgcgattgtgcgtgagccggcagtgttcctgtttgatgagccgctctctaacctcgatgc

SEQ ID NO: 224671 - DNA, 75 bp, synthetic construct
  source 1..75: mol_type = other DNA
gtatcgcgctgccgctaaacggtggctgccgtcagtatgcaggacgtaaaatgaccctcggtattcgcccggaac

SEQ ID NO: 224672 - DNA, 75 bp, synthetic construct
  source 1..75: mol_type = other DNA
ctgctgaaccagaatgacgtcaccacgctgatctgcaaagacggcttccgcttctggggttcccgctgcctcagt

SEQ ID NO: 224673 - DNA, 75 bp, synthetic construct
  source 1..75: mol_type = other DNA
atgagccgctctctaacctcgatgccaagctgcgcgtgcagatgcgtcttgaactgcaacagctgcaccgtcgcc

SEQ ID NO: 224674 - DNA, 75 bp, synthetic construct
  source 1..75: mol_type = other DNA
ctgaaaattcgcggtatgggcaagcagcaaattgctgaacgtgtcaaagaagcagcacgcattctcgaacttgac

SEQ ID NO: 224675 - DNA, 75 bp, synthetic construct
  source 1..75: mol_type = other DNA
cgaagaaaacatggcgtgggggctgaaaattcgcggcatgggcaagcagcaaatagccgagcgcgttaaagaagc

SEQ ID NO: 224676 - DNA, 75 bp, synthetic construct
  source 1..75: mol_type = other DNA
atgaatgaagaaaatacagcgctttttgacagaattttcactcttgagttacaggtcggttttcttctcccaaag

SEQ ID NO: 224677 - DNA, 75 bp, synthetic construct
  source 1..75: mol_type = other DNA
cctcatttagtcaattttgatgcttcaagagtagtgccaactgcctcagagaacagaccaagaaacattgcattt

SEQ ID NO: 224678 - DNA, 75 bp, synthetic construct
  source 1..75: mol_type = other DNA
taaattgcctgatttacgtggtgagtttattcgtggctgggatgacgggcgtggagctgacagtggtcggggatt

SEQ ID NO: 224679 - DNA, 75 bp, synthetic construct
  source 1..75: mol_type = other DNA
tgacgctgagcattatgttggtaatcgtgctgatatttttgcccattgtgttgctctacactctctggagctact

SEQ ID NO: 224680 - DNA, 75 bp, synthetic construct
  source 1..75: mol_type = other DNA
gttagccgttatctctacattttcataaacgttggtttgggagaaggttcggcattacccgttggcgtgcctgtt

SEQ ID NO: 224681 - DNA, 75 bp, synthetic construct
  source 1..75: mol_type = other DNA
ttcgttaattggtaatgatgattacaactgtttgattgaaggaaataaaaataacaaacgaacggcaacggggtt

SEQ ID NO: 224682 - DNA, 75 bp, synthetic construct
  source 1..75: mol_type = other DNA
tacgctaatttggatgtctcaagagttgttcctacagcgacagaaaacagacctcgtaacattgcctttaattat

SEQ ID NO: 224683 - DNA, 75 bp, synthetic construct
  source 1..75: mol_type = other DNA
gtcgcggttgagaatgcccctcttcttctgaagacgaagaaaatactgtggaagaaagcgaagagaaagccggtt

SEQ ID NO: 224684 - DNA, 75 bp, synthetic construct
  source 1..75: mol_type = other DNA
agcaccataatatatgtcatttgtttattgctgatttgcctgtggtttgcaggaatggtgttggttggtgggtat

SEQ ID NO: 224685 - DNA, 75 bp, synthetic construct
  source 1..75: mol_type = other DNA
gcagcttctggcaattgctgacgccattccctttgttgtgcggcttccttagtcttgggatggtgattttgcaag

SEQ ID NO: 224686 - DNA, 75 bp, synthetic construct
  source 1..75: mol_type = other DNA
gatggatttgacatggggatcggctgtctgctgccgctggtggcgcgtaatgatgatgaacgccggatagtgata

SEQ ID NO: 224687 - DNA, 75 bp, synthetic construct
  source 1..75: mol_type = other DNA
ctgctgaagaatacccggaactggcaaagtcttacccgacaaataaattacctgatttacgtggtgagtttattc

SEQ ID NO: 224688 - DNA, 75 bp, synthetic construct
  source 1..75: mol_type = other DNA
tatacaatcaacacaacactatttcttcaaaaaacagccactccccgtcgtcgaatccgtcgaggaggaagatga

SEQ ID NO: 224689 - DNA, 75 bp, synthetic construct
  source 1..75: mol_type = other DNA
tctcaagaccatttatttgcttctcatgggcactggtttgacaagtactatacgctaacaggttttgatccaacg

SEQ ID NO: 224690 - DNA, 75 bp, synthetic construct
  source 1..75: mol_type = other DNA
cctcgccttcgcgcaactgccgggtatcaccagccagccgctgcctggcggtggacaaagctggtcgctcccggt

SEQ ID NO: 224691 - DNA, 75 bp, synthetic construct
  source 1..75: mol_type = other DNA
tcatagaggagcatgaaatgaatgaactatacatattcggcaagctaatcagatgcttacctctaaaaatgatag

SEQ ID NO: 224692 - DNA, 75 bp, synthetic construct
  source 1..75: mol_type = other DNA
ctaaatttttccgtcgccccattttttcatccttagcaaaaggtaaggatatttcggatttatttgggagttttg

SEQ ID NO: 224693 - DNA, 75 bp, synthetic construct
  source 1..75: mol_type = other DNA
acgtgcgcattgccggaagcgacatcatgatgagcgatgctataccgtcaggaaaagccagctactccggcttta

SEQ ID NO: 224694 - DNA, 75 bp, synthetic construct
  source 1..75: mol_type = other DNA
actgatgatgaccagtttcacccgcatcatcattgtttttggtttattgcgtaacgcgctgggaacaccctccgc

SEQ ID NO: 224695 - DNA, 75 bp, synthetic construct
  source 1..75: mol_type = other DNA
ctgtccttctctggctggttacgcccctcgccttcgcgcaactgccgggtatcaccagccagccgctacctggcg

SEQ ID NO: 224696 - DNA, 75 bp, synthetic construct
  source 1..75: mol_type = other DNA
tgcctatgcattagatccttatcaggtatggcgtggatataacaatactaaaaaatatgcagcatttaacgcaaa

SEQ ID NO: 224697 - DNA, 75 bp, synthetic construct
  source 1..75: mol_type = other DNA
gagttggccacaattttcaaaaaaacatattcacaaggccggggacttgatgctgcaaatacaggagggagtttg

SEQ ID NO: 224698 - DNA, 75 bp, synthetic construct
  source 1..75: mol_type = other DNA
ggtttgggggaaggctctgcgctgcccgttggtgtgcccgttccgtggccctcagcaacaccaccaacgggctgg

SEQ ID NO: 224699 - DNA, 75 bp, synthetic construct
  source 1..75: mol_type = other DNA
gcgactggcgcttccgtatgggtgctctctaaccgtcgcgccaacagcgaaatggccagctggctggagcagcac

SEQ ID NO: 224700 - DNA, 75 bp, synthetic construct
  source 1..75: mol_type = other DNA
aaggacaattcaatattggatcggagatttagaacgtattggtgcaatagtaaaaataccagtaggtatttatta

SEQ ID NO: 224701 - DNA, 75 bp, synthetic construct
  source 1..75: mol_type = other DNA
gcggcaaaatttcctcgcgcaggatgcgctggtgaaaggctcggtggcggagcaggcgcagatccagagccagct

SEQ ID NO: 224702 - DNA, 75 bp, synthetic construct
  source 1..75: mol_type = other DNA
gaagcgcaggctaatacaactcaggtctcggcagagcgcgatcgtctgtttaaaaactatcagcgctacctgaaa

SEQ ID NO: 224703 - DNA, 75 bp, synthetic construct
  source 1..75: mol_type = other DNA
atcagcagcgagaaagtggtcagcgagtaactgtccagctacaaaaacatggcaaaacgaagtatgccatttggg

SEQ ID NO: 224704 - DNA, 75 bp, synthetic construct
  source 1..75: mol_type = other DNA
gaagcgcaggctaacaccacccaggtttcagcggagcgcgaccgtctgtttaaaaattatcaacgttacctgaaa

SEQ ID NO: 224705 - DNA, 75 bp, synthetic construct
  source 1..75: mol_type = other DNA
gctgggaggcgtgtttctggtgagtggtttgattttgttgatgaactacaaccacccttacacttttaccgcgca

SEQ ID NO: 224706 - DNA, 75 bp, synthetic construct
  source 1..75: mol_type = other DNA
gcgctacctgggcaggtgtttcacggcaaactgactagtattttacctgtcgtgccaggcggttcttatcaggcg

SEQ ID NO: 224707 - DNA, 75 bp, synthetic construct
  source 1..75: mol_type = other DNA
tggaacgggcacatcaacgtggttatcaggccggcatcgccggacactcaaaagaaatgtgtccctatcagacgc

SEQ ID NO: 224708 - DNA, 75 bp, synthetic construct
  source 1..75: mol_type = other DNA
gcatttctgaatcagtgctcaacggctgatcctgctgctatatcgaaaatcatgagtaagtttggtcgtgtcaga

SEQ ID NO: 224709 - DNA, 75 bp, synthetic construct
  source 1..75: mol_type = other DNA
atttgatgcccgtaaagcatttctgaatcagtgttcaacggctgatccggctgctatctcaaaaattatgagtaa

SEQ ID NO: 224710 - DNA, 75 bp, synthetic construct
  source 1..75: mol_type = other DNA
gcggttaatgccggaggccgtgctgaaattcatgctggtacgctggaaaatgcactgctgaaaggtggctcgatg

SEQ ID NO: 224711 - DNA, 75 bp, synthetic construct
  source 1..75: mol_type = other DNA
tggctgaaagtggaagccggcggtgttgccaaaggtacgcaatatgccaatgatggcacgttgtcagtaaatgat

SEQ ID NO: 224712 - DNA, 75 bp, synthetic construct
  source 1..75: mol_type = other DNA
cagacgctgaatcaaaggtcacaatggctgggaggctggcgagaagccatggcggacagggtagtaatggcctga

SEQ ID NO: 224713 - DNA, 75 bp, synthetic construct
  source 1..75: mol_type = other DNA
gcgctggtgaaaggttccgtggcggagcaggcgcagatccagagccaactcgacagcatggtcaacggcgagcag

SEQ ID NO: 224714 - DNA, 75 bp, synthetic construct
  source 1..75: mol_type = other DNA
acgtcgtcggatgatgcaatggtggtctaattatattgaagctaacactgatagatatattgccccctataaaat

SEQ ID NO: 224715 - DNA, 75 bp, synthetic construct
  source 1..75: mol_type = other DNA
atcttccgttatgccgtgcaacgtggaattgtcgattacaaccctgcccacgatctaaaaggtgcaattacggcc

SEQ ID NO: 224716 - DNA, 75 bp, synthetic construct
  source 1..75: mol_type = other DNA
aacagatagaaaacgccaagccgaagaccaatgattacaaacttaccgatggagggagtttgtatctactggtac

SEQ ID NO: 224717 - DNA, 75 bp, synthetic construct
  source 1..75: mol_type = other DNA
cccgctgctggggttcttctgcccattactgacggtgatggcgatttatcgtggtcgcccgggttggggattttt

SEQ ID NO: 224718 - DNA, 75 bp, synthetic construct
  source 1..75: mol_type = other DNA
ttgctctacactctctggagctactacaaaatgtgggggcgcatgacaacagaaactctccgccgtaacgaaaac

SEQ ID NO: 224719 - DNA, 75 bp, synthetic construct
  source 1..75: mol_type = other DNA
atgcaatgtggactattcctgctcaaagaaaaagaattgatggggtaaaatattcagagcgtggggcaaaaatgg

SEQ ID NO: 224720 - DNA, 75 bp, synthetic construct
  source 1..75: mol_type = other DNA
gtggctggattatctgggcgcactggaggctgtagacacatccagcgcaccggatatcaactggcctacccctcc

SEQ ID NO: 224721 - DNA, 75 bp, synthetic construct
  source 1..75: mol_type = other DNA
ctgaaaatgcgttttatgccggagagcttaaagaaagctacatcgcagcagactcatggccttctgatgccttgg

SEQ ID NO: 224722 - DNA, 75 bp, synthetic construct
  source 1..75: mol_type = other DNA
actccggttttacgctggtgctcgattcgcaacaggtcgaagaaggaaaacgctggtttgataaccttgcagcta

SEQ ID NO: 224723 - DNA, 75 bp, synthetic construct
  source 1..75: mol_type = other DNA
tgtgctgatatttttgcctattgtgttgctctacactgtatggagctactacaaaatgtgggggcgcatgacaac

SEQ ID NO: 224724 - DNA, 75 bp, synthetic construct
  source 1..75: mol_type = other DNA
tgttggtcatgctgtgctttttgctggcggggtactggctgtgggtgggtattgatggctttgtattgctcgccc

SEQ ID NO: 224725 - DNA, 75 bp, synthetic construct
  source 1..75: mol_type = other DNA
ttgctctacactgtgtggagctactacaaaatgtgggggcgtatgacaactgaaactctccgccatcacgatcat

SEQ ID NO: 224726 - DNA, 75 bp, synthetic construct
  source 1..75: mol_type = other DNA
agcaatttaacagctaacccgcttaaggctcttgatgatgcaattgcatctgttgataaattccgctcttctctc

SEQ ID NO: 224727 - DNA, 75 bp, synthetic construct
  source 1..75: mol_type = other DNA
agcatctgttgatgcgggaggtacagtaaaactgaataaagccgacgtaacatataacgacgcagcaaatggtgt

SEQ ID NO: 224728 - DNA, 75 bp, synthetic construct
  source 1..75: mol_type = other DNA
ttcaaaaccgtctggattccgcagtcaccaacctgaacaacaccaccaccaacctgtctgaagcgcagtcccgta

SEQ ID NO: 224729 - DNA, 75 bp, synthetic construct
  source 1..75: mol_type = other DNA
cgttctgaccttggtgctatccagaaccgtttcgattctgctatcaccaacttgggcaataccgtgaacaacctg

SEQ ID NO: 224730 - DNA, 75 bp, synthetic construct
  source 1..75: mol_type = other DNA
gtgacctgatttctaaatttaaagcgacaggtactgataattatcaaattaacggtactgataactatactgtta

SEQ ID NO: 224731 - DNA, 75 bp, synthetic construct
  source 1..75: mol_type = other DNA
tatgtcgaaagcgcagatcatccagcaggccggtaactccgtgttggcaaaagctaaccaggtaccgcagcaggt

SEQ ID NO: 224732 - DNA, 75 bp, synthetic construct
  source 1..75: mol_type = other DNA
ctgtccagaaccgtctggattctgcggtaaccaacctgaacaacaccaccaccaacctgtctgaagcgcagtccc

SEQ ID NO: 224733 - DNA, 75 bp, synthetic construct
  source 1..75: mol_type = other DNA
gtaggctatgtcaccgttcaaggtaaaaactatcttgctggtacaaatggtaccggtacagatgcgattgttaac

SEQ ID NO: 224734 - DNA, 75 bp, synthetic construct
  source 1..75: mol_type = other DNA
gcctctcgctgatcactcaaaataatatcaataagaaccagtctgcgctgtcgagctctatcgagcgtctgtctt

SEQ ID NO: 224735 - DNA, 75 bp, synthetic construct
  source 1..75: mol_type = other DNA
gatgatacgttgattaaagttgctgctaattctgacggagaggccgttggtttcgctaccgttcagggtaagaat

SEQ ID NO: 224736 - DNA, 75 bp, synthetic construct
  source 1..75: mol_type = other DNA
gatttcactgctgttgcgaaagatctgactactgcgacaggtaaaacagtcgatgtttctagcctgacgttacac

SEQ ID NO: 224737 - DNA, 75 bp, synthetic construct
  source 1..75: mol_type = other DNA
aagtgtccaacatgtcgaaagcgcagatcatccagcaggcaggtaactccgtgctgtccaaagctaaccaggtac

SEQ ID NO: 224738 - DNA, 75 bp, synthetic construct
  source 1..75: mol_type = other DNA
atgaagctgacctgccgctggtgcactggggcgttcaggatgcgctgtatcaggctgaacaggcgatggatgatt

SEQ ID NO: 224739 - DNA, 75 bp, synthetic construct
  source 1..75: mol_type = other DNA
cgtctgccgatggagttctggcaacgctacagtgccacgatgctgctcggatctatcatcctgctgatgatcgtt

SEQ ID NO: 224740 - DNA, 75 bp, synthetic construct
  source 1..75: mol_type = other DNA
gtgatttgagattgatggaggcagctcctgatttgcttgaagctctgcaagcgatgctaaacaaggcatacaagc

SEQ ID NO: 224741 - DNA, 75 bp, synthetic construct
  source 1..75: mol_type = other DNA
ggtgtggtggagtttgaacacagtgatggaagaagaagtcctgtgtctctttacagcattgttctggctgaatca

SEQ ID NO: 224742 - DNA, 75 bp, synthetic construct
  source 1..75: mol_type = other DNA
tggcgcggatgattatctgcccaagcccttctcgctgattgagctggtggcgcgtattcaggcactggtgcgccg

SEQ ID NO: 224743 - DNA, 75 bp, synthetic construct
  source 1..75: mol_type = other DNA
gacagatgtcgcggcagctggcgaatggaggcatgagcacgcagacgcgggatggctcgatggtctgggacagtg

SEQ ID NO: 224744 - DNA, 75 bp, synthetic construct
  source 1..75: mol_type = other DNA
agctatgaccagtacacgacgagcaaaacacgtagccatgagtatagtgaaatggcctcacgaacagaaagcatg

SEQ ID NO: 224745 - DNA, 75 bp, synthetic construct
  source 1..75: mol_type = other DNA
aaaagctggtaaagcgtgggataaagatatttacagcgcgtggaagcgtcagggaagcaatgctgaaaagttatc

SEQ ID NO: 224746 - DNA, 75 bp, synthetic construct
  source 1..75: mol_type = other DNA
aagacgcaggaaaacagcgaaacgctggccgctgacatcatcatcagccagaagcggatcggcaacctccccgcc

SEQ ID NO: 224747 - DNA, 75 bp, synthetic construct
  source 1..75: mol_type = other DNA
tgagcaaaatcaccgctgaggacggtaccgttatttctgacgtgattcgcgttggcaaaaacggcgactatgaga

SEQ ID NO: 224748 - DNA, 75 bp, synthetic construct
  source 1..75: mol_type = other DNA
atatctcgaggatattggtaggatatatataaaaaagtacaaaaacggtaacggtagtgttagtcaagtgattga

SEQ ID NO: 224749 - DNA, 75 bp, synthetic construct
  source 1..75: mol_type = other DNA
acagtatcaaaatgaaattgagcaaaggatattaaccgagaaaggaaagcatgatgcacttccgggaattttatc

SEQ ID NO: 224750 - DNA, 75 bp, synthetic construct
  source 1..75: mol_type = other DNA
gtgggtaagggcggtgattatgccagccttgatgcactggtgatggatgcgaccaacaacctgattgagccgtgg

SEQ ID NO: 224751 - DNA, 75 bp, synthetic construct
  source 1..75: mol_type = other DNA
actctatctttgtgctggaaggccttctggaacaggagaccgggctgaatccaaccgaaattatgaccgatacgg

SEQ ID NO: 224752 - DNA, 75 bp, synthetic construct
  source 1..75: mol_type = other DNA
actttggttcagggcgcggcattacctggtacaactttgtctctgaccaatattcgggttttcatggcatagtga

SEQ ID NO: 224753 - DNA, 75 bp, synthetic construct
  source 1..75: mol_type = other DNA
cgccgtagacatctgcaatgaaggtaaacatccttcgctgaccatcagcagcctggataaattggatgagccacc

SEQ ID NO: 224754 - DNA, 75 bp, synthetic construct
  source 1..75: mol_type = other DNA
tcagttgggtgcgctgggtctggtgacaaacgcagtggtgctgtggaatacgctttatatgcaggaagccttgtc

SEQ ID NO: 224755 - DNA, 75 bp, synthetic construct
  source 1..75: mol_type = other DNA
tggtgaaatccgtgagcgtgcgacccgccgcttatggcgaaaattggccgcgctgccaaaccgttggcaggccgc

SEQ ID NO: 224756 - DNA, 75 bp, synthetic construct
  source 1..75: mol_type = other DNA
cgggcaaatcgccgcctgtggcgaaagctggcatcgctacctgacagctggcagaccgcacaactggcagggtta

SEQ ID NO: 224757 - DNA, 75 bp, synthetic construct
  source 1..75: mol_type = other DNA
tgaaaatgccagaggtgaaagaccgtgatttaagtgcgctggaagacgctgcggaagatcaaccgcgtgttgtaa

SEQ ID NO: 224758 - DNA, 75 bp, synthetic construct
  source 1..75: mol_type = other DNA
cacctcagaccattccgttccttggttggttatccgataaaattggtcgccggatcccgtatattattatgaata

SEQ ID NO: 224759 - DNA, 75 bp, synthetic construct
  source 1..75: mol_type = other DNA
acaacaaccaacgcaataccccgccgggaggcccgccctcccgcactgtcatcgaattcccgttaactcttcatc

SEQ ID NO: 224760 - DNA, 75 bp, synthetic construct
  source 1..75: mol_type = other DNA
ggcgctggacgaggccgttgacgtgctggatatgctgatcctcaatattaccagggaggcgaagaaaaccgggca

SEQ ID NO: 224761 - DNA, 75 bp, synthetic construct
  source 1..75: mol_type = other DNA
gtccagttttatgtcgcaaggcaacttaacatccgctatccagagatcatctcccgctatgctcaaagggaaaat

SEQ ID NO: 224762 - DNA, 75 bp, synthetic construct
  source 1..75: mol_type = other DNA
agtggctcaaaaaagcgaattctcgacgatgcaccagagcaaatcatttccggcccctggaaacgtctggtctac

SEQ ID NO: 224763 - DNA, 75 bp, synthetic construct
  source 1..75: mol_type = other DNA
acaacgttgctcaggcactggggcgcccgctgcgacttgaaccgcaagcagcagatgcgccgcttaacaattatg

SEQ ID NO: 224764 - DNA, 75 bp, synthetic construct
  source 1..75: mol_type = other DNA
gcatataagcctgtgtgcggtgatgctggctgaggcctgcaatatcggacatgagccgctgatcaagcacaatat

SEQ ID NO: 224765 - DNA, 75 bp, synthetic construct
  source 1..75: mol_type = other DNA
aagtcctttcccgctacgcagaacgggataccaccctcagagagcatactgcgctgattaaggaatattacggtt

SEQ ID NO: 224766 - DNA, 75 bp, synthetic construct
  source 1..75: mol_type = other DNA
tgaaaaagggacctgtcaccgtcagcggtccggcatttaccgaagcgctggagcggtatatccggctgcgaaacc

SEQ ID NO: 224767 - DNA, 75 bp, synthetic construct
  source 1..75: mol_type = other DNA
tgtgcctgctggaacgtcttcaggatgcaatgcgtcgtcgtgatatctggctggaaaacagcgaccgctggggcg

SEQ ID NO: 224768 - DNA, 75 bp, synthetic construct
  source 1..75: mol_type = other DNA
ggagttttcctgtctgaatttcactgggctgcccgccatacagctccgcaatctggcacgctatgccggaatggc

SEQ ID NO: 224769 - DNA, 75 bp, synthetic construct
  source 1..75: mol_type = other DNA
gagcagaaacgctggttagcgccaatgcgcggctggttgattttcagtcctcgttagcgttggcaggatactggg

SEQ ID NO: 224770 - DNA, 75 bp, synthetic construct
  source 1..75: mol_type = other DNA
atttgacggaactgttgcttgaaatagatgccagaacgggatttacacgtgagtttacgcatgtcagtgaatccg

SEQ ID NO: 224771 - DNA, 75 bp, synthetic construct
  source 1..75: mol_type = other DNA
agtggccccagttcaacagcggacattgagcttatcaaagtcgttggggttcatggcccggtgaaagcggtatac

SEQ ID NO: 224772 - DNA, 75 bp, synthetic construct
  source 1..75: mol_type = other DNA
ctggtcattccggaaggtcagcgtgtatcagcactggaacagttgaaaaaaggccctgttacagtcagtggacct

SEQ ID NO: 224773 - DNA, 75 bp, synthetic construct
  source 1..75: mol_type = other DNA
cgtatatgatggtttattacgtgggaacgtttttaggccagttactggtcagcaaagtctcaaccgagctgatga

SEQ ID NO: 224774 - DNA, 75 bp, synthetic construct
  source 1..75: mol_type = other DNA
tatacgttcacgctaccggaggatattttgaagggggaactgagagaattaaattttaatttaaacaatgaatta

SEQ ID NO: 224775 - DNA, 75 bp, synthetic construct
  source 1..75: mol_type = other DNA
ctggtgaaagcggaagagagccgtctgcgtagtattaacgttgatgactttgaaccggaagagctggcgacgaag

SEQ ID NO: 224776 - DNA, 75 bp, synthetic construct
  source 1..75: mol_type = other DNA
tcagaacggcggcggcacatccatcaacggcacttatatagcgatgaaagcgactcgcgaatttgggccgtttgg

SEQ ID NO: 224777 - DNA, 75 bp, synthetic construct
  source 1..75: mol_type = other DNA
cggaatgctttgagtacctttttagttccctttaccggaaagcatttgtcaaaaccctgcgccttaacgaatgca

SEQ ID NO: 224778 - DNA, 75 bp, synthetic construct
  source 1..75: mol_type = other DNA
cgcctctctttcgaaacatctatgcaccgcctgggtgccagcgtggtgggcttctccgacagcgccaatacatca

SEQ ID NO: 224779 - DNA, 75 bp, synthetic construct
  source 1..75: mol_type = other DNA
acctgatgaaactgccggctcgtgaacgcttcgccgccgtcctgctgttcagccacgacgccaacgaagtcgaca

SEQ ID NO: 224780 - DNA, 75 bp, synthetic construct
  source 1..75: mol_type = other DNA
cggatgctgttaagaaagcgctatcccctctcggattcagcgccgatattttcatgggcctgtacgacaatccgg

SEQ ID NO: 224781 - DNA, 75 bp, synthetic construct
  source 1..75: mol_type = other DNA
tggtgaaaaaatagaatgggatctgattcaagacggtgttggcgggtacctatgtgaaatgcaccacaccatgaa

SEQ ID NO: 224782 - DNA, 75 bp, synthetic construct
  source 1..75: mol_type = other DNA
atatggacgagcgcttgttgcgatagcagcaaaaaatgcacgtatgtgctgggcaatgttgcacctgagagatga

SEQ ID NO: 224783 - DNA, 75 bp, synthetic construct
  source 1..75: mol_type = other DNA
gcaggcgactattttaccgggccgtatatcagcacactgaccaaaggtgaagctattattgatatcatgaacact

SEQ ID NO: 224784 - DNA, 75 bp, synthetic construct
  source 1..75: mol_type = other DNA
acgcatcctgcgtagtcaccacaccggagaagaattgtggaaaacacgtattatcccttcccgtgaagagacgct

SEQ ID NO: 224785 - DNA, 75 bp, synthetic construct
  source 1..75: mol_type = other DNA
ccctgcagttaaaagaaaggcgaggatatggacgagcgcttgttgcgatagcagcaaaaaatgcacgtatgtgct

SEQ ID NO: 224786 - DNA, 75 bp, synthetic construct
  source 1..75: mol_type = other DNA
cagtgagagaacagcattgattaatcgcatccggggattgctcagtgagttaggtattgttctcccgcaggcgtt

SEQ ID NO: 224787 - DNA, 75 bp, synthetic construct
  source 1..75: mol_type = other DNA
cgcgcacaatatattttgatgcgtgcgactgaagtgctgggaatggaaggcattggttggggagttgaaatcaag

SEQ ID NO: 224788 - DNA, 75 bp, synthetic construct
  source 1..75: mol_type = other DNA
ggcattgtttttaaacactatcctttaatgaaagtaatatccgcccagcaggcgataagtgctctcaaatatatg

SEQ ID NO: 224789 - DNA, 75 bp, synthetic construct
  source 1..75: mol_type = other DNA
gcgaggcttgtggtaataccatgattgttcatgcggtatctggaagtttgcatggctattatgtttgtccgatga

SEQ ID NO: 224790 - DNA, 75 bp, synthetic construct
  source 1..75: mol_type = other DNA
tactgatacatcaataagcagcttattgttagccactttaatgtcaggaagcttaagctctgttagtgttttggc

SEQ ID NO: 224791 - DNA, 75 bp, synthetic construct
  source 1..75: mol_type = other DNA
aaaaattaatgactggagaacggagctacaactgggcaccatcagcgatgaagacagagcagcacttacccaatg

SEQ ID NO: 224792 - DNA, 75 bp, synthetic construct
  source 1..75: mol_type = other DNA
tgccttttatcgatcagcaaaggatttgtgcctcaatgcgagcatcaacagtcgagggcaaaaatgtttctccgt

SEQ ID NO: 224793 - DNA, 75 bp, synthetic construct
  source 1..75: mol_type = other DNA
tataatatcattaatgaattgctttttaattgtagcaaaatccaaccagttgaaaacaagaaagatgctaatgaa

SEQ ID NO: 224794 - DNA, 75 bp, synthetic construct
  source 1..75: mol_type = other DNA
ttgccgccgccctgctctccgggtgcgccactcagaacgacgcggtagcactctcaaatcgaatcagcgatcagc

SEQ ID NO: 224795 - DNA, 75 bp, synthetic construct
  source 1..75: mol_type = other DNA
gattttcatcaccaggtcagatgtctggtgactcattaaaccgacagagaagacttattgctgaatggttaaagg

SEQ ID NO: 224796 - DNA, 75 bp, synthetic construct
  source 1..75: mol_type = other DNA
catggctattatgtttgtccgatgagaagattacatcgatgtgacagaccatcaataaaaagagatttggttgat

SEQ ID NO: 224797 - DNA, 75 bp, synthetic construct
  source 1..75: mol_type = other DNA
cggctggtatagcggcttaccggcgcaggataaatatgatacgtacatgcgtatccgtgtgggtgagcagcggct

SEQ ID NO: 224798 - DNA, 75 bp, synthetic construct
  source 1..75: mol_type = other DNA
acagtgtaatattgcctttggtgatttttgatttgatagaccgaaagccgattatggttatcggcttcggtgaag

SEQ ID NO: 224799 - DNA, 75 bp, synthetic construct
  source 1..75: mol_type = other DNA
acagtgtaatacttccattggtaatctttgatttaacacaacgcaagccaatgatgattatcagcttcgataaga

SEQ ID NO: 224800 - DNA, 75 bp, synthetic construct
  source 1..75: mol_type = other DNA
atctggcgctggttattgcggcctgtgtgacgttcaccggggcgctgtgttacttctttattgtcaaagatcgga

SEQ ID NO: 224801 - DNA, 75 bp, synthetic construct
  source 1..75: mol_type = other DNA
ataaacatgctggatgaacaatatcagcgaattactgaacttgatgaacatcttgaccacattgagaagcagttg

SEQ ID NO: 224802 - DNA, 75 bp, synthetic construct
  source 1..75: mol_type = other DNA
gcggcggtcgccaccatgggaaaggcctcagcatttaaatccggacgtgagtttgccgcctatgtcggtctggtg

SEQ ID NO: 224803 - DNA, 75 bp, synthetic construct
  source 1..75: mol_type = other DNA
tttagtcatcaaaacaaacgtactgtggcgctggatatcaaacaaactggcgtaatacaggggctgccgttgttg

SEQ ID NO: 224804 - DNA, 75 bp, synthetic construct
  source 1..75: mol_type = other DNA
tcggtcattcccagcgggtagggtatgatgtggcgaccagtatgatcagtcagttgcaacgcattggcgaaattc

SEQ ID NO: 224805 - DNA, 75 bp, synthetic construct
  source 1..75: mol_type = other DNA
agcggcaataatctggtgaaggcgattcgctctggaacgcctaaagatgcacaaacgctacggctggtggtcgat

SEQ ID NO: 224806 - DNA, 75 bp, synthetic construct
  source 1..75: mol_type = other DNA
cggtgttggggcgttaattgccacggcagcagttgcaacgatgggagaggcgtcagcgtttaaatcagggagagc

SEQ ID NO: 224807 - DNA, 75 bp, synthetic construct
  source 1..75: mol_type = other DNA
tgcccgagctatctggatggcggtacagcaacccggtaaggaaatcgctgttaagacagaagaacagcagtcgat

SEQ ID NO: 224808 - DNA, 75 bp, synthetic construct
  source 1..75: mol_type = other DNA
aggttcgcatgctgggcataagcaaacgcggggatacctacctccggacattatttattcatggggcaaggtcgg

SEQ ID NO: 224809 - DNA, 75 bp, synthetic construct
  source 1..75: mol_type = other DNA
taaaaaagatgcgccggtcattgtctacgtgttcgccgatccgttctgcccatattgtaaacagttctggcagca

SEQ ID NO: 224810 - DNA, 75 bp, synthetic construct
  source 1..75: mol_type = other DNA
ctctgcttcctgcaatcgccttcgcagaggaacttcctgccccagtaaaagcgattgaaaaacagggtattacaa

SEQ ID NO: 224811 - DNA, 75 bp, synthetic construct
  source 1..75: mol_type = other DNA
gctatctattacatgagtaaggaaaataccctgcaacaagccgtcggattacccgatcagaaaacgcttaatatc

SEQ ID NO: 224812 - DNA, 75 bp, synthetic construct
  source 1..75: mol_type = other DNA
ctaacactggcgataaaattgttatcgccattgatgccgggcacggcggccaggaccccggcgctattggccctg

SEQ ID NO: 224813 - DNA, 75 bp, synthetic construct
  source 1..75: mol_type = other DNA
ctaatggtgctgcaatttctttattagtaacggagttgtttgttacggctcaaatgtacttatttttacggacta

SEQ ID NO: 224814 - DNA, 75 bp, synthetic construct
  source 1..75: mol_type = other DNA
ttttcatgtttttatttccacatctgctattagtttatattctacgggaatagttattatcctgggatttatatc

SEQ ID NO: 224815 - DNA, 75 bp, synthetic construct
  source 1..75: mol_type = other DNA
gatcttactttttctggagataatgtaaatcgattgttttgcagcgtgattcgtaagattattaataagcatgga

SEQ ID NO: 224816 - DNA, 75 bp, synthetic construct
  source 1..75: mol_type = other DNA
gcatattttcatttcaacagctgctattagcttatatacaacaacaactgttgttgttcttgggtttatatgtgg

SEQ ID NO: 224817 - DNA, 75 bp, synthetic construct
  source 1..75: mol_type = other DNA
atgcaatatttggtgctgataacggattacggattcaactggactgcaacccaacaaattgcaaaacatcgtgat

SEQ ID NO: 224818 - DNA, 75 bp, synthetic construct
  source 1..75: mol_type = other DNA
tatctgttttgcgaataatggcatttttaccatttattattgtgttaagtaatatatttggtgttcaaacaatgt

SEQ ID NO: 224819 - DNA, 75 bp, synthetic construct
  source 1..75: mol_type = other DNA
tttgatgagtttcgtaaaaatctgacaattcttgccgggttctatgatgtggtcacaaccataagaggcgaggtg

SEQ ID NO: 224820 - DNA, 75 bp, synthetic construct
  source 1..75: mol_type = other DNA
tggtggcgtcgcattcgggcttaaactggcgtttggcgatcatgttcactgcttttttgccgaaccaacgcactc

SEQ ID NO: 224821 - DNA, 75 bp, synthetic construct
  source 1..75: mol_type = other DNA
gtggtcaccatgggggaagcatctgcatttaaatcagggcgagagttcgcggcttatgttggtctggtgcccaga

SEQ ID NO: 224822 - DNA, 75 bp, synthetic construct
  source 1..75: mol_type = other DNA
tgaatcaactttgtgagaagtttcgtgtgaaaatgacagtttatgtcgatgatcttactttttctggagataatg

SEQ ID NO: 224823 - DNA, 75 bp, synthetic construct
  source 1..75: mol_type = other DNA
gaacagcaaagaaattatttggtcgtttatattcaatgggggttattgaaaaacgttacagatcgaaagtattga

SEQ ID NO: 224824 - DNA, 75 bp, synthetic construct
  source 1..75: mol_type = other DNA
tcactttttcaggtggtaacgtaaatcgattgttttgcgctgtaattcgtaagatcgttaataagcatggacatg

SEQ ID NO: 224825 - DNA, 75 bp, synthetic construct
  source 1..75: mol_type = other DNA
ggatttaacctcgccaaagccacggctcacgccaaattactcaacgcaacgtcaaacatcggcggtttactgctg

SEQ ID NO: 224826 - DNA, 75 bp, synthetic construct
  source 1..75: mol_type = other DNA
tgttatcgtctcggcggtgatgagtgtcaaattactttacgacagccacggacaggagagcctccactggttggg

SEQ ID NO: 224827 - DNA, 75 bp, synthetic construct
  source 1..75: mol_type = other DNA
cggctcaatgagcggcgctttactggtgcagtacgttaaagccgatgtgttacggcagattttgccgctcctggt

SEQ ID NO: 224828 - DNA, 75 bp, synthetic construct
  source 1..75: mol_type = other DNA
aaagtgctgactggtgcattcaaaggcgcgattctgagtatagacggtccgccgataccggatgcccgtgccacc

SEQ ID NO: 224829 - DNA, 75 bp, synthetic construct
  source 1..75: mol_type = other DNA
actatatatacttttatttatatagtctttttcaaacaatcgattagagaaaattttccttcaacattatctact

SEQ ID NO: 224830 - DNA, 75 bp, synthetic construct
  source 1..75: mol_type = other DNA
tttgccgtcaaacatccaaggaagggaacaggtaaaaaaatggttaaaggataacttctctgaacttaagtcccg

SEQ ID NO: 224831 - DNA, 75 bp, synthetic construct
  source 1..75: mol_type = other DNA
atgaaatagaagatatcgaagaagagttatgctcaatggtgaactatgatgtttgtttcaattttgaagaagatt

SEQ ID NO: 224832 - DNA, 75 bp, synthetic construct
  source 1..75: mol_type = other DNA
gccctaggtatttaagtaatgacatcaagaagatgttattggatgatccaaaatcaatcactttaacggtcgaaa

SEQ ID NO: 224833 - DNA, 75 bp, synthetic construct
  source 1..75: mol_type = other DNA
ttacaggcttctttgtaaagcaatcgggaaagtgtcgaaaactttcattgatcagatgattctccaggaagaatt

SEQ ID NO: 224834 - DNA, 75 bp, synthetic construct
  source 1..75: mol_type = other DNA
tgcgttggtttttacgacggattctttggcccggcagccggatcgttttacgcactggccttcgttacgctgtgc

SEQ ID NO: 224835 - DNA, 75 bp, synthetic construct
  source 1..75: mol_type = other DNA
gtgcaatacgttcaggctgatgtcttacggcagattttgcccattctggtgatttgtatcggcctctatttcttg

SEQ ID NO: 224836 - DNA, 75 bp, synthetic construct
  source 1..75: mol_type = other DNA
agcagggtaccgtcctggtgaagacattgtcatttgtatggacccggcatccagcgagttctatcgtgatgggaa

SEQ ID NO: 224837 - DNA, 75 bp, synthetic construct
  source 1..75: mol_type = other DNA
gaaagaaatggaagccaaataaaaagctagaaactagcgacaatcatttcattcatgctttattttacatattaa

SEQ ID NO: 224838 - DNA, 75 bp, synthetic construct
  source 1..75: mol_type = other DNA
caccgctgatgactattggaaaccagtatggtgccggatgggaaccgtccggacgtatgttactggaaaaatggt

SEQ ID NO: 224839 - DNA, 75 bp, synthetic construct
  source 1..75: mol_type = other DNA
cagcgagctgaaatctgtggtattttccaccatacagtcatttaataaatcgataccggctgaagagcaaatgcg

SEQ ID NO: 224840 - DNA, 75 bp, synthetic construct
  source 1..75: mol_type = other DNA
agtttatttcattgcgagcgatgatgtgactatttttgatattaatgggcaatggcagtggtataaaagccccga

SEQ ID NO: 224841 - DNA, 75 bp, synthetic construct
  source 1..75: mol_type = other DNA
ctgatgagaaacgggaaagcagttccttttggctctgttgttacggccagaaacggggggagcagtattgccgga

SEQ ID NO: 224842 - DNA, 75 bp, synthetic construct
  source 1..75: mol_type = other DNA
agtgcaggtgaaatggggagaagaggaaaatgctcactgtgtcgccaattatcaactgccaccagagagtcagca

SEQ ID NO: 224843 - DNA, 75 bp, synthetic construct
  source 1..75: mol_type = other DNA
tgatgttactttagattatcgaataaaagattttatcagtaccatagaatttaaagagacaacacttttttttga

SEQ ID NO: 224844 - DNA, 75 bp, synthetic construct
  source 1..75: mol_type = other DNA
atgattcatgttcgaactggacaatttgcggctgtagtcgatggcaggcggtatgtatttaatccctgtttcgcc

SEQ ID NO: 224845 - DNA, 75 bp, synthetic construct
  source 1..75: mol_type = other DNA
atgatccatgttcgtacagggcaatttgcggctgtggtgaacggtaagcgctatgagtttaatccttgctttgct

SEQ ID NO: 224846 - DNA, 75 bp, synthetic construct
  source 1..75: mol_type = other DNA
acttaacttagatattgaaaaaataaaataccagttaaaatcctctttaccccccgaagaatccagatcactaga

SEQ ID NO: 224847 - DNA, 75 bp, synthetic construct
  source 1..75: mol_type = other DNA
ctattcctgatgttgatccggaatattttcgcccgctgacggagaatgtggcgcaatataaagattcgctctatc

SEQ ID NO: 224848 - DNA, 75 bp, synthetic construct
  source 1..75: mol_type = other DNA
gattatgatgagcaaatggaggccgctaaaagggtgctggaattgatgaaaaaacgcgagcaagaaaaagcccgg

SEQ ID NO: 224849 - DNA, 75 bp, synthetic construct
  source 1..75: mol_type = other DNA
aaccctggaccatgggatactatctggcggacaaaatcgcaggtctttgtgaacggagatgccatcaacgccgat

SEQ ID NO: 224850 - DNA, 75 bp, synthetic construct
  source 1..75: mol_type = other DNA
cacagcgggttattgccatcggctttattgccatgggggtggttattctgggaagcatcaccaccaatgttattc

SEQ ID NO: 224851 - DNA, 75 bp, synthetic construct
  source 1..75: mol_type = other DNA
gcatcagcagcttctccggtatgtattacccgctgcgcagaacagcctaaaggtccagctggctgaagatgcgaa

SEQ ID NO: 224852 - DNA, 75 bp, synthetic construct
  source 1..75: mol_type = other DNA
gaagatggacagaacttggagtgttcagaatattttatagggactattgttctttctggagcagatagtgatgat

SEQ ID NO: 224853 - DNA, 75 bp, synthetic construct
  source 1..75: mol_type = other DNA
tcttcggatttacgtgttctggaaaaagcctggcatgaaggtcacgaacgcgcgcaactggcaattaaaaccttt

SEQ ID NO: 224854 - DNA, 75 bp, synthetic construct
  source 1..75: mol_type = other DNA
tgtggaagatgactccgggctggttgtggcgcatcttggcaatggcgcgtcaatctgcgcggttcgtaacggtca

SEQ ID NO: 224855 - DNA, 75 bp, synthetic construct
  source 1..75: mol_type = other DNA
caaaccaaccagagcctgggcgacctggaacgcgtggtaaataaagagtcgggattattaggtatttccggtctt

SEQ ID NO: 224856 - DNA, 75 bp, synthetic construct
  source 1..75: mol_type = other DNA
atcgtcaatcttacaaaacggcgaaactggggggccgttcatttgaaaacggaactgggtatcagtacttgccca

SEQ ID NO: 224857 - DNA, 75 bp, synthetic construct
  source 1..75: mol_type = other DNA
tgcgctgagggattattgcaaccagtaccctacgtcagtgaatatggggtattaccataactttatatctcacct

SEQ ID NO: 224858 - DNA, 75 bp, synthetic construct
  source 1..75: mol_type = other DNA
ctttaagcaaagcagggaacttccttttgagcgggcactggaaaagttaaaacaggctggtttaataaagatcat

SEQ ID NO: 224859 - DNA, 75 bp, synthetic construct
  source 1..75: mol_type = other DNA
gtagccccgcatttctggcaggtggtgcttcaggatgggcgtttgttcggtagccctatcgacattcttaaccgt

SEQ ID NO: 224860 - DNA, 75 bp, synthetic construct
  source 1..75: mol_type = other DNA
gtctgcggcgtcccttttatcgtaatatagcagtattccttcagcatgttatatgtgtcgctacctgtagccgta

SEQ ID NO: 224861 - DNA, 75 bp, synthetic construct
  source 1..75: mol_type = other DNA
agtctaaacgcgatatccctaacgttgccttcagggagctggtagtgagtgtctggaacaaacttgaaccacttg

SEQ ID NO: 224862 - DNA, 75 bp, synthetic construct
  source 1..75: mol_type = other DNA
gttggatggcattatattcaccggaggaataggggaaaattcaaatttaattcgtcgattggttatggagcattt

SEQ ID NO: 224863 - DNA, 75 bp, synthetic construct
  source 1..75: mol_type = other DNA
atggtgatcgtgatgaagttataagaaagtttaagtatgactttgatagaaattttttaaaagggggagaggatt

SEQ ID NO: 224864 - DNA, 75 bp, synthetic construct
  source 1..75: mol_type = other DNA
aaattactgagacatcttagcaataatgtgcttggtagcattgttcaagatgaaaatctgactcatgcggtaata

SEQ ID NO: 224865 - DNA, 75 bp, synthetic construct
  source 1..75: mol_type = other DNA
aagatggtgaccgtgatgaagttatccgaaaatttgcttatgattttagccgtaattttttacgtggtggagatg

SEQ ID NO: 224866 - DNA, 75 bp, synthetic construct
  source 1..75: mol_type = other DNA
ccgtcatctgtttcggtcggcctgtgccttgtgcatgtcgcctgcgacaagcgtccctggctggagggtctgaat

SEQ ID NO: 224867 - DNA, 75 bp, synthetic construct
  source 1..75: mol_type = other DNA
cggcatggtggtcacgctggaagcgccgtccgccgtctcggtcggcctatgcctcgcgcatgccgcctgcgacaa

SEQ ID NO: 224868 - DNA, 75 bp, synthetic construct
  source 1..75: mol_type = other DNA
ccgctcgtgacctacaaggtgtgggcggcgagcctcctgccgtgaccgcgccgctggagcaggtgcagatagacc

SEQ ID NO: 224869 - DNA, 75 bp, synthetic construct
  source 1..75: mol_type = other DNA
gcacctgcaaaacgccgcgcaggtgttgctcatctggcaaattgtcattgtcgatggtagcgaacagaacctgct

SEQ ID NO: 224870 - DNA, 75 bp, synthetic construct
  source 1..75: mol_type = other DNA
cggccgatgtaaatatcgatattttaagtgcgacagtgaaagataaacgcattgagggagcatcggtgacgctgc

SEQ ID NO: 224871 - DNA, 75 bp, synthetic construct
  source 1..75: mol_type = other DNA
gtgagtaaaaaggcaaagggcaacaaaaggccgcgccgctggcgtttttccataggctccgcccccctgacgagc

SEQ ID NO: 224872 - DNA, 75 bp, synthetic construct
  source 1..75: mol_type = other DNA
gcagcgatattgagcgcttttattacaatgaagatttcgtagaaaaggatggcaatgatgttgtttgcgaaattt

SEQ ID NO: 224873 - DNA, 75 bp, synthetic construct
  source 1..75: mol_type = other DNA
acgctcaggtcaggctggcgctgggttttctgcgcgaaactgaacctgaaatgcaggagattaatgcattccaga

SEQ ID NO: 224874 - DNA, 75 bp, synthetic construct
  source 1..75: mol_type = other DNA
atgatctggataatgctcgctacgatggcggtggtgtttgtgattggttttcgggtgctgacatccggagccaga

SEQ ID NO: 224875 - DNA, 75 bp, synthetic construct
  source 1..75: mol_type = other DNA
atatcgcaaaacatctgattcaggttcacttcattgatgagaacacaggtgaagtggtggataagcaacttcgca

SEQ ID NO: 224876 - DNA, 75 bp, synthetic construct
  source 1..75: mol_type = other DNA
acagaccgcgccgcataatgtgcccaccagcaacgccagggcacgggcaaacatccagaagctgaaaacaatgat

SEQ ID NO: 224877 - DNA, 75 bp, synthetic construct
  source 1..75: mol_type = other DNA
ttgccagcggccccgctcgaactgaatttatgaacggcgatatttaccgcgataaatacggcggcacggtaacga

SEQ ID NO: 224878 - DNA, 75 bp, synthetic construct
  source 1..75: mol_type = other DNA
gtcgatggcggtgctgggtggtagcctgaaacgccgtgagcgtatctcggcacgtctgggggatattttaagtca

SEQ ID NO: 224879 - DNA, 75 bp, synthetic construct
  source 1..75: mol_type = other DNA
tcgtctgctgatggatgggcgtttgcgctggcaggggcaggagtggagcatcgtcaaagcgccgtggatgattaa

SEQ ID NO: 224880 - DNA, 75 bp, synthetic construct
  source 1..75: mol_type = other DNA
tctgacagcggaaaacggcaacatttatggctggcagctgacagcatggacgaagccgaatggcgggatttacgg

SEQ ID NO: 224881 - DNA, 75 bp, synthetic construct
  source 1..75: mol_type = other DNA
tcgcctgttgatggacgggcgtttgcgttggcaagggcaggagtggagcatcgtcaaagcaccgtggatgattaa

SEQ ID NO: 224882 - DNA, 75 bp, synthetic construct
  source 1..75: mol_type = other DNA
tctacctcaagccacaatggatgcaggatgacggcattcatcccaaccgcgacgcccagccgtttattgccgact

SEQ ID NO: 224883 - DNA, 75 bp, synthetic construct
  source 1..75: mol_type = other DNA
ccagcgcggcctggcctgccttgttgaatgataagtggcagagtaaaacgtcggtagtcaatgccagcatcagcg

SEQ ID NO: 224884 - DNA, 75 bp, synthetic construct
  source 1..75: mol_type = other DNA
gataagtacggcggcatcgtgacaattatcagcgtgagagaacgccgcatcgcctaccgccgtgaaggctatgac

SEQ ID NO: 224885 - DNA, 75 bp, synthetic construct
  source 1..75: mol_type = other DNA
aacctaccgtcgtgaaggctacgaatatgattgcgtgatgcctgtttatcagttcgatcgtgatttttctctggt

SEQ ID NO: 224886 - DNA, 75 bp, synthetic construct
  source 1..75: mol_type = other DNA
aacttaccgccgtgaaggttacgaatatgattgcgtgatgcctgtttatcagttccggcgtgatttttctctggt

SEQ ID NO: 224887 - DNA, 75 bp, synthetic construct
  source 1..75: mol_type = other DNA
aacacgacagcgtgatcatcatgggcgggcaatacaacaaaagtcagtccatcactttaagtccgcagggtagcg

SEQ ID NO: 224888 - DNA, 75 bp, synthetic construct
  source 1..75: mol_type = other DNA
ttaaaggcgtggcagaacggcgcatcacctaccgccgtgaaggttacgaatatgattgcgtgatgcctgtttatc

SEQ ID NO: 224889 - DNA, 75 bp, synthetic construct
  source 1..75: mol_type = other DNA
gcgtaacgggcaactggtggcactggttaatgacgaaggctggtacgctacgcgcgaccgcggtgagctgcataa

SEQ ID NO: 224890 - DNA, 75 bp, synthetic construct
  source 1..75: mol_type = other DNA
cggaagaagtcgagcgcgttattgctgcacatcctgcggttttgcaggtgtttatcgttcccgttgccgacaagg

SEQ ID NO: 224891 - DNA, 75 bp, synthetic construct
  source 1..75: mol_type = other DNA
ctgccagcggaaaaactcgcactaaattcatgtgcggggatatttaccgcgataagtacggcggcacggtaatga

SEQ ID NO: 224892 - DNA, 75 bp, synthetic construct
  source 1..75: mol_type = other DNA
tatgattgcgtgatgcctgtttatcagttccggtgtgatttttctctggtacagaccgcgccgcataacgtgccc

SEQ ID NO: 224893 - DNA, 75 bp, synthetic construct
  source 1..75: mol_type = other DNA
gtgctcgcgtcgatgaattagcctccggatttgcggtgcagggtgtggttgagggcagcggcgtgatgttgcggg

SEQ ID NO: 224894 - DNA, 75 bp, synthetic construct
  source 1..75: mol_type = other DNA
atcgctgattccgtttggcgatcacgatgactggctgctctctttgccgctatttcatgtttccgggcagggaat

SEQ ID NO: 224895 - DNA, 75 bp, synthetic construct
  source 1..75: mol_type = other DNA
aaaaatcctcccggatttcagcaaaattagcccgttaaaagggattgggcgactgttttccagtgagcatctggc

SEQ ID NO: 224896 - DNA, 75 bp, synthetic construct
  source 1..75: mol_type = other DNA
gcgcaactttgtcatcctgtttatcttctttgcgcttctcgacgtgccgctggcgaaagccctgttcaccaaagg

SEQ ID NO: 224897 - DNA, 75 bp, synthetic construct
  source 1..75: mol_type = other DNA
aagtggtcgagttcccgcggctggcgcgctcggtttactacaccacccaggtgaatcagcaaattccgtttcagc

SEQ ID NO: 224898 - DNA, 75 bp, synthetic construct
  source 1..75: mol_type = other DNA
ggatcatcgtgaaaccgtaaatcagaaccgtgcagcaagatatatccgcaaaatccgcgaaatgatggttactgg

SEQ ID NO: 224899 - DNA, 75 bp, synthetic construct
  source 1..75: mol_type = other DNA
caggtcgctgctgaatatcaggtggaagtggtcgagtttccgcgactggcgcgctcggtttactacaccacccag

SEQ ID NO: 224900 - DNA, 75 bp, synthetic construct
  source 1..75: mol_type = other DNA
tgacctacgtcctgcaaatgaaacactggcgcgagggcgcacagccgcgcccggccctgaacagacatatttcca

SEQ ID NO: 224901 - DNA, 75 bp, synthetic construct
  source 1..75: mol_type = other DNA
ctacggcaatctctaagaaaaaggaccagggaacatcgaccttcggcactaccacagtgaatcttgtgggtaaat

SEQ ID NO: 224902 - DNA, 75 bp, synthetic construct
  source 1..75: mol_type = other DNA
ggttatcggcaacggtaacggcccaggggatcagtgcgcctgattatcagactatcctggacaaactaacggaat

SEQ ID NO: 224903 - DNA, 75 bp, synthetic construct
  source 1..75: mol_type = other DNA
attctcagtgccaacgagacgttgatggacgaactgggcgcaaatgttacccctgctatttattacatgagccca

SEQ ID NO: 224904 - DNA, 75 bp, synthetic construct
  source 1..75: mol_type = other DNA
gaactggtgcttaatgcactggtagcgattcgttatctcaaaccgcaaatgccgaaaagctggcattttgtttct

SEQ ID NO: 224905 - DNA, 75 bp, synthetic construct
  source 1..75: mol_type = other DNA
ttgctcgtaaaatgctcacaccagatgcctttaatccctccggtttttgtgttgatgatgcagcactctattttt

SEQ ID NO: 224906 - DNA, 75 bp, synthetic construct
  source 1..75: mol_type = other DNA
atttcaggcagatttacggtagtgatgcctacctcgaaccagacagcaaagacgggcagatggtcgcgctggtgg

SEQ ID NO: 224907 - DNA, 75 bp, synthetic construct
  source 1..75: mol_type = other DNA
attcgttaatcgttaacgataacttgtcgtgcaaaaaactttttgccacagacgaaattgtagcgcgtggtggta

SEQ ID NO: 224908 - DNA, 75 bp, synthetic construct
  source 1..75: mol_type = other DNA
acctggtgctgatctcgttgttaatgatacgacctataagtttggggcaacaaatccagcgactgaatgtatcgc

SEQ ID NO: 224909 - DNA, 75 bp, synthetic construct
  source 1..75: mol_type = other DNA
tcaccacggcaacgcgaaccgcaggcgatccgatgaataactgcgagtttaacggatttgttatgcctggtggct

SEQ ID NO: 224910 - DNA, 75 bp, synthetic construct
  source 1..75: mol_type = other DNA
caaaaaccgactatcggcaacatcggcttactgatgcggttatggggcgtcgtgctgctgggtaatattctcgga

SEQ ID NO: 224911 - DNA, 75 bp, synthetic construct
  source 1..75: mol_type = other DNA
catttccggctggctgatcgccactatggtatggatgtttcctgcagcgggtgcggcaaaaattgtgggtttttt

SEQ ID NO: 224912 - DNA, 75 bp, synthetic construct
  source 1..75: mol_type = other DNA
acagcgacgaaattgaagttgagagcgaagaaaaagagcgcggcaaaaaaatagaaatagatgaagatcgactcc

SEQ ID NO: 224913 - DNA, 75 bp, synthetic construct
  source 1..75: mol_type = other DNA
gcttatcggcaacggtaaccgctgaggggatcagtgcgcctgattaccagacgatactcgataccctgacgagct

SEQ ID NO: 224914 - DNA, 75 bp, synthetic construct
  source 1..75: mol_type = other DNA
ctgcggatgcctcgccagacgatgtgcaggatgtgaaagcagtttacgcaacacaggccgcatctgaactggcca

SEQ ID NO: 224915 - DNA, 75 bp, synthetic construct
  source 1..75: mol_type = other DNA
cacatcagatgtcgggcaaccggtgccggttctgcaacgtgttgattctgccacccggaccgggttggcaggaga

SEQ ID NO: 224916 - DNA, 75 bp, synthetic construct
  source 1..75: mol_type = other DNA
gacagcgccaacacgtcattgggtaaaaaaggggaaacgctggccgataccatttcggttattagtacctatgtc

SEQ ID NO: 224917 - DNA, 75 bp, synthetic construct
  source 1..75: mol_type = other DNA
gcaggcagtaccacgtcgtagcccagccagcaacgcaaaagcagaagcgaacatccgaaagatgaaaaacatgat

SEQ ID NO: 224918 - DNA, 75 bp, synthetic construct
  source 1..75: mol_type = other DNA
ttaaaagcgtggcgggacggtgtgttacttaccgccgtgaaggttatgactatgactgcgtgatgcctgtttatc

SEQ ID NO: 224919 - DNA, 75 bp, synthetic construct
  source 1..75: mol_type = other DNA
ccggtcttcctggtttgcccggtacagttcagggggtgcgctggacgctcaatcggatcacagagacgcacccag

SEQ ID NO: 224920 - DNA, 75 bp, synthetic construct
  source 1..75: mol_type = other DNA
ctgcactgaccagtaacgtgaaaataaatggtatttcacgtaaaggcgcgacgaattctacggttgatttgcttc

SEQ ID NO: 224921 - DNA, 75 bp, synthetic construct
  source 1..75: mol_type = other DNA
tggaggccagaagtggtgcagccctgaacagcatgtttggtacgctggcaagtggctggaccgtcatttccgatg

SEQ ID NO: 224922 - DNA, 75 bp, synthetic construct
  source 1..75: mol_type = other DNA
cctggtttatcaggagcagcgggaacggggcggacgtaacattgtgcgccgtgaatacccactgcgtgaaagcgg

SEQ ID NO: 224923 - DNA, 75 bp, synthetic construct
  source 1..75: mol_type = other DNA
ggggatggtaatgatggcgttgatgatctggttgaggcttatttccgcagacacccggagaaaacaccaccatgg

SEQ ID NO: 224924 - DNA, 75 bp, synthetic construct
  source 1..75: mol_type = other DNA
cgcgaccggttcagcgaatacaccgtcaaggggtatgcccgcgcaaatggtgctgagggtgatgatattgatgcg

SEQ ID NO: 224925 - DNA, 75 bp, synthetic construct
  source 1..75: mol_type = other DNA
ctcacggtacaacatccgttacggttccggataaatacggcaatccccatgtaatcaaattctcgcgttccagtg

SEQ ID NO: 224926 - DNA, 75 bp, synthetic construct
  source 1..75: mol_type = other DNA
ctactcacgttatcgtccggaaaagagtgtctggaacctgtatttattggcacagttgccgcgtgtgtcacgaac

SEQ ID NO: 224927 - DNA, 75 bp, synthetic construct
  source 1..75: mol_type = other DNA
aaaactcgaacactactggagccaggatatatttagcgatcgagaagccagctacatgtcgcatgaaaaccactt

SEQ ID NO: 224928 - DNA, 75 bp, synthetic construct
  source 1..75: mol_type = other DNA
atttcgctgatcctcccggaaaaaccagaaatagccaatgagttggtaggccttgaatgcccgcgaactcatttt

SEQ ID NO: 224929 - DNA, 75 bp, synthetic construct
  source 1..75: mol_type = other DNA
cgggctgggggcgatgatcgccattgagctgtttgaagacggcgatcacaacaagccggacgccaaactcaccgc

SEQ ID NO: 224930 - DNA, 75 bp, synthetic construct
  source 1..75: mol_type = other DNA
gccgccatcgtgattgagccggttcagggcgaaggcggtttctacgccgcgacgccagcctttatgcagcgttta

SEQ ID NO: 224931 - DNA, 75 bp, synthetic construct
  source 1..75: mol_type = other DNA
ccggagatcggcgacgtacgcgggctgggagcgatgattgccatcgagctgtttgaagatggcgatcacagcaaa

SEQ ID NO: 224932 - DNA, 75 bp, synthetic construct
  source 1..75: mol_type = other DNA
gccatcacacattctgaagggcatatcaacattaccgtgacagcaggtgtcagtcgcgcatttcctgaagagcct

SEQ ID NO: 224933 - DNA, 75 bp, synthetic construct
  source 1..75: mol_type = other DNA
aaccgtcgtgttgttgttgctaacaaaaatggtttaggttattccgatatctctgatgtaactcgtgaccgtgct

SEQ ID NO: 224934 - DNA, 75 bp, synthetic construct
  source 1..75: mol_type = other DNA
tgatcttgaagttgctggtcaaatgagatggggtaagaataccggacaatctagcttcaatattcgtgcatgggg

SEQ ID NO: 224935 - DNA, 75 bp, synthetic construct
  source 1..75: mol_type = other DNA
cgccactgagtctgcccgttatttcagcacggaatctcttgcggaacgcatggaacaaaaaagtggacgagttgt

SEQ ID NO: 224936 - DNA, 75 bp, synthetic construct
  source 1..75: mol_type = other DNA
tatcggcaccgccaaaaccggttattgatagcaccgataacagcagtctgcctgaaatgctcgtttcaccaccgt

SEQ ID NO: 224937 - DNA, 75 bp, synthetic construct
  source 1..75: mol_type = other DNA
ccttgaatgttcgcaaactcattttcactcaaaagagtggttaaaagttgttgctgatgatcctaaagcggtgaa

SEQ ID NO: 224938 - DNA, 75 bp, synthetic construct
  source 1..75: mol_type = other DNA
gtggaagcgcagttgaaaaaactgtcgcacacctgcttccaggtgctggcttacgagccgtatctggagctgtgc

SEQ ID NO: 224939 - DNA, 75 bp, synthetic construct
  source 1..75: mol_type = other DNA
gacaggattttctgacgttcttcggcaaccgtgagccatgcctgattggtatggaggcctgtggaggttctcagc

SEQ ID NO: 224940 - DNA, 75 bp, synthetic construct
  source 1..75: mol_type = other DNA
gaaacgggtaagagaaaatgagcgaaataagatacgtgaaaaacaacttcaggcattaaatgatgctcattcagt

SEQ ID NO: 224941 - DNA, 75 bp, synthetic construct
  source 1..75: mol_type = other DNA
gaaacgggtaagagaaaacgagcgcaataagatacgtgaaaaacaacttaaagcattaaatgatgctcattcagc

SEQ ID NO: 224942 - DNA, 75 bp, synthetic construct
  source 1..75: mol_type = other DNA
cgtcgtccagccagcgtggcgatcgtcgccatggcaaacaagctggcgcgaacggtgtgggcaatagccgctcac

SEQ ID NO: 224943 - DNA, 75 bp, synthetic construct
  source 1..75: mol_type = other DNA
atggaggcctgtagaggctctcagcactgggggcgtgaactgacaaagctggggcataaagtccggttgttacag

SEQ ID NO: 224944 - DNA, 75 bp, synthetic construct
  source 1..75: mol_type = other DNA
gttcgccgcatatgttggtctggttccaaaacaaactggctccggagggaaagtacgtctgctggggataagcaa

SEQ ID NO: 224945 - DNA, 75 bp, synthetic construct
  source 1..75: mol_type = other DNA
gcggtgctcaataccgggcacctgcatccgaaagtggttgcggcggtggaagcgcagttgaaaaaactgtcgcac

SEQ ID NO: 224946 - DNA, 75 bp, synthetic construct
  source 1..75: mol_type = other DNA
tttgccaagaaaacgctgctggtcaccacaggttccgaagcggtggaaaacgcggtgaaaatcgcccgcgccgcc

SEQ ID NO: 224947 - DNA, 75 bp, synthetic construct
  source 1..75: mol_type = other DNA
gtaccgctcacaattgaagatgctcagattcgtcagggtctggagatcatcggccagtgttttgctgaggcgaag

SEQ ID NO: 224948 - DNA, 75 bp, synthetic construct
  source 1..75: mol_type = other DNA
ttctggcttttatatttgttggcgttatggctatgttgatatgtggtcttttttacaatgattaccttgagcaac

SEQ ID NO: 224949 - DNA, 75 bp, synthetic construct
  source 1..75: mol_type = other DNA
tggaagaggcgcgacggctaagagaaaatgaacgcaataaaatacgcgaaaaacaacttcaggcattaaatgatg

SEQ ID NO: 224950 - DNA, 75 bp, synthetic construct
  source 1..75: mol_type = other DNA
tggcacctgatctcaccacctttgcgaaatcgatcgcaggcggtttcccgctggcaggcgtcaccgggcgtgcgg

SEQ ID NO: 224951 - DNA, 75 bp, synthetic construct
  source 1..75: mol_type = other DNA
cggtctttgttgtcgtcgggaagcgttgttccggggagtgtgtccgacatgataaaatcctcacagaaaatcggt

SEQ ID NO: 224952 - DNA, 75 bp, synthetic construct
  source 1..75: mol_type = other DNA
aaccggctctcggggccctttctcgaccgcttcgatctctcactggagatcccattaccaccccccggcattttg

SEQ ID NO: 224953 - DNA, 75 bp, synthetic construct
  source 1..75: mol_type = other DNA
cggttgtcctgctcggcgcgttgttttatcaccgcgtgagcttatttatcagcagtctgattttgctcgcctgga

SEQ ID NO: 224954 - DNA, 75 bp, synthetic construct
  source 1..75: mol_type = other DNA
atggcgaaaacgaagggtgatctcgttctaaaggctttacgaaaagccgggctgtattccaatgccacgttgaca

SEQ ID NO: 224955 - DNA, 75 bp, synthetic construct
  source 1..75: mol_type = other DNA
tggtggatatccgggtaccggaccatctgatagttggtggcaaccaggttttctcctttgcggaacacggtctgc

SEQ ID NO: 224956 - DNA, 75 bp, synthetic construct
  source 1..75: mol_type = other DNA
gagttccagttgtttcatcagcagtggaaaggcctggtccagatggtatgcatccgcatcgctgaaccggcctct

SEQ ID NO: 224957 - DNA, 75 bp, synthetic construct
  source 1..75: mol_type = other DNA
accagcagggagaaagcacgcgccaatattcaggaaataaaaaagatgcttaacgtattcaggggcaagaaatga

SEQ ID NO: 224958 - DNA, 75 bp, synthetic construct
  source 1..75: mol_type = other DNA
atgttcagaccttttttagactctctaatgctcggcagtatgttttttccttttattgccatcgcaggaagcacc

SEQ ID NO: 224959 - DNA, 75 bp, synthetic construct
  source 1..75: mol_type = other DNA
ctgccagtggtctccctcggcctgaaatccgccccggcgatattttccgggataactacggcggcacggtaacga

SEQ ID NO: 224960 - DNA, 75 bp, synthetic construct
  source 1..75: mol_type = other DNA
agttccggcgtgatttttctctggtacagaccgcgccgcataacgtgcccaccagcaacgccagggcacgggcaa

SEQ ID NO: 224961 - DNA, 75 bp, synthetic construct
  source 1..75: mol_type = other DNA
aacctaccgccgtgaaggctacgaatatgattgcgtgatgcctgtttatcagttccggcgtgatttttctctggt

SEQ ID NO: 224962 - DNA, 75 bp, synthetic construct
  source 1..75: mol_type = other DNA
attcatgcgcggtgatatttaccgcgaccagtacggcggcacggtaatgattaagggcgtggaggaacggcgcgt

SEQ ID NO: 224963 - DNA, 75 bp, synthetic construct
  source 1..75: mol_type = other DNA
ttagcctgctgatcgacatggaagaattccaccatgaaaatcccttccatagcgtgcgtaagctgaaactggaaa

SEQ ID NO: 224964 - DNA, 75 bp, synthetic construct
  source 1..75: mol_type = other DNA
tgatggtattgaaggtagcaatgatgctctttacatcaagaagaataccaatactaagcatggtgggtatctgtt

SEQ ID NO: 224965 - DNA, 75 bp, synthetic construct
  source 1..75: mol_type = other DNA
tttgaagattaacaaggaagaattacaggacggcgcattagagaaagtaaactccctgaaagtctacacctacga

SEQ ID NO: 224966 - DNA, 75 bp, synthetic construct
  source 1..75: mol_type = other DNA
ccaaagccgaagttgataagatgtttgttaaaaacgtcgttatgtctgttcccaattctagcgaaaacgtatctg

SEQ ID NO: 224967 - DNA, 75 bp, synthetic construct
  source 1..75: mol_type = other DNA
ggtaatgttactttgggtggtgatggtaacgaaggtgcattagtcttagaacgtgcaagtcgtgcagctcgtttt

SEQ ID NO: 224968 - DNA, 75 bp, synthetic construct
  source 1..75: mol_type = other DNA
tgaataacgattcaggtactggtaaaaaatatcttcgtaaattccgtagtaaagccgcagaaacaatctggcatg

SEQ ID NO: 224969 - DNA, 75 bp, synthetic construct
  source 1..75: mol_type = other DNA
gcggttaatacttccggtgataactacgacatttacgttaactacggtcgttatactgataacgttattgtcgaa

SEQ ID NO: 224970 - DNA, 75 bp, synthetic construct
  source 1..75: mol_type = other DNA
gccagtgccgatgccgcaattgccgcagctaatcagcgaattgattctattgaaggtagtgccgatgctgcttac

SEQ ID NO: 224971 - DNA, 75 bp, synthetic construct
  source 1..75: mol_type = other DNA
acaagacagatattaatgcgcgagttgatcagacgaataccaacgttaccaacttaacgaatactgtcgaagcaa

SEQ ID NO: 224972 - DNA, 75 bp, synthetic construct
  source 1..75: mol_type = other DNA
taacgtagtccaaattagtgtttctccagaaaaacacgctgaactgaatacgaaagtagacaccaacaaggtcaa

SEQ ID NO: 224973 - DNA, 75 bp, synthetic construct
  source 1..75: mol_type = other DNA
gatgttcatcaagaacgttagaatgaccgttccttctggtgatgctactcgtggatacttcaagatcgcaaccgc

SEQ ID NO: 224974 - DNA, 75 bp, synthetic construct
  source 1..75: mol_type = other DNA
ctgaacgtactttagcaactggtgcaattaaaactaaattcttcggtgatttggaatctgctggtcaaattaaat

SEQ ID NO: 224975 - DNA, 75 bp, synthetic construct
  source 1..75: mol_type = other DNA
aatacatccggtgataactatgacatttatgtgaaatatcagcgttacactgataacgttattgttgaatttggt

SEQ ID NO: 224976 - DNA, 75 bp, synthetic construct
  source 1..75: mol_type = other DNA
acccgcaaaagggccaggcgatggtcgaaatcggccccggtctggcggcattgaccgaaccggtcggcgaacgtc

SEQ ID NO: 224977 - DNA, 75 bp, synthetic construct
  source 1..75: mol_type = other DNA
ggcaaaaaaacgtgggcagacttcgccagcggcgacagtggtgatctgcttgatttgtgggtgttggtacgcaac

SEQ ID NO: 224978 - DNA, 75 bp, synthetic construct
  source 1..75: mol_type = other DNA
ctggataaggatgagcaggcagcgctccagatgccagcttcaatgattcgcctgctcaaacaacgcgaaggtgag

SEQ ID NO: 224979 - DNA, 75 bp, synthetic construct
  source 1..75: mol_type = other DNA
aacgaagacgcataattattgaacttgcagaggccgatgttggtcaacatatcagtcgcttacaacctgttattc

SEQ ID NO: 224980 - DNA, 75 bp, synthetic construct
  source 1..75: mol_type = other DNA
tgaggagttccgctggatccagtatcgggcacagtacgctaaaggcgaggccagagcacaaataacattttctga

SEQ ID NO: 224981 - DNA, 75 bp, synthetic construct
  source 1..75: mol_type = other DNA
tgattttcgctcaatgcttgatatagagcataaatatcaaacatataagtctctgaaccagcaattattaagacc

SEQ ID NO: 224982 - DNA, 75 bp, synthetic construct
  source 1..75: mol_type = other DNA
acgacgatgtcggccgtgaagctgcaaaggaaattgccagacgacttggcgagcatcgctgccgcatggttgaac

SEQ ID NO: 224983 - DNA, 75 bp, synthetic construct
  source 1..75: mol_type = other DNA
aaaccgtcgtcgccgggccgttatgtgaatcgggcgatgtctttacccagcaggaagggggaaatgttgaaaccc

SEQ ID NO: 224984 - DNA, 75 bp, synthetic construct
  source 1..75: mol_type = other DNA
gcatcccgatgacattgtttttactgcggatgttatcgatcaggcgaccctcgagcgcgtcagtgaattgcaaat

SEQ ID NO: 224985 - DNA, 75 bp, synthetic construct
  source 1..75: mol_type = other DNA
caggaagggggaaatgttgaaacccgcgccttgccggaagtgaaggcaggtgattatctggtactgcatgataca

SEQ ID NO: 224986 - DNA, 75 bp, synthetic construct
  source 1..75: mol_type = other DNA
gttcatcatcgtgaactcatgtgccgcatcttcgatggtaatgaagaggttagctcggcagagtatatgccgatg

SEQ ID NO: 224987 - DNA, 75 bp, synthetic construct
  source 1..75: mol_type = other DNA
ttcatattttgcgcttaatgcgtgagcagggcgtgaaagtggattccgtctcgttaggcgaaatagagcgtgcac

SEQ ID NO: 224988 - DNA, 75 bp, synthetic construct
  source 1..75: mol_type = other DNA
gcaaggcgtgaaagtagattccgtctcgttgggcgaaatcgagcgcgcgctggcggcgggttacaatccacaaac

SEQ ID NO: 224989 - DNA, 75 bp, synthetic construct
  source 1..75: mol_type = other DNA
cgctcgcaaacagttattcgtcagggacgcgacattcttcacgcctgggatgccacctggaactcggctcaggcg

SEQ ID NO: 224990 - DNA, 75 bp, synthetic construct
  source 1..75: mol_type = other DNA
ggtgcagcagcaactgttacaggttaacgacaccgctcagggcgcagcaacggtgtggatggcctcacctgaact

SEQ ID NO: 224991 - DNA, 75 bp, synthetic construct
  source 1..75: mol_type = other DNA
agtgccttaagtcgctggctactgctaaaaaataacgcgataccagaggcggcaaccgaacccacatacggaaag

SEQ ID NO: 224992 - DNA, 75 bp, synthetic construct
  source 1..75: mol_type = other DNA
ggcaggcggagcggggactggggcaggaaacacctctggaatccctgctgacgcagtaccaggatgcccgtgcgc

SEQ ID NO: 224993 - DNA, 75 bp, synthetic construct
  source 1..75: mol_type = other DNA
atggcaaactgggcgcagaaattaaaacttcatcacctgcaaatgctggtggcgctgggcgaacagggtaatctg

SEQ ID NO: 224994 - DNA, 75 bp, synthetic construct
  source 1..75: mol_type = other DNA
ctggcgggcttttgcgaaggtgcggaactgctggcggcaatggtaagccacgactgggataagttctggccgcag

SEQ ID NO: 224995 - DNA, 75 bp, synthetic construct
  source 1..75: mol_type = other DNA
acgatttttaaaagcaacggcgtggacctgcacaccgccacctactacacgcttgcccggacacggacacaggga

SEQ ID NO: 224996 - DNA, 75 bp, synthetic construct
  source 1..75: mol_type = other DNA
tacaaacaattcagagacttaaataaaatactaataaaaccctgtgttgacgaactgaacaaaaaaagcgacctg

SEQ ID NO: 224997 - DNA, 75 bp, synthetic construct
  source 1..75: mol_type = other DNA
cagcacctacagcatccgtatttacgagctgctccagcagttccgcagcaccggcgacagaactatttcactcga

SEQ ID NO: 224998 - DNA, 75 bp, synthetic construct
  source 1..75: mol_type = other DNA
cagcacctacagcatccgcatttacgagctgctccagcagttccgcagcaccggtgacagaacgatagctatcga

SEQ ID NO: 224999 - DNA, 75 bp, synthetic construct
  source 1..75: mol_type = other DNA
cccggccatatctccggagaacggcttgttccgcgcgccacttctgcgttgttgcgccagccatccatctgccag

SEQ ID NO: 225000 - DNA, 75 bp, synthetic construct
  source 1..75: mol_type = other DNA
caatattctgcgtcagcaaatctcctttgcggaatccgacctaccactgatctaccgcacagagcgggcattgca

SEQ ID NO: 225001 - DNA, 75 bp, synthetic construct
  source 1..75: mol_type = other DNA
gagtcgtcattaaaaatatttctaatttatcaagaagttacagcataagaatatacgaaattctccagcaattcc

SEQ ID NO: 225002 - DNA, 75 bp, synthetic construct
  source 1..75: mol_type = other DNA
cccttctgccgttcattctcccagactcacagacactgcagctgctctattccatgagtctctccgacaaaccgg

SEQ ID NO: 225003 - DNA, 75 bp, synthetic construct
  source 1..75: mol_type = other DNA
atgaagcgccaggtggtgctgaatgtggaaattctgagtatccggaaaacccgtaatgagcaggcaggtatcgac

SEQ ID NO: 225004 - DNA, 75 bp, synthetic construct
  source 1..75: mol_type = other DNA
ctgtggtttcccagtcgtgccattacgcaaatgcatcaggcgcttaatgatcggcttgatgatgccattagccac

SEQ ID NO: 225005 - DNA, 75 bp, synthetic construct
  source 1..75: mol_type = other DNA
ggctattacaaccgctgcgaatacaagcccgcttatgaagtcagtattgataggccagtgaactacgatgatacc

SEQ ID NO: 225006 - DNA, 75 bp, synthetic construct
  source 1..75: mol_type = other DNA
tgcccatatcgtgatgtatcttgatggtcaccataaccaggccacctttccgatggctgaacaggcaggggctgt

SEQ ID NO: 225007 - DNA, 75 bp, synthetic construct
  source 1..75: mol_type = other DNA
ccacctatgtggattataaaatcaacctgctgaaagacaaccagtttacacgtgatgccggcatcaataccgatg

SEQ ID NO: 225008 - DNA, 75 bp, synthetic construct
  source 1..75: mol_type = other DNA
gcaacgagcatccttactttcagtacctcgatcaaagcggtatagaaacaggcactggaaaacggcaaatcgttc

SEQ ID NO: 225009 - DNA, 75 bp, synthetic construct
  source 1..75: mol_type = other DNA
atgaataaaaaaattcttgtcattatgattgccgccgctctgttacagggctgtgccagtttcagacagcttgag

SEQ ID NO: 225010 - DNA, 75 bp, synthetic construct
  source 1..75: mol_type = other DNA
cgcacgcagagcagagcggaagaagacaatccggaaagtccggttcctgttccgccatcggctgaaagtcatctt

SEQ ID NO: 225011 - DNA, 75 bp, synthetic construct
  source 1..75: mol_type = other DNA
ctgtgccagtttcagacagcttgagagcacaagaaaggaagccgttgcggaacaacaacgggcacgggaaatgat

SEQ ID NO: 225012 - DNA, 75 bp, synthetic construct
  source 1..75: mol_type = other DNA
atctgcaacgtttatcacgctgtatacatcgggccttactgttgatgtaacgtcatttatcacggagcttaaaat

SEQ ID NO: 225013 - DNA, 75 bp, synthetic construct
  source 1..75: mol_type = other DNA
cgccagtcattcgattaaaaccaaccgggtgatgctttaccttgcccggcgtaatggacacccttattttcagta

SEQ ID NO: 225014 - DNA, 75 bp, synthetic construct
  source 1..75: mol_type = other DNA
ccagatacacgatgaactggtttctactgtctctgatcaatgaccacctgaatcagctactgaaccggtactccc

SEQ ID NO: 225015 - DNA, 75 bp, synthetic construct
  source 1..75: mol_type = other DNA
ttatagctattttaagaaaagaaatgatgtaaatatgcatctggtttttctttataatgtaaggatgtccgatga

SEQ ID NO: 225016 - DNA, 75 bp, synthetic construct
  source 1..75: mol_type = other DNA
tttgattcgctcgcagctcacatggagtctgaaaacgcggagtggcaatacattaagaagttgtgccagcaagaa

SEQ ID NO: 225017 - DNA, 75 bp, synthetic construct
  source 1..75: mol_type = other DNA
acggatcaccccgcttctctccccgagcatctatcaggacgtgattgatgccatcgaaattcaagctcaacagat

SEQ ID NO: 225018 - DNA, 75 bp, synthetic construct
  source 1..75: mol_type = other DNA
atgcgtaaaatgccggatgcggcgcgccatgaactgaaccccaaaacctggacagtttcagttaaccggcttttt

SEQ ID NO: 225019 - DNA, 75 bp, synthetic construct
  source 1..75: mol_type = other DNA
atgccggatgcgacgcttgatgaactgaaccccaaaacctggacagtttcagttaaccggctttttgatgctcag

SEQ ID NO: 225020 - DNA, 75 bp, synthetic construct
  source 1..75: mol_type = other DNA
cctgccaatgtctatggcgaaagggatcctcgaagatacgcatccactttctgcggcagctgcgcgttcgtttgc

SEQ ID NO: 225021 - DNA, 75 bp, synthetic construct
  source 1..75: mol_type = other DNA
ccagacgggcggcctgtgggcttccggcgcactatacggaaaactggcgagcgtctttagttccaccggtactgg

SEQ ID NO: 225022 - DNA, 75 bp, synthetic construct
  source 1..75: mol_type = other DNA
tgctttattattccatgtacggacatattgaaacgatggcacgcgcagtcgctgagggtgcaagcaaagtggatg

SEQ ID NO: 225023 - DNA, 75 bp, synthetic construct
  source 1..75: mol_type = other DNA
tggtgttgtctatgacgtcacctcctggactgatgtactgccggagtttggtggtgatacttacagcgcggataa

SEQ ID NO: 225024 - DNA, 75 bp, synthetic construct
  source 1..75: mol_type = other DNA
gctcggactcaatactacgctttcgctctgactatgatgaaacgacggcccttccgttactctcaatacagaaag

SEQ ID NO: 225025 - DNA, 75 bp, synthetic construct
  source 1..75: mol_type = other DNA
tggaggcctgggtaagggcattacatctcaatcaggaagagaactatcaacagtattatcgacttattgagtttc

SEQ ID NO: 225026 - DNA, 75 bp, synthetic construct
  source 1..75: mol_type = other DNA
gtcaagagagtttggtgagatcaagggtaagaagcattaccatatcgcattgatgctgaataacgatgcgtacta

SEQ ID NO: 225027 - DNA, 75 bp, synthetic construct
  source 1..75: mol_type = other DNA
taacgcccgtcgtcgacagctgcagcagccagaaattcagcctaacgccgcgcatcttgcgctggctaaactgca

SEQ ID NO: 225028 - DNA, 75 bp, synthetic construct
  source 1..75: mol_type = other DNA
agtactcgtactgacaggggcagggatttctgcggaatcaggtattcgtacctttcgcgccgcagatggcctgtg

SEQ ID NO: 225029 - DNA, 75 bp, synthetic construct
  source 1..75: mol_type = other DNA
gttgacggacaagtggagctgctggtttatttcggtcagccttcctgggcgcacttcccgttctacttcaacagt

SEQ ID NO: 225030 - DNA, 75 bp, synthetic construct
  source 1..75: mol_type = other DNA
agttcagattcaggatgctggtcatcaggtcgatgatgcagaagatgccaaagaagccgattattatctcaatga

SEQ ID NO: 225031 - DNA, 75 bp, synthetic construct
  source 1..75: mol_type = other DNA
cggcatccccggaaaggattgcggtggatcgccggacgatacttctcctttgaaggcaggcgctggatctttaaa

SEQ ID NO: 225032 - DNA, 75 bp, synthetic construct
  source 1..75: mol_type = other DNA
ttttcattgctattggcacgtccgggcatgtttatccggcagcaggatttgtccacgaagcgaagctgcatggcg

SEQ ID NO: 225033 - DNA, 75 bp, synthetic construct
  source 1..75: mol_type = other DNA
atgataccatctcagatctctttcaatacccttccagtcaatgcaacatacgcttcagagacaacagttgacaca

SEQ ID NO: 225034 - DNA, 75 bp, synthetic construct
  source 1..75: mol_type = other DNA
catctatgccagatgcaagagaaagagttagaacatctacgtgcactcattgatgcgcataacatagattattag

SEQ ID NO: 225035 - DNA, 75 bp, synthetic construct
  source 1..75: mol_type = other DNA
cacagtttaatatgccccagtatttcgcacatggtgcagtgctaagtattttcgtcggtgccattctctggctgg

SEQ ID NO: 225036 - DNA, 75 bp, synthetic construct
  source 1..75: mol_type = other DNA
agaaggtgcagaagcctgcatcaatgccatccgtgaactggcgaagaaagtgaatatcccggcaggcttgcgtga

SEQ ID NO: 225037 - DNA, 75 bp, synthetic construct
  source 1..75: mol_type = other DNA
cacgactgtgcaaaaggtattgcgctggttgcagccaacggcggtgacatccgcgattatgaaggcgttgaccgc

SEQ ID NO: 225038 - DNA, 75 bp, synthetic construct
  source 1..75: mol_type = other DNA
tatggatgccttaacgcacgctatcgaagcgtatgtttctattgccgccacgccgatcactgacgcttgtgcact

SEQ ID NO: 225039 - DNA, 75 bp, synthetic construct
  source 1..75: mol_type = other DNA
gcactgtgccgggtagaagtggaagaaggcctggcgctggtggcactgattggcaacgacctgtcaaaagcctgc

SEQ ID NO: 225040 - DNA, 75 bp, synthetic construct
  source 1..75: mol_type = other DNA
tccgttctatgcctcgctggggctggcttactcaacagaattcccggacagaagcggtctgcaggccaaggccag

SEQ ID NO: 225041 - DNA, 75 bp, synthetic construct
  source 1..75: mol_type = other DNA
atgagaagaggttattttctggtcaggggcgataagaccacctgcggcggcaaaattattgaaggggcggacgac

SEQ ID NO: 225042 - DNA, 75 bp, synthetic construct
  source 1..75: mol_type = other DNA
accggccttctgccgctggtcactgacagcctgccgatgcgcttgttaccgactgaaataatggccggttcaccg

SEQ ID NO: 225043 - DNA, 75 bp, synthetic construct
  source 1..75: mol_type = other DNA
atgaacagaacgattcttgtccctatcgatatttccgattcagaattaactcaacgcgtgattagccatgttgag

SEQ ID NO: 225044 - DNA, 75 bp, synthetic construct
  source 1..75: mol_type = other DNA
tctggccagaaagcgaagctcgtgctttaccgtcaaaactggcggcagcgctgggaatgttaagcaagatgatgc

SEQ ID NO: 225045 - DNA, 75 bp, synthetic construct
  source 1..75: mol_type = other DNA
cgaaaaactcgaagagattattaagcagttcaatattcctgcaggcaggagtcagactcacgtcgtttacggccc

SEQ ID NO: 225046 - DNA, 75 bp, synthetic construct
  source 1..75: mol_type = other DNA
cagcaggtctataacggccttgccggaatgtggctggtggaagatgaagtcagcaaatcgctgcctatccccaac

SEQ ID NO: 225047 - DNA, 75 bp, synthetic construct
  source 1..75: mol_type = other DNA
aaggcctggcgctggtggcgctgattggtaacgacctgtccaaagcctgcggcgtcggcaaagaagtatttggcg

SEQ ID NO: 225048 - DNA, 75 bp, synthetic construct
  source 1..75: mol_type = other DNA
cgcagcaaaacgcattgatgaaatcgcgtttgccgaagcggcagagatggcaacttttggtgcaaaagtactgca

SEQ ID NO: 225049 - DNA, 75 bp, synthetic construct
  source 1..75: mol_type = other DNA
gagccgggaagcggcggttttgttggcgatacgctactggtcaatggcgtacaaagcccgtatgttgaagtttcg

SEQ ID NO: 225050 - DNA, 75 bp, synthetic construct
  source 1..75: mol_type = other DNA
aattagcaaagatagtatcatcgaagatttttgagcgctttaaatggagcatatcagggccgtgtgatcaggact

SEQ ID NO: 225051 - DNA, 75 bp, synthetic construct
  source 1..75: mol_type = other DNA
acttagcaaaacgcatttctaacgatcttatgagtcgttttaagtggcaacagcatggcccctgtgaccaagatt

SEQ ID NO: 225052 - DNA, 75 bp, synthetic construct
  source 1..75: mol_type = other DNA
agagtcacgccatatttacgatctcaaagtcatgcagattgacccactggaagcaccggatcttatctggctgct

SEQ ID NO: 225053 - DNA, 75 bp, synthetic construct
  source 1..75: mol_type = other DNA
agcgccataagtattccaactttaaggacttctgggagcaactgaagccgggctacgactactttgaacagactc

SEQ ID NO: 225054 - DNA, 75 bp, synthetic construct
  source 1..75: mol_type = other DNA
gtcagcaagccgttaagccacgaagttgtgcagccacaactggcatcaaactacacgctccccgaggcaaaataa

SEQ ID NO: 225055 - DNA, 75 bp, synthetic construct
  source 1..75: mol_type = other DNA
ggtggcgagattaaggcacacgaaattcgacctgatcttcccgacctgtttccacacccagagaaccatgccgct

SEQ ID NO: 225056 - DNA, 75 bp, synthetic construct
  source 1..75: mol_type = other DNA
taaaggaaagcataaaaaaaagaggattaagcaagcctataagcgtaagagctattgatgaagacgatttcaaat

SEQ ID NO: 225057 - DNA, 75 bp, synthetic construct
  source 1..75: mol_type = other DNA
ggaagattccagaatcagcaacaaaggcagcgcccggaaatgtttccggcgtttatttttatatggaaggtaaat

SEQ ID NO: 225058 - DNA, 75 bp, synthetic construct
  source 1..75: mol_type = other DNA
agcttcatcacctgcaaatgctggtggcgctgggtgaacagggtaatctgacccatgtcgcacggatgatgaata

SEQ ID NO: 225059 - DNA, 75 bp, synthetic construct
  source 1..75: mol_type = other DNA
ggtgctgtacaccgagccagtatgctttgtcgcccgccctgagcacccactggcgaaatacgccaccctcagttg

SEQ ID NO: 225060 - DNA, 75 bp, synthetic construct
  source 1..75: mol_type = other DNA
atggcgaactgggcgcaaaaattaaaactacatcaccttgaaatgctggtggcgctgggtgaacagggcaatcta

SEQ ID NO: 225061 - DNA, 75 bp, synthetic construct
  source 1..75: mol_type = other DNA
atatttctcatcagataaatacccagccaggtcctgtgttgaagtagcccgattaccgaaggacgtgctgataga

SEQ ID NO: 225062 - DNA, 75 bp, synthetic construct
  source 1..75: mol_type = other DNA
ccaaagctatcggtccctatgtacaggcagtatcaactggtaatttattgttcatttccggatgttgtcctttca

SEQ ID NO: 225063 - DNA, 75 bp, synthetic construct
  source 1..75: mol_type = other DNA
ttcactgctcggcattaacagcggcgcggcgctggctatggcgcttaccagcgcgctgagtccgacgccaattgc

SEQ ID NO: 225064 - DNA, 75 bp, synthetic construct
  source 1..75: mol_type = other DNA
ctggccagatgaaatctacggcagcacggaaaccggcgtcatcgcctggcgttaccgcgaacaagagcagcgacg

SEQ ID NO: 225065 - DNA, 75 bp, synthetic construct
  source 1..75: mol_type = other DNA
aaagatgagcggcaaaacgccagccgtggtggtggtgcatgagaatcgtggactgaatccgtatatcgaagatgt

SEQ ID NO: 225066 - DNA, 75 bp, synthetic construct
  source 1..75: mol_type = other DNA
tgatgaatgatttctttgccgcaattgagtttatgcaacgctatccgcaagcggcaggcaaagtgggtattaccg

SEQ ID NO: 225067 - DNA, 75 bp, synthetic construct
  source 1..75: mol_type = other DNA
aaaaatgagcggcaaaacgccagccgtggtagtggtgcatgagaatcgtggactgaatccgtatatcgaagatgt

SEQ ID NO: 225068 - DNA, 75 bp, synthetic construct
  source 1..75: mol_type = other DNA
gtggaaacgcgggcagaaagttaccattcacggctgggcctacggcattcacgacggcttgctacgtgatctgga

SEQ ID NO: 225069 - DNA, 75 bp, synthetic construct
  source 1..75: mol_type = other DNA
ggtgcggggttatctggtgaagcccgcaaagatgagcggcaaaacgccagccgtagtggtggtgcatgagaatcg

SEQ ID NO: 225070 - DNA, 75 bp, synthetic construct
  source 1..75: mol_type = other DNA
tgcgcggctatctggtgaaacctgcgaagatgaacagcaaaacgccagccgtagtggtggtgcatgagaatcgcg

SEQ ID NO: 225071 - DNA, 75 bp, synthetic construct
  source 1..75: mol_type = other DNA
ctttcacaggaaagtgagggggttcgtgtcttttcgccactcatccctgctgaaggattggtgcttgacgatatg

SEQ ID NO: 225072 - DNA, 75 bp, synthetic construct
  source 1..75: mol_type = other DNA
cgttcaggtgcttctgtctgctggcggtgagctaccgtggcaggacgtacaacacactgcgagctggctgcgcgt

SEQ ID NO: 225073 - DNA, 75 bp, synthetic construct
  source 1..75: mol_type = other DNA
gaacgttgggcgctgtgctttgagaacagctatctgtttatcgttgccctgctcgccacgctacacgccggaaaa

SEQ ID NO: 225074 - DNA, 75 bp, synthetic construct
  source 1..75: mol_type = other DNA
ttggggtgaccgccgggatcaccgcccgagaagacttcgccaactacgtaccgctaccgattattttgccgctct

SEQ ID NO: 225075 - DNA, 75 bp, synthetic construct
  source 1..75: mol_type = other DNA
aagcaaacatgctggcaactcactttgcagaccgactactgggctgtcgttttgtagcatccgtgatgcctcagc

SEQ ID NO: 225076 - DNA, 75 bp, synthetic construct
  source 1..75: mol_type = other DNA
gcaaagcactattaccatggcttgaacctgttgcagtacctcgttactggcgcattattgatgaaataccagtaa

SEQ ID NO: 225077 - DNA, 75 bp, synthetic construct
  source 1..75: mol_type = other DNA
aacgggcaacagcaggctcagaatcaggaggcggagccggcaccgcaggctgatgcacatcatcagtcaggcggc

SEQ ID NO: 225078 - DNA, 75 bp, synthetic construct
  source 1..75: mol_type = other DNA
tgctcttgctaatcagggactggatactcgtctgattcaggattatctgggacacaggaacattcatcatactgt

SEQ ID NO: 225079 - DNA, 75 bp, synthetic construct
  source 1..75: mol_type = other DNA
atatcaagcgtttaaaaaatggattatccacagtacatcccctgcaaaaagaaactgttctgttattaaaaaaat

SEQ ID NO: 225080 - DNA, 75 bp, synthetic construct
  source 1..75: mol_type = other DNA
aatattagatagacatggatggcatacagatagttatattgctaatagaaaaataaaaattgataatgttcctca

SEQ ID NO: 225081 - DNA, 75 bp, synthetic construct
  source 1..75: mol_type = other DNA
gctgatgctgatgttgaattggttggggccgaactggtggcagaatacaaaatgactgaaggcgaaaacggaggg

SEQ ID NO: 225082 - DNA, 75 bp, synthetic construct
  source 1..75: mol_type = other DNA
tttaatgcagaacatcttgaagacctgaatagaattaaaagccttatttttgcctatctggcgttccctggcata

SEQ ID NO: 225083 - DNA, 75 bp, synthetic construct
  source 1..75: mol_type = other DNA
aatggattaaatttttctgtgctattgacgatacacgtaatgagatccgcgataaggctatgctccatatggctt

SEQ ID NO: 225084 - DNA, 75 bp, synthetic construct
  source 1..75: mol_type = other DNA
caactgctggcctgtgcggcacaaaagcggacggaaacgtatctgaaccggaagctctatgcaccggatgaaacc

SEQ ID NO: 225085 - DNA, 75 bp, synthetic construct
  source 1..75: mol_type = other DNA
ttttatgaaaatcgttcagcgagtaccgatgttgagaaacttgaaacgccagtgagtttcagatggctcgctggc

SEQ ID NO: 225086 - DNA, 75 bp, synthetic construct
  source 1..75: mol_type = other DNA
atgattcaaagggatattgaatactcgggacaattttcaaaggatgtaaaacttgcacaaaagcgtcataaggat

SEQ ID NO: 225087 - DNA, 75 bp, synthetic construct
  source 1..75: mol_type = other DNA
atcattttttcaaaagtaatgatttcgccataacaatattgtcaagatgtgaaaacaacattgaatataatgatg

SEQ ID NO: 225088 - DNA, 75 bp, synthetic construct
  source 1..75: mol_type = other DNA
tgacctaccacattgaaccgccgtcaaaagccgggatgcatcgccatactgacagcgaaacaggcgtaggccgct

SEQ ID NO: 225089 - DNA, 75 bp, synthetic construct
  source 1..75: mol_type = other DNA
gcagcagcaaggcgttctggaaactggcgatctggaagaggctctgaatgcggcgcaagctattggcgatgaccg

SEQ ID NO: 225090 - DNA, 75 bp, synthetic construct
  source 1..75: mol_type = other DNA
ttcgatccagaacatcttaaacatccaggtaaaattaaaacgcttattttcgcttttctgacgattaattcttac

SEQ ID NO: 225091 - DNA, 75 bp, synthetic construct
  source 1..75: mol_type = other DNA
tattaatgcaaaaaggaaaggttatcgcaaatggtaaacctcaggacgtattgacacagcaggcgctgacaatgc

SEQ ID NO: 225092 - DNA, 75 bp, synthetic construct
  source 1..75: mol_type = other DNA
gccctaatggtgcgggaaaatctacgctgcttcgccagctaaccggctatcttcaacctgatagcggcgaatgtc

SEQ ID NO: 225093 - DNA, 75 bp, synthetic construct
  source 1..75: mol_type = other DNA
tcgtaaaaattgtagacattggtagcctgacccaggctgctgaagtattgcatatagcacagcctgcgctcagtc

SEQ ID NO: 225094 - DNA, 75 bp, synthetic construct
  source 1..75: mol_type = other DNA
ttcgacgggcaaactctggagttaaccggcaccgaatttaccctgctctatttactggcgcagcatctgggtcag

SEQ ID NO: 225095 - DNA, 75 bp, synthetic construct
  source 1..75: mol_type = other DNA
ttttgcagggcgaagaactcaatgccctcgcggatacgctgtggcaaaaagcgctctggaatgcgctactgtggt

SEQ ID NO: 225096 - DNA, 75 bp, synthetic construct
  source 1..75: mol_type = other DNA
atttaagagatcttgttctttttgattatccctcttcggcaacactgtatatgacgaatgagcagtatattatgg

SEQ ID NO: 225097 - DNA, 75 bp, synthetic construct
  source 1..75: mol_type = other DNA
gcgaagcgagcgagaagaaaccgttcaactttgcgctgttctgggataaatacggtactttttttatcctggcga

SEQ ID NO: 225098 - DNA, 75 bp, synthetic construct
  source 1..75: mol_type = other DNA
acggtcggcaattctgggttgaacgtattggtccggatgactgtggctcctgtcatatctgtctgggtaacggct

SEQ ID NO: 225099 - DNA, 75 bp, synthetic construct
  source 1..75: mol_type = other DNA
cctgatcttgaggttgatttagtcggcgcggaactggtcgcagaatacaaaataaccccggcagaaagcggagat

SEQ ID NO: 225100 - DNA, 75 bp, synthetic construct
  source 1..75: mol_type = other DNA
cctgacccaggctgctgaagtattgcatatagcacagcctgcgctcagtcagcaggttgctacgctggaaggaga

SEQ ID NO: 225101 - DNA, 75 bp, synthetic construct
  source 1..75: mol_type = other DNA
tcccctgtggctggtgtatccagtcaggctttgctgaaagaagatcttttcctggtaggaactcaagattgtccg

SEQ ID NO: 225102 - DNA, 75 bp, synthetic construct
  source 1..75: mol_type = other DNA
ctttgtcattaaatttacccgccagagcgaacttatcaccacaggcacaggcagtgaaagagttgttaatgtcag

SEQ ID NO: 225103 - DNA, 75 bp, synthetic construct
  source 1..75: mol_type = other DNA
tcaatgccattctggatgcagctgcagaaccccagcagtccctgattgctgacagtacccccaattccgccacca

SEQ ID NO: 225104 - DNA, 75 bp, synthetic construct
  source 1..75: mol_type = other DNA
tgcttgcactcctgataggctgtgcggttatccctgccacccatgcctactctgtgaatgttgtgtccagtcagc

SEQ ID NO: 225105 - DNA, 75 bp, synthetic construct
  source 1..75: mol_type = other DNA
agaaacttcacgaccggacaggtttcagtttcatactggacggctcgtgtgacatatcgttttgaaccagaaaag

SEQ ID NO: 225106 - DNA, 75 bp, synthetic construct
  source 1..75: mol_type = other DNA
atggctgaaaatttaaaggcaagagatggtaaccgcctgtataaggcgcaattgctttcctactattattcacgc

SEQ ID NO: 225107 - DNA, 75 bp, synthetic construct
  source 1..75: mol_type = other DNA
aatatcactccgttattttggaacatttcaccttaatcttgaaaatggacatgtatggaagtcagaaggtgtttt

SEQ ID NO: 225108 - DNA, 75 bp, synthetic construct
  source 1..75: mol_type = other DNA
ggcataccaggctcatgcttattcagtcaccgtcgtcgccagccgccccgttgaacagcaggtcgtccccagaat

SEQ ID NO: 225109 - DNA, 75 bp, synthetic construct
  source 1..75: mol_type = other DNA
atgaaaaagattatcgctggtatcgttcttgctatgggtttggttggtactgctaatgctaatacctattatgtg

SEQ ID NO: 225110 - DNA, 75 bp, synthetic construct
  source 1..75: mol_type = other DNA
tcaaatatctgcattctgtagatggcgcgcctatatttgatgttaaaaaaggtgatacgtcttattccctgatta

SEQ ID NO: 225111 - DNA, 75 bp, synthetic construct
  source 1..75: mol_type = other DNA
ataaggacaagaagatcggcagtcaggacgactatctgaaacactatttcgatggtggcaaaatcaataagctag

SEQ ID NO: 225112 - DNA, 75 bp, synthetic construct
  source 1..75: mol_type = other DNA
aagtgttgggcaaacgcctgacgcctttcgaccgcgctattgatatgcacatttccaacctgcgtcgtaaactgc

SEQ ID NO: 225113 - DNA, 75 bp, synthetic construct
  source 1..75: mol_type = other DNA
tggaaacggaacttgatctgattcagaagatgggcctgcaaaattatctgcaagcacaaatccgcgaagaagggt

SEQ ID NO: 225114 - DNA, 75 bp, synthetic construct
  source 1..75: mol_type = other DNA
gtcctaaattaaaagaagataagaacgagaaagaagaatattatggttccgaagatggtaaatcctacatcaagt

SEQ ID NO: 225115 - DNA, 75 bp, synthetic construct
  source 1..75: mol_type = other DNA
agagaacggtccggaagataccacgcaagatgacgatatgaagcagagcactgatgaatcccctaatgattttta

SEQ ID NO: 225116 - DNA, 75 bp, synthetic construct
  source 1..75: mol_type = other DNA
atccatgagcgggtcaacaatgcacaggctcctgctcaccagatgcagtctgctgcggctcctgtcgggatccag

SEQ ID NO: 225117 - DNA, 75 bp, synthetic construct
  source 1..75: mol_type = other DNA
ggggagacctcccggatggccggaatgaatcagcatgaacaggccatcattgctcatgaaaccatgaataatggc

SEQ ID NO: 225118 - DNA, 75 bp, synthetic construct
  source 1..75: mol_type = other DNA
ggggagaaactgaccgctggcaccttggcgttatggccggttacggtaacgaccataacaatacggactctgtgc

SEQ ID NO: 225119 - DNA, 75 bp, synthetic construct
  source 1..75: mol_type = other DNA
gatgaagaaggtcatatcgactggctcgaaactgaactggatctcatcggtaaaatcggcctacaaaattacctg

SEQ ID NO: 225120 - DNA, 75 bp, synthetic construct
  source 1..75: mol_type = other DNA
gcaaagccgccgtcgaagccgctattgcccgtgccaaagcgcgcaagctggaacagcaacagtctaatgcggaac

SEQ ID NO: 225121 - DNA, 75 bp, synthetic construct
  source 1..75: mol_type = other DNA
atccgcgcaaagccgccgtcgaagccgctattgcccgtgccaaagcacgcaagctggaacagcaacaggctaatg

SEQ ID NO: 225122 - DNA, 75 bp, synthetic construct
  source 1..75: mol_type = other DNA
acggactcgccctgattcaccagtttggcgaggtagttttccaccgcatggtaggggatccccgccatcgggatc

SEQ ID NO: 225123 - DNA, 75 bp, synthetic construct
  source 1..75: mol_type = other DNA
aacccagtgataacgatttggctgaagaagaactgttatcgcagggtgccacacagcgtgtgttggacgcgacgc

SEQ ID NO: 225124 - DNA, 75 bp, synthetic construct
  source 1..75: mol_type = other DNA
ctgggtggtgattccgaaaaagcgttgctggcatcctggccgatgaaaaagagaacggtccggaagataccacgc

SEQ ID NO: 225125 - DNA, 75 bp, synthetic construct
  source 1..75: mol_type = other DNA
cccttcacggaaaaatagcggcaatacgggctgtgaactcagcaggtatgacaggcctgctcaataccacagtcc

SEQ ID NO: 225126 - DNA, 75 bp, synthetic construct
  source 1..75: mol_type = other DNA
gttaatggtggagatgtcgatattcatggtccggattcccgtgcggtatcagccagcacgaatggcctgataaac

SEQ ID NO: 225127 - DNA, 75 bp, synthetic construct
  source 1..75: mol_type = other DNA
gagcgcattacctcggtagacaccccgctgggtggtgattccgaaaaaagcgttgctggacatcctggccgatga

SEQ ID NO: 225128 - DNA, 75 bp, synthetic construct
  source 1..75: mol_type = other DNA
ataccgatataacacaccatcagcctaatgggcgacaagggagagacagtccgttactggagaagttaaaacatg

SEQ ID NO: 225129 - DNA, 75 bp, synthetic construct
  source 1..75: mol_type = other DNA
cggtgcaccattgaaaatgccgcagatgcattaaatgccataaagaaagcgaatactgattcaaatcggggataa

SEQ ID NO: 225130 - DNA, 75 bp, synthetic construct
  source 1..75: mol_type = other DNA
ggtttttgttacccgccagaaaccaaaaccgttccgttaagcgaagtggttactaacaacgcgacgccaccgtct

SEQ ID NO: 225131 - DNA, 75 bp, synthetic construct
  source 1..75: mol_type = other DNA
caatgtccgacggaggttgctatctcagaccgtcgggaaaaagaattgtcagatctcggttttattcctctggtt

SEQ ID NO: 225132 - DNA, 75 bp, synthetic construct
  source 1..75: mol_type = other DNA
tgggccgaagggaagtatagcaaagccatttcttactattaccattatcttcgcgctaaattattaggtgtgaaa

SEQ ID NO: 225133 - DNA, 75 bp, synthetic construct
  source 1..75: mol_type = other DNA
gttttttaattccagaagttgttgatgataaaataacaaacatactttaccttgattgtgatattatatgtaatg

SEQ ID NO: 225134 - DNA, 75 bp, synthetic construct
  source 1..75: mol_type = other DNA
atgctgacaaaatatgcccttgtggcaatcatcgtactgtgttgtacagtactgggattcacgttgatggtaggc

SEQ ID NO: 225135 - DNA, 75 bp, synthetic construct
  source 1..75: mol_type = other DNA
atgctgacgaaatatgcccttgtggcagtcatagtgctgtgttttacggtactgggatttacgcttctggtcgga

SEQ ID NO: 225136 - DNA, 75 bp, synthetic construct
  source 1..75: mol_type = other DNA
atgctgacgaaatatgcccttgtggcagtcatagtgctgtgtttaacggtcctgggatttacgcttctggtcggt

SEQ ID NO: 225137 - DNA, 75 bp, synthetic construct
  source 1..75: mol_type = other DNA
aagagttcgagaaatacacctttagcgacccacaggtgcaaaaagcgttggctgacacagtcttacttcaggcca

SEQ ID NO: 225138 - DNA, 75 bp, synthetic construct
  source 1..75: mol_type = other DNA
acaaactcaggcgcatctcaactttacaccaatcaaaacggtggatgagttaaatcaggcgctcgttgaagccaa

SEQ ID NO: 225139 - DNA, 75 bp, synthetic construct
  source 1..75: mol_type = other DNA
atgctgacaaaatatgcccttgtggcaatcatagtgctgtgttttacagtactgggattcacgctgatggtaggc

SEQ ID NO: 225140 - DNA, 75 bp, synthetic construct
  source 1..75: mol_type = other DNA
tcttttagcgaactaccctacccgcgtgatctggcaaaattatttgaaacaacagattatgcccggtggcgtagt

SEQ ID NO: 225141 - DNA, 75 bp, synthetic construct
  source 1..75: mol_type = other DNA
tatgccggtgattacttccagacgggatcatcaacaacaggatatgtgatacctgagcgaaattactggatgtcg

SEQ ID NO: 225142 - DNA, 75 bp, synthetic construct
  source 1..75: mol_type = other DNA
ttttagccacaattaaccttgaagcactaaagctcaaggttgatgtatggaaaacaattgttgatgtgcaaaaac

SEQ ID NO: 225143 - DNA, 75 bp, synthetic construct
  source 1..75: mol_type = other DNA
gtttcggtagagaaaaccacccgcaatgccctgcaactgctgcatttctggaatgcggagattccgctcgcctag

SEQ ID NO: 225144 - DNA, 75 bp, synthetic construct
  source 1..75: mol_type = other DNA
cttccgtgaaaatttcgacggttcaccattggctctattccaggcctttcaggtgttgttagctcttaacctgta

SEQ ID NO: 225145 - DNA, 75 bp, synthetic construct
  source 1..75: mol_type = other DNA
tgcccgttatcgcgggaaaacaccacgtttcacccagaattattcgtcactgagcgctgtacagaagaaagtgta

SEQ ID NO: 225146 - DNA, 75 bp, synthetic construct
  source 1..75: mol_type = other DNA
gagaatacctgaaagcctggacggtggtggatgcaggtctgtcgtggaaggtgacggatgccctgacgctgaatg

SEQ ID NO: 225147 - DNA, 75 bp, synthetic construct
  source 1..75: mol_type = other DNA
tgattgtcttgaagaaattataaataataccagagctgtaagacaggattctgaaaagaaccggtttaaattaca

SEQ ID NO: 225148 - DNA, 75 bp, synthetic construct
  source 1..75: mol_type = other DNA
agaatgaaacacagtatgctacagatgattgtcttgaagaaattataaataataccagagctgtaagacaggatt

SEQ ID NO: 225149 - DNA, 75 bp, synthetic construct
  source 1..75: mol_type = other DNA
aaactggttcaggccagcgttactgaaaatgtaaaatatacggtgttacattgtacaaaaaacgagttactcaga

SEQ ID NO: 225150 - DNA, 75 bp, synthetic construct
  source 1..75: mol_type = other DNA
caatgtcctactgaggttgctatctcagaccggagggaaaaagaactgtcagatctcggatttatcccacttgtt

SEQ ID NO: 225151 - DNA, 75 bp, synthetic construct
  source 1..75: mol_type = other DNA
atcccatacaggtgagcgacttttacaatgtccgactgaggttgctatctcagaccgcagggaaaaagaactgtc

SEQ ID NO: 225152 - DNA, 75 bp, synthetic construct
  source 1..75: mol_type = other DNA
gattaaacctcattttcagcttgagggattaagcatgtcattgcgtcttgttgcagatttaccatcaaacgtcag

SEQ ID NO: 225153 - DNA, 75 bp, synthetic construct
  source 1..75: mol_type = other DNA
tgcctgccgccgcgaacatgtgttttgtgcctgcgtgatgcatggtcacgggaagcatattttgaagcagcaaac

SEQ ID NO: 225154 - DNA, 75 bp, synthetic construct
  source 1..75: mol_type = other DNA
gccgctgtggctggcgcagcatccgcatgtgatggcatttcaccaggcgccgaaagagtacggcggtgatgcagc

SEQ ID NO: 225155 - DNA, 75 bp, synthetic construct
  source 1..75: mol_type = other DNA
cggtctgacgcagctacaagccaagcaggaattaggcgcattgattgcctgccgccgcgaacatgtgttttgtgc

SEQ ID NO: 225156 - DNA, 75 bp, synthetic construct
  source 1..75: mol_type = other DNA
atggaaaacaatgaaacatcgtattcgtggctggggaaatttaccacggtgaaacaggaatgcccgacctgcggt

SEQ ID NO: 225157 - DNA, 75 bp, synthetic construct
  source 1..75: mol_type = other DNA
ccgaacggttactgaatcaggaaactccactggagtacatgctgacgcagtaccaggagacccgcacgcagaatc

SEQ ID NO: 225158 - DNA, 75 bp, synthetic construct
  source 1..75: mol_type = other DNA
ggtcagggataccgcacagggagccgccaccgtctggctggcatcaccggtactgaaagaatatgaacagaacct

SEQ ID NO: 225159 - DNA, 75 bp, synthetic construct
  source 1..75: mol_type = other DNA
cgcctgccgccgtgaacatgtgttttgtgcctgcgtgatgcatggtcacgggaagcatattttgaagcagcaaac

SEQ ID NO: 225160 - DNA, 75 bp, synthetic construct
  source 1..75: mol_type = other DNA
gctggcacagcatctgggtcaggtggtttcccgtgagcatttaagccaggaagtgctgggcaagcgcctgacgcc

SEQ ID NO: 225161 - DNA, 75 bp, synthetic construct
  source 1..75: mol_type = other DNA
aggcgctgatgactatctcccgaaaccgtttaacgaccgtgagctggtggctcgtattcgcgcgatcctgcgccg

SEQ ID NO: 225162 - DNA, 75 bp, synthetic construct
  source 1..75: mol_type = other DNA
aacaggaactgggggcgttgattgccgcctgccgccgtgaacatgtgttttgtgcctgcgtgatgcatggtcacg

SEQ ID NO: 225163 - DNA, 75 bp, synthetic construct
  source 1..75: mol_type = other DNA
ggaagcatattttgaagcaacaaacaccgctgtggctggcacaacatccgcatgtgatggcatttcaccaggcac

SEQ ID NO: 225164 - DNA, 75 bp, synthetic construct
  source 1..75: mol_type = other DNA
aggaggaccaggcgctgtttcgccagttgatggccggtactcgccaacttaagcaggacaccattgtccatcgac

SEQ ID NO: 225165 - DNA, 75 bp, synthetic construct
  source 1..75: mol_type = other DNA
tcgacctcacacgaacaacgatggtttaccgcctctcttacatgaagaaaagtggaaacaggttatcccagtgtc

SEQ ID NO: 225166 - DNA, 75 bp, synthetic construct
  source 1..75: mol_type = other DNA
tgcccgaattgtttgagcgcattggcgactatcagcagggacgacagcttacgaggctggcggtggtgctgactc

SEQ ID NO: 225167 - DNA, 75 bp, synthetic construct
  source 1..75: mol_type = other DNA
acccggcgcagcatctggaaggcgtcaccgcgccgccggttaaaaaccactatcccgccctgccgccggagaggt

SEQ ID NO: 225168 - DNA, 75 bp, synthetic construct
  source 1..75: mol_type = other DNA
gttcacgtatctggtatctcaagtatcgtttcagtggtaaagagtcccgcgtcagtctgggtgcatatccgctgg

SEQ ID NO: 225169 - DNA, 75 bp, synthetic construct
  source 1..75: mol_type = other DNA
atgctgacgaaatatgcccttgtggcagtcatagtgctgtgtttaacggttctgggatttacgcttctggtcggc

SEQ ID NO: 225170 - DNA, 75 bp, synthetic construct
  source 1..75: mol_type = other DNA
atgggtgaagttatctccgtttttgaatatgacctcttggggagtggaaaagcggcttcagttggcgcaaaaccg

SEQ ID NO: 225171 - DNA, 75 bp, synthetic construct
  source 1..75: mol_type = other DNA
gcaagttaaaaccctcttcccgtccggtaaaactctccgactctcacggtctgtatctgctcgtcaatccgggcg

SEQ ID NO: 225172 - DNA, 75 bp, synthetic construct
  source 1..75: mol_type = other DNA
aaggaatcatttattgaaagtataatccaaataaaatttaattctaactcaactaattgcctggagaagttatgt

SEQ ID NO: 225173 - DNA, 75 bp, synthetic construct
  source 1..75: mol_type = other DNA
ccgccttgcttacattaagaaaagtggaaacaggttatcccggtgtcctgattttgtgatcaactacaatacaca

SEQ ID NO: 225174 - DNA, 75 bp, synthetic construct
  source 1..75: mol_type = other DNA
cagtacgctcaggaagtacggcagattccgtcaaaaattacctgtaaagacagacatcagaaaaacagtgctcgc

SEQ ID NO: 225175 - DNA, 75 bp, synthetic construct
  source 1..75: mol_type = other DNA
ggtaaaactctccgactctcacggtctgtatctgctcgtcaatccgggcggttcacgcatctggtatctcaaata

SEQ ID NO: 225176 - DNA, 75 bp, synthetic construct
  source 1..75: mol_type = other DNA
aatgaactgatcttccccggcgaccataacccgtataagccaatgtgtgaaaacacggtcggtgatgctgccaac

SEQ ID NO: 225177 - DNA, 75 bp, synthetic construct
  source 1..75: mol_type = other DNA
gatttagactatccatttgaagcaccgctcaaggaatcatttattgaaagtataatccaaatagaatttaattct

SEQ ID NO: 225178 - DNA, 75 bp, synthetic construct
  source 1..75: mol_type = other DNA
tctaaacagtctgaagttgcgattctaacaactgagaggctctttgctaagtgtacggaaatgcttaaatcgaga

SEQ ID NO: 225179 - DNA, 75 bp, synthetic construct
  source 1..75: mol_type = other DNA
ctatcgacttgatcaatcggtcacttctaaacagtctgaagttgcgattctaacaactgagaggctctttgctaa

SEQ ID NO: 225180 - DNA, 75 bp, synthetic construct
  source 1..75: mol_type = other DNA
ccataacctgtgggataggcaacgttcacccggcggatcgtccggaggagcggcggtggcggtggcggcggattt

SEQ ID NO: 225181 - DNA, 75 bp, synthetic construct
  source 1..75: mol_type = other DNA
gatcgcgacgatatgtacgcgtctctcacgatgttctacaaggaaatgggctgggatccacagctcggttgcccg

SEQ ID NO: 225182 - DNA, 75 bp, synthetic construct
  source 1..75: mol_type = other DNA
ggagtatggattgcacaggcaggcgctgcattaacaggtgctggttgttcgttaattttcccggcacttggtgtg

SEQ ID NO: 225183 - DNA, 75 bp, synthetic construct
  source 1..75: mol_type = other DNA
ctctggattcctgttcgcttcctgctgatcgcgaacgttgtcatccagttttttaaaatgctgtttaaatggagt

SEQ ID NO: 225184 - DNA, 75 bp, synthetic construct
  source 1..75: mol_type = other DNA
atgtggagcatttcttgccgttacgactacaattttctcaattacttaacgtattgtgccgtttcattttccata

SEQ ID NO: 225185 - DNA, 75 bp, synthetic construct
  source 1..75: mol_type = other DNA
tcaaccacacgttttacgacccacggctatcgtgaccatagtggcgcacagaaaaatttagccaatgccaaactg

SEQ ID NO: 225186 - DNA, 75 bp, synthetic construct
  source 1..75: mol_type = other DNA
atgcttggaatatctatctggcagccgggcgaggttttgaaacgccgacgattaatgagctgtcttatcgcgctg

SEQ ID NO: 225187 - DNA, 75 bp, synthetic construct
  source 1..75: mol_type = other DNA
cagggacactgttggcacagttggcgtccggagaaaccacctcagtggcgttggtgaatcactatttttcacgta

SEQ ID NO: 225188 - DNA, 75 bp, synthetic construct
  source 1..75: mol_type = other DNA
tcaacccagtcaagcaccgcaattaagactgcagagaaattaatccagcgttgcgctgatatgaccaagtctaaa

SEQ ID NO: 225189 - DNA, 75 bp, synthetic construct
  source 1..75: mol_type = other DNA
agatgatatgagtgtgatgatgtatgccggagagcgagaaacgacccagtaccagtcaatcccgatggcccccca

SEQ ID NO: 225190 - DNA, 75 bp, synthetic construct
  source 1..75: mol_type = other DNA
atgctgaatagtcgtaaccacagtggcggcgcaggaactggcgcaataatgggctccaaaaacctgaaagcgatt

SEQ ID NO: 225191 - DNA, 75 bp, synthetic construct
  source 1..75: mol_type = other DNA
tttcactgtcatccggcaaatacctttgatgctattgcgcgcgttaaaacgatgctgccaggcaatatggaaagt

SEQ ID NO: 225192 - DNA, 75 bp, synthetic construct
  source 1..75: mol_type = other DNA
cgacccgtgaaacattgcagcgtctggggctggaagatattgccgccgatctggcagcacacaatctactgcctg

SEQ ID NO: 225193 - DNA, 75 bp, synthetic construct
  source 1..75: mol_type = other DNA
atcgcgcctacacggtaaaactgatgcaaaccaaagatatgcgtaatgaacacgatcttatctgttcctgggtat

SEQ ID NO: 225194 - DNA, 75 bp, synthetic construct
  source 1..75: mol_type = other DNA
cggcacaaatgacggcggcagtgtctatcggtcttgccagttatattgggatgcccgtctccacaacacacgtcc

SEQ ID NO: 225195 - DNA, 75 bp, synthetic construct
  source 1..75: mol_type = other DNA
atcgtccatatgttgccaaccgatttgttgctgaatatggggtcaactcacggtctggcgatggtcttttccatg

SEQ ID NO: 225196 - DNA, 75 bp, synthetic construct
  source 1..75: mol_type = other DNA
ctgctacgccgtttctggagtgggacgaaaaagcgtgaccgtattcatcgtattcctgaagatcgcaaaaagaaa

SEQ ID NO: 225197 - DNA, 75 bp, synthetic construct
  source 1..75: mol_type = other DNA
gaaatcaccggtttggctgaatattaaagatgacaaagttacccttgaaaaagcagatttcctatggggtaaagg

SEQ ID NO: 225198 - DNA, 75 bp, synthetic construct
  source 1..75: mol_type = other DNA
aagggacgaaaggggtcaacattgccgatcgtcaggagatgaagcgtctcaacgattacatgatgactgaactta

SEQ ID NO: 225199 - DNA, 75 bp, synthetic construct
  source 1..75: mol_type = other DNA
gcgcctcaatgactacatgatgaccgagcttatcggcgctaataacaaccatgtggtgccgagtacgccgcaatc

SEQ ID NO: 225200 - DNA, 75 bp, synthetic construct
  source 1..75: mol_type = other DNA
tacgcgcgcaactacggaagagatttgtcgattgaccagccctgaaacctgtgtggcggctattggtcaggctgg

SEQ ID NO: 225201 - DNA, 75 bp, synthetic construct
  source 1..75: mol_type = other DNA
tttgaagataaagacgatggtcgtgtgattggtaacctggttggtctgaatttgttcgatgactacggcctatgg

SEQ ID NO: 225202 - DNA, 75 bp, synthetic construct
  source 1..75: mol_type = other DNA
cctttcgatgaagcaaataaattagtctttgccaccgggccattaactggctctggtgctccctgtagttctcgc

SEQ ID NO: 225203 - DNA, 75 bp, synthetic construct
  source 1..75: mol_type = other DNA
taccgggtgttgcggggatcggacccaaaagcgccacgcagctgctggtcgagtttcagagtctggaagggatat

SEQ ID NO: 225204 - DNA, 75 bp, synthetic construct
  source 1..75: mol_type = other DNA
tttaagggggttatcgtggctgttcatttgcttattgtcgatgcactgaatcttattcgtcgcattcatgccgtt

SEQ ID NO: 225205 - DNA, 75 bp, synthetic construct
  source 1..75: mol_type = other DNA
gtggcgaatccgtcgctttcaggcgtgctggatcaacacctcggtcgtaactggcgtaccgatctgagtcaatta

SEQ ID NO: 225206 - DNA, 75 bp, synthetic construct
  source 1..75: mol_type = other DNA
ccgcccgcgctgcgttgcacgatctcatgatgggaaagcgggtggcaacggtgcaaaaagacggccggcgggttg

SEQ ID NO: 225207 - DNA, 75 bp, synthetic construct
  source 1..75: mol_type = other DNA
ccgttgtgggtcgcggttaatgagcgggatcagccgattgggtttatgttattgagtggtcagcatatggatgcg

SEQ ID NO: 225208 - DNA, 75 bp, synthetic construct
  source 1..75: mol_type = other DNA
atgccgttcagggatcgccctgtgtcgaaaacctgccagcatgcgctcgatcagctcattatgcacagccagcca

SEQ ID NO: 225209 - DNA, 75 bp, synthetic construct
  source 1..75: mol_type = other DNA
cggtcgtcgtgtgcgtatggcctggctggcggttgtggtgagccacaaagttaacggtgtatcggaactgcactc

SEQ ID NO: 225210 - DNA, 75 bp, synthetic construct
  source 1..75: mol_type = other DNA
gttcaaaccgtgcccagttgtcgcaagaaactcgtcaggtttactacctgtcgatggagtttttgattggccgta

SEQ ID NO: 225211 - DNA, 75 bp, synthetic construct
  source 1..75: mol_type = other DNA
agcttctgcgccaaaagttgatggtgagatcaaggtctcttttgtgaattcgcctccgggtatgcgggttatgga

SEQ ID NO: 225212 - DNA, 75 bp, synthetic construct
  source 1..75: mol_type = other DNA
tcgaagagttgattgatgaagaaaatgacccgggtctcggtaacggtggcctggggcgtctggccgcctgcttcc

SEQ ID NO: 225213 - DNA, 75 bp, synthetic construct
  source 1..75: mol_type = other DNA
tgctgatcgatgagcaccaatttagctgggacgacgcgtttgaagtgtgttgtcaggtcttctcctacaccaacc

SEQ ID NO: 225214 - DNA, 75 bp, synthetic construct
  source 1..75: mol_type = other DNA
gccgactttgcgaaaatcttcccgggtcgtttcaccaacgttaccaacggtgtgaccccgcgtcgctggctggcg

SEQ ID NO: 225215 - DNA, 75 bp, synthetic construct
  source 1..75: mol_type = other DNA
ggatacggagcctacgcaccgtaaagcgtggcgcgaagtattagggcactacggtcttcagtacgatgttcaggc

SEQ ID NO: 225216 - DNA, 75 bp, synthetic construct
  source 1..75: mol_type = other DNA
tcggcctggtgatgctggtactggtggggattgcccctgctggcttcgtcgtcaatatgaacgcgtccggctatg

SEQ ID NO: 225217 - DNA, 75 bp, synthetic construct
  source 1..75: mol_type = other DNA
ggcttaatgatgcctgttgtgggacggctcatagcagcgtttattgctcgattcttgaagctcttgagcaaggag

SEQ ID NO: 225218 - DNA, 75 bp, synthetic construct
  source 1..75: mol_type = other DNA
gtcgcggtagtggcgggcgagggtacagcacattgaacagtggaccggcaacgcggattctctccgttacggctt

SEQ ID NO: 225219 - DNA, 75 bp, synthetic construct
  source 1..75: mol_type = other DNA
ttcccccgttgtttttgccgctgatgaacagaccatgattgtcagtaccgcaccgcaggtggtttcagaactgga

SEQ ID NO: 225220 - DNA, 75 bp, synthetic construct
  source 1..75: mol_type = other DNA
gcggtaatcttattccggcgattgtcattctctttggtataaccgtaattttatgctggttcggtaacgtcttta

SEQ ID NO: 225221 - DNA, 75 bp, synthetic construct
  source 1..75: mol_type = other DNA
cgcaaatactaaccaccctcgaccgcgaaaccgcccgtattgatgcgttgattggcaaggtagagcaaagtatta

SEQ ID NO: 225222 - DNA, 75 bp, synthetic construct
  source 1..75: mol_type = other DNA
tggtagagaagctgcgttggtttggctacggtgaaacgctgccggagaaagtccgcgaagtgctgcaacagtttg

SEQ ID NO: 225223 - DNA, 75 bp, synthetic construct
  source 1..75: mol_type = other DNA
tggatagcgtcgagccgcttcctcttgttgacgtagtgaagagttggcatggtcgtcgcccaatggctgtcggta

SEQ ID NO: 225224 - DNA, 75 bp, synthetic construct
  source 1..75: mol_type = other DNA
tatttgatatggatggcaccattctggataccgagcctacgcaccgtaaagcgtggcgcgaagtattaggacgtt

SEQ ID NO: 225225 - DNA, 75 bp, synthetic construct
  source 1..75: mol_type = other DNA
acgaatcggaaaatcgatactggaaaaactctaactcggtggccagtttttgttgaccacttcaattttcaggca

SEQ ID NO: 225226 - DNA, 75 bp, synthetic construct
  source 1..75: mol_type = other DNA
ctgctctgcgtcgagtttacgcttgctcctgtaaccgaatggtttatgcaaatgggctggatagcaacgctttga

SEQ ID NO: 225227 - DNA, 75 bp, synthetic construct
  source 1..75: mol_type = other DNA
tgggctgcaaagctatggagatagccagtatctggtgaagctcggcaccgggtatttgctgaaagatgatggaac

SEQ ID NO: 225228 - DNA, 75 bp, synthetic construct
  source 1..75: mol_type = other DNA
atgcccgtggcgcttcgccgcattacccctgccgtagtgcaatctatccaggtattttttcaggttgtgctgtat

SEQ ID NO: 225229 - DNA, 75 bp, synthetic construct
  source 1..75: mol_type = other DNA
gtcgccaacctttcctacttgtcactgagttaaaaaattatgacaacgttgtgttagttggcatgtcttacgcag

SEQ ID NO: 225230 - DNA, 75 bp, synthetic construct
  source 1..75: mol_type = other DNA
atgcaatttcctccggacagtattattcagttttcattagaaaaaatgcggcagcaactgcatcaccggcaacac

SEQ ID NO: 225231 - DNA, 75 bp, synthetic construct
  source 1..75: mol_type = other DNA
tgtcagaagaacagattgttagcgatcttctccacggcggcgtaaaacatgtggcgataaaacgcgcccagcgtg

SEQ ID NO: 225232 - DNA, 75 bp, synthetic construct
  source 1..75: mol_type = other DNA
tcatagtcataaagcctcccgggaaaccgtcagcagggcactgttaatgctgaggctgacgggctggctcagttt

SEQ ID NO: 225233 - DNA, 75 bp, synthetic construct
  source 1..75: mol_type = other DNA
ttgatattgtttctcaggttgttattggggtttatggttctttagaagaagctcagctagggaaggtgcgaacaa

SEQ ID NO: 225234 - DNA, 75 bp, synthetic construct
  source 1..75: mol_type = other DNA
atgacagaccgtttcttgattactccacatagcaccacacttacttacagaatcggggaaggagaggaaatcact

SEQ ID NO: 225235 - DNA, 75 bp, synthetic construct
  source 1..75: mol_type = other DNA
ctttgaagtcattggcgaattcatatcctttattgtttaattcttctgatgatagctctaaaaatgagtatcgtg

SEQ ID NO: 225236 - DNA, 75 bp, synthetic construct
  source 1..75: mol_type = other DNA
agaattcaacactaacgattacagaattacatgctggtcttgatgatgtaacctacaaattttcaatgaaagatt

SEQ ID NO: 225237 - DNA, 75 bp, synthetic construct
  source 1..75: mol_type = other DNA
gctgtgattctgacccccgcgacagcccctgcctggtgtacgaaccgtgccgaactctggaatgccgttgagaag

SEQ ID NO: 225238 - DNA, 75 bp, synthetic construct
  source 1..75: mol_type = other DNA
tccggaaaagccccgtttcccgtggatttcctccggcagttttgccgaagccattgtggtggaaggcgctgatgc

SEQ ID NO: 225239 - DNA, 75 bp, synthetic construct
  source 1..75: mol_type = other DNA
acctcattcggataaagcctcccgggagacggtcagtcgggcgctgttaatgctgcgtcttaccgggtggctgag

SEQ ID NO: 225240 - DNA, 75 bp, synthetic construct
  source 1..75: mol_type = other DNA
atctcgaatacagcaaaactaatccgtgggtaggccagaccggtgatgatggtagatttgctaaattcgaaacac

SEQ ID NO: 225241 - DNA, 75 bp, synthetic construct
  source 1..75: mol_type = other DNA
ggcaaagcctatcgacatgagcaataaggataactttggacagagcgttgccttgcgtgctgctcaggtcagtga

SEQ ID NO: 225242 - DNA, 75 bp, synthetic construct
  source 1..75: mol_type = other DNA
caaactttccagcaaattgaggattacggcattgcgcatggctggagcgacgagcaaatccaggccaagaaaatc

SEQ ID NO: 225243 - DNA, 75 bp, synthetic construct
  source 1..75: mol_type = other DNA
tctcagccaggtattagtgatgcttttgttcgtgcaggagcagaggcaattgatgttctgggtcaggcaaaacag

SEQ ID NO: 225244 - DNA, 75 bp, synthetic construct
  source 1..75: mol_type = other DNA
ccttgccaagtcatatggcactccactgacgttcttttccaaagacgaggccaatcagatcggtgttttctttcg

SEQ ID NO: 225245 - DNA, 75 bp, synthetic construct
  source 1..75: mol_type = other DNA
gactataacggaatggggaatgtccttttgccgtggggaatgtctgcagagcaattcgataagcaggttaatcag

SEQ ID NO: 225246 - DNA, 75 bp, synthetic construct
  source 1..75: mol_type = other DNA
cagatactacccatcaatttcgatattaagtggaggtgattatcttgatgcacttggtggatggggaaggattac

SEQ ID NO: 225247 - DNA, 75 bp, synthetic construct
  source 1..75: mol_type = other DNA
actgattacacagttaccggggctggaggatataacggcggtaatgtaattctctcgaaggcgttggctaacggt

SEQ ID NO: 225248 - DNA, 75 bp, synthetic construct
  source 1..75: mol_type = other DNA
acaacgaatacacaggtaacggcgttacgacatcatttccgtacacctttagggttttcaataaatctgatctgg

SEQ ID NO: 225249 - DNA, 75 bp, synthetic construct
  source 1..75: mol_type = other DNA
tccttatggtggagagccaaagtccacaaagggaatggttgttcaaggaaatattaatctcttcaaccgcccatc

SEQ ID NO: 225250 - DNA, 75 bp, synthetic construct
  source 1..75: mol_type = other DNA
ttgagcgaattattattgcacctgagcatctcgccgatcctcagttcccacatcgaacatggtgcgcaagtgccg

SEQ ID NO: 225251 - DNA, 75 bp, synthetic construct
  source 1..75: mol_type = other DNA
gtttaactataaacagaagcaaaaatcaggatgtggtgtaagcagaacagcaacaggaactataaacttttatac

SEQ ID NO: 225252 - DNA, 75 bp, synthetic construct
  source 1..75: mol_type = other DNA
tttatttgcgatcgctgcggcgcggtgaaagaagaatgtgcagaaggcgtggaagacattatgcatacgctggcg

SEQ ID NO: 225253 - DNA, 75 bp, synthetic construct
  source 1..75: mol_type = other DNA
cgcaagaatcatcgagtttggtatagcaagccaggtgagttcggtataacttgtcaaggaagacaaaaggttaaa

SEQ ID NO: 225254 - DNA, 75 bp, synthetic construct
  source 1..75: mol_type = other DNA
ctattgatacgggaaataataaagtcagcgaatcactattagagcagcgcgatattattttttatcacgatagtg

SEQ ID NO: 225255 - DNA, 75 bp, synthetic construct
  source 1..75: mol_type = other DNA
tgaaagaagagtgtgcggaaggtgtggaggacatcatgcatacgctggcggcaaaaatgggttttgccctgcggc

SEQ ID NO: 225256 - DNA, 75 bp, synthetic construct
  source 1..75: mol_type = other DNA
cagcgcctacgatctgcttgatttactgcgtgaagcagagccgcaggccaagccgccaacggtttatcgcgcgct

SEQ ID NO: 225257 - DNA, 75 bp, synthetic construct
  source 1..75: mol_type = other DNA
gctacgtgctctgtcatctgttcgatcagccaacccatacttccgcaatgtttatttgcgatcgttgcggcgcgg

SEQ ID NO: 225258 - DNA, 75 bp, synthetic construct
  source 1..75: mol_type = other DNA
accaataccattgatggtaactggcaggccgatgaaggacgccgttaccgggataatgtaagaatctatttcagc

SEQ ID NO: 225259 - DNA, 75 bp, synthetic construct
  source 1..75: mol_type = other DNA
attaatgcctatcctgattctgcattgtcagagtttcgtagatggtttaagcatgaatatttaaccacaaagttc

SEQ ID NO: 225260 - DNA, 75 bp, synthetic construct
  source 1..75: mol_type = other DNA
gaaattactgaatcagaaagacagctactaattaaccaggctaacgaatacatgaacggtaagcaatggcctggt

SEQ ID NO: 225261 - DNA, 75 bp, synthetic construct
  source 1..75: mol_type = other DNA
ctaatccgtgccgtttgcccgtcgccattgaaaaggcgctcgattttctgcgcaccaccgatttcaacgccctgc

SEQ ID NO: 225262 - DNA, 75 bp, synthetic construct
  source 1..75: mol_type = other DNA
aacttctttcttaaaaacgactacgttcaggatgacattcactatgatatagttaaaaacaatttaataataatg

SEQ ID NO: 225263 - DNA, 75 bp, synthetic construct
  source 1..75: mol_type = other DNA
gcacgctgattaattttgccgtacttaacgtcacagacagaaagagcgaagatatcgataccattgatggtaact

SEQ ID NO: 225264 - DNA, 75 bp, synthetic construct
  source 1..75: mol_type = other DNA
gcaagccacgcagtgaaatggggttgacctgctcaggccgccagaagcaacgcggaaaatcaattccagcttatt

SEQ ID NO: 225265 - DNA, 75 bp, synthetic construct
  source 1..75: mol_type = other DNA
tacccgtttactgttaagcattcgctccaaaatgctgctgtcgctctctttttgcatggcggcggcgtttctctc

SEQ ID NO: 225266 - DNA, 75 bp, synthetic construct
  source 1..75: mol_type = other DNA
ctgcccttcaccgcactgttgacggtttttttctcggtcgtcgcagtcattatcgaccagcaattgttctcgccg

SEQ ID NO: 225267 - DNA, 75 bp, synthetic construct
  source 1..75: mol_type = other DNA
ggccaggcggcgttcttgttcctgctaacctccgcactcgcgccattgattcgtctctcttatggtcgcatggta

SEQ ID NO: 225268 - DNA, 75 bp, synthetic construct
  source 1..75: mol_type = other DNA
ccgtacgtagcctcaataatcccattgcatcggcctatctccaagtacttttgctcaccggtgcacggcgtgaag

SEQ ID NO: 225269 - DNA, 75 bp, synthetic construct
  source 1..75: mol_type = other DNA
acagcaagacgggatctcacccatctggcctttgtgctggaatccgctggccctcaccgctggcgactggctccc

SEQ ID NO: 225270 - DNA, 75 bp, synthetic construct
  source 1..75: mol_type = other DNA
attatccagtttgtattgcaggcatcagaacacgctcagctatcgctgttctatatcttcaacggtttgctgtct

SEQ ID NO: 225271 - DNA, 75 bp, synthetic construct
  source 1..75: mol_type = other DNA
cagcgcagtgacaatgccgacaacatgttgcacattgaaaatatcgcccttatgccgtaatgccagtcagttaag

SEQ ID NO: 225272 - DNA, 75 bp, synthetic construct
  source 1..75: mol_type = other DNA
agcaggaaagtgtttttctgttgatgttcatatttcagatttcatttgcaaagagatacctccacaaaatgcagg

SEQ ID NO: 225273 - DNA, 75 bp, synthetic construct
  source 1..75: mol_type = other DNA
ccatggatgctgggtgaagtggccagtctgttatatataagtgagagtttactgaagaaaaagcttcaggaagag

SEQ ID NO: 225274 - DNA, 75 bp, synthetic construct
  source 1..75: mol_type = other DNA
cctgccatccgtcgccacgccgaacggacaagctgcgttcttgttcctgttaacctccgctctcgcgccattgat

SEQ ID NO: 225275 - DNA, 75 bp, synthetic construct
  source 1..75: mol_type = other DNA
tatggcgcaattttttgggccagtcccccgactggtacaaactcgccctcatcattttcttaatcgtaaacccgt

SEQ ID NO: 225276 - DNA, 75 bp, synthetic construct
  source 1..75: mol_type = other DNA
atggatatcccaaacgggaaggaaacgtcacaatcattaaggaccttcaatcaaaattatgtaccagatgcgggc

SEQ ID NO: 225277 - DNA, 75 bp, synthetic construct
  source 1..75: mol_type = other DNA
ggcgttgacgacaccaacatgctgtcattcttcactaaaaccagctctgttctgaagatggtgaataaggacggt

SEQ ID NO: 225278 - DNA, 75 bp, synthetic construct
  source 1..75: mol_type = other DNA
gtgttcggaccgttattgcgcgtctggcgttatgacaatttcgatgaagcgattcgaatggcgaataacactcgc

SEQ ID NO: 225279 - DNA, 75 bp, synthetic construct
  source 1..75: mol_type = other DNA
gcgaaccctgcttgcgccgcgcttattacaagcaggaacatcgttgctgacgccggggatcattgaaatgacggg

SEQ ID NO: 225280 - DNA, 75 bp, synthetic construct
  source 1..75: mol_type = other DNA
ttgacggtcaggcggaggcagacataatgccgcggaaaaagccctttgtgccatctgtctcggaaataactctta

SEQ ID NO: 225281 - DNA, 75 bp, synthetic construct
  source 1..75: mol_type = other DNA
ttcggactctcttgcggtctggtttccccgagcgggaaaaattcgatcaactgttgctggaggcgcggcggggat

SEQ ID NO: 225282 - DNA, 75 bp, synthetic construct
  source 1..75: mol_type = other DNA
ctgaacgtcaggcagttgtcgaacgctttgccgcactgctggaaagcaataaagccgaattaaccgcgattattg

SEQ ID NO: 225283 - DNA, 75 bp, synthetic construct
  source 1..75: mol_type = other DNA
gtcagccggagaaaattctcgcccttgagatgggtggtaataacccgctaataatcgatgaggtgacggatatcg

SEQ ID NO: 225284 - DNA, 75 bp, synthetic construct
  source 1..75: mol_type = other DNA
aacacccccgttgccgatgaggtatggtggcaggatttccgggccgcaatgctggaacttcaggcgcgccgcagg

SEQ ID NO: 225285 - DNA, 75 bp, synthetic construct
  source 1..75: mol_type = other DNA
aactcggtgccacgctgtatatgcctgccacacgcaaggatatcgctgaggtcgttctggaagggaaaataccgg

SEQ ID NO: 225286 - DNA, 75 bp, synthetic construct
  source 1..75: mol_type = other DNA
tcgtggaacaaatggaaccgattgccggatacggatgggaaagtacctggcgaccgctggcggatgaaaattttc

SEQ ID NO: 225287 - DNA, 75 bp, synthetic construct
  source 1..75: mol_type = other DNA
ctggccttgacgatactagagggatttcttacagggaatacagcctagagtggctgacatttacatcggttatga

SEQ ID NO: 225288 - DNA, 75 bp, synthetic construct
  source 1..75: mol_type = other DNA
cttttataaccccatttgatagcagcgaagaacccaaccaaccgacgcttaattttacatgcaatgaatttcctg

SEQ ID NO: 225289 - DNA, 75 bp, synthetic construct
  source 1..75: mol_type = other DNA
gatgttattcctgatgataatgattgcgggtaagcgtgcagcaagaaccgtattgacggggatgtgttattcagt

SEQ ID NO: 225290 - DNA, 75 bp, synthetic construct
  source 1..75: mol_type = other DNA
gtcagccagcggttaacgccggggaactgggatgacgaaccacagccgtttattggcgggctgatttctgaacag

SEQ ID NO: 225291 - DNA, 75 bp, synthetic construct
  source 1..75: mol_type = other DNA
ggcgattggctttatcattgttatgctcttcctggcggtacgctggttacaacggcaacttgccgggcaagaatt

SEQ ID NO: 225292 - DNA, 75 bp, synthetic construct
  source 1..75: mol_type = other DNA
aacaggtttatacccagtcccgcaatggcagctaccgtccggttggtactagcgatctgtttcgcgagctgactg

SEQ ID NO: 225293 - DNA, 75 bp, synthetic construct
  source 1..75: mol_type = other DNA
cgtgtgatatctggggcaaaaaggccggggatagtggcgatcaatatttaagtgaaaaccttacacgatcaaggt

SEQ ID NO: 225294 - DNA, 75 bp, synthetic construct
  source 1..75: mol_type = other DNA
acgttgatgcagtgtgaaaaatcgcaacgaaaacgcataattattgaacttgcagaggctgatgttggtcaacat

SEQ ID NO: 225295 - DNA, 75 bp, synthetic construct
  source 1..75: mol_type = other DNA
gtgactttgctgggctgttcgctaagtttctacaacgccattcagtataagtttagtcatcgcgttcaggcggtg

SEQ ID NO: 225296 - DNA, 75 bp, synthetic construct
  source 1..75: mol_type = other DNA
gctggaaacccgggctactcgtatcttaaacggtgagcgtggctctaatgtgttgggaaccatctatgaatggcc

SEQ ID NO: 225297 - DNA, 75 bp, synthetic construct
  source 1..75: mol_type = other DNA
atcggcagtgatttacacctttgtctggcctgaaagcgaagcacgcacactaccgcaaaaactggctggcgcgct

SEQ ID NO: 225298 - DNA, 75 bp, synthetic construct
  source 1..75: mol_type = other DNA
tgttgctggcgtgccggatgaagaagtgttcgggccgctattgcgcgtctggcgttatgacactttcgatgaagc

SEQ ID NO: 225299 - DNA, 75 bp, synthetic construct
  source 1..75: mol_type = other DNA
tagcctggagtcagacacgttaacgttgcccactacgcttaaccccggtctggatttctccgatgaggtggtgcc

SEQ ID NO: 225300 - DNA, 75 bp, synthetic construct
  source 1..75: mol_type = other DNA
agaagcgaccaatcaacttcccccggctttatctaaggcgctcggtaagttgaacctcacagttaagcccgtcat

SEQ ID NO: 225301 - DNA, 75 bp, synthetic construct
  source 1..75: mol_type = other DNA
gtgaccgggttcaggtggtggctgcactgatggccatcggggatgagctgcgccggctgcgtctggccgtcaggg

SEQ ID NO: 225302 - DNA, 75 bp, synthetic construct
  source 1..75: mol_type = other DNA
accgccatcgaaaacgtcaggtcttccgacactggcaccgccgctgttgcgccagttcgcttcggtcggcaataa

SEQ ID NO: 225303 - DNA, 75 bp, synthetic construct
  source 1..75: mol_type = other DNA
atacctacgactctgataacttcatgcagcagcgtggtaacggtttcgcgacctaccgtaacacagacttcttcg

SEQ ID NO: 225304 - DNA, 75 bp, synthetic construct
  source 1..75: mol_type = other DNA
attaatgggccgactgcgcaaaaaaattcaggcgcaatatccgcacgaagtcattaccaccgttcgcggccaggg

SEQ ID NO: 225305 - DNA, 75 bp, synthetic construct
  source 1..75: mol_type = other DNA
gtcatttcgctacccccgtttcaggttgatctctctcgccgtgaattatctattaatgacgaagtgatcaaactg

SEQ ID NO: 225306 - DNA, 75 bp, synthetic construct
  source 1..75: mol_type = other DNA
tgatgacgcctcctggcttccggcattttcgcctgcggagcttaaacaggcagtacacgataatctgcgtaacct

SEQ ID NO: 225307 - DNA, 75 bp, synthetic construct
  source 1..75: mol_type = other DNA
ttatggcgcgatgcaactggcaggtcctggggtttttggccccccaagagatcgtcatgtcgctataactgtgct

SEQ ID NO: 225308 - DNA, 75 bp, synthetic construct
  source 1..75: mol_type = other DNA
cagcctgaccgtgctggcagagatgcaacaacaaggcctggtaaaacatattggcctgagcaacgtcacaccgac

SEQ ID NO: 225309 - DNA, 75 bp, synthetic construct
  source 1..75: mol_type = other DNA
aaaagccgttgccatgattgccgaaaacctgccgctggccgttgaagatggcagcaacgccaaagcgcgtgaagc

SEQ ID NO: 225310 - DNA, 75 bp, synthetic construct
  source 1..75: mol_type = other DNA
cgtgactccgctgctttctgtcaatgactcctcgctgatgatcggtatgccgaagtcactgaccgccgccactgg

SEQ ID NO: 225311 - DNA, 75 bp, synthetic construct
  source 1..75: mol_type = other DNA
ggtatggcgttcaataatgcttctctgggttatgttcatgcgatggcgcaccagctgggcggtttctacaacctg

SEQ ID NO: 225312 - DNA, 75 bp, synthetic construct
  source 1..75: mol_type = other DNA
gcggtgctggcgaccaatgccctgaaagacgcctgcggttttactaacccgattcaggcaactcacgaagaaatt

SEQ ID NO: 225313 - DNA, 75 bp, synthetic construct
  source 1..75: mol_type = other DNA
tggtggcagccaacggtggtgatattcgcgattacgaaggcgttgatcgctctgcaaaaccgcagttgccgatga

SEQ ID NO: 225314 - DNA, 75 bp, synthetic construct
  source 1..75: mol_type = other DNA
gctgaatgttaaagatgaggatattccggagctggcccgaaatgcactgaaagacgcctgtgggctaacgaatcc

SEQ ID NO: 225315 - DNA, 75 bp, synthetic construct
  source 1..75: mol_type = other DNA
aatacaacattgctcatcgtgctgatgacgcaatgattgatgctttggcccgcgaaggcattgcctatgtgccgt

SEQ ID NO: 225316 - DNA, 75 bp, synthetic construct
  source 1..75: mol_type = other DNA
atcaaggtaactaaattccatggcattacagatgtagctgaacaagccaaaaagctaggccataacgagcaagaa

SEQ ID NO: 225317 - DNA, 75 bp, synthetic construct
  source 1..75: mol_type = other DNA
ccgaaccaaccaatggcgtaaagatgcttggaatggaccgtaacaccggtaaacttttatcggggactgatcaca

SEQ ID NO: 225318 - DNA, 75 bp, synthetic construct
  source 1..75: mol_type = other DNA
gatcctcagagtccttggcagcggggaacaaatgagaacacaaatgggctaattcggcagtactttcctaaaaag

SEQ ID NO: 225319 - DNA, 75 bp, synthetic construct
  source 1..75: mol_type = other DNA
tatataccagcgatcacctggcatgcgcgttttgcctacgacaaagaaaaaatcgaacattataacgagcggccg

SEQ ID NO: 225320 - DNA, 75 bp, synthetic construct
  source 1..75: mol_type = other DNA
attacaaacagatgtgatttcctatactacaaaaaataatagcaattcatcagtaggtgcgcggtttgctatggt

SEQ ID NO: 225321 - DNA, 75 bp, synthetic construct
  source 1..75: mol_type = other DNA
caaggacaaaggagattatatatatagaaaccgcaaaggaaattgataaaatatttgatgattttaaccgggatg

SEQ ID NO: 225322 - DNA, 75 bp, synthetic construct
  source 1..75: mol_type = other DNA
ctgctggttatgccctggctggataatattgtcgaattactgtttgctcttgctccgattttcctgttgggcgcg

SEQ ID NO: 225323 - DNA, 75 bp, synthetic construct
  source 1..75: mol_type = other DNA
caacagaccgagaaagacactgaagttcaaaacaccgaaagagataattgaaaggggtgttgcattgacagattg

SEQ ID NO: 225324 - DNA, 75 bp, synthetic construct
  source 1..75: mol_type = other DNA
tgacgcaatgattgatgctttggctcgtgacggcattgcctacgtgccgttctttccgctcgggggctttacgcc

SEQ ID NO: 225325 - DNA, 75 bp, synthetic construct
  source 1..75: mol_type = other DNA
gtgctgggctttgaagttgatcatgaacgcaacctggctgcacgtttcggcaaatctggtttcatcaataaagaa

SEQ ID NO: 225326 - DNA, 75 bp, synthetic construct
  source 1..75: mol_type = other DNA
tgaactgcggtagttcttcactgaaatttgcaatcatcgatgcagtaaatggtgaagagtacctttctggtttag

SEQ ID NO: 225327 - DNA, 75 bp, synthetic construct
  source 1..75: mol_type = other DNA
gtatcgttgtcggcctctatccaaccttgctgatgacgttaatcggcgtgctgtggtttcccagccgcgccatta

SEQ ID NO: 225328 - DNA, 75 bp, synthetic construct
  source 1..75: mol_type = other DNA
cggaagaagcgtcacagggtgggctggcgcttggtggcggactggcagcggggctgacgctttccctgaaatctt

SEQ ID NO: 225329 - DNA, 75 bp, synthetic construct
  source 1..75: mol_type = other DNA
ccgaggggaaacaacccatatgcgtcgaatcctgcccgctgcgtgcacttgagttcggtccaattgaagagctgc

SEQ ID NO: 225330 - DNA, 75 bp, synthetic construct
  source 1..75: mol_type = other DNA
cttggcggtgagatgatcgggcgtgtgctcttttatggtctgcacatgacggtaggaatggctattgcaggttaa

SEQ ID NO: 225331 - DNA, 75 bp, synthetic construct
  source 1..75: mol_type = other DNA
caatcacccgttcgcgggcgagatccgcagtggttacatcgacgtgtcgattgtgccggaagagctgggatttgc

SEQ ID NO: 225332 - DNA, 75 bp, synthetic construct
  source 1..75: mol_type = other DNA
acgttaagcgaacaggtgtacttaaggcaatatttggtgatgatgccgaaacccttcaggtggtcaatgcactaa

SEQ ID NO: 225333 - DNA, 75 bp, synthetic construct
  source 1..75: mol_type = other DNA
cgcctccggggatgcgggttatggaaacgcgatccagcggttttgatataaatcacgatgttggctatacgcata

SEQ ID NO: 225334 - DNA, 75 bp, synthetic construct
  source 1..75: mol_type = other DNA
agtgaagcgcgcacgctgccgcaaaaactggctggcgcgctgggtatgttaagtaaagtaatgcggatcccacgc

SEQ ID NO: 225335 - DNA, 75 bp, synthetic construct
  source 1..75: mol_type = other DNA
cagaaactcggggtacagctcgattttactgacggcaaaggaagttttggcggtcttgataacatgttcaggcaa

SEQ ID NO: 225336 - DNA, 75 bp, synthetic construct
  source 1..75: mol_type = other DNA
gcgaacggcgaggttggaaagagctttcaggacatcaataaactggctattggcctgggtaaccagctacccggt

SEQ ID NO: 225337 - DNA, 75 bp, synthetic construct
  source 1..75: mol_type = other DNA
gattgacattcacaatctgaaatcaactaaaagccgatatcgacatgttaagaagaaattaggacgaaaggaggg

SEQ ID NO: 225338 - DNA, 75 bp, synthetic construct
  source 1..75: mol_type = other DNA
cgatgcttttaccaatccagactatatgcgctacgcggtaaaaacactgctcgcctgtttgatctgttacacctt

SEQ ID NO: 225339 - DNA, 75 bp, synthetic construct
  source 1..75: mol_type = other DNA
aaatatcacgcaatggctgggggagttgggggaaaaattcacgaagtttgcggatgaaaatccccgggttattcg

SEQ ID NO: 225340 - DNA, 75 bp, synthetic construct
  source 1..75: mol_type = other DNA
gggctggatgtgtcggtgcaggcccgcctgctcgacctgctgcgcggcctggtggtggagctgaacctcgcggtg

SEQ ID NO: 225341 - DNA, 75 bp, synthetic construct
  source 1..75: mol_type = other DNA
cctcaatttcctgacgggctgtttccttttgcggagtcgcacaaaggcgaacgccggccgttacgccggaggctc

SEQ ID NO: 225342 - DNA, 75 bp, synthetic construct
  source 1..75: mol_type = other DNA
aagaatttctccaaatgcgggcggctggagcatggctttctacgggttcgctgcgagtcttgccacgccgagcac

SEQ ID NO: 225343 - DNA, 75 bp, synthetic construct
  source 1..75: mol_type = other DNA
acccttctctatcagatcgttgacgagtattacccggcattcgctgcgcttatggcagagcagggaaaggaattg

SEQ ID NO: 225344 - DNA, 75 bp, synthetic construct
  source 1..75: mol_type = other DNA
gaataccggcgcggggatacacaccttatccggcggtagatccggctcagtcaaacaacgcctccgatgccacag

SEQ ID NO: 225345 - DNA, 75 bp, synthetic construct
  source 1..75: mol_type = other DNA
ggtgcttatgatgcttatgggacgggaataccgccacggggatacactccttatccggcggtggatccggctcag

SEQ ID NO: 225346 - DNA, 75 bp, synthetic construct
  source 1..75: mol_type = other DNA
ctacttgctctgcctgccggcgctgcgtcgcgggcttggagaaattcttcaaattcccgttgcacatagcccggc

SEQ ID NO: 225347 - DNA, 75 bp, synthetic construct
  source 1..75: mol_type = other DNA
caatcacccgttcgcaggcgaaattcgcagtggctatatcgatatatttattgtgccggaagagctgggatttgc

SEQ ID NO: 225348 - DNA, 75 bp, synthetic construct
  source 1..75: mol_type = other DNA
ctcgaacggcgtatctccgccgtttataaagacattcccggcggccaactgcttggcccaacctacgactacacc

SEQ ID NO: 225349 - DNA, 75 bp, synthetic construct
  source 1..75: mol_type = other DNA
ccgtcgccgcacgttttcagcctgctggcgcgtcaggggctggcgaagtttgaagaggatagcggcgcacagccg

SEQ ID NO: 225350 - DNA, 75 bp, synthetic construct
  source 1..75: mol_type = other DNA
aggctgtcgccagaacggattactggcagtctgtacaggcgcaggccggatatgtctacctcagctggaatgccg

SEQ ID NO: 225351 - DNA, 75 bp, synthetic construct
  source 1..75: mol_type = other DNA
cgctgcgtcaggcgcgccttgatttattaaccggtaaacgggttgtgtcggtacagaaagacggtcgcaggatcg

SEQ ID NO: 225352 - DNA, 75 bp, synthetic construct
  source 1..75: mol_type = other DNA
attcttttacctggaacctctaccagtacttttgtgaactggggacggatgtgctggttaagcgcaacgatgcgt

SEQ ID NO: 225353 - DNA, 75 bp, synthetic construct
  source 1..75: mol_type = other DNA
cgggcaccatatcaccgcactggctaaccgtctgttgaggatcagacaggcccggttcagtgccattgatcggga

SEQ ID NO: 225354 - DNA, 75 bp, synthetic construct
  source 1..75: mol_type = other DNA
ctggcagagtgtgtggctcaccttcctgaagcgttgttgccggagcgccgtaaaagaaggaattatatcagcagc

SEQ ID NO: 225355 - DNA, 75 bp, synthetic construct
  source 1..75: mol_type = other DNA
atgaacgatgtacaaaaccgtagaatactggcattacttgatatgctgtataatactctgggcaacaaaaccact

SEQ ID NO: 225356 - DNA, 75 bp, synthetic construct
  source 1..75: mol_type = other DNA
caggcggacagcatccgcagccggatcctgcagacgtctgaggtgccatggcaggtcatcaccgcagaggacgcc

SEQ ID NO: 225357 - DNA, 75 bp, synthetic construct
  source 1..75: mol_type = other DNA
cgttgtacgaacatccgttaccgttggtgattgtgggtggtgcggggagtggtaagacggcgctggtactggaaa

SEQ ID NO: 225358 - DNA, 75 bp, synthetic construct
  source 1..75: mol_type = other DNA
agtgcagcacgactggcagagtgtgtggcccaccttcctgaagcgttgctgccggaacgtcgcaaacgaagaagt

SEQ ID NO: 225359 - DNA, 75 bp, synthetic construct
  source 1..75: mol_type = other DNA
atgtcagccaaagtatgggttttaggggatgcggttgtcgatctcttgcctgaatcagacgggcgcctactgcct

SEQ ID NO: 225360 - DNA, 75 bp, synthetic construct
  source 1..75: mol_type = other DNA
ccatcctgcccaccttattaaaacaggagcaacacgtctgccagcttttcgcccgcttgccagactggacagccc

SEQ ID NO: 225361 - DNA, 75 bp, synthetic construct
  source 1..75: mol_type = other DNA
agcaacgttactggaagatcaggagaaagtaggtacccacgggatcgtgatgatgattcgtctaccggatttcaa

SEQ ID NO: 225362 - DNA, 75 bp, synthetic construct
  source 1..75: mol_type = other DNA
cgctgaaaaactgcagagtctccgcatttgaagcgcagcaggcagggtttctggctaaagcaaaagatgcctggt

SEQ ID NO: 225363 - DNA, 75 bp, synthetic construct
  source 1..75: mol_type = other DNA
caggcgctacaactggcggatgtcgtcaagctctcggaagaagaatggcgactaatcagtggaaaaacacagaac

SEQ ID NO: 225364 - DNA, 75 bp, synthetic construct
  source 1..75: mol_type = other DNA
ttgtgtcgatagcacggggggcgggagatgcgttcgttgccgggttactcacaggtctgtcctctacgggattat

SEQ ID NO: 225365 - DNA, 75 bp, synthetic construct
  source 1..75: mol_type = other DNA
ctgcaggaggagatttccagccgtgatgagtggcagaaaactgcacatttgcttgagaaacaagggaagcaggag

SEQ ID NO: 225366 - DNA, 75 bp, synthetic construct
  source 1..75: mol_type = other DNA
gcgcggtactgaatatcatcagcccccccatacccgacagtaaagccaccaggctggaaatactctgtaaaaatg

SEQ ID NO: 225367 - DNA, 75 bp, synthetic construct
  source 1..75: mol_type = other DNA
tgagctgaacgcctcttctcgtctggaagtgctcagcggcccgtataaaggtcaggtgctaaatatcatcggtcc

SEQ ID NO: 225368 - DNA, 75 bp, synthetic construct
  source 1..75: mol_type = other DNA
aaggtcaatacggggccgctggcggggcgtgtactgaatatcatcgggcagccgctgccggatgccgccaggaca

SEQ ID NO: 225369 - DNA, 75 bp, synthetic construct
  source 1..75: mol_type = other DNA
gggtatgcagggtgagtcagccggaaacgcccttcgcaaagttatccagtccggtttagacatcaagaaagtcaa

SEQ ID NO: 225370 - DNA, 75 bp, synthetic construct
  source 1..75: mol_type = other DNA
ccgtggggaatattgttcagacttattgcaatagccgcaggttatattattgccaactggagtacggtaggcccg

SEQ ID NO: 225371 - DNA, 75 bp, synthetic construct
  source 1..75: mol_type = other DNA
cagcggcagggagcagttgcaatcgggtgcggaaacggcgcaggcaacgatccgggtgtgggtccgtttccggcg

SEQ ID NO: 225372 - DNA, 75 bp, synthetic construct
  source 1..75: mol_type = other DNA
ccagccagcagcggatgcaaacccagatgcaaacgcagcaaatccagcaaaaagggatgctgaatcagcaactga

SEQ ID NO: 225373 - DNA, 75 bp, synthetic construct
  source 1..75: mol_type = other DNA
cttgattctggaactcttgtgtattccaagaagcaatttataggcgataccgagataacagtgcatctttgccca

SEQ ID NO: 225374 - DNA, 75 bp, synthetic construct
  source 1..75: mol_type = other DNA
cttatcttgtaattcaaggtttcaatcattatgatgtcaatgtttgggatttaatgaatctaattaaaaataaat

SEQ ID NO: 225375 - DNA, 75 bp, synthetic construct
  source 1..75: mol_type = other DNA
agtaaagatgatgtacaagcggctgagcttgtacatgaggccttaaacaacgcaatcaatcgtttgcaccttatg

SEQ ID NO: 225376 - DNA, 75 bp, synthetic construct
  source 1..75: mol_type = other DNA
cactcctgccgtttgtcggctttgcacagcccattaatactctgaataaccctaaccagccggggtatcagatcc

SEQ ID NO: 225377 - DNA, 75 bp, synthetic construct
  source 1..75: mol_type = other DNA
gatgcagactcagcaaatccagcaaaaagggatgctgaatcagcaactgaaaacgcagacgcaattacaacagca

SEQ ID NO: 225378 - DNA, 75 bp, synthetic construct
  source 1..75: mol_type = other DNA
acgctaggatcgtgggaaagcaacgaagtaatgatgcttgaacatatcaataagcacattaaatcacgcatgaaa

SEQ ID NO: 225379 - DNA, 75 bp, synthetic construct
  source 1..75: mol_type = other DNA
atatccgcaactggcaaccggaacaggcactcgatctgatttttgctaatgcctcgctgcaatggctgcccgacc

SEQ ID NO: 225380 - DNA, 75 bp, synthetic construct
  source 1..75: mol_type = other DNA
ggctttggcacaatcgctggagtatgacgctgaatacacgacgcgaaaagggcttctgaaatacagaatttataa

SEQ ID NO: 225381 - DNA, 75 bp, synthetic construct
  source 1..75: mol_type = other DNA
atggcaatcagatagagccgtgtgcggcactggcaaggtcccttgagcatgatgctgaatacacgacgcgaaaag

SEQ ID NO: 225382 - DNA, 75 bp, synthetic construct
  source 1..75: mol_type = other DNA
gtatctggctggttgcaggtatcaccgatatgcgaaatggctttaacggcctggcatcaaaaagttcagaacgtc

SEQ ID NO: 225383 - DNA, 75 bp, synthetic construct
  source 1..75: mol_type = other DNA
gaagagcagtatccactgcaagagaacggagagatactgctggcatttccgcgtctgtttattgttgcccggcgt

SEQ ID NO: 225384 - DNA, 75 bp, synthetic construct
  source 1..75: mol_type = other DNA
cagcggtgacagcgtgattaaacctgcggtgacagcgaaaccacggaagaagaaaacggcattcgatacgcgcaa

SEQ ID NO: 225385 - DNA, 75 bp, synthetic construct
  source 1..75: mol_type = other DNA
gatgctgaatacacgacgcgaaaaggtctgctgatatacaaaatctggaatgagagtttaactcgcggacctgat

SEQ ID NO: 225386 - DNA, 75 bp, synthetic construct
  source 1..75: mol_type = other DNA
ttggttccatttctggttcagccgttgcggcagctgctgccgttggtggcacactgaatcccattcagaccaaac

SEQ ID NO: 225387 - DNA, 75 bp, synthetic construct
  source 1..75: mol_type = other DNA
ggcttttgtccatctggaacctcgcgaatgcttaacgccagacagcctcaagcacccgacgccattctatacctg

SEQ ID NO: 225388 - DNA, 75 bp, synthetic construct
  source 1..75: mol_type = other DNA
ttaaaccaatggattatgataatttatataaattcagtcctgataaaatgatgtcaacaattgttgctgatttta

SEQ ID NO: 225389 - DNA, 75 bp, synthetic construct
  source 1..75: mol_type = other DNA
ttgcagattatgaattaaaaatgatccagtatctgaaaagaaagcacaagataaaaaatataacaacaccaaaga

SEQ ID NO: 225390 - DNA, 75 bp, synthetic construct
  source 1..75: mol_type = other DNA
gtgagtgagtcaaaatgccaaattaatggcaacaagatagaaccgtgcgcggcgctggcacaatctctggagcag

SEQ ID NO: 225391 - DNA, 75 bp, synthetic construct
  source 1..75: mol_type = other DNA
ggatgattgatacgctggtggatgacttaaaaacgcgagggcgttacgactacgtgatttgcgatagcgttttga

SEQ ID NO: 225392 - DNA, 75 bp, synthetic construct
  source 1..75: mol_type = other DNA
aaaattccatcatggttttatgagaaaggtttaattttcgatcataaccgtatttcacatgccagtaactggtat

SEQ ID NO: 225393 - DNA, 75 bp, synthetic construct
  source 1..75: mol_type = other DNA
agatctgttggatctgatggcgaaggtcgggcaacacatctttatattgatgggaatccttcaaaattccttcag

SEQ ID NO: 225394 - DNA, 75 bp, synthetic construct
  source 1..75: mol_type = other DNA
acataatggcaaaataataacctattataattataaaccaaatgataaattttacgattctgtgcttagtttata

SEQ ID NO: 225395 - DNA, 75 bp, synthetic construct
  source 1..75: mol_type = other DNA
agaattactttctttcggaatagatattaacttttattgtgagtcaccggattctaataacgttgttccgttggt

SEQ ID NO: 225396 - DNA, 75 bp, synthetic construct
  source 1..75: mol_type = other DNA
gcactgtttacttagggaaaaactcccgtcgttggagcctgaaattttattcaaaatatgatgagcatacatctg

SEQ ID NO: 225397 - DNA, 75 bp, synthetic construct
  source 1..75: mol_type = other DNA
ctgtttccgggccgcgctgctgggtgggatttgatccttcgcgtggcgtggatagttcagccgtgtacggagtac

SEQ ID NO: 225398 - DNA, 75 bp, synthetic construct
  source 1..75: mol_type = other DNA
cgtcctgtgcctgccgttgctgctgacaggttgcgggagctcgaaaaacgcacccgtgccatcggtggtgatcct

SEQ ID NO: 225399 - DNA, 75 bp, synthetic construct
  source 1..75: mol_type = other DNA
aatcaatgatgtatcgtaatgggcgaaaggcaatttttttaccgatgaggttaagtgacattatgggaaatgata

SEQ ID NO: 225400 - DNA, 75 bp, synthetic construct
  source 1..75: mol_type = other DNA
ctggttttttatctggttttttgtttttaactgtgctgtttattcttctctgaaggcaataaatataaaagatat

SEQ ID NO: 225401 - DNA, 75 bp, synthetic construct
  source 1..75: mol_type = other DNA
tataattataatgataagttacacgattctgtgcttagtttatataaaaaacttggagtgcaggatttgaaaact

SEQ ID NO: 225402 - DNA, 75 bp, synthetic construct
  source 1..75: mol_type = other DNA
ataatgacgttatgcattgccgcgataaggacaaaattataacttattataattataaattaaatgataaatttt

SEQ ID NO: 225403 - DNA, 75 bp, synthetic construct
  source 1..75: mol_type = other DNA
tatgacgatttgcgcaagggcgaggatatcggcatggtcaaatctgaccgtcctaaccccaatcttgaaaccttt

SEQ ID NO: 225404 - DNA, 75 bp, synthetic construct
  source 1..75: mol_type = other DNA
gacttttgttggcggtaactgtaccgtaagcctgatgttgatgtcgttgggtggtttattcgccaatgatcttgt

SEQ ID NO: 225405 - DNA, 75 bp, synthetic construct
  source 1..75: mol_type = other DNA
gatgtcgttgggcggtttattcgctaatgatcttgttgattgggtctccgttgcgacttaccaggcggcttctgg

SEQ ID NO: 225406 - DNA, 75 bp, synthetic construct
  source 1..75: mol_type = other DNA
gatcttgttgattgggtgtccgttgcaacctaccaggccgcttccggcggtggtgcgcgacatatgcgtgagtta

SEQ ID NO: 225407 - DNA, 75 bp, synthetic construct
  source 1..75: mol_type = other DNA
ggtatgcctacccgttccacaatcctgaaatggtttagggatgtaccggaattctcgatcatgtacgcgcgcgcg

SEQ ID NO: 225408 - DNA, 75 bp, synthetic construct
  source 1..75: mol_type = other DNA
attgcagaactggagaaaagcgaagagcaactcattaacgagcgtgaccatgctgagtctgctttagatgatatg

SEQ ID NO: 225409 - DNA, 75 bp, synthetic construct
  source 1..75: mol_type = other DNA
cgaacgcgtcacacaggagatcgtcggtaacaaggaagaagcacccgtccaggtagaagtaaatcagactactgt

SEQ ID NO: 225410 - DNA, 75 bp, synthetic construct
  source 1..75: mol_type = other DNA
gcctccggcaactggtatgttcgcaacgtcacccatacgaaagcagcaaatctgcggttgataaatacccactcg

SEQ ID NO: 225411 - DNA, 75 bp, synthetic construct
  source 1..75: mol_type = other DNA
gaccggtttaaaatacaatggttcaggaaccatctatcagcaaagcctcggctacattgataacggttacaacac

SEQ ID NO: 225412 - DNA, 75 bp, synthetic construct
  source 1..75: mol_type = other DNA
ttactggattgacgcagcatcgtctctgcgcatgaaagatgacgccatcatcattcttgaccccgtcaatcagga

SEQ ID NO: 225413 - DNA, 75 bp, synthetic construct
  source 1..75: mol_type = other DNA
gccatgtggcagatgaactcgcgaccccgtcctctgctattctcgatatcgaacgcaaagtcacaactttaaccc

SEQ ID NO: 225414 - DNA, 75 bp, synthetic construct
  source 1..75: mol_type = other DNA
atagaaatcgcgatgaaggctattggtgtaccggttcagtggactaatggcgatgcggaaaagcgcatgacagga

SEQ ID NO: 225415 - DNA, 75 bp, synthetic construct
  source 1..75: mol_type = other DNA
gagtgccgccgccatcaactgatgattgaaacgcgtaaatggctactggcaaaactgcaaccgcgtaaatatggt

SEQ ID NO: 225416 - DNA, 75 bp, synthetic construct
  source 1..75: mol_type = other DNA
gggaattgagttgcctgcggtagtgccggctggaccggataatccaatgggccatcatgcgattcgtctggcggc

SEQ ID NO: 225417 - DNA, 75 bp, synthetic construct
  source 1..75: mol_type = other DNA
taaagatgcagcacaaactgacgctgaagtgatgcaacatgtgatggatgtccgttccgggatgccggtggatgt

SEQ ID NO: 225418 - DNA, 75 bp, synthetic construct
  source 1..75: mol_type = other DNA
acgctcaatagtgcgatgcaggcatttaaaaatgcagcgcaaactgacgccgaagtaatgcagcatgtgatggat

SEQ ID NO: 225419 - DNA, 75 bp, synthetic construct
  source 1..75: mol_type = other DNA
atgcttctcaaagatccagcattccgggctgcttatgaagctgagagccagaacccgcaatccggttaccagatt

SEQ ID NO: 225420 - DNA, 75 bp, synthetic construct
  source 1..75: mol_type = other DNA
acatcgcccgacgtttgaaatgatgtgcgcattcgcgaaggtgcttaatgtgccggaatgctatttctacgcggt

SEQ ID NO: 225421 - DNA, 75 bp, synthetic construct
  source 1..75: mol_type = other DNA
tggaagccatcgccaaaaaatataacgtcggctttctcgctctgttacaggctaaccccggcgttgatccttacg

SEQ ID NO: 225422 - DNA, 75 bp, synthetic construct
  source 1..75: mol_type = other DNA
gatttcggtattggtatgcgggtaagctctggctgcatccgtttgcgcgatgacgatatcaaaacacttttcagc

SEQ ID NO: 225423 - DNA, 75 bp, synthetic construct
  source 1..75: mol_type = other DNA
gtgcttgcgggtattgaagaggaaacggcgcgctcccgcgtgtctcagtatgagggcgggatacaccggccaaca

SEQ ID NO: 225424 - DNA, 75 bp, synthetic construct
  source 1..75: mol_type = other DNA
gattgcaaacacagttctactgataatattcattatctatataatttctcatgcttcggccgaaatgatcgcccc

SEQ ID NO: 225425 - DNA, 75 bp, synthetic construct
  source 1..75: mol_type = other DNA
gagacacattgacgccaacaatggtaactaccgtttcggacaagcgagctaacccaacatggacacctaccgcaa

SEQ ID NO: 225426 - DNA, 75 bp, synthetic construct
  source 1..75: mol_type = other DNA
aacgctgctgccggatgcgccacgtgaaggcattgtgatcaatattgcagagttacgtctctattattatccacc

SEQ ID NO: 225427 - DNA, 75 bp, synthetic construct
  source 1..75: mol_type = other DNA
gaaggcattgtgatcaatattgcggagctgcgtctctattactacccgccgggtaaaaattcggtaaccgtgtat

SEQ ID NO: 225428 - DNA, 75 bp, synthetic construct
  source 1..75: mol_type = other DNA
aacatcttggggagcgaaggttgatgctgcagtggtgggctgattatctggatgccaatcgggagaaggcggtaa

SEQ ID NO: 225429 - DNA, 75 bp, synthetic construct
  source 1..75: mol_type = other DNA
ccatcgtgtgctaaaaagtctggaagataatctttttgcagcgcttggtgaacgtaatattgctgagttaaaaac

SEQ ID NO: 225430 - DNA, 75 bp, synthetic construct
  source 1..75: mol_type = other DNA
gttctaagtactggcgtttgcagtaccgttatgagggaaagcaaaagatgctagcacttggggtttatcctgaaa

SEQ ID NO: 225431 - DNA, 75 bp, synthetic construct
  source 1..75: mol_type = other DNA
ggtgcgcttggtgaatcaggattatggagcgatgatgcgatagaacggcagttgagtcatacagagcgtaacaat

SEQ ID NO: 225432 - DNA, 75 bp, synthetic construct
  source 1..75: mol_type = other DNA
gatcgtctcgcttttggtgtttggcctactgtgacgcttgctcaggcaagagcaaaacgcgatgaagctaaaaag

SEQ ID NO: 225433 - DNA, 75 bp, synthetic construct
  source 1..75: mol_type = other DNA
tctgcgccaactttgatgaaacgctggcgatgttgaaggcgggggatgtggtgtattgcgatccgccgtatgacg

SEQ ID NO: 225434 - DNA, 75 bp, synthetic construct
  source 1..75: mol_type = other DNA
tcggttcgtccgacattcggcagcttaaaaccagccacctgttagccccgattaaaaaagttgatgccagtggca

SEQ ID NO: 225435 - DNA, 75 bp, synthetic construct
  source 1..75: mol_type = other DNA
taaagttatgagtgaaaacacggttaacagtgctttgcgcacaatggggtatgacacaaaaaccgaagtttgcgg

SEQ ID NO: 225436 - DNA, 75 bp, synthetic construct
  source 1..75: mol_type = other DNA
agagaatgctggtgcttataattttgaaactattgctcgtgaatggcacgccagcaacaaacgttggagtgagga

SEQ ID NO: 225437 - DNA, 75 bp, synthetic construct
  source 1..75: mol_type = other DNA
agttaatgctggtgcttataattttgaaactattgctcgtgaatggcatgccagcaataagcgttggagtgagga

SEQ ID NO: 225438 - DNA, 75 bp, synthetic construct
  source 1..75: mol_type = other DNA
attaaaaaagttgatgcaagtggtaagcatgacgtcgcgcagcgacttcagcagcgtgtcacggctatcatgcgt

SEQ ID NO: 225439 - DNA, 75 bp, synthetic construct
  source 1..75: mol_type = other DNA
aatagtgcgttacgcgccatgggttacgacactaaaaccgaagtttgtgggcatggattcaggacgatggcgcgt

SEQ ID NO: 225440 - DNA, 75 bp, synthetic construct
  source 1..75: mol_type = other DNA
atatcgttccgcttagtctgcaggcgatggctttgttagagcagcttaagcagatgagtggtgataaagagctgc

SEQ ID NO: 225441 - DNA, 75 bp, synthetic construct
  source 1..75: mol_type = other DNA
ctcaatatgaccggctctccggtaggcgcgatgaaagtgtttttaatcttctacatcgtttgtgtgctgctgacc

SEQ ID NO: 225442 - DNA, 75 bp, synthetic construct
  source 1..75: mol_type = other DNA
tctcctcctgccgatacattcgctggctcattaaatggtattgcgggacttatcaccgacgattccagccaaatg

SEQ ID NO: 225443 - DNA, 75 bp, synthetic construct
  source 1..75: mol_type = other DNA
cagcatcggtgtggcagctggcgagggtaaatcagcaacagaaatcatcgctgtttccgggccgcgctgctgggt

SEQ ID NO: 225444 - DNA, 75 bp, synthetic construct
  source 1..75: mol_type = other DNA
ccatgctggaaacgcgtcgggcatcagtcatgtatttttcagatcacggtctggagtatgacccgacaaaagaac

SEQ ID NO: 225445 - DNA, 75 bp, synthetic construct
  source 1..75: mol_type = other DNA
gtaatctgaacagccttgatacccgtatggtgccacaggccagcgcatgggcgatgaaccgtgtggcggcaaagg

SEQ ID NO: 225446 - DNA, 75 bp, synthetic construct
  source 1..75: mol_type = other DNA
atgaaggggcttgagaatgctattcgcaatctgaacagccttgatacccgtatggtaccgcaggccagtgcatgg

SEQ ID NO: 225447 - DNA, 75 bp, synthetic construct
  source 1..75: mol_type = other DNA
tttcaggctacggagacattacgatcacccgaaggcgcttttctcagatcgtcaaagcattggctggtagtcgcc

SEQ ID NO: 225448 - DNA, 75 bp, synthetic construct
  source 1..75: mol_type = other DNA
ttgaaacaggaaaggacagtaaggggcggcccagaaaaaatcgtctgcccgtggaggttgtgaaaattccgctgg

SEQ ID NO: 225449 - DNA, 75 bp, synthetic construct
  source 1..75: mol_type = other DNA
gaaggactgagagtgggaaaatactttttccgggggcatttgttcagcaactggcgaatggccgctggcatgttc

SEQ ID NO: 225450 - DNA, 75 bp, synthetic construct
  source 1..75: mol_type = other DNA
tgagttacgtttcgcgcgttgggatgagtttgacttcgataaatctctctggcgagtacctgcaaaacgagaaga

SEQ ID NO: 225451 - DNA, 75 bp, synthetic construct
  source 1..75: mol_type = other DNA
gatggttcagtggtgggctgattatcttgatattattaagtatgagcatatcacgccctatgaatatgcaaaagt

SEQ ID NO: 225452 - DNA, 75 bp, synthetic construct
  source 1..75: mol_type = other DNA
tggtgcgctatcgacaaccaaagtgcggcattacccagctttaccctctaatcggttccctgagtttcttgcacg

SEQ ID NO: 225453 - DNA, 75 bp, synthetic construct
  source 1..75: mol_type = other DNA
ggtgctttgggtgagtcagggttatggagtgatgatgcgattgagcgccagttaagccactcagaacgtaacaat

SEQ ID NO: 225454 - DNA, 75 bp, synthetic construct
  source 1..75: mol_type = other DNA
ggcgtatacctgcaaagcgagaagaaattaaaggtgtgcgttactcgtatcgtggcatgaagatgaaagaggagc

SEQ ID NO: 225455 - DNA, 75 bp, synthetic construct
  source 1..75: mol_type = other DNA
acagcgcgttacggccattatgcgttatgccgtgcagaacgattacatcgactcaaatccagccagtgatatggc

SEQ ID NO: 225456 - DNA, 75 bp, synthetic construct
  source 1..75: mol_type = other DNA
cctggtggaccccgtctctctcccgtgatgccctgtgcgtggtgtttaaagtaggtgcttatggcagggaaataa

SEQ ID NO: 225457 - DNA, 75 bp, synthetic construct
  source 1..75: mol_type = other DNA
ccagacctgatgagtcatgccctgaaggaccggcgattgccgcaatgattgaagccgctgaacgcgagttaagaa

SEQ ID NO: 225458 - DNA, 75 bp, synthetic construct
  source 1..75: mol_type = other DNA
ttccttgcacacaccgaccgttaccggccggtagtgtcgtcagcgttgatgctgacggtgcagtggagtgggaaa

SEQ ID NO: 225459 - DNA, 75 bp, synthetic construct
  source 1..75: mol_type = other DNA
taaaaccagccacctgttagccccgattaaaaaagttgatgccagtggtaagcatgacgttgcgcagcgtcttca

SEQ ID NO: 225460 - DNA, 75 bp, synthetic construct
  source 1..75: mol_type = other DNA
tactaccgccatcatgcgctatgcagtgcaaagtgggttaattgattataacccggcacaagagatggctggggc

SEQ ID NO: 225461 - DNA, 75 bp, synthetic construct
  source 1..75: mol_type = other DNA
tttttatccgttcaagcgagctgcgatttgcccgttggtcagaagtagatttcgaaacggccatgtggacgattc

SEQ ID NO: 225462 - DNA, 75 bp, synthetic construct
  source 1..75: mol_type = other DNA
cggcttcactgaagatgaccattatcacctggcatccgttcttgaacatcggtcatcagaaggacatccggtcat

SEQ ID NO: 225463 - DNA, 75 bp, synthetic construct
  source 1..75: mol_type = other DNA
caggaaccgtatattaccctggggcgttatattcatgtcaccgcgcgcaaaccgcagagcaaggataaagtatga

SEQ ID NO: 225464 - DNA, 75 bp, synthetic construct
  source 1..75: mol_type = other DNA
cgtgcaggcgggaatgccgaaaaagaaaaaacggacgctttcgccagattatccacgcgacccggcgcaggttta

SEQ ID NO: 225465 - DNA, 75 bp, synthetic construct
  source 1..75: mol_type = other DNA
atgaagctcaatgctaggcaggtcgagaccgcaaaaccaaaagacaaaacctacaaaatggccgatggcggcggt

SEQ ID NO: 225466 - DNA, 75 bp, synthetic construct
  source 1..75: mol_type = other DNA
gtgattgccagcacacaaccggcacaaaccaccgtatatctggagcagccagaagccatcgattacaaacggtga

SEQ ID NO: 225467 - DNA, 75 bp, synthetic construct
  source 1..75: mol_type = other DNA
tggaaacgcccgttgatctgatattgttccatgcggtgctcgagtgggtggccgatccccgcagcgtattgcaga

SEQ ID NO: 225468 - DNA, 75 bp, synthetic construct
  source 1..75: mol_type = other DNA
aatgcgcatggcttgctgatgcataacatggtcgccgggaattttgattacgtgcaggcgggaatgccgaaaaag

SEQ ID NO: 225469 - DNA, 75 bp, synthetic construct
  source 1..75: mol_type = other DNA
ctcaccactacatcaaagcaaaacgcagcatcggtgtagcagctggtgagagtaaatctgcaacagaaatcatcg

SEQ ID NO: 225470 - DNA, 75 bp, synthetic construct
  source 1..75: mol_type = other DNA
ccgcgactggttgaacctttcgcgggttcttgtgctgtgatgatagagacggattacccaagctatcttgttgcg

SEQ ID NO: 225471 - DNA, 75 bp, synthetic construct
  source 1..75: mol_type = other DNA
tctgcaccagctttgatgaaacgctggcgatgttgaaggcgggggatgtggtgtattgcgatccgccgtatgacg

SEQ ID NO: 225472 - DNA, 75 bp, synthetic construct
  source 1..75: mol_type = other DNA
taaggttatgagtgaaaacacggtaaacagcgcattgcgtgcgatgggctatgatactaaaaccgaggtgtgtgg

SEQ ID NO: 225473 - DNA, 75 bp, synthetic construct
  source 1..75: mol_type = other DNA
gaaaccattgcccgcgaatggcatgccagtaacaagcgctggagtgaagaccatcgatcacgagttcttcgctat

SEQ ID NO: 225474 - DNA, 75 bp, synthetic construct
  source 1..75: mol_type = other DNA
agcaaagcgtgatgatgctaaaaagctgctggcgcagggcattgacccaaaagccgaacagaaagaagctcaggc

SEQ ID NO: 225475 - DNA, 75 bp, synthetic construct
  source 1..75: mol_type = other DNA
cagaattgctgatttagaagctaaacagccatcgccagtagtaccggaaggactgattaaagcggtgcgttttta

SEQ ID NO: 225476 - DNA, 75 bp, synthetic construct
  source 1..75: mol_type = other DNA
gaactccattacctcgcccaatttgttcggggtatgggaatcattctggcctatcaacacggtctgccctggctc

SEQ ID NO: 225477 - DNA, 75 bp, synthetic construct
  source 1..75: mol_type = other DNA
atatcattggcgtgggcagctgcccgtcgcgtggtatggataaaggcggggggaacgacctcgaatccgtggtca

SEQ ID NO: 225478 - DNA, 75 bp, synthetic construct
  source 1..75: mol_type = other DNA
tataccgagctgctcaacctggtcaacgaagagatattgcagttgcaggaaaagcttcgccaacaaggggttaaa

SEQ ID NO: 225479 - DNA, 75 bp, synthetic construct
  source 1..75: mol_type = other DNA
cggtaatccagtgtccggaggagcagataagcccgatgatactggggatactgcatccaaagttaaagatatcag

SEQ ID NO: 225480 - DNA, 75 bp, synthetic construct
  source 1..75: mol_type = other DNA
gacttttccggtacgctgactgaagcacgtgagaatggacttaatccgatagacgcgctgtccagcctgatagac

SEQ ID NO: 225481 - DNA, 75 bp, synthetic construct
  source 1..75: mol_type = other DNA
tggtcaaactgcggaatatcagatggtgatgactgttagcgcgtcggtattgattcctggacgagatatctaccc

SEQ ID NO: 225482 - DNA, 75 bp, synthetic construct
  source 1..75: mol_type = other DNA
tctttatggccgagggtaacccacgtattgcgcaggcgacaggcgaaggaattgccgaaatcgtggcgcgttacc

SEQ ID NO: 225483 - DNA, 75 bp, synthetic construct
  source 1..75: mol_type = other DNA
cgttgtggaaaactcggtagtgcttgatggctctgcaatgaatcaaatcattaatattgatatagagaatatgca

SEQ ID NO: 225484 - DNA, 75 bp, synthetic construct
  source 1..75: mol_type = other DNA
cgttgctggaagggctgaaaaaacagttcgatcctaacggcattatgaatacgggtactatctatccgattgaaa

SEQ ID NO: 225485 - DNA, 75 bp, synthetic construct
  source 1..75: mol_type = other DNA
gtgaacgacctcgaatccgtggtcaagtgcgtacaacgcgccattgaccaggcagaattgatggcagattgtcag

SEQ ID NO: 225486 - DNA, 75 bp, synthetic construct
  source 1..75: mol_type = other DNA
tggctgatggcaccgtcacacgcattaaaaacgtgccacgccgcgcggctggcccggacattcgtcacatcatca

SEQ ID NO: 225487 - DNA, 75 bp, synthetic construct
  source 1..75: mol_type = other DNA
caacccgcagtatcgggcagttctccacactctacggcgcaatcgaagatatggtcgttggtctggaagcagtat

SEQ ID NO: 225488 - DNA, 75 bp, synthetic construct
  source 1..75: mol_type = other DNA
ccggaaaaattgcaaccatttacgcaggctatgaggccgcagaagaactttatggggctgttgttggcgatacca

SEQ ID NO: 225489 - DNA, 75 bp, synthetic construct
  source 1..75: mol_type = other DNA
agccgccgtcgaagctgctattgcccgtgccaaagcacgcaagctggaacagcaacaggctaatgcagagccaga

SEQ ID NO: 225490 - DNA, 75 bp, synthetic construct
  source 1..75: mol_type = other DNA
caggctaatgcggtaccagaagaacaggttgatccgcgcaaagtcgccgtcgaagcggctattgcacgcgccaaa

SEQ ID NO: 225491 - DNA, 75 bp, synthetic construct
  source 1..75: mol_type = other DNA
gccaaagcacgcaagctggaacagcaacaggctaatgcggaaccagaagaacaggtcgatccgcgcaaagccgcc

SEQ ID NO: 225492 - DNA, 75 bp, synthetic construct
  source 1..75: mol_type = other DNA
agtaaacctgcaaacgtgcaggtggcgctggatctggatgtgaaaggtttccagcagtgggtggctgaggtgctg

SEQ ID NO: 225493 - DNA, 75 bp, synthetic construct
  source 1..75: mol_type = other DNA
gtacaggtggcattggatctggatgtgaaaggcttccagcagtgggtggctgaggtgctggctctggcgtcgtaa

SEQ ID NO: 225494 - DNA, 75 bp, synthetic construct
  source 1..75: mol_type = other DNA
ctgaccccggcattgacgatgccgtcgccattgccgccgcgatttttgccccggaacttgacctgcaactgatga

SEQ ID NO: 225495 - DNA, 75 bp, synthetic construct
  source 1..75: mol_type = other DNA
tgcggggatgagaggcaaggatgattttgtcaagattctggcgctgaatgaagctgccgccatcacggcgggaag

SEQ ID NO: 225496 - DNA, 75 bp, synthetic construct
  source 1..75: mol_type = other DNA
atccggcctcaatgactttaaaaccgaacaggctaaaaacacgcttgaattttcacaaatggacagcgtgaaaaa

SEQ ID NO: 225497 - DNA, 75 bp, synthetic construct
  source 1..75: mol_type = other DNA
ggtttgttttttgcagacgatggctccttgttctttacccgtgaaggaatgcttaaagtaagcgactcgtcagaa

SEQ ID NO: 225498 - DNA, 75 bp, synthetic construct
  source 1..75: mol_type = other DNA
gatcacgttgacctacggcaccgtatccacgctgcactacacggttcaggcattctgcaaaccgggtgacagcgt

SEQ ID NO: 225499 - DNA, 75 bp, synthetic construct
  source 1..75: mol_type = other DNA
ggttgaagacgcgattaatcagcagcgcaccctgccggaaggtcagcgcgcgggtgatgtggattttaaattcat

SEQ ID NO: 225500 - DNA, 75 bp, synthetic construct
  source 1..75: mol_type = other DNA
ttacggcactggccaccgcaaccagcccggaagaagacgccgccgtcgaaggaagcgaagaacgctggaagcgca

SEQ ID NO: 225501 - DNA, 75 bp, synthetic construct
  source 1..75: mol_type = other DNA
ttatactgttcgtcctctgttgcactgtaaatggaacattatgaaccccggtgacctagaattcttgaaggccac

SEQ ID NO: 225502 - DNA, 75 bp, synthetic construct
  source 1..75: mol_type = other DNA
taatgatcattctattggaataggtcgtggtagatactccgtgtttcccagtatggctattcataaattatgggg

SEQ ID NO: 225503 - DNA, 75 bp, synthetic construct
  source 1..75: mol_type = other DNA
ggatccatatttcgacctgatgacattaatcctaactgatatgaatgctagccctgtctggagttctctcccgga

SEQ ID NO: 225504 - DNA, 75 bp, synthetic construct
  source 1..75: mol_type = other DNA
tcgatgactctcatgctgtcggttttgtcggtgaaaacggccgcggttctcatgaatactgcgacgtgatgggcc

SEQ ID NO: 225505 - DNA, 75 bp, synthetic construct
  source 1..75: mol_type = other DNA
gccattattccggtcatgcttggcgatgctgtagtggcgcaaaaatttgcacgtgaactgcaaaaagagggcatt

SEQ ID NO: 225506 - DNA, 75 bp, synthetic construct
  source 1..75: mol_type = other DNA
agatagtttgttctatcagtccgtataatgaagaaaataaagaattcagtttttcttcagaagagcaaggcactg

SEQ ID NO: 225507 - DNA, 75 bp, synthetic construct
  source 1..75: mol_type = other DNA
aagagagagaatactgtaaagatattgttctagcgtattctaaacttcctttgaaggaaggctataattatcagg

SEQ ID NO: 225508 - DNA, 75 bp, synthetic construct
  source 1..75: mol_type = other DNA
gctttccaattaattccagttgatactgttaatattgaacataagcaattggtttccttaattgttaaaagattt

SEQ ID NO: 225509 - DNA, 75 bp, synthetic construct
  source 1..75: mol_type = other DNA
cgctgataattatttggaaactgtcggaaatagtaacgatcccaaaataaaaattgaagttgatcagaaagcata

SEQ ID NO: 225510 - DNA, 75 bp, synthetic construct
  source 1..75: mol_type = other DNA
taaacagttaggagttagaaactataatctactttccattgaatatgttcttactaagccaaagggaacaggttg

SEQ ID NO: 225511 - DNA, 75 bp, synthetic construct
  source 1..75: mol_type = other DNA
tgtttataatataaaacctgggaacttagtaataaacaatcttgagcctagcgagttaatcgagttatctgttaa

SEQ ID NO: 225512 - DNA, 75 bp, synthetic construct
  source 1..75: mol_type = other DNA
aatccaataactaaagataatgacgttatcggttggcaagctaaattctatgaaacgaaattatcggataacaaa

SEQ ID NO: 225513 - DNA, 75 bp, synthetic construct
  source 1..75: mol_type = other DNA
tggcgttagggattgcctttggcgcggtggaactgtttgacgtctcctttgcgctgggcgcgttcttcgccggga

SEQ ID NO: 225514 - DNA, 75 bp, synthetic construct
  source 1..75: mol_type = other DNA
aggaatacgttgccaaaaaattgaaattaccattcgagatgataaccgaggcaagaaatggtgataggtacttcg

SEQ ID NO: 225515 - DNA, 75 bp, synthetic construct
  source 1..75: mol_type = other DNA
caataaaagtgcctgatactataaaagaaaaaatgtctgaggtatatgtcagtcatgaatatttcttttggatgt

SEQ ID NO: 225516 - DNA, 75 bp, synthetic construct
  source 1..75: mol_type = other DNA
attcagccggaaaggtgaccgatctcggcaatgtggaaaatggtaaaccaacgcttgtgaatggcgatatcatct

SEQ ID NO: 225517 - DNA, 75 bp, synthetic construct
  source 1..75: mol_type = other DNA
agctattgaaattgagctgcaaaagccaaagaaaggcccacttcccggtgattatcacattggctatgactcagg

SEQ ID NO: 225518 - DNA, 75 bp, synthetic construct
  source 1..75: mol_type = other DNA
cagcagagaagcattagccaaagggtttactgttgattattccaatggcttcggcgatggaatggatgcttatga

SEQ ID NO: 225519 - DNA, 75 bp, synthetic construct
  source 1..75: mol_type = other DNA
aaataaccgcgccaaagtttatcgacagcagagaagcattagccaaagggtttactgttgattattccaatggct

SEQ ID NO: 225520 - DNA, 75 bp, synthetic construct
  source 1..75: mol_type = other DNA
ttttcactcaaggatttgatggcagtaaagtccatcgccattcccggcgccatcgcccagatagccgtggcgacg

SEQ ID NO: 225521 - DNA, 75 bp, synthetic construct
  source 1..75: mol_type = other DNA
catgctggaactgctggaaacgccaccggcgggggagggggggacgggggaaacgggggttgccggatgtaaaat

SEQ ID NO: 225522 - DNA, 75 bp, synthetic construct
  source 1..75: mol_type = other DNA
tgggtgagcgtgaaattgcccggactatgctggaactgctggaaacaccaccggcgggggaagtggggacggggg

SEQ ID NO: 225523 - DNA, 75 bp, synthetic construct
  source 1..75: mol_type = other DNA
gattgcccagatagccgtggcgacgttgctgggcatggctctctctgccgtgatcggctggtcgttgatgaccgg

SEQ ID NO: 225524 - DNA, 75 bp, synthetic construct
  source 1..75: mol_type = other DNA
gaacgtggcgcgaatcaggtagtgatgggtgagcgtgaaattgcccgtactatgctggaactgctggaaacgcca

SEQ ID NO: 225525 - DNA, 75 bp, synthetic construct
  source 1..75: mol_type = other DNA
tgacgatgaggtggcgtatatcaccgaacgtggcgcgaatcaggtagtgatgggtgaacgtgaaatcgcccgtac

SEQ ID NO: 225526 - DNA, 75 bp, synthetic construct
  source 1..75: mol_type = other DNA
atgatttctaaaaacatgaaaggcgtgtcggcagttcgcgccgccagcgtgcttacatcgtgtaaattcagccat

SEQ ID NO: 225527 - DNA, 75 bp, synthetic construct
  source 1..75: mol_type = other DNA
aaggggagtaaatggcttaaagaggccgaagaaatcccagtaaaagggggagaagtaagcgaaagctcgctaaaa

SEQ ID NO: 225528 - DNA, 75 bp, synthetic construct
  source 1..75: mol_type = other DNA
cacgcttaccacccaatgggaaatgagcgtgaaagcagcagagaagcgcgaaaatgcgctagaagcggagcgtgt

SEQ ID NO: 225529 - DNA, 75 bp, synthetic construct
  source 1..75: mol_type = other DNA
aattactctgaaacggcaagtgtgcaacagcaaaactggagcgtgctggcgcgggctattgagcgtggaattaac

SEQ ID NO: 225530 - DNA, 75 bp, synthetic construct
  source 1..75: mol_type = other DNA
caatcaaaaagttatgccaatacatgcagacaagaggtcatcaacaaagcaatacaaatcgaacaaaccaatgaa

SEQ ID NO: 225531 - DNA, 75 bp, synthetic construct
  source 1..75: mol_type = other DNA
tttgatgcaacagccagactggagaatattcgccagtggacaaaagaagccaatcaatggctacaaacggtacaa

SEQ ID NO: 225532 - DNA, 75 bp, synthetic construct
  source 1..75: mol_type = other DNA
cctctggcgtcgtgacggaccggtaatgatttcttttgatgatctgtggagtgcgataacgcatggcggacagtg

SEQ ID NO: 225533 - DNA, 75 bp, synthetic construct
  source 1..75: mol_type = other DNA
ttgatatggacggcgtcattattgattcggaaggattatggcgtcaggcgcaacaaggagcgctggcacgatggg

SEQ ID NO: 225534 - DNA, 75 bp, synthetic construct
  source 1..75: mol_type = other DNA
cttgatgagatagcccgaacctggtgcgaatactgtcatctgtctattacgcccacggaactagaagcggagatc

SEQ ID NO: 225535 - DNA, 75 bp, synthetic construct
  source 1..75: mol_type = other DNA
agcgcgaaaaagtgcttgaggcggagcgcgttaaacagtggaatcagcagcagttaaccgcaccaacagttgatt

SEQ ID NO: 225536 - DNA, 75 bp, synthetic construct
  source 1..75: mol_type = other DNA
aagaccaactggcgacagccactggcgttcgtgatattgctgattttgttgaccaggccaaaggcctgaaagctg

SEQ ID NO: 225537 - DNA, 75 bp, synthetic construct
  source 1..75: mol_type = other DNA
atggaactgtggctgacggtgaacggtaaatgcacctgtgccagcgcaccgctggagccgctgacccgcgctgtg

SEQ ID NO: 225538 - DNA, 75 bp, synthetic construct
  source 1..75: mol_type = other DNA
aaagcagttccatcggtaaagactaatgatttggggcatacgttttgcggggccctcattgagtggtttcatcat

SEQ ID NO: 225539 - DNA, 75 bp, synthetic construct
  source 1..75: mol_type = other DNA
ttacgtcgctggctggttggcggcggtgcactcaccacgccagttaatgaagcgatgacggcaggcggcacgacg

SEQ ID NO: 225540 - DNA, 75 bp, synthetic construct
  source 1..75: mol_type = other DNA
ggcaaatcgggccacattggtaagaaaatcgccgcaacgcttgccagcaccggcactcctgccttttttgtccat

SEQ ID NO: 225541 - DNA, 75 bp, synthetic construct
  source 1..75: mol_type = other DNA
cgctcgcttgctgaacaaagtgcatcatctgatgcgccgtgatgacgccatcccgcaggtggcggtaaatgccag

SEQ ID NO: 225542 - DNA, 75 bp, synthetic construct
  source 1..75: mol_type = other DNA
tgcgtgctaaggcagagaaagcaacgtgtggtgcgtggtcgctcgaatatggagagggccgatttgatggtgatg

SEQ ID NO: 225543 - DNA, 75 bp, synthetic construct
  source 1..75: mol_type = other DNA
cttgcttatgcttacaaagagcttacgcctgagattatgcgcggtcatatcgctgtattcgagcgatatggaata

SEQ ID NO: 225544 - DNA, 75 bp, synthetic construct
  source 1..75: mol_type = other DNA
gattagaacagtgttataatgggatatcagctgcagtaattgttaccttgctaattgtgttatacgaaataatta

SEQ ID NO: 225545 - DNA, 75 bp, synthetic construct
  source 1..75: mol_type = other DNA
atggaaaaaacgggtatatcacgggcgacgtattttaggctgaaaagaaaaacggttactaacaatattaatctt

SEQ ID NO: 225546 - DNA, 75 bp, synthetic construct
  source 1..75: mol_type = other DNA
tgatctcgtttggtttagttgtctttttgggtaccagttattactaccaaactaagtatatcccgaaaggcaccg

SEQ ID NO: 225547 - DNA, 75 bp, synthetic construct
  source 1..75: mol_type = other DNA
cttatctgccccacgacgcgcccatgttactgctggaagacgtggtgagcgtcagcgatgacagcgcggtgtgcc

SEQ ID NO: 225548 - DNA, 75 bp, synthetic construct
  source 1..75: mol_type = other DNA
cgtctgggcgatgattttgttcgcgccgccaatatcatcctgcactgcgaaggcaaagtggtggtttcgggaatt

SEQ ID NO: 225549 - DNA, 75 bp, synthetic construct
  source 1..75: mol_type = other DNA
gcaactgatgaacgggaaggactacagcggttgttggcccgtgcagagaaagacgacgtaatcatctgtacaaaa

SEQ ID NO: 225550 - DNA, 75 bp, synthetic construct
  source 1..75: mol_type = other DNA
tatcaactagtcatcagaagctaacacatcaaatctcggagctaaaaaatgccggggtacgggaagatcgtattt

SEQ ID NO: 225551 - DNA, 75 bp, synthetic construct
  source 1..75: mol_type = other DNA
ctctccggcaaagcggattacatcggtgcatttgccgtaactggcgggctggaagaggacgcgctggctgatgcc

SEQ ID NO: 225552 - DNA, 75 bp, synthetic construct
  source 1..75: mol_type = other DNA
gcccaaccaaccgcacggcgtctatttctccggacgtcaacgatccggcattccgcaacatcacttttgaccagc

SEQ ID NO: 225553 - DNA, 75 bp, synthetic construct
  source 1..75: mol_type = other DNA
gattgaagggccgctgatggacggaatgaacgtcgtcggtgacctgtttggtgaagggaaaatgtttttgccgca

SEQ ID NO: 225554 - DNA, 75 bp, synthetic construct
  source 1..75: mol_type = other DNA
gcggaaatcaactttgcggcggcgaagctggcgcgtgcctgtgctgacgagtggaccgcccgtacgccggagaaa

SEQ ID NO: 225555 - DNA, 75 bp, synthetic construct
  source 1..75: mol_type = other DNA
caaagcattagtggaaggcggtgcggatctgattctgattgaaaccgttttcgacacccttaacgccaaagcggc

SEQ ID NO: 225556 - DNA, 75 bp, synthetic construct
  source 1..75: mol_type = other DNA
agcaggctacgcgaccgattgaagtgattgaaggcccgttgatggacggcatgaacgtggtcggcgatctgtttg

SEQ ID NO: 225557 - DNA, 75 bp, synthetic construct
  source 1..75: mol_type = other DNA
cgccaaagcacgcaagctggagcagcaacaggctaatgcgaagccagaagaacaggttgacccgcgcaaagccgc

SEQ ID NO: 225558 - DNA, 75 bp, synthetic construct
  source 1..75: mol_type = other DNA
gccaaagcacgcaagctggagcagcaacaggctaatgccgagccagaacaacaggtcgatccgcgcaaagccgcc

SEQ ID NO: 225559 - DNA, 75 bp, synthetic construct
  source 1..75: mol_type = other DNA
tcgaagcggctattgcacgcgccaaagcgcgcaagctggaacagcaacaacaggctaatgcggaaccagaagaac

SEQ ID NO: 225560 - DNA, 75 bp, synthetic construct
  source 1..75: mol_type = other DNA
atcgctcgcgtgccgattatgatcgattcttcgaaatgggacgtcatcgaaaaaggactgaagtgtattcagggc

SEQ ID NO: 225561 - DNA, 75 bp, synthetic construct
  source 1..75: mol_type = other DNA
gcggatatcatcgaaaccaacaccttcaactccacgaccattgcgatggcggattaccaaatggaatccctgtcg

SEQ ID NO: 225562 - DNA, 75 bp, synthetic construct
  source 1..75: mol_type = other DNA
agccaccatctgcgtcaacagaccgaaaaaaccggcttcgctaactactgtctcgctgacttcgttgcgccgaag

SEQ ID NO: 225563 - DNA, 75 bp, synthetic construct
  source 1..75: mol_type = other DNA
gagcaggataccgaagaagcccgccagcaggctacgcgcccgattgaagtgattgaaggcccgctaatggacggc

SEQ ID NO: 225564 - DNA, 75 bp, synthetic construct
  source 1..75: mol_type = other DNA
atagatctgatttcaaaactatatcacctttataaaagttctcttattaattataaaacaagtattactcaacaa

SEQ ID NO: 225565 - DNA, 75 bp, synthetic construct
  source 1..75: mol_type = other DNA
gttgctggcgcacccgccagtctccgccgaacccgctggcgcggtttcgggctgtcgctacggtccgatgcgtga

SEQ ID NO: 225566 - DNA, 75 bp, synthetic construct
  source 1..75: mol_type = other DNA
ggaagaggacgcactggctgatgcctttgaagcacagcatgatgattacaacaaaatcatggtgaaagcgcttgc

SEQ ID NO: 225567 - DNA, 75 bp, synthetic construct
  source 1..75: mol_type = other DNA
tttgcagtgccgacgacgaaagccacggcaaaccacatccggcagtttacctctccgcactacgaaaattacgcc

SEQ ID NO: 225568 - DNA, 75 bp, synthetic construct
  source 1..75: mol_type = other DNA
agaagaacaggttgatccgcgcaaagctgccgtcgaagcagctattgcacgcgccaaagcacgcaagctggaaca

SEQ ID NO: 225569 - DNA, 75 bp, synthetic construct
  source 1..75: mol_type = other DNA
gaagccgctattgcccgtgccaaagcgcgcaagctggaacagcaacagactaatgcggaaccagaagaacaggtt

SEQ ID NO: 225570 - DNA, 75 bp, synthetic construct
  source 1..75: mol_type = other DNA
gaaggattagcgccgcgcaaactgccggaaattcccgtagcctgccgtttgtccggcctggagccgctgaacatt

SEQ ID NO: 225571 - DNA, 75 bp, synthetic construct
  source 1..75: mol_type = other DNA
gcgcaccgtctcggcgtgcaggaagtcgaagccagcatcgaaacgctgcgtaattacatcgactggacgccgttc

SEQ ID NO: 225572 - DNA, 75 bp, synthetic construct
  source 1..75: mol_type = other DNA
acaccaccggtcacgctggaagcggcgcgcgataacgacttcgcttttgactggcaggcttacacgccgccggtg

SEQ ID NO: 225573 - DNA, 75 bp, synthetic construct
  source 1..75: mol_type = other DNA
aaaaaaccggcttcgctaactactgtctcgctgacttcgtggcaccgaagctctccggtaaagcggattacatcg

SEQ ID NO: 225574 - DNA, 75 bp, synthetic construct
  source 1..75: mol_type = other DNA
cgcgtgataacgacttcgcttttgactggcaggcttacacgccgccggtggcgcaccgtctcggcgtgcaggaag

SEQ ID NO: 225575 - DNA, 75 bp, synthetic construct
  source 1..75: mol_type = other DNA
tggatgtcgcgcgtcaacaggtggaaaacggcgcgcagattatcgatatcaacatggatgaagggatgctcgatg

SEQ ID NO: 225576 - DNA, 75 bp, synthetic construct
  source 1..75: mol_type = other DNA
agatggatgccaacgaaggatcgcttctgcttgcaacccgtttcgatctcgctatcaaagcctttgaacataccg

SEQ ID NO: 225577 - DNA, 75 bp, synthetic construct
  source 1..75: mol_type = other DNA
tgtataaccaggcggcgaaagacgcacaactggcagatgccatcgccagagcggtatacgcttgcgattcggcat

SEQ ID NO: 225578 - DNA, 75 bp, synthetic construct
  source 1..75: mol_type = other DNA
cgagctgattcgtgcaggcaagcaatatggcctgacaacgcgcgaggaagtgtttgccgatcgcggttatcaggc

SEQ ID NO: 225579 - DNA, 75 bp, synthetic construct
  source 1..75: mol_type = other DNA
agccggtatcgtcgaattcgcccaggcactttccgcacacggtgtggagctgctgtctacagggggcactgcccg

SEQ ID NO: 225580 - DNA, 75 bp, synthetic construct
  source 1..75: mol_type = other DNA
cctgtatccgttcgcccagaccgtggcccgtgaaggttgctcgctggaagatgcggttgagaacatcgatatcgg

SEQ ID NO: 225581 - DNA, 75 bp, synthetic construct
  source 1..75: mol_type = other DNA
tctgcttgcaacccgtttcgatctcgctatcaaagcctttgaacataccgccgcctacgacagcatgattgccaa

SEQ ID NO: 225582 - DNA, 75 bp, synthetic construct
  source 1..75: mol_type = other DNA
tgactaacctgaacaacaccactaccaacctgtctgaagcgcagtcccgtgaaccgccccgggaatcctggagac

SEQ ID NO: 225583 - DNA, 75 bp, synthetic construct
  source 1..75: mol_type = other DNA
ggcttccggcaagagtctcattgccagtaccctttatcgtgaattacgtgaacaagtgggtgatgaacacatcgg

SEQ ID NO: 225584 - DNA, 75 bp, synthetic construct
  source 1..75: mol_type = other DNA
aagaacgcgttaagaccaactacgaccatccgagtgcgatggatcacagtctgctgcttgagcatttacaagcgc

SEQ ID NO: 225585 - DNA, 75 bp, synthetic construct
  source 1..75: mol_type = other DNA
gttttcccgacagggaaaattttggtcgtagcgccatgcaactgccgccggaaatggtttatgcccagacgctgt

SEQ ID NO: 225586 - DNA, 75 bp, synthetic construct
  source 1..75: mol_type = other DNA
aatgtatcgaataatacttcagaaaaagcaggtgatgtagcagctagccttctcccgccggctgggcaaactgct

SEQ ID NO: 225587 - DNA, 75 bp, synthetic construct
  source 1..75: mol_type = other DNA
ctccatgaaaattcaggttggcgcgaacgatggtgaaaccatcaccatcgacctgaaaaaaattgactcttctac

SEQ ID NO: 225588 - DNA, 75 bp, synthetic construct
  source 1..75: mol_type = other DNA
cgctgacgcttgcaacccgtttcgacctcgccatcaaagccttcgaacacactgccgcctacgacagcatgattg

SEQ ID NO: 225589 - DNA, 75 bp, synthetic construct
  source 1..75: mol_type = other DNA
catgaaagacatgcatgacaaaatgatggctgccgtaaatgagtccgatcccgacaaggcttttgcgaaaggcat

SEQ ID NO: 225590 - DNA, 75 bp, synthetic construct
  source 1..75: mol_type = other DNA
atgcgggctgtacatgagtacaacaactggtgcgtagatgcaggagagaaacctgtaaaacttattaaattagac

SEQ ID NO: 225591 - DNA, 75 bp, synthetic construct
  source 1..75: mol_type = other DNA
gattttatgctgacgatcagtgagcgattccgtcagtctcccaataaaggtgaaaatattaaatggtttaaagta

SEQ ID NO: 225592 - DNA, 75 bp, synthetic construct
  source 1..75: mol_type = other DNA
ggtgatgaattgatgaaattctctggcattctttctggttcgctttctttcatcttcggtaagttagacgaaggg

SEQ ID NO: 225593 - DNA, 75 bp, synthetic construct
  source 1..75: mol_type = other DNA
ccgtatttccgtggtgctgattacgcaatcatcttccgaatacagtatcagtttctgcgttccacaaagcgactg

SEQ ID NO: 225594 - DNA, 75 bp, synthetic construct
  source 1..75: mol_type = other DNA
tgctcagcgaagcagaacacctgatgcgcgaaaaagggtattcagcattcagctatgctgatttatcaaaaatag

SEQ ID NO: 225595 - DNA, 75 bp, synthetic construct
  source 1..75: mol_type = other DNA
ttgtcggtcaacgcatgaagagcgagcagatctctctgaaagagtcattattggtctcttcgagggtttcggtat

SEQ ID NO: 225596 - DNA, 75 bp, synthetic construct
  source 1..75: mol_type = other DNA
ttgagaacatcgatatcggcggcccaacgatggtgcgctccgccgccaagaaccataaagatgtcgcaatcgtgg

SEQ ID NO: 225597 - DNA, 75 bp, synthetic construct
  source 1..75: mol_type = other DNA
tatcggcgcgggccagatgagccgtgtttattccgcaaaaattgccggtatcaaagccgctgatgaaggtctgga

SEQ ID NO: 225598 - DNA, 75 bp, synthetic construct
  source 1..75: mol_type = other DNA
ttgtcgggcaacgcatgaagtccgaacaaatttcattgaaagaatcgttactggcttcttcccgggtatctgtat

SEQ ID NO: 225599 - DNA, 75 bp, synthetic construct
  source 1..75: mol_type = other DNA
gcgatcattactttagcagagctattgttactcagaatcataaaggcggtacagggaaaagcactacatctgtag

SEQ ID NO: 225600 - DNA, 75 bp, synthetic construct
  source 1..75: mol_type = other DNA
tgggctgctgacgaagcggccgatgggattcttgtcgcagtgtcaccacgtgaatatgattacgcctctactaca

SEQ ID NO: 225601 - DNA, 75 bp, synthetic construct
  source 1..75: mol_type = other DNA
ttcaatttagcccttctctcgctgataaagtagctctaaattcatcaatgtatactatagaagaaattgctgaag

SEQ ID NO: 225602 - DNA, 75 bp, synthetic construct
  source 1..75: mol_type = other DNA
gacctgctggcgaacggagaaacggtcttgcgtgatgcttccggcgagaaacgttttgaaggagaaaaagacagc

SEQ ID NO: 225603 - DNA, 75 bp, synthetic construct
  source 1..75: mol_type = other DNA
acatcaacagaatacaaaaagagattgctaatctggaaaagcaactttctgctgagcaacgcaaggaagccctac

SEQ ID NO: 225604 - DNA, 75 bp, synthetic construct
  source 1..75: mol_type = other DNA
ccgcaatccggggaccgacaccgaccgaaccgcgaagtactttatggtaccgtacagcgagattgcggatgagaa

SEQ ID NO: 225605 - DNA, 75 bp, synthetic construct
  source 1..75: mol_type = other DNA
gaacgaatttaagcgtatgcaggcagaggagatgctgcagcacgtacagggcaaggtatttcccttcctgaaaga

SEQ ID NO: 225606 - DNA, 75 bp, synthetic construct
  source 1..75: mol_type = other DNA
gaattcctgctgtcggaaatcgccaccgcaggcaagaacggccaatttcgcacaccacgccacattattaaattg

SEQ ID NO: 225607 - DNA, 75 bp, synthetic construct
  source 1..75: mol_type = other DNA
acaacggcaaaagtgaacttcactaccagtacgtacaatatcgggaaaaacacccgaaatctgagcattggcgta

SEQ ID NO: 225608 - DNA, 75 bp, synthetic construct
  source 1..75: mol_type = other DNA
cgaagtattaatggcgctacccgacgggcaaacactgtgcgccacagtgccggtaaatgaagcgacttctcttca

SEQ ID NO: 225609 - DNA, 75 bp, synthetic construct
  source 1..75: mol_type = other DNA
aatgggacgaagttggtgttgacgttgtcgctgaagcaactggtctgttcctgaccgacgaaaccgcacgtaagc

SEQ ID NO: 225610 - DNA, 75 bp, synthetic construct
  source 1..75: mol_type = other DNA
actagtagataaaatggcattaaatacatcgataaataccattgatgaaattgctgaacagcttgaattattact

SEQ ID NO: 225611 - DNA, 75 bp, synthetic construct
  source 1..75: mol_type = other DNA
gcagaacgtcagtatgagtccgttaataattacgggcggtgggcgaagcagcactatcggccctctcaggcactc

SEQ ID NO: 225612 - DNA, 75 bp, synthetic construct
  source 1..75: mol_type = other DNA
gtatcgcaggttctggccgtcgttctatagcttcagcgttgatagcttttattcttgatgcgcttgatgacggac

SEQ ID NO: 225613 - DNA, 75 bp, synthetic construct
  source 1..75: mol_type = other DNA
acgctgtatcctcctggacgtacaacattcacgatgaaacaacctgctaaagatcctttcggttcagcacttgtt

SEQ ID NO: 225614 - DNA, 75 bp, synthetic construct
  source 1..75: mol_type = other DNA
gaagatgctgactacgcaaccgaagtgtctaacatgtctcgtgcgcagatcctgcaacaagcgggtacctctgtt

SEQ ID NO: 225615 - DNA, 75 bp, synthetic construct
  source 1..75: mol_type = other DNA
gcgtgagttgaccgtgcaggccaccactggtaccaactctgattccgatctctcttctattcaggatgaaattaa

SEQ ID NO: 225616 - DNA, 75 bp, synthetic construct
  source 1..75: mol_type = other DNA
ttcgatgaaaattcaggttggtgcgaatgacggccagactatcacgattgatctgaagaaaattgactcagatac

SEQ ID NO: 225617 - DNA, 75 bp, synthetic construct
  source 1..75: mol_type = other DNA
aagaacgtgttaagactaactacgaccatcccagcgcgatggatcacagcctgctgcttgagcatttgcaggcgc

SEQ ID NO: 225618 - DNA, 75 bp, synthetic construct
  source 1..75: mol_type = other DNA
aacaatatgcggacattatcgtgccgcgcggcgggaaaaaccgcatcgcgatcgatatattgaaagcgaaaataa

SEQ ID NO: 225619 - DNA, 75 bp, synthetic construct
  source 1..75: mol_type = other DNA
ggatatctgcctgatgcgccgcatcaagcgtgacgttaacgagcgtgggcgttcaatggattcagtgatggcgca

SEQ ID NO: 225620 - DNA, 75 bp, synthetic construct
  source 1..75: mol_type = other DNA
aaaacgtgatgcgttagctgccacccttcatgctgatgtgggtaaatctgttaatggttcttacaccacaaaaga

SEQ ID NO: 225621 - DNA, 75 bp, synthetic construct
  source 1..75: mol_type = other DNA
agcacagaatgtaaatattgatgattcgggcaatattacttcaagtgatggcgatcaactttatctggattcaac

SEQ ID NO: 225622 - DNA, 75 bp, synthetic construct
  source 1..75: mol_type = other DNA
cgaaagcgcagatcatccagcaggccggtaactccgtgttggcaaaagctaaccaggtaccgcagcaggttctgt

SEQ ID NO: 225623 - DNA, 75 bp, synthetic construct
  source 1..75: mol_type = other DNA
gattattcagcaggcaggcaactccgtgctgtctaaagcgaaccaggtgccgcagcaagttctgtcactgttaca

SEQ ID NO: 225624 - DNA, 75 bp, synthetic construct
  source 1..75: mol_type = other DNA
tattccgtagacaaagacacgggggctgtaagtgttacaggggggaccggtacgggtaaatacgccgcaaacgtg

SEQ ID NO: 225625 - DNA, 75 bp, synthetic construct
  source 1..75: mol_type = other DNA
acctgaaaaaaatcgattctgatactctgggtctgaatggctttaacgtaaatggtaaaggtactattaccaaca

SEQ ID NO: 225626 - DNA, 75 bp, synthetic construct
  source 1..75: mol_type = other DNA
gtgacggtagtcgaggctgagggctttcttaatctcgtatccgcgcctgcggtaacactgaatcagccattcagc

SEQ ID NO: 225627 - DNA, 75 bp, synthetic construct
  source 1..75: mol_type = other DNA
cgagtgttatcaacattagatctgaattgactaaagtcctacaaggtttgccgagcgattcacatttagcgaaac

SEQ ID NO: 225628 - DNA, 75 bp, synthetic construct
  source 1..75: mol_type = other DNA
gcactgaatcaatctggttaaataccgaacacataagaaactctgatatcaactcattaatgacagggtatctca

SEQ ID NO: 225629 - DNA, 75 bp, synthetic construct
  source 1..75: mol_type = other DNA
tcgaccccccgttatggctggcagataacgaccgcctggtattgcgcgatatctctgcccgcaacacgctggccg

SEQ ID NO: 225630 - DNA, 75 bp, synthetic construct
  source 1..75: mol_type = other DNA
ccaatggaagatgaagcgctagtactgttgctgattgaaaagatgcgcgaaagcggcgacatcctcagtcatcac

SEQ ID NO: 225631 - DNA, 75 bp, synthetic construct
  source 1..75: mol_type = other DNA
agtttctgtaaatataatgggcataccgaaaatcaattgctaacttcagttcaagttataaaagttattaggaat

SEQ ID NO: 225632 - DNA, 75 bp, synthetic construct
  source 1..75: mol_type = other DNA
aataatgattttagagcattttatagatacattaatagaggttcccattcagatgcagttaatatcacagacatg

SEQ ID NO: 225633 - DNA, 75 bp, synthetic construct
  source 1..75: mol_type = other DNA
attttttaaatgcaaatatgagcaactattgtgaaatggtttccaattctttatcttttgatttttttaaaagtg

SEQ ID NO: 225634 - DNA, 75 bp, synthetic construct
  source 1..75: mol_type = other DNA
aggtttaaatttaataatggtatgcaagctcctaccataaagatactaaagatgcttcgtcaagatgtaaagaac

SEQ ID NO: 225635 - DNA, 75 bp, synthetic construct
  source 1..75: mol_type = other DNA
aaatatttaaacttatgggagatgtttcacattttattaaaatgtatgaagagaaaaataatatagaagatacta

SEQ ID NO: 225636 - DNA, 75 bp, synthetic construct
  source 1..75: mol_type = other DNA
taaaaacaccaccatacaaacaatatctccatataatccttaccctatttcttttgatgataaaaatttattaaa

SEQ ID NO: 225637 - DNA, 75 bp, synthetic construct
  source 1..75: mol_type = other DNA
ttctctactttctggaatgctgtaaaggtaagacagataagaatgatacggatatgcgagatgtatttatcgtta

SEQ ID NO: 225638 - DNA, 75 bp, synthetic construct
  source 1..75: mol_type = other DNA
gaccgcattggttttacgcgtcgtcggggaaatgatcatttattgcgcgacgcattattatttccggaaaaataa

SEQ ID NO: 225639 - DNA, 75 bp, synthetic construct
  source 1..75: mol_type = other DNA
cgcgctggtcagggcgctgaaatgcgttattgatatcccggatgaatggcttgatgccacatgccgggaactgga

SEQ ID NO: 225640 - DNA, 75 bp, synthetic construct
  source 1..75: mol_type = other DNA
cttgatgcattaataaaaaatgaccttcccgcaataaaaaatgttatcggtcaggattttatcggatacaacaaa

SEQ ID NO: 225641 - DNA, 75 bp, synthetic construct
  source 1..75: mol_type = other DNA
ttgtgcgccggctcgttcaggattttgaatttaaagaacgggataaatatttgcagcagggcgtttgccctaaat

SEQ ID NO: 225642 - DNA, 75 bp, synthetic construct
  source 1..75: mol_type = other DNA
caaactgtaacccagcgccgctttattacattcgaaacaatgacacggatgaagcatggtattacttccgcgtta

SEQ ID NO: 225643 - DNA, 75 bp, synthetic construct
  source 1..75: mol_type = other DNA
tctccagacaggcaaacgccggaagaggggtcgccgaggccagagagccggaagtactgaaatgccggatattca

SEQ ID NO: 225644 - DNA, 75 bp, synthetic construct
  source 1..75: mol_type = other DNA
tgtgggcgcgaaaataaatgcggtacagacctgctgaccaaagaactttacccggatgtgttttcatcatggtca

SEQ ID NO: 225645 - DNA, 75 bp, synthetic construct
  source 1..75: mol_type = other DNA
gttgaatttgccaatatgatccgcggcctcgatcaggagtgcggatcgacgtgcgcggcggattttcgcgatcgt

SEQ ID NO: 225646 - DNA, 75 bp, synthetic construct
  source 1..75: mol_type = other DNA
aagcggtgacatcctcagtcaccacggttggttgcatctgccggatcacaaagccggattcagcgaagaacaaca

SEQ ID NO: 225647 - DNA, 75 bp, synthetic construct
  source 1..75: mol_type = other DNA
acaccgctgacccagtggcagccgctgcatattcaccacgccgccagccacgttacgggacgcgtttcgctgctg

SEQ ID NO: 225648 - DNA, 75 bp, synthetic construct
  source 1..75: mol_type = other DNA
tagaaaaaacgcgtgaagccatcaccgcgctggccgttgaacgttgtcaggcacttaaaaaggatcatcctctgg

SEQ ID NO: 225649 - DNA, 75 bp, synthetic construct
  source 1..75: mol_type = other DNA
ccaggtatccggattcacattactggccaccatgcgcgaaaaagaaatcatgcagacgttcggcagggggtacga

SEQ ID NO: 225650 - DNA, 75 bp, synthetic construct
  source 1..75: mol_type = other DNA
tgaggaatacgaagggtttgacccatctaaatctaccgccgccgcgcgtggccgtaacttcgcccaggtcggtaa

SEQ ID NO: 225651 - DNA, 75 bp, synthetic construct
  source 1..75: mol_type = other DNA
gtgttctgagggcatggaacagcggaatgttaaggccaattttatcgaacaattcgattcattactggtcaaaga

SEQ ID NO: 225652 - DNA, 75 bp, synthetic construct
  source 1..75: mol_type = other DNA
cggctattccattcgaaggtgagcgccataatgcacttgatgacgcccgttaccaggcaaaatacgtttcagtta

SEQ ID NO: 225653 - DNA, 75 bp, synthetic construct
  source 1..75: mol_type = other DNA
actccgacagcaaaacgggccacttactctcccagccattcaacagctcgactcccgttctctattacaacaaag

SEQ ID NO: 225654 - DNA, 75 bp, synthetic construct
  source 1..75: mol_type = other DNA
aacaaagacgccttcaagaaagcaggattagacccggaacagccgccgaaaacctggcaggatctggcggactat

SEQ ID NO: 225655 - DNA, 75 bp, synthetic construct
  source 1..75: mol_type = other DNA
gaatttaagcgcggggattgccgcatttcgtaccggcaacgctccggctattttgcaggtttatgaagttggcac

SEQ ID NO: 225656 - DNA, 75 bp, synthetic construct
  source 1..75: mol_type = other DNA
tgcgtatctgaaatcaatcgcaccccgtccggcgctaatgctggcggaggaattcttaccgatcgcggtgaaggt

SEQ ID NO: 225657 - DNA, 75 bp, synthetic construct
  source 1..75: mol_type = other DNA
ttaacgcggaaggtgatgttgcggcatttatggcgaatctggtgcgactggatgctctctttgccgcgcgcgtgg

SEQ ID NO: 225658 - DNA, 75 bp, synthetic construct
  source 1..75: mol_type = other DNA
tggcgggtgtgctggaagcgcgtggccacaacgttacggttatcgatccagttgaaaaactgttggcagttggtc

SEQ ID NO: 225659 - DNA, 75 bp, synthetic construct
  source 1..75: mol_type = other DNA
ccttcacgacgtaaggtcattccgttcctgaaaatgatgcacaaagaaacgggctcgatgttgaaagccattctt

SEQ ID NO: 225660 - DNA, 75 bp, synthetic construct
  source 1..75: mol_type = other DNA
tgagcgccataatgcacttgatgacgcccgttatcaggcaaaatacgtttcagccatctggcaaaaactgatccc

SEQ ID NO: 225661 - DNA, 75 bp, synthetic construct
  source 1..75: mol_type = other DNA
ttattcaggtctggggaaatggagccaacttcgacaacacgattttgcgccgttcatacgaacggcaggggatcc

SEQ ID NO: 225662 - DNA, 75 bp, synthetic construct
  source 1..75: mol_type = other DNA
ccggtaagaagacgccacagcaggcgctggataccgctgttgagcgtgggaaccagttactgcgccgctttgaga

SEQ ID NO: 225663 - DNA, 75 bp, synthetic construct
  source 1..75: mol_type = other DNA
atccctcccggtaaaacgttacacatcctcggtagcctgcgcggcaacggcagagggcgatttgtcttacaggac

SEQ ID NO: 225664 - DNA, 75 bp, synthetic construct
  source 1..75: mol_type = other DNA
taacattgagatgaagcgtgcctcgctggagttacacaacaagccgcaacatctttttatacgtaatatcaatgt

SEQ ID NO: 225665 - DNA, 75 bp, synthetic construct
  source 1..75: mol_type = other DNA
cttacgataacaactacccggaagaccaggcagtgaaaaactttgtcgtggcgaatatcaccggatcggactgtc

SEQ ID NO: 225666 - DNA, 75 bp, synthetic construct
  source 1..75: mol_type = other DNA
atccggtgatcaccgatgactctgcggcgtttagccagaaagcggtgcaggcgatggaaaaagagcgcagccaga

SEQ ID NO: 225667 - DNA, 75 bp, synthetic construct
  source 1..75: mol_type = other DNA
agtgaattaaaaaaaatagaatccaaagcgcaaatcgtctttctgcttttctttgctgtctccattatactcacg

SEQ ID NO: 225668 - DNA, 75 bp, synthetic construct
  source 1..75: mol_type = other DNA
aaaaaggacaaagttcagtcgatatcgacaggattaattaccacattgttaatgtggaaaagattaactttagat

SEQ ID NO: 225669 - DNA, 75 bp, synthetic construct
  source 1..75: mol_type = other DNA
catctcacgtttttcactgcagaccagcgcccgtaaccagtggttcggtacgatcaccgctcgtaataatgatga

SEQ ID NO: 225670 - DNA, 75 bp, synthetic construct
  source 1..75: mol_type = other DNA
atgcaggccgaaatccttctcacccttaagctccaacaaaaattattcgccgacccgcgccgcatttcgctacta

SEQ ID NO: 225671 - DNA, 75 bp, synthetic construct
  source 1..75: mol_type = other DNA
aacaaagacgccttcaagaaagcggggttagacccggaacagccgccgaaaacctggcaggatctggcggactat

SEQ ID NO: 225672 - DNA, 75 bp, synthetic construct
  source 1..75: mol_type = other DNA
aggctgccaagctaattacatccgcgatgttcagggagggactgtcgcaccatcctcctcttctaaactgacggg

SEQ ID NO: 225673 - DNA, 75 bp, synthetic construct
  source 1..75: mol_type = other DNA
atgcaggccgaaattcttctcacccttaagcttcaacaaaaactgtttgccgatccgcgccgcatctcgctacta

SEQ ID NO: 225674 - DNA, 75 bp, synthetic construct
  source 1..75: mol_type = other DNA
cgccgtgggtaggcattactcaggacgaagcggtcgcgcaaaacgctgacaaccaattaccgggtattattagtc

SEQ ID NO: 225675 - DNA, 75 bp, synthetic construct
  source 1..75: mol_type = other DNA
atgactggtccgtctaaagacaacactccgatgttcgttaaaggcgctaacttcgacaaatatgctggccaggac

SEQ ID NO: 225676 - DNA, 75 bp, synthetic construct
  source 1..75: mol_type = other DNA
aacgcttcttttactttttcatcccggcgatgctggtggtctattttctgcgccaggacagcaaagcgtggctgt

SEQ ID NO: 225677 - DNA, 75 bp, synthetic construct
  source 1..75: mol_type = other DNA
ggcggcactcgcgccaatatcatcatcgcattcgctatcttcctgtttattggcattattcgcggctggatttcg

SEQ ID NO: 225678 - DNA, 75 bp, synthetic construct
  source 1..75: mol_type = other DNA
ggtgatcctgatgggcatcgcgctggtaagcgtcggcatcttcttcatgcacaacggctttttgctgttccggct

SEQ ID NO: 225679 - DNA, 75 bp, synthetic construct
  source 1..75: mol_type = other DNA
cggactgtgcatggctgtcacgaacggtgcaatagtggctcttccgcaacctgggtggagattttcatgccagtg

SEQ ID NO: 225680 - DNA, 75 bp, synthetic construct
  source 1..75: mol_type = other DNA
cgccaggacagcaaagcgtggctgtttttcctcgtcagtaccgttgcctttggattgctgacctacatgattgtc

SEQ ID NO: 225681 - DNA, 75 bp, synthetic construct
  source 1..75: mol_type = other DNA
attccttcctggttgtggccgggacggccgagcatggtgctgaattctgccaactatttcacctgggaagtgctg

SEQ ID NO: 225682 - DNA, 75 bp, synthetic construct
  source 1..75: mol_type = other DNA
gccgcgaaactgaaagcctccggtatgaagtgcggctactccagcggctggcagggctggatccaactggaaaac

SEQ ID NO: 225683 - DNA, 75 bp, synthetic construct
  source 1..75: mol_type = other DNA
agatcggcaaaaattacagctgcagggcgaacaaattgcccaccagcgtgacggcgtgggtccaatccaggtgga

SEQ ID NO: 225684 - DNA, 75 bp, synthetic construct
  source 1..75: mol_type = other DNA
gcggcgagctttgtctggcgcgaagcgagtggtgagcgaatttaccgcactggggatcgcgggcgctactttgct

SEQ ID NO: 225685 - DNA, 75 bp, synthetic construct
  source 1..75: mol_type = other DNA
cacggggggttttttgttcggactgctcatgacctctttccactggtggcgcaggaaagttaagcggctgccatc

SEQ ID NO: 225686 - DNA, 75 bp, synthetic construct
  source 1..75: mol_type = other DNA
caggctggcgcgtaagctgcgccgcctggccagtaaaggtgtgccggtggtggcctctaatgccgatctggaaat

SEQ ID NO: 225687 - DNA, 75 bp, synthetic construct
  source 1..75: mol_type = other DNA
ggatgtgcaatgtggtttatgtactgggggccgtcaggaatggtagcaggtgaggccattattataagtatcacg

SEQ ID NO: 225688 - DNA, 75 bp, synthetic construct
  source 1..75: mol_type = other DNA
accatgtcatcgagcgcatcaactgtaccaacggcaaaatcaactggggcatcggcataggccttgcgggaagta

SEQ ID NO: 225689 - DNA, 75 bp, synthetic construct
  source 1..75: mol_type = other DNA
gtaattataaaaatccgtattttcctgaaagtgaaatacgcgcttttgcagaaaaggctcaacgcgcaacgttta

SEQ ID NO: 225690 - DNA, 75 bp, synthetic construct
  source 1..75: mol_type = other DNA
ccagaatgtcagtttgtggaagcagacatccgcaattggcaacctaaccatgcactcgatctgattttcgccaat

SEQ ID NO: 225691 - DNA, 75 bp, synthetic construct
  source 1..75: mol_type = other DNA
ttcctcacttggtttctttacttaatccgcagggcgtgctggcagtacagatgccagataactggctggagccga

SEQ ID NO: 225692 - DNA, 75 bp, synthetic construct
  source 1..75: mol_type = other DNA
ggctgcgggatatgggctggacgccggaacggattcaggaggcaaccggactttccggtgaagaactgaaaaagc

SEQ ID NO: 225693 - DNA, 75 bp, synthetic construct
  source 1..75: mol_type = other DNA
attggtaaaggtggtaatgctgtcgtgtatgaagatatggaaaatacaacaaaagtgttgaagatgtttactata

SEQ ID NO: 225694 - DNA, 75 bp, synthetic construct
  source 1..75: mol_type = other DNA
agcacgactatagaaagaggatctgttcgttcgaacagacctgatttacctccagtggattatgcgcagccggag

SEQ ID NO: 225695 - DNA, 75 bp, synthetic construct
  source 1..75: mol_type = other DNA
aacgacagtgatattttgatatccgaccatctcattgagcgcattaactgtaccaacggcaaaatcaattggggc

SEQ ID NO: 225696 - DNA, 75 bp, synthetic construct
  source 1..75: mol_type = other DNA
tcgtcgtgcctgccggattggtttgtgacaatatcaacaccggcatcttcattcctcctggcaaaacgttacaca

SEQ ID NO: 225697 - DNA, 75 bp, synthetic construct
  source 1..75: mol_type = other DNA
cgcaacctgaccatcgataatctcaccgttaaccacgctaattacgctattttgcgccagggatttcataaccag

SEQ ID NO: 225698 - DNA, 75 bp, synthetic construct
  source 1..75: mol_type = other DNA
atatccgcaactggcaaccggaacagacactcgatctgatttttgctaatgcctcactgcaatggctgcccgacc

SEQ ID NO: 225699 - DNA, 75 bp, synthetic construct
  source 1..75: mol_type = other DNA
tacccggatcgcgggcgtgagccgttggctggcgttcatgcttactacgatattttgagcgaagccggatgtgag

SEQ ID NO: 225700 - DNA, 75 bp, synthetic construct
  source 1..75: mol_type = other DNA
atctgcactttgccgctgaacgatcgcgtccggcggtggagctgcttgccagagtgccgctggagaatatcaaat

SEQ ID NO: 225701 - DNA, 75 bp, synthetic construct
  source 1..75: mol_type = other DNA
aatgtcattctggtcactatgtcctgcgctttgatcgggatgatgatattaagtctggcgctctggctgacatcc

SEQ ID NO: 225702 - DNA, 75 bp, synthetic construct
  source 1..75: mol_type = other DNA
agatttatagcgactggttggagaagcatcagaactctggccgagtttccggctctcgcacggcggatatgaaag

SEQ ID NO: 225703 - DNA, 75 bp, synthetic construct
  source 1..75: mol_type = other DNA
agaccgcctgctggaagaagtcgaacaaaagctggcgacagaaataacgtccagtcaattattcgcggtgagctg

SEQ ID NO: 225704 - DNA, 75 bp, synthetic construct
  source 1..75: mol_type = other DNA
cagcaattcgggatattctctctgtctctatcgctgaaatgggcggtgtactctttggcctgtcgataggttcga

SEQ ID NO: 225705 - DNA, 75 bp, synthetic construct
  source 1..75: mol_type = other DNA
ttgtgctttggggattgggcgcttctctgggcttcccactaaccatttctgccgccagcgataccggccccgatg

SEQ ID NO: 225706 - DNA, 75 bp, synthetic construct
  source 1..75: mol_type = other DNA
gcgggcatcgcacctatttatattgctattaaggcaatccctggcggtacgggcaaaaacgctgccgatggctcg

SEQ ID NO: 225707 - DNA, 75 bp, synthetic construct
  source 1..75: mol_type = other DNA
ttgctgattgcacccgcaacgctacgcaagcagtggagccaggagctggaagagaaattttcgctgccttcacaa

SEQ ID NO: 225708 - DNA, 75 bp, synthetic construct
  source 1..75: mol_type = other DNA
ccgctggcattatctgtaaataccgtgctgcatcatgatgttcgccattatcccgataatattatcaacatggcg

SEQ ID NO: 225709 - DNA, 75 bp, synthetic construct
  source 1..75: mol_type = other DNA
aatcagatgtttttgatgcaaaccataacgtgtttgactataacgtattacgaaagaactttaataagcccctgg

SEQ ID NO: 225710 - DNA, 75 bp, synthetic construct
  source 1..75: mol_type = other DNA
aaccgcatcccgtctgcttcgcttgccgttgtcagaggtaacatcaatcgaagaacagcctttgttacccacttt

SEQ ID NO: 225711 - DNA, 75 bp, synthetic construct
  source 1..75: mol_type = other DNA
ccgtatcccgtctgcttcgcctgccattatcagagataacatctgtcgaagaacagcctttgctgcctgcgttaa

SEQ ID NO: 225712 - DNA, 75 bp, synthetic construct
  source 1..75: mol_type = other DNA
cgttctcgatcgggcctttacctttacggctgaactgggcggattacgtaaggcggtcatttttaccgagtccgt

SEQ ID NO: 225713 - DNA, 75 bp, synthetic construct
  source 1..75: mol_type = other DNA
tccttaccttaccgggcacaggctccggtaatttcatcgcattttacgccgtatttatggggctgtttctgaccg

SEQ ID NO: 225714 - DNA, 75 bp, synthetic construct
  source 1..75: mol_type = other DNA
ggcgaacgaacgagcgaagattgcattgttctgtaatgttccggaaaaagcggttatttctctgaaagacgtcga

SEQ ID NO: 225715 - DNA, 75 bp, synthetic construct
  source 1..75: mol_type = other DNA
taaaggcattgccgcagcctctctcgcagccattcttgaagcccgtggcctcaatgtgaccatcatgaaactgga

SEQ ID NO: 225716 - DNA, 75 bp, synthetic construct
  source 1..75: mol_type = other DNA
gtaattataaaaatccgtatttccctgaaaaagaaattcgcgcatttgcagaaaaagcccagcgagcaatgttta

SEQ ID NO: 225717 - DNA, 75 bp, synthetic construct
  source 1..75: mol_type = other DNA
acagcgcataaagtggcctgggcagcagtgaaacatgaatatgctaaagggagtgatgataaatggcataaaaag

SEQ ID NO: 225718 - DNA, 75 bp, synthetic construct
  source 1..75: mol_type = other DNA
gaagtcggcgaactggcggccttcctcgcatcggatgaatccagttatttaaccggtacacagaatgtgattgat

SEQ ID NO: 225719 - DNA, 75 bp, synthetic construct
  source 1..75: mol_type = other DNA
tattcagatgcctgcaaatacagttcgagtgcgggagagttcatatgcttcaacttttttattaaatcttatgtt

SEQ ID NO: 225720 - DNA, 75 bp, synthetic construct
  source 1..75: mol_type = other DNA
cggttcttctgttccgccgccgacggcgttttatcagccgggagccggtggtgaggtgaataacctggcacctgt

SEQ ID NO: 225721 - DNA, 75 bp, synthetic construct
  source 1..75: mol_type = other DNA
gccgcaaacaaaacctgcgcctggccctgattgcacttgggatcagtgctgttggcgggggcgcctggtatatgt

SEQ ID NO: 225722 - DNA, 75 bp, synthetic construct
  source 1..75: mol_type = other DNA
gataaacttagagagtgagatgaatagttgggtgttatataagctctctttgtttttttgtatattatcaatatt

SEQ ID NO: 225723 - DNA, 75 bp, synthetic construct
  source 1..75: mol_type = other DNA
cgaagccttcctgaaagtttgtcacattgcaaaaatgatcactcactacacggtgctgaacgaaacccgtaagtg

SEQ ID NO: 225724 - DNA, 75 bp, synthetic construct
  source 1..75: mol_type = other DNA
gccatgtgaaggagaatctccacaaacagggacgtccggagaacggttatatctggcacaccactggctccggta

SEQ ID NO: 225725 - DNA, 75 bp, synthetic construct
  source 1..75: mol_type = other DNA
actggttcgcacagaccggctgtcctgccataaggatgagggggtgattgatatgccattcaagggacacgtctc

SEQ ID NO: 225726 - DNA, 75 bp, synthetic construct
  source 1..75: mol_type = other DNA
tatggtttggcaattctgaccgcgcttctctgggcgttgataaagacgtttacctgaccattccacgtggtcgca

SEQ ID NO: 225727 - DNA, 75 bp, synthetic construct
  source 1..75: mol_type = other DNA
ctgacggccagtacagctctgcgcgtgatatggcgctgatcggtcaggcgttaattcgtgatgttcccaacgaat

SEQ ID NO: 225728 - DNA, 75 bp, synthetic construct
  source 1..75: mol_type = other DNA
ggcatatttgttctaccggtcacaattaaattttataggcggtttaggggttattgttctggcagttgctgtgtt

SEQ ID NO: 225729 - DNA, 75 bp, synthetic construct
  source 1..75: mol_type = other DNA
attgaaaacgtctttgagctggaatcccgtaccgttccgtcttcaatgacaccgcgtgaaaacgtgatttggttt

SEQ ID NO: 225730 - DNA, 75 bp, synthetic construct
  source 1..75: mol_type = other DNA
agctttattctctctttctcgttagtgactggcatgtttatcctgtttgcggatttaaccccgaaacgcatcggt

SEQ ID NO: 225731 - DNA, 75 bp, synthetic construct
  source 1..75: mol_type = other DNA
agttttaaaaccgcaggtgaagacttcgcggtgatcatgaacgagtacgcgctggtagtggggatcatcaccctc

SEQ ID NO: 225732 - DNA, 75 bp, synthetic construct
  source 1..75: mol_type = other DNA
gaaggaacaaaacgtgacgcatataaaaataccggacgatatactgctttttaccgtgtaggaagtggcagccag

SEQ ID NO: 225733 - DNA, 75 bp, synthetic construct
  source 1..75: mol_type = other DNA
gcatggacagaaaggaaatgatcttaatgcaggtaaaaatctggtgttcagtgggcaaaacggcgcaattctcct

SEQ ID NO: 225734 - DNA, 75 bp, synthetic construct
  source 1..75: mol_type = other DNA
tctaaaattgaattattcaatagcaaaatagacaggcaacatattcagaatcaccgttctggctatttccctctc

SEQ ID NO: 225735 - DNA, 75 bp, synthetic construct
  source 1..75: mol_type = other DNA
tgatattgcaaaatatctcatgtgtattgctatgattcttggtcgacttgaaatttaccctgttattatactatt

SEQ ID NO: 225736 - DNA, 75 bp, synthetic construct
  source 1..75: mol_type = other DNA
ccagagcattgttgagtgtcagtgtgggagggaaaatcgtcacagagcgtgtaatgcgttccgtatggagtttct

SEQ ID NO: 225737 - DNA, 75 bp, synthetic construct
  source 1..75: mol_type = other DNA
aattatcgggagaacgtaaggtagtgatggatggttccgtaaatctgccaggcggaaacctgagtaaagagggag

SEQ ID NO: 225738 - DNA, 75 bp, synthetic construct
  source 1..75: mol_type = other DNA
tgaaaacactgtcgctgaaagatgctgacttccatctttcacgtaacgcctcgctgaacagtgacattaagtcgg

SEQ ID NO: 225739 - DNA, 75 bp, synthetic construct
  source 1..75: mol_type = other DNA
tgggaacaaaacactacaacacccattcctggtatgccggtgctgaaacgggttaccgctatcacttgacagagg

SEQ ID NO: 225740 - DNA, 75 bp, synthetic construct
  source 1..75: mol_type = other DNA
ctgaaacgggttaccgctatcacttgacagaggacactttcattgaaccgcaggctgaactggtttacggcgcag

SEQ ID NO: 225741 - DNA, 75 bp, synthetic construct
  source 1..75: mol_type = other DNA
ccttcagtggtaaggactggagtgtgacggcccgtgccgggaccagctggcagtttgacctactgaataatggtg

SEQ ID NO: 225742 - DNA, 75 bp, synthetic construct
  source 1..75: mol_type = other DNA
caggattcccggggcggttcagactatagccataacaacagccaggataaacgcaataaatccgtctcccagctg

SEQ ID NO: 225743 - DNA, 75 bp, synthetic construct
  source 1..75: mol_type = other DNA
ctgccaattgccctttgatatcagcgggaaggacagcaatagccctatcatccgcctgaatgaaacctgtcagtc

SEQ ID NO: 225744 - DNA, 75 bp, synthetic construct
  source 1..75: mol_type = other DNA
tcggataacagccatatcacactgggaagtgacagggtatttgtggataaaaatgacgggacgggaaattatgtc

SEQ ID NO: 225745 - DNA, 75 bp, synthetic construct
  source 1..75: mol_type = other DNA
gctgtattaagagcatatgcaggtattaatggtgctacgaactggtggaatgtcataccaacagattatctgaac

SEQ ID NO: 225746 - DNA, 75 bp, synthetic construct
  source 1..75: mol_type = other DNA
aaggaacccacgttctgtggcaggggaacggagttgccggtgataacctgcataaaactggcgaaggtaccctga

SEQ ID NO: 225747 - DNA, 75 bp, synthetic construct
  source 1..75: mol_type = other DNA
aaaaatcccagcttttactggatcttaaggctcaggatacaaatgtcagtgaaccgacgattggaaatatatccc

SEQ ID NO: 225748 - DNA, 75 bp, synthetic construct
  source 1..75: mol_type = other DNA
tgacactcaacaaccagacccgtttctatattctgaaatctgctacctatgattcccccctgtggggaaacagcc

SEQ ID NO: 225749 - DNA, 75 bp, synthetic construct
  source 1..75: mol_type = other DNA
ttatgcacagcaaaaatcccggcttctgttgaatatgtctgcctcccagaattccgacgtcaatgtttcgattgg

SEQ ID NO: 225750 - DNA, 75 bp, synthetic construct
  source 1..75: mol_type = other DNA
ctctggaggagaccgggcattccgtaccctgaaggtgaataaactggatgcaacaggcaatgattttatcctgcg

SEQ ID NO: 225751 - DNA, 75 bp, synthetic construct
  source 1..75: mol_type = other DNA
gtggactataacgacaacacggtagttatcgtcctgaatctcggacagcgggtggtcggcatcgtggttgacggc

SEQ ID NO: 225752 - DNA, 75 bp, synthetic construct
  source 1..75: mol_type = other DNA
tctggggcagcgtgtggtcggtattgtggttgatggcgtgtcagacgttctttcattgacggcggagcaaattcg

SEQ ID NO: 225753 - DNA, 75 bp, synthetic construct
  source 1..75: mol_type = other DNA
gtggttgacggcgtttcagacgtgctttcattgacggcggagcaaattcgtccggcaccagagtttgccgtgacg

SEQ ID NO: 225754 - DNA, 75 bp, synthetic construct
  source 1..75: mol_type = other DNA
gtgaccttctgtcgtcgccatattggtattccgctggagaaagcgccaggggagtgggtacacagtgtggctgct

SEQ ID NO: 225755 - DNA, 75 bp, synthetic construct
  source 1..75: mol_type = other DNA
cagcggcgcacgctgtaaggatcaggcctccggcaactggtatgttcgcaacgtcacccatacgaaagcagcaaa

SEQ ID NO: 225756 - DNA, 75 bp, synthetic construct
  source 1..75: mol_type = other DNA
aagaaagtaaaccagtaagttgtcttgcgcattatcaacaaagcccagaagcagaaaaaatagcacaatctatta

SEQ ID NO: 225757 - DNA, 75 bp, synthetic construct
  source 1..75: mol_type = other DNA
gtgctgctgacgctggccgataacgacacgccggtgtggctttctaccccattaaataacgatatcgtcaaccag

SEQ ID NO: 225758 - DNA, 75 bp, synthetic construct
  source 1..75: mol_type = other DNA
acacgccggtgtggctttccgcgccattaagtaacgatatcgtcagccagagcctgcgttttcataccaacgcgc

SEQ ID NO: 225759 - DNA, 75 bp, synthetic construct
  source 1..75: mol_type = other DNA
cgctggttaatcagccgaaacaggcgaccttcgcggtaacagatgaggcgatctccagcgagcagctcaacgccc

SEQ ID NO: 225760 - DNA, 75 bp, synthetic construct
  source 1..75: mol_type = other DNA
cgcggcattcaaatctccgccgggaatgctgtctcctttgtggcgctgactaacattgagatgaagcgtgcgtcg

SEQ ID NO: 225761 - DNA, 75 bp, synthetic construct
  source 1..75: mol_type = other DNA
tcacgactggatcgcctcatttaaacaagccttcagcgaagggcaaacggtcgtcgtgcccgccggattggtttg

SEQ ID NO: 225762 - DNA, 75 bp, synthetic construct
  source 1..75: mol_type = other DNA
acctttttatgcgcaatatcaatgtgatgcaggaatcctcagttggaccagcattgagtatgaactttgacatgc

SEQ ID NO: 225763 - DNA, 75 bp, synthetic construct
  source 1..75: mol_type = other DNA
agtgaaagtacttgatgaaaaaattaatggtgcagttaggcaatggattcaggattttcgaataaatattatccc

SEQ ID NO: 225764 - DNA, 75 bp, synthetic construct
  source 1..75: mol_type = other DNA
attgccctgccaccggaggacttattgctgtatctgaacttgccagccaggtaataaaaaaaacacgtcggagat

SEQ ID NO: 225765 - DNA, 75 bp, synthetic construct
  source 1..75: mol_type = other DNA
ggcgcgcgaaatccttgccagaaaaacggcacatataaaaattcagccgtggcaggatgataagtggggtcgagt

SEQ ID NO: 225766 - DNA, 75 bp, synthetic construct
  source 1..75: mol_type = other DNA
atatcgatgacccgccgcacttcctgctttggagtgccgatgagatggctcccattctgttggggctagtgatcg

SEQ ID NO: 225767 - DNA, 75 bp, synthetic construct
  source 1..75: mol_type = other DNA
agtgggctaccgctatcatgtcactgaggatgcctggattgagccacaggctgagctggtttacggttctgtatc

SEQ ID NO: 225768 - DNA, 75 bp, synthetic construct
  source 1..75: mol_type = other DNA
atcaccggcggtaagggaaacgtcagtatgaataatggcctgtggcagctgaccggagattccgatatcaacagt

SEQ ID NO: 225769 - DNA, 75 bp, synthetic construct
  source 1..75: mol_type = other DNA
ctgcataaactgggagaaggcaccctgacagtgaacgggagtggcgttaatgaaggaggactcaaggtaggtgat

SEQ ID NO: 225770 - DNA, 75 bp, synthetic construct
  source 1..75: mol_type = other DNA
atgttatttagcgctgtcgccgttaatctcaacaaaatcggctttaattttactaccgatcaactttttttatta

SEQ ID NO: 225771 - DNA, 75 bp, synthetic construct
  source 1..75: mol_type = other DNA
aactgcgttgttgtcaatagcattgaaagtggtgtaatagttggtggtgtacctgccaaaattttaggtaagcta

SEQ ID NO: 225772 - DNA, 75 bp, synthetic construct
  source 1..75: mol_type = other DNA
tgaaattacattcaaacaaaaaaattactactgaagaagaaaacttactatcaagggacattggcgtctatagct

SEQ ID NO: 225773 - DNA, 75 bp, synthetic construct
  source 1..75: mol_type = other DNA
cgctggcgaatgccgcatggatttgggtgccgctactggcgattgctacgatcgccgcctggtcagggatgaatg

SEQ ID NO: 225774 - DNA, 75 bp, synthetic construct
  source 1..75: mol_type = other DNA
tgctctacctcgccacttttggctcgttcatcggcttttccgcgggttttgccatgttggcaaaaacgcagttcc

SEQ ID NO: 225775 - DNA, 75 bp, synthetic construct
  source 1..75: mol_type = other DNA
tatggtgccaatatttggtggacgtcgctggaccgtttttagtaccgctatcctgattattccctgcatctggct

SEQ ID NO: 225776 - DNA, 75 bp, synthetic construct
  source 1..75: mol_type = other DNA
ggcatatgaccgatatcacatgtcagcttaccgatttggcggaaaagcatggaggtagttttgatggctggggcg

SEQ ID NO: 225777 - DNA, 75 bp, synthetic construct
  source 1..75: mol_type = other DNA
acgaatcgctgcacgaaagctaccagaaatggctgaccggcttcacccggcatgcagtatcctggggaatgtgcc

SEQ ID NO: 225778 - DNA, 75 bp, synthetic construct
  source 1..75: mol_type = other DNA
gtggtgagtttatgtaccagcgaacatctgctggtgcatcatccgatgctggaaggcattctgctgtctgaatgt

SEQ ID NO: 225779 - DNA, 75 bp, synthetic construct
  source 1..75: mol_type = other DNA
atccgaacatctactacttccataatctgatggccggatggatatcattcaatggtgaaaaacctgagatcgcca

SEQ ID NO: 225780 - DNA, 75 bp, synthetic construct
  source 1..75: mol_type = other DNA
atcctgattattcccggctttatcccgatgttcttctccaacgccaccatcggcgtgttcgctaaccacttcggc

SEQ ID NO: 225781 - DNA, 75 bp, synthetic construct
  source 1..75: mol_type = other DNA
atgaaaccacagtatcagacccgttacgaaccgctccacgaaagctaccagaaatggctgaccggcttcacccga

SEQ ID NO: 225782 - DNA, 75 bp, synthetic construct
  source 1..75: mol_type = other DNA
gacgactggacgaaaaacctgaaacacaaatcagaaaaagatctggagcaatggatcattgcacgtcagggtcag

SEQ ID NO: 225783 - DNA, 75 bp, synthetic construct
  source 1..75: mol_type = other DNA
tgaccggaaacagccttgaagactggaaagagaacctgaaacggaaatcagaaaaagagctggaggaatggatca

SEQ ID NO: 225784 - DNA, 75 bp, synthetic construct
  source 1..75: mol_type = other DNA
tgatttaatgaccggaaacagccttgaagactggaaagagaacctgaaacggaaatcagaaaaagagctggagga

SEQ ID NO: 225785 - DNA, 75 bp, synthetic construct
  source 1..75: mol_type = other DNA
ggttctcagcagactgaatgtgcaggtgcggttattcaccagaaatggcatgctgcggtacatacccatcctggt

SEQ ID NO: 225786 - DNA, 75 bp, synthetic construct
  source 1..75: mol_type = other DNA
gaaaaagagctggaggaatggatcatcaaccgtcagaagcagagcgcagcactgacggatctgatggatcagtac

SEQ ID NO: 225787 - DNA, 75 bp, synthetic construct
  source 1..75: mol_type = other DNA
tgatcagcctcttccgtcagtttggtggcacggagttgcgcctcaaactggtctggctttgctggcttgatttaa

SEQ ID NO: 225788 - DNA, 75 bp, synthetic construct
  source 1..75: mol_type = other DNA
gtgtggcaacggacaaggcagttccatgatcatgaagatgaaagtggaccagtttttaacccaatcaaacattga

SEQ ID NO: 225789 - DNA, 75 bp, synthetic construct
  source 1..75: mol_type = other DNA
gtctacggcattaacggcgcaatttccgatacttacgcttcgatgatggcaaccatcgaccgcatgggcgatgcc

SEQ ID NO: 225790 - DNA, 75 bp, synthetic construct
  source 1..75: mol_type = other DNA
accaccgatgatgcagggcttcttctccatcggcatcgcctttatggccgtcatcattgtcattgcactggctta

SEQ ID NO: 225791 - DNA, 75 bp, synthetic construct
  source 1..75: mol_type = other DNA
tgcgcaaaagtgtcagcgtgattatcaaaggtacgattaaaaccattattggtttcatgttgttgcaggccgggt

SEQ ID NO: 225792 - DNA, 75 bp, synthetic construct
  source 1..75: mol_type = other DNA
cggttctggcgattgactgtgcagctatctatagcttcgcgccgaacgccgtggtctggggctttatgtggggca

SEQ ID NO: 225793 - DNA, 75 bp, synthetic construct
  source 1..75: mol_type = other DNA
ctgattattccaggctttatcccgatgttcttctccaacgccaccatcggcgtgttcgctaaccacttcggtggc

SEQ ID NO: 225794 - DNA, 75 bp, synthetic construct
  source 1..75: mol_type = other DNA
tttggctactccatgtggaccaccattatctgcaccgcgattctggtttcgctctactggggcattacctccaac

SEQ ID NO: 225795 - DNA, 75 bp, synthetic construct
  source 1..75: mol_type = other DNA
tcctcggcaaaaaagaggagagcgttgaagacctcaaactgcctggctggctgaatattttccacgacaacatcg

SEQ ID NO: 225796 - DNA, 75 bp, synthetic construct
  source 1..75: mol_type = other DNA
cggttctggcgattgactgtgcggcgatctatagcttcgcgccgaacgccgtggtttggggctttatgtggggca

SEQ ID NO: 225797 - DNA, 75 bp, synthetic construct
  source 1..75: mol_type = other DNA
tctccacggcgattgtgatgaccatcttctttggcgccattctgctttccttcggtatcgacaccgtgcaggcga

SEQ ID NO: 225798 - DNA, 75 bp, synthetic construct
  source 1..75: mol_type = other DNA
cagatacctacgcatcgatgatggcaactatcgagcgcatgggcgatgcctatagctgggtgggttacgcggtgt

SEQ ID NO: 225799 - DNA, 75 bp, synthetic construct
  source 1..75: mol_type = other DNA
tgacggatggctgcggtttctccatcggtcaccagcagcagtttgcatcatggattgcttataaagtcgcgccgt

SEQ ID NO: 225800 - DNA, 75 bp, synthetic construct
  source 1..75: mol_type = other DNA
gtctggtgatggggatgatcgaaatctttggttgcgtctgggcggggaaacttaccggtatgagtgcctggatgg

SEQ ID NO: 225801 - DNA, 75 bp, synthetic construct
  source 1..75: mol_type = other DNA
aagaggtgctggatacgatgattgggctggcgcagtcgggtatgacaatgttgtgtgtaacgcatgagatggggt

SEQ ID NO: 225802 - DNA, 75 bp, synthetic construct
  source 1..75: mol_type = other DNA
tggcgatgcattaccttgagcgggtgagaattgccgaacatgcgcataagtttcccggacagatttcaggtggtc

SEQ ID NO: 225803 - DNA, 75 bp, synthetic construct
  source 1..75: mol_type = other DNA
aagaagtgctggatacaatgattgggctggcgcagtcaggtatgacaatgttgtgcgtaacgcacgagatggggt

SEQ ID NO: 225804 - DNA, 75 bp, synthetic construct
  source 1..75: mol_type = other DNA
ccgtctggttcggtattaaagcctcgctggtcgcgccaatgaatcgcctgattgacagcattcgtcatattgcag

SEQ ID NO: 225805 - DNA, 75 bp, synthetic construct
  source 1..75: mol_type = other DNA
cggatatgccgtcgcaactggctgcccggctggatgaggtctgggcggccattaagaccgggctggtcagggggc

SEQ ID NO: 225806 - DNA, 75 bp, synthetic construct
  source 1..75: mol_type = other DNA
taagtttcccggacagatttcaggtggtcagcagcaacgcgttgccattgcgcgttcgctgtgtatgaagccgaa

SEQ ID NO: 225807 - DNA, 75 bp, synthetic construct
  source 1..75: mol_type = other DNA
tgtccgtgggcttccgccctcatgaatacaccttcctggacggtggcggactgcattttctgcgctgggagttga

SEQ ID NO: 225808 - DNA, 75 bp, synthetic construct
  source 1..75: mol_type = other DNA
gctctgaagccctggaagtggcccgtcgtcagtatccggatgacagtcgtctgcatcatgtcctgaaatcggcag

SEQ ID NO: 225809 - DNA, 75 bp, synthetic construct
  source 1..75: mol_type = other DNA
tttctctggcagcatgaccattcccgcccggtaggccagtgtacggtgcgccgggtcagcgaagggctggaaatc

SEQ ID NO: 225810 - DNA, 75 bp, synthetic construct
  source 1..75: mol_type = other DNA
acctgcgcgctgcgctttcccgccgggcggtggcctgtgcctggctttccctgtgccgcagacagcagcgctacc

SEQ ID NO: 225811 - DNA, 75 bp, synthetic construct
  source 1..75: mol_type = other DNA
tgccggctgggtgggtgagggtaaggccagacccctgacgaagtttgattttgaatccatcaccttcagtcatgc

SEQ ID NO: 225812 - DNA, 75 bp, synthetic construct
  source 1..75: mol_type = other DNA
acaggccggtaatggtgatgtggtgacggtgacttctgcgccggttatccgtgtggagcagaagctggataaggg

SEQ ID NO: 225813 - DNA, 75 bp, synthetic construct
  source 1..75: mol_type = other DNA
aatgcaccgctgacgaatctgatggatcagtacgtgctcctggcattccgcacaacggttgacgatagccgcaac

SEQ ID NO: 225814 - DNA, 75 bp, synthetic construct
  source 1..75: mol_type = other DNA
ggaattatcatggccattttactggctctggcaccggtgatgttggtacaggacaaaatgggcgtttttgcctcg

SEQ ID NO: 225815 - DNA, 75 bp, synthetic construct
  source 1..75: mol_type = other DNA
aacaccttgagcaacctgatttcagccgtattgctcatctatctgttccgcctgtatatgttgattcgccaataa

SEQ ID NO: 225816 - DNA, 75 bp, synthetic construct
  source 1..75: mol_type = other DNA
gggattatcatggccattttactggctctggctccagtgatgctggtacaggacaaaatgggcgtttttgcctcg

SEQ ID NO: 225817 - DNA, 75 bp, synthetic construct
  source 1..75: mol_type = other DNA
gatttatggtccggacaaacggaccacgccgcccctggatgatgatctgatagtgaatttatgcaccagtgaaca

SEQ ID NO: 225818 - DNA, 75 bp, synthetic construct
  source 1..75: mol_type = other DNA
aagcagagcgcagcactgacggatctgatggatcagtacgtgctcctggcataccgcacaacggttgacgataag

SEQ ID NO: 225819 - DNA, 75 bp, synthetic construct
  source 1..75: mol_type = other DNA
aatgtgaacgtctgaggcagcgttcgctggcaaataaactgatcagcctcttccgtcagtttggtggcacggagt

SEQ ID NO: 225820 - DNA, 75 bp, synthetic construct
  source 1..75: mol_type = other DNA
tagaagctcaggaagagaaaggcgattacaactccggtacggtgcgctttttgcgtggcgcagtgaaagcctgcc

SEQ ID NO: 225821 - DNA, 75 bp, synthetic construct
  source 1..75: mol_type = other DNA
gcagatcgacgcaaatctggccgcgcatcaccacgaaccgctgtatcacaagaatatacgtgtgaccgacgccaa

SEQ ID NO: 225822 - DNA, 75 bp, synthetic construct
  source 1..75: mol_type = other DNA
atctcgacagcaaagggcgcttatcagtgcccacccgataccgggagcagctgctcgagaacgctaccggtcaaa

SEQ ID NO: 225823 - DNA, 75 bp, synthetic construct
  source 1..75: mol_type = other DNA
tctgacgcccggatggatatcattcaatggtgaaaaacacgagatcgccatcgtaccccagagtctgcaccggct

SEQ ID NO: 225824 - DNA, 75 bp, synthetic construct
  source 1..75: mol_type = other DNA
agtgacggtatgaagattgcccgtccgcgtcagctgtatacaggatatgaaaaacgcgactttaaaagcgatatc

SEQ ID NO: 225825 - DNA, 75 bp, synthetic construct
  source 1..75: mol_type = other DNA
ctctcggttcaaaaggtgtgttcacctttgacccaggcttcacttcaaccgcatcctgcgaatctaaaattactt

SEQ ID NO: 225826 - DNA, 75 bp, synthetic construct
  source 1..75: mol_type = other DNA
cgctcgataccttcgcccgctttagccagaacccggcttaccacacccaactgtcacagccgatcgaaaccgtga

SEQ ID NO: 225827 - DNA, 75 bp, synthetic construct
  source 1..75: mol_type = other DNA
gtgatgcaggcgaaaatgaattatctgcccgtcttaatgagccgctggcaaatggtgccgtgatccacattgtgc

SEQ ID NO: 225828 - DNA, 75 bp, synthetic construct
  source 1..75: mol_type = other DNA
gaaccctgtgggctggctgggtgccgcggctgtatcgggcatgtatgcggcaggggccagtatgatcctgggcgg

SEQ ID NO: 225829 - DNA, 75 bp, synthetic construct
  source 1..75: mol_type = other DNA
gcccgtcttaatgagccgctggcaaatggtgccgtgatccacatcgtaccgcgtctggcaggtgccaaaagtggc

SEQ ID NO: 225830 - DNA, 75 bp, synthetic construct
  source 1..75: mol_type = other DNA
ctggtatcaggtacgcattgccgggcgtgatacaggtgaaacggaattatcagcccgtcttaatgaaccgctggc

SEQ ID NO: 225831 - DNA, 75 bp, synthetic construct
  source 1..75: mol_type = other DNA
gtgatgcaggtgaaaccgaattatcagctcgtcttaatgaaccgctggcgaatggagcagtgatccacatcgtgc

SEQ ID NO: 225832 - DNA, 75 bp, synthetic construct
  source 1..75: mol_type = other DNA
gtgtggcgcagatgctggcccctaaacccagaactccccgcacacaaacaacggataacggtaagcagaacacat

SEQ ID NO: 225833 - DNA, 75 bp, synthetic construct
  source 1..75: mol_type = other DNA
ggccagtcgtcttaatttaccccgccagcaaaaagcaacgatgcaggaaatctggcactcttttgtctccggtat

SEQ ID NO: 225834 - DNA, 75 bp, synthetic construct
  source 1..75: mol_type = other DNA
attatcgcgccaattattcccccttccattccgtttattatcttcggcgtttccagcggattatccatcagtaag

SEQ ID NO: 225835 - DNA, 75 bp, synthetic construct
  source 1..75: mol_type = other DNA
gatgccgggggtaggaattatggcgagtaatctgctgttttctctcggtgccagtatgacgcttggcggtgttgc

SEQ ID NO: 225836 - DNA, 75 bp, synthetic construct
  source 1..75: mol_type = other DNA
cggtgtatttcaggcggtgctgggggcggcgctgattgcggtggcatggtggaaccctgcaggctggctgggtgc

SEQ ID NO: 225837 - DNA, 75 bp, synthetic construct
  source 1..75: mol_type = other DNA
gtgaaaacgggtgccgaagccatccgggcgctggccatgcagatcccggcgtttcgtcagaaactgagcaacggc

SEQ ID NO: 225838 - DNA, 75 bp, synthetic construct
  source 1..75: mol_type = other DNA
ggtgaaatgcgcgtggggtcccgcgtggtatctcaggagatcagcactgcagaagaaggcgatggtggtcaggtt

SEQ ID NO: 225839 - DNA, 75 bp, synthetic construct
  source 1..75: mol_type = other DNA
ggtgaaatgcgcgtgggctcccgagtggtatctcaggagatcagcactgcagacgaaggcgatggtggtcaggtt

SEQ ID NO: 225840 - DNA, 75 bp, synthetic construct
  source 1..75: mol_type = other DNA
tttcgtcagaaactgagcgatggctggtatcaggtgcgcattgccgggcgtgatgcaggcgaaaacgaattatca

SEQ ID NO: 225841 - DNA, 75 bp, synthetic construct
  source 1..75: mol_type = other DNA
tggctcccggcgaatatcccaggacgtcagcacccgtgatgaaggcgctggcgggaaggtggtggttatcgggcg

SEQ ID NO: 225842 - DNA, 75 bp, synthetic construct
  source 1..75: mol_type = other DNA
gggtaatcctgtgccggtgccatacggtgaaatgctggttggttcccgacggatatcccaggacatcagtacccg

SEQ ID NO: 225843 - DNA, 75 bp, synthetic construct
  source 1..75: mol_type = other DNA
ggtgaaatgcgcgtgggttcccgcgtggtatctcaggagatcagcactgcagatgaaggcgatggtggtcaggtt

SEQ ID NO: 225844 - DNA, 75 bp, synthetic construct
  source 1..75: mol_type = other DNA
ggtgaaatgcgcgtgggatcccgcgtggtatctcaggagatcagcactgcagaggaaggcgatggtggtcaggtt

SEQ ID NO: 225845 - DNA, 75 bp, synthetic construct
  source 1..75: mol_type = other DNA
aacaccggagtacagggcgacggataacggcaaacagaacacgtacttttcctcactggataacatgattgccca

SEQ ID NO: 225846 - DNA, 75 bp, synthetic construct
  source 1..75: mol_type = other DNA
gtctggacggtccggcaatggcgtactggattcgccgttgttgtgaactgaaggcagaagttgtcgccgccgacg

SEQ ID NO: 225847 - DNA, 75 bp, synthetic construct
  source 1..75: mol_type = other DNA
aaagcagaagttgtcgctgccgacgagcgcgaatccggcttacgtgctttactgaatctgggacatacctttggt

SEQ ID NO: 225848 - DNA, 75 bp, synthetic construct
  source 1..75: mol_type = other DNA
cgaaactttggctcctctgtatctcgataaggttcgcggtgtactcgaacaggcgggtgttaacgttgattgcgt

SEQ ID NO: 225849 - DNA, 75 bp, synthetic construct
  source 1..75: mol_type = other DNA
cactcatcgtctggtggctaatgtatggcggttttctcggtctagcgcgggttgaaacccggcaatggggcgggc

SEQ ID NO: 225850 - DNA, 75 bp, synthetic construct
  source 1..75: mol_type = other DNA
attgcggtatgggcggtgatttacccactgattgtctggtggctgatgtatggcggggttcttggtcttgagcgg

SEQ ID NO: 225851 - DNA, 75 bp, synthetic construct
  source 1..75: mol_type = other DNA
cgggagcaaaaagtggcggtgtgtttcaggcggtgctgggtgcggcgttgattgctacggcaatctggatgccgg

SEQ ID NO: 225852 - DNA, 75 bp, synthetic construct
  source 1..75: mol_type = other DNA
gggaacgtagttacccaattaccatcgcatctggtttgtttaatgaaccagcttcattcttaccgctgaaatcgg

SEQ ID NO: 225853 - DNA, 75 bp, synthetic construct
  source 1..75: mol_type = other DNA
cctggtgccgtggtcggttttatctcctggttatttgcgctggcgatgccgatgttgatttatggctctaacacg

SEQ ID NO: 225854 - DNA, 75 bp, synthetic construct
  source 1..75: mol_type = other DNA
aaaagcctggctgtactcgataccgtctttacggcattgttacaaaagccgcatggtcgcgatactacgctggtg

SEQ ID NO: 225855 - DNA, 75 bp, synthetic construct
  source 1..75: mol_type = other DNA
tatccttcctgacggcgagcagtataaaagcctggcagtactcgacaccgtttttacggcgttgttgcaaaagcc

SEQ ID NO: 225856 - DNA, 75 bp, synthetic construct
  source 1..75: mol_type = other DNA
tgacggtgagtttttcaactggctggaagataatctggatgcattgctcggtctggatggttcggcaatggcgta

SEQ ID NO: 225857 - DNA, 75 bp, synthetic construct
  source 1..75: mol_type = other DNA
ggctcacggcgaatctcccaggacatcagtacccgtgatgaaggcggtgacgggaaggtggtggttatcgggcgg

SEQ ID NO: 225858 - DNA, 75 bp, synthetic construct
  source 1..75: mol_type = other DNA
ttcctgcaagaactggccctgccccgtcctttccgctttatcgccccctcgcagtttaaaaaccatgaaaccatg

SEQ ID NO: 225859 - DNA, 75 bp, synthetic construct
  source 1..75: mol_type = other DNA
tttcgtcagaaactgaatgagggctggtatcaggtgcgcattgccgggcgtgatgcaggcgaaaatgaattatct

SEQ ID NO: 225860 - DNA, 75 bp, synthetic construct
  source 1..75: mol_type = other DNA
gctgggctacgtcggcgtgctggcggctatgattatggcgagcctttctggttctgctgttgcggataccgccgc

SEQ ID NO: 225861 - DNA, 75 bp, synthetic construct
  source 1..75: mol_type = other DNA
tctggcactcttttgtctccggtatctgggcgctgtttcttccagtcatcattattggcgggtttcgctccggtc

SEQ ID NO: 225862 - DNA, 75 bp, synthetic construct
  source 1..75: mol_type = other DNA
tttgcctattgcctgggcactgttgttgtgcggggcggcgttaatgttctggctggacatgtttgatgtccagat

SEQ ID NO: 225863 - DNA, 75 bp, synthetic construct
  source 1..75: mol_type = other DNA
atgcgtaatagccataacattacactaacaaataacgacagccttactgaggatgaagaaaccacatggtcactg

SEQ ID NO: 225864 - DNA, 75 bp, synthetic construct
  source 1..75: mol_type = other DNA
gtgaaaacgggtgccgaagccatccgggcgatggccacacagctccctgcgtttcgtcagaagctgagcgacggc

SEQ ID NO: 225865 - DNA, 75 bp, synthetic construct
  source 1..75: mol_type = other DNA
tgttcggtgaaatgcgcgtggggtcacgtgtggcatctcaggaaatcagtacagctgatgaaggtgatggtggtg

SEQ ID NO: 225866 - DNA, 75 bp, synthetic construct
  source 1..75: mol_type = other DNA
agctggccgtacgtgaagcgctcaattacgcggtaaacaaaaaatcgctgatcgataacgcgttgtatggcaccc

SEQ ID NO: 225867 - DNA, 75 bp, synthetic construct
  source 1..75: mol_type = other DNA
atacacctttctggacggaggcggactgcattttctgcgctgggagctgatggaggtgtctgccgtcaccgtgcc

SEQ ID NO: 225868 - DNA, 75 bp, synthetic construct
  source 1..75: mol_type = other DNA
ggaagcccgtcagcaatccccggctggctgcgtgatggtatttactgcccgcatccgtcaggaggaacactatgc

SEQ ID NO: 225869 - DNA, 75 bp, synthetic construct
  source 1..75: mol_type = other DNA
aagggcgggactcgcacaacctgaataaatacatctggcgttttatcgccctgagcacggcacaaccgcgcgtaa

SEQ ID NO: 225870 - DNA, 75 bp, synthetic construct
  source 1..75: mol_type = other DNA
ggaagcacgccagcaatccccggctggctgcgtgatggtattcgctgcccgtattcgccaggggtcacatcatgc

SEQ ID NO: 225871 - DNA, 75 bp, synthetic construct
  source 1..75: mol_type = other DNA
aagggcgggactcgcacaacctgaataaatacatctggcgttttatcgccctgagcacggcacagccgcgcgtga

SEQ ID NO: 225872 - DNA, 75 bp, synthetic construct
  source 1..75: mol_type = other DNA
attgaggccaccagcgaacaggaagcgcgccagcaatctccggctggctgcgtgatggtattcgctgcccgtatt

SEQ ID NO: 225873 - DNA, 75 bp, synthetic construct
  source 1..75: mol_type = other DNA
ggaagcgcgtcagcaatctcctgatggctgcgtgatggtattcgctgcccgtattcgtcagggggtacgccatgt

SEQ ID NO: 225874 - DNA, 75 bp, synthetic construct
  source 1..75: mol_type = other DNA
agtgtggttttaccgcatatacgctctactggcattgtccgtcatgtcgggcctggtcaaccattaaacccattc

SEQ ID NO: 225875 - DNA, 75 bp, synthetic construct
  source 1..75: mol_type = other DNA
gtgaactggcgctccagcatatggccagcgacgatcttgatcgcgctatgaccttgttgagaaaaggggcggcgg

SEQ ID NO: 225876 - DNA, 75 bp, synthetic construct
  source 1..75: mol_type = other DNA
tacaacgccatccgacgatgcgcgtgttccacaagttgatggattaccaccttaacgaagcggaagaagggcgcg

SEQ ID NO: 225877 - DNA, 75 bp, synthetic construct
  source 1..75: mol_type = other DNA
ggaagcacgccagcaatccccggctggctgcgtgatggtattcgccgcccgtattcgtcagggggtgagtcatgc

SEQ ID NO: 225878 - DNA, 75 bp, synthetic construct
  source 1..75: mol_type = other DNA
ttaaatgaagcggaagaagggcgtgccaaagagagtctgatggtgctgcgtgacatggttggcgagaaggtacgt

SEQ ID NO: 225879 - DNA, 75 bp, synthetic construct
  source 1..75: mol_type = other DNA
caaaacaagcaagatgaagccaaccgcttgtcgcgtgattacgtagcaggggttaacttcctgcttagtaatcaa

SEQ ID NO: 225880 - DNA, 75 bp, synthetic construct
  source 1..75: mol_type = other DNA
ggaagcacgccagcaatctcctgatggctgtgtgatggtattcgccgcccgtattcgtcagggggtgagccatgc

SEQ ID NO: 225881 - DNA, 75 bp, synthetic construct
  source 1..75: mol_type = other DNA
gccggtttctttggactgcttggcgttttgctacagcacacctgcatcttgctctggcaagccccactctcgaat

SEQ ID NO: 225882 - DNA, 75 bp, synthetic construct
  source 1..75: mol_type = other DNA
ggaacgccgcagcgacttatgttccgcaatcccgcgatgccgtggtatgtgatatccgccggattggtgacctgc

SEQ ID NO: 225883 - DNA, 75 bp, synthetic construct
  source 1..75: mol_type = other DNA
cttttgttggaaaagtaaaaagaaaatgttagcgattgaatccaatttcccatacgttactgctgtgttgcctca

SEQ ID NO: 225884 - DNA, 75 bp, synthetic construct
  source 1..75: mol_type = other DNA
tggtgtgtttatctgcgatgaaactctccgtgatggaattatcatcaacggtgaattcgagaaagcaaaatttag

SEQ ID NO: 225885 - DNA, 75 bp, synthetic construct
  source 1..75: mol_type = other DNA
gaaacggacagcattcaggctgaaattgataaatggactttaatggcgcgggaactggaacagtacccagatctc

SEQ ID NO: 225886 - DNA, 75 bp, synthetic construct
  source 1..75: mol_type = other DNA
agcgcggggatcaatgagcacagtgcgaaatacatagagaacctggaagcaacaaaagagctaatgaagcagtac

SEQ ID NO: 225887 - DNA, 75 bp, synthetic construct
  source 1..75: mol_type = other DNA
tggtatgcggcgtggcgaaacttaaatttgacgatgcggtaaaaggcgttgcgccttacgtcatggttttattca

SEQ ID NO: 225888 - DNA, 75 bp, synthetic construct
  source 1..75: mol_type = other DNA
catagacgatcctatatcctcactggatgagcataacgctatcacagttggtaaccatctggcacaactattgaa

SEQ ID NO: 225889 - DNA, 75 bp, synthetic construct
  source 1..75: mol_type = other DNA
atgactatcttaatagaaaaaattcccatgccaagtaggctcttactgacatggcaaccgaccgacggcggctct

SEQ ID NO: 225890 - DNA, 75 bp, synthetic construct
  source 1..75: mol_type = other DNA
ccgcgaaacgttttcagttaatccgcctgacacatattgataagcactggaccagcgcgaaaatgcagcgtgaac

SEQ ID NO: 225891 - DNA, 75 bp, synthetic construct
  source 1..75: mol_type = other DNA
gcgccaggcatcatgatgggcgttacgctgatggtaacctggtggtggcaggcaaaacgtcttaatctgcctcgc

SEQ ID NO: 225892 - DNA, 75 bp, synthetic construct
  source 1..75: mol_type = other DNA
cggcgggattattgcggccattatcccgccttccataccactcattatcttcggcgtctccagcggactctccat

SEQ ID NO: 225893 - DNA, 75 bp, synthetic construct
  source 1..75: mol_type = other DNA
gtctggcgtcacgccatcggtacgccagcatcgcaagataaactgatttacgaagaaaaagacgatacctattac

SEQ ID NO: 225894 - DNA, 75 bp, synthetic construct
  source 1..75: mol_type = other DNA
ttgatgcctgcgatgcattgttaaaactgggctatggctctccttcgctctgttatgcgatgggcggagtgcggg

SEQ ID NO: 225895 - DNA, 75 bp, synthetic construct
  source 1..75: mol_type = other DNA
gaatttgaagagtgggggaatccgcaggatccgcaatattacgagtatatgaaaagctacagcccgtatgacaac

SEQ ID NO: 225896 - DNA, 75 bp, synthetic construct
  source 1..75: mol_type = other DNA
gaaaagctatagtccgtatgacaatgtcacggcgcaggcttatccgcacttgctggtgactaccggtttacatga

SEQ ID NO: 225897 - DNA, 75 bp, synthetic construct
  source 1..75: mol_type = other DNA
atgctatctaccagcgtcaatcggcattcagtgaagagtgggatgagtgggaaacattgctcgatgccaataagc

SEQ ID NO: 225898 - DNA, 75 bp, synthetic construct
  source 1..75: mol_type = other DNA
ctgtgaatatgccatctatcagcgtcagtcggcgtttagtgaagaatgggacgaatgggagactttgcttgatgc

SEQ ID NO: 225899 - DNA, 75 bp, synthetic construct
  source 1..75: mol_type = other DNA
ctgcgctctggcaacacgacttcactgcactggctgatccccatattgttagcgttgtttactttgtcatgtttg

SEQ ID NO: 225900 - DNA, 75 bp, synthetic construct
  source 1..75: mol_type = other DNA
acgcgattaaacttgatgatcaatggaccgtgcgcccaggaatgttaacccattttagcagcaatggcacacgct

SEQ ID NO: 225901 - DNA, 75 bp, synthetic construct
  source 1..75: mol_type = other DNA
aatgatgttcaggttgaagttaattacgcgattaaacttgatgatcaatggaccgtgcgcccaggaatgttaacc

SEQ ID NO: 225902 - DNA, 75 bp, synthetic construct
  source 1..75: mol_type = other DNA
cctatgtgacctggattgcctacaatccagaacctgaaaccgcgcgattgcgttatggttattcttccatgacca

SEQ ID NO: 225903 - DNA, 75 bp, synthetic construct
  source 1..75: mol_type = other DNA
gttaggcaataccaaaacggtgaaaggctggctggcgcagcttccggctaaatatcaccagcgcgccacttgtat

SEQ ID NO: 225904 - DNA, 75 bp, synthetic construct
  source 1..75: mol_type = other DNA
ctgctggctggacgttttctcgcatttgtccgtacgctgttgccaaccatggcgggtatttccggtctgccaaac

SEQ ID NO: 225905 - DNA, 75 bp, synthetic construct
  source 1..75: mol_type = other DNA
ctgtgaatatgctatctaccagcgtcaatcggcgttcagtgaagagtgggatgagtgggaaacattgctcgatgc

SEQ ID NO: 225906 - DNA, 75 bp, synthetic construct
  source 1..75: mol_type = other DNA
ggtgatgcttatccggggcgctggctggcgattaaccctggaaccgctgccgggacgttacctggtgaggcgacc

SEQ ID NO: 225907 - DNA, 75 bp, synthetic construct
  source 1..75: mol_type = other DNA
acagtggcagatccttgccggacctattttgatcctgctgatcttgtcgatgatggtgctgccactgcccgcatt

SEQ ID NO: 225908 - DNA, 75 bp, synthetic construct
  source 1..75: mol_type = other DNA
gcaactggtggtgctttcgaatctcgaactctctgataaccgccaaatccgtatgacggcgacgattggcggcaa

SEQ ID NO: 225909 - DNA, 75 bp, synthetic construct
  source 1..75: mol_type = other DNA
aatatcgtgttgatcgcctgagtggtgatctggaggtgaagggcagaaccgcagggcaatcgctggagcctaccg

SEQ ID NO: 225910 - DNA, 75 bp, synthetic construct
  source 1..75: mol_type = other DNA
gtgcaaaaattgcctatatcaacggactgaaatcaccgtcagagcagcaaagattacttgtgttactggcagaga

SEQ ID NO: 225911 - DNA, 75 bp, synthetic construct
  source 1..75: mol_type = other DNA
tgatttctaccgccgcgggggttatcgttacgcgcgtcagcactgatcaggatgttggcgaacagatggtgaatc

SEQ ID NO: 225912 - DNA, 75 bp, synthetic construct
  source 1..75: mol_type = other DNA
cggcactgctcactgcaaacggtctgtacgctgtggtattcgtgatgtgcttcctgttaggttttgtcagccgtc

SEQ ID NO: 225913 - DNA, 75 bp, synthetic construct
  source 1..75: mol_type = other DNA
tttgccggaagtcggatgttgcaagggctcttgagaggagaaggtctggagaccgggcggcgacacgtcgccacg

SEQ ID NO: 225914 - DNA, 75 bp, synthetic construct
  source 1..75: mol_type = other DNA
atgaaagttcaggccgttggtttattctggtttcgcgatgctattcagtatcatgagctcaaaaatatttttact

SEQ ID NO: 225915 - DNA, 75 bp, synthetic construct
  source 1..75: mol_type = other DNA
gaaatttgcccaggagatggggtttctgccgccagtggtgcacattcgcgacaatatggatctgcaacctgcccg

SEQ ID NO: 225916 - DNA, 75 bp, synthetic construct
  source 1..75: mol_type = other DNA
gagcgattacccagcagtggttccccggcaaagatgaagtccatgttattggcctcgatacaccgctggaacgtt

SEQ ID NO: 225917 - DNA, 75 bp, synthetic construct
  source 1..75: mol_type = other DNA
ctggcatctgctgacgtcagaaaaagtggcgtgtgccgccgatgcgcggcgtatcgtcagccactacgaacgacg

SEQ ID NO: 225918 - DNA, 75 bp, synthetic construct
  source 1..75: mol_type = other DNA
cgcgttcgccagacctatgcattactggcgaaacaatatggtgtgaaatggaatggtcgcaaatacgatcctaaa

SEQ ID NO: 225919 - DNA, 75 bp, synthetic construct
  source 1..75: mol_type = other DNA
gagccaccgccagctcgccgttcagtggatcagctacggggaattgagggatcccgcgttcgccagacctatgca

SEQ ID NO: 225920 - DNA, 75 bp, synthetic construct
  source 1..75: mol_type = other DNA
ccggatatgttaccgccagctatcccggaacctgaaacgctgggtgatagtggtcaccgggggcgcagcggatga

SEQ ID NO: 225921 - DNA, 75 bp, synthetic construct
  source 1..75: mol_type = other DNA
tgttaaacatttgctgacgcgcccggaggttgaaatcatcgcctgcggtaaaaatagcgcctataccctgaaaaa

SEQ ID NO: 225922 - DNA, 75 bp, synthetic construct
  source 1..75: mol_type = other DNA
aaattttttgtgacgatggactctatgctgtgtgcgttgaaaatggaaatattgttagccattaccgcattaagt

SEQ ID NO: 225923 - DNA, 75 bp, synthetic construct
  source 1..75: mol_type = other DNA
gaaattgaaccaccacaacccgcgccggatatgttaccgcctgccatccctgaacctgaaaccttaggcgatagc

SEQ ID NO: 225924 - DNA, 75 bp, synthetic construct
  source 1..75: mol_type = other DNA
aattaattttgtggatgctcgggtcacggacggatttatcttgcgcgaaggtgagtttgtcacttcattacaggc

SEQ ID NO: 225925 - DNA, 75 bp, synthetic construct
  source 1..75: mol_type = other DNA
agctattggtgccagtgcgccgatattgccaaagttatttattctgatttttctgactacccttttagtacagat

SEQ ID NO: 225926 - DNA, 75 bp, synthetic construct
  source 1..75: mol_type = other DNA
ctcaatgacggcgtgcccgttagcggcagtagtgggttgttcgacctggttcagaatatgtcaccggaacagcaa

SEQ ID NO: 225927 - DNA, 75 bp, synthetic construct
  source 1..75: mol_type = other DNA
ggccgccacggtgggaacactgctggtctgggtcggtgaagcgggcgttcgcgtttactcttccggacaacccgg

SEQ ID NO: 225928 - DNA, 75 bp, synthetic construct
  source 1..75: mol_type = other DNA
ttactggcgaagcaatatggtgtgaaatggaatggtcgcaaatacgatcctaaagactgggaaaaaggcgatgtt

SEQ ID NO: 225929 - DNA, 75 bp, synthetic construct
  source 1..75: mol_type = other DNA
taaagactgggaaaaaggcgatgttgtgaatcgctgcatcagtgctgccacatcatgtctgtacggtatttctga

SEQ ID NO: 225930 - DNA, 75 bp, synthetic construct
  source 1..75: mol_type = other DNA
taactgaactgattgattatctagattatggcaatactggagcttatttcgctcagccaacccagggaatgcaaa

SEQ ID NO: 225931 - DNA, 75 bp, synthetic construct
  source 1..75: mol_type = other DNA
gactcattagccgcattgcgcctagcccatccagtgttatggtcgttggtgaaagtggcaccgggaaagaagtgg

SEQ ID NO: 225932 - DNA, 75 bp, synthetic construct
  source 1..75: mol_type = other DNA
tcatttctgcaactaaccagaatttggctcagtttattgctgaaggtaagtttcgtgaggatctcttctatcgcc

SEQ ID NO: 225933 - DNA, 75 bp, synthetic construct
  source 1..75: mol_type = other DNA
agcccaatacaggtcgacattcgcatcatttctgcaactaaccagaatttggctcagtttattgctgaaggtaag

SEQ ID NO: 225934 - DNA, 75 bp, synthetic construct
  source 1..75: mol_type = other DNA
gagcaaagtgatgtaacagaggtcagcgaggcgcacctggcactcgatgatgcgggcggcacggcgctggaggag

SEQ ID NO: 225935 - DNA, 75 bp, synthetic construct
  source 1..75: mol_type = other DNA
atcggtttatccgggcattgctcccgatgtcgtcgaaatattgcgtaagcatcgttggcccggaaacctgcgcga

SEQ ID NO: 225936 - DNA, 75 bp, synthetic construct
  source 1..75: mol_type = other DNA
gctaagcaatttgatggaatatctggtcaacgttgttccttcaggtgaagtcattgacagcacactcctgccgcc

SEQ ID NO: 225937 - DNA, 75 bp, synthetic construct
  source 1..75: mol_type = other DNA
attgatgaggaaaatcgggttcagtttgttaaccagacagcattaaaaacgcttggtgtcgtgcaaaataatatc

SEQ ID NO: 225938 - DNA, 75 bp, synthetic construct
  source 1..75: mol_type = other DNA
gaacgtcaggaagatattgaactactggtgcattactttttacatctgcatacccgtcgtctgggatcggtttat

SEQ ID NO: 225939 - DNA, 75 bp, synthetic construct
  source 1..75: mol_type = other DNA
gcggaaaaaaactgggcggattacgaagcgttgccgcgtgacccgcgtcagagcaccgccgcagcgtcagagatc

SEQ ID NO: 225940 - DNA, 75 bp, synthetic construct
  source 1..75: mol_type = other DNA
gctatcaactgtgccgcgattccggagcagcttctggagagcgagctgttcggttatgttaaaggcgcatttact

SEQ ID NO: 225941 - DNA, 75 bp, synthetic construct
  source 1..75: mol_type = other DNA
agtcgcggatgaactgggaattggtattgcaaccctctatcgtaagataaaaaaatatgaattgctggacgcatg

SEQ ID NO: 225942 - DNA, 75 bp, synthetic construct
  source 1..75: mol_type = other DNA
aattgttgcgggctattgaagcgcgagagatcctgccgattggcgccagcagtccgatacaggtcgatatccgta

SEQ ID NO: 225943 - DNA, 75 bp, synthetic construct
  source 1..75: mol_type = other DNA
cctgaagaaggaaaaactttcactaaaggagacaaagtgttaattatttgccgactttctgcaacgcgatatttg

SEQ ID NO: 225944 - DNA, 75 bp, synthetic construct
  source 1..75: mol_type = other DNA
cctttatgactccatagaaccgatcatctgcgaccgctggccgcaagcaaaaatatatcgcctggcagatattga

SEQ ID NO: 225945 - DNA, 75 bp, synthetic construct
  source 1..75: mol_type = other DNA
agccctaactacaatgatggtaaatcagttagttaccatgtgccactgtgtggcgtgtttatctgcgatgaaact

SEQ ID NO: 225946 - DNA, 75 bp, synthetic construct
  source 1..75: mol_type = other DNA
aaaggcgatcttaagggatttgattttggtgtcttccagtggcacgccgacggttcatccacggcagccaagtga

SEQ ID NO: 225947 - DNA, 75 bp, synthetic construct
  source 1..75: mol_type = other DNA
gggcgtatccggcggattgacgaagatgcgattcatcgtcaactggacagcggtgcgatagtgctgctggggccg

SEQ ID NO: 225948 - DNA, 75 bp, synthetic construct
  source 1..75: mol_type = other DNA
tgtttacgattattgcggtgcattataccggtaaaatagttgcgccctggattccacgcgaccagagctcagcta

SEQ ID NO: 225949 - DNA, 75 bp, synthetic construct
  source 1..75: mol_type = other DNA
ttacagaagacgattatattggctgcatggcattaattaccggacatcaggccacttcaggtaacccctgtgaag

SEQ ID NO: 225950 - DNA, 75 bp, synthetic construct
  source 1..75: mol_type = other DNA
agctctcgtcgttctctgcttacatgctggtttttttggccttattggcatcctgctacagcaggtctgcatcat

SEQ ID NO: 225951 - DNA, 75 bp, synthetic construct
  source 1..75: mol_type = other DNA
atttttgcgcttatctgcggtcacatgctctccggtgctcttgatgcacatcttgaccattatgattccataacc

SEQ ID NO: 225952 - DNA, 75 bp, synthetic construct
  source 1..75: mol_type = other DNA
agccctaactacaatgatggtaaatcagttagttaccatgtgccgctatgtggcgtgtttatctgcgatgaaact

SEQ ID NO: 225953 - DNA, 75 bp, synthetic construct
  source 1..75: mol_type = other DNA
gcgctgatctactggatcttctgtttcagcatgtcgcgctatagccagcatctggaaaaacgttttaacaccggg

SEQ ID NO: 225954 - DNA, 75 bp, synthetic construct
  source 1..75: mol_type = other DNA
aaatactcccgcatcgcggtcgctatattgcggtctgggcagtgatttacccactgattgtctggtggctgatgt

SEQ ID NO: 225955 - DNA, 75 bp, synthetic construct
  source 1..75: mol_type = other DNA
gttgaggccagcgacatcaacgtgtttttttccgagttgggtgagaaggaagagtacaacgcgcaggatgtattg

SEQ ID NO: 225956 - DNA, 75 bp, synthetic construct
  source 1..75: mol_type = other DNA
ccgatggttcgtgtctgggtaatcccgggccgggtggttatggcgctattttacgctatcgcggacgcgaaaaaa

SEQ ID NO: 225957 - DNA, 75 bp, synthetic construct
  source 1..75: mol_type = other DNA
taaaagaacattgcgaagtcattttgagtaccgacagccagtatgtccgccaggggatcactcagtggatccata

SEQ ID NO: 225958 - DNA, 75 bp, synthetic construct
  source 1..75: mol_type = other DNA
ggtccactcaaaaccgccccgtcgctgtcctttctcgggctggccgtgatggatgagctttgcgcccgtcatatc

SEQ ID NO: 225959 - DNA, 75 bp, synthetic construct
  source 1..75: mol_type = other DNA
acagcgacgctaaaatcggagacatcgtggcgctcgataaccagcacatcctgctgatcgaacagggaagagata

SEQ ID NO: 225960 - DNA, 75 bp, synthetic construct
  source 1..75: mol_type = other DNA
gggctggattgacaaaaaagcattcgccagcgttaaaggaatgaatgaacctgctgatggtgcaatgaatctcgt

SEQ ID NO: 225961 - DNA, 75 bp, synthetic construct
  source 1..75: mol_type = other DNA
gccaacgttaaagggatgaatgaacctgctgatggtgcaatcaatctcgttaaaacaagtaatggttggaaagcc

SEQ ID NO: 225962 - DNA, 75 bp, synthetic construct
  source 1..75: mol_type = other DNA
gcagggcaatcgctggagcctaccgccgttaagtcggacaagttggttatctctgtggatacgctgagctatatc

SEQ ID NO: 225963 - DNA, 75 bp, synthetic construct
  source 1..75: mol_type = other DNA
gatattatttttacctgtcagaacattatcagatggagcgtgcaggatggatgaagaaagggtgttttcactcag

SEQ ID NO: 225964 - DNA, 75 bp, synthetic construct
  source 1..75: mol_type = other DNA
atcttactattacaaaacaaagggctctccaagagcttgctaaacatggcgttgaggccagcgacatcaacgtgt

SEQ ID NO: 225965 - DNA, 75 bp, synthetic construct
  source 1..75: mol_type = other DNA
aagcgaggaagactatgcgcgggagatggtggaggacaacggcctgttaaatgaggtgccggagccgttgcgcag

SEQ ID NO: 225966 - DNA, 75 bp, synthetic construct
  source 1..75: mol_type = other DNA
aagaagtgctggatacgatgattgggctggcgcagtcgggtatgacaatgttgtgtgtaacacatgagatggggt

SEQ ID NO: 225967 - DNA, 75 bp, synthetic construct
  source 1..75: mol_type = other DNA
cgcgcgttgaagatgtgcatcccatatcggaacgaccacagtatttttctggtgatggtaaaagtggaaagatcc

SEQ ID NO: 225968 - DNA, 75 bp, synthetic construct
  source 1..75: mol_type = other DNA
cgccggaagaacaggaagtagcggcacaacaacaggcacttcagcaacaacaggcagaactccagatgcgcgaga

SEQ ID NO: 225969 - DNA, 75 bp, synthetic construct
  source 1..75: mol_type = other DNA
aaccaggcacatacggcagaaatcattaccggcatacagaatatggaacaggagcaggaagttcttcagcaacag

SEQ ID NO: 225970 - DNA, 75 bp, synthetic construct
  source 1..75: mol_type = other DNA
tggcgatcagcaacctggtggagcagggagccacaacccttgccgaaatcaacgataactaccagtttgcctgcc

SEQ ID NO: 225971 - DNA, 75 bp, synthetic construct
  source 1..75: mol_type = other DNA
cactgctggatgaacgggaaagaaacctgcaatacatcaaacgccgcgatcaggagaacgaggatattgcgctaa

SEQ ID NO: 225972 - DNA, 75 bp, synthetic construct
  source 1..75: mol_type = other DNA
gaacgaatggcttcagcgtgaacgccgccgcgtgcttcttcaggtggtttattaccgcacattcgatcgcctgcc

SEQ ID NO: 225973 - DNA, 75 bp, synthetic construct
  source 1..75: mol_type = other DNA
ttaccggcgtacagaatatggaacaggagcaggacgttcttcagcaacagatgctgtatacgttacaacagcgga

SEQ ID NO: 225974 - DNA, 75 bp, synthetic construct
  source 1..75: mol_type = other DNA
cgaaaacggccggcttgttgccgatacgctacgccacttagctgataacgaaatcgactctgattattttgctat

SEQ ID NO: 225975 - DNA, 75 bp, synthetic construct
  source 1..75: mol_type = other DNA
ccgttggtcggagaaaacgaaaatgcgttatttttcccaaccaaatccatcgaactgcttttcacacagagcgat

SEQ ID NO: 225976 - DNA, 75 bp, synthetic construct
  source 1..75: mol_type = other DNA
ttctttctttaggcctagggatattattgtctacttcaacaaaattagggcatgtcataaaaataatgtctcagg

SEQ ID NO: 225977 - DNA, 75 bp, synthetic construct
  source 1..75: mol_type = other DNA
aaagcccgctctgatgcctatgcggaacaaatcaaggcggggctcagctgggtggaggtcagacggaacagcgat

SEQ ID NO: 225978 - DNA, 75 bp, synthetic construct
  source 1..75: mol_type = other DNA
cttatgctcatggtcagggattcaacggcttacgtggtcaataagctgggggtgaaatttggtacaatactgaca

SEQ ID NO: 225979 - DNA, 75 bp, synthetic construct
  source 1..75: mol_type = other DNA
ctcacttaaaaaagacattctcatctattttggaaaaggcatttataaatacagttagttatgactcgaaactgt

SEQ ID NO: 225980 - DNA, 75 bp, synthetic construct
  source 1..75: mol_type = other DNA
cttatgctcatggtcagggattcaacggcttacgtggtcaataagctgggggtgaaatttggaacaatactgact

SEQ ID NO: 225981 - DNA, 75 bp, synthetic construct
  source 1..75: mol_type = other DNA
tcagaatcgtggcttcaactacttcatgggctatcacgcatccggcgtttcactttataactccccgtcattgtt

SEQ ID NO: 225982 - DNA, 75 bp, synthetic construct
  source 1..75: mol_type = other DNA
tgaaaacgggtgattatgacaaactggtttcatcaatggacttctatccgaccgctttagatgccgcagatatca

SEQ ID NO: 225983 - DNA, 75 bp, synthetic construct
  source 1..75: mol_type = other DNA
taaagatctctctgcatcccatcctgatgtagttaagaatatgaagaatgagatgaacgcatcccccaacattaa

SEQ ID NO: 225984 - DNA, 75 bp, synthetic construct
  source 1..75: mol_type = other DNA
tggtcgaaagcgccggggaaacaatggcggagattgtcagtgctgtgacccgcgtgacggacattatgggcgaaa

SEQ ID NO: 225985 - DNA, 75 bp, synthetic construct
  source 1..75: mol_type = other DNA
catcatacaaaataacatatttcaaagtattaattatcttttatacaaaatggagcgtaaagatgacattaaaaa

SEQ ID NO: 225986 - DNA, 75 bp, synthetic construct
  source 1..75: mol_type = other DNA
ctgatgaagcaattggtgtaattgaccgtgcaagcaaactggaacagccatttatgatttatctggcatacagtg

SEQ ID NO: 225987 - DNA, 75 bp, synthetic construct
  source 1..75: mol_type = other DNA
gaagtcagacgcgatttgtggatatcgccgaacctgtctgcggtaaaggcgaagtgttactcaatgttgagcgtg

SEQ ID NO: 225988 - DNA, 75 bp, synthetic construct
  source 1..75: mol_type = other DNA
ctcactacccgctggaacaggctgatcacgcttttagcgactgggcaagtgatcccggcgcgtataccaaaatcc

SEQ ID NO: 225989 - DNA, 75 bp, synthetic construct
  source 1..75: mol_type = other DNA
gctggcattgatggagtccgggcgttatccggtcagcaatctggtgagtgctcactacccgctggaacaggctga

SEQ ID NO: 225990 - DNA, 75 bp, synthetic construct
  source 1..75: mol_type = other DNA
ctggatccgaacattccatatacacatccaagcttagcgcgcacgggagaggtgaagggcttgtatgtcccagaa

SEQ ID NO: 225991 - DNA, 75 bp, synthetic construct
  source 1..75: mol_type = other DNA
aaacggcagaaattgccataaaagccgcgcaaaccggtcacctggtgttgtctaccctacacactaattccacct

SEQ ID NO: 225992 - DNA, 75 bp, synthetic construct
  source 1..75: mol_type = other DNA
ggcgcaacaactgacgatgcctgcacataaagtcattgtctgtaatgccttaagtgttgatgagttagcgctggt

SEQ ID NO: 225993 - DNA, 75 bp, synthetic construct
  source 1..75: mol_type = other DNA
tgatcgacgaattcggtcgtactaaagaaagctacaaagtaccttacggtgcggtactggcgaaaggcgatggcg

SEQ ID NO: 225994 - DNA, 75 bp, synthetic construct
  source 1..75: mol_type = other DNA
acggccgtcgtggtcgtgcaatcaccggttccaacaagcgtcctctgaaatctttggccgacatgatcaaaggta

SEQ ID NO: 225995 - DNA, 75 bp, synthetic construct
  source 1..75: mol_type = other DNA
tcgttcgtcagatgctgcgtaaagctaccatcgttaacgcgggcagctccgacttcctggaaggcgaacaggttg

SEQ ID NO: 225996 - DNA, 75 bp, synthetic construct
  source 1..75: mol_type = other DNA
tggtgtatgtgcgcactgctacggtcgtgacctggcacgtggccacatcatcaacaagggtgaagcaatcggtgt

SEQ ID NO: 225997 - DNA, 75 bp, synthetic construct
  source 1..75: mol_type = other DNA
ggaagcgaacggcaaagtgggtgcaacttactcccgcgatctgctgggtatcaccaaggcgtctctggcaaccga

SEQ ID NO: 225998 - DNA, 75 bp, synthetic construct
  source 1..75: mol_type = other DNA
agctggaactgcgtggtcttgctaccaccatcaaagctgctaagaaaatggttgaacgtgaagaagctgtcgttt

SEQ ID NO: 225999 - DNA, 75 bp, synthetic construct
  source 1..75: mol_type = other DNA
atgctgcccgttaaaatggcgacgccgctctcagtgattgtcggcacggctactgcgttgtacgctacctggctg

SEQ ID NO: 226000 - DNA, 75 bp, synthetic construct
  source 1..75: mol_type = other DNA
gaccgccgatggttatctacggtatgctgcgtaacttaggcccggcggcatttcgtggcactctgaacgctttct

SEQ ID NO: 226001 - DNA, 75 bp, synthetic construct
  source 1..75: mol_type = other DNA
cggatggggccatggtggaaacaagcgtggtatgtatcgttatcgcgttaatgtttctttatacctttgtgggga

SEQ ID NO: 226002 - DNA, 75 bp, synthetic construct
  source 1..75: mol_type = other DNA
ctgctgctcgatatgccgctgcgcgatatcgaacgcgtactgtacttcgaatcctatgtggttatcgaaggcggt

SEQ ID NO: 226003 - DNA, 75 bp, synthetic construct
  source 1..75: mol_type = other DNA
cggcaaaaataaacttgactgggcggtagtttgctcagcctttattgtcggcattgcactttttttcgaagtcgg

SEQ ID NO: 226004 - DNA, 75 bp, synthetic construct
  source 1..75: mol_type = other DNA
ggattgctttactcctgcttttaaccataaaaattaagcttaatacgtttgtttcgttaattattgtctcgattg

SEQ ID NO: 226005 - DNA, 75 bp, synthetic construct
  source 1..75: mol_type = other DNA
gccaagggtatggtacaccaaattatcccatcaaagaaccccgcgagatgaaggaaccagcaacatgtccatcaa

SEQ ID NO: 226006 - DNA, 75 bp, synthetic construct
  source 1..75: mol_type = other DNA
aagcatggaagaaagttgcgctaaacagttttagaaaatattcaacaattgttgatatcccggaatatgatgctg

SEQ ID NO: 226007 - DNA, 75 bp, synthetic construct
  source 1..75: mol_type = other DNA
attgacagcgtaaaccgtgatctggatacctggaccgatattcaacacggcaaggggtattcctctgcggcagat

SEQ ID NO: 226008 - DNA, 75 bp, synthetic construct
  source 1..75: mol_type = other DNA
accaggaccgcgagatcaaaaacgtggagttctggccggatattaacgccggggaatttgaggaacgccgccaga

SEQ ID NO: 226009 - DNA, 75 bp, synthetic construct
  source 1..75: mol_type = other DNA
acgagcaacgctggctgatagaggaataccacaaagcgtggaaaagtggtggtacatgtgtggaatcgctgcgaa

SEQ ID NO: 226010 - DNA, 75 bp, synthetic construct
  source 1..75: mol_type = other DNA
cccgctccgatgcctatgcggaacaaatcaaggcgggcctcagttgggtggaggtcagacgaaacagtgatccgt

SEQ ID NO: 226011 - DNA, 75 bp, synthetic construct
  source 1..75: mol_type = other DNA
cagataatgagctgatggagcagatcgaacgtccggatggcattattaaactaaatcctgcccggaaaaatcaga

SEQ ID NO: 226012 - DNA, 75 bp, synthetic construct
  source 1..75: mol_type = other DNA
tcggtggtgcaggtgtctacggtgaaaactttacgctaaataataatggaagtgtttggggaggagatggatata

SEQ ID NO: 226013 - DNA, 75 bp, synthetic construct
  source 1..75: mol_type = other DNA
tttatgcaacatggtatgccaatgatgaaacacacaatggttcttatcttgatagctggctgcaatacagctggt

SEQ ID NO: 226014 - DNA, 75 bp, synthetic construct
  source 1..75: mol_type = other DNA
ttccgttcagaccatttgtggaggcacactggttgcacaatagtcgtgttttcggcaccagtatgaatggtgtaa

SEQ ID NO: 226015 - DNA, 75 bp, synthetic construct
  source 1..75: mol_type = other DNA
gaatctgtggggtaatgtgggtgttcaggctggtgacaaggggtacagcgacacctcagccatgctgggtgtgaa

SEQ ID NO: 226016 - DNA, 75 bp, synthetic construct
  source 1..75: mol_type = other DNA
taatgatcttcgtccggaagccggttcctatacggccaatatggttgcagtaaacaccatgttcgtgacccgtct

SEQ ID NO: 226017 - DNA, 75 bp, synthetic construct
  source 1..75: mol_type = other DNA
aatgacgacgataacaaactgatatccatgctgagatggaataatacaaaaggcatgggatatggaacctttaat

SEQ ID NO: 226018 - DNA, 75 bp, synthetic construct
  source 1..75: mol_type = other DNA
tcaaatatgactcttttgactccgcgctgcgtaacgcgccgtttatggttgaggcgcgggcgctttcggtagaga

SEQ ID NO: 226019 - DNA, 75 bp, synthetic construct
  source 1..75: mol_type = other DNA
tcttgcacgtccgtccggcactggatatgtgcgatccgcaacaagagattttgatgaagcaaatctctgatgacg

SEQ ID NO: 226020 - DNA, 75 bp, synthetic construct
  source 1..75: mol_type = other DNA
ctctgaaaagcacatcggtatggttgatttaccgctgctttcggtaccgtcgctgcaacaacaaatggtagggca

SEQ ID NO: 226021 - DNA, 75 bp, synthetic construct
  source 1..75: mol_type = other DNA
ctccccgatgcggtggtatttccacgttcaaccgcagatgtggcgttaatcgcccgtctggctgcgcaggaacgc

SEQ ID NO: 226022 - DNA, 75 bp, synthetic construct
  source 1..75: mol_type = other DNA
aaccgactcaacccagggaagatttgcccgccagaaggtctcgatgcgccgatgatgaaagtggacgcggtgaag

SEQ ID NO: 226023 - DNA, 75 bp, synthetic construct
  source 1..75: mol_type = other DNA
gcgcgctgctcgacagccacggcttaagctacggtatgttcggtcacgtcgacgcaggtgtcttgcacgtccgtc

SEQ ID NO: 226024 - DNA, 75 bp, synthetic construct
  source 1..75: mol_type = other DNA
ccggattattaaacagcggagcatatcggcggatcgccatcgtttcggcggatatcgcttcacgcggtattgact

SEQ ID NO: 226025 - DNA, 75 bp, synthetic construct
  source 1..75: mol_type = other DNA
tcgttccgcatcaggccagtcatctttcccttgaacatatgcgtaaacggctgcgagtgccggaatctgcgctca

SEQ ID NO: 226026 - DNA, 75 bp, synthetic construct
  source 1..75: mol_type = other DNA
aagatgttgcaggaacggtgaaagacctaatcgcagaaggtaaggtcaaacattttggcttgtcagaagcggggg

SEQ ID NO: 226027 - DNA, 75 bp, synthetic construct
  source 1..75: mol_type = other DNA
cacacccgttatttgcgcccgttgcgtgatcatctggtcgcaacggttgagagttatgctccgttgatggcgcgc

SEQ ID NO: 226028 - DNA, 75 bp, synthetic construct
  source 1..75: mol_type = other DNA
gcgctgcatgaagcggtgattagcggtcgtttcacagcggataaacctgtaatgttgattggcacggcagcggga

SEQ ID NO: 226029 - DNA, 75 bp, synthetic construct
  source 1..75: mol_type = other DNA
attgttgagcggggcaatggtcgcagcgggattattgccagcctgatcgaaatgtaccccgaaggcagcgaacta

SEQ ID NO: 226030 - DNA, 75 bp, synthetic construct
  source 1..75: mol_type = other DNA
tgcgccgtctggtgaatgtcaaatatgactcttttgactctgcgctgcgtaacgcgccgtttatggttgaggcgc

SEQ ID NO: 226031 - DNA, 75 bp, synthetic construct
  source 1..75: mol_type = other DNA
ttttaaaaaagcagagtatttactaggtgagattttagaatattcactgatcattaaaaatgagttaacagcata

SEQ ID NO: 226032 - DNA, 75 bp, synthetic construct
  source 1..75: mol_type = other DNA
caaagagatgctcgggttgaacattgttgaatttgcaggcgatgatgagtcactgattgacgagcaggtgaatgc

SEQ ID NO: 226033 - DNA, 75 bp, synthetic construct
  source 1..75: mol_type = other DNA
gctggtctatggcaaaacgtcagatcacgtacttggcgtacgtgcggtgttgttggggggcgatattctcgatac

SEQ ID NO: 226034 - DNA, 75 bp, synthetic construct
  source 1..75: mol_type = other DNA
aaattgttctcgaagaactcaatgaaaatgcccggagtctgcggttgatgagcgatctcaaccgtaacctgttgc

SEQ ID NO: 226035 - DNA, 75 bp, synthetic construct
  source 1..75: mol_type = other DNA
gaaaatcatgttgaactaataccaaataatagtgatagtgaattaataaaacttgctgaacgtttttataatatc

SEQ ID NO: 226036 - DNA, 75 bp, synthetic construct
  source 1..75: mol_type = other DNA
tttttacttatgatattccacggcggaaaacatttttattagctcttctttccttgcctctaataaatggtcctt

SEQ ID NO: 226037 - DNA, 75 bp, synthetic construct
  source 1..75: mol_type = other DNA
gggctgggtgcgcgttgaggccggggtgattaaagaccaactcaatcagtacctgaaaccgttcggctacttttt

SEQ ID NO: 226038 - DNA, 75 bp, synthetic construct
  source 1..75: mol_type = other DNA
aaatgaatggctggcaaacgcacttcagccacagccggtggcagcggttagtggcgagccgtggtatttctttgg

SEQ ID NO: 226039 - DNA, 75 bp, synthetic construct
  source 1..75: mol_type = other DNA
atgaagcaaatctctgatgacgtggtggcgctgactgcgaaatacggtggtttgttgtggggcgagcacggcaaa

SEQ ID NO: 226040 - DNA, 75 bp, synthetic construct
  source 1..75: mol_type = other DNA
tgactcttttgactccgcgctgcgtaacgcgccgtttatggttgaggcgcgcgcgctttcagttgagacggtgga

SEQ ID NO: 226041 - DNA, 75 bp, synthetic construct
  source 1..75: mol_type = other DNA
ggcgcgcaacgctggtgcgtgaatggctgcgtttgttggcagatcgcggcgttgacccactcaaactggaacaag

SEQ ID NO: 226042 - DNA, 75 bp, synthetic construct
  source 1..75: mol_type = other DNA
tgccgatcgtctgacaatgtcgaccgacaacagtatttaccaacttctccccgatgcggtggtatttccgcgttc

SEQ ID NO: 226043 - DNA, 75 bp, synthetic construct
  source 1..75: mol_type = other DNA
tcctgaagggaactactcgcgactggcagagctggcccggtgtatcaaaggaaagatgataatttcggtgaacga

SEQ ID NO: 226044 - DNA, 75 bp, synthetic construct
  source 1..75: mol_type = other DNA
gtccgccagttcaaatgggcgctggttagccggcagatctacaaatggctgcagatcaccccggaggaaaccctg

SEQ ID NO: 226045 - DNA, 75 bp, synthetic construct
  source 1..75: mol_type = other DNA
tgggcgaaaaaagaacatggcaagaccaccaaaagcccccgcttacctggatgaaatcgcggtcaggcagtggaa

SEQ ID NO: 226046 - DNA, 75 bp, synthetic construct
  source 1..75: mol_type = other DNA
ttctactgcgacccgccgtactggggaacggaaggttatggtgtggactttccgataggtaactatatccatata

SEQ ID NO: 226047 - DNA, 75 bp, synthetic construct
  source 1..75: mol_type = other DNA
cgcgcttcaatttgctgcgtattgaggaagaactgtcgatggcacacctgcgcctgtcgagaacgctgatagagc

SEQ ID NO: 226048 - DNA, 75 bp, synthetic construct
  source 1..75: mol_type = other DNA
accgacattcagcgggcggcccggttctactacctgcagaaacaggcttttggcggcaaggtggccgatcacacg

SEQ ID NO: 226049 - DNA, 75 bp, synthetic construct
  source 1..75: mol_type = other DNA
tgagcgtcttaatatgtcagtagattttaagacgtggatgggcatcattcgaacctatgccaatcatccgattaa

SEQ ID NO: 226050 - DNA, 75 bp, synthetic construct
  source 1..75: mol_type = other DNA
ccagcttactgctggttttggccgttttcggccttttgcaactgacatcaggcagcctgttctttaacgctttaa

SEQ ID NO: 226051 - DNA, 75 bp, synthetic construct
  source 1..75: mol_type = other DNA
cagcagcgtgaaacatcggctgtggtaaaaaccgtgacgccagctgcgccgcgtaaaatggccgtggcagatagc

SEQ ID NO: 226052 - DNA, 75 bp, synthetic construct
  source 1..75: mol_type = other DNA
ccacagtacgtaaggcattggaggagctggcatccattggttaccttcagtacaccgaagtaaaaaaagatggga

SEQ ID NO: 226053 - DNA, 75 bp, synthetic construct
  source 1..75: mol_type = other DNA
ggatgaaacgttaaccatccatgacttaacagctgaagaacttcactacattcgcagccttagaagccagaaaaa

SEQ ID NO: 226054 - DNA, 75 bp, synthetic construct
  source 1..75: mol_type = other DNA
tacaacgtaacgaacttagtaaacaatcgctggactggcttaacatcaatccgctgggaatccagattattgatg

SEQ ID NO: 226055 - DNA, 75 bp, synthetic construct
  source 1..75: mol_type = other DNA
ggaacaaatattcgcaattgaagaagatcctcactttttcaaaaaatatattctgtactatagcgataccgaaga

SEQ ID NO: 226056 - DNA, 75 bp, synthetic construct
  source 1..75: mol_type = other DNA
ccgactgctggaacacgaaacgctatttctcggcacgattaacagcacggaagtacatccccgtgagattgtgaa

SEQ ID NO: 226057 - DNA, 75 bp, synthetic construct
  source 1..75: mol_type = other DNA
taagcgagacagaccttttgaaatcaacgcttgggtcgttttaccagagcatatgcattgcatatggacattacc

SEQ ID NO: 226058 - DNA, 75 bp, synthetic construct
  source 1..75: mol_type = other DNA
tctcaacgttccatcgcgatgtcgcgcgagggttatatcccatcgattgggcgggggacgtaacggatttaagtg

SEQ ID NO: 226059 - DNA, 75 bp, synthetic construct
  source 1..75: mol_type = other DNA
agcgaatattccatgtggtggcgtgagcctgaacaggaaattctgccgttactggaggaactgggaattggtttt

SEQ ID NO: 226060 - DNA, 75 bp, synthetic construct
  source 1..75: mol_type = other DNA
ttcgataccgccgaagtgtatggtccgtatctgaatgaagaagtggtcggcgaagccttaaaaccgtttcgtgac

SEQ ID NO: 226061 - DNA, 75 bp, synthetic construct
  source 1..75: mol_type = other DNA
cccgcgttgttgccgaacgcggctgcgggattatccccggcgacgtcggcctgtcgagtaacatgatcaatgctt

SEQ ID NO: 226062 - DNA, 75 bp, synthetic construct
  source 1..75: mol_type = other DNA
aacgcctgggtagttttgccggagcatatgcactgtatctggacattacccgaaagcgatgatgatttttcctct

SEQ ID NO: 226063 - DNA, 75 bp, synthetic construct
  source 1..75: mol_type = other DNA
tcaaagggggaacctggtttttcacggttaacctacgaaatcgtcgaagccatcttctgaccgctcagttccaga

SEQ ID NO: 226064 - DNA, 75 bp, synthetic construct
  source 1..75: mol_type = other DNA
tataaatccagtaaaacatggttgggtaaaacaagtgagtgattggccattctcaacgtttcaccgcgatgttgc

SEQ ID NO: 226065 - DNA, 75 bp, synthetic construct
  source 1..75: mol_type = other DNA
taatgaggatgtctgggaaggcctgcgctttggttttctgattatggatgattatcgccaggggtggcgacatag

SEQ ID NO: 226066 - DNA, 75 bp, synthetic construct
  source 1..75: mol_type = other DNA
taaatccagtaaaacatggttgggtaaaacaagtgagtgattggccattctcaacgtttcaccgcgatgttgtga

SEQ ID NO: 226067 - DNA, 75 bp, synthetic construct
  source 1..75: mol_type = other DNA
ttctccgcacttttagtgagtttaacgtcgatgacggggaggtttgtgattatatctatgaattgatgaaccgtg

SEQ ID NO: 226068 - DNA, 75 bp, synthetic construct
  source 1..75: mol_type = other DNA
ctgggggcaattatttcacctgtaattgtaggtatagaaaatggtattttgctaagtattttgatgaagataaaa

SEQ ID NO: 226069 - DNA, 75 bp, synthetic construct
  source 1..75: mol_type = other DNA
gcattgccgggcgtgatgcaggtgaaaccgaattatctgcccgtcttaatgagccgctggcaaatggtgccgtga

SEQ ID NO: 226070 - DNA, 75 bp, synthetic construct
  source 1..75: mol_type = other DNA
atttttcttcgctggataatatgattgcccagggaaatccgctaccggtactgtatggtgaaatgcgcgtggggt

SEQ ID NO: 226071 - DNA, 75 bp, synthetic construct
  source 1..75: mol_type = other DNA
ggccgccgcatcgaccttcgagtgaaaacggggtccgaagccatccgggcgctggccatgcagaacccggcgttt

SEQ ID NO: 226072 - DNA, 75 bp, synthetic construct
  source 1..75: mol_type = other DNA
ctgcctttacggggattttcaacgatttggccgccgcatcgatcttcgtgtgaaaacgggggcagaagctatccg

SEQ ID NO: 226073 - DNA, 75 bp, synthetic construct
  source 1..75: mol_type = other DNA
tgcccagggcaatgttatgcctgttctgtatggtgaaatgcgcgtggggtcacgtgtggtatctcaggagatcag

SEQ ID NO: 226074 - DNA, 75 bp, synthetic construct
  source 1..75: mol_type = other DNA
gcaggggccagtatgatcctgggcggtgtggcgcagatgctggcaccgaaagccaggacgcccacggcagcaagt

SEQ ID NO: 226075 - DNA, 75 bp, synthetic construct
  source 1..75: mol_type = other DNA
ggaaccctgttggctggctgggggccgcggctgtatcgggtctgtatgcagcaggggccagtatgatcctgggtg

SEQ ID NO: 226076 - DNA, 75 bp, synthetic construct
  source 1..75: mol_type = other DNA
cgcgtctggagggggccaaaagtggcggtgtgtttcaggcggtgctgggtgcggcgctgattgcggtggcatggt

SEQ ID NO: 226077 - DNA, 75 bp, synthetic construct
  source 1..75: mol_type = other DNA
gtgaacacggcagcggaggccatccgtgccctgtcgctgcaggtgccgggattccgccgtcagatgaacgaaggc

SEQ ID NO: 226078 - DNA, 75 bp, synthetic construct
  source 1..75: mol_type = other DNA
ccgggccgtgggttttgcaggaatcgaaactgaatcagtacgatgtcttcgtccgtaacgaaaactactggggcg

SEQ ID NO: 226079 - DNA, 75 bp, synthetic construct
  source 1..75: mol_type = other DNA
ctgcctttacggggatttgcaacgatttggccgccgcatcgaacttcgtgtgaaaacgggggcagaagctatccg

SEQ ID NO: 226080 - DNA, 75 bp, synthetic construct
  source 1..75: mol_type = other DNA
taacagacccgccatatctcgtcggtttccgtgaccgttccgggcgcaccatcgccggcgataaaaccgatgaat

SEQ ID NO: 226081 - DNA, 75 bp, synthetic construct
  source 1..75: mol_type = other DNA
aacggataacggtaaacagaacacgtacttttcgtcgctggataacatgattgcccaggggaacccgatgccggt

SEQ ID NO: 226082 - DNA, 75 bp, synthetic construct
  source 1..75: mol_type = other DNA
ttatcgggcatgtatgctgcgggggccagtatgatccttggcggtgtggcgcagatgctggcaccgaaagccagt

SEQ ID NO: 226083 - DNA, 75 bp, synthetic construct
  source 1..75: mol_type = other DNA
aatgcgtgtggggtcacgggtaatttcgcaggaaatcagcacggcagacgaaggggatggtggtgaaatcgtggt

SEQ ID NO: 226084 - DNA, 75 bp, synthetic construct
  source 1..75: mol_type = other DNA
gcccgtcttaatgagccgctggcaaatggtgccgtgatccacatcgtgccgcatctggcgggagctaaaagtggc

SEQ ID NO: 226085 - DNA, 75 bp, synthetic construct
  source 1..75: mol_type = other DNA
cctgtgggctggctgggtgccgcggctgtatcgggcatgtatgcggcaggggccagtatgatcctgggcggtgtg

SEQ ID NO: 226086 - DNA, 75 bp, synthetic construct
  source 1..75: mol_type = other DNA
gcccagggcaatgtcctgcccgttctgtacggtgaaatgcgtgtggggtcgcgggtggtatctcaggagatcagc

SEQ ID NO: 226087 - DNA, 75 bp, synthetic construct
  source 1..75: mol_type = other DNA
gtggaaccctgtgggctggctgggtgccgcggctgtatcgggtatgtatgcggcaggggccagtatgatcctggg

SEQ ID NO: 226088 - DNA, 75 bp, synthetic construct
  source 1..75: mol_type = other DNA
ggcggtgcggtgatccacattgttccccggcttgccggtgcaaagcatggcggaatttttcagaccatcctgggt

SEQ ID NO: 226089 - DNA, 75 bp, synthetic construct
  source 1..75: mol_type = other DNA
ggcgctggccatgcagatcccagcgtttcgtcagaaactgagcgatggttggtatcaggtgcgtattgccgggcg

SEQ ID NO: 226090 - DNA, 75 bp, synthetic construct
  source 1..75: mol_type = other DNA
tttcgtcagaaactgagcgacggctggtaccaggtacgcattgccgggcgtgatgcaggtgaaaccgaattgtct

SEQ ID NO: 226091 - DNA, 75 bp, synthetic construct
  source 1..75: mol_type = other DNA
accattatcgggcgatttggtcagggcgggatccctgcacttcgtcaggtgccgttcaatatccgtgtgcacgcc

SEQ ID NO: 226092 - DNA, 75 bp, synthetic construct
  source 1..75: mol_type = other DNA
cttccggccccatgaatacacttatctggacggaggcggactgcattttctgcgctgggagctgatggaggtgtc

SEQ ID NO: 226093 - DNA, 75 bp, synthetic construct
  source 1..75: mol_type = other DNA
tgtggcgcagatgctggcacctaaagccagaactccccgtacacagacaacggataacggcaaacagaacaccta

SEQ ID NO: 226094 - DNA, 75 bp, synthetic construct
  source 1..75: mol_type = other DNA
cggatatgccgtcgcaactggcagcccgactggatgaggcatgggcagccattaagaccgggctggtcagggggc

SEQ ID NO: 226095 - DNA, 75 bp, synthetic construct
  source 1..75: mol_type = other DNA
tggcagcctccctagaggagatcatgactaaagccgcagaagaaggccgcacgctggatgtggaggaggaggagg

SEQ ID NO: 226096 - DNA, 75 bp, synthetic construct
  source 1..75: mol_type = other DNA
tatttatctggctgatgacggcggtgtggcggtggcggtgatcaccggtgtgaactacggaactgcgtccggtgg

SEQ ID NO: 226097 - DNA, 75 bp, synthetic construct
  source 1..75: mol_type = other DNA
tgcccgtcttaatgagccgctggcaaatggtgccgtgatccacatcgtaccgcgtctggcgggtgctaaaagtgg

SEQ ID NO: 226098 - DNA, 75 bp, synthetic construct
  source 1..75: mol_type = other DNA
agtgacggcatgaagatcgcccgtccgcgccagttgtatacaggatatgaaaaacgcgactttaaaagcgatatc

SEQ ID NO: 226099 - DNA, 75 bp, synthetic construct
  source 1..75: mol_type = other DNA
tcgctatggcacgtacagttggctggatcgcccactggagcgaaatgcacagtgacggcatgaagattgcccgtc

SEQ ID NO: 226100 - DNA, 75 bp, synthetic construct
  source 1..75: mol_type = other DNA
aagtaatctgctgttttctctcggtgccagtatgacgcttggcggtgtggcccagatgctggcacccagacccaa

SEQ ID NO: 226101 - DNA, 75 bp, synthetic construct
  source 1..75: mol_type = other DNA
atgatgttctccacgccgtgcgaaccgtatgaagttaatccgattctggaacgtgctatggaccgtattttgatc

SEQ ID NO: 226102 - DNA, 75 bp, synthetic construct
  source 1..75: mol_type = other DNA
gtgaaaactggtgccgaagccatccgggcgctggccacgcagctaccgtcgtttcgccagaaactgagcgacggc

SEQ ID NO: 226103 - DNA, 75 bp, synthetic construct
  source 1..75: mol_type = other DNA
ggcgataaaaccgatgaatggctgcaaccggcctgtaatgaaatgttccgcgtactcaaaaaagatgcgctgatg

SEQ ID NO: 226104 - DNA, 75 bp, synthetic construct
  source 1..75: mol_type = other DNA
gcgtccatatcatgtccggctttccggataatgctgtcgatttcattctcaccgatccgccatatctcgtcggtt

SEQ ID NO: 226105 - DNA, 75 bp, synthetic construct
  source 1..75: mol_type = other DNA
tgctggcgataaaaccgacgagtggctgcaaccggcctgtaatgagatgtaccgcgtgctgaaaaaagacgcgct

SEQ ID NO: 226106 - DNA, 75 bp, synthetic construct
  source 1..75: mol_type = other DNA
ttgaacagtatcaccgtgccggacagcaacgactggccgccatgcagcagggggccgcgaatgataactggtttg

SEQ ID NO: 226107 - DNA, 75 bp, synthetic construct
  source 1..75: mol_type = other DNA
ggaaaagagcgtctcatcgccgttcagcgcgcaatgcaacagggggctgcgaatgacgacagttttgtcccggag

SEQ ID NO: 226108 - DNA, 75 bp, synthetic construct
  source 1..75: mol_type = other DNA
cgctggtgataaaaccgatgaatggctgcaaccggcctgtaatgaaatgtaccgtgtgctgaaaaaagacgcgct

SEQ ID NO: 226109 - DNA, 75 bp, synthetic construct
  source 1..75: mol_type = other DNA
gccacgaatgcgcttacatcctggcaaagggcagtccggcccggccccgtaaccctctgccggatgtgctgggct

SEQ ID NO: 226110 - DNA, 75 bp, synthetic construct
  source 1..75: mol_type = other DNA
accgacccgccttacctggtggggttccgtgaccgttcagggcgtaccattgccggcgataaaaccgatgaatgg

SEQ ID NO: 226111 - DNA, 75 bp, synthetic construct
  source 1..75: mol_type = other DNA
gccggcgataaaaccgatgaatggctgcaaccggcctgtaatgagatgtaccgcgtactcaaaaaagacgcgtta

SEQ ID NO: 226112 - DNA, 75 bp, synthetic construct
  source 1..75: mol_type = other DNA
tctacctgcgtggccgccctccaggctggccgtcgttacatcggtattgaattgcttgagcagtatcaccgggcc

SEQ ID NO: 226113 - DNA, 75 bp, synthetic construct
  source 1..75: mol_type = other DNA
ggacagcaacgactggctgccgtgcagcgggccattcagcagggggccgcgaatgataactggtttgaaccggag

SEQ ID NO: 226114 - DNA, 75 bp, synthetic construct
  source 1..75: mol_type = other DNA
atgtcccgttttgtcctcggtaactgcatcgatgttatggcccgtatccctgataacgccattgatttcatctta

SEQ ID NO: 226115 - DNA, 75 bp, synthetic construct
  source 1..75: mol_type = other DNA
cgccacgaatgcgcttacatcctggcaaagggcagtccggcccggccccgtaacccgctgccggatgtgctgggc

SEQ ID NO: 226116 - DNA, 75 bp, synthetic construct
  source 1..75: mol_type = other DNA
caacagtatttacacctttacctacgtcaccaagtcgaatcattgcccatacagcaaaagtttcgatacggctga

SEQ ID NO: 226117 - DNA, 75 bp, synthetic construct
  source 1..75: mol_type = other DNA
gatccccagcaggaaacgacggagagcggaaagacgctctgcacataccagaacagcatttacctgttcacctac

SEQ ID NO: 226118 - DNA, 75 bp, synthetic construct
  source 1..75: mol_type = other DNA
ggtagcagggcagatcacaatgaccgatccccagcaggaaacgacggagagcggaaagacgctctgcacatacca

SEQ ID NO: 226119 - DNA, 75 bp, synthetic construct
  source 1..75: mol_type = other DNA
tttttggttctgtccaaagagtcgctgatttttatggggtaacccgagaagctatatacatgtggcgtaagcgtc

SEQ ID NO: 226120 - DNA, 75 bp, synthetic construct
  source 1..75: mol_type = other DNA
aaggggaaattatctttgaacccagaactttacaaaaagaaggataccactcagggcgaaggaaagggggattca

SEQ ID NO: 226121 - DNA, 75 bp, synthetic construct
  source 1..75: mol_type = other DNA
atggcttatcaatcgcaagatatcattcgtcgttccgcgactaacggtctgacccccccccccccccccccccgc

SEQ ID NO: 226122 - DNA, 75 bp, synthetic construct
  source 1..75: mol_type = other DNA
acaggtacagaacaattcgtggagtttcttttgactcgtattcgaacaatgctaggtgacactcgtattagtgca

SEQ ID NO: 226123 - DNA, 75 bp, synthetic construct
  source 1..75: mol_type = other DNA
tgggctggaaatattcaggcaatcgccatcacccgacggaaaagcccgttaccagcctgcaaccgctcattgaga

SEQ ID NO: 226124 - DNA, 75 bp, synthetic construct
  source 1..75: mol_type = other DNA
aagtcagagtgttaatgtcaaaagtaataatgcaaataactggcatctgaccattatcgatgaccatggcaacta

SEQ ID NO: 226125 - DNA, 75 bp, synthetic construct
  source 1..75: mol_type = other DNA
cgacgcatgcgggcgccatggcggcggctactgcccggactgcgggccggtgacgggatatgaaacgtacagcgc

SEQ ID NO: 226126 - DNA, 75 bp, synthetic construct
  source 1..75: mol_type = other DNA
actgcgactggccgccatgtttttgtatctcaaccggcactgctttaatggcctgtaccgggtgaacggaaaagg

SEQ ID NO: 226127 - DNA, 75 bp, synthetic construct
  source 1..75: mol_type = other DNA
gaacggagaatatagtagagctttagggccagaatcaagatataagggtaaactattacgtgtagaggctaacat

SEQ ID NO: 226128 - DNA, 75 bp, synthetic construct
  source 1..75: mol_type = other DNA
accgcgtgctgaaaaaagacgcgctgatggtgagcttctatggctggaaccgcgtcgatcgctttatgtctgcct

SEQ ID NO: 226129 - DNA, 75 bp, synthetic construct
  source 1..75: mol_type = other DNA
attctgacccgtctgcatgacgaggcggtttatctgcctatcagctacatctcaatgatggtggtatcaaaaccg

SEQ ID NO: 226130 - DNA, 75 bp, synthetic construct
  source 1..75: mol_type = other DNA
gtcagccgctgcgcattgaactgtcgttcatcggcaccgatgcgttaagcaaatcgatggcggaaatcattcagg

SEQ ID NO: 226131 - DNA, 75 bp, synthetic construct
  source 1..75: mol_type = other DNA
ctgtaacatgacaggatcctggtatccgattgcaataatgattatggcttattccgtcatcggcttaatttccgc

SEQ ID NO: 226132 - DNA, 75 bp, synthetic construct
  source 1..75: mol_type = other DNA
gcttcacacatccgaacgcgattgtgctggacccgtttgcaggcagcggatcaacctgcgtggccgctcttcagt

SEQ ID NO: 226133 - DNA, 75 bp, synthetic construct
  source 1..75: mol_type = other DNA
ttcgtgaccgccaggggcgtaccattgccggcgataaaaccgatgaatggctgcaaccggcctgtaatgagatgt

SEQ ID NO: 226134 - DNA, 75 bp, synthetic construct
  source 1..75: mol_type = other DNA
ttaccgacccgccatatctcgtcggttttcgtgaccgttccgggcgcaccatcgccggcgataaaaccgatgaat

SEQ ID NO: 226135 - DNA, 75 bp, synthetic construct
  source 1..75: mol_type = other DNA
ttactgacccgccatatctcgtcggtttccgtgaccgttccgggcgcaccatcgccggcgataaaaccgatgaat

SEQ ID NO: 226136 - DNA, 75 bp, synthetic construct
  source 1..75: mol_type = other DNA
taaccgacccgccatatctcgtcggtttacgtgaccgttccgggcgcaccatcgccggcgataaaaccgatgaat

SEQ ID NO: 226137 - DNA, 75 bp, synthetic construct
  source 1..75: mol_type = other DNA
tgacggacccgccatatctcgtcggtttccgtgaccgttccgggcgcaccatcgccggcgataaaaccgatgaat

SEQ ID NO: 226138 - DNA, 75 bp, synthetic construct
  source 1..75: mol_type = other DNA
tgaccgacccgccatatctcgtcggtttgcgtgaccgttccgggcgcaccatcgccggcgataaaaccgatgaat

SEQ ID NO: 226139 - DNA, 75 bp, synthetic construct
  source 1..75: mol_type = other DNA
tcaccgacccgccatatctcgtcggtttccgtgaccgttccgggcgcaccatcgccggcgataaaaccgatgaat

SEQ ID NO: 226140 - DNA, 75 bp, synthetic construct
  source 1..75: mol_type = other DNA
gggcagcaacgccttgccgccgtgcaacgggccatgcagcagggggccgcgaatgataactggtttatgccggag

SEQ ID NO: 226141 - DNA, 75 bp, synthetic construct
  source 1..75: mol_type = other DNA
ccatcacccgacggaaaagcctgttaccagcctgcaaccgctgattgagagcttcacacacccgaacgcaattgt

SEQ ID NO: 226142 - DNA, 75 bp, synthetic construct
  source 1..75: mol_type = other DNA
tggtcttcaccaaaaactacacatcgaaggccgcatatgtgggctatcgccacgaatgcgcctacatcctggcaa

SEQ ID NO: 226143 - DNA, 75 bp, synthetic construct
  source 1..75: mol_type = other DNA
gtggttggccacctggtgtttaccaaaacctacacatcgaaggccgcatatgtgggctatcgccacgaatgcgct

SEQ ID NO: 226144 - DNA, 75 bp, synthetic construct
  source 1..75: mol_type = other DNA
tggccacctggtatttaccaaaacctacacatcgaaggccgcatatgtgggctatcgccacgaatgcgcttacat

SEQ ID NO: 226145 - DNA, 75 bp, synthetic construct
  source 1..75: mol_type = other DNA
accgcgtgctgaaaaaagatgcgctgatggtcagcttctacggctggaaccgcgtcgatcgctttatggccgcct

SEQ ID NO: 226146 - DNA, 75 bp, synthetic construct
  source 1..75: mol_type = other DNA
tatgatggggatctgtactaccttaattggtgtgctgccgacctatgcacaaattggtgtgtttgcgccaatttt

SEQ ID NO: 226147 - DNA, 75 bp, synthetic construct
  source 1..75: mol_type = other DNA
ttcgcgtactcaaaaaagatgcgctgatggtcagcttctacggctggaaccgcgtcgatcgctttatggccgcct

SEQ ID NO: 226148 - DNA, 75 bp, synthetic construct
  source 1..75: mol_type = other DNA
ggacagcaacgccttgccgccgtgcagcgggccatgcagcagggggccgcaaatgatgactggtttatgccggag

SEQ ID NO: 226149 - DNA, 75 bp, synthetic construct
  source 1..75: mol_type = other DNA
gtgcagcgttagtattccatgaaatattttttccggaatcatcaaccgcaatggcgttaattctggcaatgggaa

SEQ ID NO: 226150 - DNA, 75 bp, synthetic construct
  source 1..75: mol_type = other DNA
acagcaacgactggccgccgtgcaacgggccatgcagcagggggccgcgaatgataactggtttgaaccggaggc

SEQ ID NO: 226151 - DNA, 75 bp, synthetic construct
  source 1..75: mol_type = other DNA
gacagcaacgactggccgccgtgcaacgggccatgcagcaggggccgcgaatgataactggtttgaaccggaggc

SEQ ID NO: 226152 - DNA, 75 bp, synthetic construct
  source 1..75: mol_type = other DNA
caatgggaacctacggtgcaggttatgtggcgcgtattgtcggagcatttattttcggcaaaatgggcgacagaa

SEQ ID NO: 226153 - DNA, 75 bp, synthetic construct
  source 1..75: mol_type = other DNA
tgtagatgctgacaacgacattcacattgaagcgtatgaccgggacgttcagacccgccttgaggcaaagagcgt

SEQ ID NO: 226154 - DNA, 75 bp, synthetic construct
  source 1..75: mol_type = other DNA
gtaacggcgatgacagcggagatgccagttatcacaaatggctgccagccggatcgttaaaatacgccatcaccg

SEQ ID NO: 226155 - DNA, 75 bp, synthetic construct
  source 1..75: mol_type = other DNA
gtttgattccaacgaccattacgttactccgggtaacggcgatgacagcggtgatgccagttatcacaaatggct

SEQ ID NO: 226156 - DNA, 75 bp, synthetic construct
  source 1..75: mol_type = other DNA
aactacgaaaacatgagtgaaaaccgcaagggctacaataacttccgcctgaatagcggcgtgccggaatacggg

SEQ ID NO: 226157 - DNA, 75 bp, synthetic construct
  source 1..75: mol_type = other DNA
ttactccgggtaacggcgatgacagcggtgatgccagttatcacaaattgatgcgccgcgcgataaatgcactct

SEQ ID NO: 226158 - DNA, 75 bp, synthetic construct
  source 1..75: mol_type = other DNA
acccagtaccagtcaatcccgatggccccccaacttaacccgtcgcatgcgggcggcgtgattactctgcaacgc

SEQ ID NO: 226159 - DNA, 75 bp, synthetic construct
  source 1..75: mol_type = other DNA
agtgttccagaccgatactcatgatgaaatcgttgtcgatagcagtagcggtgggcgtaccacttataaaaatgc

SEQ ID NO: 226160 - DNA, 75 bp, synthetic construct
  source 1..75: mol_type = other DNA
tgacggcacaacgcactggaatttcctgatttactgcaacccccatgagagcgcaacggtgcttgccatttttcg

SEQ ID NO: 226161 - DNA, 75 bp, synthetic construct
  source 1..75: mol_type = other DNA
cagcgtataacgccatcgacgcggcatccgttgcccttggtcgtccctgcctgacgctgcccgaacgcgagcatt

SEQ ID NO: 226162 - DNA, 75 bp, synthetic construct
  source 1..75: mol_type = other DNA
cggttacttcatcgtgctcaccacgccgtcacgttttcacccgacgaccagttttaaggttgccggaaaatggca

SEQ ID NO: 226163 - DNA, 75 bp, synthetic construct
  source 1..75: mol_type = other DNA
tgcaacagcttgaggaaattcgtctttcctgtgatgcaggtgattttcgtacctatatacttctgaacggtggtt

SEQ ID NO: 226164 - DNA, 75 bp, synthetic construct
  source 1..75: mol_type = other DNA
atcgtcaagtacatcaccaaaatggcgggtcatgctgatgcaaaaggtactggtcatcttgatgatatacactca

SEQ ID NO: 226165 - DNA, 75 bp, synthetic construct
  source 1..75: mol_type = other DNA
tttttgttttactgccagccttatgatgctgaggctgttctgaacatattccgcgatgaggcacttgcagataat

SEQ ID NO: 226166 - DNA, 75 bp, synthetic construct
  source 1..75: mol_type = other DNA
cagcagttactatggcagttatggtagctggcgctatggactgaaagcgacgggcgcaatgggcgacggcaccca

SEQ ID NO: 226167 - DNA, 75 bp, synthetic construct
  source 1..75: mol_type = other DNA
tggcggtactactgaagttgccgttatttctctgaacggcgtggtttactcctcttctgtacgtatcggtggtga

SEQ ID NO: 226168 - DNA, 75 bp, synthetic construct
  source 1..75: mol_type = other DNA
gcgatatgatgcgctggatgcagcagtatttgtcgtctgatttttatcagcgcagcaaccaggcggatcgtatgc

SEQ ID NO: 226169 - DNA, 75 bp, synthetic construct
  source 1..75: mol_type = other DNA
agcagattacccgtccgctggggatgaaagacaccacatacacaccatcaccggaccagtgccgtcgtttaatgg

SEQ ID NO: 226170 - DNA, 75 bp, synthetic construct
  source 1..75: mol_type = other DNA
ctggcgcttcgcatcttacggcacaacacctctgggaagcggttggtatgttgcgccagcaattctcgcacaaag

SEQ ID NO: 226171 - DNA, 75 bp, synthetic construct
  source 1..75: mol_type = other DNA
cgctatccaaagtttaacagggcagggaatatctatgataagtcgctggttaagtatctgacaatgcgtctggat

SEQ ID NO: 226172 - DNA, 75 bp, synthetic construct
  source 1..75: mol_type = other DNA
ttgaaaagatttggtacacgttctgcaacaggtaagatggtaaaactaaaattacctgtagatgtggaaagtcta

SEQ ID NO: 226173 - DNA, 75 bp, synthetic construct
  source 1..75: mol_type = other DNA
cgagcgcaatctgatgtggaacgtcgatccctatttacaaacccagtggcaactaactgacaaactatcgttgga

SEQ ID NO: 226174 - DNA, 75 bp, synthetic construct
  source 1..75: mol_type = other DNA
gcaggcgaacgggaaacgacccagtatcagtcgatcccgatgaccccgcagcttaacccgtcacacgcaggcggt

SEQ ID NO: 226175 - DNA, 75 bp, synthetic construct
  source 1..75: mol_type = other DNA
aaaatgtggaagtgctgcgaggccccttctctgccctgtatggcaatgcgtccggcggcgtaatgaacgtcacta

SEQ ID NO: 226176 - DNA, 75 bp, synthetic construct
  source 1..75: mol_type = other DNA
cgaatccacaacaagcgcctcgtgcagaacagtacgacacgcgaaaaaccatcaagcaaactcaggctgggttgc

SEQ ID NO: 226177 - DNA, 75 bp, synthetic construct
  source 1..75: mol_type = other DNA
gaaagcgtcgtggacgcggcttgacgcaacttatcgcagcaatgtttgtaacgctcaggactgtaatggtaaccg

SEQ ID NO: 226178 - DNA, 75 bp, synthetic construct
  source 1..75: mol_type = other DNA
agcgttttgccggagatttccgtgtgaaagcgtcgtggacgcggcttgacgcaacttatcgcagcaatgtttgta

SEQ ID NO: 226179 - DNA, 75 bp, synthetic construct
  source 1..75: mol_type = other DNA
ctgttgccaaatggcgtaaaggctggaacccaccggttactactgccgcaagacttccttcagtgtcccgggtaa

SEQ ID NO: 226180 - DNA, 75 bp, synthetic construct
  source 1..75: mol_type = other DNA
tttcagggaaatatcccgtattacaggcctgtcgcgagtgacagtcagtcgctgggtgcgttcaggaacattccc

SEQ ID NO: 226181 - DNA, 75 bp, synthetic construct
  source 1..75: mol_type = other DNA
gatgtagtttcagggaaatatcccgtattacaggcctgtcgcgagtgacagtcagtcgctgggtgggttcaggaa

SEQ ID NO: 226182 - DNA, 75 bp, synthetic construct
  source 1..75: mol_type = other DNA
tgacggcgttaaggaatgctgatgctgcaggtgatactgatggcgcgcgccgcattgctaggatgctgtcttcca

SEQ ID NO: 226183 - DNA, 75 bp, synthetic construct
  source 1..75: mol_type = other DNA
cagttatgacatcggatgtagttcctccaaaaacaaaacttggcaatcaactgcagggttactcagaaggagtca

SEQ ID NO: 226184 - DNA, 75 bp, synthetic construct
  source 1..75: mol_type = other DNA
atgaatcagactttacccactgctgacctgaatactgccggcacgacagatgttattccgtctgtggccatcgac

SEQ ID NO: 226185 - DNA, 75 bp, synthetic construct
  source 1..75: mol_type = other DNA
catgtcagcgtgatgagtggaacagccagctgatgagagacacctgtcctgaaatcaccctggacaatgtactgg

SEQ ID NO: 226186 - DNA, 75 bp, synthetic construct
  source 1..75: mol_type = other DNA
atatcacccgtcttgccgaccggaaaatctgggaccgcctgatgacggatacggggatgtacaccttcatgagtt

SEQ ID NO: 226187 - DNA, 75 bp, synthetic construct
  source 1..75: mol_type = other DNA
tcggtaagctgttagaaggggaatattttacggtgcgtggctaccagaaagggccgtacatattgtctttaagcg

SEQ ID NO: 226188 - DNA, 75 bp, synthetic construct
  source 1..75: mol_type = other DNA
tctgggggccgacgattatctgtgtaaaccttttgcattgatagaagtggccgccaggctggaagcgctgatgcg

SEQ ID NO: 226189 - DNA, 75 bp, synthetic construct
  source 1..75: mol_type = other DNA
tggaggaacgtgtagaagggctgcgtctgggagctgacgattatctgtgtaaaccttttgcgttgatagaagtcg

SEQ ID NO: 226190 - DNA, 75 bp, synthetic construct
  source 1..75: mol_type = other DNA
gaacagcatcggggcgcagtatggtgaatttctcgggaacggcgacaatgtcggtaagctgttagaaggggaata

SEQ ID NO: 226191 - DNA, 75 bp, synthetic construct
  source 1..75: mol_type = other DNA
gcgttattgaagacattacaaccaaaatgggagacacgccagttgacacatcaaaatctattaaggttatcgaca

SEQ ID NO: 226192 - DNA, 75 bp, synthetic construct
  source 1..75: mol_type = other DNA
ggctggaagcgcccgaaggttcgcaattactgttggtggcaaactctgatttctgtcgctggcaacccaacgaga

SEQ ID NO: 226193 - DNA, 75 bp, synthetic construct
  source 1..75: mol_type = other DNA
ctgcctgtagtcacaactcttcacttcctccctttaccgccagtggatttgctgaagaccagggcgcggtacgca

SEQ ID NO: 226194 - DNA, 75 bp, synthetic construct
  source 1..75: mol_type = other DNA
ctaaagctggaacgccagcctatgaaagagcgctgaataacgctgcgaatgccatcaggccgctgcttgccactg

SEQ ID NO: 226195 - DNA, 75 bp, synthetic construct
  source 1..75: mol_type = other DNA
cgtataactccatcgacgcggcatctgttgcccttggtcgtccctgtctgacgctgcccgaacgtgagcattttc

SEQ ID NO: 226196 - DNA, 75 bp, synthetic construct
  source 1..75: mol_type = other DNA
actggtatcacagtttggctcgttttcgttcaccgtagcgcatgcgttctgccgtctggtttaccagcttggtgt

SEQ ID NO: 226197 - DNA, 75 bp, synthetic construct
  source 1..75: mol_type = other DNA
ttgacgcgtttaacgccgtcaccataacagaaaatattgcctcgcggccagggcagacccgcctggagtgcgaca

SEQ ID NO: 226198 - DNA, 75 bp, synthetic construct
  source 1..75: mol_type = other DNA
atgcagccaaaaatgccggagttaaccttgccgctcagggtgttctttccgcagcagcaaagggaatagggcgtg

SEQ ID NO: 226199 - DNA, 75 bp, synthetic construct
  source 1..75: mol_type = other DNA
acctgccgtttatggcgtatgccacgccagaacaagcctttgaaaacgctgctacagtaatgcgtgccggagcca

SEQ ID NO: 226200 - DNA, 75 bp, synthetic construct
  source 1..75: mol_type = other DNA
cggttaccgttgccgatatcgcctaccacactgctgccgtacgtcgcggtgcgccaaactgcctgctgctggctg

SEQ ID NO: 226201 - DNA, 75 bp, synthetic construct
  source 1..75: mol_type = other DNA
agggggcggaaggatgccgctggcgctgttatcaatgacgtcaccaataaaatgggtaatgccgcagttgatacc

SEQ ID NO: 226202 - DNA, 75 bp, synthetic construct
  source 1..75: mol_type = other DNA
catttaccttccctgatggtacgagcacggaagatattggagccgccattgatgagtattttgctggtcaggttg

SEQ ID NO: 226203 - DNA, 75 bp, synthetic construct
  source 1..75: mol_type = other DNA
agacatttaccttccctgatggtacgagcacggaagatattggatctgccattgatgagtattttgctggacagt

SEQ ID NO: 226204 - DNA, 75 bp, synthetic construct
  source 1..75: mol_type = other DNA
cgggcggggtcgcggcgacggtaggcgctgtgcagccgctgatggtcgtgttcatctctgccgctctgctaggta

SEQ ID NO: 226205 - DNA, 75 bp, synthetic construct
  source 1..75: mol_type = other DNA
agacaaagttggggggatactggtaaaaaaatacctttccgggagtcttttttccaagttcagacaagatactat

SEQ ID NO: 226206 - DNA, 75 bp, synthetic construct
  source 1..75: mol_type = other DNA
aatatagccagtgacaatatattgaataaaataacaacggaatcagaaaacgatagccaaccttccctatcatat

SEQ ID NO: 226207 - DNA, 75 bp, synthetic construct
  source 1..75: mol_type = other DNA
gcaagtggcaacctcccgtgcctctgctcacctttaccgcctggcaactggcggccggaggacttctgctcgttc

SEQ ID NO: 226208 - DNA, 75 bp, synthetic construct
  source 1..75: mol_type = other DNA
ttggatcagacgctgagtgcgcttcaaatcatcggcgtcctgctcgtgatcgggagtatctggctgggccaacgt

SEQ ID NO: 226209 - DNA, 75 bp, synthetic construct
  source 1..75: mol_type = other DNA
cgactcgaacctacagttgtttccttactgggctttctcagcccggggaccgccgtgttgctaggatggttgttc

SEQ ID NO: 226210 - DNA, 75 bp, synthetic construct
  source 1..75: mol_type = other DNA
caaccggatggcatcggtctcacgaatatttttttagagcctcacacgtccagcgaaaacagcgagtattcaaaa

SEQ ID NO: 226211 - DNA, 75 bp, synthetic construct
  source 1..75: mol_type = other DNA
ggtaaaaccgaccccattatcgctattttcaacgagccttacgcgcgcgttgacgttcctcacgctggttttatt

SEQ ID NO: 226212 - DNA, 75 bp, synthetic construct
  source 1..75: mol_type = other DNA
gtgaggacagtcctgaaggtatcgtaaaagaagtgaaggaatggcgagccaaaaacggcaagccgggctttaaac

SEQ ID NO: 226213 - DNA, 75 bp, synthetic construct
  source 1..75: mol_type = other DNA
ctgccccgggtatccggaagtgcagagcaggtattatgcctcgaaaacctaggtggcgtaaggaaaaaagtggag

SEQ ID NO: 226214 - DNA, 75 bp, synthetic construct
  source 1..75: mol_type = other DNA
gtgacgtactccggctgttaccggataatggtgactgggtggggattttccggaagggccataggccaacgataa

SEQ ID NO: 226215 - DNA, 75 bp, synthetic construct
  source 1..75: mol_type = other DNA
aaaatgcagaaagtttctgctgcctcaccgttgacgcaaaaaccggatcaggcgcggcgtcgttttcgtctcggg

SEQ ID NO: 226216 - DNA, 75 bp, synthetic construct
  source 1..75: mol_type = other DNA
actgcgctgatgttgattatcggctgggaaaaacgcttcttccgccgtgcggcaccgcagactgctaaggagatc

SEQ ID NO: 226217 - DNA, 75 bp, synthetic construct
  source 1..75: mol_type = other DNA
tcactcgagtccacgaaagcggatcagcagaatttcggcgcgtggctgcggggatggaagctgatgctgctgcta

SEQ ID NO: 226218 - DNA, 75 bp, synthetic construct
  source 1..75: mol_type = other DNA
tcactcgagtccacgaaagcggatcagcagaatttcggcgcgtggcagcggggatggaagctgatgctgcggcta

SEQ ID NO: 226219 - DNA, 75 bp, synthetic construct
  source 1..75: mol_type = other DNA
tcactcgagtccacgaaagcggatcagcagaatttcggtgcgtggccgcggggatggaagctgatgctgctgcta

SEQ ID NO: 226220 - DNA, 75 bp, synthetic construct
  source 1..75: mol_type = other DNA
tcactcgagtccacgaaagcggatcagcagaatttcggggcgtggccgcggggatggaagctgatgctgcagcta

SEQ ID NO: 226221 - DNA, 75 bp, synthetic construct
  source 1..75: mol_type = other DNA
tcactcgagtccacgaaagcggatcagcagaatttcggggcgtggcagcggggatggaagctgatgctgccgcta

SEQ ID NO: 226222 - DNA, 75 bp, synthetic construct
  source 1..75: mol_type = other DNA
tcactcgagtccacgaaagcggatcagcagaatttcggcgcgtggcggcggggatggaagctgatgctgcagcta

SEQ ID NO: 226223 - DNA, 75 bp, synthetic construct
  source 1..75: mol_type = other DNA
aaatagcgcagcaactggcactcgagttctaccgtattctgaaaacccaaaataaatcacagctaagaagctagt

SEQ ID NO: 226224 - DNA, 75 bp, synthetic construct
  source 1..75: mol_type = other DNA
tgatgctgcggctatatgtgaggcaatcagcagtcgctggagtaatggtgttgtcgaaggtcatgtaaatcgcct

SEQ ID NO: 226225 - DNA, 75 bp, synthetic construct
  source 1..75: mol_type = other DNA
gtcaaactgcgcatgccgcgcagccgtatccgcattatgcaggccatcattggcggtattatcgccggttttggc

SEQ ID NO: 226226 - DNA, 75 bp, synthetic construct
  source 1..75: mol_type = other DNA
tcactcgagtccacgaaagcggatcagcagaatttcggtgcgtggctgcggggatggaagctgatgctgccgcta

SEQ ID NO: 226227 - DNA, 75 bp, synthetic construct
  source 1..75: mol_type = other DNA
tcactcgagtccacgaaagcggatcagcagaatttcggagcgtggcggcggggatggaagctgatgctgccgcta

SEQ ID NO: 226228 - DNA, 75 bp, synthetic construct
  source 1..75: mol_type = other DNA
tcactcgagtccacgaaagcggatcagcagaatttcggagcgtggccgcggggatggaagctgatgctgcggcta

SEQ ID NO: 226229 - DNA, 75 bp, synthetic construct
  source 1..75: mol_type = other DNA
catatcgatgagaataacaagagcgcatttaatcaaggctcttcaggaagtacttattactccccagattttaaa

SEQ ID NO: 226230 - DNA, 75 bp, synthetic construct
  source 1..75: mol_type = other DNA
ctaaccataccatttaccataaaggtaaaggccgcctgggaattgacaactacacgctgtatatggggatcgcat

SEQ ID NO: 226231 - DNA, 75 bp, synthetic construct
  source 1..75: mol_type = other DNA
tttaaccttaaaatataccggctccagccgtgattataataccagcaccttcccggagtctgatcgcgaaatggg

SEQ ID NO: 226232 - DNA, 75 bp, synthetic construct
  source 1..75: mol_type = other DNA
cgctgccgggagcgcttgcctcacagggaaaacctgctccggcaggtgacgttccgcccccgaccagtttctggc

SEQ ID NO: 226233 - DNA, 75 bp, synthetic construct
  source 1..75: mol_type = other DNA
gcctcagacggaatcgctatcgctttatttaatgaaagcggagagctggtaaaacttaatcagcctccggagaac

SEQ ID NO: 226234 - DNA, 75 bp, synthetic construct
  source 1..75: mol_type = other DNA
atgtttcgaatgacggcattgtcgccggtcgggcacagtataaaaacgttatcgatactgcattgagcaaattta

SEQ ID NO: 226235 - DNA, 75 bp, synthetic construct
  source 1..75: mol_type = other DNA
acggtattagtgcaaccaataacctgaatccggcgaatgagtccgatgccagtaatgtaactaacattagtggga

SEQ ID NO: 226236 - DNA, 75 bp, synthetic construct
  source 1..75: mol_type = other DNA
gaaaatctcaattcacggcgcgtcaccttatcaaaatgcctatttgattgacggtattagtgcaaccaataacct

SEQ ID NO: 226237 - DNA, 75 bp, synthetic construct
  source 1..75: mol_type = other DNA
agcaaatttacctggtttgccagcgaccgctttacccacgatttaaccttaaaatataccggctccagtcgtgat

SEQ ID NO: 226238 - DNA, 75 bp, synthetic construct
  source 1..75: mol_type = other DNA
tcatatcagtgactatacccgtcacgaccatgacatttggtacaccgaactctcatgcacatatggtgatattac

SEQ ID NO: 226239 - DNA, 75 bp, synthetic construct
  source 1..75: mol_type = other DNA
tcattttatgtggcgctggcgctgatatggcgcaggccgtcgacgacaaagacaagtatatgcctgtttttgaag

SEQ ID NO: 226240 - DNA, 75 bp, synthetic construct
  source 1..75: mol_type = other DNA
tatgacagttttgtgccggttgaatttggccgcttcaatggcggggtaattgacgcaaagatcaaacgtttcaat

SEQ ID NO: 226241 - DNA, 75 bp, synthetic construct
  source 1..75: mol_type = other DNA
aaagtcaccgcaaagcaattgttagtaaaggtataccacccgctctattaaataggctcaccaattcggatgttc

SEQ ID NO: 226242 - DNA, 75 bp, synthetic construct
  source 1..75: mol_type = other DNA
acctctggttatataacgactggtttattgacccgctggacaacgtcgagaagcctatgatccccgatggcgctg

SEQ ID NO: 226243 - DNA, 75 bp, synthetic construct
  source 1..75: mol_type = other DNA
gaaaacaatcccatagtatctttttcagatacaaccttcatcaatggtgaacagatgttgagttatgactcgcat

SEQ ID NO: 226244 - DNA, 75 bp, synthetic construct
  source 1..75: mol_type = other DNA
ccggccctattgctgcaatcggtatgggagcatccagtattgcccgtaatgtggctctaaaagaagagcgttatg

SEQ ID NO: 226245 - DNA, 75 bp, synthetic construct
  source 1..75: mol_type = other DNA
aattgggtaaaacgccgttaggacgctatctgttcacatcatcgacattaacccgggattttattgagataggcc

SEQ ID NO: 226246 - DNA, 75 bp, synthetic construct
  source 1..75: mol_type = other DNA
gacctgatttattatcctcgagatgacagggaagatagtcctgaagggattgttaaagagattaaagaatggcga

SEQ ID NO: 226247 - DNA, 75 bp, synthetic construct
  source 1..75: mol_type = other DNA
cgtcctcctctggaggttcttaatagtcagtgtactgtgatagctggagagcgtaaaaccacagtacttcccctg

SEQ ID NO: 226248 - DNA, 75 bp, synthetic construct
  source 1..75: mol_type = other DNA
aacgaaatgcgcaaagatggagatagcgcgttggcaacttggattaaaagaattttacgcaaagaactccaatca

SEQ ID NO: 226249 - DNA, 75 bp, synthetic construct
  source 1..75: mol_type = other DNA
ttattcaggaaaccagccagcgatttaatagcttagtccaggcaggtgcgaaaaacgacattgcttataactttt

SEQ ID NO: 226250 - DNA, 75 bp, synthetic construct
  source 1..75: mol_type = other DNA
cacattcaaaacacattgcaaacaaaaaaaggcttgcaaatgtgccaattggcactatactaaacattagttcca

SEQ ID NO: 226251 - DNA, 75 bp, synthetic construct
  source 1..75: mol_type = other DNA
acagatatgatgccagcatactctaagcaagtgatatttaaaataatgatggaaacaaaaggagacaaccgtttc

SEQ ID NO: 226252 - DNA, 75 bp, synthetic construct
  source 1..75: mol_type = other DNA
tcatcctcaggatacacgcttacttagtgacctgcttcaattgttaccagataatagcaactgggtgactatttt

SEQ ID NO: 226253 - DNA, 75 bp, synthetic construct
  source 1..75: mol_type = other DNA
catccaataatggtaagattacagagcaggtaatagtcagtgctgctgatggatttgataatccggtatctgatt

SEQ ID NO: 226254 - DNA, 75 bp, synthetic construct
  source 1..75: mol_type = other DNA
ggtacggtgcatatcaccttccgtcgtcctgaccttgttgagcaactgaataacatcattgcccgccattatccc

SEQ ID NO: 226255 - DNA, 75 bp, synthetic construct
  source 1..75: mol_type = other DNA
gttattggtatttcgcttagaactattgcgaagaagcgaaaatgttcggacggtacgattagaaaggaattgcaa

SEQ ID NO: 226256 - DNA, 75 bp, synthetic construct
  source 1..75: mol_type = other DNA
atatgaactgatcattgctcactttgttataggtatctcactgcgttctatcgcgaagaaacgcagatgctcgga

SEQ ID NO: 226257 - DNA, 75 bp, synthetic construct
  source 1..75: mol_type = other DNA
atcataatagacggttgtgtctctcggttgcgtaaatataaaccggaagagtatgagctgatcattgcacacttt

SEQ ID NO: 226258 - DNA, 75 bp, synthetic construct
  source 1..75: mol_type = other DNA
tttattaatgtggttagctttggatttgaagaatcagccactcaagtcttggcaaagaatcacttctcaggtttg

SEQ ID NO: 226259 - DNA, 75 bp, synthetic construct
  source 1..75: mol_type = other DNA
atgcgtgatatgtatgaagttttggatcgctggggggcatgggctgcagcagataacagtggtgtggactggcag

SEQ ID NO: 226260 - DNA, 75 bp, synthetic construct
  source 1..75: mol_type = other DNA
gtcattggtatctcattacgcactattgccaagaagagaagatgttcagatggcacagttaggaaaaaattgcag

SEQ ID NO: 226261 - DNA, 75 bp, synthetic construct
  source 1..75: mol_type = other DNA
tgatgtcgaagtgggcgaaaaccaccattgaactggaaacgccttacagcgctcgcgatgttgctgccctcgcag

SEQ ID NO: 226262 - DNA, 75 bp, synthetic construct
  source 1..75: mol_type = other DNA
gtctcggtttagcactggcaacttctgctcaggcggctgacaaaattgcaatcgtcaacatgggcagcctgttcc

SEQ ID NO: 226263 - DNA, 75 bp, synthetic construct
  source 1..75: mol_type = other DNA
gagtgccggtgaaatcggtcaggccggactcggcggcggagtcagttctgcggccaaaacactctctgattacta

SEQ ID NO: 226264 - DNA, 75 bp, synthetic construct
  source 1..75: mol_type = other DNA
tgatgtcgaagtgggcgaaaacgaccattgaactggaaacgccttacagtgctcacgatgttgccgccctcgcag

SEQ ID NO: 226265 - DNA, 75 bp, synthetic construct
  source 1..75: mol_type = other DNA
ggcctggtagggcgcgcggcggacgtcgtgctcaaagaaggccgcaaactagtgctggtgccgcgtgaaatgccg

SEQ ID NO: 226266 - DNA, 75 bp, synthetic construct
  source 1..75: mol_type = other DNA
atgagactgatcgtcgggatgacaggggctaccggtgcgcctcttggggtggcattactgcaagcgctgcgggag

SEQ ID NO: 226267 - DNA, 75 bp, synthetic construct
  source 1..75: mol_type = other DNA
tgggtgcaacctatgctaaatcagatcgcactgacggtcaggtcgcctatggtaagagcaaattcaatgcctccg

SEQ ID NO: 226268 - DNA, 75 bp, synthetic construct
  source 1..75: mol_type = other DNA
gtctcaaacgctggcaccgccgcaagatgctggatgtgctggggatgccagcgcgtacagtgatgagttatgagc

SEQ ID NO: 226269 - DNA, 75 bp, synthetic construct
  source 1..75: mol_type = other DNA
ccctgccgggagcgctggcctctcaggggaaacctgtacccgctggtaatgttcctcctccgacaagtttctggc

SEQ ID NO: 226270 - DNA, 75 bp, synthetic construct
  source 1..75: mol_type = other DNA
aacacgacggacatgctcagacaactgcaggacttcaggctgggggacaccgtcgacccggccacaggccaggtt

SEQ ID NO: 226271 - DNA, 75 bp, synthetic construct
  source 1..75: mol_type = other DNA
agtccacgaaagcggttcagcagaatttcggcgcgtggtggcggggatggaagccgatgctgcggctatatgtga

SEQ ID NO: 226272 - DNA, 75 bp, synthetic construct
  source 1..75: mol_type = other DNA
atcgacagcattgtttctgccattaacccgcagaagggccaggcgatggtcgaaatcggtcccggtctggcggca

SEQ ID NO: 226273 - DNA, 75 bp, synthetic construct
  source 1..75: mol_type = other DNA
gatgctggatgtgctggggatgccagcgcgtacagtgatgagttatgagcgcgtttgcaggctgtatgaagaatc

SEQ ID NO: 226274 - DNA, 75 bp, synthetic construct
  source 1..75: mol_type = other DNA
gcctgatgatggttataagtatagacaaataattccgtataaagatgtctatgagctaaagtataaacactttaa

SEQ ID NO: 226275 - DNA, 75 bp, synthetic construct
  source 1..75: mol_type = other DNA
cgatagtaagtttaccaaaacagctggtattgataccgacgacatcgtcgctgtaggtctggtttatcagttcta

SEQ ID NO: 226276 - DNA, 75 bp, synthetic construct
  source 1..75: mol_type = other DNA
tcggcgtgggtgcaacctatgctaaatcagatcgcactgacggtcaggtcgcctatggtaagagcaaattcaatg

SEQ ID NO: 226277 - DNA, 75 bp, synthetic construct
  source 1..75: mol_type = other DNA
tctgtccgcgtataaacaaaagaaaacaggcggcacctggggcgcaatcattcgccagccgctagcatttgcaag

SEQ ID NO: 226278 - DNA, 75 bp, synthetic construct
  source 1..75: mol_type = other DNA
atgaaaaatgtcatcaccattttagtgattgcagttatcagtttctttactgctaatgtatcagcaaacaatgct

SEQ ID NO: 226279 - DNA, 75 bp, synthetic construct
  source 1..75: mol_type = other DNA
ggagagttgagtcattggatattgatgaccttccaaaggatcatatttctcaaggtgatttatgtgtacatctta

SEQ ID NO: 226280 - DNA, 75 bp, synthetic construct
  source 1..75: mol_type = other DNA
agatgcggcgggcggaaggcattagttttaatcagaacaatcacgtggtgattcagaacgacggcaccaacggac

SEQ ID NO: 226281 - DNA, 75 bp, synthetic construct
  source 1..75: mol_type = other DNA
ggtggtttatgacctcgggaaaaaagcggccgcggactttatgcaacagcaggcccgtgatggtggccggttaag

SEQ ID NO: 226282 - DNA, 75 bp, synthetic construct
  source 1..75: mol_type = other DNA
agtctgctgatttgagtcgctacagtggcacggtggttaaccgtccgacgttttttgcttttgcaaaaggcgcgg

SEQ ID NO: 226283 - DNA, 75 bp, synthetic construct
  source 1..75: mol_type = other DNA
gcggtaatattgatgtgctggtacaggcattaagcggcgtgctgaacagccgtagcctggaccttctgctggtcg

SEQ ID NO: 226284 - DNA, 75 bp, synthetic construct
  source 1..75: mol_type = other DNA
atgggggaagcgggacctgaagccattctgccattgcgtcgtggtgctgacggtaagctgggggttgtggcggat

SEQ ID NO: 226285 - DNA, 75 bp, synthetic construct
  source 1..75: mol_type = other DNA
cgttaaagcagcttgaacacatccaggccagcctggagcgtgcccgtattcaggccagtcaggaaaaccacgccc

SEQ ID NO: 226286 - DNA, 75 bp, synthetic construct
  source 1..75: mol_type = other DNA
gccggaagccgttgccgggcgcattattgattccaactcacgactggtgatcacttccgacgaaggtgtgcgtgc

SEQ ID NO: 226287 - DNA, 75 bp, synthetic construct
  source 1..75: mol_type = other DNA
ttaccttattgaagagtacgaaaaaggcaagccgagcgaacacctcattaaagacttattcgccgacggcgttct

SEQ ID NO: 226288 - DNA, 75 bp, synthetic construct
  source 1..75: mol_type = other DNA
cattgaactggaaacgccttacagcgctcgcgatgttgctgccctcgcagacttcagccataacccggcggatca

SEQ ID NO: 226289 - DNA, 75 bp, synthetic construct
  source 1..75: mol_type = other DNA
atacctcggcaaacctgagtgcgtacagcaacagtattgtggatacgcccacgtactttgcctttgcaaaagggg

SEQ ID NO: 226290 - DNA, 75 bp, synthetic construct
  source 1..75: mol_type = other DNA
ataatgacgaatctgttgttttatggcaaattaatccgtttcctgattatccattttttgcgttaaatcagagtg

SEQ ID NO: 226291 - DNA, 75 bp, synthetic construct
  source 1..75: mol_type = other DNA
agagaatcaaaaaaactaacgccgaaataaacaaaagatttggttcttttgatttattcaggaataaatgtatca

SEQ ID NO: 226292 - DNA, 75 bp, synthetic construct
  source 1..75: mol_type = other DNA
ttacggcaaagatccgaaaaccatcgtgaaatgcctggtgtacggtacgctgatggcgctggcgctgtataccat

SEQ ID NO: 226293 - DNA, 75 bp, synthetic construct
  source 1..75: mol_type = other DNA
gagaaataaccgccagaccagctaaccatcatgcgcatatcagcatggccgcaagaaaagccgagcgtgcacata

SEQ ID NO: 226294 - DNA, 75 bp, synthetic construct
  source 1..75: mol_type = other DNA
tgaaaatgataacgactacataagagcaacagatgattacattatccagaggaataaagaatgcgaacagacaga

SEQ ID NO: 226295 - DNA, 75 bp, synthetic construct
  source 1..75: mol_type = other DNA
aaaatccacaaccgtggaagtcagttgtgagtattttcaggggaaaccatatatccgtctgtccggcggaacagg

SEQ ID NO: 226296 - DNA, 75 bp, synthetic construct
  source 1..75: mol_type = other DNA
atgagccagctcgtctacttctcctgcagctccgaaaatacgcagcgttttatcgaacgtttagggctgcccgcc

SEQ ID NO: 226297 - DNA, 75 bp, synthetic construct
  source 1..75: mol_type = other DNA
cgacgagcacaaccgggcgttgctgcgcggcgttattgcttcgggtaatcgcaactttggtgaggcgtatggccg

SEQ ID NO: 226298 - DNA, 75 bp, synthetic construct
  source 1..75: mol_type = other DNA
gcaagaaaagccgagcgtgcgcatatctgcgaattgctgcatgacctggttaacacagcgagagagaagcacacc

SEQ ID NO: 226299 - DNA, 75 bp, synthetic construct
  source 1..75: mol_type = other DNA
cctgcacgggcagcgggttttggttttgcactactggtggcgtttgtggtgtggttgagcaccaaagcggtcagc

SEQ ID NO: 226300 - DNA, 75 bp, synthetic construct
  source 1..75: mol_type = other DNA
attctggtgtttggcgtcggcaacgcactggtgcatattttatcgagctttaatttgctgccggtgtatcagtaa

SEQ ID NO: 226301 - DNA, 75 bp, synthetic construct
  source 1..75: mol_type = other DNA
gtaacgctgggtttgtttgactatctggcagatctgtttggtttcgatgactcggctatgggccgcttgaaaaca

SEQ ID NO: 226302 - DNA, 75 bp, synthetic construct
  source 1..75: mol_type = other DNA
gcattgctgacctttgcaccgcctgttgtgggtggtctgctgttcccgaacggattcctgtacgccattggttat

SEQ ID NO: 226303 - DNA, 75 bp, synthetic construct
  source 1..75: mol_type = other DNA
ccggcacgggcggcgggttttggttttgcactgttggtggcgtttgtggtgtggttgagcaccaaagcggtcagc

SEQ ID NO: 226304 - DNA, 75 bp, synthetic construct
  source 1..75: mol_type = other DNA
cggattcctgtacgccattggctatgctggcttagcagctactatctgggcggcaattgtaccggcgctgttggc

SEQ ID NO: 226305 - DNA, 75 bp, synthetic construct
  source 1..75: mol_type = other DNA
agcatcccggacgccgaaggctacgctaactctcgtaccattaaagagtgctacgatgccttccagtcgctggag

SEQ ID NO: 226306 - DNA, 75 bp, synthetic construct
  source 1..75: mol_type = other DNA
tggtgattctgaccaaagatatcggcatcaagtttgaagagcgttttgctggcaagaccatcgtgcgcgtcaaca

SEQ ID NO: 226307 - DNA, 75 bp, synthetic construct
  source 1..75: mol_type = other DNA
atgacgaaaattattgcagtaaccgcgtgtccttccggtgttgcccatacttatatggcggcggaagcgctggaa

SEQ ID NO: 226308 - DNA, 75 bp, synthetic construct
  source 1..75: mol_type = other DNA
ccgacccagcgcgacctgctggccgggattgttgctaaacactatgcacgccagcatttgctgccgcgtgacgtg

SEQ ID NO: 226309 - DNA, 75 bp, synthetic construct
  source 1..75: mol_type = other DNA
gcttcacctgcccgaaatgtggtaaccatgacacctcccgtgtgtcggtgactcgccgcgtgtgcggatatttag

SEQ ID NO: 226310 - DNA, 75 bp, synthetic construct
  source 1..75: mol_type = other DNA
gtgcgtctatatcgttgggctacatcggtatccacgaaaccattaacgcgctgttcggcggcgagcatgtttatg

SEQ ID NO: 226311 - DNA, 75 bp, synthetic construct
  source 1..75: mol_type = other DNA
gagaaagtagtaattataacgccagccggatatggcgggaaatggtggcccgggtaagccgctggttgatgccct

SEQ ID NO: 226312 - DNA, 75 bp, synthetic construct
  source 1..75: mol_type = other DNA
gggaatatggctataaatgtgtgcccgcaatcggcgagctacgccaacctgtgtggcctgcgggggtatacggca

SEQ ID NO: 226313 - DNA, 75 bp, synthetic construct
  source 1..75: mol_type = other DNA
gacggaagcgcaaagccgaacatttagccgggcggatcgctgcaatttatgcgctgcgggaatatggctataaat

SEQ ID NO: 226314 - DNA, 75 bp, synthetic construct
  source 1..75: mol_type = other DNA
gcactcgagttctaccgtattctgaaaacccaaaataaatcacagctaagcagttggttcaatcgagtccacgaa

SEQ ID NO: 226315 - DNA, 75 bp, synthetic construct
  source 1..75: mol_type = other DNA
tttattagtctgatgtgtgaaaaagaaccggagttgaaaatagcgcagcaactggtactcgagttctatcgtatt

SEQ ID NO: 226316 - DNA, 75 bp, synthetic construct
  source 1..75: mol_type = other DNA
ttgcagacgcaacaggacaccatacgccagatggctgaatacaaccgcctgctctcacagcgggtgtccggccgg

SEQ ID NO: 226317 - DNA, 75 bp, synthetic construct
  source 1..75: mol_type = other DNA
tatcgccattgttgaacgtctgcgtcaggcggtggatcagtggaaagaagaaacgggttacggttttagccttta

SEQ ID NO: 226318 - DNA, 75 bp, synthetic construct
  source 1..75: mol_type = other DNA
tatctggaaacccgggttaggcctggcgctacaaggcgttggctttgccgttatcggcacctttgtttcgctcta

SEQ ID NO: 226319 - DNA, 75 bp, synthetic construct
  source 1..75: mol_type = other DNA
gaagtggttaaacgcgttccttcccaggtgcgcggcacagcgctcggtggctatgccgcgtttcaggatatcgcc

SEQ ID NO: 226320 - DNA, 75 bp, synthetic construct
  source 1..75: mol_type = other DNA
gtaccagctctggcgggagaacgcccctcgctgtggagtgtcgtcggtcttatctggaagcctgggctgggcctg

SEQ ID NO: 226321 - DNA, 75 bp, synthetic construct
  source 1..75: mol_type = other DNA
caatgcctctgtcaccggcgataaaaataccgtcccgatgcagcttcgcctgaccggcaaagttcagatgcctaa

SEQ ID NO: 226322 - DNA, 75 bp, synthetic construct
  source 1..75: mol_type = other DNA
gaaagccagttactgacgggcgctctgacctggggattgggcatcgttgggccaaaacattccggcaaagtgatg

SEQ ID NO: 226323 - DNA, 75 bp, synthetic construct
  source 1..75: mol_type = other DNA
cgttgccggttatcccgctgtttgttcatcatgagctgggctatggcaacaccatggtcgggattgccgtcggca

SEQ ID NO: 226324 - DNA, 75 bp, synthetic construct
  source 1..75: mol_type = other DNA
aggggggttacaggcagtgaaaccatcgtcagggatgctgttgccaaatggcgtaaaggctggatcccaccggtt

SEQ ID NO: 226325 - DNA, 75 bp, synthetic construct
  source 1..75: mol_type = other DNA
tcaataccccggagacgaaacagtcaggcgcgcctcatgtcggtattgatgagtgggcgtggcatcggggccacc

SEQ ID NO: 226326 - DNA, 75 bp, synthetic construct
  source 1..75: mol_type = other DNA
caacgtcaactgggattaatcgccggaggtgaggccgggaaacgggcagcaacggcagtggggctccgttgcagt

SEQ ID NO: 226327 - DNA, 75 bp, synthetic construct
  source 1..75: mol_type = other DNA
cgcttcaggggatgttagcttgtggtctggctggcggcgcgctgctgctggcggcgcttttacccgtctctgcac

SEQ ID NO: 226328 - DNA, 75 bp, synthetic construct
  source 1..75: mol_type = other DNA
gaatgctggcgaccacgtttggttactcttcggtatttcttgccggggcgatctctgcggtgctgggaattattg

SEQ ID NO: 226329 - DNA, 75 bp, synthetic construct
  source 1..75: mol_type = other DNA
gcaaaacgttcggcgcttcaggggatgttagcttgtggtctggctggcggcgcgttgctgctggcggcgattttg

SEQ ID NO: 226330 - DNA, 75 bp, synthetic construct
  source 1..75: mol_type = other DNA
gagacgaaactgtcaggctcgccccatgtcggtattgatgagtgggcgtggcatcggggccaccgttacggtacg

SEQ ID NO: 226331 - DNA, 75 bp, synthetic construct
  source 1..75: mol_type = other DNA
atattgaagccgacacgcccgcacgttataacgccgacccggatcgcctgtttgaatcctccggttgcgccggaa

SEQ ID NO: 226332 - DNA, 75 bp, synthetic construct
  source 1..75: mol_type = other DNA
gagatcgacagccagttggtgcacaagctctattacggccattttatgtgctatgtcttccatcaggattacatc

SEQ ID NO: 226333 - DNA, 75 bp, synthetic construct
  source 1..75: mol_type = other DNA
aacagcaaccccgcaaaaaacggcatcagcgttggacagaggttatggccctgcataacaagggatgtagtttca

SEQ ID NO: 226334 - DNA, 75 bp, synthetic construct
  source 1..75: mol_type = other DNA
tggcgatgcgcttgaacgaatgatgtacagacatatacctctgatacgtcttgttgccagtgagttgtcaccaaa

SEQ ID NO: 226335 - DNA, 75 bp, synthetic construct
  source 1..75: mol_type = other DNA
gtcatgtaaatcgtctgaagatgctgaaacgccagatgtatggtcgagcaggatttgaactactcaggcagaggg

SEQ ID NO: 226336 - DNA, 75 bp, synthetic construct
  source 1..75: mol_type = other DNA
ccacactgccgccgtacgtcgcggtgcgccaaactgcctgttgctggctgacctgccgtttatggcgtatgccac

SEQ ID NO: 226337 - DNA, 75 bp, synthetic construct
  source 1..75: mol_type = other DNA
cggttgaactggcaaaacgcattaccgaagcactggcgatcccggttatcggtattggcgcaggcaacgttaccg

SEQ ID NO: 226338 - DNA, 75 bp, synthetic construct
  source 1..75: mol_type = other DNA
atgaaaccaaccactattgcttcattgcaaaaatgcaaacaagaaaaaaaacgtttcgcgaccatcaccgcttac

SEQ ID NO: 226339 - DNA, 75 bp, synthetic construct
  source 1..75: mol_type = other DNA
tgataccttcgaagcagaaaaaaatcagcaggtgttttatataggcaccaatcagccggaagtgctgactgaaat

SEQ ID NO: 226340 - DNA, 75 bp, synthetic construct
  source 1..75: mol_type = other DNA
tatcaaagggcgtaccgatgcgatgctggaaaaagtaaaattcttccgcccgcattttaccgaccgtgcgatgca

SEQ ID NO: 226341 - DNA, 75 bp, synthetic construct
  source 1..75: mol_type = other DNA
accctgcgtctcgacaagctgcacgttcttggcaagggcgaacaggtgctggcctatccgggcaccacgctctat

SEQ ID NO: 226342 - DNA, 75 bp, synthetic construct
  source 1..75: mol_type = other DNA
agttgtcgtcggcgccggatacagcatctaccctgctgagggcaaacgctatggcttgtattttccgtccgccac

SEQ ID NO: 226343 - DNA, 75 bp, synthetic construct
  source 1..75: mol_type = other DNA
tacggcagtattagtcactgcggggctacggctatagcaatcgtctctcaccaaccgattggtgtggatatcgaa

SEQ ID NO: 226344 - DNA, 75 bp, synthetic construct
  source 1..75: mol_type = other DNA
gctttacgagagtatggtttgaaaggcacacctgcaattggtcgtcatcgccagcctgtctggcctgcggaggta

SEQ ID NO: 226345 - DNA, 75 bp, synthetic construct
  source 1..75: mol_type = other DNA
aattgtcagcatcaacagatgaatataagcgggccgaatggcgaccatatcgtgcagtggttagtaaggggtaat

SEQ ID NO: 226346 - DNA, 75 bp, synthetic construct
  source 1..75: mol_type = other DNA
tcaaccaattggcattgatattgaagaaattttttctgcacaaaccgcaggggaattgacagacaacattattac

SEQ ID NO: 226347 - DNA, 75 bp, synthetic construct
  source 1..75: mol_type = other DNA
ttgcgtttgtcatcagtctctaatatggtcgatatgaaaactacgcatacctccctcccctttgccggacatacg

SEQ ID NO: 226348 - DNA, 75 bp, synthetic construct
  source 1..75: mol_type = other DNA
gacatacgctgcattttgttgagtttgatccggcgagttttcgcgagcaggatttactctggctgccgcactacg

SEQ ID NO: 226349 - DNA, 75 bp, synthetic construct
  source 1..75: mol_type = other DNA
atcgatggcacctgctaaaaaatattggcgatgcgcttgaacgaatgatgtacagacatatacctctgatacgtc

SEQ ID NO: 226350 - DNA, 75 bp, synthetic construct
  source 1..75: mol_type = other DNA
tgttgccaaatggcgtaaaggctggaacccaccggttactactgccgcaagacttccttcagtgtcccgggtaag

SEQ ID NO: 226351 - DNA, 75 bp, synthetic construct
  source 1..75: mol_type = other DNA
tggttcagaaaatatccggaaatacaggttgtctcgcgtgatcgcagtggagtctatgcgacagcagcacgtgaa

SEQ ID NO: 226352 - DNA, 75 bp, synthetic construct
  source 1..75: mol_type = other DNA
tgtaaatcgcctgaagatgctgaaacgccagatgtatggtcgagcaggatttgaactactcaggcagagggtaat

SEQ ID NO: 226353 - DNA, 75 bp, synthetic construct
  source 1..75: mol_type = other DNA
cgagggcttctggacccatggagggagtggttaaaagagcaacgagaaagtagtaattataacgccagccggata

SEQ ID NO: 226354 - DNA, 75 bp, synthetic construct
  source 1..75: mol_type = other DNA
cctgcagcatcgctccgtcgtccggaacgcctaaaacaacaaacccgcaaaaaacggcatcagcgttggacagag

SEQ ID NO: 226355 - DNA, 75 bp, synthetic construct
  source 1..75: mol_type = other DNA
aacaggatttcggctatcagttgccgatactgagcgatgtagcttatcagcgtatacatcttgaaagcggggagg

SEQ ID NO: 226356 - DNA, 75 bp, synthetic construct
  source 1..75: mol_type = other DNA
gcgcggaaaaagccagcgcgcacgcttcccgtacgctaaaagcggtgtacgaagcgattggttttgtggcgaagc

SEQ ID NO: 226357 - DNA, 75 bp, synthetic construct
  source 1..75: mol_type = other DNA
acagttcgaaggcaagatgtatggtcatctgaaaggtgaagtggctgatgccgtttccggtatgctgactgaatt

SEQ ID NO: 226358 - DNA, 75 bp, synthetic construct
  source 1..75: mol_type = other DNA
cacaggccgtcgatgcgctagttacgcagggggccactgcggcacaaaccccagcggaagcggcagcaggcgctg

SEQ ID NO: 226359 - DNA, 75 bp, synthetic construct
  source 1..75: mol_type = other DNA
gattggtaccggaaaaaattcattttcctgggggatttcaaccgctttatcattcgccgcgttacttatatggaa

SEQ ID NO: 226360 - DNA, 75 bp, synthetic construct
  source 1..75: mol_type = other DNA
ctgattttctggcgcttgatgaaaagttatcggtgaatgctatggattttgaaactattagtgaacatcttatta

SEQ ID NO: 226361 - DNA, 75 bp, synthetic construct
  source 1..75: mol_type = other DNA
atatcgcaaaacatgtcattcagattcacctcatcaatgagcacacgggtgaagtggttgataaacagttgcgta

SEQ ID NO: 226362 - DNA, 75 bp, synthetic construct
  source 1..75: mol_type = other DNA
caggttcacttcatcaatgagcacacaggtgaagtggtagataagcagattcgccgtcaggattttctgacattt

SEQ ID NO: 226363 - DNA, 75 bp, synthetic construct
  source 1..75: mol_type = other DNA
gaactggagaactggaaggtttccgtgatagccatgaatggaatggcgttcgatctggcactgttgcaaagttag

SEQ ID NO: 226364 - DNA, 75 bp, synthetic construct
  source 1..75: mol_type = other DNA
gcgcacagccttcaggtgaattgaccattggtaactacatgggtgcgctgcgtcagtgggtaaacatgcaggatg

SEQ ID NO: 226365 - DNA, 75 bp, synthetic construct
  source 1..75: mol_type = other DNA
tgatttggcaatattcaacctgaataatataatatttttatcaatatttattttgatcttttatcttagccgata

SEQ ID NO: 226366 - DNA, 75 bp, synthetic construct
  source 1..75: mol_type = other DNA
gtggatgagcgatgaccaacgccgtcggatgcaggatattgccgatcgccttgggcgcggtcttgacgaaatcga

SEQ ID NO: 226367 - DNA, 75 bp, synthetic construct
  source 1..75: mol_type = other DNA
gcagggggccactgcggcacaaaccccagcggaagcggcagcaggcgctgaatttatcatcactatgcttcccaa

SEQ ID NO: 226368 - DNA, 75 bp, synthetic construct
  source 1..75: mol_type = other DNA
ttgctgaacttgtggcaatgaaagccggtgcattcatgaaagacaggagcatggcttccggggttattaacggta

SEQ ID NO: 226369 - DNA, 75 bp, synthetic construct
  source 1..75: mol_type = other DNA
ggtggcgggatgagattttagcaaatagtgcgattgctggagtttatgcaaaatctgatgacggaaaatcagcca

SEQ ID NO: 226370 - DNA, 75 bp, synthetic construct
  source 1..75: mol_type = other DNA
gatagtggcgcgttaattgagaagaaagtggtcgcccaaactctttttgaaccggtctggattggctggaacgaa

SEQ ID NO: 226371 - DNA, 75 bp, synthetic construct
  source 1..75: mol_type = other DNA
gctgttttccccatgtggaaagctatattatcggtggactgattcgcccgggttatttttcggtaggagagagtc

SEQ ID NO: 226372 - DNA, 75 bp, synthetic construct
  source 1..75: mol_type = other DNA
atgagtaaagtcgtacgcattattttcgaatacaaggaagatgttatctgcaaaaactctgatggcagcacgcac

SEQ ID NO: 226373 - DNA, 75 bp, synthetic construct
  source 1..75: mol_type = other DNA
tcgaatacaaggaggacgttatccgtaaaaacgctgatggaacagtgcacatgggggtaagtctggatatacgtt

SEQ ID NO: 226374 - DNA, 75 bp, synthetic construct
  source 1..75: mol_type = other DNA
gattcatcagttaattgcaaatccagaatttgtagtccgtctgacagatgactattacctgatgctttctgttac

SEQ ID NO: 226375 - DNA, 75 bp, synthetic construct
  source 1..75: mol_type = other DNA
tgagcaaacacaagcacttagagacttattcaattctgtatctaaacaggcatctgggtttaatgatattgtaga

SEQ ID NO: 226376 - DNA, 75 bp, synthetic construct
  source 1..75: mol_type = other DNA
ctccattaaggcaaaaagtaaaaagaaaatactctgctaattcgtctggggtaccaggacataatgattcaaaaa

SEQ ID NO: 226377 - DNA, 75 bp, synthetic construct
  source 1..75: mol_type = other DNA
ccgttatctggcgcaacgctttcttgatagtggtgcgttaatcgagaagaaagtggtcgcgcaaaccctctttga

SEQ ID NO: 226378 - DNA, 75 bp, synthetic construct
  source 1..75: mol_type = other DNA
ccgtaccggaaaaatgttattagagaaagggcgggaagttctgcataccgtgcgagaactggaaaagcaggcgat

SEQ ID NO: 226379 - DNA, 75 bp, synthetic construct
  source 1..75: mol_type = other DNA
ggtggcgagacgagattttagcaaatagtgcgatcgccggtgtttatgcaaaatctgatgacggaaaatcagcca

SEQ ID NO: 226380 - DNA, 75 bp, synthetic construct
  source 1..75: mol_type = other DNA
aacattaccgccgttgttcacaagccagcagaaaaggccgaattttcgatgactgcctgtacattgcaaaacagt

SEQ ID NO: 226381 - DNA, 75 bp, synthetic construct
  source 1..75: mol_type = other DNA
gctcctgcctacgataccatcattcaggcaatgagcgggataatgatggaaacagggtaccctgatgctccgcca

SEQ ID NO: 226382 - DNA, 75 bp, synthetic construct
  source 1..75: mol_type = other DNA
atgacaaatactaaaagcaaaggcccatttgaagggttattagttattgatatgactcatgtccttaatgggcct

SEQ ID NO: 226383 - DNA, 75 bp, synthetic construct
  source 1..75: mol_type = other DNA
tcaaaaacctctccgatgaaacccgtctgggcattgtgttgctgcttagagagatgggagagctgtgcgtgtgcg

SEQ ID NO: 226384 - DNA, 75 bp, synthetic construct
  source 1..75: mol_type = other DNA
acaggacgacgtacaggccatcgcccgtaagctggcatcggccaactgctctggcagcggtaaggctgtttgtat

SEQ ID NO: 226385 - DNA, 75 bp, synthetic construct
  source 1..75: mol_type = other DNA
gtttctcttttggccatgactcatggagcggacggcaacagaaaggacctacatggtaatgctaggtttgccgga

SEQ ID NO: 226386 - DNA, 75 bp, synthetic construct
  source 1..75: mol_type = other DNA
cgcacatttggtccctatgtggatggacagtcactctattacagttttattaatcatggcaaagagagtgtggtt

SEQ ID NO: 226387 - DNA, 75 bp, synthetic construct
  source 1..75: mol_type = other DNA
tgggcgcaagggtaattaaagttgagccgccgggtcatggtgatgatacccgcacatttggtccctatgtggatg

SEQ ID NO: 226388 - DNA, 75 bp, synthetic construct
  source 1..75: mol_type = other DNA
atgacaaataatgaaagcaaagggccgtttgaaggcttattagttatcgatatgacacatgtccttaatggacct

SEQ ID NO: 226389 - DNA, 75 bp, synthetic construct
  source 1..75: mol_type = other DNA
gacccgcatgttatgccgggagcggcaacgctcgaccagcatggggaacaaattcgccaggagttctcatcataa

SEQ ID NO: 226390 - DNA, 75 bp, synthetic construct
  source 1..75: mol_type = other DNA
ataaaaatcagcggctgcgcggacccgcatgttatgccgggagcggcaacgctcgaccagcatggggaacaaatt

SEQ ID NO: 226391 - DNA, 75 bp, synthetic construct
  source 1..75: mol_type = other DNA
ggcggtgtctatttattcagcggaatagtgagtgcactttatggccgcgaaaagagccagagaggggcgcatgtc

SEQ ID NO: 226392 - DNA, 75 bp, synthetic construct
  source 1..75: mol_type = other DNA
gcaatgctacgtgaaagtggattattgcaggatcgcaaacagggcaagtgggttcactaccgcttatccccgcat

SEQ ID NO: 226393 - DNA, 75 bp, synthetic construct
  source 1..75: mol_type = other DNA
cactcaacgagatcccactgacggaagatctggcctccgcactgactcctgggcttttttttcaacgtgatacag

SEQ ID NO: 226394 - DNA, 75 bp, synthetic construct
  source 1..75: mol_type = other DNA
aggtgatgccattcgcatcagatcaccccatgtttacccggccacagtcacgcgcctgctgggcactgctggcgg

SEQ ID NO: 226395 - DNA, 75 bp, synthetic construct
  source 1..75: mol_type = other DNA
cactcaacgagatcccgctaacggaagatctggcctctgcactgacgcctacgctcttttttcaacacgatgcag

SEQ ID NO: 226396 - DNA, 75 bp, synthetic construct
  source 1..75: mol_type = other DNA
ccggtaattggcgaagcggtcaacgtgatcgtccagatatctaaaacttctgagggtcgccggattaaagaaatc

SEQ ID NO: 226397 - DNA, 75 bp, synthetic construct
  source 1..75: mol_type = other DNA
ggaccgtatttttgtgggtgaaacacgcggcccggaagcactggatatgctcgatgcctggaataccggtcatga

SEQ ID NO: 226398 - DNA, 75 bp, synthetic construct
  source 1..75: mol_type = other DNA
ccgatgttctgcatgggtactttagacaagatgcgctcaaaaaccatcctacaaacaatcgcgggttttcatgac

SEQ ID NO: 226399 - DNA, 75 bp, synthetic construct
  source 1..75: mol_type = other DNA
ctatctttgccgaaggcgcgtatctgatgcgcgaagacgacgatcgcagctacgagaagctggtcgataccatgc

SEQ ID NO: 226400 - DNA, 75 bp, synthetic construct
  source 1..75: mol_type = other DNA
ggctcagtgcgttgcttgaagcgcgggaagctgaaggcagccttgccagggcgcttttcactccggatgcgccgg

SEQ ID NO: 226401 - DNA, 75 bp, synthetic construct
  source 1..75: mol_type = other DNA
acggtactacattgctgatgcattcatttccttaatggagcgtgttcataatgaacctgtttatattgaagatgg

SEQ ID NO: 226402 - DNA, 75 bp, synthetic construct
  source 1..75: mol_type = other DNA
catctacgaccgctcctgtgagttcgtcaaaagttattacgacccgtctattgataaaattctcaacccgctgga

SEQ ID NO: 226403 - DNA, 75 bp, synthetic construct
  source 1..75: mol_type = other DNA
tggctgtcgattgccattcgcggtctgctggcaatgggggaaaaccgtaaccgtcgtgtctggatttttgcagac

SEQ ID NO: 226404 - DNA, 75 bp, synthetic construct
  source 1..75: mol_type = other DNA
agaacggcgagccgttcaccatccgggactggatgcgcagtgtccgtgaggaccagcccaacggctggctgttta

SEQ ID NO: 226405 - DNA, 75 bp, synthetic construct
  source 1..75: mol_type = other DNA
tcagcgatgatattcgcaccaagacgtatgcagatggtcgcaaggaagagatttatatgatttacctgatttttg

SEQ ID NO: 226406 - DNA, 75 bp, synthetic construct
  source 1..75: mol_type = other DNA
gccaatgcggaaaggattaagaacctgacctttaatggcaagccgattgatccgaacgccatgttcctggttgcc

SEQ ID NO: 226407 - DNA, 75 bp, synthetic construct
  source 1..75: mol_type = other DNA
gtgattgatggtgtgaattatcagattgatgttacccagcctgcccgttatgacggcgagtgccagatggttaat

SEQ ID NO: 226408 - DNA, 75 bp, synthetic construct
  source 1..75: mol_type = other DNA
atgggctggaattttcctttatatgaacaggttacaaccggcccggtcgcggcattacattacgatggcacaacc

SEQ ID NO: 226409 - DNA, 75 bp, synthetic construct
  source 1..75: mol_type = other DNA
gtggccagtttgcttcggagccgtattgagactgccgtttcggctcggctcaagggagagtttgaagcggcatca

SEQ ID NO: 226410 - DNA, 75 bp, synthetic construct
  source 1..75: mol_type = other DNA
cgccgggaaatccgcgaagagctcggcgaacaactgattcttaccgatatcacgccatggaccttcagtgatgat

SEQ ID NO: 226411 - DNA, 75 bp, synthetic construct
  source 1..75: mol_type = other DNA
cgcccgtcgataccttcctgacgctgtttgtcgccgagatccaaaaccaggacccgaccgacccaaccgacgcca

SEQ ID NO: 226412 - DNA, 75 bp, synthetic construct
  source 1..75: mol_type = other DNA
gcatcaacctgctgcgcggcatcctgcgcgagatgggcgtggccgcgcccaacggcacccaggcgttcctgcgtc

SEQ ID NO: 226413 - DNA, 75 bp, synthetic construct
  source 1..75: mol_type = other DNA
agggcaaataaaatagcaacaggaaaagctggatcagactgggatgttaatgacgcaagtaatataattctttca

SEQ ID NO: 226414 - DNA, 75 bp, synthetic construct
  source 1..75: mol_type = other DNA
acgcggtgctgatgagcaacattcaggtgatggcgctcggtaacctggtgggcgacgacattatggtgcagacca

SEQ ID NO: 226415 - DNA, 75 bp, synthetic construct
  source 1..75: mol_type = other DNA
atgaataccctggcgctgaatgcgcaatcgccgcaacccaccgccacggcggaaagcaacaacgtggcggccagc

SEQ ID NO: 226416 - DNA, 75 bp, synthetic construct
  source 1..75: mol_type = other DNA
gacccgaccgacgccaccgaatatatcgaccagctgtcgtcgatggcgcaggtggcgatgatggaagagatgagc

SEQ ID NO: 226417 - DNA, 75 bp, synthetic construct
  source 1..75: mol_type = other DNA
tgaaaatatctggaaggctcaatcaggcctaagtcgcatgacggcgacaaatcagaacggcaactggcttgatgt

SEQ ID NO: 226418 - DNA, 75 bp, synthetic construct
  source 1..75: mol_type = other DNA
tctttttcagcgtactggtagccaggagcttattgttgagatttttggaaaaaagcagcgtgtaaatcgtagtgc

SEQ ID NO: 226419 - DNA, 75 bp, synthetic construct
  source 1..75: mol_type = other DNA
gtcgctctattttaagcgagcaaggatatgcaacggaggatcatgctcacggattaccgtcaaaatcaaccgtag

SEQ ID NO: 226420 - DNA, 75 bp, synthetic construct
  source 1..75: mol_type = other DNA
tgcaacggaggatcatgctcatggattaccgtcaagatccacgattgtgactgatgcaacgattaatttctattt

SEQ ID NO: 226421 - DNA, 75 bp, synthetic construct
  source 1..75: mol_type = other DNA
aaactgacactcacggtgtccagtccgcttatcggtgtctatgcccctacaggcactactctgacggcaacgcta

SEQ ID NO: 226422 - DNA, 75 bp, synthetic construct
  source 1..75: mol_type = other DNA
taccgacaactacattcccttcgcaggggttcaccggggcgtattatcagttgaataatgacaactttgccccag

SEQ ID NO: 226423 - DNA, 75 bp, synthetic construct
  source 1..75: mol_type = other DNA
atggtcgcacaagacatagcagttaaagctcacgttaacgaccagtttggcaacccggtgacgcatcaacccgcg

SEQ ID NO: 226424 - DNA, 75 bp, synthetic construct
  source 1..75: mol_type = other DNA
tgcctctatcccggatcatgatgttcttcttgcgggatttccatgccagccattcagcatcgccggtgtcagtaa

SEQ ID NO: 226425 - DNA, 75 bp, synthetic construct
  source 1..75: mol_type = other DNA
ggatctgaaattcttattgatcggggctggtctcatgaactgggagaaactgatttccataacacatacaacatg

SEQ ID NO: 226426 - DNA, 75 bp, synthetic construct
  source 1..75: mol_type = other DNA
gggagtacttatacaactatgcaaagaaacatgcggcaaaaggcaatggttttggttttggactagtagatcctt

SEQ ID NO: 226427 - DNA, 75 bp, synthetic construct
  source 1..75: mol_type = other DNA
atgacgagaaaatatctcacacaggatgaagtctacaggctgatggatgcagcccagagtatgtcctttcctgaa

SEQ ID NO: 226428 - DNA, 75 bp, synthetic construct
  source 1..75: mol_type = other DNA
aaacgaagtgggtaaggtgacgtccgtcactttgcctaagctgacgcgcaaaaccgacagctaccggggtgtggc

SEQ ID NO: 226429 - DNA, 75 bp, synthetic construct
  source 1..75: mol_type = other DNA
aaccagcaatcgcggcgcagccgtgcggcacaccatcacaagtccagaaaatcatcgaatcagaagtatacgacc

SEQ ID NO: 226430 - DNA, 75 bp, synthetic construct
  source 1..75: mol_type = other DNA
aaatgtttttatctaaaatatcttgggagcaaaatgcagcaatgtttcttatgcttgaaaataagagtaaaatgc

SEQ ID NO: 226431 - DNA, 75 bp, synthetic construct
  source 1..75: mol_type = other DNA
gtggattttaatgccaagtctttattaacaactaagggatgggaatattattggtggcttgattcgtttttggga

SEQ ID NO: 226432 - DNA, 75 bp, synthetic construct
  source 1..75: mol_type = other DNA
gtgccgggttcaaagagaatttgcaggcagtgtctgaaagatgacatttatctgaacaacatcattgcaagcgat

SEQ ID NO: 226433 - DNA, 75 bp, synthetic construct
  source 1..75: mol_type = other DNA
tgcgccgggagcgtttaaagacagcctggcatccggtagcgatgtgcgtgcgctgtacgagcataactataccca

SEQ ID NO: 226434 - DNA, 75 bp, synthetic construct
  source 1..75: mol_type = other DNA
acattacaggaatgagctttggttttcgcgcattatgcgaggaggggagtatcgcgcaaaaaccgtatctgcgta

SEQ ID NO: 226435 - DNA, 75 bp, synthetic construct
  source 1..75: mol_type = other DNA
atgagttatccctggagcgtgagcgccagccggaaatacaggaatggacacaggatggcccttcgcttggatggt

SEQ ID NO: 226436 - DNA, 75 bp, synthetic construct
  source 1..75: mol_type = other DNA
gagaatgaataatatgcaggagcagattaaagagaaccggaaggagttaagggagagtgcagcccagagcgcggc

SEQ ID NO: 226437 - DNA, 75 bp, synthetic construct
  source 1..75: mol_type = other DNA
gtgctcatactgacagtcaggttacagcagtacgtgatgaactgaaggcagagggagacagtctgcgtggtgaga

SEQ ID NO: 226438 - DNA, 75 bp, synthetic construct
  source 1..75: mol_type = other DNA
agctctccgggggtaaccagcaaaaagtgatcctcgcgcgctgcatggcgctcaacccgcgggtgctgatcgtcg

SEQ ID NO: 226439 - DNA, 75 bp, synthetic construct
  source 1..75: mol_type = other DNA
ctggtttcccatgacgtgctgctggcgcaagggagctaccgagcacaagcgtctgaacagtgtcgtgttcaccct

SEQ ID NO: 226440 - DNA, 75 bp, synthetic construct
  source 1..75: mol_type = other DNA
tggtgagataggcggtgtatacagagatgcccgtgctcatactgacagtcaggtcacagcagtacgtgatgaact

SEQ ID NO: 226441 - DNA, 75 bp, synthetic construct
  source 1..75: mol_type = other DNA
tatgaagtggcacactgaatttggccacctgaacagaggtgatatgctcacctcagaacaacacaggtgctccaa

SEQ ID NO: 226442 - DNA, 75 bp, synthetic construct
  source 1..75: mol_type = other DNA
gtgctggagctggtggagcgcggggatatctccggcatgagctttggtttccgggcgctgaaagaggcgtgggat

SEQ ID NO: 226443 - DNA, 75 bp, synthetic construct
  source 1..75: mol_type = other DNA
ggagagactgcaaaatgttgggtctgctccagagcttaatagcttaagcactgatgcgctgcgtgctggattggg

SEQ ID NO: 226444 - DNA, 75 bp, synthetic construct
  source 1..75: mol_type = other DNA
ggtgcaacgttaaagtcaggtgctactgatttagccatacagggggttacacaggcggcaggcggtgaggacatc

SEQ ID NO: 226445 - DNA, 75 bp, synthetic construct
  source 1..75: mol_type = other DNA
aaccccggaattgtcactgtatgccgtcggtatcctgctctcccgcgccagtaaaatgccgggcaagaatggcga

SEQ ID NO: 226446 - DNA, 75 bp, synthetic construct
  source 1..75: mol_type = other DNA
cgatgcgctggcgggagaaagtacacggcccagagtcagtcgtcttggcgaagggacgctgattactttgcgctg

SEQ ID NO: 226447 - DNA, 75 bp, synthetic construct
  source 1..75: mol_type = other DNA
taatgcagcggatatctacttccagttagttgaggaatgccagattccaccaggtggctctcttgtcgattacgt

SEQ ID NO: 226448 - DNA, 75 bp, synthetic construct
  source 1..75: mol_type = other DNA
aaggttttgtactggatagtcagtctgacaattcacaattgccagaaggttttgtgcttgattcgcagccatcta

SEQ ID NO: 226449 - DNA, 75 bp, synthetic construct
  source 1..75: mol_type = other DNA
aaatgccgcagaactctccgcgcgcgatgcaatagtaaaccaggtgattttgagtaccctcacgctccccgattt

SEQ ID NO: 226450 - DNA, 75 bp, synthetic construct
  source 1..75: mol_type = other DNA
atggcagcaatcgcgtttatcggtttaggacaaatgggttcgccaatggcgagcaatttattgcagcaagggcat

SEQ ID NO: 226451 - DNA, 75 bp, synthetic construct
  source 1..75: mol_type = other DNA
cctgtatgagcagcaccccgaaaaaatgccacgcgcggataatcgccgctggtgggcggatttagcgggggtgtg

SEQ ID NO: 226452 - DNA, 75 bp, synthetic construct
  source 1..75: mol_type = other DNA
gtaaaatgccgggcagagacggagatattcttgcccgcttgacgacgctgccacaggcgctggggggtcatgcac

SEQ ID NO: 226453 - DNA, 75 bp, synthetic construct
  source 1..75: mol_type = other DNA
ttgctgacgctacatgacgccaacagcaaagccctgttacaacagcagcttaaggtgcagtggcaaaccacctag

SEQ ID NO: 226454 - DNA, 75 bp, synthetic construct
  source 1..75: mol_type = other DNA
cggaatacgtgcgcaaatttttagcgcgtcaccccggttcgcctttatacgtccgcaaggtgtggaaaaacgaga

SEQ ID NO: 226455 - DNA, 75 bp, synthetic construct
  source 1..75: mol_type = other DNA
cctgtcggcttgctcaagcgtccctcagacaagcaacgaatacacgaaagccctggatgataccaaacaggtatg

SEQ ID NO: 226456 - DNA, 75 bp, synthetic construct
  source 1..75: mol_type = other DNA
agggcgcaagcgcaacttaccggtgatggtgatgctttttgaacctcaaccactggaactgtttgctaccgataa

SEQ ID NO: 226457 - DNA, 75 bp, synthetic construct
  source 1..75: mol_type = other DNA
taatcgtcctccagcaaactggaaacggctttactcaggctctacttcgctacatttcatcgccaaatatcgtgc

SEQ ID NO: 226458 - DNA, 75 bp, synthetic construct
  source 1..75: mol_type = other DNA
cctgtacgcgttgcaactggcatggattgattatcaactgaagaacaagaagctggcattcaatcaggaaatgcc

SEQ ID NO: 226459 - DNA, 75 bp, synthetic construct
  source 1..75: mol_type = other DNA
atggtcttccccgacagatgatgatgagctgcgcggaagtcaccgcgccggagtggatagtcgacaaggtggcgc

SEQ ID NO: 226460 - DNA, 75 bp, synthetic construct
  source 1..75: mol_type = other DNA
gcagggctgcaatttctgtggctggcagcgatatgagcgtggagagcttgttgatgtgctgtggggggaactgga

SEQ ID NO: 226461 - DNA, 75 bp, synthetic construct
  source 1..75: mol_type = other DNA
cacgccgtggtgtcagccggaaagcgacgttattgcagaattaagccgccgtttcagctgcacgctggagcactg

SEQ ID NO: 226462 - DNA, 75 bp, synthetic construct
  source 1..75: mol_type = other DNA
atgaataaaaaattaatgtatatattcgcaatatttatagttgcagcaataacctgtattaaagccatggtgaat

SEQ ID NO: 226463 - DNA, 75 bp, synthetic construct
  source 1..75: mol_type = other DNA
acgaccttgcgcgataaagctatggcgaattatgtctttgattatttaagcgcaccgggcagtcttccgtttacc

SEQ ID NO: 226464 - DNA, 75 bp, synthetic construct
  source 1..75: mol_type = other DNA
cattatgaatctcaaaaatggttaaaactggccgccaaacaacattacaaaaacgcggaaagattacttgccggg

SEQ ID NO: 226465 - DNA, 75 bp, synthetic construct
  source 1..75: mol_type = other DNA
ctgacgctatactgcttctctttcttattgctcaaactgtcgacattactatgcccgtttttgctctgctcgcgc

SEQ ID NO: 226466 - DNA, 75 bp, synthetic construct
  source 1..75: mol_type = other DNA
gacgccgcgtcgtctggtttaacgttgcgggcgcggtaattctgacactggcctacttcggcagccgaattgtcc

SEQ ID NO: 226467 - DNA, 75 bp, synthetic construct
  source 1..75: mol_type = other DNA
ttatttagcatggaaaatatcgacaaggccgtgctctctatcgtggcgtggtttgtctatattgtgctgctgtgg

SEQ ID NO: 226468 - DNA, 75 bp, synthetic construct
  source 1..75: mol_type = other DNA
acgatgtcagggataccatcaccgtgcttttcaccgcaaaaagaggtgactggtgtggcttctggagtaacgagg

SEQ ID NO: 226469 - DNA, 75 bp, synthetic construct
  source 1..75: mol_type = other DNA
catcaacccgaacagtatggctgcgctgggtattgaagttgtcgatgtgcgtatcaagcagatcaacctgccgac

SEQ ID NO: 226470 - DNA, 75 bp, synthetic construct
  source 1..75: mol_type = other DNA
ctgggtattgaagttgtcgatgtgcgtattaagcagatcaacctgccgaccgaagtgtctgaggcgatctacaac

SEQ ID NO: 226471 - DNA, 75 bp, synthetic construct
  source 1..75: mol_type = other DNA
catcaaatggcgcatcagcgatttcagccgttactacctggcaacgggcggcggcgatatttcgcaagcagaagt

SEQ ID NO: 226472 - DNA, 75 bp, synthetic construct
  source 1..75: mol_type = other DNA
ttgacagttggcctgcgcgtgccggaagagcaggagcgcgaaggactggacgtcaacagccacggtgaaaatgct

SEQ ID NO: 226473 - DNA, 75 bp, synthetic construct
  source 1..75: mol_type = other DNA
ccgccagattggtgagcgtattggcggtgaatataccgccgcagaacgcgaaatgttgaacctgcagtttgagat

SEQ ID NO: 226474 - DNA, 75 bp, synthetic construct
  source 1..75: mol_type = other DNA
cattacgcaactatgtgactctatactgtagagcttgttatgaaaatgacaggtttatcggtcatgtgtactacg

SEQ ID NO: 226475 - DNA, 75 bp, synthetic construct
  source 1..75: mol_type = other DNA
tctcggcggtctgattgccagtggtcaggtgcttccagggcaaatctgggtgtataccccctccccggataaagt

SEQ ID NO: 226476 - DNA, 75 bp, synthetic construct
  source 1..75: mol_type = other DNA
atggaaaagaaaatcggttttattggctgcggcaatatgggaaaagccattctcggcggtctgattgccagcggt

SEQ ID NO: 226477 - DNA, 75 bp, synthetic construct
  source 1..75: mol_type = other DNA
gtgtcagccggaaagcgacgttgttgcagaattaagccgccgtttcggctgcacgctggagcactggtacgccga

SEQ ID NO: 226478 - DNA, 75 bp, synthetic construct
  source 1..75: mol_type = other DNA
ttgcactggttcagttactgctggagcgtggtgcagatcccttgctgaccggtaatgacgggctggcggcttatc

SEQ ID NO: 226479 - DNA, 75 bp, synthetic construct
  source 1..75: mol_type = other DNA
aagcgatggccgacgccgccgtgctgggcgggatgccacgcgcgcaggcctacaaatttgccgcccaggcggtaa

SEQ ID NO: 226480 - DNA, 75 bp, synthetic construct
  source 1..75: mol_type = other DNA
gctgcggcaatatgggaaaagccattctcggcggtctgattgccagcggtcaggtgtttccagggcaaatctggg

SEQ ID NO: 226481 - DNA, 75 bp, synthetic construct
  source 1..75: mol_type = other DNA
catcggagcaaatcccttctctgcgtctcaacggtgatgttctgaatgattatctgtcccgcacagttctgactc

SEQ ID NO: 226482 - DNA, 75 bp, synthetic construct
  source 1..75: mol_type = other DNA
aaacaaatatattaccaacgaatcgctactacataagaccgcatggaaccaagaaagaataactttattattcaa

SEQ ID NO: 226483 - DNA, 75 bp, synthetic construct
  source 1..75: mol_type = other DNA
gatatggaagccagaatattgattttcaccctcagtctctattggtaacccaagaaggacgctgtatgggattag

SEQ ID NO: 226484 - DNA, 75 bp, synthetic construct
  source 1..75: mol_type = other DNA
tattacctcactagggctgatggtaatggagaagcagggcgaagtagcgatcctgcaaacgcaaggcttaactcc

SEQ ID NO: 226485 - DNA, 75 bp, synthetic construct
  source 1..75: mol_type = other DNA
tggtgttgtcgaaggtcatgtaaatcgcctgaagatgttgaaacgccagatgtatggtcgagccggatttgaact

SEQ ID NO: 226486 - DNA, 75 bp, synthetic construct
  source 1..75: mol_type = other DNA
tgatatgggatggagcctggcccccgaggtcaggttccggggaggagaaacatctgccagctatgaccccctgaa

SEQ ID NO: 226487 - DNA, 75 bp, synthetic construct
  source 1..75: mol_type = other DNA
gcggttgccaaatggcgtaaaggctggagcccaccggttactactgccgtcagacttccttcagtgtcccgggta

SEQ ID NO: 226488 - DNA, 75 bp, synthetic construct
  source 1..75: mol_type = other DNA
tatgcttcccgatttattagtctgatgtgtgaaaaagaacctgagctgaaaatagcgcagcaactggcactcgag

SEQ ID NO: 226489 - DNA, 75 bp, synthetic construct
  source 1..75: mol_type = other DNA
taagtagctggttcactcgagtccacgaaagcggttcagcagaatttcggcgcgtggcggcggggatggaagctg

SEQ ID NO: 226490 - DNA, 75 bp, synthetic construct
  source 1..75: mol_type = other DNA
cactggatcgtctttatcatgaaggatatgtattttctgatatcaataccttgtctcgttatacactacacggac

SEQ ID NO: 226491 - DNA, 75 bp, synthetic construct
  source 1..75: mol_type = other DNA
tgatgctttttttaaaaaacataatgaaaatattcataataaaatacaaagaataaaagacgagttcaaggaata

SEQ ID NO: 226492 - DNA, 75 bp, synthetic construct
  source 1..75: mol_type = other DNA
aaactgatgaattgtcctcacttccagatacagacaaaattggagggattctggtaaaaaaatacctttcaggaa

SEQ ID NO: 226493 - DNA, 75 bp, synthetic construct
  source 1..75: mol_type = other DNA
tgactttatgcgctgggactactgggccttcggcatctctggtctgctgttaattgctgctatcgtcattatggg

SEQ ID NO: 226494 - DNA, 75 bp, synthetic construct
  source 1..75: mol_type = other DNA
gataaccacgggcaaccactgccgcctgcgacggttgaaggttgtgagcaagccgatgccgtgctgtttggctcg

SEQ ID NO: 226495 - DNA, 75 bp, synthetic construct
  source 1..75: mol_type = other DNA
tacaacagcgattatcggtggttgggttaatgtgattagtgcagggaatggagttgtaggcacagttggctggaa

SEQ ID NO: 226496 - DNA, 75 bp, synthetic construct
  source 1..75: mol_type = other DNA
ttatcaatggtaccggttcgggtattggctatggcattggtaaaggactttcatggggtgttaatgcaggggcaa

SEQ ID NO: 226497 - DNA, 75 bp, synthetic construct
  source 1..75: mol_type = other DNA
atcgacaacgccaccatgcagttgattaaagatccgtcgcaatttgacgtgctgctgtgctccaacctgtttggt

SEQ ID NO: 226498 - DNA, 75 bp, synthetic construct
  source 1..75: mol_type = other DNA
atgaaaaagcgtttgataccgaggtgtatcaccgtttttgagatcgagcgtattgcccgcatcgcgtttgaatct

SEQ ID NO: 226499 - DNA, 75 bp, synthetic construct
  source 1..75: mol_type = other DNA
ttgcgatgcgtatcaccaccagccattacgatgtaggcggcgcagccattgataaccacgggcagccgctgccgc

SEQ ID NO: 226500 - DNA, 75 bp, synthetic construct
  source 1..75: mol_type = other DNA
cgccagcttatcgagagcaatattgccgagtttgccgcaacccaggtgaccaaacaggacatcatgaaattgatg

SEQ ID NO: 226501 - DNA, 75 bp, synthetic construct
  source 1..75: mol_type = other DNA
gtgacagcagcccttcagggcaacagtgcggcagcaggcgcaattggcgcgggtactggcgaagtgatcgcgtca

SEQ ID NO: 226502 - DNA, 75 bp, synthetic construct
  source 1..75: mol_type = other DNA
tcctgatgctgtatctcttcggtggtccggtgctggaaggcttctcgctgactatgcttatcggtgtttccatcg

SEQ ID NO: 226503 - DNA, 75 bp, synthetic construct
  source 1..75: mol_type = other DNA
atagtggtgctaactggttaaaagacggctgggacccgaaatttaatccaacacttcaaaaatataccgatatta

SEQ ID NO: 226504 - DNA, 75 bp, synthetic construct
  source 1..75: mol_type = other DNA
tgtaccaacaacttgctgctgacctgaaagagcgcatcgagcagggcgtctatctggtgggtgataaattacccg

SEQ ID NO: 226505 - DNA, 75 bp, synthetic construct
  source 1..75: mol_type = other DNA
gaagccatcattatgctggaagtcgaaggctatgttgaagtccgtaaaggctccggcattcatgtggtttccaat

SEQ ID NO: 226506 - DNA, 75 bp, synthetic construct
  source 1..75: mol_type = other DNA
cgccagcaaaaactggtgcagcagtggctggatattctcggcattgataaacgtacggctgacgctccgttccat

SEQ ID NO: 226507 - DNA, 75 bp, synthetic construct
  source 1..75: mol_type = other DNA
aaaaaccctgctgtgtcaggcgctgatgtcggagcctgacttgttgattcttgatgagccgttcgatggcctgga

SEQ ID NO: 226508 - DNA, 75 bp, synthetic construct
  source 1..75: mol_type = other DNA
gagcgcgagatgtcggtggtaatggactcgtaccgcctcttcaacgttgggctgcgccgcccggactgcgttatc

SEQ ID NO: 226509 - DNA, 75 bp, synthetic construct
  source 1..75: mol_type = other DNA
cggattgcacgttagcggaaactggcgcgaaagaagaactgttccaacaggcactcgtcgcacaactggcgcaca

SEQ ID NO: 226510 - DNA, 75 bp, synthetic construct
  source 1..75: mol_type = other DNA
ggcagcggtgaaaccatctgggacatcaaaaaacatattggttacgtcagcagtagtttgcatctggattaccgt

SEQ ID NO: 226511 - DNA, 75 bp, synthetic construct
  source 1..75: mol_type = other DNA
ggtgaacttccgcttttgaaaggtgaacggcaaagccagttttcccacatcactcgtctctccttcgagcaattg

SEQ ID NO: 226512 - DNA, 75 bp, synthetic construct
  source 1..75: mol_type = other DNA
caagcgtactgacaaagtgtactatcatcacaccggccacatcggtggtatcaaacaagcgacctttgaagagat

SEQ ID NO: 226513 - DNA, 75 bp, synthetic construct
  source 1..75: mol_type = other DNA
ggccgtctggcttccgaactggctctgcgcctgcgcggtaagcataaagcggaatacactccgcacgtagatact

SEQ ID NO: 226514 - DNA, 75 bp, synthetic construct
  source 1..75: mol_type = other DNA
ggaaggccaggtgcactactggtgggttggcctgggcaacgttatcggctcgacgattctggcttattactggga

SEQ ID NO: 226515 - DNA, 75 bp, synthetic construct
  source 1..75: mol_type = other DNA
gctcacgctaaattctacgacgaagcgcacaccatccagctaatcaaagcgactgactttgtaccgccgccgaca

SEQ ID NO: 226516 - DNA, 75 bp, synthetic construct
  source 1..75: mol_type = other DNA
ggcgaactggcttgcgtagtcctggatgcgacgggaaataaagcttcaatgagtcatgatgtaaatcttattcgt

SEQ ID NO: 226517 - DNA, 75 bp, synthetic construct
  source 1..75: mol_type = other DNA
gatatgactctcggttggatcgtctggcagcaacgagctggtatcggagctaaccccagattacatagcagcgtg

SEQ ID NO: 226518 - DNA, 75 bp, synthetic construct
  source 1..75: mol_type = other DNA
tttgtccagtttgctggcgtgctggcggattgtacgttagcggaaactggcgctaaagaggaactgctccaacaa

SEQ ID NO: 226519 - DNA, 75 bp, synthetic construct
  source 1..75: mol_type = other DNA
tgccttatgtatggtttcctgcgtccgatgttcaataactggctgcaaaacatatttgcagccatattaacaata

SEQ ID NO: 226520 - DNA, 75 bp, synthetic construct
  source 1..75: mol_type = other DNA
ctggaatgaacaacgctattatggatggattgaacactgctttagcaggtcaaacatccatatatagcacaatga

SEQ ID NO: 226521 - DNA, 75 bp, synthetic construct
  source 1..75: mol_type = other DNA
aataaaagaaggtttttccagtagcacaagcatctggcaattacttgatactctatggaacagcgcaagagtttt

SEQ ID NO: 226522 - DNA, 75 bp, synthetic construct
  source 1..75: mol_type = other DNA
ttttaggagtagatgatgagctcgtcgattatcttgaaaaacaaggggaagagacgatacgagagattcatcttt

SEQ ID NO: 226523 - DNA, 75 bp, synthetic construct
  source 1..75: mol_type = other DNA
gcgcgtaaatacgccatcgagcagatgatagcccggaacgaagcgcggaggctggcacagtcgagagattccgcg

SEQ ID NO: 226524 - DNA, 75 bp, synthetic construct
  source 1..75: mol_type = other DNA
ccggggcaagtgctaccgtatccatgcaggggctggctgccatgggcatcggtgctgccgcctatggttccggga

SEQ ID NO: 226525 - DNA, 75 bp, synthetic construct
  source 1..75: mol_type = other DNA
cggaataaaggaggggttttctggtagtgataatatatggcagttattagacaccctatggaataaggctaaagt

SEQ ID NO: 226526 - DNA, 75 bp, synthetic construct
  source 1..75: mol_type = other DNA
catgaggatggcgatcattctgtcctttgtggctaatttgggtggctatctcgatggcgttatcgacgcagttaa

SEQ ID NO: 226527 - DNA, 75 bp, synthetic construct
  source 1..75: mol_type = other DNA
cgtctgcgttctgaaattggtcgcctggacgtgaaagacatcgtcaccgattcccgtggtcgtctgaccctcgaa

SEQ ID NO: 226528 - DNA, 75 bp, synthetic construct
  source 1..75: mol_type = other DNA
aaatatatttgcagccatattaaccattatgctttcagctctttctttaagaattgtagtgaattatttaaacct

SEQ ID NO: 226529 - DNA, 75 bp, synthetic construct
  source 1..75: mol_type = other DNA
caattttatgtctggcttgggatattcgtcttaatgattatcaccgcgtttgtttccatgatagcggaagtcatg

SEQ ID NO: 226530 - DNA, 75 bp, synthetic construct
  source 1..75: mol_type = other DNA
catgcaggggctggccgctgtaggtatcggtgcggctgcttttggtgccgggaagctagccgggggtgcagttaa

SEQ ID NO: 226531 - DNA, 75 bp, synthetic construct
  source 1..75: mol_type = other DNA
ctgcggtgctttgttttgtcattgaggccgatcagattgcctttgaaagcgttgagtctacggcaaaagtatctg

SEQ ID NO: 226532 - DNA, 75 bp, synthetic construct
  source 1..75: mol_type = other DNA
tgtctctggacgcggcgttggtatggatgtcgtcaaacgtaatatccaggagatgggcggtcatgtcgaaatcaa

SEQ ID NO: 226533 - DNA, 75 bp, synthetic construct
  source 1..75: mol_type = other DNA
atgacatcacagcggtactctgttttgtgattgaagccgatcagattacctttgaaacagtagaagtctcgccaa

SEQ ID NO: 226534 - DNA, 75 bp, synthetic construct
  source 1..75: mol_type = other DNA
ctggtctggcgtacctggaattttgaggacggtgccgggtactggatgaatcatgccatcaggaatttcggcatt

SEQ ID NO: 226535 - DNA, 75 bp, synthetic construct
  source 1..75: mol_type = other DNA
ctatcgcaaagtccccggcatttctgctgcgaccattcttggcgacggcagcgtggcactgattgttgatgtctc

SEQ ID NO: 226536 - DNA, 75 bp, synthetic construct
  source 1..75: mol_type = other DNA
ggtcaacaccaggtagtagtgaaaaacctggaaagtaactatcgcaaaatcccgggaatatccgccgcaacgatt

SEQ ID NO: 226537 - DNA, 75 bp, synthetic construct
  source 1..75: mol_type = other DNA
gtacagctggaaagcatcgccattacgattgtctggtccggtgtggtggcgtttattggctacaaactggcggat

SEQ ID NO: 226538 - DNA, 75 bp, synthetic construct
  source 1..75: mol_type = other DNA
ctggtctggcgtacctggaattttgaggacggtgccgggtactggatgaaccaaaacatcagagatttcgggatt

SEQ ID NO: 226539 - DNA, 75 bp, synthetic construct
  source 1..75: mol_type = other DNA
ccgcgaacaggccgaagccgttgccgcacagtaccggaatgtctttatcgaggatgatcagggaacgcattttcg

SEQ ID NO: 226540 - DNA, 75 bp, synthetic construct
  source 1..75: mol_type = other DNA
gaagccacccagggaattgtggtgatcttacaaagtggcggtcgccgctacgccttgctggtggatcaattaatt

SEQ ID NO: 226541 - DNA, 75 bp, synthetic construct
  source 1..75: mol_type = other DNA
agtgaccgacgatggggcggggctaaaccgtgagcgaattctggcaaaagcggcctcgcaaggtttgactgtcag

SEQ ID NO: 226542 - DNA, 75 bp, synthetic construct
  source 1..75: mol_type = other DNA
cacctggtacgcaacagccttgaccacggtatagaactgccggaaaaacgcctcgccgcaggtaaaaatagcgtc

SEQ ID NO: 226543 - DNA, 75 bp, synthetic construct
  source 1..75: mol_type = other DNA
cgtgcgtttcgacaggcgtttcgcggcgttaaccgcgcaaaatttcatcagcgatcttctggtgaagcatttgcg

SEQ ID NO: 226544 - DNA, 75 bp, synthetic construct
  source 1..75: mol_type = other DNA
atgaccacctttacccaaaaagaactgattaaagaaatgaaagaacgcatcagcagcctcgacgttcgagacgat

SEQ ID NO: 226545 - DNA, 75 bp, synthetic construct
  source 1..75: mol_type = other DNA
atgaccacctttacccaaaaagaactgattaaagaaattaaagaccgcatcagcagcctcgacgtacgagacgat

SEQ ID NO: 226546 - DNA, 75 bp, synthetic construct
  source 1..75: mol_type = other DNA
cctattgccagacttgtatattgccaaacatgagaaagaagtcgcacaagacgagcaagtcaggcagtggattaa

SEQ ID NO: 226547 - DNA, 75 bp, synthetic construct
  source 1..75: mol_type = other DNA
ggccaccgactgggacaaaatcaacctgctgaaaacctttggcccgatgggtggcctgctggtgacatatttgct

SEQ ID NO: 226548 - DNA, 75 bp, synthetic construct
  source 1..75: mol_type = other DNA
tcctcggtatgtttggcggctgctttgccgcagcgctgtgggccaacaatgtcaaactacgcatgccgcgcagcc

SEQ ID NO: 226549 - DNA, 75 bp, synthetic construct
  source 1..75: mol_type = other DNA
atgaccacctttacccaaaaagaactgattaaagaaatgaaagatcgcatcagcagcctcgacgtgcgagacgat

SEQ ID NO: 226550 - DNA, 75 bp, synthetic construct
  source 1..75: mol_type = other DNA
atgagcgaatatttcagaatacttcaggggctgcctgacggctcctttacccgcgaacaggctgaagccgttgcc

SEQ ID NO: 226551 - DNA, 75 bp, synthetic construct
  source 1..75: mol_type = other DNA
atgagcgaatatttcagaatacttcagggactgccggacggtccttttacccgaaaacatgccgaagccgttgcc

SEQ ID NO: 226552 - DNA, 75 bp, synthetic construct
  source 1..75: mol_type = other DNA
agggcgcaagcgcaacttaccggtgatggtgatgctttttgagcctcaaccgctggaactgtttgctaccgataa

SEQ ID NO: 226553 - DNA, 75 bp, synthetic construct
  source 1..75: mol_type = other DNA
ataactctacaagaactgggatataccaatatacctgatgatgaccttgctcgcaggaactcatcgaaaggtgtt

SEQ ID NO: 226554 - DNA, 75 bp, synthetic construct
  source 1..75: mol_type = other DNA
ttgatctggcgctcctggaattttgaggacggtgccgggtactggatgaaccggtacatcagggatttcggcatt

SEQ ID NO: 226555 - DNA, 75 bp, synthetic construct
  source 1..75: mol_type = other DNA
atgagcgaatatttcagaatacttcaggggctgcctgatggctcctttacccgcgaacaggccgaagccgttgcc

SEQ ID NO: 226556 - DNA, 75 bp, synthetic construct
  source 1..75: mol_type = other DNA
catctgactatgccaatatacctgtagctaaacgagttagggaagcgttaggtacagatgatccggctgtatggg

SEQ ID NO: 226557 - DNA, 75 bp, synthetic construct
  source 1..75: mol_type = other DNA
agttggcgtagcgtgctctatggcagcggcgggtctggcagaactgttaggcgcaagcccggcacaggtatgcat

SEQ ID NO: 226558 - DNA, 75 bp, synthetic construct
  source 1..75: mol_type = other DNA
aggcggcatcgagcatggcaccaccaccgaaggcgtcctgccgggtaaactgcgcgtgccgcgccgtgcctcagc

SEQ ID NO: 226559 - DNA, 75 bp, synthetic construct
  source 1..75: mol_type = other DNA
ttactactctattggcggtggctttatcgttgatgaagagcattttggccagcaggatagcgcaccggttgaagt

SEQ ID NO: 226560 - DNA, 75 bp, synthetic construct
  source 1..75: mol_type = other DNA
aaactgaccatgcgtgaagcgatcaagaaatatcgcccggaaaccgacatggcggatctggacaacttcgactct

SEQ ID NO: 226561 - DNA, 75 bp, synthetic construct
  source 1..75: mol_type = other DNA
aattcatgttcatctgcataacgttgttacacagaatccccgcgaactggcgaaactggtcggtgaaatggtcag

SEQ ID NO: 226562 - DNA, 75 bp, synthetic construct
  source 1..75: mol_type = other DNA
aaagaacttgagggcgcacgcggtgaggctgaacgcacggcaaaggttatggccgacaaccttgatggcgacctg

SEQ ID NO: 226563 - DNA, 75 bp, synthetic construct
  source 1..75: mol_type = other DNA
gacagcacaaagagggcaaaacaaatggaatttatgccgtttgttccgcacatccgctggtgctggaagctgcaa

SEQ ID NO: 226564 - DNA, 75 bp, synthetic construct
  source 1..75: mol_type = other DNA
cagcgggcggttgccggtgacttctggcgcgcatattgttgattttcctgtagcaaagaacattatcttccatcc

SEQ ID NO: 226565 - DNA, 75 bp, synthetic construct
  source 1..75: mol_type = other DNA
gcagttatttgatgatcaatatcttacatggttatcaaactggatattgcttataattactggctatgtaatgac

SEQ ID NO: 226566 - DNA, 75 bp, synthetic construct
  source 1..75: mol_type = other DNA
gtgcgctactactggccggacagccagattgatgacgctttcgcccatctggttcgtaacctggcggatgcacca

SEQ ID NO: 226567 - DNA, 75 bp, synthetic construct
  source 1..75: mol_type = other DNA
tgccgctgcaatacgtgaaagttcgctccggcgagctgcaaccgacgccacgggaactcattatcaaccatattc

SEQ ID NO: 226568 - DNA, 75 bp, synthetic construct
  source 1..75: mol_type = other DNA
cgtaaaagttcgctccggcgagctacagccaacgccacgggcactcattattaaccatattcaggacatcctggc

SEQ ID NO: 226569 - DNA, 75 bp, synthetic construct
  source 1..75: mol_type = other DNA
tttcgttactggggggcgctatcggggcgttgttcagtccggtcggtcttatcgtggctgcgcttgccggagctg

SEQ ID NO: 226570 - DNA, 75 bp, synthetic construct
  source 1..75: mol_type = other DNA
cgcatccgggcctttatcgatttccttagcgagcatataaaaacagctcccgcaggagctgtcagagaggcttaa

SEQ ID NO: 226571 - DNA, 75 bp, synthetic construct
  source 1..75: mol_type = other DNA
gcgatgaagttcgccgatttcgccgtctggtcagaggcgcgttttagcgggatggtcaaaacggcgctgacgctg

SEQ ID NO: 226572 - DNA, 75 bp, synthetic construct
  source 1..75: mol_type = other DNA
tgcgcaatcaggagcgccccttcacctgtacaatggagcgcggcgcgacagaatccagaaaaaatgcgcgacctt

SEQ ID NO: 226573 - DNA, 75 bp, synthetic construct
  source 1..75: mol_type = other DNA
atcgaagcttcgctgtatggcgggatctccagtgccattacccgttctctgcgcgactacctgttgccggaaaac

SEQ ID NO: 226574 - DNA, 75 bp, synthetic construct
  source 1..75: mol_type = other DNA
atgacaaataaattcaaaatatctcttctattttgcaacaggagcaaaaatgaaagccacgtcggaagaactcgc

SEQ ID NO: 226575 - DNA, 75 bp, synthetic construct
  source 1..75: mol_type = other DNA
atttaaagcaacatgtttgcctgggattcactgaacccgcgtctctcaatacctggccaatagcctgtagtgatg

SEQ ID NO: 226576 - DNA, 75 bp, synthetic construct
  source 1..75: mol_type = other DNA
cggttctgtttgagtggggatacttctccgatcacgaaaacagcttcccgcaagagctgctggataaactggtcg

SEQ ID NO: 226577 - DNA, 75 bp, synthetic construct
  source 1..75: mol_type = other DNA
caggacgatatctcggactatgtggcctctaacgttaaagatacgcttagccgtctgaatggcgtcggtgacgta

SEQ ID NO: 226578 - DNA, 75 bp, synthetic construct
  source 1..75: mol_type = other DNA
ggcgctgttcagtccggtcggattgattgctgctgcgtttgtggctgcggcggttctcatctggaaatactggga

SEQ ID NO: 226579 - DNA, 75 bp, synthetic construct
  source 1..75: mol_type = other DNA
gagtgatgaccctgatgtttatcttgctggcggccatgctttggtttgttgctgccccggtggtgacgtatttcc

SEQ ID NO: 226580 - DNA, 75 bp, synthetic construct
  source 1..75: mol_type = other DNA
tctaacgatgaatcccgcaacacctttaaagtgcgctcgcagatcctctctggtattcgccagttcatggtgaat

SEQ ID NO: 226581 - DNA, 75 bp, synthetic construct
  source 1..75: mol_type = other DNA
gacccaacctggactggtactgaccacacccgtgaacacattccggtactggtgtatggcccgaaagtaaaaccg

SEQ ID NO: 226582 - DNA, 75 bp, synthetic construct
  source 1..75: mol_type = other DNA
gcaccaactccgacgcttggggcttcggtttgaaagccggttacgacttcaaactgggtgatgctggttacgtga

SEQ ID NO: 226583 - DNA, 75 bp, synthetic construct
  source 1..75: mol_type = other DNA
ccataaaactgttgatgtgcctgaatgggagggagcaacggttgtattacgggaaccttctgcagaagcctggtt

SEQ ID NO: 226584 - DNA, 75 bp, synthetic construct
  source 1..75: mol_type = other DNA
cactggcaacgatgtcggggtttcgccataaaaccgttgatgtgcctgaatgggagggagcatcggttgtattac

SEQ ID NO: 226585 - DNA, 75 bp, synthetic construct
  source 1..75: mol_type = other DNA
ttatgaactgggtgtagatgcaggttataccttcacctacagcgaagatcaggctctgactccgtacttcaaact

SEQ ID NO: 226586 - DNA, 75 bp, synthetic construct
  source 1..75: mol_type = other DNA
tgtattcagccctaaaaagcgccagtggggaacgcaggatgatttgacctgcgcacagtggctctggaaaaaaat

SEQ ID NO: 226587 - DNA, 75 bp, synthetic construct
  source 1..75: mol_type = other DNA
gcttcaggcagcggcattttctcaactgtcagattctgacccgtcaaaatctgacgcatcaaaatctgccccgtc

SEQ ID NO: 226588 - DNA, 75 bp, synthetic construct
  source 1..75: mol_type = other DNA
atggggttcgcagtgtggatgaacggtgcgccgtggacgggtgcacacggtgtggcaggcgaactgggtcatatc

SEQ ID NO: 226589 - DNA, 75 bp, synthetic construct
  source 1..75: mol_type = other DNA
ggtgatgggatttccggcgctggtcagtaaagataaacgcaccattatttctacgcctaacctgccgttaacagc

SEQ ID NO: 226590 - DNA, 75 bp, synthetic construct
  source 1..75: mol_type = other DNA
cgcccggtgtttgatccattgcgttatccggatatcggtcgccagctttctccggacgcgtgggatgatgtttcg

SEQ ID NO: 226591 - DNA, 75 bp, synthetic construct
  source 1..75: mol_type = other DNA
ccgtcggggcaggaaaaacaacgctttttaatgctttgcaggggaattacgctctcgccagaaaaacgcaggctg

SEQ ID NO: 226592 - DNA, 75 bp, synthetic construct
  source 1..75: mol_type = other DNA
ctctgactccgtacttcaaactggcttacgtctacgacgactctaacaacgataacgatgtgaacggtgattcca

SEQ ID NO: 226593 - DNA, 75 bp, synthetic construct
  source 1..75: mol_type = other DNA
ctgactttaatggcgctcaaggcgcagcgatattggcacacaaccgctttttgacgcaatcctgcgctaattccc

SEQ ID NO: 226594 - DNA, 75 bp, synthetic construct
  source 1..75: mol_type = other DNA
gcgatgaccatcggtgagaagattggtaagcgcggcatgacgtatgcgcaaggcatggcggcacaaatgacggcg

SEQ ID NO: 226595 - DNA, 75 bp, synthetic construct
  source 1..75: mol_type = other DNA
cgaacagtacaacaaccagcttgaacgcgaacggcaggcgcttgcgcgtgtaacgagggcgcgtgagcggtattc

SEQ ID NO: 226596 - DNA, 75 bp, synthetic construct
  source 1..75: mol_type = other DNA
tgaccttcgcgcactgggtgaaaccatgaaatatgcaggtccggtggcgggtaagctgggaatatcgctggagca

SEQ ID NO: 226597 - DNA, 75 bp, synthetic construct
  source 1..75: mol_type = other DNA
cggcgtactgagcatggcaacggctggcggtatggatctcggcgagacggcagatattggctcaaatatcctgac

SEQ ID NO: 226598 - DNA, 75 bp, synthetic construct
  source 1..75: mol_type = other DNA
acccgtggttccggctccgctgcctccggcgctggtccctgttgttgcggccagctcccgcccggtggcggaggc

SEQ ID NO: 226599 - DNA, 75 bp, synthetic construct
  source 1..75: mol_type = other DNA
taggtcaacgcagccagttgcgtcgtattatgctttgcatctccgatacctccgcgaagctggcgaaattgccgg

SEQ ID NO: 226600 - DNA, 75 bp, synthetic construct
  source 1..75: mol_type = other DNA
gtgttcagtgggattatggagcggctggccccgttgcgcgaaacctttgaacggtttggtcctgtttttgacgca

SEQ ID NO: 226601 - DNA, 75 bp, synthetic construct
  source 1..75: mol_type = other DNA
catgaaattatccagtgtggcaattatggcccgcctggctgatttcagtaatgacgaaggtgtgtgctggccatc

SEQ ID NO: 226602 - DNA, 75 bp, synthetic construct
  source 1..75: mol_type = other DNA
cacgccggatgccgcccgcgccacgctggaagcccatcgtcacgcttttgaaaagcagggtctgaatgccatctg

SEQ ID NO: 226603 - DNA, 75 bp, synthetic construct
  source 1..75: mol_type = other DNA
ttaagcaccattgaatatgcaccggtctggatcattatggcagtggctttggcgctgggtatcggtaccatgatt

SEQ ID NO: 226604 - DNA, 75 bp, synthetic construct
  source 1..75: mol_type = other DNA
gcggctacaaaatgtgctggtatttggcgtaaaaatacaaaaaaatcacatgcattaatacttaatctcacatgt

SEQ ID NO: 226605 - DNA, 75 bp, synthetic construct
  source 1..75: mol_type = other DNA
tggcgcgatacgacgccgctcttacgtcctggtaaaaaaagcggtgtggcaaccgatgcctcttgttttccgctg

SEQ ID NO: 226606 - DNA, 75 bp, synthetic construct
  source 1..75: mol_type = other DNA
gcggtgtttacggaaaagcagcaagcgcgctgcatcgggtgaagagtggtatctgtcagggaattacgtgggggc

SEQ ID NO: 226607 - DNA, 75 bp, synthetic construct
  source 1..75: mol_type = other DNA
atgagtatcctgacccggtggttgcttatcccgccggtcaacgcacggcttatcgggcgttatcgcgattatcgt

SEQ ID NO: 226608 - DNA, 75 bp, synthetic construct
  source 1..75: mol_type = other DNA
atgctgattgtgctgtcgctgaccgtctcttgccgttatatctggtggcgctacacctccacgctgaactgggat

SEQ ID NO: 226609 - DNA, 75 bp, synthetic construct
  source 1..75: mol_type = other DNA
cacccagccgtttaacccgctgtcgcagtttatcttcctgatgttgctgtggggtgtggcattaatggtacggcg

SEQ ID NO: 226610 - DNA, 75 bp, synthetic construct
  source 1..75: mol_type = other DNA
atggtttaacaccaactatcactacatggtgccggaattcgttaaaggccaacagttcaaactgacctggacgca

SEQ ID NO: 226611 - DNA, 75 bp, synthetic construct
  source 1..75: mol_type = other DNA
caccactggcaccgggccattaacgggcaaaatggtggcgctggcggcacgcgaactgtgggctggtatgacgcc

SEQ ID NO: 226612 - DNA, 75 bp, synthetic construct
  source 1..75: mol_type = other DNA
tttcttgccgttatatctggtggcgctacacctctacgctgaactgggacgatccggtcagcctggtgtgcgggc

SEQ ID NO: 226613 - DNA, 75 bp, synthetic construct
  source 1..75: mol_type = other DNA
gagcacccgcgctggcagcgtattcgcgcagaacataaaaacctgtatccgcatatcaacgcctcgcgtccgcgt

SEQ ID NO: 226614 - DNA, 75 bp, synthetic construct
  source 1..75: mol_type = other DNA
agatatgtcgctgtggccgtcggtggatatttttgtgccgacgtacaacgaagatctcagcgtggtgaaaaacac

SEQ ID NO: 226615 - DNA, 75 bp, synthetic construct
  source 1..75: mol_type = other DNA
agggaagagtttcgccagtttgcgcaaaacgtgggggtgaaatatatcgcccgtaccactcatgaacatgcgaaa

SEQ ID NO: 226616 - DNA, 75 bp, synthetic construct
  source 1..75: mol_type = other DNA
attccgcaggcggcggggctggcgaccgaaagtctgtcggcgcatatcggtcagcgtattcgctgggcgcgcggg

SEQ ID NO: 226617 - DNA, 75 bp, synthetic construct
  source 1..75: mol_type = other DNA
ctacacctccacgctgaactgggacgatccggttagtctggtgtgcgggttaatcctgctgtttgctgaaaccta

SEQ ID NO: 226618 - DNA, 75 bp, synthetic construct
  source 1..75: mol_type = other DNA
cacggcagctctggcagagtggagcgccccgattcaggcgcgtcgtcactctacccgcgtacataatccggcggt

SEQ ID NO: 226619 - DNA, 75 bp, synthetic construct
  source 1..75: mol_type = other DNA
tgccgctgcgcgtccgttcatcacccaccataatgcgctggatctcgacatgtacctgcgtatcgcgccggaact

SEQ ID NO: 226620 - DNA, 75 bp, synthetic construct
  source 1..75: mol_type = other DNA
tgattcagccgaccttcattactgaatatccggcagaagtttctccgctggcgcgtcgtaacgacgttaacccgg

SEQ ID NO: 226621 - DNA, 75 bp, synthetic construct
  source 1..75: mol_type = other DNA
ggaattggtatcgaccgtatggttatgcttttcaccaacagccatactatccgcgacgttattctgttcccggcg

SEQ ID NO: 226622 - DNA, 75 bp, synthetic construct
  source 1..75: mol_type = other DNA
cacatctgattcagcctaccttaattactgaatatccggcagaagtgtccccgctggcccgccgtaatgaggtta

SEQ ID NO: 226623 - DNA, 75 bp, synthetic construct
  source 1..75: mol_type = other DNA
cacatctgattcagcctaccttaattactgaatatccggcagaagtctcgccgctggcccgccgtaatgaggtta

SEQ ID NO: 226624 - DNA, 75 bp, synthetic construct
  source 1..75: mol_type = other DNA
accgtaacttccgtaacgaaggtatctccgtacgccataacccagagttcactatgatggaactctacatggctt

SEQ ID NO: 226625 - DNA, 75 bp, synthetic construct
  source 1..75: mol_type = other DNA
aattggcatcatccagattgacgaaccggctctgcgcgaaggtttaccgctgcgtcgtagcgactgggatgcgta

SEQ ID NO: 226626 - DNA, 75 bp, synthetic construct
  source 1..75: mol_type = other DNA
gttagccgcccggcaccgattaccgtggagtgggcgaagtatgcgcaatcgctgaccgacaaaccggtgaaaggg

SEQ ID NO: 226627 - DNA, 75 bp, synthetic construct
  source 1..75: mol_type = other DNA
cgtatcaacgccgccgtggcgaaagatgacacacaaatccacactcacatgtgttattgcgagttcaacgacatc

SEQ ID NO: 226628 - DNA, 75 bp, synthetic construct
  source 1..75: mol_type = other DNA
ggcttcgagcgtgtattcgaaatcaaccgtaacttccgtaacgaaggtatctccgtacgtcataacccagagttc

SEQ ID NO: 226629 - DNA, 75 bp, synthetic construct
  source 1..75: mol_type = other DNA
cacggcagctctggcagagtggagcgctccgattcaggcgcgtcgtcactcaacccgcgtccataatccggcggt

SEQ ID NO: 226630 - DNA, 75 bp, synthetic construct
  source 1..75: mol_type = other DNA
ctgccgatgtcggtgcagccgacgcaactggtgaccgaaaccctgaacgaacgccaggcgcgcgtgctgccgctt

SEQ ID NO: 226631 - DNA, 75 bp, synthetic construct
  source 1..75: mol_type = other DNA
gtgaagaactgctggattaccgcaactacctggagatggaagttgaggttaaccgtggttccgatggctggttgc

SEQ ID NO: 226632 - DNA, 75 bp, synthetic construct
  source 1..75: mol_type = other DNA
tatcaaaccgtttgccattcagggcctgccgatgtcggtgctgccgacgcagctggtgaccgaaaccctcaacga

SEQ ID NO: 226633 - DNA, 75 bp, synthetic construct
  source 1..75: mol_type = other DNA
gctgggaagatgaatctcggcgactgcgcggtaaggatatctctccttgccgtctgctattcctcgatgaagcag

SEQ ID NO: 226634 - DNA, 75 bp, synthetic construct
  source 1..75: mol_type = other DNA
tcgattctggtgatggtggtacagagctgggaagatgaatcccgtcgtctgcgcggtaaagatatttctccttgt

SEQ ID NO: 226635 - DNA, 75 bp, synthetic construct
  source 1..75: mol_type = other DNA
ctccctttctgacagcgtgtctaatgcccgtgaagagcgcatggcgctgcgtcaggaacaggaacaactgcaatc

SEQ ID NO: 226636 - DNA, 75 bp, synthetic construct
  source 1..75: mol_type = other DNA
ttcacgtcgtcggcctgcgaggctttgcaccgcaactccctgaaacgtttccagggactgacgaagcgccctccc

SEQ ID NO: 226637 - DNA, 75 bp, synthetic construct
  source 1..75: mol_type = other DNA
caactacgtggcggcggactacatgcgtcacgccaacgagcgccgtgtccatctcgacaaagccctggagtttcg

SEQ ID NO: 226638 - DNA, 75 bp, synthetic construct
  source 1..75: mol_type = other DNA
tgctgctgtcagaaatttatgatgacgttagcctggaagatgcgccgtacttctcagcgctgtatggcccgtcac

SEQ ID NO: 226639 - DNA, 75 bp, synthetic construct
  source 1..75: mol_type = other DNA
cgttagccttgaagatgcgccgtacttctctgcactatatggcccgtctcgccacgcgatcgttgtgccggatct

SEQ ID NO: 226640 - DNA, 75 bp, synthetic construct
  source 1..75: mol_type = other DNA
atttagccgctttatcggcagccatctggcggtggcgtttgagtccgatccggaagccgaaatccgccaactcaa

SEQ ID NO: 226641 - DNA, 75 bp, synthetic construct
  source 1..75: mol_type = other DNA
atctcaacgaaaaactgcgtgaacgtctggaacaggcggaagcggagcgtactcgcgctcgtgaagcgttgcgtg

SEQ ID NO: 226642 - DNA, 75 bp, synthetic construct
  source 1..75: mol_type = other DNA
cgcgactggacgcccgttctatcgctacgctgtttgaattgtgtgaacgtttgcaaatgcagctcatcatcgcgg

SEQ ID NO: 226643 - DNA, 75 bp, synthetic construct
  source 1..75: mol_type = other DNA
gatacttactcgaaacaggcaggtaaagaacagtatctgatcccgtatttcatctccgcgcacccgggtacgcgt

SEQ ID NO: 226644 - DNA, 75 bp, synthetic construct
  source 1..75: mol_type = other DNA
tgctcgtattccggcttacgaaatgatccgtttctctgtcaacattatgcgcggctgctttggcggctgctcttt

SEQ ID NO: 226645 - DNA, 75 bp, synthetic construct
  source 1..75: mol_type = other DNA
ggcctactgccaacatgtatatgttgcgttgcaaatcgccacgcgctgagcaaacctgccgtcgtttgtcgtgcg

SEQ ID NO: 226646 - DNA, 75 bp, synthetic construct
  source 1..75: mol_type = other DNA
gaaattaatgccgctcaccacccagcaacatatcgattttgtgcagtgtacgtttgcccgtgcggatacatgggc

SEQ ID NO: 226647 - DNA, 75 bp, synthetic construct
  source 1..75: mol_type = other DNA
tttcttgcaatggctggcttcacaccgcaggccattcaggctgcgcttcccggcgtgttgagcatggcaacggct

SEQ ID NO: 226648 - DNA, 75 bp, synthetic construct
  source 1..75: mol_type = other DNA
tgatactcctgggaaaatcgacccgatcccgcatccgtatggcgaagatctgccgtgcgcggataacaaacctgt

SEQ ID NO: 226649 - DNA, 75 bp, synthetic construct
  source 1..75: mol_type = other DNA
acgtcgatatggcgcgagagctggctgagcacaacggtgccgaaggcgatctggaagcggattatcaggcggcca

SEQ ID NO: 226650 - DNA, 75 bp, synthetic construct
  source 1..75: mol_type = other DNA
gaacaggcttaccaattagtcgtagcaatcaacggcccgctggcgcgtaacgaagcatgggatgtcgctcgcgaa

SEQ ID NO: 226651 - DNA, 75 bp, synthetic construct
  source 1..75: mol_type = other DNA
catcatccgtaaaactattcagcgcgagcagaaccgtatccgtatgctcaaccagggcttgcagaacgtatcgtt

SEQ ID NO: 226652 - DNA, 75 bp, synthetic construct
  source 1..75: mol_type = other DNA
tcgtatgctggaagcgcagggctttcgcgtcgggatcatcgcccagccagactggagcagcaaagacgactttat

SEQ ID NO: 226653 - DNA, 75 bp, synthetic construct
  source 1..75: mol_type = other DNA
ggccaccagcggttcgcgtgataaaggtctgcacggtaagctgaaagcgggtgtctgttattcgatgctcgacac

SEQ ID NO: 226654 - DNA, 75 bp, synthetic construct
  source 1..75: mol_type = other DNA
ttcatgtcgtcggcctgcgaggatttgcgccgcaactccctgaaacgcttccaggaactgacgaagcgccttctc

SEQ ID NO: 226655 - DNA, 75 bp, synthetic construct
  source 1..75: mol_type = other DNA
accgtgcgcgatatcactctgaccagtacctgtgaacaccattttgtcactatcgatggcaaagcgacggtagcc

SEQ ID NO: 226656 - DNA, 75 bp, synthetic construct
  source 1..75: mol_type = other DNA
cggcgtgtatgaccgctttgccgaaaaattgcagcaggcggtgagcaaactgcacatcggcgacgggctggataa

SEQ ID NO: 226657 - DNA, 75 bp, synthetic construct
  source 1..75: mol_type = other DNA
cggtccggcgctggcggcaggctgcaccatggtgctgaaacccgccagtcagacgccgttctctgcgctggcgct

SEQ ID NO: 226658 - DNA, 75 bp, synthetic construct
  source 1..75: mol_type = other DNA
gtgtttaacgtggtcaccggttcggcaggcgcggtcggtaatgaactgaccagcaacccgctggtacgcaaactg

SEQ ID NO: 226659 - DNA, 75 bp, synthetic construct
  source 1..75: mol_type = other DNA
aatggttgtgccggcaggtctggttaacaactggcaccgcgaactgaatgaagttttcaatttgaattttgaagt

SEQ ID NO: 226660 - DNA, 75 bp, synthetic construct
  source 1..75: mol_type = other DNA
gaagtgttccctctgtgctatatgcatgacggtcccgttttccgggggcgctatattgatgagctcagcgccgca

SEQ ID NO: 226661 - DNA, 75 bp, synthetic construct
  source 1..75: mol_type = other DNA
tcgtttaccggctcgaccgaaattggccgccagttaatggaacagtgcgcgaaagacatcaaaaaagtgtcgctg

SEQ ID NO: 226662 - DNA, 75 bp, synthetic construct
  source 1..75: mol_type = other DNA
cacgctgaccatcggtgaggaaaacttctggatagaccgggtttcgccggatgatggcggaagctgtcatctctg

SEQ ID NO: 226663 - DNA, 75 bp, synthetic construct
  source 1..75: mol_type = other DNA
acctttgaacctggtgcccgctccgcctggcatacgcatccagcaggtcagcgactgattgtgacctctggtgtt

SEQ ID NO: 226664 - DNA, 75 bp, synthetic construct
  source 1..75: mol_type = other DNA
atgtggtaaaactgttgccgctggggtcagggggctacaagcggatcacaaaatacctttgtcacgcggtggtgg

SEQ ID NO: 226665 - DNA, 75 bp, synthetic construct
  source 1..75: mol_type = other DNA
tttccaatgaagtggccccgttcggcggcattaaagcctcgggtctgggtcgtgaaggttcgaagtatggcatcg

SEQ ID NO: 226666 - DNA, 75 bp, synthetic construct
  source 1..75: mol_type = other DNA
tcgcggtgccaacgaagcctttgacctgatggtgtatgccgaggcgctggttattctgcatgggtacgagaaaat

SEQ ID NO: 226667 - DNA, 75 bp, synthetic construct
  source 1..75: mol_type = other DNA
gggaaaacgcacgatgtgctgaccggaagtgatgacggtcgccacagcaacacgtctctggcgtggggggctggc

SEQ ID NO: 226668 - DNA, 75 bp, synthetic construct
  source 1..75: mol_type = other DNA
cgaagccttttcaatgtcagatcaggagcgcgatttctataacgccttgaatgaatacctgcgcgacggttttgc

SEQ ID NO: 226669 - DNA, 75 bp, synthetic construct
  source 1..75: mol_type = other DNA
gccattacgggccggagaaggaataccatattgtttccgctgacaagggatatgacggtattgtccggacactgc

SEQ ID NO: 226670 - DNA, 75 bp, synthetic construct
  source 1..75: mol_type = other DNA
tgctccaagagcagctccccgttgtgaaggcaaaacagccagggagatcgaacgcattattgaagacgagattaa

SEQ ID NO: 226671 - DNA, 75 bp, synthetic construct
  source 1..75: mol_type = other DNA
atgaaaaaggttattgttgtttcagcgcttgctatggcggggggattttttgcccaggctctggctgataggggt

SEQ ID NO: 226672 - DNA, 75 bp, synthetic construct
  source 1..75: mol_type = other DNA
aaaaaaccatgaaatcataaaggattcaagacttaatgaatcaactttaaggttagaattcgaaatagaccctta

SEQ ID NO: 226673 - DNA, 75 bp, synthetic construct
  source 1..75: mol_type = other DNA
atgaataaggtttttgttgtttcagtggtggccgcagcctgtgtatttgcagtaaatgcaggagcaaaggaaggt

SEQ ID NO: 226674 - DNA, 75 bp, synthetic construct
  source 1..75: mol_type = other DNA
aactactgggactattcccttcatcccgtgaaactaaagtagataaactcattggggctttgggcgtgctgtggc

SEQ ID NO: 226675 - DNA, 75 bp, synthetic construct
  source 1..75: mol_type = other DNA
caatgaagagcagctggccgctgcatccgatacttttaccgatgaactggaaacagccgccgctgaagatgcggc

SEQ ID NO: 226676 - DNA, 75 bp, synthetic construct
  source 1..75: mol_type = other DNA
cgatcttccaaaagattgcggcgtccagctttgccgctgtgcatcgcaccttgagacgaagacttttggccctga

SEQ ID NO: 226677 - DNA, 75 bp, synthetic construct
  source 1..75: mol_type = other DNA
catgctaaggatgcagtattcgaactattccaggacctagatggcttcagtttagatgactacgcatcactctca

SEQ ID NO: 226678 - DNA, 75 bp, synthetic construct
  source 1..75: mol_type = other DNA
catgctaaggatgcggtattcgaactattccaggatctggacggtttcagtttggatgactacgcaccactatca

SEQ ID NO: 226679 - DNA, 75 bp, synthetic construct
  source 1..75: mol_type = other DNA
ttataaccttgtgttgggtgacaccattgaaggtcgcattttcctgctactggatgaaaaactggaggagattgc

SEQ ID NO: 226680 - DNA, 75 bp, synthetic construct
  source 1..75: mol_type = other DNA
cgttgcctcgcaacagcgtcaggctgccagccagacgttacaggtccggcaggcgttgaatacgctgcgtgaaca

SEQ ID NO: 226681 - DNA, 75 bp, synthetic construct
  source 1..75: mol_type = other DNA
tcgccgcagccgtgggttatctggcaacagcgcaggctctgctggcaaggctggaaacatcggtcgccatctggt

SEQ ID NO: 226682 - DNA, 75 bp, synthetic construct
  source 1..75: mol_type = other DNA
cgcaaccagttgaatagtcaacgccaactggaagcggagcgggcgctggaaagcaccgaattgctggcagaaaac

SEQ ID NO: 226683 - DNA, 75 bp, synthetic construct
  source 1..75: mol_type = other DNA
caccgctatctgttctggacctctgatgtgcgcccgatgaccatcgcctggccgctggaaatcgcccaggatctg

SEQ ID NO: 226684 - DNA, 75 bp, synthetic construct
  source 1..75: mol_type = other DNA
catcgctatctgttctggacctctgacgtgcgcccgatgaccatcgcctggccgctggaaatcgcccaggatctg

SEQ ID NO: 226685 - DNA, 75 bp, synthetic construct
  source 1..75: mol_type = other DNA
caggaattagcgcgtttacgctcagagctggcggaaaaagagagccagcagctggatgcatatttgcaggccttg

SEQ ID NO: 226686 - DNA, 75 bp, synthetic construct
  source 1..75: mol_type = other DNA
gttttacgatgagctgacctatgaagagcgcggcagtgacggaaaatggcgaaaaccgggcaggggcgctaacga

SEQ ID NO: 226687 - DNA, 75 bp, synthetic construct
  source 1..75: mol_type = other DNA
atcgcaagattgtcgcctccgcgccagtgggtatctgcattttgcgtaccgctgatggcgtcaatattttaagta

SEQ ID NO: 226688 - DNA, 75 bp, synthetic construct
  source 1..75: mol_type = other DNA
agctggcagcagagggaagcggcagacgggaatggaatcgcttcctggacacccactactggcgtggctggaatg

SEQ ID NO: 226689 - DNA, 75 bp, synthetic construct
  source 1..75: mol_type = other DNA
gttacgcgtgcaacggttgcgctatgaggatctgctaaacaaacagccacaactacgacaaatccatcaggccga

SEQ ID NO: 226690 - DNA, 75 bp, synthetic construct
  source 1..75: mol_type = other DNA
tgctgattgccattctggtatttattatcaccacgcagcttgtgcgcaacctacccgcgctgctggagctggcaa

SEQ ID NO: 226691 - DNA, 75 bp, synthetic construct
  source 1..75: mol_type = other DNA
gccatcaccaccatcaccaaatatctgctgatgctgattggcgggctggtcggcttctcgatgattggtattgag

SEQ ID NO: 226692 - DNA, 75 bp, synthetic construct
  source 1..75: mol_type = other DNA
cacagcaacgtcaggctaccagccagacgttacaggttcggcaggcgttgaatacgctacgtgaacaatcacaat

SEQ ID NO: 226693 - DNA, 75 bp, synthetic construct
  source 1..75: mol_type = other DNA
attcgcaactgctgacacttggtctacttgatttcatcaaagaaagaaaaggacatctgttccctgagctaacgt

SEQ ID NO: 226694 - DNA, 75 bp, synthetic construct
  source 1..75: mol_type = other DNA
tgagatctgccagctttaccacaatgacgtgatgaaagttgacggagtttggtgcttccgtgttgataacttgaa

SEQ ID NO: 226695 - DNA, 75 bp, synthetic construct
  source 1..75: mol_type = other DNA
acttgatttcatcaaagaaagaaaaggacatctgttccctgagctaacgttgcatcttgggagctatggtcacta

SEQ ID NO: 226696 - DNA, 75 bp, synthetic construct
  source 1..75: mol_type = other DNA
gggcttcggttttaaccccggcaaagtggcatggcagccggaactggaaaaatacgattaccgcagcgctcgcca

SEQ ID NO: 226697 - DNA, 75 bp, synthetic construct
  source 1..75: mol_type = other DNA
ttcggcgtctgatgtggagaaatatggcctgacggtgcagagcagcgaggggcgactggttgaggttgagcagga

SEQ ID NO: 226698 - DNA, 75 bp, synthetic construct
  source 1..75: mol_type = other DNA
tttctggcgtagaagcggacgacgttattggtactctggcgcgcgaagccgaaaaagccgggcgtccggtgctga

SEQ ID NO: 226699 - DNA, 75 bp, synthetic construct
  source 1..75: mol_type = other DNA
ttctggtgaaacggcatccccggaactgacggccggggcagaaaaacgccgtcgtcggaagaaaaaactgcggac

SEQ ID NO: 226700 - DNA, 75 bp, synthetic construct
  source 1..75: mol_type = other DNA
tgacgtacagggcggtaaaaatcgccgttttgttgtgcagatcaccggatacggagaacagggggaacgctggat

SEQ ID NO: 226701 - DNA, 75 bp, synthetic construct
  source 1..75: mol_type = other DNA
tggcgacagtggatgtgcaggcgggacgtcatcgccgttttgtggttcaggtaccggagtcggaagttgccggac

SEQ ID NO: 226702 - DNA, 75 bp, synthetic construct
  source 1..75: mol_type = other DNA
cgacgggcgcaggctgcgggtgatgtgcctctctggcttcttcagactgacgctctgaaagaccgggttaataac

SEQ ID NO: 226703 - DNA, 75 bp, synthetic construct
  source 1..75: mol_type = other DNA
caacaaatccggcgactgaatgtatcgcggcggacgttatccttgattttaagagtgggcgtggtttttatgagt

SEQ ID NO: 226704 - DNA, 75 bp, synthetic construct
  source 1..75: mol_type = other DNA
caccctggcatcaaagcgtaccaccacctttatgtcttccgggatgaccctggtcgagagttcacccgggcggga

SEQ ID NO: 226705 - DNA, 75 bp, synthetic construct
  source 1..75: mol_type = other DNA
gcgctgaacgacgctatcaacgtactttctgacgagcaaaccagccttaaattcaaactggccttgttgcaggcg

SEQ ID NO: 226706 - DNA, 75 bp, synthetic construct
  source 1..75: mol_type = other DNA
gaggcgtattaacgctaaccaactttgagcaccagtggcaaaactggattttggcgacgctgtttcatactgacc

SEQ ID NO: 226707 - DNA, 75 bp, synthetic construct
  source 1..75: mol_type = other DNA
caggcgatgaagcatgggattttatggagttacttaataccgggcacccaggaactataactacagcacatgcta

SEQ ID NO: 226708 - DNA, 75 bp, synthetic construct
  source 1..75: mol_type = other DNA
gatagtcgttaaaccaggggaagggctatccttacgtatgcatcatcatcgttcagagcattggattgtcctttc

SEQ ID NO: 226709 - DNA, 75 bp, synthetic construct
  source 1..75: mol_type = other DNA
gcctgcaaaggtgatattatcacatataaaacaaagaacaattatatatactctgaatcagccttagtagctgct

SEQ ID NO: 226710 - DNA, 75 bp, synthetic construct
  source 1..75: mol_type = other DNA
tggggaaaatttgatgcgatagatcagggagaacgatataaagttaaaaagatagttgtgaaacccggcgaagga

SEQ ID NO: 226711 - DNA, 75 bp, synthetic construct
  source 1..75: mol_type = other DNA
tgccttaggcctgccggaaatagacgttgccgatcacagtgaactgcaatggcctgttcagccctccgtatctgt

SEQ ID NO: 226712 - DNA, 75 bp, synthetic construct
  source 1..75: mol_type = other DNA
cgcagcgaactgcaatggcctgttcagcccgccgtccacattgccgaaaccagcgatttgggccagcacggacga

SEQ ID NO: 226713 - DNA, 75 bp, synthetic construct
  source 1..75: mol_type = other DNA
atgccaatcgtgtaagaggaagaagtaaagagttactggactggcaaaaggaattaaaacgtcttaatgctgctc

SEQ ID NO: 226714 - DNA, 75 bp, synthetic construct
  source 1..75: mol_type = other DNA
gaaatatattcacaccgtagcctttggtgaaaatgataacgcgccctatatcggcgtgaactgcgcggcgatccc

SEQ ID NO: 226715 - DNA, 75 bp, synthetic construct
  source 1..75: mol_type = other DNA
ccactgcgtgaacgtctgaacgatattattccgctggcagagtcgtttattaaaaaatatgccacggtgctggtg

SEQ ID NO: 226716 - DNA, 75 bp, synthetic construct
  source 1..75: mol_type = other DNA
ccacattgccgaaaccagcgatttgggccagcacggacgaagcgcccagtatcaatatatcgctgacctgatgcg

SEQ ID NO: 226717 - DNA, 75 bp, synthetic construct
  source 1..75: mol_type = other DNA
gacggtgataaaagcctgctacccggcagccagctgtccggcgcattcattgcccttaacgatatacccgctgaa

SEQ ID NO: 226718 - DNA, 75 bp, synthetic construct
  source 1..75: mol_type = other DNA
gcagacggtctgttagccatctgtattcagcatgagatggatcacctggtcggcaaactgtttatggattatctg

SEQ ID NO: 226719 - DNA, 75 bp, synthetic construct
  source 1..75: mol_type = other DNA
gaacttatttatccagaagcccaaagtcgtgttttggctgttattgagcaggtaatgcttgatgaacctgattac

SEQ ID NO: 226720 - DNA, 75 bp, synthetic construct
  source 1..75: mol_type = other DNA
agtcaggatgatccagatccccagcgattccgggaagtttggcgtttttgaggagctgcacggcttcgacagcgg

SEQ ID NO: 226721 - DNA, 75 bp, synthetic construct
  source 1..75: mol_type = other DNA
aagatattcgccaacgcccccgccgtgagcagggggtatggctgacgctcgaaccacttcagcgctacctgagtg

SEQ ID NO: 226722 - DNA, 75 bp, synthetic construct
  source 1..75: mol_type = other DNA
tctgctggtcgttcccgcgtgaagatgtcagccgtgaaaccatcgccaaacaaattgcgctggcgctgcgtgatg

SEQ ID NO: 226723 - DNA, 75 bp, synthetic construct
  source 1..75: mol_type = other DNA
acgatgaagttgctctgcaagaagtgaatgctgcattgttcaaagagtatttaccgttattacaaaaaagtgagc

SEQ ID NO: 226724 - DNA, 75 bp, synthetic construct
  source 1..75: mol_type = other DNA
caaggatcgttttcgccttgatgaccttgacgggcgcgggacgtggatctgcagccagtgtggcaatggtgacgg

SEQ ID NO: 226725 - DNA, 75 bp, synthetic construct
  source 1..75: mol_type = other DNA
cctatgccggggtggaggtcaggatgatccagatccccagcgattccggtaaatatggagtgtttgaggagctgc

SEQ ID NO: 226726 - DNA, 75 bp, synthetic construct
  source 1..75: mol_type = other DNA
gtcgagtgtacaggggcgggattttcgcgtcagcggtacttctgacgagtggcgggaaaatatcgggcgttattg

SEQ ID NO: 226727 - DNA, 75 bp, synthetic construct
  source 1..75: mol_type = other DNA
cgcctacatgctggcaaacggtcagggcaagggccgtgccggtacggacggtgagctgcgtacccgtaagcagtg

SEQ ID NO: 226728 - DNA, 75 bp, synthetic construct
  source 1..75: mol_type = other DNA
agccttctgccgacggaaagctgcagacaaccattcgcccgccagagatgaatccccgcaggctctacgtcttca

SEQ ID NO: 226729 - DNA, 75 bp, synthetic construct
  source 1..75: mol_type = other DNA
aatatacagccgccctgaccccgaaagatgcgggtaatcaggtaggccgggctgtgaaccgttttgcactggtgg

SEQ ID NO: 226730 - DNA, 75 bp, synthetic construct
  source 1..75: mol_type = other DNA
ggccggtgttcgctatgacgtaaccccggatatcgctcttgacctcagctatcgctatctggatgctggtaaatc

SEQ ID NO: 226731 - DNA, 75 bp, synthetic construct
  source 1..75: mol_type = other DNA
ttaagccacggttttatcgcaaggtaagggtagtttatcaggacgaaaacaagacctgtgcatacgccattcata

SEQ ID NO: 226732 - DNA, 75 bp, synthetic construct
  source 1..75: mol_type = other DNA
gagttataaggacgagtggggcgataaatataagtcagaagttgatgttaaaagtcatgacatcatgcttggtat

SEQ ID NO: 226733 - DNA, 75 bp, synthetic construct
  source 1..75: mol_type = other DNA
tgggcgcaaaacctgacactaccttccagcaacaccacctggtttaacttccttgcctctcacgatggcatcggg

SEQ ID NO: 226734 - DNA, 75 bp, synthetic construct
  source 1..75: mol_type = other DNA
attacgcaggtgtcgaaaaactcggatataaccgtgcgattaaccgtaaaaaatatcacagtaaagagataaccc

SEQ ID NO: 226735 - DNA, 75 bp, synthetic construct
  source 1..75: mol_type = other DNA
cgctctggacctcagctatcgctatcttgatgcaggtgacagcagtgtgagttacaaggacgagtggggcgataa

SEQ ID NO: 226736 - DNA, 75 bp, synthetic construct
  source 1..75: mol_type = other DNA
cgcttgctatggtgggcgtattttcagcccaggctctggctgatgagaacaaaactggcttttatgtgactggta

SEQ ID NO: 226737 - DNA, 75 bp, synthetic construct
  source 1..75: mol_type = other DNA
atgaataaggttattgcggtttcagcgcttgccatggcaggcatgttttcgacccaggctctggctgatgaaagc

SEQ ID NO: 226738 - DNA, 75 bp, synthetic construct
  source 1..75: mol_type = other DNA
taaatacgatgtgacgcaggatttcagccttgacctcagctaccggtatctggatgcaggggattccactctgac

SEQ ID NO: 226739 - DNA, 75 bp, synthetic construct
  source 1..75: mol_type = other DNA
gcctcagtccttcccgtaatgacaacaacgtccacgataaaatgtttcttgacggctcattcctgaaaattggct

SEQ ID NO: 226740 - DNA, 75 bp, synthetic construct
  source 1..75: mol_type = other DNA
ggatggaggggccagctgcggcgtttcagacctgggaacaactgatttttaaactgctggcggcagaagaagagt

SEQ ID NO: 226741 - DNA, 75 bp, synthetic construct
  source 1..75: mol_type = other DNA
gacggctccttcctgaagattggctggccgtcgatcaccgtcttttcctcttcggattaccgtcgtgtggcgctg

SEQ ID NO: 226742 - DNA, 75 bp, synthetic construct
  source 1..75: mol_type = other DNA
gtcagcttgggaagaaatgacctgcttattcgcaccttccttaagtttccccggtgtgccagcgatatatattca

SEQ ID NO: 226743 - DNA, 75 bp, synthetic construct
  source 1..75: mol_type = other DNA
aatagtataaaactacgtcatattgagctttactttcaacagcgttatcgaactggcgtccgttcaaaaatactc

SEQ ID NO: 226744 - DNA, 75 bp, synthetic construct
  source 1..75: mol_type = other DNA
ataatcaaattttgtcacaagtactaaattattttacaattacatttgatatttttattatatcgcatttcgggg

SEQ ID NO: 226745 - DNA, 75 bp, synthetic construct
  source 1..75: mol_type = other DNA
tagtatcactaacagttacgcttccattatataattatgctcgtttgttagtagaaaagaaatacaatattatcg

SEQ ID NO: 226746 - DNA, 75 bp, synthetic construct
  source 1..75: mol_type = other DNA
gctaaagagcgtgaacagcgtgatgcacgtaaacgcgaactccttgaaatgatcgccagtgagggattttcagtt

SEQ ID NO: 226747 - DNA, 75 bp, synthetic construct
  source 1..75: mol_type = other DNA
ggctgattgctgatgccaaacctgcaagccgccgccttattggcctgaacattacccgggacattcccggccacc

SEQ ID NO: 226748 - DNA, 75 bp, synthetic construct
  source 1..75: mol_type = other DNA
aactggatatcggctgcgagcatcgcctggaacaatgcatgaccgcgctgaaagaaacactcacaccggagtcgc

SEQ ID NO: 226749 - DNA, 75 bp, synthetic construct
  source 1..75: mol_type = other DNA
ttgtcgaagtcgtgcgccagcagagcttcacccgcgcagcggagaagctgtttgtgacccagcccaccatcagca

SEQ ID NO: 226750 - DNA, 75 bp, synthetic construct
  source 1..75: mol_type = other DNA
cacactctcagccccagcgctaaaacgggtgacgctctggtacaaaccttattaaaaaatctgtcacccaatcag

SEQ ID NO: 226751 - DNA, 75 bp, synthetic construct
  source 1..75: mol_type = other DNA
tacgcaggtgtcgaaaaactgggatataaccgtgcgattaaccgtaaaaaatattacagtgaagagatcacgacc

SEQ ID NO: 226752 - DNA, 75 bp, synthetic construct
  source 1..75: mol_type = other DNA
ttgagatcccggagaaattactgaataccgggtcgctgggcggcattctgacattccgttctcaggatctggacc

SEQ ID NO: 226753 - DNA, 75 bp, synthetic construct
  source 1..75: mol_type = other DNA
tgatagcgacaaccgcaacggtcaggccctgctggatctgcaaagcaacagtaaaacggtgggcggtgcgaaatc

SEQ ID NO: 226754 - DNA, 75 bp, synthetic construct
  source 1..75: mol_type = other DNA
ttgggatattctctactgtatatttaatacctgtgtttttggggcagattcgcggattaaatgccgaagagatag

SEQ ID NO: 226755 - DNA, 75 bp, synthetic construct
  source 1..75: mol_type = other DNA
catctccgcgcaccccggtacgcgtgatgaagatatggtgaatctggcgctgtggctgaaaaagcaccgcttccg

SEQ ID NO: 226756 - DNA, 75 bp, synthetic construct
  source 1..75: mol_type = other DNA
attcgatcatcaatgagatcgaagcgatccgcgacactgttccaggttttacgggcgtgatttccgatctcggtg

SEQ ID NO: 226757 - DNA, 75 bp, synthetic construct
  source 1..75: mol_type = other DNA
gctggcgaagattggttataagagtgaagacgtctttgtaccgaagggcgacaagcagcgtcgcctgcataaagc

SEQ ID NO: 226758 - DNA, 75 bp, synthetic construct
  source 1..75: mol_type = other DNA
gtggctgctttggcggctgctctttctgttctattaccgagcatgaagggcgcattattcagagccgttcggaag

SEQ ID NO: 226759 - DNA, 75 bp, synthetic construct
  source 1..75: mol_type = other DNA
tcgcgatgtgcgtaataccgcgattattgtgaaagaggcgctgcctggctggagtggcgtggattccacccgtct

SEQ ID NO: 226760 - DNA, 75 bp, synthetic construct
  source 1..75: mol_type = other DNA
ggatatttgtccgcatatggacactaaccacgaaccgacgatcaacctctatcgccgcgctcgcgatctgaaagg

SEQ ID NO: 226761 - DNA, 75 bp, synthetic construct
  source 1..75: mol_type = other DNA
acgggcgtgatttccgatctcggtgggccaactgccaacatgtatatgttgcgctgcaaatcgccacgcgctgaa

SEQ ID NO: 226762 - DNA, 75 bp, synthetic construct
  source 1..75: mol_type = other DNA
cgatcgccgtttacgtcatgacgatgcctacacgccggataacgtcgcgggtaagcgcccggatcgcgccacgct

SEQ ID NO: 226763 - DNA, 75 bp, synthetic construct
  source 1..75: mol_type = other DNA
ggcaccgaaaaagcaggaagccaaagccgtaaccgtgcagccaccgcgcccgaaaccgtgggaaaaaacctacgt

SEQ ID NO: 226764 - DNA, 75 bp, synthetic construct
  source 1..75: mol_type = other DNA
aagagctggcgacccatcacgtcggcggttatctgaagattgccccggaacataccgaagaagggccgttgtcga

SEQ ID NO: 226765 - DNA, 75 bp, synthetic construct
  source 1..75: mol_type = other DNA
caaacctgccgtcgtttgtcgtgcgtttatccggatatttgtccgcacatggacactaaccacgaaccgacgatc

SEQ ID NO: 226766 - DNA, 75 bp, synthetic construct
  source 1..75: mol_type = other DNA
cgcctcaggcgtacgttatgacatcgccgtggaagatccgcgctatatcaaagagttggcgacccatcacgtcgg

SEQ ID NO: 226767 - DNA, 75 bp, synthetic construct
  source 1..75: mol_type = other DNA
gatccgcgacaccgttcctggttttacgggcgtaatttccgatctcggtgggccaacatgccaacatgtatatgt

SEQ ID NO: 226768 - DNA, 75 bp, synthetic construct
  source 1..75: mol_type = other DNA
atgctattagtgcgctggaagatatttgtgagcaggtcatgaactccctgcgtccttatggcattgaccgcttag

SEQ ID NO: 226769 - DNA, 75 bp, synthetic construct
  source 1..75: mol_type = other DNA
acgcggtgttgaaattcctgcgcctgataaaaaagaacgtgaagaacttgctgaagtcgatgaatcagacatttt

SEQ ID NO: 226770 - DNA, 75 bp, synthetic construct
  source 1..75: mol_type = other DNA
ttgatcaatataaccgtaagttgcacggtgattccaagcagctgattaatgacctttatctgaccgttatttaca

SEQ ID NO: 226771 - DNA, 75 bp, synthetic construct
  source 1..75: mol_type = other DNA
agactcaagaagctgcttgccgaagccatgctggataaagaggcgcttcaggtggctcttgggcgaaagtactga

SEQ ID NO: 226772 - DNA, 75 bp, synthetic construct
  source 1..75: mol_type = other DNA
agatcatcagtattctccgcgaagccgaagctggggtacccgccggtgaactctgccgcaagcatgccatttccg

SEQ ID NO: 226773 - DNA, 75 bp, synthetic construct
  source 1..75: mol_type = other DNA
ttcgcggtaccgacgaacgccgctatacgtctgccgttgaaatccgggattacgattccgatactgagccgggtc

SEQ ID NO: 226774 - DNA, 75 bp, synthetic construct
  source 1..75: mol_type = other DNA
aatgcttacccgttcaatggctgctgaatgggcaaaatttaatattcaggcaaatgctattggccctggatatat

SEQ ID NO: 226775 - DNA, 75 bp, synthetic construct
  source 1..75: mol_type = other DNA
catctctgcgcaccccggtacgcgggatgaagatatggtgaatctggcgctgtggctgaaaaagcatcgtttccg

SEQ ID NO: 226776 - DNA, 75 bp, synthetic construct
  source 1..75: mol_type = other DNA
agacacctgccggagcaaagaaagcgccacccgcgcaatctcgcccggtgaatgcaggggcgaagaaacgcccaa

SEQ ID NO: 226777 - DNA, 75 bp, synthetic construct
  source 1..75: mol_type = other DNA
tccaggcccagcgcggctggttacgacctatttcccgcaaagagcagcaagagattgccgaacgctttattcgcc

SEQ ID NO: 226778 - DNA, 75 bp, synthetic construct
  source 1..75: mol_type = other DNA
cccgaccgcaatttctgatcctcgacgagccaacccgcggcattgatgttggtgcgcatgccgagatcatccgcc

SEQ ID NO: 226779 - DNA, 75 bp, synthetic construct
  source 1..75: mol_type = other DNA
gggtgaaaaatagtaatccagcagaacgatggggaaaaccagaagaactggtaggaactgccattttcctatcct

SEQ ID NO: 226780 - DNA, 75 bp, synthetic construct
  source 1..75: mol_type = other DNA
ataacgatgaaggcaaccacgggcgttatttttccctgcgccgggaaccgcgccgcttatcagaaaacgcccgcc

SEQ ID NO: 226781 - DNA, 75 bp, synthetic construct
  source 1..75: mol_type = other DNA
cacactggttggcgttccgggccattttgacggcatgttggatgtgaacctgaaacagcccgtcatgtatgaggg

SEQ ID NO: 226782 - DNA, 75 bp, synthetic construct
  source 1..75: mol_type = other DNA
aaagcctgggcgatcgtggttttgtggtgctgggattcccgtgcaaccagtttctggagcaagaaccgggcagcg

SEQ ID NO: 226783 - DNA, 75 bp, synthetic construct
  source 1..75: mol_type = other DNA
ccgctggccttgatgcaggtgattacggcaagtattcccgctggtgggctcaaagcaacgcacaggagcgccaag

SEQ ID NO: 226784 - DNA, 75 bp, synthetic construct
  source 1..75: mol_type = other DNA
gttgaccagtatgaagcgccgtacccggaaaatctgcgccatatcaccatcacggccatggtcaccaaccgcgat

SEQ ID NO: 226785 - DNA, 75 bp, synthetic construct
  source 1..75: mol_type = other DNA
tttcgcccgctctaccacacccgcaataatgatgaaggcagtcacggacgttatttttccctgcgccgggagccg

SEQ ID NO: 226786 - DNA, 75 bp, synthetic construct
  source 1..75: mol_type = other DNA
tggaaaatgagatcaaggtgaacattgaagccaaccacgccaccctagcggggcactctttccaccatgaaatcg

SEQ ID NO: 226787 - DNA, 75 bp, synthetic construct
  source 1..75: mol_type = other DNA
gctgtactgccctgctcggtgtagcggatgctatcagtactatggagcttgatatcgccgtttatctggtggctt

SEQ ID NO: 226788 - DNA, 75 bp, synthetic construct
  source 1..75: mol_type = other DNA
cgctacggtagtgataaacccgatgcgctgcgactgatgatttttgcgcatatggatgaagtcggttttatggtg

SEQ ID NO: 226789 - DNA, 75 bp, synthetic construct
  source 1..75: mol_type = other DNA
acgacctgattaaaaaaatttctgattttgatcctgccaggctgcacacctatgaaatcgatcagtttattttgc

SEQ ID NO: 226790 - DNA, 75 bp, synthetic construct
  source 1..75: mol_type = other DNA
cgaattgaaacctgactgggaggccatccgcaataaaaatacggcccaccctactggcttcgacgtgcatttaaa

SEQ ID NO: 226791 - DNA, 75 bp, synthetic construct
  source 1..75: mol_type = other DNA
gatatcaacagaagtttagtttccatctggatgctacacacagctttgcgcctcaacaatcagccattgatgcat

SEQ ID NO: 226792 - DNA, 75 bp, synthetic construct
  source 1..75: mol_type = other DNA
gccggaatacaaaaaggaacaggaaaagtatggcactggcagtgagattcagcgaggtatacaggccgcgacagc

SEQ ID NO: 226793 - DNA, 75 bp, synthetic construct
  source 1..75: mol_type = other DNA
tgccagaatttcggccgggaataatctgctgattgacgcggacaaactggataatacgggaagtcatcttcttgc

SEQ ID NO: 226794 - DNA, 75 bp, synthetic construct
  source 1..75: mol_type = other DNA
gtgacgcccagcaacaactgaaagaagcggttgatgagtttaaagcgaagaactgtgccggactcagtgctgacg

SEQ ID NO: 226795 - DNA, 75 bp, synthetic construct
  source 1..75: mol_type = other DNA
ggctccactgccggtaatgtcagtattaccgcgggcaaacaggctcatatcagcggttcggatgtgattgcgaac

SEQ ID NO: 226796 - DNA, 75 bp, synthetic construct
  source 1..75: mol_type = other DNA
atcccgcatccgtatggtgaagatttgccgtgcgcggataacaaaccggtggcaccgaaaaagcaggaagccaaa

SEQ ID NO: 226797 - DNA, 75 bp, synthetic construct
  source 1..75: mol_type = other DNA
gcaaacagtgagtctcaccagcgcagcgccgggcttacgaccattactgccggcgacagtgtgatgctgagtgca

SEQ ID NO: 226798 - DNA, 75 bp, synthetic construct
  source 1..75: mol_type = other DNA
attgataactactacggtggtcgtaccgataacctgagtgaacaggaacgtcagcaaatcagcatgctggccacc

SEQ ID NO: 226799 - DNA, 75 bp, synthetic construct
  source 1..75: mol_type = other DNA
agtggcagcacactcgatatcagcgcccgcaatgccacactgtccggtgatgccggtgcaaaagacagtgcccgc

SEQ ID NO: 226800 - DNA, 75 bp, synthetic construct
  source 1..75: mol_type = other DNA
cgcacaagccatgtgggctcttggcgcaggtgcaaatgcaggaattggttccatggtagatagttcagttgatcc

SEQ ID NO: 226801 - DNA, 75 bp, synthetic construct
  source 1..75: mol_type = other DNA
tttgccagtcagctacaaaatcgttacggtatagataagcaacaggctgaaatccttgctgtcgcagcattggga

SEQ ID NO: 226802 - DNA, 75 bp, synthetic construct
  source 1..75: mol_type = other DNA
agcgagttgtcagagttgaaggctctaatggctgttgaaaaacagacaggtcagaaaatcagtgcggagtcactt

SEQ ID NO: 226803 - DNA, 75 bp, synthetic construct
  source 1..75: mol_type = other DNA
acacttagctcaacttgacggatattcgcagaagaaaggaattagcggtgcacataatgctgatgtattcaataa

SEQ ID NO: 226804 - DNA, 75 bp, synthetic construct
  source 1..75: mol_type = other DNA
acggatcacaaatacccttgcggcacctgaaattaacacgccggcagagaaaaatatcagcccgggaatggctca

SEQ ID NO: 226805 - DNA, 75 bp, synthetic construct
  source 1..75: mol_type = other DNA
tgttagagtactaagtgggatgattaaatcatgtgaagttgaacaagaacgtcatatacttaatgatatcttatg

SEQ ID NO: 226806 - DNA, 75 bp, synthetic construct
  source 1..75: mol_type = other DNA
gtaaagacaataaaagttcgatagcaacacttattgaacgaaatacacggctctgtatcttggcaacattacctg

SEQ ID NO: 226807 - DNA, 75 bp, synthetic construct
  source 1..75: mol_type = other DNA
agttcaagaaagaaaaataccgggtcattgggaagctgatttaattaaggaaggtgcgaacaagtccctgatatg

SEQ ID NO: 226808 - DNA, 75 bp, synthetic construct
  source 1..75: mol_type = other DNA
cacagacggtaactgacatatcctccctagcgggtattgtcggttttgttgtaactgtaaaacttttttttacga

SEQ ID NO: 226809 - DNA, 75 bp, synthetic construct
  source 1..75: mol_type = other DNA
gttagctttttaagtaacttaatccagatttccacctctgcacaagaaaatctgattttgaatgatgtgtttaat

SEQ ID NO: 226810 - DNA, 75 bp, synthetic construct
  source 1..75: mol_type = other DNA
ctgaggataaatttaaaatttacttggcagaaaagcatgtgaatattatttggatgtcaattgaagaagctttgc

SEQ ID NO: 226811 - DNA, 75 bp, synthetic construct
  source 1..75: mol_type = other DNA
ggcgatatcatgacattcatgcagatctgcaaatccatcaccgcgtcagcagactgtgaggagatcattaagctc

SEQ ID NO: 226812 - DNA, 75 bp, synthetic construct
  source 1..75: mol_type = other DNA
tctgcaaatccatcaccgcgtcagcagactgtgaggagatcattaagctcatctatcttcgtcgctactttgaaa

SEQ ID NO: 226813 - DNA, 75 bp, synthetic construct
  source 1..75: mol_type = other DNA
ctgacgcgagctgtcagacgtgacctggaagagttcgccatgagctatgaagagagcctgaaagaagagtctgac

SEQ ID NO: 226814 - DNA, 75 bp, synthetic construct
  source 1..75: mol_type = other DNA
cccattatcttcgaacacctgccccacggaaaacggttgatagaacctttcgttggaggtggcgctgttttcact

SEQ ID NO: 226815 - DNA, 75 bp, synthetic construct
  source 1..75: mol_type = other DNA
aggaaaaaggcgtttctccggaccgtaatgccttacattaccagccaaaatgcggccattactgcggaacgtaac

SEQ ID NO: 226816 - DNA, 75 bp, synthetic construct
  source 1..75: mol_type = other DNA
cctccgccagtgtaaagaggtcgcctccctgtgtgatggcgacaccttctccggcgagcagctaaacttaatgct

SEQ ID NO: 226817 - DNA, 75 bp, synthetic construct
  source 1..75: mol_type = other DNA
gcttccaaccaaggaacgctcaaagattgatatattttttgatgaagtcaaacccaaaggaatctttcgaagaaa

SEQ ID NO: 226818 - DNA, 75 bp, synthetic construct
  source 1..75: mol_type = other DNA
gctggtcttggggatagcgaaacgtggtattactgggttcgagcatcgaacaagcgaggtatgttaagtcctccg

SEQ ID NO: 226819 - DNA, 75 bp, synthetic construct
  source 1..75: mol_type = other DNA
atcgcgcaggaaagcgcaactccggtcgaattgtggagtttaccaaaaacagcatcacactcgatgcgcctgtgt

SEQ ID NO: 226820 - DNA, 75 bp, synthetic construct
  source 1..75: mol_type = other DNA
tgaagtttccttctttgcgaagcatagataaaaaaactggtgacacgaacggtacaaccgttgagtacaagttcc

SEQ ID NO: 226821 - DNA, 75 bp, synthetic construct
  source 1..75: mol_type = other DNA
atcactgaagggacttatctctcaagcccgggcaacctgtcagtaaaactgactgcaacatgggaagggaaatct

SEQ ID NO: 226822 - DNA, 75 bp, synthetic construct
  source 1..75: mol_type = other DNA
cgaacagattaatccctgaaatagaagactacagcaaggtcttgtctgaaatgccgagagcgacgagaattatcg

SEQ ID NO: 226823 - DNA, 75 bp, synthetic construct
  source 1..75: mol_type = other DNA
gagcaatacgaaatcgttaatgtcgcggagaatggacgctacgacttccagctgtatgcggtttcattcaacggt

SEQ ID NO: 226824 - DNA, 75 bp, synthetic construct
  source 1..75: mol_type = other DNA
aagagctgccgctgataccgcattgacgtcgcagattaactcactaaagacacaaacaggtaaagatataaaggc

SEQ ID NO: 226825 - DNA, 75 bp, synthetic construct
  source 1..75: mol_type = other DNA
cgacaagagtaactaatctccagtcgcaaacaacaaatgatatcaatgcagcgattacgtcagagtcaaaggcca

SEQ ID NO: 226826 - DNA, 75 bp, synthetic construct
  source 1..75: mol_type = other DNA
tatccgctgctattaatgaggaaagagaagccagagcatcaggcgatagtgcgctatcaagagaagttagtagtt

SEQ ID NO: 226827 - DNA, 75 bp, synthetic construct
  source 1..75: mol_type = other DNA
ccagactccaatgtctggctttgatttcgttgaaacgcctaaatccgtcaatatccagttaaaaaaaacacatta

SEQ ID NO: 226828 - DNA, 75 bp, synthetic construct
  source 1..75: mol_type = other DNA
ctcaaaagattcttgtcgatgatgtgtccgcaatggcatctaaggttgaagagatacgagccgagattggtgaca

SEQ ID NO: 226829 - DNA, 75 bp, synthetic construct
  source 1..75: mol_type = other DNA
cagagaatggacgttacgacttccagttgtatgcggtttcattcaacggtaaaaaaacagagattatcagtaccg

SEQ ID NO: 226830 - DNA, 75 bp, synthetic construct
  source 1..75: mol_type = other DNA
cgtagtgaagtggaaacaggtctacttctgaccccatggccgctggcaacaatggtgatggcaccgctggcaggt

SEQ ID NO: 226831 - DNA, 75 bp, synthetic construct
  source 1..75: mol_type = other DNA
gatattaaccattgtgattggtatttcgatggctgtccttgacggcgcaatcgccaacgtcgccctgccaacaat

SEQ ID NO: 226832 - DNA, 75 bp, synthetic construct
  source 1..75: mol_type = other DNA
cggctccacctctgaatttacgccgggatatgtcaagccgaagcacttagcatggctttctgaggctttcgtgta

SEQ ID NO: 226833 - DNA, 75 bp, synthetic construct
  source 1..75: mol_type = other DNA
ccagtcacccaataaccacaccattattacctccgctcctcgcgaacgtagcggtggagccagtggcatgttagg

SEQ ID NO: 226834 - DNA, 75 bp, synthetic construct
  source 1..75: mol_type = other DNA
gcttattaccgcgttgagtggttttgcccaagggcaatctctgatgttgatcggtgcggagctggcagtcatggt

SEQ ID NO: 226835 - DNA, 75 bp, synthetic construct
  source 1..75: mol_type = other DNA
aatggtacgcacgtctcgctgatgaccgcggctattctggcagtaatcgctgccggtgttagtggtttacggatc

SEQ ID NO: 226836 - DNA, 75 bp, synthetic construct
  source 1..75: mol_type = other DNA
gaagtttggcggcatggaagtccctgaagtgaagcggctcaagttgcttgaagaggagaacgcccgcctcaagaa

SEQ ID NO: 226837 - DNA, 75 bp, synthetic construct
  source 1..75: mol_type = other DNA
gaagtatggcggtatggaggtgcctgaagttaagcgcctgaagtcgcttgaggaagagaacgccagactcaagaa

SEQ ID NO: 226838 - DNA, 75 bp, synthetic construct
  source 1..75: mol_type = other DNA
actggtggggattgttctattcgtctccattttatggtttaaacaagggatggcagggtttggcgaactggtttc

SEQ ID NO: 226839 - DNA, 75 bp, synthetic construct
  source 1..75: mol_type = other DNA
gagctaaaactatatttgatttcaatatcacaaaacaatcactttccgctgaaatgactaaagaagttgcaagat

SEQ ID NO: 226840 - DNA, 75 bp, synthetic construct
  source 1..75: mol_type = other DNA
aagaggagaacgctcgtctcaagaagctactcgctgaagccatgctggataaggaggcgcttcaggtggccctgg

SEQ ID NO: 226841 - DNA, 75 bp, synthetic construct
  source 1..75: mol_type = other DNA
agatcatatgtattctccgcgaggccgaagctggcgtttctgcccgtgagctctgccgtaagcacgccatttccg

SEQ ID NO: 226842 - DNA, 75 bp, synthetic construct
  source 1..75: mol_type = other DNA
gctgatgctaaatcagtttggtgataatggtacgcacgtctcgctgatggctgcggctattctggcagtgattgc

SEQ ID NO: 226843 - DNA, 75 bp, synthetic construct
  source 1..75: mol_type = other DNA
ttagggctaggcgctccaacacgaagcggtaaaggggtaggttttgttatacctaatcttctcaattatcgtgat

SEQ ID NO: 226844 - DNA, 75 bp, synthetic construct
  source 1..75: mol_type = other DNA
gaccccggaagaccaggcggctcaggccgcagtctggcatgcggtgattttctggtcagcgctgttttaccacct

SEQ ID NO: 226845 - DNA, 75 bp, synthetic construct
  source 1..75: mol_type = other DNA
agcgcaggatctcaccgatggaccggatgaaggcgattcgtctccgggcagtattcatgaatcgccgtatctggt

SEQ ID NO: 226846 - DNA, 75 bp, synthetic construct
  source 1..75: mol_type = other DNA
atgtttaagttacggaagttttttacctctggttctgctgtggagatacccgatgacgggcggtcactgccgggg

SEQ ID NO: 226847 - DNA, 75 bp, synthetic construct
  source 1..75: mol_type = other DNA
acggcgccgcagggcacggaagcgcaacaacttgcggccctgactgccggcacgctgttaccggacggcgcaacg

SEQ ID NO: 226848 - DNA, 75 bp, synthetic construct
  source 1..75: mol_type = other DNA
gaagctgaatcttgccgactcgctacttccgcctctgattttgattttaatgacttacgccgtaaaaggatgtct

SEQ ID NO: 226849 - DNA, 75 bp, synthetic construct
  source 1..75: mol_type = other DNA
ggggttcctgctgctggcatatactggcgctcgtagaagtgaaatcgctaacctgaaggtatcggatgttcgctt

SEQ ID NO: 226850 - DNA, 75 bp, synthetic construct
  source 1..75: mol_type = other DNA
gatgattatttgctcagtattcaggtggctttttattccgccgcaaaaaaaattccaacaactgtacgtaagaga

SEQ ID NO: 226851 - DNA, 75 bp, synthetic construct
  source 1..75: mol_type = other DNA
gtagggcaaggtttatatcttcccggctcactatgttcatttctcttgtaaaatcgtccaagatggagccagccc

SEQ ID NO: 226852 - DNA, 75 bp, synthetic construct
  source 1..75: mol_type = other DNA
ttcttttgtaaaatcgtccaaaatggagccagcccaattattggacatagtgcagaaaatgaagaagttagaaca

SEQ ID NO: 226853 - DNA, 75 bp, synthetic construct
  source 1..75: mol_type = other DNA
gatgacgattcaggagtgtcttgacgcggatgatatacctgaagaagatctggtgtcttcaagaacagttaacgg

SEQ ID NO: 226854 - DNA, 75 bp, synthetic construct
  source 1..75: mol_type = other DNA
tgtgcatagcttacgtcacactttcgtaactgaaattcaggcaaagcacaccctcacacttgttcagcaaacgat

SEQ ID NO: 226855 - DNA, 75 bp, synthetic construct
  source 1..75: mol_type = other DNA
taattgtttgggggctatccgttattcagctcgcatctccaaatgaggttttaaattaccttgcatctactttaa

SEQ ID NO: 226856 - DNA, 75 bp, synthetic construct
  source 1..75: mol_type = other DNA
tgattcagcctaccttgattacggaatatccggcagaagtatccccgctggcgcggcgtaaggatgttaacccgg

SEQ ID NO: 226857 - DNA, 75 bp, synthetic construct
  source 1..75: mol_type = other DNA
tgattcagcctaccttgattacggaatatccggcagaagtatccccgctggcgcgccgtaacgatgttaacccgg

SEQ ID NO: 226858 - DNA, 75 bp, synthetic construct
  source 1..75: mol_type = other DNA
tgattcagcctaccttgattacggaatatccggcagaagtatccccgctggcgcgacgtaaagatgttaacccgg

SEQ ID NO: 226859 - DNA, 75 bp, synthetic construct
  source 1..75: mol_type = other DNA
tgattcagcctaccttgattacggaatatccggcagaagtgtccccgctggcgcgacgtaaggatgttaacccgg

SEQ ID NO: 226860 - DNA, 75 bp, synthetic construct
  source 1..75: mol_type = other DNA
tgattcagcctaccttgattacggaatatccggcagaagtctccccgctggcgcgacgtaacgatgttaacccgg

SEQ ID NO: 226861 - DNA, 75 bp, synthetic construct
  source 1..75: mol_type = other DNA
tgattcagcctaccttgattacggaatatccggcagaagtttccccgctggcgcgacgtaatgatgttaacccgg

SEQ ID NO: 226862 - DNA, 75 bp, synthetic construct
  source 1..75: mol_type = other DNA
tattcctttgaatgtgatggttgatcaaacgctgaccgttggtgcagagtggaaccgcgataagctcgatgatcc

SEQ ID NO: 226863 - DNA, 75 bp, synthetic construct
  source 1..75: mol_type = other DNA
tactgtaacaactgaaacacaatcgccagcaaatgtggcggttgttgatcaaacaaaatcattaacaggggccag

SEQ ID NO: 226864 - DNA, 75 bp, synthetic construct
  source 1..75: mol_type = other DNA
gattggtattggtaatgagcaggaggagtttgatttttacaggcaaatttatcctgtgacagggggagagcacaa

SEQ ID NO: 226865 - DNA, 75 bp, synthetic construct
  source 1..75: mol_type = other DNA
ccactggaattaacaagttcaaacttccggcaacgaagttccagttattacaaaaattactggcaaaagagatga

SEQ ID NO: 226866 - DNA, 75 bp, synthetic construct
  source 1..75: mol_type = other DNA
aaaattatcgcaacgcaacggtgctggataatgttctgacgccgttacgtgtttatgaatcgggtgcgctggaat

SEQ ID NO: 226867 - DNA, 75 bp, synthetic construct
  source 1..75: mol_type = other DNA
tccggcgggaacttcagccccagtctgaatctttcgcaggaattgggcgattatttcaaagtcaaagcaggggtt

SEQ ID NO: 226868 - DNA, 75 bp, synthetic construct
  source 1..75: mol_type = other DNA
atgattatgctgtttacaaacagccatactattcgcgacgttattctcttcccggcgatgcgcccacagaaataa

SEQ ID NO: 226869 - DNA, 75 bp, synthetic construct
  source 1..75: mol_type = other DNA
cgatattgtccccagtcagattatcagcgtgctgtccgttgccggagtgtatcaggtcgaactggtgacaccggc

SEQ ID NO: 226870 - DNA, 75 bp, synthetic construct
  source 1..75: mol_type = other DNA
aggaagacgatgaccggctccgggagcgtatcaggctggccccggagtcattcaccaatgccggaagccgtggtg

SEQ ID NO: 226871 - DNA, 75 bp, synthetic construct
  source 1..75: mol_type = other DNA
ggcagaaatgattgcgaagtatgaagcggataccggaaaaacgctgtacccggcacaggctgaacgtctgctgat

SEQ ID NO: 226872 - DNA, 75 bp, synthetic construct
  source 1..75: mol_type = other DNA
gtgccattcaggatgctcaggcgttgtccgaaggtgtggtggcctcttcccgttatccgaaacactggctgacgg

SEQ ID NO: 226873 - DNA, 75 bp, synthetic construct
  source 1..75: mol_type = other DNA
atcactgataacctcaaacaggaagagcacgccattgtccaggtggaagaaatgcaggcggtgaatgccgtgctg

SEQ ID NO: 226874 - DNA, 75 bp, synthetic construct
  source 1..75: mol_type = other DNA
cggctatgaaattacccgtacccgcgatgccgtcaccaacttcgaacactatctgcaacagcatcctgaactgcc

SEQ ID NO: 226875 - DNA, 75 bp, synthetic construct
  source 1..75: mol_type = other DNA
gaattacggtagagaaaagctggggctgggacgtattgtcacggagatctttgatgaagtggcagaagcacatct

SEQ ID NO: 226876 - DNA, 75 bp, synthetic construct
  source 1..75: mol_type = other DNA
tttgatgaagtggcagaagcacatctgattcagccaacctttattacggaatatccggcagaagtgtcaccgctg

SEQ ID NO: 226877 - DNA, 75 bp, synthetic construct
  source 1..75: mol_type = other DNA
cgcggctttatggaagtagaaaccccgatgatgcaggtaattccaggtggggcatctgctcgcccgtttattacc

SEQ ID NO: 226878 - DNA, 75 bp, synthetic construct
  source 1..75: mol_type = other DNA
ttgaacgcgatgccgataaaatcacggcagaaatgattgcgaagtatgaagcggataccggaaaaacgctgtacc

SEQ ID NO: 226879 - DNA, 75 bp, synthetic construct
  source 1..75: mol_type = other DNA
ttcccgcgcgccaatgctggattatttaggtgagctggtgggcgttcaccgcttacctgcacaaccggcaaaaac

SEQ ID NO: 226880 - DNA, 75 bp, synthetic construct
  source 1..75: mol_type = other DNA
aatggctggcagcctgcacaaattagcgcccttgttgacaggattggttattacgatatcaacgtaaccaacctg

SEQ ID NO: 226881 - DNA, 75 bp, synthetic construct
  source 1..75: mol_type = other DNA
cgctgcgggcgtggcgttttcgcacggcgcgaatgacgggcagaaaggaattggtctggtgatgctggtgctggt

SEQ ID NO: 226882 - DNA, 75 bp, synthetic construct
  source 1..75: mol_type = other DNA
tgcgtgaggcggcagagaaagcaacgtgtggcgagtggtcgctcgaatatggaaagggccgatttgatggtgatg

SEQ ID NO: 226883 - DNA, 75 bp, synthetic construct
  source 1..75: mol_type = other DNA
ttgggaagctgcgcgttgagctggaagccgcagagaagcgcaacgcaaaattacaaagcgagaatgcatacatcc

SEQ ID NO: 226884 - DNA, 75 bp, synthetic construct
  source 1..75: mol_type = other DNA
gattaagttgccggatgatggaaacctctttctttatgtcgcatgagtcgttgatcctcggcaaacgcccgtggt

SEQ ID NO: 226885 - DNA, 75 bp, synthetic construct
  source 1..75: mol_type = other DNA
tgacgttgatgtcgcttgccgggcgtaatacgtcggcgcgaaccacatcaatgctggtgattatggggctaatcg

SEQ ID NO: 226886 - DNA, 75 bp, synthetic construct
  source 1..75: mol_type = other DNA
gtgagcgaaattaattaccaggcactgcgtgaggcggcggaacgtgcaattccagcaatggaacgcctattaatg

SEQ ID NO: 226887 - DNA, 75 bp, synthetic construct
  source 1..75: mol_type = other DNA
cacatctgattcagcctaccttcattactgaatatccggcagaagtgtcaccgctggcccgccgtaatgaggtta

SEQ ID NO: 226888 - DNA, 75 bp, synthetic construct
  source 1..75: mol_type = other DNA
cacatctgattcagcctaccttcattactgaatatccggcagaagtatcgccgctggcccgccgtaatgaggtta

SEQ ID NO: 226889 - DNA, 75 bp, synthetic construct
  source 1..75: mol_type = other DNA
cacatctgattcagcctacctttattactgaatatccggcagaagtttccccgctggcccgccgtaatgaggtta

SEQ ID NO: 226890 - DNA, 75 bp, synthetic construct
  source 1..75: mol_type = other DNA
gctgcgtctgctgaccaaagcactgcgcccgctgccagacaaattccacggcttgcaagatcaggaagcgcgtta

SEQ ID NO: 226891 - DNA, 75 bp, synthetic construct
  source 1..75: mol_type = other DNA
cacatctgattcagcctaccttgattactgaatatccggcagaagtctcaccgctggcccgccgtaatgaggtta

SEQ ID NO: 226892 - DNA, 75 bp, synthetic construct
  source 1..75: mol_type = other DNA
cacatctgattcagcctaccttgattactgaatatccggcagaagtatccccgctggcccgccgtaatgaggtta

SEQ ID NO: 226893 - DNA, 75 bp, synthetic construct
  source 1..75: mol_type = other DNA
gggcgctgatcccgctgctgattatcgccgcactggcgacagtaattgcctcgcaggcggtgatttctggtgttt

SEQ ID NO: 226894 - DNA, 75 bp, synthetic construct
  source 1..75: mol_type = other DNA
aataattgcggctgttgggtttgtcgcaggtaaggcaattttctctgataatgttgttttcaggagaagaatgta

SEQ ID NO: 226895 - DNA, 75 bp, synthetic construct
  source 1..75: mol_type = other DNA
gtgagcgagattgactatcaggcgctgcgtgaagcagcagagaaagcaactaaaggatgctacatcgtagggcat

SEQ ID NO: 226896 - DNA, 75 bp, synthetic construct
  source 1..75: mol_type = other DNA
aagaagcaccgattgacgaaaagcttatggcgcttcacaagtggttttgggaacaaagtgaagccaagcgcgccg

SEQ ID NO: 226897 - DNA, 75 bp, synthetic construct
  source 1..75: mol_type = other DNA
cggatatagccgccaggggaatatctatgcgggcgatacgcagaacagttcttccagtgcagttaccgaaagcct

SEQ ID NO: 226898 - DNA, 75 bp, synthetic construct
  source 1..75: mol_type = other DNA
cgttttgcctgaaagaaagccagcggggtgttcatgtctgcaccggctgcatggcgactgttttatatggaacct

SEQ ID NO: 226899 - DNA, 75 bp, synthetic construct
  source 1..75: mol_type = other DNA
gtgacggagtttcactgtcatccggcaaatacctttgatgccatcgcgcgcgttaaaacgatgttgccgggcaat

SEQ ID NO: 226900 - DNA, 75 bp, synthetic construct
  source 1..75: mol_type = other DNA
gtggcggtgcagcgcacgttgccagcgaagcagatcaccctgaatatggctctggcggtcgattctatttcgttc

SEQ ID NO: 226901 - DNA, 75 bp, synthetic construct
  source 1..75: mol_type = other DNA
tgttgctgaactggaagaagctctacgcgataagcaggcgttacttgaagcctcagaaaagcgcaacgcaaaatt

SEQ ID NO: 226902 - DNA, 75 bp, synthetic construct
  source 1..75: mol_type = other DNA
ttccactgtttaccgctaacctcgataaactgctctccggtggctggttgcctctgagtctcgggacggtgatgt

SEQ ID NO: 226903 - DNA, 75 bp, synthetic construct
  source 1..75: mol_type = other DNA
tgcgactggcggcagaacgtgcaattccggcaatggaacgcctgttaatgttgccagttgatgatgatttgttaa

SEQ ID NO: 226904 - DNA, 75 bp, synthetic construct
  source 1..75: mol_type = other DNA
gtgagcgaaattaattaccagtcactgcgtgaggtggcggaacgtgcaattccagcaatggaacgcctgttaatg

SEQ ID NO: 226905 - DNA, 75 bp, synthetic construct
  source 1..75: mol_type = other DNA
gcctactttaatcgcaaatatgcaccgattgacgaaaagctcatggagcttcacaagtggttttgggaacaaagt

SEQ ID NO: 226906 - DNA, 75 bp, synthetic construct
  source 1..75: mol_type = other DNA
gtattacggcgatctggccattgtggtggcgaaaacgtcttatgtggcagaggacggtaccgaaaaacgttatct

SEQ ID NO: 226907 - DNA, 75 bp, synthetic construct
  source 1..75: mol_type = other DNA
tgctggggaatacggcggcagaggggattcgttgctatggtgccattaaggatgcacaggcgttgtctgaaggag

SEQ ID NO: 226908 - DNA, 75 bp, synthetic construct
  source 1..75: mol_type = other DNA
tctgcaacgcgttatccgaaacactgggaggttattggcgatccaagttgtgaatataccatgacgcagtctgcg

SEQ ID NO: 226909 - DNA, 75 bp, synthetic construct
  source 1..75: mol_type = other DNA
gaagtttttgagggggagggtaaacattggtcatttatactcccagatcagaatggaaatgtttctcgcactact

SEQ ID NO: 226910 - DNA, 75 bp, synthetic construct
  source 1..75: mol_type = other DNA
tctccagtgaagatggtacggttcgtatcccgacgagtcgggttatagcgcaacttaccgaggagcaacattggc

SEQ ID NO: 226911 - DNA, 75 bp, synthetic construct
  source 1..75: mol_type = other DNA
tgaatttaccatgacgcagtccgcaccgctgatggtgctggctgatcctgatgagttcgtgtccgttcaactggc

SEQ ID NO: 226912 - DNA, 75 bp, synthetic construct
  source 1..75: mol_type = other DNA
acggttttaagctgtttcgtgaaaaactggatacccgccgtggctcaaaatctgaactggaaaccgcgctgaaag

SEQ ID NO: 226913 - DNA, 75 bp, synthetic construct
  source 1..75: mol_type = other DNA
acgtccgggctacgtcaagcccaaacacgaatttaattaccagcaggcggttgagcgccttcctggtgaagatcc

SEQ ID NO: 226914 - DNA, 75 bp, synthetic construct
  source 1..75: mol_type = other DNA
atggttttaagctgttccgcgaaaaactggatacccgtcgcggttcaaattcacaactcgaaacggcagtgaaag

SEQ ID NO: 226915 - DNA, 75 bp, synthetic construct
  source 1..75: mol_type = other DNA
taaaaaatggtctgagcaggaccgtgatacgtttgatccgacgcatgatattgacctttactgcgatcaggccag

SEQ ID NO: 226916 - DNA, 75 bp, synthetic construct
  source 1..75: mol_type = other DNA
tcaggcaggttgaacaaaaaacagggttgaaacgctcacagatatatctatatatgaaaaaagggacatttcctc

SEQ ID NO: 226917 - DNA, 75 bp, synthetic construct
  source 1..75: mol_type = other DNA
aaggaaacggtctggcggcttgcctccggctcactccccaaagcgtggtttactgagccatggtacagggtctat

SEQ ID NO: 226918 - DNA, 75 bp, synthetic construct
  source 1..75: mol_type = other DNA
gcacagcgggcagcaaagtcacctcgaacggtgaaatggcgctcagtgcactgaatttaagcaacagcggacaat

SEQ ID NO: 226919 - DNA, 75 bp, synthetic construct
  source 1..75: mol_type = other DNA
cagcttttaggtgagttgatcaacgaggtgtttgccttgaatgttcaactacatggtcgagaaaataatcaatcg

SEQ ID NO: 226920 - DNA, 75 bp, synthetic construct
  source 1..75: mol_type = other DNA
accgggagccagattaagtccggcaatgacaccagcctgaatgcacagaacgatattctgctggctgccgccgct

SEQ ID NO: 226921 - DNA, 75 bp, synthetic construct
  source 1..75: mol_type = other DNA
ggcactgaaaggaacacaggcggttctgtctggtgtacaggccggtgttaaccacggactgcagcaacagagtgc

SEQ ID NO: 226922 - DNA, 75 bp, synthetic construct
  source 1..75: mol_type = other DNA
gggggattcaaatattacctaatatgcaagaacgagtgaatgtggaatggctattaaagaatggatatattcgtg

SEQ ID NO: 226923 - DNA, 75 bp, synthetic construct
  source 1..75: mol_type = other DNA
gtgcctatggaaggagaaaacggtcaatctggatatgagagagctcaaattgagcatggtggaaagtggtcacca

SEQ ID NO: 226924 - DNA, 75 bp, synthetic construct
  source 1..75: mol_type = other DNA
tggaaacacacaagtttatgctgatggcgtaagagctttaaatgctaataactgggctcactatccattgcctgc

SEQ ID NO: 226925 - DNA, 75 bp, synthetic construct
  source 1..75: mol_type = other DNA
gctgaagcgttcacagatatatctttatatgaaagatggctcatttccccgctcaataaaaattggccctgccag

SEQ ID NO: 226926 - DNA, 75 bp, synthetic construct
  source 1..75: mol_type = other DNA
atggctacagataaaggtaaagaaaccagaaaaatgatgctctacgtcggtggtgctgctgcagtggtggcgctt

SEQ ID NO: 226927 - DNA, 75 bp, synthetic construct
  source 1..75: mol_type = other DNA
cttgcaatttggcgctaaaactcgctaagaagggcgaaaacgtattcctgatgttccgcaatactaagcacggaa

SEQ ID NO: 226928 - DNA, 75 bp, synthetic construct
  source 1..75: mol_type = other DNA
tcccttatgaagcaatccatacaatgatgagtggtagcgggaaacatccgggagacaggttaatcacggttagta

SEQ ID NO: 226929 - DNA, 75 bp, synthetic construct
  source 1..75: mol_type = other DNA
taaaaaatggtctgagcacgatcgtgacacgttcgatcctgcgcatgatattgacctctactgcgaccaggccag

SEQ ID NO: 226930 - DNA, 75 bp, synthetic construct
  source 1..75: mol_type = other DNA
gcaggcgttgtccgaaggtgtggtggcctcttcccgttatccgaaacactggctgactgtgggcgatccggcccg

SEQ ID NO: 226931 - DNA, 75 bp, synthetic construct
  source 1..75: mol_type = other DNA
cttccgcgatgtgaatatcgcttttgctaatgaattgtcgctgatttgtgccgatcaggggattaacgtctggga

SEQ ID NO: 226932 - DNA, 75 bp, synthetic construct
  source 1..75: mol_type = other DNA
accgagaagatggcagaatggttagcagagatgcgtccagatctgactttcccgcagcaagtgggcgagcaggct

SEQ ID NO: 226933 - DNA, 75 bp, synthetic construct
  source 1..75: mol_type = other DNA
acccccagcaggcgcggcttatccgtaccgcgcgcgaagtgaacgatcacaaaccgttctgggttatcgatcagg

SEQ ID NO: 226934 - DNA, 75 bp, synthetic construct
  source 1..75: mol_type = other DNA
gacacgttcgatcctacacatgatcttgacctctactgcgaccaggccagcggtcttgtgaatattgccattatg

SEQ ID NO: 226935 - DNA, 75 bp, synthetic construct
  source 1..75: mol_type = other DNA
cttaccgccgtctgcgtatcattaccgataacctcaaacaggaagagcacgcgattgtccaggtggaagaaatgc

SEQ ID NO: 226936 - DNA, 75 bp, synthetic construct
  source 1..75: mol_type = other DNA
atctggccattgtggtggcgaaaacgtcttatgtggcagacgacggtaccgaaaaacgttatctgccggtgggca

SEQ ID NO: 226937 - DNA, 75 bp, synthetic construct
  source 1..75: mol_type = other DNA
atgtgaacggtgattccatcgataacggtactgaagggtctgcggtacgtgttggtctggggactcagttcagct

SEQ ID NO: 226938 - DNA, 75 bp, synthetic construct
  source 1..75: mol_type = other DNA
tcgttgctatggtgccattaaggatgcacaggcgttgtctgaaggagtggtggcttcttcccgttacccgaaaca

SEQ ID NO: 226939 - DNA, 75 bp, synthetic construct
  source 1..75: mol_type = other DNA
tgaattcaccatgacgcagtccgctccgctgatggtgctgccggatccggatgagtttgtggtggtacaggtgaa

SEQ ID NO: 226940 - DNA, 75 bp, synthetic construct
  source 1..75: mol_type = other DNA
atgagttttgcgaccatttctgttatcggactgggttacatcgggctgcctacagcagctgcgtttgcctcacgg

SEQ ID NO: 226941 - DNA, 75 bp, synthetic construct
  source 1..75: mol_type = other DNA
tgctcggttataccgaacaaaaagtgaaatttcgtgcgctgtttctggaactgtttttccgccgtacggtgaatt

SEQ ID NO: 226942 - DNA, 75 bp, synthetic construct
  source 1..75: mol_type = other DNA
ggtattacggcgatctggccattgtggtggcgaaaacgtcttatatagcagaagacggtatcgaaaaacgttatc

SEQ ID NO: 226943 - DNA, 75 bp, synthetic construct
  source 1..75: mol_type = other DNA
agcgcgtgctgccaggacaggtgatggttgagctgattaaaaatgatcgcgtgattggcggtatgacgccagttt

SEQ ID NO: 226944 - DNA, 75 bp, synthetic construct
  source 1..75: mol_type = other DNA
tgataattttgtcctgattgccacgaataatcaggatcgtgaagccctcgataaactcattgaacagcccattgc

SEQ ID NO: 226945 - DNA, 75 bp, synthetic construct
  source 1..75: mol_type = other DNA
tttatcgcgaaagccttaatcctgaattattcccaccatcaaccacgcttctccatgctgagtcgtttggtgcgg

SEQ ID NO: 226946 - DNA, 75 bp, synthetic construct
  source 1..75: mol_type = other DNA
cccgcctgttcattgcttgatgaactgaaaccgctttgcgtggtggacgctattctggcgaaacagaatttggga

SEQ ID NO: 226947 - DNA, 75 bp, synthetic construct
  source 1..75: mol_type = other DNA
cgccagtgagctgaaaattgcctgctttggtctggcgtttaaaccgaatattgatgacctgcgcgaaagtccggc

SEQ ID NO: 226948 - DNA, 75 bp, synthetic construct
  source 1..75: mol_type = other DNA
gctggtcgatcatatccagttcaaagccatcagcggcgacaacgttcgtcagcaatatgtcgtcgatgctaaagg

SEQ ID NO: 226949 - DNA, 75 bp, synthetic construct
  source 1..75: mol_type = other DNA
caaaaacaggtgattggtgtcgatatcaaccaacacgcggttgataccatcaatcgtggcgaaatccatatcgtc

SEQ ID NO: 226950 - DNA, 75 bp, synthetic construct
  source 1..75: mol_type = other DNA
accgagaaaatggcagaatggttagcagagatgcgcccggacttgacctttccgcagcaggtcggcgagcaggcg

SEQ ID NO: 226951 - DNA, 75 bp, synthetic construct
  source 1..75: mol_type = other DNA
cccacagcaggtgggcgagcaggctgacgtcaatattgcctactgcccggaacgcgtgttgccgggacaggtaat

SEQ ID NO: 226952 - DNA, 75 bp, synthetic construct
  source 1..75: mol_type = other DNA
gctggtcgatcacagtcagttcaaagccatcagcggcgaacatgttaaacagcagtatgtcgtagataccaaagg

SEQ ID NO: 226953 - DNA, 75 bp, synthetic construct
  source 1..75: mol_type = other DNA
tctgtgcgtccggtggtgattgagtcggtgacaaaaatcatggcgtgcgggaccacgctgatgggttacacacag

SEQ ID NO: 226954 - DNA, 75 bp, synthetic construct
  source 1..75: mol_type = other DNA
caggaagaagacgatgaaccctttgccgagaagatggcgcgactgaccgcgcaactgaaagatcagctggaagag

SEQ ID NO: 226955 - DNA, 75 bp, synthetic construct
  source 1..75: mol_type = other DNA
atataacggcgagaaactcagcttaaagagcaaagatattctcggccacgtttacgaatatttcctggggcaatt

SEQ ID NO: 226956 - DNA, 75 bp, synthetic construct
  source 1..75: mol_type = other DNA
tcgtgaccctgattgttgaatgcctacagccgtataacggccgtgtgtatgacccggcgatgggttccggcgggt

SEQ ID NO: 226957 - DNA, 75 bp, synthetic construct
  source 1..75: mol_type = other DNA
gagctctaacaccaatagtgaaggggaaattcgtcgggctattattgaggcggatctggtggaatgtatggtggc

SEQ ID NO: 226958 - DNA, 75 bp, synthetic construct
  source 1..75: mol_type = other DNA
acgctatgttggtgcagttgaaaaagacgaagatgatgaaccgtttgcagaaaaaatggtttggttaacgacatg

SEQ ID NO: 226959 - DNA, 75 bp, synthetic construct
  source 1..75: mol_type = other DNA
caacatctatgcaatatcgcgcgatgattacggttccgacgaagaatacgctcaggctatccaggacgagctgga

SEQ ID NO: 226960 - DNA, 75 bp, synthetic construct
  source 1..75: mol_type = other DNA
ccgtatatcaaaggcaccttcaaagtgccgaaagattttccggtcaacaaggtcacaacctcggaccagatgact

SEQ ID NO: 226961 - DNA, 75 bp, synthetic construct
  source 1..75: mol_type = other DNA
ccaccaagcgacagagtacctggcttgcgtgagattgtagcccaccctaactatataattctataccgcgtaaca

SEQ ID NO: 226962 - DNA, 75 bp, synthetic construct
  source 1..75: mol_type = other DNA
ggttataatagctataattgtatacgcaacattcccttagatattattaaaatcgacaaatcttacatccatgac

SEQ ID NO: 226963 - DNA, 75 bp, synthetic construct
  source 1..75: mol_type = other DNA
tctttgtttccagcgaccgttttatcgaagagcacgcgggcgagaagcagtacaacgccgccgagcagaagcgca

SEQ ID NO: 226964 - DNA, 75 bp, synthetic construct
  source 1..75: mol_type = other DNA
gaaatcgaaaaaaccaacccgaagctgaaaggtattctgaaccgtatcagccagtatcaattgggcaacgaagtg

SEQ ID NO: 226965 - DNA, 75 bp, synthetic construct
  source 1..75: mol_type = other DNA
acgttgcaggagtatccggcgctgtggcatttgctgtcggaaccgtggttgtgtgcactgattgcgttgtcgctg

SEQ ID NO: 226966 - DNA, 75 bp, synthetic construct
  source 1..75: mol_type = other DNA
gagctctaacagtaatacggaaggtgatatacgccgtcagattatcgaagctgatttggttgaatgtatggtagc

SEQ ID NO: 226967 - DNA, 75 bp, synthetic construct
  source 1..75: mol_type = other DNA
cctgggacctgttcaaccgtaatgccagttatggtgtcagtgaaaaggccgcgcagatagctgcagctaccggac

SEQ ID NO: 226968 - DNA, 75 bp, synthetic construct
  source 1..75: mol_type = other DNA
accctcgggtggatttaacggggtctgtaacccgggatgaccagcagataggtgtcaatctgtcttgggacctct

SEQ ID NO: 226969 - DNA, 75 bp, synthetic construct
  source 1..75: mol_type = other DNA
ctttcgacctggaccacaaatccggtaaccgaagccgatcttgaaaatcctttttcccggatgacagagtccaga

SEQ ID NO: 226970 - DNA, 75 bp, synthetic construct
  source 1..75: mol_type = other DNA
cgctgtcttgctggtgatacgcgatcttttgcaggcaaaaccagcctcttgcgccaacgcacaggaaaaaccggc

SEQ ID NO: 226971 - DNA, 75 bp, synthetic construct
  source 1..75: mol_type = other DNA
atccccggacttacagatatagaaaaagacggctctgtttacgtaaccggatataacggggaacgcaccaaagtt

SEQ ID NO: 226972 - DNA, 75 bp, synthetic construct
  source 1..75: mol_type = other DNA
gaagcgggcgatgtgtcaacgatggttaagtacattcttgctaataaaaacactgacccatataacaaggacgtc

SEQ ID NO: 226973 - DNA, 75 bp, synthetic construct
  source 1..75: mol_type = other DNA
aaaccgggttagtcgccattttacgcggtgtgaaaccggatgagattgtcgccatcggtgaaaaactgtacgccg

SEQ ID NO: 226974 - DNA, 75 bp, synthetic construct
  source 1..75: mol_type = other DNA
gcgttgtcgttattgctggcctttccgtcgctctcgttaagagctgctccgacgccagtagcctacagagcgata

SEQ ID NO: 226975 - DNA, 75 bp, synthetic construct
  source 1..75: mol_type = other DNA
gtaccgtgatcaccaaagacggtccgaagcttaaaaaactgcatcagacagagcggatgtgggtcgttggcaaaa

SEQ ID NO: 226976 - DNA, 75 bp, synthetic construct
  source 1..75: mol_type = other DNA
gcatgttgtttaccctcgcgctgttgttgctggatggtgtgatgtggggactgctcaactctgccgatagcgcgc

SEQ ID NO: 226977 - DNA, 75 bp, synthetic construct
  source 1..75: mol_type = other DNA
cattgaacccggcaccgggttagagcaaggcgggcagggcgtgcatatccctttacccgaaggggactggcggaa

SEQ ID NO: 226978 - DNA, 75 bp, synthetic construct
  source 1..75: mol_type = other DNA
tcagacgtcaggaacaggcttcagccagagttgtggacttttatcgtcttcagtttcaggtggcaagaaaaacac

SEQ ID NO: 226979 - DNA, 75 bp, synthetic construct
  source 1..75: mol_type = other DNA
actgttccgccccggcccgttgcaatcagggatggtggataactttatcgaccgtaaacatggtcgcgaagagat

SEQ ID NO: 226980 - DNA, 75 bp, synthetic construct
  source 1..75: mol_type = other DNA
attcgccgcagcaatatatgcgtagcgaagaggagatgtgcgagctgtttgccgacatccccgaagcccttgcca

SEQ ID NO: 226981 - DNA, 75 bp, synthetic construct
  source 1..75: mol_type = other DNA
catcggtcaggccgatatgttcggcgtgctggccgaagagccggaacaaattgaacaatcctacgccagctgcca

SEQ ID NO: 226982 - DNA, 75 bp, synthetic construct
  source 1..75: mol_type = other DNA
tcgaaggataacggcgtaccggtaggaccgggccgtggttccggtgcggggtcactggtggcctacgcgctaaaa

SEQ ID NO: 226983 - DNA, 75 bp, synthetic construct
  source 1..75: mol_type = other DNA
ggcgctggagatgatcaacaagcggcgggagaagaatggcgagccgccgctggatatcgccgcgatcccgctgga

SEQ ID NO: 226984 - DNA, 75 bp, synthetic construct
  source 1..75: mol_type = other DNA
actctcggcggcgcggatatgctgcgtcgtgcaatgggtaagaaaaagccggaagagatggccaagcagcgttct

SEQ ID NO: 226985 - DNA, 75 bp, synthetic construct
  source 1..75: mol_type = other DNA
atacgatgcgtatggtgtgcagcagttttattacccgaatgtgctgaagtatgaccctgatcagttggagcaacg

SEQ ID NO: 226986 - DNA, 75 bp, synthetic construct
  source 1..75: mol_type = other DNA
tgggagaaggtcaggaagtttctaacggtatatatcccgttattctctattataaagattttgatgagttggttt

SEQ ID NO: 226987 - DNA, 75 bp, synthetic construct
  source 1..75: mol_type = other DNA
tgcgcggtggactggccgccgcaggcacggtgctgcgagtactggcatctggtccactggcgatgctgcgcgttg

SEQ ID NO: 226988 - DNA, 75 bp, synthetic construct
  source 1..75: mol_type = other DNA
ttgaccgtcttgggccacaccgcgcggcgctgatgaactcgctgggcgatgcgttaaaagcggcagatcaacacg

SEQ ID NO: 226989 - DNA, 75 bp, synthetic construct
  source 1..75: mol_type = other DNA
ttgagcaatcctacgccagctgccagccgtggccggatcaggtggtgctggatggggagcgcgaaacgttgggtt

SEQ ID NO: 226990 - DNA, 75 bp, synthetic construct
  source 1..75: mol_type = other DNA
cggtttgcccgtcgtggcgaccaacgacgtgcgctttatcgacagcagcgactttgacgcacacgaaatccgcgt

SEQ ID NO: 226991 - DNA, 75 bp, synthetic construct
  source 1..75: mol_type = other DNA
gtcattcgcgatctggcagataaatacggcaaaacccctgcgcagattgttatccgctggcatctggatagcggc

SEQ ID NO: 226992 - DNA, 75 bp, synthetic construct
  source 1..75: mol_type = other DNA
gttaaaagtaatttaattgataaaaatataccttatttatattcggtcagaatattctctacaattagaccagtt

SEQ ID NO: 226993 - DNA, 75 bp, synthetic construct
  source 1..75: mol_type = other DNA
tattggcaactgttttcaagatgactcaggtattgcagaaataaatagcatactagatatgctaagacccgtgga

SEQ ID NO: 226994 - DNA, 75 bp, synthetic construct
  source 1..75: mol_type = other DNA
tgttatttgtcggttgtagtgtatctaaattaccgattaataaaattatcaaacctatgctgccattctatgccg

SEQ ID NO: 226995 - DNA, 75 bp, synthetic construct
  source 1..75: mol_type = other DNA
taagagcaagtctagagatggcgcatagccttgctcaaattggagtcaggtttgtaccaattccagttgaaacag

SEQ ID NO: 226996 - DNA, 75 bp, synthetic construct
  source 1..75: mol_type = other DNA
gtatcggacaaggcgataagacagcgaacctatgaagctccggatttaaagggcacgttttctactcatgctgcc

SEQ ID NO: 226997 - DNA, 75 bp, synthetic construct
  source 1..75: mol_type = other DNA
ttacgctggcgcgcagaaaaatatcggcccggctggcctgacgatcgttattgttcgcgaagatttgctgggtaa

SEQ ID NO: 226998 - DNA, 75 bp, synthetic construct
  source 1..75: mol_type = other DNA
atgaacaaagaaaacgtcattaccctggacaagccggtcaaacgtggtgagcaggttatcgaacaggtcacgctg

SEQ ID NO: 226999 - DNA, 75 bp, synthetic construct
  source 1..75: mol_type = other DNA
atgatgtacagcaaatacgatgaggcgcagttccacttgaggcttacgcacgagttgcacgccaagattaaacag

SEQ ID NO: 227000 - DNA, 75 bp, synthetic construct
  source 1..75: mol_type = other DNA
cgttgcgatatggatggctatccccagtattttcctgattgtgttaattatgggtggggctttgttgaataaatc

SEQ ID NO: 227001 - DNA, 75 bp, synthetic construct
  source 1..75: mol_type = other DNA
caccgcagattatgttgatgccggctactgggcggcaagcgccatcaaagaagcgaaaaaatactgcacgccaaa

SEQ ID NO: 227002 - DNA, 75 bp, synthetic construct
  source 1..75: mol_type = other DNA
ctggtcttcaaatggctaaaagcgaacggtggcgtggctgcaatggataatatcaatcagcaaaaagcagaactg

SEQ ID NO: 227003 - DNA, 75 bp, synthetic construct
  source 1..75: mol_type = other DNA
atcctctttaaaggaaaatactgagactgtagaaatgaacagtaaagtttgggggaggctgaaaaagataatcac

SEQ ID NO: 227004 - DNA, 75 bp, synthetic construct
  source 1..75: mol_type = other DNA
acttgaaattgatgcttcagaatgggatgaaagtaaaaagagttttttctgtagtgagtatgaaaaacaaagagc

SEQ ID NO: 227005 - DNA, 75 bp, synthetic construct
  source 1..75: mol_type = other DNA
caaggtgaaaaacatgatccgcaacccgaagctgtctaaagcaatagctgacgcaggctggagcgaacttgttcg

SEQ ID NO: 227006 - DNA, 75 bp, synthetic construct
  source 1..75: mol_type = other DNA
acgatacacaccatgaatataatattgaaacttcattagattttagttctcctttgccagagccggagcgagagc

SEQ ID NO: 227007 - DNA, 75 bp, synthetic construct
  source 1..75: mol_type = other DNA
accatagacaccatgaatataatattgaaacttcattagattttagttctcctttgccagagccggagcgagagc

SEQ ID NO: 227008 - DNA, 75 bp, synthetic construct
  source 1..75: mol_type = other DNA
accatacacagcatgaatataatattgaaacttcattagattttagttctcctttgccagagccggagcgagagc

SEQ ID NO: 227009 - DNA, 75 bp, synthetic construct
  source 1..75: mol_type = other DNA
acttggatttgaggatatcggcaatatgttgcaatcattttcgacggaaagtattgcccaggccattgatagtgg

SEQ ID NO: 227010 - DNA, 75 bp, synthetic construct
  source 1..75: mol_type = other DNA
gttaacacccaaaaacggacggttcaggaacttcaggagcagaccagcgaaattaaagagggcaatgacaagatt

SEQ ID NO: 227011 - DNA, 75 bp, synthetic construct
  source 1..75: mol_type = other DNA
ccggaaaacttgcaactaagggattggggaaactaggtgttaaggcacttgcaaagggggttttacgcgcaattc

SEQ ID NO: 227012 - DNA, 75 bp, synthetic construct
  source 1..75: mol_type = other DNA
ttaaagataaggtcagccagtttgatgaagtgattgttgtcctgggttcacgtagtagtgagagtgcctcccgtg

SEQ ID NO: 227013 - DNA, 75 bp, synthetic construct
  source 1..75: mol_type = other DNA
ttttcgctggtgtaccgaacgtatgaaaatcaatccggtgagcgactttattaaagaaaaggtcagccagtttga

SEQ ID NO: 227014 - DNA, 75 bp, synthetic construct
  source 1..75: mol_type = other DNA
gtggtgaaatctatacacctggggcaggagcacagggtggggcgcaatatggagtgaggggaccactgcctgata

SEQ ID NO: 227015 - DNA, 75 bp, synthetic construct
  source 1..75: mol_type = other DNA
gataaaaggaatgctaaaaaatacttgacggttttcttttttgggatgccggatgaaaatgataagtttctattt

SEQ ID NO: 227016 - DNA, 75 bp, synthetic construct
  source 1..75: mol_type = other DNA
cagtttcgagtggaattttgggacagaacgccgctgaaagaacagcagacgatttttggtcgtgataagcaaacc

SEQ ID NO: 227017 - DNA, 75 bp, synthetic construct
  source 1..75: mol_type = other DNA
ggaatatgttaaacccatcggcggcggttatttttttgcgctgccgggagtgaaggacgcgaatgattatctcgg

SEQ ID NO: 227018 - DNA, 75 bp, synthetic construct
  source 1..75: mol_type = other DNA
ccgtttggtttatcctcttttccacaaaacaccgtataaagtatacaaggcttttgttaaaggaattatcgacgg

SEQ ID NO: 227019 - DNA, 75 bp, synthetic construct
  source 1..75: mol_type = other DNA
acacccaggacacggtgatccatgcgctgcgcgatatcattaaacacacgccagatttactcagcgttcgctgga

SEQ ID NO: 227020 - DNA, 75 bp, synthetic construct
  source 1..75: mol_type = other DNA
atgcagtatgaagatgaaaacggcgtgaatgaaccgtcacgccgacgtttactgaaagggattggtgcgctggcg

SEQ ID NO: 227021 - DNA, 75 bp, synthetic construct
  source 1..75: mol_type = other DNA
ggaatacgttaaacctatcggcggcggctatttttttgcgctgccgggagtgaaggacgcgaacgattatctcgg

SEQ ID NO: 227022 - DNA, 75 bp, synthetic construct
  source 1..75: mol_type = other DNA
ttacgtcttatcttccagcctgcggaagagatgattaacggcggtgagatcatggttaaagaggggctttttgat

SEQ ID NO: 227023 - DNA, 75 bp, synthetic construct
  source 1..75: mol_type = other DNA
atgatcgaacactatattcgtgggtttgaggaagaactgcgcgagatccgccatcagatccatgaaaacccggag

SEQ ID NO: 227024 - DNA, 75 bp, synthetic construct
  source 1..75: mol_type = other DNA
ccaccttaaaagtgggcgacggagagaaaagtattggtctgcgagcggatatggatgcgttgccgatttatgaaa

SEQ ID NO: 227025 - DNA, 75 bp, synthetic construct
  source 1..75: mol_type = other DNA
tttggaacaggccccgatccacttttattggcaaaacctttatcttacacaaaagccttacaaatatgggataca

SEQ ID NO: 227026 - DNA, 75 bp, synthetic construct
  source 1..75: mol_type = other DNA
actcttaaagcaagagttgccttaacgttaatgtatggaactgcgaagaggtttgaagcatggcaaaactcattt

SEQ ID NO: 227027 - DNA, 75 bp, synthetic construct
  source 1..75: mol_type = other DNA
tacaacccatcctccttttaaaaaaaaatcaactaataaaaaagaagcttccagaatggttaaattatataaagc

SEQ ID NO: 227028 - DNA, 75 bp, synthetic construct
  source 1..75: mol_type = other DNA
ttgataatcagtacatcgacgtagacggcagcgaaatcaaatttgtaaaagggattttcgccatttttggccacg

SEQ ID NO: 227029 - DNA, 75 bp, synthetic construct
  source 1..75: mol_type = other DNA
ggacgatgcgaccggcgacgctgtaccgtgcgaaatccagacgcgtggccgcttcactgaactggatcccggttc

SEQ ID NO: 227030 - DNA, 75 bp, synthetic construct
  source 1..75: mol_type = other DNA
gcgcaggaagaaaaatacacagtgctgtatgccataggtgaaggtaaatgggggaatacctatgaagttgtaaag

SEQ ID NO: 227031 - DNA, 75 bp, synthetic construct
  source 1..75: mol_type = other DNA
gtaaaggtgcgctcagttctgcgcatccgctgaatgttggtgggattggtgaaaccggatcgctggcggcgaatt

SEQ ID NO: 227032 - DNA, 75 bp, synthetic construct
  source 1..75: mol_type = other DNA
acgctttgtttgccgcaggatgttcagggagaagcctgggattatccagactatttttttgcacgtcgggtctat

SEQ ID NO: 227033 - DNA, 75 bp, synthetic construct
  source 1..75: mol_type = other DNA
atgttattttgctggataacatgactaatggttgtataaataatcttcaaatggaacacggtatggacagtttct

SEQ ID NO: 227034 - DNA, 75 bp, synthetic construct
  source 1..75: mol_type = other DNA
tcgaaagaaaaccgtgagtacgcgatcaaggtcaatactcatcgtgctcgctatttaggtggtgaaatctataca

SEQ ID NO: 227035 - DNA, 75 bp, synthetic construct
  source 1..75: mol_type = other DNA
acagttaaagaaactgcgaatcagattatcaatgcaaatgccgtagaaacgggcaatagcgcgttgcagaaaatt

SEQ ID NO: 227036 - DNA, 75 bp, synthetic construct
  source 1..75: mol_type = other DNA
agagggcaatgacaagattctcagcgcccttgatcagatagccaaaaacaccgggaaaaagaagggcggcttgct

SEQ ID NO: 227037 - DNA, 75 bp, synthetic construct
  source 1..75: mol_type = other DNA
atgaaacggcttaatttaggggacgtttctcgtgtagttcaggagggcattgctcaacaggaacagcaggccaaa

SEQ ID NO: 227038 - DNA, 75 bp, synthetic construct
  source 1..75: mol_type = other DNA
gacgactgccgccaacgatttgcagcaaccaaccggtcgtatgcagatagacggacaggttattagtgaccttgg

SEQ ID NO: 227039 - DNA, 75 bp, synthetic construct
  source 1..75: mol_type = other DNA
gtttgggcttaaatcaggacaagagccatcattccagcaaaaagccgcttatacgttagccaatgttcttgatat

SEQ ID NO: 227040 - DNA, 75 bp, synthetic construct
  source 1..75: mol_type = other DNA
ctatcaataatatagtgaatccaaagcttagtaagtttaactccagagtgagaaaaaatagaaataaagctatca

SEQ ID NO: 227041 - DNA, 75 bp, synthetic construct
  source 1..75: mol_type = other DNA
atggtgatatcagcgtcgaactgcgtgatgctgatcagcaggttgtcgcagccggacaaggtcacagcggaacct

SEQ ID NO: 227042 - DNA, 75 bp, synthetic construct
  source 1..75: mol_type = other DNA
tgttgcgcaagactgtaaccacgcgtctgttgactggcaggtggtagcaaatggtgatgtcagcgttgaactgcg

SEQ ID NO: 227043 - DNA, 75 bp, synthetic construct
  source 1..75: mol_type = other DNA
tcgtgctgcgtttcgatgcggtcactcattacggcaaagtgtgggtcaataatcaggaagtgatggagcatcagg

SEQ ID NO: 227044 - DNA, 75 bp, synthetic construct
  source 1..75: mol_type = other DNA
cttgcaggtatccgggaagctgttgaagatttgaaagggggacgcgttgcaactgttgatcctgtctctcgcagt

SEQ ID NO: 227045 - DNA, 75 bp, synthetic construct
  source 1..75: mol_type = other DNA
aaaccgaagtctgcggcttttctgctgcaaaaacgctggaccggcatgaacttcggtgaaaaaccgcagcaggga

SEQ ID NO: 227046 - DNA, 75 bp, synthetic construct
  source 1..75: mol_type = other DNA
tgatgcggatcaacaggtggttgcaactggacaaggcaccagcggggactttgcaagtggtgaatccgcacctct

SEQ ID NO: 227047 - DNA, 75 bp, synthetic construct
  source 1..75: mol_type = other DNA
gcgtgcagcagcacagagtgcagcgctggcgggtcttttccagccgtacagtgtggggaaattcaacgccacggc

SEQ ID NO: 227048 - DNA, 75 bp, synthetic construct
  source 1..75: mol_type = other DNA
tgaacggttaaaaatgctggcggatgagcggctgtataaaagtaagaaaaacggcagggcacagattagctggca

SEQ ID NO: 227049 - DNA, 75 bp, synthetic construct
  source 1..75: mol_type = other DNA
ccgactcggtttcaccctcttatttgtacgatgtcggtccttatctgatttccagtgacgaatgtattcaggtaa

SEQ ID NO: 227050 - DNA, 75 bp, synthetic construct
  source 1..75: mol_type = other DNA
gtttcaacgagcagaccgcagcgaaagcgggtattgcagcgagtgatggcgatgtgtcctacaacatgggcgtta

SEQ ID NO: 227051 - DNA, 75 bp, synthetic construct
  source 1..75: mol_type = other DNA
ctgtcagaaataatactaatgctatcgccagccactcccaacagttgcaggagcacaaagcacgtttgaacatac

SEQ ID NO: 227052 - DNA, 75 bp, synthetic construct
  source 1..75: mol_type = other DNA
tggtagcgttgaccgccgggttactaaaaatacacaggctattcagtccaatactcgccagttgcaggaacataa

SEQ ID NO: 227053 - DNA, 75 bp, synthetic construct
  source 1..75: mol_type = other DNA
gcatcggggtggaaggtgccaccaccgacggacgcgaaatccagcgtgaatggtttactgatctgctgacgcccg

SEQ ID NO: 227054 - DNA, 75 bp, synthetic construct
  source 1..75: mol_type = other DNA
tacattgcccaacacgacaatgaacttaactttatctctatgctgccgctggcgggctatgacggctctttgcag

SEQ ID NO: 227055 - DNA, 75 bp, synthetic construct
  source 1..75: mol_type = other DNA
gaaccggcggatcaacgtaatcgccgcattccgttggtgcgctttgaaagccgcttgtacaaagatatttatcag

SEQ ID NO: 227056 - DNA, 75 bp, synthetic construct
  source 1..75: mol_type = other DNA
cgagctggacgtagtgcctggcgacctgaatcgttttacgttgaccggatgcctgccacaacgttcagaaccgct

SEQ ID NO: 227057 - DNA, 75 bp, synthetic construct
  source 1..75: mol_type = other DNA
gttgccgatcgtcctgatgcagaaatgctgcaaaccatgctgctgcgctcgatgaaacaggcgatttacgatccg

SEQ ID NO: 227058 - DNA, 75 bp, synthetic construct
  source 1..75: mol_type = other DNA
gggatttcatttgagagcgaagaagcgaagttcattttcaacgctgaacgccgtattgaacgtatcgaacagact

SEQ ID NO: 227059 - DNA, 75 bp, synthetic construct
  source 1..75: mol_type = other DNA
gaaaaccgtggtcacttcggtctggcattgcagtcctatgcgcactttacttcgccgattcgtcgttatcctgac

SEQ ID NO: 227060 - DNA, 75 bp, synthetic construct
  source 1..75: mol_type = other DNA
gattgaccagctgtatagcgttcagtgttcaggccgcgaatgttgatgagtacgttactcaactccccgctggtg

SEQ ID NO: 227061 - DNA, 75 bp, synthetic construct
  source 1..75: mol_type = other DNA
cacgttaattggtgggcaactgctggcgttactggttgtggttgttctgcaacagacgcttgatgacaccacgtt

SEQ ID NO: 227062 - DNA, 75 bp, synthetic construct
  source 1..75: mol_type = other DNA
agtgaagttgccgttgaagggcgcaaaggtttttacgcatcatttcagtatgtgacgttgatcggcggacaactg

SEQ ID NO: 227063 - DNA, 75 bp, synthetic construct
  source 1..75: mol_type = other DNA
gtggttctgccgaagcgcaatattgcgagctggatgtggtgccaggcgacctgaaccgctttacgctgaccggat

SEQ ID NO: 227064 - DNA, 75 bp, synthetic construct
  source 1..75: mol_type = other DNA
tggccttggaacgacatgacacaatgctttagcgctccgccagccgccgctatcgttgaccgcaattgcttctct

SEQ ID NO: 227065 - DNA, 75 bp, synthetic construct
  source 1..75: mol_type = other DNA
ctccatgctgccgctggcgggctatgacggctctttgcagtaccgtgcaggtctgcatcaggcgggcgtggatgg

SEQ ID NO: 227066 - DNA, 75 bp, synthetic construct
  source 1..75: mol_type = other DNA
gagcttgttcctgcggtagaagaagagccgctggttgaagaaattgcccaggagcaggaaaaaccaaccaaagaa

SEQ ID NO: 227067 - DNA, 75 bp, synthetic construct
  source 1..75: mol_type = other DNA
gctttttgcatcagccagctttgacaacagcgggcaaaaaagcacgggagtagggcaaattaacggcgggctgac

SEQ ID NO: 227068 - DNA, 75 bp, synthetic construct
  source 1..75: mol_type = other DNA
gcgagcgcctacgggcagtggtcgccggaccgcctctacggcagcgaacgtatgaccatcggcggcgaaagctcg

SEQ ID NO: 227069 - DNA, 75 bp, synthetic construct
  source 1..75: mol_type = other DNA
ccgccggtgtcagtctgccgtatggctataccctggtggattacacgtattcatggagtgactacctcagcacca

SEQ ID NO: 227070 - DNA, 75 bp, synthetic construct
  source 1..75: mol_type = other DNA
ttcattgatataaaatttaattcagggattgatttgttttcaggggagtcttttagaatcgtaataacgctaaaa

SEQ ID NO: 227071 - DNA, 75 bp, synthetic construct
  source 1..75: mol_type = other DNA
gtgccaaagctaatatttctggagctgggtttaatgaactggataccacactaccacgaacaggaagtgtttctt

SEQ ID NO: 227072 - DNA, 75 bp, synthetic construct
  source 1..75: mol_type = other DNA
cgtaatcttaccccacaatttttgtatcactacccttcctcatgtattgtttcatttgaacctgatacgacctct

SEQ ID NO: 227073 - DNA, 75 bp, synthetic construct
  source 1..75: mol_type = other DNA
cgctggctgccgaagcggcagaagaggcggtgatggtggttcctccggcagaagaagagcagccggtggaagaaa

SEQ ID NO: 227074 - DNA, 75 bp, synthetic construct
  source 1..75: mol_type = other DNA
gaacaggttgttgaaagtgaaaaagcgcaacctgaagcggaagttgttgcacagccggaactggtcgtagaagaa

SEQ ID NO: 227075 - DNA, 75 bp, synthetic construct
  source 1..75: mol_type = other DNA
agcagcttcgtgatgccgaggcgctctatggcctgctgaaagaagagatgggcgagattctggcgaaagtcgatg

SEQ ID NO: 227076 - DNA, 75 bp, synthetic construct
  source 1..75: mol_type = other DNA
agcctcgggggtgagagttcagtgcgtggctttaaggagcagtatatctccggtaataacggcggttatctgcga

SEQ ID NO: 227077 - DNA, 75 bp, synthetic construct
  source 1..75: mol_type = other DNA
ggatgatgttctgcttcagggcagcagccgtaaactcacttcattttctgtcgggctgaatcacacccacaagtt

SEQ ID NO: 227078 - DNA, 75 bp, synthetic construct
  source 1..75: mol_type = other DNA
ccggacgcttgcagaacaaatcgcacctgatggaagagctgaagaaaatcgtccgcgtgatgaagaaactcgacg

SEQ ID NO: 227079 - DNA, 75 bp, synthetic construct
  source 1..75: mol_type = other DNA
gcggcgtcatgtccgctttctacccgcacgaatcagaattatcacgccgagttaaacaattaatcatagcagcaa

SEQ ID NO: 227080 - DNA, 75 bp, synthetic construct
  source 1..75: mol_type = other DNA
tgggaagcgcacaggacacgctcaacgtaaccgtaacggagtttaacggtcgctatgatggcaaggtcattgtca

SEQ ID NO: 227081 - DNA, 75 bp, synthetic construct
  source 1..75: mol_type = other DNA
gtcgctgttcctgactatctggcggggaatggtgtggtttatcaaaccagtgatgtgaagtatgtgattgccaac

SEQ ID NO: 227082 - DNA, 75 bp, synthetic construct
  source 1..75: mol_type = other DNA
taccgagaaaaaattgcaggaagtggtgagttttgtccatcaacatcgccgcaaacttcacatcgcgattaacac

SEQ ID NO: 227083 - DNA, 75 bp, synthetic construct
  source 1..75: mol_type = other DNA
gaatacgccgccgagcgttatccgcatattgagcgccacgtatcggtgcaggcttcggcgaccaatgaagaggcg

SEQ ID NO: 227084 - DNA, 75 bp, synthetic construct
  source 1..75: mol_type = other DNA
gtgaaatcagtgcgctgattgttgaagaagggggcaagatccagcagttggctgaagtcgaagtggcttttactg

SEQ ID NO: 227085 - DNA, 75 bp, synthetic construct
  source 1..75: mol_type = other DNA
atcagcagccgcaacaaccggttgcgccacagccgcaatatcagcagccgcaacaaccagttgcgccgcagccgc

SEQ ID NO: 227086 - DNA, 75 bp, synthetic construct
  source 1..75: mol_type = other DNA
cagtcctatgcccagctggaagatatctacggtgagaaagcggctgcctcgctgtttgacgtcatgaacacccgt

SEQ ID NO: 227087 - DNA, 75 bp, synthetic construct
  source 1..75: mol_type = other DNA
atggccagcctcttcgaaccggaggttgcctccggagaagatgtgactcaggctgaacagccacaacagccacaa

SEQ ID NO: 227088 - DNA, 75 bp, synthetic construct
  source 1..75: mol_type = other DNA
cattaaccatcatcaatgagcaatttagctttcaacttccggatgatgagattggttttattgcattgcatattt

SEQ ID NO: 227089 - DNA, 75 bp, synthetic construct
  source 1..75: mol_type = other DNA
atgtcagaaatgaacaaaaaaaacaaactctataaattgattgaacatgtagatattgagtatgtgtttgttgcc

SEQ ID NO: 227090 - DNA, 75 bp, synthetic construct
  source 1..75: mol_type = other DNA
aggacatcctgttacagcgcgcaattcatgaaattgaacggtatctgtatgcctggatttgcccctatatttcca

SEQ ID NO: 227091 - DNA, 75 bp, synthetic construct
  source 1..75: mol_type = other DNA
aactttgtaccgcaaagcgcgtggatggagacgctcgggtcgatgtccgaaggcacgcaaaccactcttggcgca

SEQ ID NO: 227092 - DNA, 75 bp, synthetic construct
  source 1..75: mol_type = other DNA
ctgtcatatgcggtcgctaatgctatatttggtggttcggcggagtacgtagcgttgtcgctgaaatcaatagga

SEQ ID NO: 227093 - DNA, 75 bp, synthetic construct
  source 1..75: mol_type = other DNA
atgcacgcaaacgtagcaagcggcattatgacagcagcactgtttgtatttatgctcatccagccgctcattggg

SEQ ID NO: 227094 - DNA, 75 bp, synthetic construct
  source 1..75: mol_type = other DNA
tttaccgctgcgggctccctttgtttctataccttcaccacttatatgcagaagtatctggtaaatactgcggga

SEQ ID NO: 227095 - DNA, 75 bp, synthetic construct
  source 1..75: mol_type = other DNA
cgcccaataggcggctggttatttggtcgaattgccgataagcatggccgcaagaaatcgatgctgttatcagta

SEQ ID NO: 227096 - DNA, 75 bp, synthetic construct
  source 1..75: mol_type = other DNA
tgtttttgcagcaggattcttgatgcgcccaataggcggctggttatttggtcgaattgccgataagcatggccg

SEQ ID NO: 227097 - DNA, 75 bp, synthetic construct
  source 1..75: mol_type = other DNA
gaagtatctggtgaataccgcaggaatgcacgccaatgtagcgagtggcattatgaccgcggcactgtttgtatt

SEQ ID NO: 227098 - DNA, 75 bp, synthetic construct
  source 1..75: mol_type = other DNA
cgatttaagcacctgtgcccagggtaaggttagcgtggccttatatcgtcttgatgaactggaaggccagccggt

SEQ ID NO: 227099 - DNA, 75 bp, synthetic construct
  source 1..75: mol_type = other DNA
atcaaccgattaccgggatacttatgacgccagcctgctgcaaggcgttccacgcagtttgaatcgcgatccgct

SEQ ID NO: 227100 - DNA, 75 bp, synthetic construct
  source 1..75: mol_type = other DNA
cacccatcaaccagattggggttcgatccaaattcagtatcgtggacgccaaattgacagagaaaaactgctgcg

SEQ ID NO: 227101 - DNA, 75 bp, synthetic construct
  source 1..75: mol_type = other DNA
gaaatcattgcaacagcactggcaaaccgagcggcgctatctggggctgctctcgggcgaagacggcgacaaaat

SEQ ID NO: 227102 - DNA, 75 bp, synthetic construct
  source 1..75: mol_type = other DNA
cgcaggctgaaatttcgggcttttattatgatggaccggggattggcgtcgaacgtgcgaccgggaaaatcagca

SEQ ID NO: 227103 - DNA, 75 bp, synthetic construct
  source 1..75: mol_type = other DNA
tgaagggcggcgtttcgagaagaaagcccagagcatcaataaatgcatcgacattctcaatgcgctcaccagttc

SEQ ID NO: 227104 - DNA, 75 bp, synthetic construct
  source 1..75: mol_type = other DNA
tggatgtgttgatctactcggcggcgatcctgctgctggtgatcactctgtggctgtgtaattcgaaacggctga

SEQ ID NO: 227105 - DNA, 75 bp, synthetic construct
  source 1..75: mol_type = other DNA
gcttattacgcggctattcgtgatgcattgaatggcgacggcgaaaatccggttccggcaagccaggccattcag

SEQ ID NO: 227106 - DNA, 75 bp, synthetic construct
  source 1..75: mol_type = other DNA
aattatccggcttactatgcggcgattcgtgatgcgttaaatggcgatggtgaaaatccggttccggcaagccag

SEQ ID NO: 227107 - DNA, 75 bp, synthetic construct
  source 1..75: mol_type = other DNA
attaatcacgcagaaaattaacgaactggctcatgctgcaatgaccaatcaggactacccaacatttaatttcct

SEQ ID NO: 227108 - DNA, 75 bp, synthetic construct
  source 1..75: mol_type = other DNA
atgacgcatatgcagcgtctgtttgactatctgaccgataccggaaacttaccgcgtattaataccgttgaatcc

SEQ ID NO: 227109 - DNA, 75 bp, synthetic construct
  source 1..75: mol_type = other DNA
actttgtctatattgggatcaccgccattgtgcgcttgatcatcgtcgatcataaatcgccactggatgtgttga

SEQ ID NO: 227110 - DNA, 75 bp, synthetic construct
  source 1..75: mol_type = other DNA
ggcgatggggatgatgtttctgccaggagactggcgaactacgccggaaaaagacatgaaagatctgaaatcgtt

SEQ ID NO: 227111 - DNA, 75 bp, synthetic construct
  source 1..75: mol_type = other DNA
aaaaagagaacgggagagggccggatatcagtaccggaaccggaaaaacgcgcatctggaatccctgtatcgccg

SEQ ID NO: 227112 - DNA, 75 bp, synthetic construct
  source 1..75: mol_type = other DNA
acacatggtcgctttccgttgaagagcagttctacattgtatggcctttcatcgttttcatgctcgttcggaact

SEQ ID NO: 227113 - DNA, 75 bp, synthetic construct
  source 1..75: mol_type = other DNA
cagttacggcccggagcgcagtcgaccgattatttccacgccatcttgtcctatccacagcggcgagtcatttta

SEQ ID NO: 227114 - DNA, 75 bp, synthetic construct
  source 1..75: mol_type = other DNA
atttttcacctcaatcaaaaagccagtttcgatcaaatcctctatttgcttattgctaaaggccagaaatgcatt

SEQ ID NO: 227115 - DNA, 75 bp, synthetic construct
  source 1..75: mol_type = other DNA
aatttaagtaccagtatcggtgtagcacattcaaatgaatgtcctaccgtcgaacgcattgaaaatgctggcgga

SEQ ID NO: 227116 - DNA, 75 bp, synthetic construct
  source 1..75: mol_type = other DNA
atcttcactccgtacttcaccaccaaagccgaaggcaccggactggggctggcggtcgtgcataatattgttgaa

SEQ ID NO: 227117 - DNA, 75 bp, synthetic construct
  source 1..75: mol_type = other DNA
taccacccgcaatgccatgccagacggttttactccagtagactttgatatcacttatgactgtggtgatacttc

SEQ ID NO: 227118 - DNA, 75 bp, synthetic construct
  source 1..75: mol_type = other DNA
actgtaattggcattggcggcagcgaaaagcaggccagagaaggtgaatttgatgctgtgatgctggcaccgaag

SEQ ID NO: 227119 - DNA, 75 bp, synthetic construct
  source 1..75: mol_type = other DNA
acagaacgccgagaatgcgcgccaggccagccatctggcattaagtgcttctgaaacggcgcaacggggcggcaa

SEQ ID NO: 227120 - DNA, 75 bp, synthetic construct
  source 1..75: mol_type = other DNA
gctggttggtcgtcttcccggttcgctggctcattgtaatatccttgcgaatactctgtttggagcgatttcagg

SEQ ID NO: 227121 - DNA, 75 bp, synthetic construct
  source 1..75: mol_type = other DNA
acgcattgatggggatttctgataacccactgatcatattgctgctgattaatatcgtcttattaattgtcggca

SEQ ID NO: 227122 - DNA, 75 bp, synthetic construct
  source 1..75: mol_type = other DNA
caacgctaagtagcactaactggcaatacgcctgtacctgctctgcgggtaaggcagttaaacttgtctatatgg

SEQ ID NO: 227123 - DNA, 75 bp, synthetic construct
  source 1..75: mol_type = other DNA
ctgcaatatggtcgaggtgaggctatgccgaaattatcgacgcaaacaatgaggattacatttcctatccctttc

SEQ ID NO: 227124 - DNA, 75 bp, synthetic construct
  source 1..75: mol_type = other DNA
atggtatgcacaatatgccgcgctgtaacggaaaagctgtgccacaggcagaagcacaacaggctatctttatcg

SEQ ID NO: 227125 - DNA, 75 bp, synthetic construct
  source 1..75: mol_type = other DNA
acgccttagccaaatggttaagcgcgatcctccccgtggtcattgttgggctggtgggattgtttgcagtgacgg

SEQ ID NO: 227126 - DNA, 75 bp, synthetic construct
  source 1..75: mol_type = other DNA
agctcagtttattgagaccttactcgaacgtgaactttctgaacgcggcgttctcgatgtaaagacttcacattc

SEQ ID NO: 227127 - DNA, 75 bp, synthetic construct
  source 1..75: mol_type = other DNA
ggtgattcggcgctggcgctgtacgatcagctttccaccatcgccccgacattaatcatcaattacgacgacaaa

SEQ ID NO: 227128 - DNA, 75 bp, synthetic construct
  source 1..75: mol_type = other DNA
gccggtcactgccattgtctataccgccgctgcacacagtgccaatctctggacgccggaatcagcacaagggca

SEQ ID NO: 227129 - DNA, 75 bp, synthetic construct
  source 1..75: mol_type = other DNA
gtaacggggacatgaagacagcactgaccggaggtctgcagcaccgcattattcacaattatctggatgatgttc

SEQ ID NO: 227130 - DNA, 75 bp, synthetic construct
  source 1..75: mol_type = other DNA
agaactcttcagagtaaactgttctcccgttgttaatctcttcgaaaaaaaacagaccccttacgattatcggac

SEQ ID NO: 227131 - DNA, 75 bp, synthetic construct
  source 1..75: mol_type = other DNA
cagaaaaataatgatgtattatatggtatcaaaactgatatatccggtgtgggattttatgagggtgaagtaaca

SEQ ID NO: 227132 - DNA, 75 bp, synthetic construct
  source 1..75: mol_type = other DNA
gggggcggaaggtatggtgcgtggtatcgccggagtcgataaaacggttcaaaatgcggataagagcactgaccg

SEQ ID NO: 227133 - DNA, 75 bp, synthetic construct
  source 1..75: mol_type = other DNA
atgcagcaccggcaggataacttactggcgagcagaacgtcgttgcctggtatggtttccggtcagtgcgcattt

SEQ ID NO: 227134 - DNA, 75 bp, synthetic construct
  source 1..75: mol_type = other DNA
tatcgcccggtgaccgtgagggatggtcggtggtgacactgacggcattgccggaatggcccgtcacagggagcg

SEQ ID NO: 227135 - DNA, 75 bp, synthetic construct
  source 1..75: mol_type = other DNA
tcttttgcattcttaagctcaagaattcatcagagattagatgaagatttacctgagttaatggaagcattgctt

SEQ ID NO: 227136 - DNA, 75 bp, synthetic construct
  source 1..75: mol_type = other DNA
agaaggaacttctttttctaaaaagacatggggtcgaattttccagaagatatcccaagatagcccgccgccttg

SEQ ID NO: 227137 - DNA, 75 bp, synthetic construct
  source 1..75: mol_type = other DNA
caataatcccagcagtggttaatgaagctcaaatttactatgataacgagtcttccttatggaaaattgagttaa

SEQ ID NO: 227138 - DNA, 75 bp, synthetic construct
  source 1..75: mol_type = other DNA
atgaataaactattattttactaccagaaagaactggcttttcttaaaaagcaaggaactgagtttgccagaaaa

SEQ ID NO: 227139 - DNA, 75 bp, synthetic construct
  source 1..75: mol_type = other DNA
gaattggagaattatctctcatttatctcttaactttatcttgcttggtggtaccgatggagcaatgaaactgag

SEQ ID NO: 227140 - DNA, 75 bp, synthetic construct
  source 1..75: mol_type = other DNA
ttcatttgaaccagataagaattccagtggaataacatccatctataatgttccttctggcactttgatatattc

SEQ ID NO: 227141 - DNA, 75 bp, synthetic construct
  source 1..75: mol_type = other DNA
gtcggtggtgacactgacggcattgccggaatggcctgtcacagggagcgtgggcatcgacaacagcgggcagaa

SEQ ID NO: 227142 - DNA, 75 bp, synthetic construct
  source 1..75: mol_type = other DNA
gccgccagccagtttctttgacgaactggacccgatcctcaatcgccatttgccttccccgctattcactgacac

SEQ ID NO: 227143 - DNA, 75 bp, synthetic construct
  source 1..75: mol_type = other DNA
aaaatccgtctctggatcacctgccggtggtgctcgactggtttaacggccgccgcacgccaaacgcgaaccaac

SEQ ID NO: 227144 - DNA, 75 bp, synthetic construct
  source 1..75: mol_type = other DNA
gcctgaaaggggtgattaccgatctgaacctcgctaccgacgctccgctgctgttcggcggtttgattgctgcca

SEQ ID NO: 227145 - DNA, 75 bp, synthetic construct
  source 1..75: mol_type = other DNA
tactagcgttacctgttgtaattggctcatgtttaattattgttgttgataagggtgttgtttctaaattcctat

SEQ ID NO: 227146 - DNA, 75 bp, synthetic construct
  source 1..75: mol_type = other DNA
cgatgcaataaatgaagcaacaattatttctcgtctggggcatcgtaccgcattaatgagccgcattggtaaaga

SEQ ID NO: 227147 - DNA, 75 bp, synthetic construct
  source 1..75: mol_type = other DNA
cctaacgcactggtaaaagttatcggtacttccacctgcgacattctgattgccgacaaacagagcgttggcgag

SEQ ID NO: 227148 - DNA, 75 bp, synthetic construct
  source 1..75: mol_type = other DNA
tattccagcgaatggttctgggcaaaaatcctgcatgtgactcgccaggacaccgccgtggcgcaatctgccgca

SEQ ID NO: 227149 - DNA, 75 bp, synthetic construct
  source 1..75: mol_type = other DNA
ctgttcggcggtttaattgccgccaccgcctttggcgcacgcgcaattatggagtgcttcaccgatcaggggatc

SEQ ID NO: 227150 - DNA, 75 bp, synthetic construct
  source 1..75: mol_type = other DNA
tgtttccggttcgttcaccgccggactgcctctggtttacccggactggcttgcccctgaccatctcacggttta

SEQ ID NO: 227151 - DNA, 75 bp, synthetic construct
  source 1..75: mol_type = other DNA
tgcggcgatttttgctgccgtcgccgcgaaagtgcacgcagacatcccatcagcccagcaaaaaatggccagtgc

SEQ ID NO: 227152 - DNA, 75 bp, synthetic construct
  source 1..75: mol_type = other DNA
gccgtcaataacgtgatggcgctgggcggcatcgcgcggaaaaaccaggtcattatgcaggcctgctgcgacgtg

SEQ ID NO: 227153 - DNA, 75 bp, synthetic construct
  source 1..75: mol_type = other DNA
cgccgcacaccgaacgctaaccaacgcctgaaaggggtgattaccgatctgaacctcgctaccgacgctccgctg

SEQ ID NO: 227154 - DNA, 75 bp, synthetic construct
  source 1..75: mol_type = other DNA
gagataccggcgacaccggcggaaatgaaacgcgcccccgcaacattgcatttaactacattgtgagggctgcat

SEQ ID NO: 227155 - DNA, 75 bp, synthetic construct
  source 1..75: mol_type = other DNA
cagttttgatgcatccagggttgtaccaacagcatcagagaatcgccctcgaaacattgcatttaactatatcgt

SEQ ID NO: 227156 - DNA, 75 bp, synthetic construct
  source 1..75: mol_type = other DNA
tcagcagataactccataacgggtactcaaaggacagcggaggataattttaccggggcatggatatcaatgcgc

SEQ ID NO: 227157 - DNA, 75 bp, synthetic construct
  source 1..75: mol_type = other DNA
ccaattggagcaggcgcaggggctggttttagggttcgaccaaggaatattgcatttaactatattgtgagggct

SEQ ID NO: 227158 - DNA, 75 bp, synthetic construct
  source 1..75: mol_type = other DNA
ggtttgggagaaggctcagcattacctgttggggtgcctgttccgtggccttcagccacaccgccaacaggctgg

SEQ ID NO: 227159 - DNA, 75 bp, synthetic construct
  source 1..75: mol_type = other DNA
cgggatttacatcatcatatggcgggagtgaaacccgtccacgaaatattgcatttaactttatcgtgagggctg

SEQ ID NO: 227160 - DNA, 75 bp, synthetic construct
  source 1..75: mol_type = other DNA
atctggcaaaggcttacccaacattaaaattaccagatttacgcggtgaatttattcgtggctgggatgatgggc

SEQ ID NO: 227161 - DNA, 75 bp, synthetic construct
  source 1..75: mol_type = other DNA
tcatcggagatgcttcatctgattcaattaaaggtggttatgcaaagcgagtaacattcgatgcttccagagttg

SEQ ID NO: 227162 - DNA, 75 bp, synthetic construct
  source 1..75: mol_type = other DNA
ttgggggaaggctcggcgctacccgttggtgtgcctgttccatggcccaccgccacaccgccagcaggctggtta

SEQ ID NO: 227163 - DNA, 75 bp, synthetic construct
  source 1..75: mol_type = other DNA
gctttttatgatgcaggaacacgatctgcgagaatgccgaataacacaactgatataggcaaaaccgatgacctt

SEQ ID NO: 227164 - DNA, 75 bp, synthetic construct
  source 1..75: mol_type = other DNA
cattacccgttggtgtgcctgtcccgtggccttccgccactccgccaacaggctggctaaaatgcaatggtgcgg

SEQ ID NO: 227165 - DNA, 75 bp, synthetic construct
  source 1..75: mol_type = other DNA
tggcgcttataactggacattcgacgcatctcgctcagttcgcacagcatctgaaacccgctcccgtaacatcgc

SEQ ID NO: 227166 - DNA, 75 bp, synthetic construct
  source 1..75: mol_type = other DNA
ggcacacctgccaccgatctggatgatgactactttgatatgttgcaggaagaactctgcagcgtggtggaggca

SEQ ID NO: 227167 - DNA, 75 bp, synthetic construct
  source 1..75: mol_type = other DNA
gagccggataaaattgaggcgggtgtgaagattctggcggaagagatagaaagagcctgggctgaaagccattaa

SEQ ID NO: 227168 - DNA, 75 bp, synthetic construct
  source 1..75: mol_type = other DNA
ctaccagcgtgttcaggaaactatcgccatcattcgccgctatttaccggaagatcgctgcctgattcataaacc

SEQ ID NO: 227169 - DNA, 75 bp, synthetic construct
  source 1..75: mol_type = other DNA
atcaccaatatgaacggcattatcagcctggcacctggcggtattggtccggcgatgatgtgtgaaatgattaag

SEQ ID NO: 227170 - DNA, 75 bp, synthetic construct
  source 1..75: mol_type = other DNA
gctcaaccaactcagggaatgcaaaatgcgatgggcgaagcgtttgctcagtacgccctcagtagtgaaaaactt

SEQ ID NO: 227171 - DNA, 75 bp, synthetic construct
  source 1..75: mol_type = other DNA
cgcaaacaccatcccgtcctgccagtgagcaaccaccggcacagccacgactgcgaattgctgaacaagatccaa

SEQ ID NO: 227172 - DNA, 75 bp, synthetic construct
  source 1..75: mol_type = other DNA
atcttcacagggggatgcaataagaaatattgaggggttcgccgatggcgggattggcatgtcttttgatgcaat

SEQ ID NO: 227173 - DNA, 75 bp, synthetic construct
  source 1..75: mol_type = other DNA
gcggatcctgattttctacgtaggcgcgattttcgttatcgtcaccatcttcccgtggaatgaaattggcagcaa

SEQ ID NO: 227174 - DNA, 75 bp, synthetic construct
  source 1..75: mol_type = other DNA
ccttgatgcttcaaaaattgttccaactgcaaacgaaaaccgcccacgcaacattgcgtttaattacatcgtaag

SEQ ID NO: 227175 - DNA, 75 bp, synthetic construct
  source 1..75: mol_type = other DNA
tgggagaaggctctgcattacctgttggtgtccctgttccgtggccttcagccactccgccaacaggctggctga

SEQ ID NO: 227176 - DNA, 75 bp, synthetic construct
  source 1..75: mol_type = other DNA
cgtttttctacttatttaatctgtttgccggacgccgtgccgatggtcgggtcaaaaaagtgctgttcccgctgg

SEQ ID NO: 227177 - DNA, 75 bp, synthetic construct
  source 1..75: mol_type = other DNA
tgtaacagcggcatgtacagttgcggacgtatgctctacgcactggcgaaaaaccgtcagttaccggcggcgatg

SEQ ID NO: 227178 - DNA, 75 bp, synthetic construct
  source 1..75: mol_type = other DNA
tttgatcggcatgtactttaatgaagatacgcgtatgtcgctgtttgtcggcatcatctttatgctggcggtgac

SEQ ID NO: 227179 - DNA, 75 bp, synthetic construct
  source 1..75: mol_type = other DNA
cctgttccgtggccttctgcaacaccgcctactggctggctgaaatgtaacggtgcggctttttctgctgaagaa

SEQ ID NO: 227180 - DNA, 75 bp, synthetic construct
  source 1..75: mol_type = other DNA
caaagacgagacaattgaacaatatgctgcaagggtttttgacaattggcgtttaggagatgccaaacgcaatga

SEQ ID NO: 227181 - DNA, 75 bp, synthetic construct
  source 1..75: mol_type = other DNA
ggtgtgcttccagacctgcgcggtgagtttatccgtggatgggatgatggtcgcaatgtagattcggggcgacaa

SEQ ID NO: 227182 - DNA, 75 bp, synthetic construct
  source 1..75: mol_type = other DNA
tggtatggacagctgcctgtcgaagccggtaacgctggatgtgataaaacagacgctaacggtatatgccgagag

SEQ ID NO: 227183 - DNA, 75 bp, synthetic construct
  source 1..75: mol_type = other DNA
agctctcgaaaaccttggtttgggagaaggctctgcattacccgttggtgtccctgttccatggccttccgccac

SEQ ID NO: 227184 - DNA, 75 bp, synthetic construct
  source 1..75: mol_type = other DNA
gaccagcaacaataccaatctgcaaatcagcttcgtccattcgcgctatcgtaatgaaaacgtggccatttgtgt

SEQ ID NO: 227185 - DNA, 75 bp, synthetic construct
  source 1..75: mol_type = other DNA
gcgtaaaggtgaagtacgggtgaataaaaaacgtattaagcctgaatataaactcgaagctggcgatgaagtgcg

SEQ ID NO: 227186 - DNA, 75 bp, synthetic construct
  source 1..75: mol_type = other DNA
atgggggttaccattcttgatgaaaatggtcataccctgatttcgcttaccggaccggaaagcaagattaagagc

SEQ ID NO: 227187 - DNA, 75 bp, synthetic construct
  source 1..75: mol_type = other DNA
gggatgacgggcgcggggttgactcagggcgtacgatactgtcatttcaggaggggactatcgtttccggctttg

SEQ ID NO: 227188 - DNA, 75 bp, synthetic construct
  source 1..75: mol_type = other DNA
cagcgttaccagttggcgtccctgtaccatatccactggctacaccaccaaccggctggatgaaatgcaatggtt

SEQ ID NO: 227189 - DNA, 75 bp, synthetic construct
  source 1..75: mol_type = other DNA
ggggtggagttaatgagtgacaaggatgatgcgatcgccgtttctacaaagcgttatgtgccgtcaacaacattg

SEQ ID NO: 227190 - DNA, 75 bp, synthetic construct
  source 1..75: mol_type = other DNA
ggcgttgcgccccgaagcgcggttccttgaactggtgcatcgactcgaccgggacacctctggtgtactgctggt

SEQ ID NO: 227191 - DNA, 75 bp, synthetic construct
  source 1..75: mol_type = other DNA
caatcctcatttagtcaattttgatgcttcaagagtagtgccaactgcctcagagaacagaccaagaagcattgc

SEQ ID NO: 227192 - DNA, 75 bp, synthetic construct
  source 1..75: mol_type = other DNA
cgcgaataacaccatgaaaatcactgacccgcattactatctcgacaacgtgctgctggaaaccggttttgacta

SEQ ID NO: 227193 - DNA, 75 bp, synthetic construct
  source 1..75: mol_type = other DNA
gacccgcactactatctcgacaacgtgctgctggaaaccggttttgactacgaaaacggtgtggcggtacagacc

SEQ ID NO: 227194 - DNA, 75 bp, synthetic construct
  source 1..75: mol_type = other DNA
ccggcaccgacagcgttatcgaccactggtcgccttacggcctgggcgacatgctggaaaaagccaatctgtacg

SEQ ID NO: 227195 - DNA, 75 bp, synthetic construct
  source 1..75: mol_type = other DNA
tacccggaactggcaaaggcttatccggcaaataaattgcctgatttacgtggtgagtttattcgcggctgggat

SEQ ID NO: 227196 - DNA, 75 bp, synthetic construct
  source 1..75: mol_type = other DNA
acaattatggatcatgcacacaatatgggtaagcgtgcagcaagaaccgtattgacggggatgtgttattcagtc

SEQ ID NO: 227197 - DNA, 75 bp, synthetic construct
  source 1..75: mol_type = other DNA
gccacgctaccgcactatgacgctggcggtaagcttatgttgcccactactcgcgacatgcatattcatcttgac

SEQ ID NO: 227198 - DNA, 75 bp, synthetic construct
  source 1..75: mol_type = other DNA
aggaggggatagtctgttgtcgacagataacgccgtccggcaaggtgcaattaacggtagatttaccagtcaata

SEQ ID NO: 227199 - DNA, 75 bp, synthetic construct
  source 1..75: mol_type = other DNA
gtgccttgctaagtcttcaggatgactcttttgaagcgcacaggcatgagtcctttttttacgcgggtatttctc

SEQ ID NO: 227200 - DNA, 75 bp, synthetic construct
  source 1..75: mol_type = other DNA
gcttcaagagtagtgccaactgcctcagagaacagaccaagaagcattgcatttaactatatcgtgagagcagca

SEQ ID NO: 227201 - DNA, 75 bp, synthetic construct
  source 1..75: mol_type = other DNA
gttgcaggaggagctttgcagcgtggtggaggcatccggtgccagcctggagaaggggcggcacgaccagttgct

SEQ ID NO: 227202 - DNA, 75 bp, synthetic construct
  source 1..75: mol_type = other DNA
atttggaggtaattatccagagggatccggccattcgattgctaatcacgatggaatatcagcacacgagccggg

SEQ ID NO: 227203 - DNA, 75 bp, synthetic construct
  source 1..75: mol_type = other DNA
atcctgtgctggcgaaagtgtttccttcgctggtattacctgaagcccgcggtgatttcattcgtatctgggatg

SEQ ID NO: 227204 - DNA, 75 bp, synthetic construct
  source 1..75: mol_type = other DNA
ggctgaagcggggataccgtctgacagagctggtagtgatgcatgtgatcttacccagcaatagtggacacgcgg

SEQ ID NO: 227205 - DNA, 75 bp, synthetic construct
  source 1..75: mol_type = other DNA
tgtactttggctcttacctgaaaaagccgccggtgccaatgagccgtctggagcactatgccggtcaggatgaaa

SEQ ID NO: 227206 - DNA, 75 bp, synthetic construct
  source 1..75: mol_type = other DNA
cggttactgaaggttgacccgctgaaatgcattctttgcggaagtcagatgtggtttacgggactgaagaggggc

SEQ ID NO: 227207 - DNA, 75 bp, synthetic construct
  source 1..75: mol_type = other DNA
cggttactgaaggttgacccgctgaagtgcatcctgtgcggaggtcagatgcgttttacggggctgaagcggggc

SEQ ID NO: 227208 - DNA, 75 bp, synthetic construct
  source 1..75: mol_type = other DNA
ctggtgataccggatgcgctggcagttgaaggaagcagcggacgggactggaatcgcttcctggacagtcattac

SEQ ID NO: 227209 - DNA, 75 bp, synthetic construct
  source 1..75: mol_type = other DNA
tacggggctgaagcggggctaccgtctgacagagctggtcctgatgcatgagccactggcgcaacagcgggtgtg

SEQ ID NO: 227210 - DNA, 75 bp, synthetic construct
  source 1..75: mol_type = other DNA
atgcttccccgttttgccgacatttttcagcagggaaaccgctggcttaactggctggagaaacagccggaaggg

SEQ ID NO: 227211 - DNA, 75 bp, synthetic construct
  source 1..75: mol_type = other DNA
ctggagcattatgccggtcaggatgaaatcggtctgcgttacaacagtcaccgtacaaaacgggaagaatacctg

SEQ ID NO: 227212 - DNA, 75 bp, synthetic construct
  source 1..75: mol_type = other DNA
gcttcctggacacgcattaccgccgcggctggaatgtcaacatatccagggtgatggataacgccacacatgtgg

SEQ ID NO: 227213 - DNA, 75 bp, synthetic construct
  source 1..75: mol_type = other DNA
cggataaggggttccgtatggtgaggtactacggttttttgagtccggcgaaacggcggttactggaagaagtgg

SEQ ID NO: 227214 - DNA, 75 bp, synthetic construct
  source 1..75: mol_type = other DNA
cctggtgatgagtggtgatgagttcatggaaaggttctcgtggcatgtggcggataaggggttccgtatggtgag

SEQ ID NO: 227215 - DNA, 75 bp, synthetic construct
  source 1..75: mol_type = other DNA
atggaaaggttctcctggcatgtagcagataaggggttccgtatggtgaggtactacggtttcctgagtccggtg

SEQ ID NO: 227216 - DNA, 75 bp, synthetic construct
  source 1..75: mol_type = other DNA
ctgtccgtggcagcatattgtgttcacacttccctgccagtactggtccctggtgttccacaaccggtggttact

SEQ ID NO: 227217 - DNA, 75 bp, synthetic construct
  source 1..75: mol_type = other DNA
gctgttcgtcaccggactgttgccacaccaaaaaggtctgcttccggtgtaaaagccgctcctgtccgcactgcg

SEQ ID NO: 227218 - DNA, 75 bp, synthetic construct
  source 1..75: mol_type = other DNA
cataacggagacggtgagaaagacggcgatgcaaatcacctggagagggatgtatcagcggttactgaaggttga

SEQ ID NO: 227219 - DNA, 75 bp, synthetic construct
  source 1..75: mol_type = other DNA
gcgttttacggggctgaagcggggctaccgtctggcagagctggtcctgatgcatgagccgctggcccggatgcg

SEQ ID NO: 227220 - DNA, 75 bp, synthetic construct
  source 1..75: mol_type = other DNA
catgtggcgttaccggataacgcggttactgtcccgaaaatacccggagctggtgataccggatgcgctggcagc

SEQ ID NO: 227221 - DNA, 75 bp, synthetic construct
  source 1..75: mol_type = other DNA
tggcatgtggcggataagggtttccgtatggtgaggtactacggtttcctgagtccggtgaagcgccgcttcctg

SEQ ID NO: 227222 - DNA, 75 bp, synthetic construct
  source 1..75: mol_type = other DNA
acgggactggaatcgcttcctggacagtcattaccggcggggctggaatgtcaacgtatcccgggggatggataa

SEQ ID NO: 227223 - DNA, 75 bp, synthetic construct
  source 1..75: mol_type = other DNA
cggtgacaaaaatcatggcatgcggaaccacgctgatggggtacacacagtggtgctgttcatctccggactgtt

SEQ ID NO: 227224 - DNA, 75 bp, synthetic construct
  source 1..75: mol_type = other DNA
ctggtgttccacaaccggtggttactggcagagatgagccgcattgctgcggatgtgatacaggaaatctgccgc

SEQ ID NO: 227225 - DNA, 75 bp, synthetic construct
  source 1..75: mol_type = other DNA
cttcatttttacgcccgtaaggtgatgagcatgtggcgttaccggataacacggttgctgtcacggaaataccct

SEQ ID NO: 227226 - DNA, 75 bp, synthetic construct
  source 1..75: mol_type = other DNA
gagtggtgatgagtttatggaaaggttctcctggcatgtggcggataaggggttccgtatggtgaggtactacgg

SEQ ID NO: 227227 - DNA, 75 bp, synthetic construct
  source 1..75: mol_type = other DNA
agtatctgctgagtctggttcccgactgtccgtggcagcatattgtgttcacacttccctgccagtactggtccc

SEQ ID NO: 227228 - DNA, 75 bp, synthetic construct
  source 1..75: mol_type = other DNA
acattcacctgtcgacaacggccggcggcgtgacatcagaccacacctggaaaaccttcatttttacgcccgtaa

SEQ ID NO: 227229 - DNA, 75 bp, synthetic construct
  source 1..75: mol_type = other DNA
gcttctgacaatgcagcgaatattggcactgaaacccgcccgcgcaacattgcatttaactacatcgtgagggct

SEQ ID NO: 227230 - DNA, 75 bp, synthetic construct
  source 1..75: mol_type = other DNA
aagagctgtcagcactcgtggggttgcttctgacaatgcagcgaatattggcactgaaacccgcccgcgcaacat

SEQ ID NO: 227231 - DNA, 75 bp, synthetic construct
  source 1..75: mol_type = other DNA
aggaaataacaccacgcggatgcgaccactgcgttgtacaggccgctattaccgctctgattaacggtgcgcctg

SEQ ID NO: 227232 - DNA, 75 bp, synthetic construct
  source 1..75: mol_type = other DNA
atgccagttagctgttacctctgcattttcttaaacgttggtttgggagaaggctctgcattacctgtcggtgtg

SEQ ID NO: 227233 - DNA, 75 bp, synthetic construct
  source 1..75: mol_type = other DNA
ccccagaccggcacacctgccaccgatctggatgatgactactttgacatgttgcaggaagaactttgtggcgtg

SEQ ID NO: 227234 - DNA, 75 bp, synthetic construct
  source 1..75: mol_type = other DNA
gacgggacaacattcagcaatcctgtcataacaatgtcagacaatggtatgcaggctactattctgacctctatc

SEQ ID NO: 227235 - DNA, 75 bp, synthetic construct
  source 1..75: mol_type = other DNA
atcccaaactggcaaaagcctaccccaccaataaattaccggatttacgcggtgaatttatccgtggctgggatg

SEQ ID NO: 227236 - DNA, 75 bp, synthetic construct
  source 1..75: mol_type = other DNA
aagcatacaggggtggttaacaggaagtcattatcataatattcggtcatgggacgcgtgggataacacggtatt

SEQ ID NO: 227237 - DNA, 75 bp, synthetic construct
  source 1..75: mol_type = other DNA
tggctgaaatgcaacggtgcagctttttcggctgaagaatacccggaactggcaaaggcttacccgacaaataaa

SEQ ID NO: 227238 - DNA, 75 bp, synthetic construct
  source 1..75: mol_type = other DNA
cgccaacaggctggttgaaatgcaatggtgcggctttttctgctgaagaatacccggaactggcaaaggcttacc

SEQ ID NO: 227239 - DNA, 75 bp, synthetic construct
  source 1..75: mol_type = other DNA
aggctctgcattacctgttggtgtgcctgttccgtggccttcagtcacaccgccaacaggctggctgaaatgcaa

SEQ ID NO: 227240 - DNA, 75 bp, synthetic construct
  source 1..75: mol_type = other DNA
atgccagttagtcgtaatcgctgcattttcttaaacgttggtttgggagaaggctctgcattaccggttggggtg

SEQ ID NO: 227241 - DNA, 75 bp, synthetic construct
  source 1..75: mol_type = other DNA
tttgatgcttccagagttgttccaactacaaacgaaaaccgtccgcgtaatattgcatttaactatatcgtgagg

SEQ ID NO: 227242 - DNA, 75 bp, synthetic construct
  source 1..75: mol_type = other DNA
tggtgctgttcatcaccggactgttgccacacaaaaaaggtctgcttccggtgtaaaagccgctcctgcccgcac

SEQ ID NO: 227243 - DNA, 75 bp, synthetic construct
  source 1..75: mol_type = other DNA
atgtggcgttaccggataacgcggctactgtcccggaaatacccggagctggtaataccggatgaactggcagtg

SEQ ID NO: 227244 - DNA, 75 bp, synthetic construct
  source 1..75: mol_type = other DNA
aacagtcaccgtacaaaacgggaagaatacctgttgatgagtggagatgagttcatggaaaggttctcctggcat

SEQ ID NO: 227245 - DNA, 75 bp, synthetic construct
  source 1..75: mol_type = other DNA
actggaagaggtggtgtacgccataacggagacagtgagaaaaacagcgatacaaatcaggtggagagggatgta

SEQ ID NO: 227246 - DNA, 75 bp, synthetic construct
  source 1..75: mol_type = other DNA
tgcccgcactgcggggtgaaggctggcgcacagtggacacagtatctgctgagtctggtccccgactgtccgtgg

SEQ ID NO: 227247 - DNA, 75 bp, synthetic construct
  source 1..75: mol_type = other DNA
tactgtcacggaaataccctgacctggtgataccggataagctggcagcagaaggaaacagcagacgggactgga

SEQ ID NO: 227248 - DNA, 75 bp, synthetic construct
  source 1..75: mol_type = other DNA
taattacccaattcccaacccggctattacagagggtggtgttgttgcggcaacgactaaacctgcaggtgcgaa

SEQ ID NO: 227249 - DNA, 75 bp, synthetic construct
  source 1..75: mol_type = other DNA
tcagcattacccgttggtgtgcctgttccgtggccttcagccactccgccaacaggctggctgaaatgcaacgga

SEQ ID NO: 227250 - DNA, 75 bp, synthetic construct
  source 1..75: mol_type = other DNA
atgtcatttgctcgttatttctgcactttcataaacgttggtttgggagaaggttcggcattacccgttggtgtg

SEQ ID NO: 227251 - DNA, 75 bp, synthetic construct
  source 1..75: mol_type = other DNA
tggtgcgcctttttctgccgaagagtatccggaactggcaaaagtttatccgacaaataaattgccagatttacg

SEQ ID NO: 227252 - DNA, 75 bp, synthetic construct
  source 1..75: mol_type = other DNA
tgctattcgtaatataaccggcacatttggtaatggacaaaccgaagctaatgcggctattagctttaatacagc

SEQ ID NO: 227253 - DNA, 75 bp, synthetic construct
  source 1..75: mol_type = other DNA
tacccggaactggcaaaggcttatccaacaaataaattgcctgatttacgtggtgagtttattcgtggttgggat

SEQ ID NO: 227254 - DNA, 75 bp, synthetic construct
  source 1..75: mol_type = other DNA
attatccgctcagggcgatgccatacgtaatatctatggtgagttcaagactgtaaacaccgaaaattattcaat

SEQ ID NO: 227255 - DNA, 75 bp, synthetic construct
  source 1..75: mol_type = other DNA
aagaaatgatcgaggctattgaacagcacacaatctgtatcagcgccagggacattcctggtgttatagccaact

SEQ ID NO: 227256 - DNA, 75 bp, synthetic construct
  source 1..75: mol_type = other DNA
gcgcctggctgccgaactggctgaacaaaagcaacttctggaacagaaagcccaccagctaaatcagcagctggt

SEQ ID NO: 227257 - DNA, 75 bp, synthetic construct
  source 1..75: mol_type = other DNA
agcgcgccagacgcctgaagaaactgcctgccgaccagcagattcatgagatggcagagtatctcaggaagcgtc

SEQ ID NO: 227258 - DNA, 75 bp, synthetic construct
  source 1..75: mol_type = other DNA
cagctacttccgacaaaaagaacagcaaccgatcgcaatcccccagacgcttcccgaagctctgcgcctggctgc

SEQ ID NO: 227259 - DNA, 75 bp, synthetic construct
  source 1..75: mol_type = other DNA
cagccagacactgttaaagatggtcaatgaggcgcgcaagctatgtggggaaaatgagatccgcaataacgattt

SEQ ID NO: 227260 - DNA, 75 bp, synthetic construct
  source 1..75: mol_type = other DNA
caccgcatcctgctaaccgatatccgtgaatacctgctcgaacagggtcgtcttgattatgcaaccgtaaccgcc

SEQ ID NO: 227261 - DNA, 75 bp, synthetic construct
  source 1..75: mol_type = other DNA
aacactggagtcagcttccgcctgaagagcaaatccgtttctgggaagactatgaggcgggaagggcgacctctt

SEQ ID NO: 227262 - DNA, 75 bp, synthetic construct
  source 1..75: mol_type = other DNA
cgtctgccacgttacgtctggataacaccggcaggctggcagatgctgggcgtggatatggttaaacttcacgaa

SEQ ID NO: 227263 - DNA, 75 bp, synthetic construct
  source 1..75: mol_type = other DNA
cctgcgtatgcgcatgtcgcgacatcctttttacgtgcagaaacggacgttcgctggtcgcaaatatgctttccg

SEQ ID NO: 227264 - DNA, 75 bp, synthetic construct
  source 1..75: mol_type = other DNA
aagcagtttttgtccagcccggaggtaaacgagcgtaccgatgatgataaaacgctggcgctggccatgtggttg

SEQ ID NO: 227265 - DNA, 75 bp, synthetic construct
  source 1..75: mol_type = other DNA
cagattggcgatggtggcgtggtggtggattttggtcacggcctgcaactgccgctcatgccgatggtgggtgaa

SEQ ID NO: 227266 - DNA, 75 bp, synthetic construct
  source 1..75: mol_type = other DNA
ttgttaaagcagtttttgtccagcccggcggtaaacgagcgtaccgatgatgataaaacgttggcactggcgctg

SEQ ID NO: 227267 - DNA, 75 bp, synthetic construct
  source 1..75: mol_type = other DNA
ggaatggcagggagtgcgtgtcgtgacaaccgagactcttgctagagggtatgggacagaaacaatccgtattcg

SEQ ID NO: 227268 - DNA, 75 bp, synthetic construct
  source 1..75: mol_type = other DNA
gaggagctaagaaagaaagccaaaaaaaatgccaggccagtacaaaagacggcagttcttattattgaggaggca

SEQ ID NO: 227269 - DNA, 75 bp, synthetic construct
  source 1..75: mol_type = other DNA
aatccgtcctggtatcgtcctgcacgctataaggcgctgagcgggcagctcgggcacgcctatcatcgtctggtg

SEQ ID NO: 227270 - DNA, 75 bp, synthetic construct
  source 1..75: mol_type = other DNA
aggtctgaagaatacatcatataacgccgtacattggagtcagctgtcccccgaagaccagatccgtttctggga

SEQ ID NO: 227271 - DNA, 75 bp, synthetic construct
  source 1..75: mol_type = other DNA
agcataacgcctttgcgtggttctatcttggcgcgttcctggtggcggtgattgcatggttcttgctgggaaatg

SEQ ID NO: 227272 - DNA, 75 bp, synthetic construct
  source 1..75: mol_type = other DNA
aggaatttaaatgtaaatgcggaaaatgtgattatgatacaatcgacgctgaattactggtaattcttgaggatg

SEQ ID NO: 227273 - DNA, 75 bp, synthetic construct
  source 1..75: mol_type = other DNA
tgggcaaatccccttccgggccgttcgacggctgcaccacgcaccacacacgcccacaggagaaacagcacccga

SEQ ID NO: 227274 - DNA, 75 bp, synthetic construct
  source 1..75: mol_type = other DNA
aactttgcaaaggtcgttggacttaagcaaaacgcccttttctcatggttgcgccagaacggcattctcatggct

SEQ ID NO: 227275 - DNA, 75 bp, synthetic construct
  source 1..75: mol_type = other DNA
gaatcggagctggtggttgctcaaaatcagcctgatgaaattcccgttctggagtggcagggggtgcgtgtagtg

SEQ ID NO: 227276 - DNA, 75 bp, synthetic construct
  source 1..75: mol_type = other DNA
acgaggagctgcccgtcacgctaaaatgctcgaaaccgatcaggcatgggcattctttgaaaaactggaagacag

SEQ ID NO: 227277 - DNA, 75 bp, synthetic construct
  source 1..75: mol_type = other DNA
ggctaaagaaatcagcccgaaagacagcaaagggaaggttattccggaacttgaagtgacagtctcccgtctttc

SEQ ID NO: 227278 - DNA, 75 bp, synthetic construct
  source 1..75: mol_type = other DNA
taaagctgcgcttgagaaaggtatggcgagatacggagatgccatgctgaagcttgccagcaaagagttggcgat

SEQ ID NO: 227279 - DNA, 75 bp, synthetic construct
  source 1..75: mol_type = other DNA
aaattaaaggaatttaaaaggctggtgactactagtcacctggttagcaaatatacaagccaggtaattctttgg

SEQ ID NO: 227280 - DNA, 75 bp, synthetic construct
  source 1..75: mol_type = other DNA
tgctgctggaaaccggttttgactacgaaaatggcgtggcggtgcagacccgcacggcgcgccagactgtggaaa

SEQ ID NO: 227281 - DNA, 75 bp, synthetic construct
  source 1..75: mol_type = other DNA
cagggaaaatcatccgttttgggaaagtagacaaggtttactcaggcccagtagacgaaatgttgcggaaacaca

SEQ ID NO: 227282 - DNA, 75 bp, synthetic construct
  source 1..75: mol_type = other DNA
atcggattggatgctccctacttcaacacactgcgctctggtgtcacttggcgagatcgtgtcgaacctggcaaa

SEQ ID NO: 227283 - DNA, 75 bp, synthetic construct
  source 1..75: mol_type = other DNA
atcatcggcgtggcggggattctggttgggatctgttggtacgcgtggtatcgcaaccgggcgcagtttgtcctg

SEQ ID NO: 227284 - DNA, 75 bp, synthetic construct
  source 1..75: mol_type = other DNA
aatctggcgttggttatcgcggcctgtgtgacgttcaccggggcgctgtgttacttctttattgtcaaagatcgg

SEQ ID NO: 227285 - DNA, 75 bp, synthetic construct
  source 1..75: mol_type = other DNA
ggaacgggcggaaaaactgatcgatttattgcagtcgaaaggcaccaccattgcccgcagccactgcaatatcga

SEQ ID NO: 227286 - DNA, 75 bp, synthetic construct
  source 1..75: mol_type = other DNA
ggcggctatttctttgcgctgccgggtgtgaaggacgcgaacgattatctcggaagcgcattattgcgggtttaa

SEQ ID NO: 227287 - DNA, 75 bp, synthetic construct
  source 1..75: mol_type = other DNA
gtttttaggcggataaggcgtttacgccgcaccaggcgttcgtacactgatgcgacgcttgcgcgtcttatcatg

SEQ ID NO: 227288 - DNA, 75 bp, synthetic construct
  source 1..75: mol_type = other DNA
ctgactcagggcggaacggcaccagaaacgccaaatccgcgcctgccgccactcgattccggcattcttggcggc

SEQ ID NO: 227289 - DNA, 75 bp, synthetic construct
  source 1..75: mol_type = other DNA
atcatcggcgtagcagggattctggttgggatctgttggtacgcgtggtatcgcaaccgggcgcagtttgtcctg

SEQ ID NO: 227290 - DNA, 75 bp, synthetic construct
  source 1..75: mol_type = other DNA
tcagacgttatctgtgggttaggatccccgaacaggagaaacctgttctcatgcgattttatgatccccggaata

SEQ ID NO: 227291 - DNA, 75 bp, synthetic construct
  source 1..75: mol_type = other DNA
atgcacaaaaaacgcaaagtgcgcctgccaccactcgattccggcattcttggcggctacattgcgcccgataat

SEQ ID NO: 227292 - DNA, 75 bp, synthetic construct
  source 1..75: mol_type = other DNA
acatggttgttgatctggttttcgccaatgctggggtttttgataaaagttcgcgtcgtcgaaactcaacatttc

SEQ ID NO: 227293 - DNA, 75 bp, synthetic construct
  source 1..75: mol_type = other DNA
tctgcgtcgtcgtggcgaacattccaccaaacctaaatgcgaaaatccgtcctggtttcgtcctgcacgctataa

SEQ ID NO: 227294 - DNA, 75 bp, synthetic construct
  source 1..75: mol_type = other DNA
gatctcggctatttaactaagggggattctggttttcttctgacaccgttaggtcaaaaagcagggggggagttt

SEQ ID NO: 227295 - DNA, 75 bp, synthetic construct
  source 1..75: mol_type = other DNA
aagcgggcgtcggctttgtggttcctgacgacagtcgtttgagcttcgatattttaatcccgcccgatcagatta

SEQ ID NO: 227296 - DNA, 75 bp, synthetic construct
  source 1..75: mol_type = other DNA
ccgtgggcatgagtgtttcccgcctggctaaagaaatcagcccgaaagacagcaaagggaaggttattccggaac

SEQ ID NO: 227297 - DNA, 75 bp, synthetic construct
  source 1..75: mol_type = other DNA
agcgagggacatgttattccggaactggaagtgacggtctcccgtctttcccgtctgctggccgaacaggtgcgc

SEQ ID NO: 227298 - DNA, 75 bp, synthetic construct
  source 1..75: mol_type = other DNA
aaaaaggacccggtgaccggcgagcagagcctgcgcatgcgcatgtcgcggcatcctttttatgtacagaaacgg

SEQ ID NO: 227299 - DNA, 75 bp, synthetic construct
  source 1..75: mol_type = other DNA
ctacaaattctacgaagcggtgatgagttctcacgcgcgtctgacctacaccaaagtctggcatatactgcaagg

SEQ ID NO: 227300 - DNA, 75 bp, synthetic construct
  source 1..75: mol_type = other DNA
atagtttagcattggcaccaacgatactaaatttattaaatattaaccattatcctaatttctttttaggctgtt

SEQ ID NO: 227301 - DNA, 75 bp, synthetic construct
  source 1..75: mol_type = other DNA
taagactatccactatccatggcgtctccattatcatcctttgttcatgagccctatcgaacataaatcgcatgc

SEQ ID NO: 227302 - DNA, 75 bp, synthetic construct
  source 1..75: mol_type = other DNA
gcccgtgactttgacgatgcggtttactgcgagaaaaaacgcggcggcggctggcgtttatgggtcgcaattgcc

SEQ ID NO: 227303 - DNA, 75 bp, synthetic construct
  source 1..75: mol_type = other DNA
aagcgggcgtcggctttgtggttcctgacgacagccgtttgagcttcgatatcttaatcccacctgatcagatca

SEQ ID NO: 227304 - DNA, 75 bp, synthetic construct
  source 1..75: mol_type = other DNA
ctggcagagctggggctggaactgccgggcggtaacaagccggaaccgcgcgactacgcggagctgctggagtcg

SEQ ID NO: 227305 - DNA, 75 bp, synthetic construct
  source 1..75: mol_type = other DNA
cagcagcgggctgatgggttattgttattgccagttatctgcgataatttcgtgcaaactctgcaattaaatgct

SEQ ID NO: 227306 - DNA, 75 bp, synthetic construct
  source 1..75: mol_type = other DNA
taatccacttccggaggtattatccacaatttttgaacatgccagtaatttagcatggtgtacgggaaacagtgt

SEQ ID NO: 227307 - DNA, 75 bp, synthetic construct
  source 1..75: mol_type = other DNA
cgtggatgggacgacgggcgcaaagttgatacaggacgtaagttgctgtccgcacaaggggcaacgctgttaaga

SEQ ID NO: 227308 - DNA, 75 bp, synthetic construct
  source 1..75: mol_type = other DNA
gtataggtagggataaaaacgaaaacgttggtttgggagaaggttcggcattacccgttggtgtgcctgttccgt

SEQ ID NO: 227309 - DNA, 75 bp, synthetic construct
  source 1..75: mol_type = other DNA
ttttcacaaacgttggtttgggagaaggctctgcattacccgttggtgtgcctgttccatggccttcagccactt

SEQ ID NO: 227310 - DNA, 75 bp, synthetic construct
  source 1..75: mol_type = other DNA
aagaagagacgtttggccccctcgccccgctgttccgttttaaagatgaagccgatgtgattgcgcaagccaatg

SEQ ID NO: 227311 - DNA, 75 bp, synthetic construct
  source 1..75: mol_type = other DNA
cgaccgaaattggccgccagttaatggaacagtgcgcgaaagacatcaaaaaagtgtcgctggagctgggcggca

SEQ ID NO: 227312 - DNA, 75 bp, synthetic construct
  source 1..75: mol_type = other DNA
ccccagaccggcacgcctgccaccgatctggatgatgactactttgacatgttgcaggaagaactttgtagcgtg

SEQ ID NO: 227313 - DNA, 75 bp, synthetic construct
  source 1..75: mol_type = other DNA
tggtactggtgcttttgccttagcatctcaagctacgcgaaatatctataataacctaggcacatatgaaacaaa

SEQ ID NO: 227314 - DNA, 75 bp, synthetic construct
  source 1..75: mol_type = other DNA
aaattgcctgatttacgcggtgaatttattcgtggctgggatgacgggcgtggtattgatgctgtacgtgccttg

SEQ ID NO: 227315 - DNA, 75 bp, synthetic construct
  source 1..75: mol_type = other DNA
tcaccggttcggcgggcgcggtcggtaacgaactgaccagcaatccgctggtgcgcaagctgtcgtttaccggct

SEQ ID NO: 227316 - DNA, 75 bp, synthetic construct
  source 1..75: mol_type = other DNA
gtccgcacaaggggcaacgctgttaagaacagcaatgctggattattataaccaggacactacgggaacctcggg

SEQ ID NO: 227317 - DNA, 75 bp, synthetic construct
  source 1..75: mol_type = other DNA
cggggaatattcagattcgcaccattggctatggcgagagctatatcaacgccaccgggttacgccatgtctggc

SEQ ID NO: 227318 - DNA, 75 bp, synthetic construct
  source 1..75: mol_type = other DNA
gcagacgtcgcggcgaaaagttgctggaggacaaactggaggctggctgcgcgccgctggcgttgtggcaggcgg

SEQ ID NO: 227319 - DNA, 75 bp, synthetic construct
  source 1..75: mol_type = other DNA
gcgctgttaaacgagttacaacatcaactaagtcaacgccagccgccgttgggcgaggtgctggcagtcgatctg

SEQ ID NO: 227320 - DNA, 75 bp, synthetic construct
  source 1..75: mol_type = other DNA
tgattggccttgatgcttcaagaattgttccaactgcaaacgaaaatcgaccccgtaacattgcctttaattata

SEQ ID NO: 227321 - DNA, 75 bp, synthetic construct
  source 1..75: mol_type = other DNA
caccacaagatgatagtggcagtaacctctactggatcagcgaaggtccgcgccctggcgtcgggtatttttacg

SEQ ID NO: 227322 - DNA, 75 bp, synthetic construct
  source 1..75: mol_type = other DNA
gagaaggctcagcgttacccgttggtgtacctgttccgtggccttcagccactccgccaacaggctggctgaaat

SEQ ID NO: 227323 - DNA, 75 bp, synthetic construct
  source 1..75: mol_type = other DNA
gatttcgcctgatgacgggggcagttgttatctctggctcaaccgggggcaaccacctgccgttaaccgtcgccg

SEQ ID NO: 227324 - DNA, 75 bp, synthetic construct
  source 1..75: mol_type = other DNA
tgggtatgactcaaaagaggaatgggaactggcgacaatcttcagaagagcatatacgcaaggcagggggcttga

SEQ ID NO: 227325 - DNA, 75 bp, synthetic construct
  source 1..75: mol_type = other DNA
ctaatttgagtggaaaggatgtagctggtcttctcacataccttggtttgggagaaggctctgcattacctgttg

SEQ ID NO: 227326 - DNA, 75 bp, synthetic construct
  source 1..75: mol_type = other DNA
accattttcataaacgttggtttgggagaaggctctgcattacctgttggtgtgcctgttccatggccttcagcc

SEQ ID NO: 227327 - DNA, 75 bp, synthetic construct
  source 1..75: mol_type = other DNA
attcaatatgggaatcagtaggctcgtttaagggggcagtggtgcctttgaacccctcaacgaacaatagttatt

SEQ ID NO: 227328 - DNA, 75 bp, synthetic construct
  source 1..75: mol_type = other DNA
tggaaacccagctaatcctaaagcaggaaataatagcgattatgttcctgcatcagcagataactccataatggg

SEQ ID NO: 227329 - DNA, 75 bp, synthetic construct
  source 1..75: mol_type = other DNA
ccgcctggctggcattagcgatcgtgctggaaatcgttgctaatgtttttttgaaattttctgatggttttcgcc

SEQ ID NO: 227330 - DNA, 75 bp, synthetic construct
  source 1..75: mol_type = other DNA
taccttgtaaatctccgcgatcgcaacctggatgagtggcaagttccacctgcgattatcggaatgcttgaggaa

SEQ ID NO: 227331 - DNA, 75 bp, synthetic construct
  source 1..75: mol_type = other DNA
gaatacagcggagagcataccgatattaccagccaaaatatgcgagtgtggttgaggagatgccaagagaaatgg

SEQ ID NO: 227332 - DNA, 75 bp, synthetic construct
  source 1..75: mol_type = other DNA
attggcacgacaggttttgacgaagcaggaaaactggcgattcgtaatgccgctgaagatattgcgattgtcttt

SEQ ID NO: 227333 - DNA, 75 bp, synthetic construct
  source 1..75: mol_type = other DNA
tggtgaacataccgcgatgtttgccgatattggtgagcgtctggagatcacccataaggcgtccagccgcatgac

SEQ ID NO: 227334 - DNA, 75 bp, synthetic construct
  source 1..75: mol_type = other DNA
ctggcattagaaggcgtgcagctgggcgcggcgctggagcgcgaaggatcttctttactgggcagcgatgccggt

SEQ ID NO: 227335 - DNA, 75 bp, synthetic construct
  source 1..75: mol_type = other DNA
atgaaagatttaactttgaagtttcatgacaaactgcagtttaaggccttcctgtcatctcttgcctgggaggat

SEQ ID NO: 227336 - DNA, 75 bp, synthetic construct
  source 1..75: mol_type = other DNA
atgaaagatttaactttgaagtttcatgacaaactgcagtttaaggccttcctgtcatctcttgtctggggggag

SEQ ID NO: 227337 - DNA, 75 bp, synthetic construct
  source 1..75: mol_type = other DNA
gcacgccctggctatctggagcacttctgggcgctggtgaactgggaattcgtagcgaaaaatctcgctgcataa

SEQ ID NO: 227338 - DNA, 75 bp, synthetic construct
  source 1..75: mol_type = other DNA
catcattaatgatccgcaaatatcgtcattattcgatgaatacgtggttgctgttgagcatcaacttcgtggctg

SEQ ID NO: 227339 - DNA, 75 bp, synthetic construct
  source 1..75: mol_type = other DNA
gatggcgagccggtatgtgttaaggaagacggatattttgtaaacgtgcgcatcattaatgatgcaaaaaaatcg

SEQ ID NO: 227340 - DNA, 75 bp, synthetic construct
  source 1..75: mol_type = other DNA
atgaaagatttaactttgaagtttcatgacaaactgcagtttaaggccttcctgtcatctcttgcctgggtggaa

SEQ ID NO: 227341 - DNA, 75 bp, synthetic construct
  source 1..75: mol_type = other DNA
ctttgctaacggtgcgataagatcggcattgtggctaaatggcaagaaaagtggtctttttgatatgcgagatgt

SEQ ID NO: 227342 - DNA, 75 bp, synthetic construct
  source 1..75: mol_type = other DNA
tggaacgaacccggtacagagaaaatatccatgatgcagaatgtattcgtgaaatccacgaagcccccctgcagg

SEQ ID NO: 227343 - DNA, 75 bp, synthetic construct
  source 1..75: mol_type = other DNA
cgccccccgaggcatggaaaatccggtttctggcgaacggtacacccggcacatggttttacaccgatgacgcag

SEQ ID NO: 227344 - DNA, 75 bp, synthetic construct
  source 1..75: mol_type = other DNA
tcgcaatgcacgtcctggctatcttgagcacttctgggcgctggtgaactgggaattcgtagcaaaaaatctcgc

SEQ ID NO: 227345 - DNA, 75 bp, synthetic construct
  source 1..75: mol_type = other DNA
attcacgaggaagtattggtaacacaggtggtagtgaaacccgcccccgcaatattgcatttaactatatcgtga

SEQ ID NO: 227346 - DNA, 75 bp, synthetic construct
  source 1..75: mol_type = other DNA
agtttgattccatcaccaacgcttcattcacgaggaagtattggtaacacaggtggtagtgaaacccgcccccgc

SEQ ID NO: 227347 - DNA, 75 bp, synthetic construct
  source 1..75: mol_type = other DNA
actggcaaaagcctaccccactaataaattaccggatttacgcggagaatttatccgtggctgggatgatgggcg

SEQ ID NO: 227348 - DNA, 75 bp, synthetic construct
  source 1..75: mol_type = other DNA
aagccgaaaatagaacaacgacaacatatccagaatggtatggggctgttaataaggctcgcgaagctatcaaaa

SEQ ID NO: 227349 - DNA, 75 bp, synthetic construct
  source 1..75: mol_type = other DNA
atgaaatacaaatttgtatttctccagcatggtattactaaagatgatcaatcagaatggttgaatagccgtaaa

SEQ ID NO: 227350 - DNA, 75 bp, synthetic construct
  source 1..75: mol_type = other DNA
aagatctgaaagattgcgcggtctacagtcgtgaaggccataccggtgaacgtgtgcctggcaccattggttttg

SEQ ID NO: 227351 - DNA, 75 bp, synthetic construct
  source 1..75: mol_type = other DNA
tgtcgatgaggccaccaacccgtgggggattaaagtcacccgtattgaaattcgcgacgtgcgcccaccggcaga

SEQ ID NO: 227352 - DNA, 75 bp, synthetic construct
  source 1..75: mol_type = other DNA
actttatcaatacgcttctcggggaaggggaagtgtcagtgcgcattcagcaggctgattgtagtgaaagtgaaa

SEQ ID NO: 227353 - DNA, 75 bp, synthetic construct
  source 1..75: mol_type = other DNA
tggcagcgccagaagatttggtcgactcagcgcagcggcttagcgaggtatgtcagtggctggcggaaggggcac

SEQ ID NO: 227354 - DNA, 75 bp, synthetic construct
  source 1..75: mol_type = other DNA
gttgagcgcgatgttcttgaaactggcgaaaacataacaaaggttacgttttcaaaagctctgtcgtcagcggaa

SEQ ID NO: 227355 - DNA, 75 bp, synthetic construct
  source 1..75: mol_type = other DNA
tcttgatcccggcatatgcacgcaaaacgggaaaatcagccgaatcactggcggaaatgctggaggatgaaacat

SEQ ID NO: 227356 - DNA, 75 bp, synthetic construct
  source 1..75: mol_type = other DNA
cgatgtcccggtgacctgtatcgatatggcgatgccagtcgtcattattccggctgaatatctgggaaaaacagg

SEQ ID NO: 227357 - DNA, 75 bp, synthetic construct
  source 1..75: mol_type = other DNA
cctgtacttatttctccagcacagaaaggcggggcgatcaatgtgcgttattttatgccgcattcttgccatcgc

SEQ ID NO: 227358 - DNA, 75 bp, synthetic construct
  source 1..75: mol_type = other DNA
ggaggatgcatcatgtacaccggagatggcccgtgaaaagttgttgaacgagctggggcgcgagtccacgccatc

SEQ ID NO: 227359 - DNA, 75 bp, synthetic construct
  source 1..75: mol_type = other DNA
atgaatcactggtacaccattaaggcgctgggtgttcgcggagcggcagaaatatccatctatgaagaaattggc

SEQ ID NO: 227360 - DNA, 75 bp, synthetic construct
  source 1..75: mol_type = other DNA
attacagcaatggcccgaattgaatcaaaacgaatcggagatttttcaaatatgccggaaaaaattaaaagcatg

SEQ ID NO: 227361 - DNA, 75 bp, synthetic construct
  source 1..75: mol_type = other DNA
ggatttttcgctcgcgcctccgtatccgtttgtgcagcttgcgaccctgaaacaacggatcgaaaaggcaggaca

SEQ ID NO: 227362 - DNA, 75 bp, synthetic construct
  source 1..75: mol_type = other DNA
tttgacctgctggacaacgtatggaccgtaccgaaagagcatagcaagatgggtaatgttatccgccgtccaatc

SEQ ID NO: 227363 - DNA, 75 bp, synthetic construct
  source 1..75: mol_type = other DNA
tgttacggactcgtgaaaaactggcgctgcttgaacaaagaatcagcgaactggaaaatcgcagtactgagatca

SEQ ID NO: 227364 - DNA, 75 bp, synthetic construct
  source 1..75: mol_type = other DNA
tgacgtgcatttaagtaatgaaggtcaggatgccacaactttacgggcatctgttattcggacgaccagaaaaat

SEQ ID NO: 227365 - DNA, 75 bp, synthetic construct
  source 1..75: mol_type = other DNA
gcgctggcgataaccggtgctattgctatttccagtagttgtgcattggaaggcaccgtcacccgacaaatcgtc

SEQ ID NO: 227366 - DNA, 75 bp, synthetic construct
  source 1..75: mol_type = other DNA
ccggtaacgatctggaaattgacggtattggcggcggtaatccgctgaccagtaaagtcgccattattagccgtt

SEQ ID NO: 227367 - DNA, 75 bp, synthetic construct
  source 1..75: mol_type = other DNA
ttataaccccatgcagatggtcgggctggcgctgacgcacagcacctctgattttggcaatattctgctggatgt

SEQ ID NO: 227368 - DNA, 75 bp, synthetic construct
  source 1..75: mol_type = other DNA
aattgatcaagcctgggcaggtaaagggttgggcgtcgcattgttgaaagatgcagtctatcgcacaatgtccat

SEQ ID NO: 227369 - DNA, 75 bp, synthetic construct
  source 1..75: mol_type = other DNA
cgccggagtgtctggagtatattctggtgcatgaactggttcatcttctggaacgtcaccataatgctcgcttcc

SEQ ID NO: 227370 - DNA, 75 bp, synthetic construct
  source 1..75: mol_type = other DNA
agtgaattttatcgacatgaactaaaacagcaggtggctaagcttctacctgaatggcaggaccgaatcggtgtt

SEQ ID NO: 227371 - DNA, 75 bp, synthetic construct
  source 1..75: mol_type = other DNA
cctggcagcccacctcgcgcgggcaaaaattcctgcaagatgacgaaaaaacgctgcgttcactggacgatcagg

SEQ ID NO: 227372 - DNA, 75 bp, synthetic construct
  source 1..75: mol_type = other DNA
ttgcgatgcagttaaatcgtaaggcaattaaaaaccttcatatcagcgtgttgccacctgatgggcgtgtgcgtg

SEQ ID NO: 227373 - DNA, 75 bp, synthetic construct
  source 1..75: mol_type = other DNA
caatcgcaatacagttgaatcgtaaagcaatcaaaaatttacatatcagcgtgttaccaccagatggtcgtgtac

SEQ ID NO: 227374 - DNA, 75 bp, synthetic construct
  source 1..75: mol_type = other DNA
aacaaagaatcagcgaactggaaaatcgcagtactgagatcaaaaagcagccagatccagagactctccccccaa

SEQ ID NO: 227375 - DNA, 75 bp, synthetic construct
  source 1..75: mol_type = other DNA
taagccatggggattcagtggcggggatgctgaggatatgcgcagttatgccgatttgctggataaagtcgaatc

SEQ ID NO: 227376 - DNA, 75 bp, synthetic construct
  source 1..75: mol_type = other DNA
cattgccacaaaaatccgtattgatgccggagtggcaccacttgactggcgcgggctggtgcgttcgtcggtggc

SEQ ID NO: 227377 - DNA, 75 bp, synthetic construct
  source 1..75: mol_type = other DNA
aggactggcacaggcagatgacgccgccccggcagcgggcagtacgctggacaaaatcgccaaaaacggcgtgat

SEQ ID NO: 227378 - DNA, 75 bp, synthetic construct
  source 1..75: mol_type = other DNA
gcctttatgatggatgatgccctgctggccggtgaacgtgcgaaagcgaagaaaccagacaactgggatatcgtc

SEQ ID NO: 227379 - DNA, 75 bp, synthetic construct
  source 1..75: mol_type = other DNA
gtggattttgtactacgaaataattgcccttattatactataaaaggcaacactaaaaaagaaaacatttcatct

SEQ ID NO: 227380 - DNA, 75 bp, synthetic construct
  source 1..75: mol_type = other DNA
ttttttatcgatactgttgcatttatttttatgcagttgtatttcatttataaccgtaggcaattttcaaactgt

SEQ ID NO: 227381 - DNA, 75 bp, synthetic construct
  source 1..75: mol_type = other DNA
gcttacggatacggtttgtgctgtacggcgtggtgacacgctgaccattaacggcgagatgttctgggtggaccg

SEQ ID NO: 227382 - DNA, 75 bp, synthetic construct
  source 1..75: mol_type = other DNA
cttagactctgatgattccattcactctgacttactgtccgatggtattcagatggcttataaaaacaatagtga

SEQ ID NO: 227383 - DNA, 75 bp, synthetic construct
  source 1..75: mol_type = other DNA
gtggattttgtactacgaaataattgcccttattatactataaaaggcaatactataaaaggcaacactaaaaaa

SEQ ID NO: 227384 - DNA, 75 bp, synthetic construct
  source 1..75: mol_type = other DNA
ttttgacgatccggagtcgctgggttttgccagtagtgggatccgtattgaaggaagtaacccgtcattatttgt

SEQ ID NO: 227385 - DNA, 75 bp, synthetic construct
  source 1..75: mol_type = other DNA
tgaaaacaaacatcacggcgcgttatttcgttttaaggtttttcatcgtgacggcgaacagtgtgaacggtgcgg

SEQ ID NO: 227386 - DNA, 75 bp, synthetic construct
  source 1..75: mol_type = other DNA
ggcgcaactggatgcactcgcacacgcgttactggatattcctcgactttcttacgctacgcgggggcaggtgga

SEQ ID NO: 227387 - DNA, 75 bp, synthetic construct
  source 1..75: mol_type = other DNA
ggtttaattattactgcgagaaggtggtgaaggggttctataagaatcattttctgcgctttgaccgccagattg

SEQ ID NO: 227388 - DNA, 75 bp, synthetic construct
  source 1..75: mol_type = other DNA
tgccgccgcgtggaccgattatctccatcactgcaaacagcaggggctgcactttattcagcctgggcgctttgt

SEQ ID NO: 227389 - DNA, 75 bp, synthetic construct
  source 1..75: mol_type = other DNA
cgtgtttggtttcatcatgcagatgttcgacaacctcctgtcctcgatgaactctgatgccgcttactcatcaat

SEQ ID NO: 227390 - DNA, 75 bp, synthetic construct
  source 1..75: mol_type = other DNA
tgctcggaggtggttatacctggaacccacagtgggcaccgagctctaatttaatcaataacagtctgccacgcc

SEQ ID NO: 227391 - DNA, 75 bp, synthetic construct
  source 1..75: mol_type = other DNA
gtcaaagcgcaaattgagtttaaccccgcgtgggtaacggaataccgtcagattggttatgaaaagcgccaactt

SEQ ID NO: 227392 - DNA, 75 bp, synthetic construct
  source 1..75: mol_type = other DNA
aggcaaaagggcaagatactcaaggttacagagctgaatttattcgcctgactgaactggcggaaggtctggaca

SEQ ID NO: 227393 - DNA, 75 bp, synthetic construct
  source 1..75: mol_type = other DNA
aatcgcattttattggccactgatggtgattttaacgtcggcattgacgatcctaaatcgattgaatcaatggtc

SEQ ID NO: 227394 - DNA, 75 bp, synthetic construct
  source 1..75: mol_type = other DNA
tgcttatcggcggtttgattttgacaggatgcgggcaggaacctgatgatcaggaaaatcagcaacaacaatcca

SEQ ID NO: 227395 - DNA, 75 bp, synthetic construct
  source 1..75: mol_type = other DNA
gacaaacaggctttgctggggcgattgcaggcggctccaaagtatcaacatgcagccagagaaaaagcagcctcc

SEQ ID NO: 227396 - DNA, 75 bp, synthetic construct
  source 1..75: mol_type = other DNA
tggaatgaacagcgaacattgctgaaagttgatatcctggcgaaagatcgcaaaagtgaagagttacccgcttct

SEQ ID NO: 227397 - DNA, 75 bp, synthetic construct
  source 1..75: mol_type = other DNA
cacagcgtggcggtgaagttcagggggtttttgacgatccggagtcgctgggttttgccggtggcggggtccgta

SEQ ID NO: 227398 - DNA, 75 bp, synthetic construct
  source 1..75: mol_type = other DNA
gcgaccgcgttggctatgaaacgcttggccggatctggcagtggctgaaaggttcgtcagacgagccacggcaag

SEQ ID NO: 227399 - DNA, 75 bp, synthetic construct
  source 1..75: mol_type = other DNA
gcgaccgggccggttatgaaacgcttggccgcatctggcagtggttaaaaggttcatcaggcgagccacggcaag

SEQ ID NO: 227400 - DNA, 75 bp, synthetic construct
  source 1..75: mol_type = other DNA
tcgaattaacgctgaacgggcaaaaagcatcaattgataagttacgctatgccccggataacaaatcagcgaaat

SEQ ID NO: 227401 - DNA, 75 bp, synthetic construct
  source 1..75: mol_type = other DNA
ccgtaccgaaagagcatagcaagatgggtaatgttatccgccgtccaatcttcgaacaaattaagccttttctcg

SEQ ID NO: 227402 - DNA, 75 bp, synthetic construct
  source 1..75: mol_type = other DNA
acaatccttagatgagaagttaatagaagcttccagtaaagcggatacaccgctcaatgttctcaacgatatttt

SEQ ID NO: 227403 - DNA, 75 bp, synthetic construct
  source 1..75: mol_type = other DNA
atgaagaaaggtttacttgcagttgctctggcggctatttgcacaatgggtcttactggctgtgatcgcgtagag

SEQ ID NO: 227404 - DNA, 75 bp, synthetic construct
  source 1..75: mol_type = other DNA
caaagtagacccgaccaaagtaaccacggtttttcagacctaccgcaaaggcgtggatgacattaccgacactga

SEQ ID NO: 227405 - DNA, 75 bp, synthetic construct
  source 1..75: mol_type = other DNA
actttattgagtcgccacgatggctggcagggaaagggcaaatcgcaggtgcagaatgccaacttcgtgaagtag

SEQ ID NO: 227406 - DNA, 75 bp, synthetic construct
  source 1..75: mol_type = other DNA
caagtctgaactgctggattcagcacttaaagatattcaggcagaaatgacccccatcggcattcaggtaatgag

SEQ ID NO: 227407 - DNA, 75 bp, synthetic construct
  source 1..75: mol_type = other DNA
ccattgttcttccgaccattggccttgtcggttgcgatcgcgttgaaccaggtaatgttggcatcaaggtaaata

SEQ ID NO: 227408 - DNA, 75 bp, synthetic construct
  source 1..75: mol_type = other DNA
cgtgcgcaagcagaagcagacgccattcgtctgcgcggtgaagctctgcgtcaaaacccgaacgttatggaactg

SEQ ID NO: 227409 - DNA, 75 bp, synthetic construct
  source 1..75: mol_type = other DNA
acttagtgcagttgccgaatatgtccgtgctggaactcgacccaggctcaagcccagcggggatcacagacaaac

SEQ ID NO: 227410 - DNA, 75 bp, synthetic construct
  source 1..75: mol_type = other DNA
ttttacaggcgcttgatgactacggacagttgttgaaaatcagcgaagaggtgaacgcggagccagatcttgcgg

SEQ ID NO: 227411 - DNA, 75 bp, synthetic construct
  source 1..75: mol_type = other DNA
cgtggaccgaaatcgactacctgatggggccagccacctgcgtgccgctgtatcaacaactgaaagccgagttcc

SEQ ID NO: 227412 - DNA, 75 bp, synthetic construct
  source 1..75: mol_type = other DNA
gagagtcagggtatattatgaaccaaatatctggaaacatgaggagttttctaaaataacaacaaatgctatagc

SEQ ID NO: 227413 - DNA, 75 bp, synthetic construct
  source 1..75: mol_type = other DNA
cgtggaccgaaatcgactacctgatggggccagccacctgcgtgccgctgtatcagcagctgaaagccgagttcc

SEQ ID NO: 227414 - DNA, 75 bp, synthetic construct
  source 1..75: mol_type = other DNA
cgacgatgtctataaagaaaacatagcggctattaatccagaaagcattataaaaattgttgataaaagatatga

SEQ ID NO: 227415 - DNA, 75 bp, synthetic construct
  source 1..75: mol_type = other DNA
tcttcccgactttcaaacaaatgaagacttacgatgagccgttcaacttccagatgagtgacggcacaaccatcg

SEQ ID NO: 227416 - DNA, 75 bp, synthetic construct
  source 1..75: mol_type = other DNA
tcttggttcgctggaaagcaccgctgcagtgcgcattccagccacgctggcggaattcaaccgtcgttatcccaa

SEQ ID NO: 227417 - DNA, 75 bp, synthetic construct
  source 1..75: mol_type = other DNA
atgaaaaaaattatttttgctttagccattgttctgccgactattggccttgtcggttgcgatcgcgttgaacca

SEQ ID NO: 227418 - DNA, 75 bp, synthetic construct
  source 1..75: mol_type = other DNA
ccatcggtattcaggtaatgagcctctcatatgtgggtaagccggagtacccgtcaaccgttatcgacagcatta

SEQ ID NO: 227419 - DNA, 75 bp, synthetic construct
  source 1..75: mol_type = other DNA
aggcgtttcgtccgcaggtgatggatgtcgacaaaccgctgccgcatattcgccttgatgccgcgcttgaatttt

SEQ ID NO: 227420 - DNA, 75 bp, synthetic construct
  source 1..75: mol_type = other DNA
tcccgcctggccgacgcctacgcgcggcgtcagtgaaattcgcctggcgctacgttttaaatcgaacgattcgct

SEQ ID NO: 227421 - DNA, 75 bp, synthetic construct
  source 1..75: mol_type = other DNA
aagcgtttcgcccgcaggtgatggatgtcgacaaaccgctgccgcatattcgtcttgatgccgcgcttgaatttt

SEQ ID NO: 227422 - DNA, 75 bp, synthetic construct
  source 1..75: mol_type = other DNA
tgtggggctcggtggcgtttgtcattggctcggcgctgacgggcaaactggtcactatgtttgattatcgggtga

SEQ ID NO: 227423 - DNA, 75 bp, synthetic construct
  source 1..75: mol_type = other DNA
tgggagcaacgacggcgttgccgtggttgatagtggtgcaaattctgcattgcggtaccttcacggtctgccacc

SEQ ID NO: 227424 - DNA, 75 bp, synthetic construct
  source 1..75: mol_type = other DNA
aaagacattcaggcagaaatgacacctatcggcattcaggtaatgagcctctcttatgtcggtaaaccggaatac

SEQ ID NO: 227425 - DNA, 75 bp, synthetic construct
  source 1..75: mol_type = other DNA
gcgatcaacaaatggaacggaacgctaccgcagtatatgaccagtaataccgctgttccgtttgttccggtgaaa

SEQ ID NO: 227426 - DNA, 75 bp, synthetic construct
  source 1..75: mol_type = other DNA
atgaaaaaaattattttttctttagccattgttctgcctgccattggccttgtcggttgtgatcgtgttgagcct

SEQ ID NO: 227427 - DNA, 75 bp, synthetic construct
  source 1..75: mol_type = other DNA
agcgacgctggaagcagaaattgctcgtttgcgcgaagttcacagccagaaactcagcaaagaagcgcaaaagct

SEQ ID NO: 227428 - DNA, 75 bp, synthetic construct
  source 1..75: mol_type = other DNA
gggatgcgctttccgacgggcgtgtcgaactggcgattggcgcgacacgagcgattccggtcgggggacgttatg

SEQ ID NO: 227429 - DNA, 75 bp, synthetic construct
  source 1..75: mol_type = other DNA
cgccgtcaccgtgatgtggaattgaccgctgccggagcgtggtttttaaaagaggggcgttctgttgtcaaaaaa

SEQ ID NO: 227430 - DNA, 75 bp, synthetic construct
  source 1..75: mol_type = other DNA
ccgctgccggagcgtggtttctcaaagaagggcgctctgttgtcaaaaaaatgcagatcacccgccagcaatgtc

SEQ ID NO: 227431 - DNA, 75 bp, synthetic construct
  source 1..75: mol_type = other DNA
atgaacaccgcaatttttaacggcaaagcatccatgaccagcgttgagatcgcagagctggtgggaagccgacca

SEQ ID NO: 227432 - DNA, 75 bp, synthetic construct
  source 1..75: mol_type = other DNA
gcaatttttaacgacaaagtatccatgaccagcgttgaaatcgcagagctggttggaagtcaacacggcaatgtc

SEQ ID NO: 227433 - DNA, 75 bp, synthetic construct
  source 1..75: mol_type = other DNA
cattcagcgatgatacattgcgcaactggccgtcactggtgcgcgaagacacctcacggacgctacccaaacgta

SEQ ID NO: 227434 - DNA, 75 bp, synthetic construct
  source 1..75: mol_type = other DNA
ataatcaacaacttaggattaaaacgaaatgtaggtgcttacatcttcgaaggcgaacaaggtaagcgcgacagc

SEQ ID NO: 227435 - DNA, 75 bp, synthetic construct
  source 1..75: mol_type = other DNA
gactggtcggaacccgacctgtggatcagcgagcgcttaacgggtgaagatgccgacatcgcccgtcgtatttgg

SEQ ID NO: 227436 - DNA, 75 bp, synthetic construct
  source 1..75: mol_type = other DNA
taaagctatgatgaaagccgtctcaggctattccctgaaagcggtacgcaatatgattaccgccattcacgagca

SEQ ID NO: 227437 - DNA, 75 bp, synthetic construct
  source 1..75: mol_type = other DNA
ttgttgatgcggtagcgcgtaatggtagttttagcgctgcggcccaggagttgcatcgcgttccttctgcggtca

SEQ ID NO: 227438 - DNA, 75 bp, synthetic construct
  source 1..75: mol_type = other DNA
ggtgacagtgcgggcggacatctggcgctggtaactgctttgcgattaaagcgtgctggcgagtggcaaccggca

SEQ ID NO: 227439 - DNA, 75 bp, synthetic construct
  source 1..75: mol_type = other DNA
gcgtgaactgacaattgcggtgaacaatattatacctggtgattttctggtgtcatttattcaagattttgaacg

SEQ ID NO: 227440 - DNA, 75 bp, synthetic construct
  source 1..75: mol_type = other DNA
aaatggttgccgcgatggctcttgaagccgttcgccagcagaaacggatcactcaggtggaagaaaaagtcagcc

SEQ ID NO: 227441 - DNA, 75 bp, synthetic construct
  source 1..75: mol_type = other DNA
ctcaactgatccgggagagttactactgcttgagcgttccccggaagggatactggccttccattttttacctgt

SEQ ID NO: 227442 - DNA, 75 bp, synthetic construct
  source 1..75: mol_type = other DNA
gtgaagatgccaggcgactggtgctgggcttattgccgctgtacaagcataagccccgctttgctcatcaggcga

SEQ ID NO: 227443 - DNA, 75 bp, synthetic construct
  source 1..75: mol_type = other DNA
ctcgtgtagagataagcgagtcagagttatggggtatatcaaataatcctgtaaaccacgctcaccaacgaaatc

SEQ ID NO: 227444 - DNA, 75 bp, synthetic construct
  source 1..75: mol_type = other DNA
tgcgatgaccacgccgcacggtctgggctacgtgaagatggtgattatggtcgatgaagacgttgacccgttcaa

SEQ ID NO: 227445 - DNA, 75 bp, synthetic construct
  source 1..75: mol_type = other DNA
aatcgaagggccgttcggtgagtttaccgggcactactccggcgggcgtaacatgaccgtggtgcgcatcgataa

SEQ ID NO: 227446 - DNA, 75 bp, synthetic construct
  source 1..75: mol_type = other DNA
tccgatcatcacgctgatgggggccacgccgctgaaatatgatcagtccgagtacgaaatggcgggcgcgctgcg

SEQ ID NO: 227447 - DNA, 75 bp, synthetic construct
  source 1..75: mol_type = other DNA
tcagggcaaagtcagacgaagcaagaaaagaccctttcattgcctgctaaggaaggtgcgaacaagtccctgata

SEQ ID NO: 227448 - DNA, 75 bp, synthetic construct
  source 1..75: mol_type = other DNA
cgctttccagtcaaataacctttaacacgactcagcaaggcgacatgtacaccattattccagaagtaaccctga

SEQ ID NO: 227449 - DNA, 75 bp, synthetic construct
  source 1..75: mol_type = other DNA
atgataagcaccgtcgcattattttgggctttatgtgtcgtttgcattgttaacatggcgcgctatttctcatca

SEQ ID NO: 227450 - DNA, 75 bp, synthetic construct
  source 1..75: mol_type = other DNA
aacttactgtatcagttgaggcttatgtgcgtaagcgcgttaaaacttttaggagaggaactgggggatgaagtc

SEQ ID NO: 227451 - DNA, 75 bp, synthetic construct
  source 1..75: mol_type = other DNA
gagcttcttgtttctatatccccaatttcctctcttaagttcgattgggagtgggccccagttgatacaatactc

SEQ ID NO: 227452 - DNA, 75 bp, synthetic construct
  source 1..75: mol_type = other DNA
aaaagtgtatgtattgaggtacttggtgaaattatgtcgacatatacctttaacgtatattcatttgacaactga

SEQ ID NO: 227453 - DNA, 75 bp, synthetic construct
  source 1..75: mol_type = other DNA
atggcgaaccgtgcgaacgctgtggcggcatcattgagaaaaccacgctgtcatctcgcccgttttactggtgcc

SEQ ID NO: 227454 - DNA, 75 bp, synthetic construct
  source 1..75: mol_type = other DNA
ttgaaacagatcgctttctacaggcgttctggaaggcccggtgccttccgtgggttaaaagaacgcgtcacttgg

SEQ ID NO: 227455 - DNA, 75 bp, synthetic construct
  source 1..75: mol_type = other DNA
tcaacacgttacccatgtggaaacgcgtggtaaggcgttgttaactcatttttccaacgacttaacgctctacag

SEQ ID NO: 227456 - DNA, 75 bp, synthetic construct
  source 1..75: mol_type = other DNA
ctgtaccgtctcgaccgtaagcatactttcattctggtcgctggctattccgttcacctccgcgccaagtgttac

SEQ ID NO: 227457 - DNA, 75 bp, synthetic construct
  source 1..75: mol_type = other DNA
ttgataaagctgcccgaatatttcattttattgccgggaaaggctctgccacctacagtgaaattcaccagaatg

SEQ ID NO: 227458 - DNA, 75 bp, synthetic construct
  source 1..75: mol_type = other DNA
atgaaattccgtgcattcctctcccgccgctggcggtacatcgtttacgccaccacgccggtgctggttgccctg

SEQ ID NO: 227459 - DNA, 75 bp, synthetic construct
  source 1..75: mol_type = other DNA
aaggaaaatatattggggtatgcaggtcgattagaggacagtaagaatgttgatttaattataaaatctcttatt

SEQ ID NO: 227460 - DNA, 75 bp, synthetic construct
  source 1..75: mol_type = other DNA
agcggtcagtgataatgacgatatgatgatcctggtcgtggatgatcatccgattaaccgtcgtttgctggccga

SEQ ID NO: 227461 - DNA, 75 bp, synthetic construct
  source 1..75: mol_type = other DNA
gcaatgaaaacgtggcgatttgtgtgctggtggatgtttcttcgcgcgtgaagatggaagagtcgctgcaggaga

SEQ ID NO: 227462 - DNA, 75 bp, synthetic construct
  source 1..75: mol_type = other DNA
aaagcgccaggggagtgggtacacagtgtggctgctccgcatgagctaccggcattgttggcgcgtatttatttg

SEQ ID NO: 227463 - DNA, 75 bp, synthetic construct
  source 1..75: mol_type = other DNA
ggtcataccctgatttcgttgaccggaccggaaagtaaaatcaaagctgaaccgcgttggatgcaggaacgctcc

SEQ ID NO: 227464 - DNA, 75 bp, synthetic construct
  source 1..75: mol_type = other DNA
cggtatggacagttgcctgtcgaagccggtaacgctggatgttataatacagacactgacggtatatgccgagag

SEQ ID NO: 227465 - DNA, 75 bp, synthetic construct
  source 1..75: mol_type = other DNA
gttttcaccgcgtgaagtgatgaaccatatcaccgccaactatttgccgctggtggtgcgaaagcagcttggttt

SEQ ID NO: 227466 - DNA, 75 bp, synthetic construct
  source 1..75: mol_type = other DNA
aactgcctgttggctatgtggtgggtgcctacacaaccacttgaagcattgaaggttgtagaagcatggggcttt

SEQ ID NO: 227467 - DNA, 75 bp, synthetic construct
  source 1..75: mol_type = other DNA
ctgcgcaaccttacttaagcctgtttctgccgaacatcacgagaaaaagagcggtttcttcggctggtttaataa

SEQ ID NO: 227468 - DNA, 75 bp, synthetic construct
  source 1..75: mol_type = other DNA
agcggacgcaaaaagtgttggatcaagtgacggattactatctgaagaacgagaaagcgaacgttgaaagtgtct

SEQ ID NO: 227469 - DNA, 75 bp, synthetic construct
  source 1..75: mol_type = other DNA
gaacgatcagatcgctgccggacagttgggcggaacgccagcgttaccagggcaacagttgaacgcctcgattat

SEQ ID NO: 227470 - DNA, 75 bp, synthetic construct
  source 1..75: mol_type = other DNA
atttatttaactatgacgatattacgcagttgcataaccgtttgtcgtcgatggcaccgcgcctggcggaggatt

SEQ ID NO: 227471 - DNA, 75 bp, synthetic construct
  source 1..75: mol_type = other DNA
ttaacggctttagcttcagcggccaggcacaaaacgccggtatggccttcgtcagtctgaaaccgtgggaagagc

SEQ ID NO: 227472 - DNA, 75 bp, synthetic construct
  source 1..75: mol_type = other DNA
gcgaaagccattaaggcaaaactggcggaattacagccattcttcccgcagggaatgaaggttctctacccttat

SEQ ID NO: 227473 - DNA, 75 bp, synthetic construct
  source 1..75: mol_type = other DNA
ctgattactaacccacagaaggctctacagggtgaagaaacatcattcggtgccgatgcactgaaaacagcccgc

SEQ ID NO: 227474 - DNA, 75 bp, synthetic construct
  source 1..75: mol_type = other DNA
gttatagctgaatgggtacctttgctacaaccatactttaatcatcaaattgatatttccggtaatgagtatttt

SEQ ID NO: 227475 - DNA, 75 bp, synthetic construct
  source 1..75: mol_type = other DNA
caatgcggaacaccatccattgagatggttccgggtattgttaaatttctggagaaaaccaatgagcgaaaaaac

SEQ ID NO: 227476 - DNA, 75 bp, synthetic construct
  source 1..75: mol_type = other DNA
gcgcattgggcgagcctgtgcagaaggcaaaattgccatcaacgccaaaggcagtctgtacgagaaaaagccgtc

SEQ ID NO: 227477 - DNA, 75 bp, synthetic construct
  source 1..75: mol_type = other DNA
aaaagctgaatgcgaaaatctgcagcgagctgttcattcctgaagaattcgacaccatactgcttgatgccgcga

SEQ ID NO: 227478 - DNA, 75 bp, synthetic construct
  source 1..75: mol_type = other DNA
agcacccagaacttctgacacttgtcgtatccgtgcgcgaaggtaactccgacgcagcgcagcagctattccgtg

SEQ ID NO: 227479 - DNA, 75 bp, synthetic construct
  source 1..75: mol_type = other DNA
ggtggccttgccagcagtaagctgacgcagtcgcggacaggtttttcatttttgccgggttttacaggcaaatca

SEQ ID NO: 227480 - DNA, 75 bp, synthetic construct
  source 1..75: mol_type = other DNA
tggatatcagccagcaactgagcgattttgtaaagacaacgacaggcgttaactccagcccgacactgacgaagc

SEQ ID NO: 227481 - DNA, 75 bp, synthetic construct
  source 1..75: mol_type = other DNA
tatcagcatggtctggcaacgggtttttaatcgcccttatcagttgtcgccggatattgcaggagacacaagact

SEQ ID NO: 227482 - DNA, 75 bp, synthetic construct
  source 1..75: mol_type = other DNA
tagaaatggcgaaaaatcttaagccttctgcccgtggtgaactggaaattaccgatattaaccgtatctatatgg

SEQ ID NO: 227483 - DNA, 75 bp, synthetic construct
  source 1..75: mol_type = other DNA
ctcctgcgatgattaaagacaataccgcatccgattttttgagcagaaatggggatgtacttgttttttacggta

SEQ ID NO: 227484 - DNA, 75 bp, synthetic construct
  source 1..75: mol_type = other DNA
ccggcagagcaggtaacggtgagcggctatgttcttgaagtccagacgacagaccgcaatgcaaccggactgcaa

SEQ ID NO: 227485 - DNA, 75 bp, synthetic construct
  source 1..75: mol_type = other DNA
ttggcgataatatcttctatggacatgacttgccgaagttaatggaaactgctgttaataaagaaagcggtgcaa

SEQ ID NO: 227486 - DNA, 75 bp, synthetic construct
  source 1..75: mol_type = other DNA
gtttcctgcccggaagaaattgcttaccgtaaagggtttattgatgctgagcaggtgaaagtattagctgaaccg

SEQ ID NO: 227487 - DNA, 75 bp, synthetic construct
  source 1..75: mol_type = other DNA
atgaaaacgcgtaaaggtattattttagcgggtggttctggtactcgtctttatcctgtgactatggtcgtcagt

SEQ ID NO: 227488 - DNA, 75 bp, synthetic construct
  source 1..75: mol_type = other DNA
atttattccttatttgataatgttatatataatttcaaaggaatatggggttattggtgttgcgtggttatggac

SEQ ID NO: 227489 - DNA, 75 bp, synthetic construct
  source 1..75: mol_type = other DNA
tcccgaaacggggttgactggatttatattccggcgaagaaggaatataaggagcctgtcagcgtattcacgtat

SEQ ID NO: 227490 - DNA, 75 bp, synthetic construct
  source 1..75: mol_type = other DNA
gacattctgatcatcagtacgccacaggatcccccgcgctttgaacagcttctgggcgacggcagtcagtggggg

SEQ ID NO: 227491 - DNA, 75 bp, synthetic construct
  source 1..75: mol_type = other DNA
aacaggggcgtttatccgttgccatgatggggcgtggatatgcatggctggacacgggaacacatcaaagtctta

SEQ ID NO: 227492 - DNA, 75 bp, synthetic construct
  source 1..75: mol_type = other DNA
gttagagcgtcgagttcttcaactggaagaccagaagaaacgagcagccattcagtcagctaatcgtcgaggcgt

SEQ ID NO: 227493 - DNA, 75 bp, synthetic construct
  source 1..75: mol_type = other DNA
tgaccaacgcacagctgaacaacacggtgaccaataagatcaaggaggtttacacctctaacgtcaacgtttatg

SEQ ID NO: 227494 - DNA, 75 bp, synthetic construct
  source 1..75: mol_type = other DNA
aagggttttgcaactatgcgagattatggagtggacggttaccccccacgaacttcgtcctgacatttaccccaa

SEQ ID NO: 227495 - DNA, 75 bp, synthetic construct
  source 1..75: mol_type = other DNA
ctcgatttctcgaagattgaatcggaacagttgaagatcgaaccgcgtgagttttcaccgcgtgaagtgatgaac

SEQ ID NO: 227496 - DNA, 75 bp, synthetic construct
  source 1..75: mol_type = other DNA
cgataccgcgttgaaagctttgcatgaacgcatcaataaatatcgaaatgcaccacaagatgatagcggcagtaa

SEQ ID NO: 227497 - DNA, 75 bp, synthetic construct
  source 1..75: mol_type = other DNA
gggaaccagcattatggtcgcttctcaggacccgccatcagtcccgatctctcttatcgagttgtcttcacagat

SEQ ID NO: 227498 - DNA, 75 bp, synthetic construct
  source 1..75: mol_type = other DNA
gatggggcgtggttatgcatggctggacacggggacacatcaaagtcttattgaagcaagcaacttcattgcaac

SEQ ID NO: 227499 - DNA, 75 bp, synthetic construct
  source 1..75: mol_type = other DNA
actgatattaaccgtatttatatggaacaaggacgtttgtctgtcgctatgatggggcgtggttatgcatggctg

SEQ ID NO: 227500 - DNA, 75 bp, synthetic construct
  source 1..75: mol_type = other DNA
gtttattatcggtgaagagtttatcggtggtgatgattgtgctttggtacttggtgataatatcttctacggtca

SEQ ID NO: 227501 - DNA, 75 bp, synthetic construct
  source 1..75: mol_type = other DNA
atggcgtggactgtcaccccccacgagctccgaccagatatttaccctaacccaaccgatggcctgccttgtgga

SEQ ID NO: 227502 - DNA, 75 bp, synthetic construct
  source 1..75: mol_type = other DNA
aggctgtcgttctcatccggaaattccggtcaatgatgaacaatcgctggtgatggaatcatctttactggcagc

SEQ ID NO: 227503 - DNA, 75 bp, synthetic construct
  source 1..75: mol_type = other DNA
gcaggttaaaaagttggctgaaccgctgaagaaaaatgcttatggtcagtatctgctgaaaatgattaaaggcta

SEQ ID NO: 227504 - DNA, 75 bp, synthetic construct
  source 1..75: mol_type = other DNA
gaaaactacctggctgcgcgtgacgattgccgcccctgccctctggcaagtcaccgagtttctgcgcggttgggt

SEQ ID NO: 227505 - DNA, 75 bp, synthetic construct
  source 1..75: mol_type = other DNA
taatacgctgaagatttactacaacgcaacggctccgctgatgggcaaatcatcgttgattatctggccggagtc

SEQ ID NO: 227506 - DNA, 75 bp, synthetic construct
  source 1..75: mol_type = other DNA
gaaaaccacctggctgcgcgtggcgattgccgcccctgctctctggcaagtgaccgagtttctgcgcggttgggt

SEQ ID NO: 227507 - DNA, 75 bp, synthetic construct
  source 1..75: mol_type = other DNA
tcttaatacgctgaaaatttactacaacgcgacggcgccgctgatgggcaaatcgtcgctgattatctggcctga

SEQ ID NO: 227508 - DNA, 75 bp, synthetic construct
  source 1..75: mol_type = other DNA
tagctcgctggtcaccgggattgtcgacgcgcgtctcaataagcagaaccgctacgatacctacaacaccatcat

SEQ ID NO: 227509 - DNA, 75 bp, synthetic construct
  source 1..75: mol_type = other DNA
tccgtgaatggtattcagcttaccgcagccatttgctacgagatcattcttggcgagcaggtgcgcgataacttc

SEQ ID NO: 227510 - DNA, 75 bp, synthetic construct
  source 1..75: mol_type = other DNA
caacgccactggagcgacgactggcgcaaacctgcagggggatttctgatctgcaggtgccgctgcgtgacttgt

SEQ ID NO: 227511 - DNA, 75 bp, synthetic construct
  source 1..75: mol_type = other DNA
actaccagtgccgtgcggcgggtggtggaaccgttcggcttcctgatccgcattattgagtggtggcagaccgga

SEQ ID NO: 227512 - DNA, 75 bp, synthetic construct
  source 1..75: mol_type = other DNA
aaacgctgcgtcatccattgatgcgggcagaatacctgctttcgctgcacggttttgatcttgccagcgagcagc

SEQ ID NO: 227513 - DNA, 75 bp, synthetic construct
  source 1..75: mol_type = other DNA
tggcagcggtattaactgggtctatgtcagcatcgcgacctttggcgggatgcctggcccggttaacatcttcct

SEQ ID NO: 227514 - DNA, 75 bp, synthetic construct
  source 1..75: mol_type = other DNA
atggcttttgcctcattaattgaacgccagcgcattcgcctgctggcgttattattcggtgcctgcggaacgctg

SEQ ID NO: 227515 - DNA, 75 bp, synthetic construct
  source 1..75: mol_type = other DNA
gctttctccgttgacagatgggatgagaactggccccagacaacgaagcgtaaggcgatagctgatgcgttttac

SEQ ID NO: 227516 - DNA, 75 bp, synthetic construct
  source 1..75: mol_type = other DNA
ttaaatcactttcagaccacccagatgccctggctacgtttgaacctaacgatttgatgaaacttgcaacaggca

SEQ ID NO: 227517 - DNA, 75 bp, synthetic construct
  source 1..75: mol_type = other DNA
atgcaaaagtgaaaaatcccgaggctggacaatatatggggaatattaaaattactttcacaccaagtagtcaaa

SEQ ID NO: 227518 - DNA, 75 bp, synthetic construct
  source 1..75: mol_type = other DNA
tagcacttaactcatctcattttcaatgtaatagagaacaagcttcaggtgctactttatcgttatacataccag

SEQ ID NO: 227519 - DNA, 75 bp, synthetic construct
  source 1..75: mol_type = other DNA
ctaaatctgatgggaaattttatctaaggaaaataaatgatgacaccaaagaaattgcatatactttgtcacttc

SEQ ID NO: 227520 - DNA, 75 bp, synthetic construct
  source 1..75: mol_type = other DNA
aatcacaactattaatctcgagtttacggaaagaaaaagtttaataaaaaaagtcctgcaggtaaaggggtacaa

SEQ ID NO: 227521 - DNA, 75 bp, synthetic construct
  source 1..75: mol_type = other DNA
ttatttaagcagtaccggctataccaccgctgaaacgctggccgcatacagtgacctgacctggcatttaaccga

SEQ ID NO: 227522 - DNA, 75 bp, synthetic construct
  source 1..75: mol_type = other DNA
agccctgggaaatgggctttgccgcctcacgcgaatgtacccgcgccacccaggacgcctatgtgggatggaatg

SEQ ID NO: 227523 - DNA, 75 bp, synthetic construct
  source 1..75: mol_type = other DNA
accgttaccaaagctttctttgaatttgagtatcagagaaatagtgacgcagatagctatacccagggggatcac

SEQ ID NO: 227524 - DNA, 75 bp, synthetic construct
  source 1..75: mol_type = other DNA
aatataacgcactccgtagagagtttaacagctctgttcgtccgaactttctcaagtcgatttccactcacccgg

SEQ ID NO: 227525 - DNA, 75 bp, synthetic construct
  source 1..75: mol_type = other DNA
gtccctgaattgctgaccagcccaaaagataagccttatatctgttctggatacgatcctgtctatgatgccctt

SEQ ID NO: 227526 - DNA, 75 bp, synthetic construct
  source 1..75: mol_type = other DNA
ctgcgctgtaagagatgcattttccaatctggaaaatcttcttattgctgcggaaattataaatacatgtcatga

SEQ ID NO: 227527 - DNA, 75 bp, synthetic construct
  source 1..75: mol_type = other DNA
cgggtgaaaacagaaaattcagggtgacagggcgcggcactggtaaggcgctcagaatggcgcttaagcctctta

SEQ ID NO: 227528 - DNA, 75 bp, synthetic construct
  source 1..75: mol_type = other DNA
cgatcacccgattgcccaagatgtgatcatgcgtaccagagaaacaggcaattttacctacgcagacctcaatca

SEQ ID NO: 227529 - DNA, 75 bp, synthetic construct
  source 1..75: mol_type = other DNA
gtacagaactggctggagaatggtcgggatctacctaccatcgctttctgcgtcaacgtagctcacgccaattat

SEQ ID NO: 227530 - DNA, 75 bp, synthetic construct
  source 1..75: mol_type = other DNA
ctgacaatccagtttaacctggcgggtgttaacgctgaggtaatgaccgccgacactccggtagatgagcgccag

SEQ ID NO: 227531 - DNA, 75 bp, synthetic construct
  source 1..75: mol_type = other DNA
ccatcatggggagttcggatctggttggcgatatcgttagcaactggcttgagaatggcgaggatttaccgacga

SEQ ID NO: 227532 - DNA, 75 bp, synthetic construct
  source 1..75: mol_type = other DNA
tacggttcatcgcctgggatttcctgaaaatattgagtatgacgaactgcccggcaaaaacgacgggatgcaggt

SEQ ID NO: 227533 - DNA, 75 bp, synthetic construct
  source 1..75: mol_type = other DNA
aaaattcggtgtatggccgagagggttacatcacaccccgcagcaaatcacacctgaagtgacgaatttcatcaa

SEQ ID NO: 227534 - DNA, 75 bp, synthetic construct
  source 1..75: mol_type = other DNA
agtgatgttcgctgcatcatctttgcccgaccgactaaaagtgaaattcgctggattcagacgcttgggcgagga

SEQ ID NO: 227535 - DNA, 75 bp, synthetic construct
  source 1..75: mol_type = other DNA
tcaaccagttccagagcacgatgccacaggtgaaagagcagatgaaagcggcggggaaagacccggtgctgctgg

SEQ ID NO: 227536 - DNA, 75 bp, synthetic construct
  source 1..75: mol_type = other DNA
caagcaggagctgacggtgtataccctgaataatgagctggaaaatctgctgactaacctagtgaatcaggcgca

SEQ ID NO: 227537 - DNA, 75 bp, synthetic construct
  source 1..75: mol_type = other DNA
acagccagttgctgaaagtgtaccgggcgctgctgaccgaaggcgtttccctgcgcgatatcgtcaccatcgcca

SEQ ID NO: 227538 - DNA, 75 bp, synthetic construct
  source 1..75: mol_type = other DNA
gcctgatcaagcctacaacgattcgtgaacttattcagcgtggtgatctgagcgattacgagttttttgccccct

SEQ ID NO: 227539 - DNA, 75 bp, synthetic construct
  source 1..75: mol_type = other DNA
cgctcagatttactgacgctgttgacaatcaactttatcgtcgtcaccaaaggggccgagcgtatttccgaggtt

SEQ ID NO: 227540 - DNA, 75 bp, synthetic construct
  source 1..75: mol_type = other DNA
ccgggaatgccacatctgccgtttttgctgttcagcgccctgcttggctttaccggctggcggatgagcaaacgc

SEQ ID NO: 227541 - DNA, 75 bp, synthetic construct
  source 1..75: mol_type = other DNA
tcgaacgactggttgcagagggaaatgtgaaggtgattgggttgtccggtacacccttttcatcgttcctggggc

SEQ ID NO: 227542 - DNA, 75 bp, synthetic construct
  source 1..75: mol_type = other DNA
caggtgcgcactgcgaaagatgtggtgatctccgacgcgctgacctttatggcgggtgaccgttcgcacgttgaa

SEQ ID NO: 227543 - DNA, 75 bp, synthetic construct
  source 1..75: mol_type = other DNA
aagcttaggtattattgaaccaataatagtgttctatgacaaagataaagatgccattaagatactcgatggcca

SEQ ID NO: 227544 - DNA, 75 bp, synthetic construct
  source 1..75: mol_type = other DNA
attttatttacctggaaactaataagttaattccatctaaggaattattagaaaacgtaaagcgaagccataaat

SEQ ID NO: 227545 - DNA, 75 bp, synthetic construct
  source 1..75: mol_type = other DNA
gcgagcgaagacaaatttaccggcttcgtatttaaaattcaggccaacatggacccgaaacaccgcgaccgcgtg

SEQ ID NO: 227546 - DNA, 75 bp, synthetic construct
  source 1..75: mol_type = other DNA
ggtgaaaggcgcgtctaacgagttcgacaaagagctgttccttgcaggtgaaatcaccccggtattctttggtac

SEQ ID NO: 227547 - DNA, 75 bp, synthetic construct
  source 1..75: mol_type = other DNA
ctgcctgatggttatcgacgctgcaaaaggtgttgaagatcgtacccgtaagctgatggaagttacccgtctgcg

SEQ ID NO: 227548 - DNA, 75 bp, synthetic construct
  source 1..75: mol_type = other DNA
atgaagcggatattccggcggataaactgatggccctgccctccagtgaaacctacggtgagattgacggcgtgc

SEQ ID NO: 227549 - DNA, 75 bp, synthetic construct
  source 1..75: mol_type = other DNA
atggggtatcaggtgatcgacagcgccagcgtaattgccacccatgtgaataagattgtgcgcagctatattcct

SEQ ID NO: 227550 - DNA, 75 bp, synthetic construct
  source 1..75: mol_type = other DNA
atatcgaacgcctgcgcgaaaaaggcgtgaaagtgatcggcctgtcggggacaccgttttccccgttcctgggaa

SEQ ID NO: 227551 - DNA, 75 bp, synthetic construct
  source 1..75: mol_type = other DNA
ccccgctggaagaaacttaactacaagtacctgcatgaaaagcatttgcgtctgcaatggctggaagatcaccgg

SEQ ID NO: 227552 - DNA, 75 bp, synthetic construct
  source 1..75: mol_type = other DNA
ccgcagaaagtgataaatttgaagaactggatcaccgttttcatagcattattgccgaagcgacacaaaatcggg

SEQ ID NO: 227553 - DNA, 75 bp, synthetic construct
  source 1..75: mol_type = other DNA
aagatagttgaattaaaatggcaagagaagcatctgaacctgattagtactggtctggataatcgacatatattg

SEQ ID NO: 227554 - DNA, 75 bp, synthetic construct
  source 1..75: mol_type = other DNA
tcgtctgctggcaaaacagatcgatcagccgctgcacctgggtatcaccgaagccggtggcgcacgcagcggggc

SEQ ID NO: 227555 - DNA, 75 bp, synthetic construct
  source 1..75: mol_type = other DNA
tcacgcttatcggcgcttttagcgccatccaggctgcctgggcggttgattatccgctaccaccaaccggaagcc

SEQ ID NO: 227556 - DNA, 75 bp, synthetic construct
  source 1..75: mol_type = other DNA
gtgataaaacaacacatggcggacaggtaatttctgcttcatcaaatattactgttaatggtaagaaggttgccc

SEQ ID NO: 227557 - DNA, 75 bp, synthetic construct
  source 1..75: mol_type = other DNA
caggagtttgacgtcatcggcacggttaacgcactcgaacagcgcctggaagatattatcactccgatggacgtt

SEQ ID NO: 227558 - DNA, 75 bp, synthetic construct
  source 1..75: mol_type = other DNA
catcgcctgcccaacttgttctcgtcaggagtttgacgtcatcggcacggttaacgcactcgaacagcgcctgga

SEQ ID NO: 227559 - DNA, 75 bp, synthetic construct
  source 1..75: mol_type = other DNA
gaagcacgcattcgtgcgaaagccagtcagctggacgaagcgcgtcgaattgacgttcagcaggttgaaaaataa

SEQ ID NO: 227560 - DNA, 75 bp, synthetic construct
  source 1..75: mol_type = other DNA
gcacagcatgtctgcctgtcgccgtcgcgtttgtcgcatttgttccgtcagcagttagggattagcgtcttaagc

SEQ ID NO: 227561 - DNA, 75 bp, synthetic construct
  source 1..75: mol_type = other DNA
ccaggagagattcatcactacggtcgtcatccggaggctcgcgaatggtatcaccagtgggtttactttcgtccg

SEQ ID NO: 227562 - DNA, 75 bp, synthetic construct
  source 1..75: mol_type = other DNA
agtgttattgggagcgggcattggcacgctgggctcaaccattaacccatttgctaccgtcattgctgccaacgc

SEQ ID NO: 227563 - DNA, 75 bp, synthetic construct
  source 1..75: mol_type = other DNA
gaccgttggatcaatccaccatttgaaccgaccattcgcgacggtatgttattcgggcgcggcgcggcagatatg

SEQ ID NO: 227564 - DNA, 75 bp, synthetic construct
  source 1..75: mol_type = other DNA
cacaacagcttattcgccgcccttccctgagtcctgatgacgcaggatgccaggctttgttgattgaacgtttgc

SEQ ID NO: 227565 - DNA, 75 bp, synthetic construct
  source 1..75: mol_type = other DNA
tgctgccgggctactcgttcaacgctcatctggtagccggtttaacgccaatcgaagcgaatggttatctcgatt

SEQ ID NO: 227566 - DNA, 75 bp, synthetic construct
  source 1..75: mol_type = other DNA
ggcgtcgattgtctgcgtattaaccctggcaatatcggtaatgaagagcgtattcgcatggtggttgactgcgcg

SEQ ID NO: 227567 - DNA, 75 bp, synthetic construct
  source 1..75: mol_type = other DNA
cactctgatgagagcggggctgatcaaaatcacacagacgatggtgagcagttgaacaacacggatgctccggat

SEQ ID NO: 227568 - DNA, 75 bp, synthetic construct
  source 1..75: mol_type = other DNA
aggagttgctcgactgcatttccaggcttcgggatgatgtaaatgcccttgctgtcgcattttcatatctggcat

SEQ ID NO: 227569 - DNA, 75 bp, synthetic construct
  source 1..75: mol_type = other DNA
atgcggggggtccgggaagatcagaaaaacggctggctgtttatttcgtcgaacgccgacacccatgcctccctg

SEQ ID NO: 227570 - DNA, 75 bp, synthetic construct
  source 1..75: mol_type = other DNA
actgaacatgcgttgcatcaacacagcatgttcaccattctggtcggtcgttttgttggcccgacgcgtccgctg

SEQ ID NO: 227571 - DNA, 75 bp, synthetic construct
  source 1..75: mol_type = other DNA
gccgctggcagtttgatgatgataaactcaatacactacatcatttaggcgctggcaccttcgttaccagcggca

SEQ ID NO: 227572 - DNA, 75 bp, synthetic construct
  source 1..75: mol_type = other DNA
gccaacgctggcatccattcattttgaatcacgcaaccccaaatggtcccaggaacaacaaaattctttcaagtg

SEQ ID NO: 227573 - DNA, 75 bp, synthetic construct
  source 1..75: mol_type = other DNA
tagaagatattgaatcggacgttcgctatgtaggggatggccttatcgaactcgctcaacgcttagccgttatca

SEQ ID NO: 227574 - DNA, 75 bp, synthetic construct
  source 1..75: mol_type = other DNA
ggcgtttaaacactgggatttagctgtgaatgcctttgagatgctctgtaagcgtgtagagatgctctgtaagag

SEQ ID NO: 227575 - DNA, 75 bp, synthetic construct
  source 1..75: mol_type = other DNA
atgctctgcgccgggtatgatcacctgaaggatttcccggccggttgcagcgagctggccagccaaacgctgact

SEQ ID NO: 227576 - DNA, 75 bp, synthetic construct
  source 1..75: mol_type = other DNA
gttgtcgctacagatacaggtggagtcagttctatagttatcaacgaaaggacggggatattaattaaagacccg

SEQ ID NO: 227577 - DNA, 75 bp, synthetic construct
  source 1..75: mol_type = other DNA
aaatcaacagcgtctcggttccgctaaatgttgatgcgctagttcaacttcaagcccaggttatcgccatgcaaa

SEQ ID NO: 227578 - DNA, 75 bp, synthetic construct
  source 1..75: mol_type = other DNA
tagaagatattgaatctgatgttcgctatgtgggagatggccttgttgaactcgcacaacgcttagtcgctgcta

SEQ ID NO: 227579 - DNA, 75 bp, synthetic construct
  source 1..75: mol_type = other DNA
tctgaaattgctggagcgcgttgggctttccgcacacgccaataagtttccggcgcagctttccggtggtcagca

SEQ ID NO: 227580 - DNA, 75 bp, synthetic construct
  source 1..75: mol_type = other DNA
tcgccgaaagatgctttcttcgatgatccgaaatcggaccgcgcaaaagacttcctcgcgaaaatcctgcattaa

SEQ ID NO: 227581 - DNA, 75 bp, synthetic construct
  source 1..75: mol_type = other DNA
ctcgccaaaagacgcgttctttgatgatccgaaatcagaccgcgcaaaagacttcctcgcgaaaatactgcacta

SEQ ID NO: 227582 - DNA, 75 bp, synthetic construct
  source 1..75: mol_type = other DNA
aaaataacgttgacgaatatcagaaattcatcgatgtgttatctaacgctgatatacttcttttaccaaccattg

SEQ ID NO: 227583 - DNA, 75 bp, synthetic construct
  source 1..75: mol_type = other DNA
ggatccggagatgatcaacgaagtgctggatgtgatggtggagctggcgaatgaaggaatgactatgatggtggt

SEQ ID NO: 227584 - DNA, 75 bp, synthetic construct
  source 1..75: mol_type = other DNA
gcccgtctggttccggaaaatcaacgctgattaaaaccgtcaacggcctcgaaccggtgcagcaaggtgaaatca

SEQ ID NO: 227585 - DNA, 75 bp, synthetic construct
  source 1..75: mol_type = other DNA
ggataagcagcgctggagatagtagtcggattgcgaataccggaatgcgagtacgcgtttgtacattgggtgaac

SEQ ID NO: 227586 - DNA, 75 bp, synthetic construct
  source 1..75: mol_type = other DNA
cgcgccagatgctggcaaaagcgcaaaaaccgatgctgtacgttggcggtggcgtgggtatggcgcaggcagttc

SEQ ID NO: 227587 - DNA, 75 bp, synthetic construct
  source 1..75: mol_type = other DNA
cattacagggtgatttaaacacgctgttgcctgcgttacagcagccgttaaatatcaatgactggcagcaacact

SEQ ID NO: 227588 - DNA, 75 bp, synthetic construct
  source 1..75: mol_type = other DNA
gtatacggattgggcagatagtctggttgagtatgcatggaacaaatggctgacagacgaaaactttgcccgcca

SEQ ID NO: 227589 - DNA, 75 bp, synthetic construct
  source 1..75: mol_type = other DNA
ggcatatcatgacggctgtcacgaacggtgcaatagtgatccacacccaacgcctgaaatcagatccagggggta

SEQ ID NO: 227590 - DNA, 75 bp, synthetic construct
  source 1..75: mol_type = other DNA
cctggtgcaaatcgccagctttggcgcaaacgccagaattgccaacagcggcgacaatgtacacatcattgccag

SEQ ID NO: 227591 - DNA, 75 bp, synthetic construct
  source 1..75: mol_type = other DNA
ctggatattgaagggattgtactgaagcaaggcgcgccgacggatctgccgaaagcccttgccgccctgcaaaaa

SEQ ID NO: 227592 - DNA, 75 bp, synthetic construct
  source 1..75: mol_type = other DNA
gccgctggcagtttgatgatgataagctcaatacactacatcatttaggtgctggcacgtttgttaccagcggga

SEQ ID NO: 227593 - DNA, 75 bp, synthetic construct
  source 1..75: mol_type = other DNA
gccgctggcagtttgatgatgataaactcaatacgttgcatcatttaggtgctggcacgtttgttactagcggca

SEQ ID NO: 227594 - DNA, 75 bp, synthetic construct
  source 1..75: mol_type = other DNA
gatgccggtggagtttgaaccgccacgcgtggcgattgtggtagataaatcgacatggaccagggagttgattga

SEQ ID NO: 227595 - DNA, 75 bp, synthetic construct
  source 1..75: mol_type = other DNA
ttgatcctctggtcgctgccgccacagtgttattgggagcgggcattggcacgctgggctcaaccattaacccat

SEQ ID NO: 227596 - DNA, 75 bp, synthetic construct
  source 1..75: mol_type = other DNA
atttacggcgtagcggtactgggttggtggatggcggaaatctctgctgtctttctggcagctgcggtcatcgtg

SEQ ID NO: 227597 - DNA, 75 bp, synthetic construct
  source 1..75: mol_type = other DNA
atcgaaggcaatcctgattatcttgataacgggatcccggttgcctttcatggtcataaatgtggttgtggctgt

SEQ ID NO: 227598 - DNA, 75 bp, synthetic construct
  source 1..75: mol_type = other DNA
gccatcggcgtggtggcgctggtggtgttaattcgccacccgttgatgccggtgtatatcgatattttgcgtaaa

SEQ ID NO: 227599 - DNA, 75 bp, synthetic construct
  source 1..75: mol_type = other DNA
atctcccggtggcaaaatttattacgccgaatattatcggctgcctgctgtggccaccgttttacttcctgccgg

SEQ ID NO: 227600 - DNA, 75 bp, synthetic construct
  source 1..75: mol_type = other DNA
gccagaagaaatctgcgatgatgaaactgggcgtcgagaacgacatcgctctgctgaattatctctcttctgtga

SEQ ID NO: 227601 - DNA, 75 bp, synthetic construct
  source 1..75: mol_type = other DNA
gtgagccaattcattcccgtcgaattacaccatgccagccgtctgttaaatcatggacctactgtcttgatcacc

SEQ ID NO: 227602 - DNA, 75 bp, synthetic construct
  source 1..75: mol_type = other DNA
atttggcgaagtggtatctgcagcggcagacgcacgagtatttgtcgaaggccgctggcagtttgatgatgataa

SEQ ID NO: 227603 - DNA, 75 bp, synthetic construct
  source 1..75: mol_type = other DNA
atgcacaggccgtcctgcactctatacaaaatggtatcggcagcacgcttcgaccctgtggtagccgcctccacc

SEQ ID NO: 227604 - DNA, 75 bp, synthetic construct
  source 1..75: mol_type = other DNA
agtttgcctgggctggtactgccgcaaggtatgcgcttatctggtgaacagccgctactacccgcaactggcgca

SEQ ID NO: 227605 - DNA, 75 bp, synthetic construct
  source 1..75: mol_type = other DNA
gtgaacatcaacaccacgataacgatcgatacagccctgaacaccggcctagcgctccttggttatttctacatc

SEQ ID NO: 227606 - DNA, 75 bp, synthetic construct
  source 1..75: mol_type = other DNA
gcaaactggcatgcatgctcaccataacctgagtcttggcgtggcgaactctatcgcggcggtggaagagggctg

SEQ ID NO: 227607 - DNA, 75 bp, synthetic construct
  source 1..75: mol_type = other DNA
agcatgtaaggccccgacaccacctaaaggtgtgcagccgattacaaattttgacaccaaccgctacctcggaaa

SEQ ID NO: 227608 - DNA, 75 bp, synthetic construct
  source 1..75: mol_type = other DNA
ccacactggagcgtgaaggattcagtgaaactaagctaccggagctgatagccgggcagcacccactgctggaaa

SEQ ID NO: 227609 - DNA, 75 bp, synthetic construct
  source 1..75: mol_type = other DNA
caggcatttgccaacaaccttccctggcccacctgggtggaaaataacgctaatgcttctgccattggcgagatg

SEQ ID NO: 227610 - DNA, 75 bp, synthetic construct
  source 1..75: mol_type = other DNA
accaggcacaacagccaggatagcgacaaaaggcgacctgatgatagtgatgttcagacaggagaaaacaaaatg

SEQ ID NO: 227611 - DNA, 75 bp, synthetic construct
  source 1..75: mol_type = other DNA
gtgaatatcgacaccacgataacgatcgatacggccataaatatcggtctggcacttctcggttggttttacatc

SEQ ID NO: 227612 - DNA, 75 bp, synthetic construct
  source 1..75: mol_type = other DNA
caaccacgcaacagatttttatttttaatactgtgacgctttgtactattgggttaatccatatagagactggta

SEQ ID NO: 227613 - DNA, 75 bp, synthetic construct
  source 1..75: mol_type = other DNA
atgaacggtaaaaaactttatatctcggacgtcacgttgcgtgacggtatgcacgccattcgtcatcagtattca

SEQ ID NO: 227614 - DNA, 75 bp, synthetic construct
  source 1..75: mol_type = other DNA
ggcaaacgccggatggttggcggccaggaggatatgatcgtcgatgtggcgctggatctgcgcaacaacaaataa

SEQ ID NO: 227615 - DNA, 75 bp, synthetic construct
  source 1..75: mol_type = other DNA
cagaaggcattagaagcgttctatgacgcatttgaacttagccgcatagaaccaggcacaacagccaggatagcg

SEQ ID NO: 227616 - DNA, 75 bp, synthetic construct
  source 1..75: mol_type = other DNA
ctttcgtccgcagaaggttctttggcaagggattttttgcccattgcttgccgatattgttctcattgtcgggct

SEQ ID NO: 227617 - DNA, 75 bp, synthetic construct
  source 1..75: mol_type = other DNA
gataacggtgatatcgcccatgacgtgcgtaatcagttgctggcaagcccgtcggttctctacaccgccactgga

SEQ ID NO: 227618 - DNA, 75 bp, synthetic construct
  source 1..75: mol_type = other DNA
ataaactgatggccctgccctccagcgaaacctacggcgagattgacggcgtactggggaatgacccggcatatg

SEQ ID NO: 227619 - DNA, 75 bp, synthetic construct
  source 1..75: mol_type = other DNA
gacggggcatcgaagtttgtgcgcggggatgccatcgccgggatgatgattctggcgatcaacctgatcggcggc

SEQ ID NO: 227620 - DNA, 75 bp, synthetic construct
  source 1..75: mol_type = other DNA
ttttactcgtttattctgaacggtgaagagaaagatattcctgttactgacacccgcctgggagactcgattatt

SEQ ID NO: 227621 - DNA, 75 bp, synthetic construct
  source 1..75: mol_type = other DNA
cgagatcaggctatgctaaataaagagtttatgtatcttgccagatgttttaaagctttgggaaaacaggaaggg

SEQ ID NO: 227622 - DNA, 75 bp, synthetic construct
  source 1..75: mol_type = other DNA
accgggaaaaacgtatttgttcttgaaaatcccgacgaagttcagcgcaggattgaacaggctcagaaggacact

SEQ ID NO: 227623 - DNA, 75 bp, synthetic construct
  source 1..75: mol_type = other DNA
gtgcctgccatctgccattgtccgtctggcgctggatttagcgggtatcattctggcggctgctggtctgggttt

SEQ ID NO: 227624 - DNA, 75 bp, synthetic construct
  source 1..75: mol_type = other DNA
ctggcgctggatttagcgggtatcattctggcggctgctggcctgggttttcttgggcttggtgctcgcccgcca

SEQ ID NO: 227625 - DNA, 75 bp, synthetic construct
  source 1..75: mol_type = other DNA
cgacaccacctaaaggtgtgcagccgattacaaattttgacgccaaccgctacctcggaaaatggtatgaaatag

SEQ ID NO: 227626 - DNA, 75 bp, synthetic construct
  source 1..75: mol_type = other DNA
gatttccgacggcaacggcgtgctgctgccggagatccgcattcgggaaaacttccgcctcaagcccagccagta

SEQ ID NO: 227627 - DNA, 75 bp, synthetic construct
  source 1..75: mol_type = other DNA
aaagtgatgctcgatagcgtgccggtggacccgaatatgctcaaccagttccagaacacgatgccgcaggtgaag

SEQ ID NO: 227628 - DNA, 75 bp, synthetic construct
  source 1..75: mol_type = other DNA
ctatggaaaagaaaatattgtttgtgatggagtgataagttcagtaaaatcaaacattaactctggtaataaaat

SEQ ID NO: 227629 - DNA, 75 bp, synthetic construct
  source 1..75: mol_type = other DNA
atttccggtcgccggagctgcaaccgccagaaaactggaggagtcgtccgtattcctggatgagttgattgaaga

SEQ ID NO: 227630 - DNA, 75 bp, synthetic construct
  source 1..75: mol_type = other DNA
gtggttttggaatcagtattgcccccctcactcttccggacaaaaaacagtcatcgatggtttctttttggctcg

SEQ ID NO: 227631 - DNA, 75 bp, synthetic construct
  source 1..75: mol_type = other DNA
gctggggcgcgaggcggatatatcggggagtgctgcggatattgcgcaacgtgtgtctgagtgggaagaggagct

SEQ ID NO: 227632 - DNA, 75 bp, synthetic construct
  source 1..75: mol_type = other DNA
aaaaacaaaacctcttaacgaacaaattcatgcaataagaatgaaaatgattgagccggaggtaaagttaaaata

SEQ ID NO: 227633 - DNA, 75 bp, synthetic construct
  source 1..75: mol_type = other DNA
cgcaacgccgtttcgcgcacgcgctctccgtcgttgcggcgggtccctgctcattgcctgccgggtgccacacac

SEQ ID NO: 227634 - DNA, 75 bp, synthetic construct
  source 1..75: mol_type = other DNA
actggcaccgcgtgcggtgtggcccacagattccgcatcggttatcaggcaaaaacagcagacaaaccttgtggc

SEQ ID NO: 227635 - DNA, 75 bp, synthetic construct
  source 1..75: mol_type = other DNA
atcaacgctggcatcaatccagtttgaatcatgcaatcccaaatggtctcaggaacaacaagactctttcaggcg

SEQ ID NO: 227636 - DNA, 75 bp, synthetic construct
  source 1..75: mol_type = other DNA
gcgctggtggtgttaattcgccatccgttaatgccggtgtatatcgatattttgcgtaaagtggttggggtttag

SEQ ID NO: 227637 - DNA, 75 bp, synthetic construct
  source 1..75: mol_type = other DNA
actgaacatgcgttgcatcaacacagcatgtttaccattctggtcggtcgttttgtcggcccgacgcgtccgctg

SEQ ID NO: 227638 - DNA, 75 bp, synthetic construct
  source 1..75: mol_type = other DNA
agggcagcctcaggcccgggacgggcgggtggtacatctgataagtgagcggccggttcgccaccaggctgctgc

SEQ ID NO: 227639 - DNA, 75 bp, synthetic construct
  source 1..75: mol_type = other DNA
gtctgatcaaaatgacacagacgatggtgagccgttgaacaacacggatgctccggatgatgttaaagccgtccg

SEQ ID NO: 227640 - DNA, 75 bp, synthetic construct
  source 1..75: mol_type = other DNA
aaaattacacagacgatggtgagcagttgcacaacactgatgctccggatgatgttaaagcggtccgggtacgga

SEQ ID NO: 227641 - DNA, 75 bp, synthetic construct
  source 1..75: mol_type = other DNA
aaactacataaccagatttagttataataatcattctatagttgtagaaacacagcttcctgattgtggaacaac

SEQ ID NO: 227642 - DNA, 75 bp, synthetic construct
  source 1..75: mol_type = other DNA
ggatccggtagaaaacgcctcgtttatgccgtggctggtggggactgcgctgatgcactcactggcagtcactga

SEQ ID NO: 227643 - DNA, 75 bp, synthetic construct
  source 1..75: mol_type = other DNA
caacactgccgggtcgatgatgaccgaagcggcgattgacggcggcatcacgcgtgacctgtacgccgcgctcgg

SEQ ID NO: 227644 - DNA, 75 bp, synthetic construct
  source 1..75: mol_type = other DNA
ttgattatcgccttcatctctacgctggtgctgtcgctgctgttgccgtggctgttcgaaagcaaagttgtggcg

SEQ ID NO: 227645 - DNA, 75 bp, synthetic construct
  source 1..75: mol_type = other DNA
gctgatgatggcgttgggcggactgctgtgtctgtttgatcctcgctatcgtaagcgcgtgaacccgcagaaaac

SEQ ID NO: 227646 - DNA, 75 bp, synthetic construct
  source 1..75: mol_type = other DNA
tgaaggctcgctactgctgtgggtgctgctgatgagcggctggacctttgcggtagcgatttttagtcagcgtat

SEQ ID NO: 227647 - DNA, 75 bp, synthetic construct
  source 1..75: mol_type = other DNA
tgctgtgcctggcgctaggaattgcgctgttgctgtccgtgtatccgctatggggcgtggcgcgcggggatgcgc

SEQ ID NO: 227648 - DNA, 75 bp, synthetic construct
  source 1..75: mol_type = other DNA
tcgggacgaatatgaaaaatattttgactctttaaataacggcgaggaggatttgagttttaaagaatatatcgg

SEQ ID NO: 227649 - DNA, 75 bp, synthetic construct
  source 1..75: mol_type = other DNA
cataaggatacgggacaacagtatgttgtcatatttactgataacaataaaattcgtgactataaaaccggaatt

SEQ ID NO: 227650 - DNA, 75 bp, synthetic construct
  source 1..75: mol_type = other DNA
gcgacactattcgggtattcactacccacagggagccgtccggtcaggttgttcaggtctgggaagacggggaaa

SEQ ID NO: 227651 - DNA, 75 bp, synthetic construct
  source 1..75: mol_type = other DNA
gctgatgatggcgttgggcggactgctgtgtctgtttgatcctcgctatcgtaagcgcgtgagcccgcaaaaaac

SEQ ID NO: 227652 - DNA, 75 bp, synthetic construct
  source 1..75: mol_type = other DNA
acattactgctggcaatcagtgccttctcgttgtgtctgctggggactttcctcgtgcgttccggcgtgctggta

SEQ ID NO: 227653 - DNA, 75 bp, synthetic construct
  source 1..75: mol_type = other DNA
acgcgtgacggcaaaccggaaacggtgttgtatgcagaaaaacgttattacaacaccgctggttcgatgatgacc

SEQ ID NO: 227654 - DNA, 75 bp, synthetic construct
  source 1..75: mol_type = other DNA
gcaattatgccggtttacgatgcattgtatgacggcggcgtggagcacttgctgtgccgacatgagcagggcgcg

SEQ ID NO: 227655 - DNA, 75 bp, synthetic construct
  source 1..75: mol_type = other DNA
ggagccatgatgaagatcgctccacaaccagcggtatgttcttctggaagaaaacccatacccgaattgtgtctg

SEQ ID NO: 227656 - DNA, 75 bp, synthetic construct
  source 1..75: mol_type = other DNA
atgaagcgaaggattttcgctccgtcgcgggattaaaaagagttcgccaggaactggagctgtgtcgggagaaaa

SEQ ID NO: 227657 - DNA, 75 bp, synthetic construct
  source 1..75: mol_type = other DNA
aagatattgccgagctaaaagtggccctggaaaaggcattagacagcataagcaagaaaatcagacatacgcttg

SEQ ID NO: 227658 - DNA, 75 bp, synthetic construct
  source 1..75: mol_type = other DNA
ttcggtgaactgaccggtatcgcagtactgctgactatgctgccgtacttctactcttgcgttgacctgattcgt

SEQ ID NO: 227659 - DNA, 75 bp, synthetic construct
  source 1..75: mol_type = other DNA
taactgggctgcgccgctggtttctgcattcaccgcctttgcgtgcctgacttctctgggctcctggatgatgtt

SEQ ID NO: 227660 - DNA, 75 bp, synthetic construct
  source 1..75: mol_type = other DNA
aacgccactcctcactttctcacctgtatataggtcaaaaagtgaggaatgaaaaacatattgtaaaacaagaca

SEQ ID NO: 227661 - DNA, 75 bp, synthetic construct
  source 1..75: mol_type = other DNA
gataagcgcattcatgaccacagcggcggcaaactttgccacgttgacagaacgggagattgccgaagcggaaca

SEQ ID NO: 227662 - DNA, 75 bp, synthetic construct
  source 1..75: mol_type = other DNA
tgaccacagcagcggcaaactttgccacgctgacagaacgggagattgccgaagcggaacaggtaacaaccatca

SEQ ID NO: 227663 - DNA, 75 bp, synthetic construct
  source 1..75: mol_type = other DNA
tacatcccaaaaagtggggagcaaaaaaatccttatgaaacagcatgataaaaattacaaatcccacgcctttaa

SEQ ID NO: 227664 - DNA, 75 bp, synthetic construct
  source 1..75: mol_type = other DNA
gtgggcagttcagttccgccgcctgcacgacaccgaccgctcggcgtggtgggcactgttgttcttaatcccgtt

SEQ ID NO: 227665 - DNA, 75 bp, synthetic construct
  source 1..75: mol_type = other DNA
ggtggcgaaggcatcctgacgacaatctacggtattctggtgtttttaccgtggtgggcagttcagttccgccgc

SEQ ID NO: 227666 - DNA, 75 bp, synthetic construct
  source 1..75: mol_type = other DNA
atcaatgacaatatcaaggatttgaaagcttggcttaggaatgtagggaaaaccgccacatcaacacgagataag

SEQ ID NO: 227667 - DNA, 75 bp, synthetic construct
  source 1..75: mol_type = other DNA
taactgggctgcgccgatggtttctgcattcaccgcttttgcgtgcctgacttctctgggctcctggatgatgct

SEQ ID NO: 227668 - DNA, 75 bp, synthetic construct
  source 1..75: mol_type = other DNA
aaagaatattccagcagagaaaaaagacaggattatggcaactctgattgagatggaacaaaaaggcgaaatctg

SEQ ID NO: 227669 - DNA, 75 bp, synthetic construct
  source 1..75: mol_type = other DNA
tgatatcgatggtccatcaggcaacgtaaaaacacttgatgaaggtgtcacaaaaatgagcctggttcacatcgg

SEQ ID NO: 227670 - DNA, 75 bp, synthetic construct
  source 1..75: mol_type = other DNA
aaaaaatgagcctggtgcatatcggaaagaatctgcccgcagaaaaaagccggatttctggcaactctgattgca

SEQ ID NO: 227671 - DNA, 75 bp, synthetic construct
  source 1..75: mol_type = other DNA
aggacggctggctggccgtgcagaccgctgacggcagcgaaggatatacgcgtaatggcagcattcaggttgatc

SEQ ID NO: 227672 - DNA, 75 bp, synthetic construct
  source 1..75: mol_type = other DNA
aggatggttggctggccgtgcagaccgctgacggcagcgaagggtatacgcgtaatggcagcattcaggttgatc

SEQ ID NO: 227673 - DNA, 75 bp, synthetic construct
  source 1..75: mol_type = other DNA
tggctacgtgattaaaacagaaaataaagaaaccccattcactgtagttgatatcgacggtccatcaggcaacgt

SEQ ID NO: 227674 - DNA, 75 bp, synthetic construct
  source 1..75: mol_type = other DNA
tcattgtctctcccatcgtggggctggtgattgcggggggggctaatttttctgctacgccgtttctggagtggg

SEQ ID NO: 227675 - DNA, 75 bp, synthetic construct
  source 1..75: mol_type = other DNA
gctgaagcaatcgctacagccagggcgaaatgccgtgcggcgattgcagaacaggccaaagaagaagttaaggaa

SEQ ID NO: 227676 - DNA, 75 bp, synthetic construct
  source 1..75: mol_type = other DNA
gggcaaagactactctctggaagaactgtttgcccttgcacagtctttcgaatgtgtagcattagacctgtttaa

SEQ ID NO: 227677 - DNA, 75 bp, synthetic construct
  source 1..75: mol_type = other DNA
ctggcactttgctacccgaggttgcaaaagcgtggggaatggcggcggtgccagttgtcgcgggcggcggtgata

SEQ ID NO: 227678 - DNA, 75 bp, synthetic construct
  source 1..75: mol_type = other DNA
gatcataaacgcgatcagcaggcgcaggaacggcttaccgggcgacttcaggcattaaatgaaagggttcctgag

SEQ ID NO: 227679 - DNA, 75 bp, synthetic construct
  source 1..75: mol_type = other DNA
gaagtcaccaagattttctcttcactcattgtctctcccatcgtctgtctcttatacacaaatccccacccgggg

SEQ ID NO: 227680 - DNA, 75 bp, synthetic construct
  source 1..75: mol_type = other DNA
tcgcagccgagccgcattaagcgtcagcttcgtttgctgcgttatttacgctggcactacaccggcaacctctga

SEQ ID NO: 227681 - DNA, 75 bp, synthetic construct
  source 1..75: mol_type = other DNA
gctctatcgcctgctttcgcagccgagtcgcattaagcgtcagctccgtttactgcgctatttacgctggcatta

SEQ ID NO: 227682 - DNA, 75 bp, synthetic construct
  source 1..75: mol_type = other DNA
agtattgcgcagcgcagggagggctatatcgccagcgctgtccttgcgggtgagacagaaacgcgggtagatatt

SEQ ID NO: 227683 - DNA, 75 bp, synthetic construct
  source 1..75: mol_type = other DNA
tgacggtttttcttataacgggtgaatcacagaatgtgattaccagaatttatgccagtaaagaatcctgcctcc

SEQ ID NO: 227684 - DNA, 75 bp, synthetic construct
  source 1..75: mol_type = other DNA
ctcagtcacaggtttcccgcgtagctggagccgatctctgggaagagctgatggctcgcgcaggaaaagaaggga

SEQ ID NO: 227685 - DNA, 75 bp, synthetic construct
  source 1..75: mol_type = other DNA
gctctatcgcctgctttcgcagccaagccgcattaaacgccagcttcgtttactgcgctatttacgctggcacta

SEQ ID NO: 227686 - DNA, 75 bp, synthetic construct
  source 1..75: mol_type = other DNA
gcgagcggtttaattattactgcgagaaggtggtgaaggggttctataagaatcattttctgcgctttgaccgcc

SEQ ID NO: 227687 - DNA, 75 bp, synthetic construct
  source 1..75: mol_type = other DNA
ggtttaattattactgcgagaaagtggtgaaggggttctataaaaaccactttttgcgttttgaccgccagattg

SEQ ID NO: 227688 - DNA, 75 bp, synthetic construct
  source 1..75: mol_type = other DNA
tgccgccgcgtggaccgattatctccaccattgcaagcagcaggggctgcactttatccagcctggtcgctttgt

SEQ ID NO: 227689 - DNA, 75 bp, synthetic construct
  source 1..75: mol_type = other DNA
cataaaatcctcggcgtcattgcaatgccgcgaaacgaaaccaacgatctggcgctgaaacttcctgtttgtcgc

SEQ ID NO: 227690 - DNA, 75 bp, synthetic construct
  source 1..75: mol_type = other DNA
cggtgcatcggtttatttcaaagccgcccgtagcgccagtcagaccctgaatattccttcagaaataaaagaagg

SEQ ID NO: 227691 - DNA, 75 bp, synthetic construct
  source 1..75: mol_type = other DNA
cgtttgccgctgttaagtgcggtgcgtgaagagcgcctgctgggcgtaaaacgcattcctcagcgtgactttggc

SEQ ID NO: 227692 - DNA, 75 bp, synthetic construct
  source 1..75: mol_type = other DNA
tcaggaacagcgttcgctaacctgacaatagccacgtcagaacaatggcgagataaaaatactggcgagcaaaag

SEQ ID NO: 227693 - DNA, 75 bp, synthetic construct
  source 1..75: mol_type = other DNA
gatcagccgatctcaatggcggctgccaatagatttattggacgcataagatcgggaatggatgtcggttactgg

SEQ ID NO: 227694 - DNA, 75 bp, synthetic construct
  source 1..75: mol_type = other DNA
gcaaactttgccacgctgacagaacgggagattgccgaagcggaacaggtaacaaccatcaacgttaaaagcgct

SEQ ID NO: 227695 - DNA, 75 bp, synthetic construct
  source 1..75: mol_type = other DNA
cgggcgtcgcggagctggccagagagtccggtctgagcgttctcaaaattaagcgaggcttccgcgttctgttca

SEQ ID NO: 227696 - DNA, 75 bp, synthetic construct
  source 1..75: mol_type = other DNA
cattgaccttacagagcactggctgagagtggcgataaaaatcatcgaccgcaacacgggggaaggatacgcgaa

SEQ ID NO: 227697 - DNA, 75 bp, synthetic construct
  source 1..75: mol_type = other DNA
ttgccacgctgacagaacgggagattgccgaagcggaacaggtaacaaccatcaacgttaaaagcgctggagaat

SEQ ID NO: 227698 - DNA, 75 bp, synthetic construct
  source 1..75: mol_type = other DNA
cattgaccttacagagcactggctgaggatggcgataaaaatcatcgaccgcaacacgggagagggatacgcgaa

SEQ ID NO: 227699 - DNA, 75 bp, synthetic construct
  source 1..75: mol_type = other DNA
tgtcgccgttaaataaaatcagcccgtctcatccgtcaaaacctgccaccgtggcggtgccggaagagacggaga

SEQ ID NO: 227700 - DNA, 75 bp, synthetic construct
  source 1..75: mol_type = other DNA
gctttcggctcgtcgggtgctggaagaggccggaatgccggaagataaagtgatgcaggtaagcgcaatggcgga

SEQ ID NO: 227701 - DNA, 75 bp, synthetic construct
  source 1..75: mol_type = other DNA
cgccaagagcgttaagtttaaatatccgcgtcagcgtaaaacggtcgtcgctgatggtgtgggtcagggttataa

SEQ ID NO: 227702 - DNA, 75 bp, synthetic construct
  source 1..75: mol_type = other DNA
cagcgccaaaatatcgcgcattagacatgacagagcacgccttaaaggtggcaatcagaacaatagaccgccatg

SEQ ID NO: 227703 - DNA, 75 bp, synthetic construct
  source 1..75: mol_type = other DNA
aaaatcatcgaccgcaacgccggggaaggatatgcgaaagcacatcccgaactgattagcgcattcatgacaacg

SEQ ID NO: 227704 - DNA, 75 bp, synthetic construct
  source 1..75: mol_type = other DNA
gggaattaatacaggaagcaacaaatacaataaacatccttcaggatgccgtggatttaaatatggcgaccgacg

SEQ ID NO: 227705 - DNA, 75 bp, synthetic construct
  source 1..75: mol_type = other DNA
tcattgtcggaatatccggcatcgcgacgggaataatcgtcagcctgaatatcccctttatccgtcaggggcttt

SEQ ID NO: 227706 - DNA, 75 bp, synthetic construct
  source 1..75: mol_type = other DNA
gggggatgtggggccagcactgggcgcagcaaggctggcgcagattgcggcgaatccagagaaatcgctcattga

SEQ ID NO: 227707 - DNA, 75 bp, synthetic construct
  source 1..75: mol_type = other DNA
cgctggtggtgctgggcgtgtgcggcaaatggatgattatccagttgcatgatctctgcattcacctgtttaccc

SEQ ID NO: 227708 - DNA, 75 bp, synthetic construct
  source 1..75: mol_type = other DNA
cgcgacgccagatcaggtttacgccgcactgctggtagctgaccagtatggacaacgtttcctgcaagagtggga

SEQ ID NO: 227709 - DNA, 75 bp, synthetic construct
  source 1..75: mol_type = other DNA
agtgactcagcctgtgaaaacagagaaaatccgccggaaccgattttcaccggagtttaaatggaggcttgttca

SEQ ID NO: 227710 - DNA, 75 bp, synthetic construct
  source 1..75: mol_type = other DNA
ggaaagctgacccggaattaaataatttgatttatatgtggaacatcctgatgtatgccattccgtatacgttat

SEQ ID NO: 227711 - DNA, 75 bp, synthetic construct
  source 1..75: mol_type = other DNA
atgctcaacagcgggtgctacgtcctgccattttgtggaacgacgggcgctgtgcagaggagtgcgttttgctgg

SEQ ID NO: 227712 - DNA, 75 bp, synthetic construct
  source 1..75: mol_type = other DNA
ccgcagaggctggtatggcggcaagggaggccggtcatgccgtccgtgagatggagcggtggatggtgccgaaca

SEQ ID NO: 227713 - DNA, 75 bp, synthetic construct
  source 1..75: mol_type = other DNA
tacccctgagtcatgagcgtcgtgctgcaatgcaggccatcgcggaggtggagaagaaatatgagcgtggcgttc

SEQ ID NO: 227714 - DNA, 75 bp, synthetic construct
  source 1..75: mol_type = other DNA
gacccacgaaatgggctttgcccgtaaagtggcgaatcgggtgatctttatggacgagggtaaaattatcgaaga

SEQ ID NO: 227715 - DNA, 75 bp, synthetic construct
  source 1..75: mol_type = other DNA
ccgtcgatggcatcgtggttaacgacaagaaaaccgatctggcgaaactgcgttcccgcgtcgggatggtgtttc

SEQ ID NO: 227716 - DNA, 75 bp, synthetic construct
  source 1..75: mol_type = other DNA
tacccctgagtcatgagcgtcgtgctgcaatgcaggccatcgcagaagtggagaagaaatatgagcgtggcgttc

SEQ ID NO: 227717 - DNA, 75 bp, synthetic construct
  source 1..75: mol_type = other DNA
cggcaagtgcacccaggcggcgctggcactggctgaactgtgctacaacaccctgctggaagaaggcgaaaaagc

SEQ ID NO: 227718 - DNA, 75 bp, synthetic construct
  source 1..75: mol_type = other DNA
aaggttcaccttactccggctcagttgtccatgcttctcgaaggcatcgactggaagcacccgaaacgaacggaa

SEQ ID NO: 227719 - DNA, 75 bp, synthetic construct
  source 1..75: mol_type = other DNA
agcattgaaagcaattgaatatgtaagagagttatatgggatcgatgttagactaaaaatttgtggatgtactcc

SEQ ID NO: 227720 - DNA, 75 bp, synthetic construct
  source 1..75: mol_type = other DNA
tggcgctgatgctttgtgctgtggtgctgttcaaaatgaaacgtcaacgttacgcctgggtggcgctggtaccaa

SEQ ID NO: 227721 - DNA, 75 bp, synthetic construct
  source 1..75: mol_type = other DNA
ggcaccatgggttttggtttaccggcggcggttggcgcacaagtcgcgcgaccgaacgataccgtcgtctgtatc

SEQ ID NO: 227722 - DNA, 75 bp, synthetic construct
  source 1..75: mol_type = other DNA
gcagccgcccggcgaacatgaaacatcgctacttcccgtgacgttaacgccggagccggataataaaatcccggc

SEQ ID NO: 227723 - DNA, 75 bp, synthetic construct
  source 1..75: mol_type = other DNA
ctgaatgttatggaatggtattttgtgaagctgctgcttttggattgcctgttgtcgctacagatacaggtggag

SEQ ID NO: 227724 - DNA, 75 bp, synthetic construct
  source 1..75: mol_type = other DNA
gctgcggcacacgcggtgcacaatggcctgactgcaattccagatgcacatcactattatcacggtgaaaaagtg

SEQ ID NO: 227725 - DNA, 75 bp, synthetic construct
  source 1..75: mol_type = other DNA
gtaaatacatccagggcgctgatgtaattaatcgcctgggcgaatacctgaaaccgctggcagaacgttggttag

SEQ ID NO: 227726 - DNA, 75 bp, synthetic construct
  source 1..75: mol_type = other DNA
gcatttggtacgctgaccagcgccagtgaagctttcatctggttcgtccgtgaaaataagagtcacagattcgac

SEQ ID NO: 227727 - DNA, 75 bp, synthetic construct
  source 1..75: mol_type = other DNA
gcgcacctgcacgtctgttagcggcgggtatcggcgatgcgctggcgacctggtttgaagcgcgtgcctgctctc

SEQ ID NO: 227728 - DNA, 75 bp, synthetic construct
  source 1..75: mol_type = other DNA
tcactattatcacggtgaaaaagtggcattcggtacgctgacgcaactggttctggaaaacgcaccagttgagga

SEQ ID NO: 227729 - DNA, 75 bp, synthetic construct
  source 1..75: mol_type = other DNA
gcggcggcgcacgcggtgcacaatggcctgacggccattccggatgcgcatcactattatcacggtgaaaaagtg

SEQ ID NO: 227730 - DNA, 75 bp, synthetic construct
  source 1..75: mol_type = other DNA
tggcgctcggttatttcacatacttttttagctacggcatctttttgcctttctggagcgtctggcttgagggag

SEQ ID NO: 227731 - DNA, 75 bp, synthetic construct
  source 1..75: mol_type = other DNA
tggttcggcgctgacgggcaaactggtcacggtgtttgattatcgggtgatcctcgcgatgttgacgctgggcgt

SEQ ID NO: 227732 - DNA, 75 bp, synthetic construct
  source 1..75: mol_type = other DNA
ctgggcgtggtggcggaagtcattatctttgcgctgagtaataaacttttccgccgttgtagtgcacgcgatatg

SEQ ID NO: 227733 - DNA, 75 bp, synthetic construct
  source 1..75: mol_type = other DNA
aacggtggcgggttgtcgccgttgaataaaatcagcccgacccgcccgccgaaacctgccaccgtagcggtgccg

SEQ ID NO: 227734 - DNA, 75 bp, synthetic construct
  source 1..75: mol_type = other DNA
atgagaaagacgggcaaccgccgcgaccgtggggcaaaaacgaccatcgtccggcggcagatcaaaaagagtcat

SEQ ID NO: 227735 - DNA, 75 bp, synthetic construct
  source 1..75: mol_type = other DNA
acaactggaacctttcgggcgaccgcgcgctttcggctcgtcgcgtgctggaagaagccggaatgccagaagata

SEQ ID NO: 227736 - DNA, 75 bp, synthetic construct
  source 1..75: mol_type = other DNA
cacggacggtgagccagccacaggcgtgaagccgacgccgttgcttgctctctggttcaacgtcatacagcggga

SEQ ID NO: 227737 - DNA, 75 bp, synthetic construct
  source 1..75: mol_type = other DNA
tctacaaaaacaaaaccccaataacagtttttgagcaaagccgtaaagttttcaatttagtaccagatccggatg

SEQ ID NO: 227738 - DNA, 75 bp, synthetic construct
  source 1..75: mol_type = other DNA
gtgagatgaagaaatactctgtcaaaaatgatgtatctgatatcaatagaagagatttaaaagtggatttgcccc

SEQ ID NO: 227739 - DNA, 75 bp, synthetic construct
  source 1..75: mol_type = other DNA
gcccgttttctcgggagtttgctcatcgcgccccgcgtcagcgatccttcccgcctgatttccgccttgcgcgtg

SEQ ID NO: 227740 - DNA, 75 bp, synthetic construct
  source 1..75: mol_type = other DNA
gcctcaaaaaagtttcttcagttacatgaaaattgtctgttatctgcacgcgtcaccccatctgtggaaaagacg

SEQ ID NO: 227741 - DNA, 75 bp, synthetic construct
  source 1..75: mol_type = other DNA
gcaggaacctcgtttcatttatccatgcagatgatgaatcacacaaaaccgatattttcaaagctgtagtaaatg

SEQ ID NO: 227742 - DNA, 75 bp, synthetic construct
  source 1..75: mol_type = other DNA
agacagctttaggtaagttagcaaacaactgggatgacacgatggtgaaaatcttctcaggttcacaggatgagc

SEQ ID NO: 227743 - DNA, 75 bp, synthetic construct
  source 1..75: mol_type = other DNA
caatttgtattaggcgatgaaggcgctaaacgagctacagacttcgttaagaatcttgctaataatacaggtgta

SEQ ID NO: 227744 - DNA, 75 bp, synthetic construct
  source 1..75: mol_type = other DNA
aaacattcacacaagatttaaaggttatcaagccgtcagtaaacattcagcctcagacaatcaatatcacaactc

SEQ ID NO: 227745 - DNA, 75 bp, synthetic construct
  source 1..75: mol_type = other DNA
gagcaatcacagcagcgcatagcgtgaatatgagcaagcttcgtgactttaatcctatgcttgagaagtatttta

SEQ ID NO: 227746 - DNA, 75 bp, synthetic construct
  source 1..75: mol_type = other DNA
gaaaaatacacccgccagcgccgaaaagaggcgtgccagcgcgaaacggcgtatcaggcgctggcggggccaggc

SEQ ID NO: 227747 - DNA, 75 bp, synthetic construct
  source 1..75: mol_type = other DNA
agacagccacgaattagcggcaacagagcaatcacagcagcttattcagcgaatatgtctaagctgaaaggtctt

SEQ ID NO: 227748 - DNA, 75 bp, synthetic construct
  source 1..75: mol_type = other DNA
tcctgattgagttaagctttagctctcagaaagttttaaaaggtctggaaaaagctgaaaagcaaacgatgcagg

SEQ ID NO: 227749 - DNA, 75 bp, synthetic construct
  source 1..75: mol_type = other DNA
ttctgattgagctaggttttagctctcagaaagttttaaaaggcttggaaaaagccgagaaacaaacgatgcagg

SEQ ID NO: 227750 - DNA, 75 bp, synthetic construct
  source 1..75: mol_type = other DNA
ggaacttaattagagctatttccacgcttggaaatgtagcaaatacagcagcaggaagaatcaattcacgttctg

SEQ ID NO: 227751 - DNA, 75 bp, synthetic construct
  source 1..75: mol_type = other DNA
tgtggcaaacggtatcacgcatattggtccggcacggcaacaggacggcgattacagttatctggcggatatttt

SEQ ID NO: 227752 - DNA, 75 bp, synthetic construct
  source 1..75: mol_type = other DNA
acaggaattatttgatgccatgaagaagggggctttaaaatctgccgatactcttcagaaggtcactcaggaact

SEQ ID NO: 227753 - DNA, 75 bp, synthetic construct
  source 1..75: mol_type = other DNA
cagcatccagaattaatcaccatgagacaagatgcggcattaacgaatacggatatccaaagcctgagagatgaa

SEQ ID NO: 227754 - DNA, 75 bp, synthetic construct
  source 1..75: mol_type = other DNA
ggttgccaatacaacagcagacaccgtgaataaaaagaatgggaagccatcaaggctaaaccctatgaatatgct

SEQ ID NO: 227755 - DNA, 75 bp, synthetic construct
  source 1..75: mol_type = other DNA
actgggtgatggcagccagtgggggctgaatcttcaatacaaagtgcaaccgagcccagacggtcttgcgcaagc

SEQ ID NO: 227756 - DNA, 75 bp, synthetic construct
  source 1..75: mol_type = other DNA
caccttttattattgataaagacagtggtgaaattcattctctgggaacggcaaagccgctggaagaatatctac

SEQ ID NO: 227757 - DNA, 75 bp, synthetic construct
  source 1..75: mol_type = other DNA
ctcaaacaaggtgaatggttggcgctgaccggcgacaatggcgcagggaaatcgacgctgttacgagtaatggca

SEQ ID NO: 227758 - DNA, 75 bp, synthetic construct
  source 1..75: mol_type = other DNA
ttgtctttgcgacatttctctacaactcaaacaaggtgaatggctggcgctgaccggcgacaatggcgcgggaaa

SEQ ID NO: 227759 - DNA, 75 bp, synthetic construct
  source 1..75: mol_type = other DNA
gttatcaccagagcttgatcgacattactccccagcgcgtactggaagaactcaacgcgctattgttacaagagg

SEQ ID NO: 227760 - DNA, 75 bp, synthetic construct
  source 1..75: mol_type = other DNA
gtgcgtaaaggtgacgctgcggagggttatcaccagagcttgatcgacattactccccagcgcgtactggaagaa

SEQ ID NO: 227761 - DNA, 75 bp, synthetic construct
  source 1..75: mol_type = other DNA
gttaacgaagccattcctatgccgcttggtcacggggcgctggaaattggcgaacgccgcaagctgggtcatagc

SEQ ID NO: 227762 - DNA, 75 bp, synthetic construct
  source 1..75: mol_type = other DNA
gaccgtgatttaagtgcgctggaagacgccgcagaagatcaaccacatgttgtaagagctgcgcaaccgtccaga

SEQ ID NO: 227763 - DNA, 75 bp, synthetic construct
  source 1..75: mol_type = other DNA
caggacctgttggtaatgggaccattgataccagcaaactgattgctgactggaagtatgacaatcgtgttattg

SEQ ID NO: 227764 - DNA, 75 bp, synthetic construct
  source 1..75: mol_type = other DNA
ttcagagctgaacatttaccagtacggtggcggtaactctgcacttgctctgcaagctgacgcccgtaactctga

SEQ ID NO: 227765 - DNA, 75 bp, synthetic construct
  source 1..75: mol_type = other DNA
gacgaagcagcagcgtaaagccggtaagttccgcgagcaggaagaagcagcacgtcatcgcaacgactggatcta

SEQ ID NO: 227766 - DNA, 75 bp, synthetic construct
  source 1..75: mol_type = other DNA
atgacaatagaaaaacacgaaagaagcactaaggatttggtgaaagcagcagtatcgggatggttgggcactgcg

SEQ ID NO: 227767 - DNA, 75 bp, synthetic construct
  source 1..75: mol_type = other DNA
cctgagcgcaacggcaatctgggcctttatgttcttcattctcagtaaagaggaactgctggcgtggggatggcg

SEQ ID NO: 227768 - DNA, 75 bp, synthetic construct
  source 1..75: mol_type = other DNA
cattgaataccgagcagcagtcgtggtgtcgtaatctggcaggggaaacgcagcttgatcaagcggttatcctga

SEQ ID NO: 227769 - DNA, 75 bp, synthetic construct
  source 1..75: mol_type = other DNA
attgctaaagccttggctctggtggaagtgcgtgtgctggatcatcttgtggtcgggaacgaagtggtgtctttt

SEQ ID NO: 227770 - DNA, 75 bp, synthetic construct
  source 1..75: mol_type = other DNA
attgctaaagccttagctctggtggaagtgcgtgtactggatcatcttgtggtcgggaacgaagtggtgtctttt

SEQ ID NO: 227771 - DNA, 75 bp, synthetic construct
  source 1..75: mol_type = other DNA
gcggtcattctggcgcacaaccatccgtccggcacgacagaaattagccagcaggataaatatgtcactcagagg

SEQ ID NO: 227772 - DNA, 75 bp, synthetic construct
  source 1..75: mol_type = other DNA
gttctttgttcttaaagcgccgcgcaaggacgatactgtactgatttacgcgtttagtaacccggtgcggttatt

SEQ ID NO: 227773 - DNA, 75 bp, synthetic construct
  source 1..75: mol_type = other DNA
acagtgactcccggtggtgaagtatgcgtatttaacgacatcattcctgctgaccattgtctgcatgatgttcag

SEQ ID NO: 227774 - DNA, 75 bp, synthetic construct
  source 1..75: mol_type = other DNA
gcacgacaggagcgggaaatgtttgttgtgctctatctcgataaccagaaccgactgctggaacacgaaacgcta

SEQ ID NO: 227775 - DNA, 75 bp, synthetic construct
  source 1..75: mol_type = other DNA
cgcgccagcattattaccccggaagcccgtgaagtggcagatctactgggttttaccatcaccgaatgtgatgaa

SEQ ID NO: 227776 - DNA, 75 bp, synthetic construct
  source 1..75: mol_type = other DNA
aagcagtcgctggagcagggcgcaatgcagccgagctttaaatcagtgaccggcaaaggcggcatcaaagttatt

SEQ ID NO: 227777 - DNA, 75 bp, synthetic construct
  source 1..75: mol_type = other DNA
cgaacaggcaatgtccgtggttctgcgcgccagcattattaccccggaagcccgtgaagtggcggatctactggg

SEQ ID NO: 227778 - DNA, 75 bp, synthetic construct
  source 1..75: mol_type = other DNA
cggcaaaggcggcatcaaagtgattgatggtagcagcgtcaagtttggtcgctttgatggcgcacaaccgcattg

SEQ ID NO: 227779 - DNA, 75 bp, synthetic construct
  source 1..75: mol_type = other DNA
gatgtgatgtttatcccgaaaggctccagcatcgaatttggtacgacatccagcgtgaaattcctgtatgtcgcc

SEQ ID NO: 227780 - DNA, 75 bp, synthetic construct
  source 1..75: mol_type = other DNA
cgtgggcttgactgatcttgtgaccggagacgacggcagcagcatggccgccggttttatgcagtgggagaacgc

SEQ ID NO: 227781 - DNA, 75 bp, synthetic construct
  source 1..75: mol_type = other DNA
atagtgaaatcgattgttgtcgcgcataaaggcacggttgcggtaacgtcagatgcgcgggggacaaggtttgtt

SEQ ID NO: 227782 - DNA, 75 bp, synthetic construct
  source 1..75: mol_type = other DNA
tagccacggaaaaacggtgtatcactcccccgacgcgcccgatatccgcgagtttgcgcgcgacgccatacccga

SEQ ID NO: 227783 - DNA, 75 bp, synthetic construct
  source 1..75: mol_type = other DNA
ctaggacgctacgcactgcgcctggcgcatggtaatggcgagtatctcattcatggcaccagcgcgccggacagc

SEQ ID NO: 227784 - DNA, 75 bp, synthetic construct
  source 1..75: mol_type = other DNA
atgaaacgcgcgtctttgcttacactcacgcttatcggcgcttttagcgccatccaggctgcctgggcggttgat

SEQ ID NO: 227785 - DNA, 75 bp, synthetic construct
  source 1..75: mol_type = other DNA
tacccggtgatgcatatcggggatgagccttaccgcctgctgaccacggatatggccagtgtgccggccaccgtc

SEQ ID NO: 227786 - DNA, 75 bp, synthetic construct
  source 1..75: mol_type = other DNA
ataaccggatgaccaaaatggtcagcgacatgctgtttctggcacaggcggacaataaccagcttatacctgaca

SEQ ID NO: 227787 - DNA, 75 bp, synthetic construct
  source 1..75: mol_type = other DNA
tatgtcatgctgactggcctatccattaatttccatctccattacctcgatgcgctgaaaaagaacctgattgcg

SEQ ID NO: 227788 - DNA, 75 bp, synthetic construct
  source 1..75: mol_type = other DNA
gaacagttaactgctgaagatcgtaaccattgtatgaaactgtctaaaaaaatccatagagaaaaactatacacc

SEQ ID NO: 227789 - DNA, 75 bp, synthetic construct
  source 1..75: mol_type = other DNA
ttgctcatatcgcttaaggagtttaacgatgccaaaatccgtaattattcccgctggcagcagcgcaccgctggc

SEQ ID NO: 227790 - DNA, 75 bp, synthetic construct
  source 1..75: mol_type = other DNA
agtttgcacgtgatgccatacccgataaagacgcgcggggcggcgaggtgtatctcctttccggcccgacaatga

SEQ ID NO: 227791 - DNA, 75 bp, synthetic construct
  source 1..75: mol_type = other DNA
cttttttgaccttgtgattgaaaatccggggaaaccgatccctgaagaacatttatcaaggctgtttgaccgttt

SEQ ID NO: 227792 - DNA, 75 bp, synthetic construct
  source 1..75: mol_type = other DNA
aaccttgcagagctgcgcctttattattatccgccgggagaaaatattgtgcaggtttatccaataggtattgga

SEQ ID NO: 227793 - DNA, 75 bp, synthetic construct
  source 1..75: mol_type = other DNA
tgtctggatttggcaaatcgttctcgccctcgttacgctgaccgtggctctgatgcaaccacggaatatgcctcg

SEQ ID NO: 227794 - DNA, 75 bp, synthetic construct
  source 1..75: mol_type = other DNA
ggcatgcgacgctgaatgaaggggtaacggcgaaaatccatcagactaatcacgcgattcacctgatttgtgcgg

SEQ ID NO: 227795 - DNA, 75 bp, synthetic construct
  source 1..75: mol_type = other DNA
tgatgattatggtggtcatcgcgctggctaatcgttatgttcttgtaccgcgcatgaggcaggatgaagatcgtg

SEQ ID NO: 227796 - DNA, 75 bp, synthetic construct
  source 1..75: mol_type = other DNA
atgaaacttttaaaagtagcagcaattgcagcaatcgtattttccggtagcgctctggcaggtgttgttcctcag

SEQ ID NO: 227797 - DNA, 75 bp, synthetic construct
  source 1..75: mol_type = other DNA
tgtccgtgagaataacggaacatggaaagatttaactcgtaatgctgaacccttcacacaccagcaattaaaatc

SEQ ID NO: 227798 - DNA, 75 bp, synthetic construct
  source 1..75: mol_type = other DNA
accatttggtaagatttgacggtaaagtctggaaagacgtaacacaaaccaataagcccaagtttacccaccagc

SEQ ID NO: 227799 - DNA, 75 bp, synthetic construct
  source 1..75: mol_type = other DNA
gtcgttcctgccgggccaaataacccgctaggacgttacgcactgcgcctcgcgcatggtaatggcgaatacctc

SEQ ID NO: 227800 - DNA, 75 bp, synthetic construct
  source 1..75: mol_type = other DNA
cacacggcaatggcgaatatctcattcatggcaccagcgcgccggatagcgtcggtttgcgcgtcagctcggggt

SEQ ID NO: 227801 - DNA, 75 bp, synthetic construct
  source 1..75: mol_type = other DNA
tcggtgagcagtggagcaactcccgcagccagcaatgcgccttcagtagagtcagcgcagaatggtgaaccagag

SEQ ID NO: 227802 - DNA, 75 bp, synthetic construct
  source 1..75: mol_type = other DNA
agatgcgcggggggacaaggtttgtgattatgctgccggagagagagtgattattaagttcaaattcagggcgtg

SEQ ID NO: 227803 - DNA, 75 bp, synthetic construct
  source 1..75: mol_type = other DNA
gcgatagtgaaatcgattgttgtcgcgcataaaggcacggttgcggtaacgtcggatgcgcgggggacaaggttt

SEQ ID NO: 227804 - DNA, 75 bp, synthetic construct
  source 1..75: mol_type = other DNA
tcatgatccactcagtaaaagtgcattttgccgagcaggatattaatgatttaaaagagattagcgccacccttg

SEQ ID NO: 227805 - DNA, 75 bp, synthetic construct
  source 1..75: mol_type = other DNA
cggcgtgacgccagcctgtggctacattggtgttggcggcgcgttgattatcggcgtggtagctggtctggcggg

SEQ ID NO: 227806 - DNA, 75 bp, synthetic construct
  source 1..75: mol_type = other DNA
ctggcgtttgttaacaccgtggtagcaacggcggcggcaattcttggctggatcttcggtgaatgggcactgcgc

SEQ ID NO: 227807 - DNA, 75 bp, synthetic construct
  source 1..75: mol_type = other DNA
gacgcaggtgaccgtgacgtttgcactggtctgtattctctgggtggtttacggctactcgctggcgtttggcga

SEQ ID NO: 227808 - DNA, 75 bp, synthetic construct
  source 1..75: mol_type = other DNA
gaagcaagctttacggagatgtttcaaaagtgaagcccgggggtattaatggtagtctggttatgacttttgact

SEQ ID NO: 227809 - DNA, 75 bp, synthetic construct
  source 1..75: mol_type = other DNA
gcagctggcgctaccaatacccagccatcagatgacattgaaatctggcagactactttcctgaaagagtccggc

SEQ ID NO: 227810 - DNA, 75 bp, synthetic construct
  source 1..75: mol_type = other DNA
aagccgatgatccccgacggcgccgttattatgtctggcgctgatctgatgggtacccgcgcttttggcgttatc

SEQ ID NO: 227811 - DNA, 75 bp, synthetic construct
  source 1..75: mol_type = other DNA
cgcacaccatccagttaatcaaagcgactgactttgtaccgccgccgacactgcaaccaacgtttaatccgctga

SEQ ID NO: 227812 - DNA, 75 bp, synthetic construct
  source 1..75: mol_type = other DNA
gctcacgctaaattctacgacgaagcgcacaccatccagctaatcaaagcgactgactttgtaccaccgccgaca

SEQ ID NO: 227813 - DNA, 75 bp, synthetic construct
  source 1..75: mol_type = other DNA
aagcggctgctaatcgctttctcactgagaaagatattccggtggccgagttggtactgcttatcgacccggctt

SEQ ID NO: 227814 - DNA, 75 bp, synthetic construct
  source 1..75: mol_type = other DNA
gtacagctggaaagcatcgccattacgatcgtctggtccggtgtggtggcatttatcggctacaaactggcggat

SEQ ID NO: 227815 - DNA, 75 bp, synthetic construct
  source 1..75: mol_type = other DNA
ctgcaaccaacgtttaacccgcttacggataatgttgtctcgctcgacctgaccacggggagcgaagaggatgca

SEQ ID NO: 227816 - DNA, 75 bp, synthetic construct
  source 1..75: mol_type = other DNA
ctctgtggatacgctgagttatatccgcgtcccgattgactatcaggacgattggacagcacccacatttcgcgc

SEQ ID NO: 227817 - DNA, 75 bp, synthetic construct
  source 1..75: mol_type = other DNA
gggatgtttccagtgaacgggccatcgtcaggacccgctccatcagctgcaagctgggtgatgacaatatcgacc

SEQ ID NO: 227818 - DNA, 75 bp, synthetic construct
  source 1..75: mol_type = other DNA
ggactggtctttttcgccgtcgccattgtcgctatttacgggcaaaccttccccgccatgctcgactatccggaa

SEQ ID NO: 227819 - DNA, 75 bp, synthetic construct
  source 1..75: mol_type = other DNA
cagccaaaccgccatcaatggtcgccgatgcttttaccaatccagactatatgcgctacgcggtaaaaacgctgc

SEQ ID NO: 227820 - DNA, 75 bp, synthetic construct
  source 1..75: mol_type = other DNA
cgactggcggatcagtgaaagtgaagcgatggcggcacgggaatgtaacctggagaatatctgccagacgttgtt

SEQ ID NO: 227821 - DNA, 75 bp, synthetic construct
  source 1..75: mol_type = other DNA
ctctgaacgctcttcttatatcggcacacagatggtggtcaccttcgcgctcgccacgctcgaaaacgtttttgg

SEQ ID NO: 227822 - DNA, 75 bp, synthetic construct
  source 1..75: mol_type = other DNA
tttgatctacaaatggtcttacagcgaaccgttgatcagactgatcatcaccgggccgatcctgatgggctgtat

SEQ ID NO: 227823 - DNA, 75 bp, synthetic construct
  source 1..75: mol_type = other DNA
ttggtaccgtggtgtcggcggtgatttacacctttgtctggcctgaaagcgaagcgcgcacgctgccgcaaaaac

SEQ ID NO: 227824 - DNA, 75 bp, synthetic construct
  source 1..75: mol_type = other DNA
tcggccttgccagttatattgggatgcctgtctccacaacacacgtcctctcgtctgcggtagcagggacgatgg

SEQ ID NO: 227825 - DNA, 75 bp, synthetic construct
  source 1..75: mol_type = other DNA
atttcctccggcagttttgccgaagccattgtggtggaaggcgctgatgccaatgcctctgtcaccggcgataaa

SEQ ID NO: 227826 - DNA, 75 bp, synthetic construct
  source 1..75: mol_type = other DNA
gtggttatgcgtaatggccagatcctgctgtatgcggggggcgcgggcttcctggacgggatagggaagggcatt

SEQ ID NO: 227827 - DNA, 75 bp, synthetic construct
  source 1..75: mol_type = other DNA
tcggcttgatgatgccattagtcacctgacggacagcctcgcaccgctacccgaaacgcggattgaaagagaggc

SEQ ID NO: 227828 - DNA, 75 bp, synthetic construct
  source 1..75: mol_type = other DNA
gtggtcgtgcgcttaacgctgtggtgtatcgttgttggcctctatccaaccttgctgatgacgttaatcggcgtg

SEQ ID NO: 227829 - DNA, 75 bp, synthetic construct
  source 1..75: mol_type = other DNA
tttacgggcaaaccttccccgccatgctcgactatccggaagtggtcgtgcgcttaacgctgtggtgtatcgttg

SEQ ID NO: 227830 - DNA, 75 bp, synthetic construct
  source 1..75: mol_type = other DNA
tttagtgcagacgttattgtttaacaaagcaattccaacagatgcattgatgatcagttcgattctcggctttat

SEQ ID NO: 227831 - DNA, 75 bp, synthetic construct
  source 1..75: mol_type = other DNA
atgcagtaaacatgctggtaggaaagaaaggacttcgctatgacgatgcatacaatatggttcatcagcggtttg

SEQ ID NO: 227832 - DNA, 75 bp, synthetic construct
  source 1..75: mol_type = other DNA
cagactgcatctaactccagcgtcaacgtaactcaggttggctttggtaacaacgcgaccgctcatcagtactaa

SEQ ID NO: 227833 - DNA, 75 bp, synthetic construct
  source 1..75: mol_type = other DNA
gatcgaaaccgtgatgctggcgctcaataccgccaaagccccaccaacgagctggcagtacgtgaagctcttaat

SEQ ID NO: 227834 - DNA, 75 bp, synthetic construct
  source 1..75: mol_type = other DNA
gcaaaccagattgttgatgtcaaagcactcagtaaaacagagctgcaaatcaccctgaaaagcgcctactatcct

SEQ ID NO: 227835 - DNA, 75 bp, synthetic construct
  source 1..75: mol_type = other DNA
gtatgaatctgaaagaaagcccggtctttgagaaggttaatgacagcaaccaacccacagcaaaacctgcacctg

SEQ ID NO: 227836 - DNA, 75 bp, synthetic construct
  source 1..75: mol_type = other DNA
aaaaatttttaagtaaggtaataaaagacaaaataataatcagcaccagcaaacttgacaaaagagaagttcacc

SEQ ID NO: 227837 - DNA, 75 bp, synthetic construct
  source 1..75: mol_type = other DNA
agatttgaaaccaagtctttttcataagatgctatttgaattaaacccccactatataattacaaccaactggga

SEQ ID NO: 227838 - DNA, 75 bp, synthetic construct
  source 1..75: mol_type = other DNA
atatgtttgcgtacatttaattttgaatatcattatgattgttaaaagaatgcacgcactcttaactcttgatgt

SEQ ID NO: 227839 - DNA, 75 bp, synthetic construct
  source 1..75: mol_type = other DNA
aaattcagagctgaacatttaccagtacggtggcggtaactctgcacttgctctgcaagctgatgcccgtaactc

SEQ ID NO: 227840 - DNA, 75 bp, synthetic construct
  source 1..75: mol_type = other DNA
aagattctactatgactgttaaacagttcggtggcggtaacggtgctgctgttgaccagactgcatctaactcca

SEQ ID NO: 227841 - DNA, 75 bp, synthetic construct
  source 1..75: mol_type = other DNA
tgttgcgttatgctgccagataagtggcgtgtgggattaaaggcccggattgagtgggaagtagacccgaacccc

SEQ ID NO: 227842 - DNA, 75 bp, synthetic construct
  source 1..75: mol_type = other DNA
tatgagttctcccgtattatcgatatagcgagagatgttttaatcaaccatacacgagatgttgatattaatgag

SEQ ID NO: 227843 - DNA, 75 bp, synthetic construct
  source 1..75: mol_type = other DNA
ttctatctgcgccagcacggcgaggaaaagggccgtcagattgcctgtgcattactggaagatttaatggaagcc

SEQ ID NO: 227844 - DNA, 75 bp, synthetic construct
  source 1..75: mol_type = other DNA
cgccattgccgccgagctcgaagggttttatctgcgccagcacggcgaggaaaaaggccgccagattgcctgtgc

SEQ ID NO: 227845 - DNA, 75 bp, synthetic construct
  source 1..75: mol_type = other DNA
atgaaaaagccattaccgcccgtattacgcgccgcgctgtatcgtcgcgccgtggcctgcgcatggctgaccctg

SEQ ID NO: 227846 - DNA, 75 bp, synthetic construct
  source 1..75: mol_type = other DNA
atggccgataacatttactcgcctgaccagttccgcccacattatggcggggtggaatctgacaatgatattcac

SEQ ID NO: 227847 - DNA, 75 bp, synthetic construct
  source 1..75: mol_type = other DNA
gggggaatccgacaatgatattcacatcgaggcttatgaccgggatgtccagacccgtttagagtccaaatccgt

SEQ ID NO: 227848 - DNA, 75 bp, synthetic construct
  source 1..75: mol_type = other DNA
aggaagaggaatgcaaagagatattacgatgagaacacgtagcttgaatttcttagcatttgctgctgttggtgc

SEQ ID NO: 227849 - DNA, 75 bp, synthetic construct
  source 1..75: mol_type = other DNA
actcgtcatgagtcgcggtcagtctctgccaaaggaaaaacaggcgaaggcgatgatcaccatgtggtcgtcact

SEQ ID NO: 227850 - DNA, 75 bp, synthetic construct
  source 1..75: mol_type = other DNA
atgttattggaatggcgagagacgttttaataaaccacacacgagatgttgatatcaatgagccagacggaccaa

SEQ ID NO: 227851 - DNA, 75 bp, synthetic construct
  source 1..75: mol_type = other DNA
tcttgtatggttatgggattatgccaaccgctcacaggcattattccgcgaactgtatccggcgctaaagcaaat

SEQ ID NO: 227852 - DNA, 75 bp, synthetic construct
  source 1..75: mol_type = other DNA
ggaccactgaaagccgcgccgtcgctgtcctttctcgggctcgccgtgatggatgaactttgcgcccgtcacatc

SEQ ID NO: 227853 - DNA, 75 bp, synthetic construct
  source 1..75: mol_type = other DNA
cattcattgatggacggaaagctacgctacagtattgtttttaccctggtgactgtaggtattatgtttggtgca

SEQ ID NO: 227854 - DNA, 75 bp, synthetic construct
  source 1..75: mol_type = other DNA
tactccacggcggataggttcgctgagcacacgaacaacacatccacattttattacgagcatacaaaagatctt

SEQ ID NO: 227855 - DNA, 75 bp, synthetic construct
  source 1..75: mol_type = other DNA
ggcagaaatgaataaaattcgtgaattagctgaccttcatgatctgttgattttggaggactctgcgcaagcaca

SEQ ID NO: 227856 - DNA, 75 bp, synthetic construct
  source 1..75: mol_type = other DNA
ccaatagtgattttctttaaaaaaatcatcgcacctaaggatgattcaaccttatcgaatgatgctgaaagagcg

SEQ ID NO: 227857 - DNA, 75 bp, synthetic construct
  source 1..75: mol_type = other DNA
atcttaccttttaactaagtattggtttgttaaatgggagcagaataacatgctcaatttacttgaaagaaaaga

SEQ ID NO: 227858 - DNA, 75 bp, synthetic construct
  source 1..75: mol_type = other DNA
ttgaccattacgaaacttgcatggcgtgacttagtccctgataccgaaagctatcaggaagtatttgcacagcca

SEQ ID NO: 227859 - DNA, 75 bp, synthetic construct
  source 1..75: mol_type = other DNA
tggtgcatcaggcaaatggcggtattctcatcatctctttgcgtactctgctggcgcaacctctgctgtggatgc

SEQ ID NO: 227860 - DNA, 75 bp, synthetic construct
  source 1..75: mol_type = other DNA
tgagactaagttaagaacgctatctctaattcatcctcgttcacaatacaactatgtagaattttacagggattt

SEQ ID NO: 227861 - DNA, 75 bp, synthetic construct
  source 1..75: mol_type = other DNA
ctgaatggaagagagatgtatcaacagaaagggttgaagagggaaaagaaacaacttacgtatattctacgtatt

SEQ ID NO: 227862 - DNA, 75 bp, synthetic construct
  source 1..75: mol_type = other DNA
tggtttgtgtcgggacatcgctggtcgatttatttaaccgttttctgttcagcgccaaaattatttttctggtgg

SEQ ID NO: 227863 - DNA, 75 bp, synthetic construct
  source 1..75: mol_type = other DNA
gcgctggtgttggtgtttctctgtggtattggtgtgattactgtgcaatttttgattgcagcaggattattaccc

SEQ ID NO: 227864 - DNA, 75 bp, synthetic construct
  source 1..75: mol_type = other DNA
atgttgccgcattcacaatggctggaaatcttatggtaaccctgttcgataaggggctgatttcccgtgaggagg

SEQ ID NO: 227865 - DNA, 75 bp, synthetic construct
  source 1..75: mol_type = other DNA
taactcttacaaaacaaacagggactggcaatcgttttgttttacagaacttaggtaatacagaactatcatttg

SEQ ID NO: 227866 - DNA, 75 bp, synthetic construct
  source 1..75: mol_type = other DNA
acttacctgcaccgggagcggatgcctggccggtacttatccgcgaagcagcacgctacaccggtgaacaagaaa

SEQ ID NO: 227867 - DNA, 75 bp, synthetic construct
  source 1..75: mol_type = other DNA
ttttactggctgattcgtctgtgcgcactgccgctgtatcgcaaaatgggccagtgggcgcggcaaaaaaatcgt

SEQ ID NO: 227868 - DNA, 75 bp, synthetic construct
  source 1..75: mol_type = other DNA
ggttatggcctgattgtggccgtgccgattatctctaatcaggtgaatgtacagataggtgcgctggcgaacgtc

SEQ ID NO: 227869 - DNA, 75 bp, synthetic construct
  source 1..75: mol_type = other DNA
tatattatctctggagtagggaagctgtggctaacgataccactccttatcttatggtgctgctacttaataacg

SEQ ID NO: 227870 - DNA, 75 bp, synthetic construct
  source 1..75: mol_type = other DNA
tttgcactacgaatccacatgaaggaagtattaactgagtttgagtattacaaggctgcttatggtacaggaaag

SEQ ID NO: 227871 - DNA, 75 bp, synthetic construct
  source 1..75: mol_type = other DNA
ccgctaaactggtgtcgatagatgagaaacccaattttcgtacccatgtggtggagttacccgaccatatgctga

SEQ ID NO: 227872 - DNA, 75 bp, synthetic construct
  source 1..75: mol_type = other DNA
ttttaaatgaggcacaggctcgtgtggataacgattcgcttccgcttgatgttcgtatccggtcacgcaccacgg

SEQ ID NO: 227873 - DNA, 75 bp, synthetic construct
  source 1..75: mol_type = other DNA
gcttggcggcaacatacacgctaaagggatgatgatcatgcaggcgttcctgatgtcggagcttcagcttgagca

SEQ ID NO: 227874 - DNA, 75 bp, synthetic construct
  source 1..75: mol_type = other DNA
ctggcctgtgcttatccgcgaagccacccgctacacaggtgatcaagaaactctgccgcttggaccgcagtggat

SEQ ID NO: 227875 - DNA, 75 bp, synthetic construct
  source 1..75: mol_type = other DNA
caggctatttatagtgaatttgaagataccctccagattgtcgatgcgggatcagtaagccagtggtgtcggtgg

SEQ ID NO: 227876 - DNA, 75 bp, synthetic construct
  source 1..75: mol_type = other DNA
aacaaagatttttccactgctcaatctttaatcagagaggctttgttggctgaaccattacttgaacctgctata

SEQ ID NO: 227877 - DNA, 75 bp, synthetic construct
  source 1..75: mol_type = other DNA
ttatggtgctgctacttaataacgatgtctggtgtaagagtcgtgaggtggtggttctcagaaatctgattgagc

SEQ ID NO: 227878 - DNA, 75 bp, synthetic construct
  source 1..75: mol_type = other DNA
atgccattgaagctgaaagtcattctggtaggcgaacgcgaatcattggctgatttccaggagatggagccagag

SEQ ID NO: 227879 - DNA, 75 bp, synthetic construct
  source 1..75: mol_type = other DNA
atggggcgatgattcttatgttactcactctggtgttttcgagtgaggtgttagcgaagacgcacacaacaacag

SEQ ID NO: 227880 - DNA, 75 bp, synthetic construct
  source 1..75: mol_type = other DNA
taatatctattcgaagcgaatgcagattgaagaaaccttccgagacttgaaaagtccggcactgttgcaaagtta

SEQ ID NO: 227881 - DNA, 75 bp, synthetic construct
  source 1..75: mol_type = other DNA
tgaacattctgttctgctttgccgtggtgatgcaggcggtctgtttctggcaacgccctgatgccataaaaggtg

SEQ ID NO: 227882 - DNA, 75 bp, synthetic construct
  source 1..75: mol_type = other DNA
accgtggtcgtgtgaaaaaagtctacattcagggtgacagcgaatttcgttccgcgccgtcagacttaggtaaat

SEQ ID NO: 227883 - DNA, 75 bp, synthetic construct
  source 1..75: mol_type = other DNA
ttacgataacggttttaacctcaccgcgttttcagtaactctggtggccgttattttatctcttggcggtaagtt

SEQ ID NO: 227884 - DNA, 75 bp, synthetic construct
  source 1..75: mol_type = other DNA
tggtaaaaaaagcagcaaaagctccagccgtacaccggttgaagccgacgataccgtaaattctcgtgcaatggc

SEQ ID NO: 227885 - DNA, 75 bp, synthetic construct
  source 1..75: mol_type = other DNA
gcaagatgcggcactggcgactcaaatcacaaacttagagtctcaaacagcagccaacatttctgcggcggtcac

SEQ ID NO: 227886 - DNA, 75 bp, synthetic construct
  source 1..75: mol_type = other DNA
cagaccggaactgacattgccgcagccgttgctgtagagacaaaggcaaggactgacgccgatagtgcattgtcc

SEQ ID NO: 227887 - DNA, 75 bp, synthetic construct
  source 1..75: mol_type = other DNA
atgacggcatgtgttcagcgaaaagataccgggggaacggtgcgtttcctgtggcaactggcgccattacagcgc

SEQ ID NO: 227888 - DNA, 75 bp, synthetic construct
  source 1..75: mol_type = other DNA
accgtgaactggtggcgtcattaagcgagcgtctgcgtaatggtgagcgcgatatcgacgcactggtagaacagg

SEQ ID NO: 227889 - DNA, 75 bp, synthetic construct
  source 1..75: mol_type = other DNA
cgttagccaaaggcggctgctttattcgaatactgaatcaggaaggcaaaatcgttgaacgcgatgttcttgaaa

SEQ ID NO: 227890 - DNA, 75 bp, synthetic construct
  source 1..75: mol_type = other DNA
gacgaaactgacctataaaaacggcgtactgattgccagtattatcagcctgctgatctgcccgtggaaattaat

SEQ ID NO: 227891 - DNA, 75 bp, synthetic construct
  source 1..75: mol_type = other DNA
agagcggatgcagtttgctggcgtgttgagtcagggcggtgagtttgcctttgtcctcttttctaccgcttcttc

SEQ ID NO: 227892 - DNA, 75 bp, synthetic construct
  source 1..75: mol_type = other DNA
ggcacaggtgctgttaagcgcggcgttgctggcgggattattgatgctgacggatttcgcctggcaggcggcggg

SEQ ID NO: 227893 - DNA, 75 bp, synthetic construct
  source 1..75: mol_type = other DNA
agcgacgtcgatgagatcctccacttttcggaactcggcgtggtgttcctgatgtttatcatcgggctggagtta

SEQ ID NO: 227894 - DNA, 75 bp, synthetic construct
  source 1..75: mol_type = other DNA
gcgctggtggtggtgtttctctgtggtattgctgtgattggcgtgcaatttttgattgcggcaggcttgttacca

SEQ ID NO: 227895 - DNA, 75 bp, synthetic construct
  source 1..75: mol_type = other DNA
ttgcaattggcccgtgggggctggggtttattagcgacgtcgatgagatcctccacttttcggaactcggcgtgg

SEQ ID NO: 227896 - DNA, 75 bp, synthetic construct
  source 1..75: mol_type = other DNA
gtgctttatacccatctgttgtgggtagtgataagcgtggttgtgctggtggcggtgaaaattctcgtgctgtat

SEQ ID NO: 227897 - DNA, 75 bp, synthetic construct
  source 1..75: mol_type = other DNA
caaggtcaataaaaacgtcctggaatatctaaaaaaacactatccggatgaagaccaaaaaagtatgagtaaagg

SEQ ID NO: 227898 - DNA, 75 bp, synthetic construct
  source 1..75: mol_type = other DNA
cggtcaacagtgtggaaatatttaagtggcgatagtacggctcctgcctcagctatgtcactgattatgctgttg

SEQ ID NO: 227899 - DNA, 75 bp, synthetic construct
  source 1..75: mol_type = other DNA
tccagcgtcaaggggatgaatgaaccggaagaaggcatgattaatcttgtacaaaccagcaatggctggaaagcg

SEQ ID NO: 227900 - DNA, 75 bp, synthetic construct
  source 1..75: mol_type = other DNA
tggaaaccgccattgatccgtttaaaggattgctgctcgggctattttttatatctgtcggtatgtcgctcaatc

SEQ ID NO: 227901 - DNA, 75 bp, synthetic construct
  source 1..75: mol_type = other DNA
ttattacaggcaggggtgacgcagttttctcgtgagacattctccagtgcgttagagctgggacgcaagacgctg

SEQ ID NO: 227902 - DNA, 75 bp, synthetic construct
  source 1..75: mol_type = other DNA
cgacgcgaactggaagagattttccagcgtgaaatgcaacaagaacgacgccagctggacggctgggatgaattt

SEQ ID NO: 227903 - DNA, 75 bp, synthetic construct
  source 1..75: mol_type = other DNA
catgcctttatcgctcttggcgcagtgaagcaggcaacgctgcaaatggttgcgcccggtatcgcagaagcgttg

SEQ ID NO: 227904 - DNA, 75 bp, synthetic construct
  source 1..75: mol_type = other DNA
tgcgcccggtatcgcagaagcgttgattgcgacggcaattggtttgttcgccgcaattccccggcggtattggtt

SEQ ID NO: 227905 - DNA, 75 bp, synthetic construct
  source 1..75: mol_type = other DNA
ccgcaattccggcggtaatggcttataaccgtctcaaccagcgcgtaaacaaactggaactgaattacgacaact

SEQ ID NO: 227906 - DNA, 75 bp, synthetic construct
  source 1..75: mol_type = other DNA
cacttaaaaaattgtaatatacatactcttattcattacccactaccacctcataaacaaaaggcatacgcttcc

SEQ ID NO: 227907 - DNA, 75 bp, synthetic construct
  source 1..75: mol_type = other DNA
tcatggggggatgcttcaggtttcagcttttatccaggcaaaaatcttggggctctgggagatgctgggattata

SEQ ID NO: 227908 - DNA, 75 bp, synthetic construct
  source 1..75: mol_type = other DNA
gcgtttgaagataaattctggtctggaatcgaactttctcgcctctatcaagagagccaggggaaacgggataat

SEQ ID NO: 227909 - DNA, 75 bp, synthetic construct
  source 1..75: mol_type = other DNA
gctcagagcatggtttatgaaccactggtgaaataccaggcagacggttcggtgatcccgtggctggcaaaaagc

SEQ ID NO: 227910 - DNA, 75 bp, synthetic construct
  source 1..75: mol_type = other DNA
gaaaaccaaatgaaaaaacacagcaagtctattactcaaataaaattgcaattgataaaattaaaaatatgcttt

SEQ ID NO: 227911 - DNA, 75 bp, synthetic construct
  source 1..75: mol_type = other DNA
gtatggtaagttcttaaaatataaagccgatattgataatgattcattaatgaaagccagaggtgataaaccgga

SEQ ID NO: 227912 - DNA, 75 bp, synthetic construct
  source 1..75: mol_type = other DNA
tttttgcaattaaccagcgacagcacaaagaattagtctctgcgtttagtagggtgctagattctggttggtata

SEQ ID NO: 227913 - DNA, 75 bp, synthetic construct
  source 1..75: mol_type = other DNA
gggcactttctggtgccgcatcgttcagagcttcggtgtataatgaatgaaatacgtagtaaccctgtaaaattt

SEQ ID NO: 227914 - DNA, 75 bp, synthetic construct
  source 1..75: mol_type = other DNA
acttccgtgcagtgctcgataaccgtcaacgtcacgcctggctggagctggcaaaccagattgttgatgtcaaag

SEQ ID NO: 227915 - DNA, 75 bp, synthetic construct
  source 1..75: mol_type = other DNA
ggagttgaacattgcatcggggtagctaatggattagacgcccttaacttggttctgcgagcatggaaggaacta

SEQ ID NO: 227916 - DNA, 75 bp, synthetic construct
  source 1..75: mol_type = other DNA
tatgaaacacttaatctgatcggtaaaaaaacagatattgaaaaacagatattgaaaaacagatgtatggtaagt

SEQ ID NO: 227917 - DNA, 75 bp, synthetic construct
  source 1..75: mol_type = other DNA
cggggttattaacggggcggatgccatttcgtaccggcatacgttcctggatcccaacgggaaaagatgtggcat

SEQ ID NO: 227918 - DNA, 75 bp, synthetic construct
  source 1..75: mol_type = other DNA
ctatggttctcacatcaaatatcaccacgtctttaagggagtgaatagtcgattagatgaaatccaggctgcaat

SEQ ID NO: 227919 - DNA, 75 bp, synthetic construct
  source 1..75: mol_type = other DNA
cagaagcagcatcctgatttattttatggcgactgggcagacaaaccctggcgtggtgtgggggaatattatgcc

SEQ ID NO: 227920 - DNA, 75 bp, synthetic construct
  source 1..75: mol_type = other DNA
gaaactgatggattacgtggtcgcaaggataatctctgggaaggcggcatccgtgttccggcaattattaaatac

SEQ ID NO: 227921 - DNA, 75 bp, synthetic construct
  source 1..75: mol_type = other DNA
gagtatgtcagttcggaagtcgtcaactggctggataacaaaaaggacagcaagcctttcttcctctatgttgct

SEQ ID NO: 227922 - DNA, 75 bp, synthetic construct
  source 1..75: mol_type = other DNA
aaggaacgagggcttctcgttcttgaagattgtgcccaagcacatggtgctcaaatcgagggtaaacgagctggt

SEQ ID NO: 227923 - DNA, 75 bp, synthetic construct
  source 1..75: mol_type = other DNA
tcgcacaattttattgttctcatattaataatgaaaaaataaaattacctgttgtcgattctaaagaaaatgctg

SEQ ID NO: 227924 - DNA, 75 bp, synthetic construct
  source 1..75: mol_type = other DNA
tatgcctgaaattatggcaattgcacaacaacacggtctattagttttagaagattgtgcgcaatcacatggggc

SEQ ID NO: 227925 - DNA, 75 bp, synthetic construct
  source 1..75: mol_type = other DNA
agttggggtcatgcagctggattcagtttctatccaggaaaaaatcttggcgctttaggtgacgcaggtgcgata

SEQ ID NO: 227926 - DNA, 75 bp, synthetic construct
  source 1..75: mol_type = other DNA
aagcatgttattggtgttgccaatggcttagatgcactaatccttgttcttcgggcttggaaagaaatggggaaa

SEQ ID NO: 227927 - DNA, 75 bp, synthetic construct
  source 1..75: mol_type = other DNA
tttgtctttgccaatggatccaactctttctgaagaggagatacaaaaggttgtcaatgcggtaaatggttttac

SEQ ID NO: 227928 - DNA, 75 bp, synthetic construct
  source 1..75: mol_type = other DNA
atgcaaacacttgccgatttactgaatacgatcccggccatcgatcatgctgctatgtcacgcgcacaacggcat

SEQ ID NO: 227929 - DNA, 75 bp, synthetic construct
  source 1..75: mol_type = other DNA
cgtatctcattccttctcacttgtcggcagaaaaaggcgcgcgtatagcgctgtcgcatttggggctggagcctt

SEQ ID NO: 227930 - DNA, 75 bp, synthetic construct
  source 1..75: mol_type = other DNA
ctgtcgcatttggggctggagccttatctcaatatggatatgcgtttaggtgaggggagtggcgcagctctggcg

SEQ ID NO: 227931 - DNA, 75 bp, synthetic construct
  source 1..75: mol_type = other DNA
actctggtaatattgccaaatataatattgacaaggattattttataatttgcaatcaattttggaaacataaag

SEQ ID NO: 227932 - DNA, 75 bp, synthetic construct
  source 1..75: mol_type = other DNA
taacaatattattgttaatgcacattcagttattaccgatgcaaataaatatgttgggaattattctgcaaaact

SEQ ID NO: 227933 - DNA, 75 bp, synthetic construct
  source 1..75: mol_type = other DNA
cggcacgggagtcaacaaagaccaggaagagaacggctatgcgtacattaagaaacagtgtatgcactgcgtcga

SEQ ID NO: 227934 - DNA, 75 bp, synthetic construct
  source 1..75: mol_type = other DNA
gacgctgaaatctggcgacacttacctgcatacggtgccgaaatattatccgcatctgtacggcgagaaagaggg

SEQ ID NO: 227935 - DNA, 75 bp, synthetic construct
  source 1..75: mol_type = other DNA
gcggtgattttcggtacgcgtgaagagctgatggcggaggcgaaaaaacgtctggcgctgaagcctggcagcgaa

SEQ ID NO: 227936 - DNA, 75 bp, synthetic construct
  source 1..75: mol_type = other DNA
atgcaaacacttgccgatttactgaatacgatccctgctatcgatcctgccgctatgtcgcgtgcacaacggcat

SEQ ID NO: 227937 - DNA, 75 bp, synthetic construct
  source 1..75: mol_type = other DNA
gcaaggggaacagacttggtcgaacaacgacaaactgtcgccgtataccaataacatcattcaggtgtggaccag

SEQ ID NO: 227938 - DNA, 75 bp, synthetic construct
  source 1..75: mol_type = other DNA
gcgggcttaaccgtgctggttcgtcgcaacaccaaaaacgaccatcacgacggaggtgacgatcatgagtcatga

SEQ ID NO: 227939 - DNA, 75 bp, synthetic construct
  source 1..75: mol_type = other DNA
atgacgcttgcagaacgtcttatacagaaaggttttgaaaaaggcgctcttgaagtggcgcgggaaatagcctgc

SEQ ID NO: 227940 - DNA, 75 bp, synthetic construct
  source 1..75: mol_type = other DNA
tggcttatgctctgtgggaaggtatcggtattttatttattacgctatttagtgttctgttatttgacgaaagct

SEQ ID NO: 227941 - DNA, 75 bp, synthetic construct
  source 1..75: mol_type = other DNA
gagggcggattctttggtcggatgtgggatttcgtgatgatgaaattccatcagtggttcggcagctggttctct

SEQ ID NO: 227942 - DNA, 75 bp, synthetic construct
  source 1..75: mol_type = other DNA
cgcaccgctgaaaaaaggtcaggttgtcgggaccattgatttccagcttaacggtaaatccattgagcagcgtcc

SEQ ID NO: 227943 - DNA, 75 bp, synthetic construct
  source 1..75: mol_type = other DNA
tttgaaacacttaatctgatcggtaaaaaaccagatattgaaaaacagatgtatggtaagtttttaaaatataaa

SEQ ID NO: 227944 - DNA, 75 bp, synthetic construct
  source 1..75: mol_type = other DNA
ggttcctgttcttgagcaaaaagcattgaaacgcgaaaagccattaattttcgggattgatatgccattccagga

SEQ ID NO: 227945 - DNA, 75 bp, synthetic construct
  source 1..75: mol_type = other DNA
catcagatcgttaaaacacctaatatcgacaggcttgcccaggaaggggtcaaatttactgactactatgccccc

SEQ ID NO: 227946 - DNA, 75 bp, synthetic construct
  source 1..75: mol_type = other DNA
aggaatcacttagctgtatctgtcattgtcaatgatatgagcgatctggatgttgatggtgtacttattgcaaat

SEQ ID NO: 227947 - DNA, 75 bp, synthetic construct
  source 1..75: mol_type = other DNA
gtgggctgaaatgggaagctaaagactcaagtaaacttatcggaaataaggaccacgcattacgggggctatcat

SEQ ID NO: 227948 - DNA, 75 bp, synthetic construct
  source 1..75: mol_type = other DNA
tgccgggcttttttgtcagcaggagcagagaaaacagtatgacgcttgcagaacgtcttatacagaaaggtttcg

SEQ ID NO: 227949 - DNA, 75 bp, synthetic construct
  source 1..75: mol_type = other DNA
gggttattaatttcgatggaagaaaaaggagaaaaccgcgacaccattaaaggcctcaaagttgcactgtttgga

SEQ ID NO: 227950 - DNA, 75 bp, synthetic construct
  source 1..75: mol_type = other DNA
gggcaggaattcctgttgatgtgcagggggctattgggaagtcattttttcaaaaaaaccaaataggtaaacttg

SEQ ID NO: 227951 - DNA, 75 bp, synthetic construct
  source 1..75: mol_type = other DNA
tgaactgggtcagcaaatcctgaaaggtcaaatgtcattggctgatttagcaaaatatgctcaggacaacaatct

SEQ ID NO: 227952 - DNA, 75 bp, synthetic construct
  source 1..75: mol_type = other DNA
tatgaacactgacaacatgtcgattctcggactgacgctcgattatgggccgttcggcttcctcgatgattacga

SEQ ID NO: 227953 - DNA, 75 bp, synthetic construct
  source 1..75: mol_type = other DNA
tttgcaacagtgccattctggttaagaagctcgaccgtcttggccgcgacactgccgatatgatccaactgataa

SEQ ID NO: 227954 - DNA, 75 bp, synthetic construct
  source 1..75: mol_type = other DNA
gcattggtacaacctgagcgacggtgccatggaagatgccctgtacgaaatcgcctccagcgcctgtttgcccga

SEQ ID NO: 227955 - DNA, 75 bp, synthetic construct
  source 1..75: mol_type = other DNA
gctgatgcgtgtggcaccaagtcatctgcgctttggtcatttcgaacatttttactatcgccgcgagccggaaaa

SEQ ID NO: 227956 - DNA, 75 bp, synthetic construct
  source 1..75: mol_type = other DNA
actatacccgcacgtttcgtatgctgagtcagactgaacagcgcagcgcggcttcaccgttacgtgatgagttta

SEQ ID NO: 227957 - DNA, 75 bp, synthetic construct
  source 1..75: mol_type = other DNA
ggcgcgatgaattgccagcaacctatacagcactttcccctacgcctttaaataatgcccggctgatttggcata

SEQ ID NO: 227958 - DNA, 75 bp, synthetic construct
  source 1..75: mol_type = other DNA
tggcatgatgttaatattcaagagaagttccccgtaacggatataacaaaaattaatgagcttgttgcgcacaat

SEQ ID NO: 227959 - DNA, 75 bp, synthetic construct
  source 1..75: mol_type = other DNA
gcgatgagttctatttacaagcggtacaagagttagtggatagcgcgctggctcatcgtattccccgcattattt

SEQ ID NO: 227960 - DNA, 75 bp, synthetic construct
  source 1..75: mol_type = other DNA
cgacgtacaaggcacggtaaaagaaaccaccccgcgtaatccggtaaccaatagtggacgagtattaaaagaact

SEQ ID NO: 227961 - DNA, 75 bp, synthetic construct
  source 1..75: mol_type = other DNA
ttgcgggtaaaagtagaagaaggtgatgtcattctggtgaagaagctcgaccgtcttggccgcgataccgccgat

SEQ ID NO: 227962 - DNA, 75 bp, synthetic construct
  source 1..75: mol_type = other DNA
aagtaaaactggttgcacgatcaaatggcatgaaggtttcaagggtgaatatttcccgccaacagataataccag

SEQ ID NO: 227963 - DNA, 75 bp, synthetic construct
  source 1..75: mol_type = other DNA
aaggtggaggaaggtgatgtcattctggttaagaagctcgaccgtcttggccgcgacactgccgatatgatccaa

SEQ ID NO: 227964 - DNA, 75 bp, synthetic construct
  source 1..75: mol_type = other DNA
ggggatgataagtttatcaccaccgactatttgcaacagtgccgccgatatgatccaactgataaaggaatttga

SEQ ID NO: 227965 - DNA, 75 bp, synthetic construct
  source 1..75: mol_type = other DNA
aggtgaccttaacccgcagcggccaggagtttactgtcaataacccgacgccgtacttcgtggttatcagtaacg

SEQ ID NO: 227966 - DNA, 75 bp, synthetic construct
  source 1..75: mol_type = other DNA
gcgtgagatcccgccaaagaccgggaaagccaacaccctgcaaattgccctgcaaacgcgcatcaagctgttctg

SEQ ID NO: 227967 - DNA, 75 bp, synthetic construct
  source 1..75: mol_type = other DNA
tgctcgtcagcacagcgctgatggcaatgcttaccaccgccagcctgacggcgcatgcatcggtcaccccggatc

SEQ ID NO: 227968 - DNA, 75 bp, synthetic construct
  source 1..75: mol_type = other DNA
gcacacagaaaaatggtaatccggcagccgggtttacgccgctggtcatgccgccgaaatcgtccgcaccgttga

SEQ ID NO: 227969 - DNA, 75 bp, synthetic construct
  source 1..75: mol_type = other DNA
atgtttaatctgactcatacggcaaaaaccgttatccctgcgctggcgctgctggcgagtttctccggccacgcc

SEQ ID NO: 227970 - DNA, 75 bp, synthetic construct
  source 1..75: mol_type = other DNA
cgcaacaacgatcccaaactgccttatctggcgcagagctggatagaggatgcaaagggcaacaaaatcagctcg

SEQ ID NO: 227971 - DNA, 75 bp, synthetic construct
  source 1..75: mol_type = other DNA
cgcaataacgaccctaagctgccatatctggcgcaaagctggatagaagacgaaaagggcaacaaaatcagttcg

SEQ ID NO: 227972 - DNA, 75 bp, synthetic construct
  source 1..75: mol_type = other DNA
aaggcggtcagcccatcacaggctttgaaccgctggtgatgccttctgcaaccacccaggagatgaaaggccgtg

SEQ ID NO: 227973 - DNA, 75 bp, synthetic construct
  source 1..75: mol_type = other DNA
gatcaaaatggtctacgatctgacggcgacttttgcgcagcaaatgcaggctgaaggggttgtcgcgaccaacaa

SEQ ID NO: 227974 - DNA, 75 bp, synthetic construct
  source 1..75: mol_type = other DNA
aagaagagcaaaaagacgggctgtgtgcctacggctgcaatgaagttcctgagcgtcctgctgctgggcgtcctc

SEQ ID NO: 227975 - DNA, 75 bp, synthetic construct
  source 1..75: mol_type = other DNA
cgcaataacgaccctaagctgccatacctggcgcaaagctggatagaagacgaaaagggcaacaaaatcagctcg

SEQ ID NO: 227976 - DNA, 75 bp, synthetic construct
  source 1..75: mol_type = other DNA
ggtgctgacttacgtcaacgactacggcgcgcgattgtcgctgaactttaaatgcactggcaataattgccaggt

SEQ ID NO: 227977 - DNA, 75 bp, synthetic construct
  source 1..75: mol_type = other DNA
ctggcggcggtgctggctgcctttagtgcgctttctcaggccgttaaagggatcgacttgtctgtcgcttatgca

SEQ ID NO: 227978 - DNA, 75 bp, synthetic construct
  source 1..75: mol_type = other DNA
ttggtcaacgtttaaaccgaaaaggctggattggcctggtcttgttgttggcagggatgataatggtgaaattcg

SEQ ID NO: 227979 - DNA, 75 bp, synthetic construct
  source 1..75: mol_type = other DNA
cgctgaccatcggtgaggaaaacttctggatagaccggatttcgccggatgatggcggaagctgtcatctctggc

SEQ ID NO: 227980 - DNA, 75 bp, synthetic construct
  source 1..75: mol_type = other DNA
atggctaatccaaccgttattaagctacaggatggcaatgtcatgccccagttgggactgggcgtctggcaagca

SEQ ID NO: 227981 - DNA, 75 bp, synthetic construct
  source 1..75: mol_type = other DNA
cacaaaatccagaccgaatcctggagcccattagcgcaaggagggaaaggcgttttcgatcagaaagtcattcgc

SEQ ID NO: 227982 - DNA, 75 bp, synthetic construct
  source 1..75: mol_type = other DNA
aacgacgaccacaagcgcccccgcgaagccctgctcgacagcctgaaaaaactccagcttgattatatcgacctc

SEQ ID NO: 227983 - DNA, 75 bp, synthetic construct
  source 1..75: mol_type = other DNA
gaatttaatctgagttccgatcaggctcagcgctttattcaacgcacctctgatgtgatgaaagagctgaagtac

SEQ ID NO: 227984 - DNA, 75 bp, synthetic construct
  source 1..75: mol_type = other DNA
tcaaaagcaaggcagagtttgaggctgctgtggccgaaagcatcaataagtttgtcgcgcagaaacaacaagccg

SEQ ID NO: 227985 - DNA, 75 bp, synthetic construct
  source 1..75: mol_type = other DNA
atgattagtgaaatcacaacaaatggcactaaaattaaactaagaaataatagtgctaatgatattaatatttat

SEQ ID NO: 227986 - DNA, 75 bp, synthetic construct
  source 1..75: mol_type = other DNA
cgactgacacaaattatctgtgggcagcaggtcaattttgttgatgtcctgaccagcaacaataccaatctgcaa

SEQ ID NO: 227987 - DNA, 75 bp, synthetic construct
  source 1..75: mol_type = other DNA
cgtcgtcatattggtattccgctggagaaagcgcccggggagtgggtacacagtgtggcggccccgcatgagctc

SEQ ID NO: 227988 - DNA, 75 bp, synthetic construct
  source 1..75: mol_type = other DNA
cattccggcggaaagcgacgccctgcgactggaagaacatgagcagtttaatcgcaagattgtcgcctccgcgcc

SEQ ID NO: 227989 - DNA, 75 bp, synthetic construct
  source 1..75: mol_type = other DNA
gcattggcgtctgtaacttccagatccaccacctgcaacgtctgatcgacgaaactggcgtgacgcctgttatta

SEQ ID NO: 227990 - DNA, 75 bp, synthetic construct
  source 1..75: mol_type = other DNA
gttgaagagaatgaacaagtaataaaactcactttgcaaaatggtgataatatccatgtcaaagattatgactat

SEQ ID NO: 227991 - DNA, 75 bp, synthetic construct
  source 1..75: mol_type = other DNA
gcgctgcgtctggcggcgctgctgaatacccgcgctgagctatgggcggggatgcagtctgaatatgatctctgg

SEQ ID NO: 227992 - DNA, 75 bp, synthetic construct
  source 1..75: mol_type = other DNA
gactggcacaagtattgtgcaggcagcttctgcgctgaacatttcccgctcccggttgtcccgtattctcaatgg

SEQ ID NO: 227993 - DNA, 75 bp, synthetic construct
  source 1..75: mol_type = other DNA
cgcatggagcctgagttagtttgcgattctgacgatctggatgccctgatggatgccgatgcgctggtcattacg

SEQ ID NO: 227994 - DNA, 75 bp, synthetic construct
  source 1..75: mol_type = other DNA
caaggcacggtgaaagaaaccaccccgcgtaatccggtgaccaacagtggacgagtattagaagaactcgaagac

SEQ ID NO: 227995 - DNA, 75 bp, synthetic construct
  source 1..75: mol_type = other DNA
tggttcgaccaagcaatgtctatggtttagctcttaatagtaaattatttcttccgtctattatccgtcatgcca

SEQ ID NO: 227996 - DNA, 75 bp, synthetic construct
  source 1..75: mol_type = other DNA
cgttatctggctggctaataacactactgatattgggaattatgttcgcggtgattggttacgcgatgtatgcag

SEQ ID NO: 227997 - DNA, 75 bp, synthetic construct
  source 1..75: mol_type = other DNA
ggcagcgacggccaggcacgacgggcggtaaattaccgtggaatgactggcgcaacgccactacctggcgtaaag

SEQ ID NO: 227998 - DNA, 75 bp, synthetic construct
  source 1..75: mol_type = other DNA
ccaccacctgcaacgtctgatcgacgaaactggcgtgacgcctgttattaatcaaatcgaacttcacccgctgat

SEQ ID NO: 227999 - DNA, 75 bp, synthetic construct
  source 1..75: mol_type = other DNA
tggttctgggtgcgatattacgaaaccgccggaaatacgccttttgtcgccagacctggcggcatcgaaggctgg

SEQ ID NO: 228000 - DNA, 75 bp, synthetic construct
  source 1..75: mol_type = other DNA
cagaccgggaggtatcgaaggctggctaccgattgccggtttgatgaatctgaaatatagccttgcaacaggtca

SEQ ID NO: 228001 - DNA, 75 bp, synthetic construct
  source 1..75: mol_type = other DNA
ttgggtatattgcaaatggtataggtgatgatatatcaagtattgccaggacaatgctcgtgaagttgtggaaaa

SEQ ID NO: 228002 - DNA, 75 bp, synthetic construct
  source 1..75: mol_type = other DNA
aggtcagggacttggtctttctttagtcaaagcgattgccgaattgcatgggggaagcgccacatatcactatat

SEQ ID NO: 228003 - DNA, 75 bp, synthetic construct
  source 1..75: mol_type = other DNA
gggatgcactttccgacgggcgcgtggaactggcgattggcgcaacacgcgcgattccggtaggcggtcgttatg

SEQ ID NO: 228004 - DNA, 75 bp, synthetic construct
  source 1..75: mol_type = other DNA
tcagagctttggttatgaagagtttattgaaggtttaagagctgagactactgatgacggtaatgtaaaatacga

SEQ ID NO: 228005 - DNA, 75 bp, synthetic construct
  source 1..75: mol_type = other DNA
gagctggggtagcggtatcagtgccggtgtcgcagatgctgcacgttctaccggttcttggggtctgacgctcag

SEQ ID NO: 228006 - DNA, 75 bp, synthetic construct
  source 1..75: mol_type = other DNA
aatcgaaaaaagaggatttaggacagggttacaatgcctatttgaaggatattcggcaagtttatcaggatccac

SEQ ID NO: 228007 - DNA, 75 bp, synthetic construct
  source 1..75: mol_type = other DNA
tgccgggctaaagacaaatacccggtgcgtatcgatcacgtgatgcactatagtgataagtccgcggtagacaac

SEQ ID NO: 228008 - DNA, 75 bp, synthetic construct
  source 1..75: mol_type = other DNA
ccaaacgatgttggcaggatattactgggtaatggaatatacaccagacaaagggcttcatattcattttatcgg

SEQ ID NO: 228009 - DNA, 75 bp, synthetic construct
  source 1..75: mol_type = other DNA
gaccacgctgatggggtacacacagtggtgctgttcatctccggactggccacataaaaaagatctgcttccggt

SEQ ID NO: 228010 - DNA, 75 bp, synthetic construct
  source 1..75: mol_type = other DNA
tacctggatgggcaacgtcacaagaaatcttatcggatatccaggcaactgggagatatctggaggcggatcacg

SEQ ID NO: 228011 - DNA, 75 bp, synthetic construct
  source 1..75: mol_type = other DNA
tcctgtaagcacagtatgtgtatggaaatataccgtttacttagcgaaacccagacgatgttggcgggatattac

SEQ ID NO: 228012 - DNA, 75 bp, synthetic construct
  source 1..75: mol_type = other DNA
gataagtctgcggtagacgacttacgttacgcccttagctacctggctaaacaggatcagaaagaacacggtatt

SEQ ID NO: 228013 - DNA, 75 bp, synthetic construct
  source 1..75: mol_type = other DNA
aagcgtggagcgattcgtggcaggcatggcgtcaggatcatggttttgttccgggcagtattcttaccctgcatg

SEQ ID NO: 228014 - DNA, 75 bp, synthetic construct
  source 1..75: mol_type = other DNA
gatggggcgtggttatgcctggcttgataccggtacccacgaaagcctaattgaagcgagtaactttattcagac

SEQ ID NO: 228015 - DNA, 75 bp, synthetic construct
  source 1..75: mol_type = other DNA
atgtagtagaaaagtctttgaatctttaagagcttatttggttgatggatgttcaagaaagtttatttgtgaaaa

SEQ ID NO: 228016 - DNA, 75 bp, synthetic construct
  source 1..75: mol_type = other DNA
atgagtaattcctgtcgttctgaaaagtccccccctctctatattggaggtgatgttttaactccaggttgtatg

SEQ ID NO: 228017 - DNA, 75 bp, synthetic construct
  source 1..75: mol_type = other DNA
ttgaggcaagcaacttcattgctacaattgaagagcgtcaagggttgaaagtttcctgtccggaagaaattgctt

SEQ ID NO: 228018 - DNA, 75 bp, synthetic construct
  source 1..75: mol_type = other DNA
tcgaaatggcgaaaaatcttaagccttctgcccgcggtgaactggaaattaccgatattaaccgtatttatatgg

SEQ ID NO: 228019 - DNA, 75 bp, synthetic construct
  source 1..75: mol_type = other DNA
cgactccagatgggcttgcgcaggcgtttattatcggtgaagagtttatcggtggtgatgattgtgctttggtac

SEQ ID NO: 228020 - DNA, 75 bp, synthetic construct
  source 1..75: mol_type = other DNA
acatctggtatagatccgtcaggtgcatctggtgatcatcagagcaacgatatatttattccattaactcatgag

SEQ ID NO: 228021 - DNA, 75 bp, synthetic construct
  source 1..75: mol_type = other DNA
taaaggcaatttttatattgttggctcttttaatcagtagttgctatcacatcgtatatgctgaagatatgggac

SEQ ID NO: 228022 - DNA, 75 bp, synthetic construct
  source 1..75: mol_type = other DNA
agacttgataaaaaaataatatccgatatatcaataaataacgtattgctggtttctttgtatgtcagccagttt

SEQ ID NO: 228023 - DNA, 75 bp, synthetic construct
  source 1..75: mol_type = other DNA
tatttggttgatgggcgttcaagaaagttcatttgtgaaaattacagtattagtaatgggtacttgaccgtaagt

SEQ ID NO: 228024 - DNA, 75 bp, synthetic construct
  source 1..75: mol_type = other DNA
atgaataaagcaataacggtgcttgctataatgatggcttcattttccgtaaatgcgtatgtattaccggaaacg

SEQ ID NO: 228025 - DNA, 75 bp, synthetic construct
  source 1..75: mol_type = other DNA
agccggattatcatgggcgatgtgttaaaccatgcggcgctggaacaggccgtggtggatcaggatgtggtgtac

SEQ ID NO: 228026 - DNA, 75 bp, synthetic construct
  source 1..75: mol_type = other DNA
atcagctgaatcagctgcagggcgaaacgaacgaaattgagcgcgtcatgttgtttgtcggttcgctcaaagcca

SEQ ID NO: 228027 - DNA, 75 bp, synthetic construct
  source 1..75: mol_type = other DNA
gcgcaccagacgctgtttgcgcgtccgctgcgggaaatgtctaccgccgccagtatcaatggcgtgtcgttccct

SEQ ID NO: 228028 - DNA, 75 bp, synthetic construct
  source 1..75: mol_type = other DNA
tggggaaatgaaccgggtgttctggcggggcgtctgtgtacccgatccgtgaccattgcagacagtccggcgcgg

SEQ ID NO: 228029 - DNA, 75 bp, synthetic construct
  source 1..75: mol_type = other DNA
gcgcgtaatcgcgggatcgaggcagcgacgggcaaatatgttgcttttgtcgatgctgatgatgaagtctatccc

SEQ ID NO: 228030 - DNA, 75 bp, synthetic construct
  source 1..75: mol_type = other DNA
ctggatgggggtttatcgccgcgatgttattgttaaaaataacattaaatttattgccggattacatcatcagga

SEQ ID NO: 228031 - DNA, 75 bp, synthetic construct
  source 1..75: mol_type = other DNA
acaaatcctctggcgcagcaaaacgcaggtggaaatttacatcatcgtgcgcacctacgaatgtccgaaaggtat

SEQ ID NO: 228032 - DNA, 75 bp, synthetic construct
  source 1..75: mol_type = other DNA
tacaggccagttttgggcgttttatctggtttgcccttgctgtgggcgggccggaaaaggacgaagcgtggagcg

SEQ ID NO: 228033 - DNA, 75 bp, synthetic construct
  source 1..75: mol_type = other DNA
aagaagagcaaaaagacgggctgtgtgcttacggctgcaatgaagttcctgaacgtcctgctgcaggacgaccac

SEQ ID NO: 228034 - DNA, 75 bp, synthetic construct
  source 1..75: mol_type = other DNA
gctgacttacatcaacgactacggcgcgcggatgccgctgtacttcaaatgcaccggcaacagctgccaggtgga

SEQ ID NO: 228035 - DNA, 75 bp, synthetic construct
  source 1..75: mol_type = other DNA
ggttctggccgcgcaggtggtgtgttcggtggaaggcgtggtgctgtccagtgatgtgacggcaaaagcccaggt

SEQ ID NO: 228036 - DNA, 75 bp, synthetic construct
  source 1..75: mol_type = other DNA
aagtggtcagaatacgtcaccgccatgaccggactacagaaaggcattgccgcttacgcggtgcagcttaccccg

SEQ ID NO: 228037 - DNA, 75 bp, synthetic construct
  source 1..75: mol_type = other DNA
cacgatttcgacgggctctactggtcagacggacgcacccttgatgtggaggggggcgattaccaggtcatcgaa

SEQ ID NO: 228038 - DNA, 75 bp, synthetic construct
  source 1..75: mol_type = other DNA
ctcaaccggcgtattaaccggcccggattggttgcggatggggctttcttcccgccgttggactcacgttgtctg

SEQ ID NO: 228039 - DNA, 75 bp, synthetic construct
  source 1..75: mol_type = other DNA
gatgctttacgaattaatattgatgaagtttcgccatcattaacggttactgtggctaaattggcttcagccaga

SEQ ID NO: 228040 - DNA, 75 bp, synthetic construct
  source 1..75: mol_type = other DNA
gccgaattgcatggaggaagtgctacgtatcactatctcaataagcttaatgtgttccggattacgttaccgcaa

SEQ ID NO: 228041 - DNA, 75 bp, synthetic construct
  source 1..75: mol_type = other DNA
tggtctttctttagtcaaagcgattgccgaattgcatgggggaagtgctacgtatcactatctcaataagcataa

SEQ ID NO: 228042 - DNA, 75 bp, synthetic construct
  source 1..75: mol_type = other DNA
aacaatgttttggtgaaactggatgcgctttctctcaataaggaagttgaaaatcttttggactatcttgaatat

SEQ ID NO: 228043 - DNA, 75 bp, synthetic construct
  source 1..75: mol_type = other DNA
agtaatgtcttgattaattttgaattactttctcttaaaagagaagttgaaaatctaatcgattatcttgaatat

SEQ ID NO: 228044 - DNA, 75 bp, synthetic construct
  source 1..75: mol_type = other DNA
gatgtcgccattcgcaggctccgcgcaaaagttgatgatccttttcctgaaaagctaatcgccacaatccggggg

SEQ ID NO: 228045 - DNA, 75 bp, synthetic construct
  source 1..75: mol_type = other DNA
ggaatttaccgtcaataacccgacgccgtattacgtcattttcagtaatgccagcacacagaaaaatggcaatcc

SEQ ID NO: 228046 - DNA, 75 bp, synthetic construct
  source 1..75: mol_type = other DNA
gtgttattatcccgttatataatgcgggagatgatttccgtacttgcatggaatctttaatcgcgcaaacctgga

SEQ ID NO: 228047 - DNA, 75 bp, synthetic construct
  source 1..75: mol_type = other DNA
tatgtataagcgcctgattaccaatgtgcgcagcgtgaaggtcggttaccaggcgttactgtggtctttccgctt

SEQ ID NO: 228048 - DNA, 75 bp, synthetic construct
  source 1..75: mol_type = other DNA
tgaatgtgaaaatggatagcgtaccggtactgacttacgtcaacgactttggcgcacggatgccactctttttcc

SEQ ID NO: 228049 - DNA, 75 bp, synthetic construct
  source 1..75: mol_type = other DNA
aaatcaaacaaacccaataccctgcaaatcgcgctgcaaacgcgtatcaagttgttctggcgaccaaaggcgctg

SEQ ID NO: 228050 - DNA, 75 bp, synthetic construct
  source 1..75: mol_type = other DNA
attcataaattacctgccgatcgggaatcgatgttctatttcaacgtgcgcgaaattccgccgaaatcgaacaaa

SEQ ID NO: 228051 - DNA, 75 bp, synthetic construct
  source 1..75: mol_type = other DNA
gattatatatttatgcgacagagcattccttaatcggctatgatgaaattataaacaacaaggagtgtgttaaaa

SEQ ID NO: 228052 - DNA, 75 bp, synthetic construct
  source 1..75: mol_type = other DNA
taaaaatataattcaaaagaatagttatacttgtcttttcttgggagttgattgggaaagaaaaggtgggaaaac

SEQ ID NO: 228053 - DNA, 75 bp, synthetic construct
  source 1..75: mol_type = other DNA
gtgaaaactgaaatcgcaaaagcctccaacgttgcagctaaagctggtgagagcgtaggcgggtggattgatgat

SEQ ID NO: 228054 - DNA, 75 bp, synthetic construct
  source 1..75: mol_type = other DNA
tatttacaacccggcaccattgactatgagcgctaccgactcacaaaagcacaggctgatgcacaggaactgaaa

SEQ ID NO: 228055 - DNA, 75 bp, synthetic construct
  source 1..75: mol_type = other DNA
atgctggcgaacgaagggctggcgtgctttatcggctacggtgggatgttgatggaatccttcgtggcgattatg

SEQ ID NO: 228056 - DNA, 75 bp, synthetic construct
  source 1..75: mol_type = other DNA
attcatcgatgtgttatctaacgctgatatacttcttttaccaaccattgctgaatgttatggaatggtattttg

SEQ ID NO: 228057 - DNA, 75 bp, synthetic construct
  source 1..75: mol_type = other DNA
gttaaagccaggtgcgtattttcatgaaaggagatcactcaataacggcgtttttcaaggtagttgtcgcctttt

SEQ ID NO: 228058 - DNA, 75 bp, synthetic construct
  source 1..75: mol_type = other DNA
acgaaaaactccgcaaagagaccgaggatttgcgtgcggctgcggaatcagatttacaacccggcaccattgact

SEQ ID NO: 228059 - DNA, 75 bp, synthetic construct
  source 1..75: mol_type = other DNA
ggatataaacgtatctgttagggtcataaatccaactatctggataaagaataaagcatatattgaaaaagcatt

SEQ ID NO: 228060 - DNA, 75 bp, synthetic construct
  source 1..75: mol_type = other DNA
gatcatcagaaggtcatccggtcattgtttctaacagtgacacatccctgatccgttcgctgtatcgcaatttca

SEQ ID NO: 228061 - DNA, 75 bp, synthetic construct
  source 1..75: mol_type = other DNA
acaggctgatgcgcaggagttaaagaatgcgcgtgatagtgccctggtgattgatactggtttttgtatgtatgc

SEQ ID NO: 228062 - DNA, 75 bp, synthetic construct
  source 1..75: mol_type = other DNA
attttggggatacttgtgcgtgtgcctctgacattacagcgtaaatatccggatatttcaccgtcacaccttgat

SEQ ID NO: 228063 - DNA, 75 bp, synthetic construct
  source 1..75: mol_type = other DNA
gtgaaaactgaaatcgcgaaagcctccaatgttgcagctaaagtcggtaaaaacgtgggcgggtggatcgatgat

SEQ ID NO: 228064 - DNA, 75 bp, synthetic construct
  source 1..75: mol_type = other DNA
gggcggtgcgccgacgttggcggtggggatggcttacatcctgcacggtgcgctgggtggtatgatggatgtggc

SEQ ID NO: 228065 - DNA, 75 bp, synthetic construct
  source 1..75: mol_type = other DNA
tgccgtaccggaaaacacccgcctgtttgaaatggtaaaaagaaaggagagtgaatatgagcgcatcggcactgg

SEQ ID NO: 228066 - DNA, 75 bp, synthetic construct
  source 1..75: mol_type = other DNA
aatcgacttgggcttggtcgatacccatccctgtctttgaaggatgccagacagatcactgctgacttgcgaaag

SEQ ID NO: 228067 - DNA, 75 bp, synthetic construct
  source 1..75: mol_type = other DNA
atccacggattttttcagttaggtggtatcagcgaggctgcgcgatcggcgctacgggatgttgcctggagagcg

SEQ ID NO: 228068 - DNA, 75 bp, synthetic construct
  source 1..75: mol_type = other DNA
ggcatcttatcttcccctgataaagtcgaagccagcggcgtaccggcgatcattgatagcggtattgaaaaaggc

SEQ ID NO: 228069 - DNA, 75 bp, synthetic construct
  source 1..75: mol_type = other DNA
gagctggggtagcggtatcagtgccggtgtcgcagatgctgcacgttctaccggttcttcaatgcaggcgcttgg

SEQ ID NO: 228070 - DNA, 75 bp, synthetic construct
  source 1..75: mol_type = other DNA
tccgctcttagccccggagggggcggggaggcgcttggggatttaattacacaatatatgaaagcggctgttgtt

SEQ ID NO: 228071 - DNA, 75 bp, synthetic construct
  source 1..75: mol_type = other DNA
gggccagcactgggcgcagcaaggctggcgcagattgcggcgaatccagagaaatcgctcattgagttgttgccg

SEQ ID NO: 228072 - DNA, 75 bp, synthetic construct
  source 1..75: mol_type = other DNA
ctcactacctggtttaatgaattcatcaccaccgggccacatggtgtggtgttggcaatgttcccgcttatctgg

SEQ ID NO: 228073 - DNA, 75 bp, synthetic construct
  source 1..75: mol_type = other DNA
gttggtggcaaacggctaccgtattcggcaggcgaatcgctgcatcgtatacccacaggaatgtaacagtccgcg

SEQ ID NO: 228074 - DNA, 75 bp, synthetic construct
  source 1..75: mol_type = other DNA
gttatagtctggatgttctgtctaacaccggcgcttatgcatctcacgggcactccatcgcttctgcggggggaa

SEQ ID NO: 228075 - DNA, 75 bp, synthetic construct
  source 1..75: mol_type = other DNA
ggtggggagacggtgggtaatttcaaaaagtggggagcaaaagtggggagtagtggggaatgaacagaaaaacca

SEQ ID NO: 228076 - DNA, 75 bp, synthetic construct
  source 1..75: mol_type = other DNA
cacagtgttatgctgcttatcagccacggcgtgaaacgttccgtcgcctctatcagcaacttctgccattaatgg

SEQ ID NO: 228077 - DNA, 75 bp, synthetic construct
  source 1..75: mol_type = other DNA
gcttgttctagtgctgcatgtcgggttgatgtagagcagcaaatgaacgcttatatacttggtagttattatgct

SEQ ID NO: 228078 - DNA, 75 bp, synthetic construct
  source 1..75: mol_type = other DNA
cgcgctcgccacgctcgaaaacgtttttggcccggtgtacgacctggtggaaattcgcgatcgcgccctgggtat

SEQ ID NO: 228079 - DNA, 75 bp, synthetic construct
  source 1..75: mol_type = other DNA
ctttcatgaagagttaagcgagcggcggccaggtcgcgtgccgcagaccgtacagctctgggtgggctgcctgct

SEQ ID NO: 228080 - DNA, 75 bp, synthetic construct
  source 1..75: mol_type = other DNA
agtcatgggcggacgcactttcaaaggccgtgaagccgaaagtaaaaaactgctgacctggggcttccgtttctt

SEQ ID NO: 228081 - DNA, 75 bp, synthetic construct
  source 1..75: mol_type = other DNA
aaaatgatgaccagctacgttatcggccaggcaatgaaagccggtaaatttaaagaaactgatttagtgaccatc

SEQ ID NO: 228082 - DNA, 75 bp, synthetic construct
  source 1..75: mol_type = other DNA
aaccggacacactgacaaagcaggttacaaccttgttgcttctgcgactgaaggccagatgcgcttgatctctgc

SEQ ID NO: 228083 - DNA, 75 bp, synthetic construct
  source 1..75: mol_type = other DNA
gctcatcgctcgcctgccagactggacagccccggcattaacgcccgccacggaacaggcacaaggagccacgca

SEQ ID NO: 228084 - DNA, 75 bp, synthetic construct
  source 1..75: mol_type = other DNA
aacatgccattgccaaagggcagtgctggcaaagcgactggcggcttagtgaagatgaagcgatggcggcacggg

SEQ ID NO: 228085 - DNA, 75 bp, synthetic construct
  source 1..75: mol_type = other DNA
taccggtggtcaggctgctggcgttctttcatgaagagttaagcgagcggcggcctggtcgtgtgccgcagaccg

SEQ ID NO: 228086 - DNA, 75 bp, synthetic construct
  source 1..75: mol_type = other DNA
agcatgccattgccgaaggtcagtgctggcaaagcgactggcggatcagtgaaagtgaagcgatggcggcacggg

SEQ ID NO: 228087 - DNA, 75 bp, synthetic construct
  source 1..75: mol_type = other DNA
ttgtcgccatttacgggcaaccctcccccgccatgctcgactatccggaagtggtcgtgcgcttaacgctgtggt

SEQ ID NO: 228088 - DNA, 75 bp, synthetic construct
  source 1..75: mol_type = other DNA
tactcgacgctgaatcgctacgatcccacctcttttgctgattctcaggcaattattgaattccgacaaaaatta

SEQ ID NO: 228089 - DNA, 75 bp, synthetic construct
  source 1..75: mol_type = other DNA
aaccattgaacagcgtccgctggtagtgttacaggaaattccggaaggtaacttcttcggtaaaatcattgatta

SEQ ID NO: 228090 - DNA, 75 bp, synthetic construct
  source 1..75: mol_type = other DNA
tgtttctaacagtgacacatccctgatccgttcgctgtatcgcaattttactcaccactacatcaaggcaaaacg

SEQ ID NO: 228091 - DNA, 75 bp, synthetic construct
  source 1..75: mol_type = other DNA
tctataaaaaggttgctgctgattgcgaggcgtttatatctcgcgccagagttttatttgagaacgcaaataggg

SEQ ID NO: 228092 - DNA, 75 bp, synthetic construct
  source 1..75: mol_type = other DNA
tctataaaaagattgccgctgattgcgaagcgtttatatctcgtgccagagttttatttgaggaagcaaacagtg

SEQ ID NO: 228093 - DNA, 75 bp, synthetic construct
  source 1..75: mol_type = other DNA
actgaaaaagcatcttcctgctggcccgcgactggttgaacctttcgcgggttcctgtgcagtgatgatggagac

SEQ ID NO: 228094 - DNA, 75 bp, synthetic construct
  source 1..75: mol_type = other DNA
gaaataaaaccgccattatgtccgaactgaaaaagcatcttcctgctggcccgcgactggttgaacctttcgcgg

SEQ ID NO: 228095 - DNA, 75 bp, synthetic construct
  source 1..75: mol_type = other DNA
tctataaaaaggttgccgctgattgtgaatcatttatatctcgcgccagagttttatttaaggaagcaaacaggg

SEQ ID NO: 228096 - DNA, 75 bp, synthetic construct
  source 1..75: mol_type = other DNA
acaggtgagaaaccgttattaataagtcattcatacaaaggagataaggcaaaacaggaacaaatatcaaaaagg

SEQ ID NO: 228097 - DNA, 75 bp, synthetic construct
  source 1..75: mol_type = other DNA
tctgcgccagatttgatgaaacgctggcgatgttgaaggcgggagatgtggtgtattgcgatccgccgtatgacg

SEQ ID NO: 228098 - DNA, 75 bp, synthetic construct
  source 1..75: mol_type = other DNA
tgccagcatgggtaaccatttcagaagctgccacaattattaatcaacaacagggcatttgtataaccagcagcg

SEQ ID NO: 228099 - DNA, 75 bp, synthetic construct
  source 1..75: mol_type = other DNA
ctgtttccgggccgcgctgctgggtagaatttgatccttcgcgtggcgtggattgttccgtcgtgtacggagtgc

SEQ ID NO: 228100 - DNA, 75 bp, synthetic construct
  source 1..75: mol_type = other DNA
cggcttcactgaagatgaccagtatcacctggcactgagagatcccctcataatttccccaaaacgtaaccatgt

SEQ ID NO: 228101 - DNA, 75 bp, synthetic construct
  source 1..75: mol_type = other DNA
ggattttaatcattcggctgaaaccaccgatttctggaaagctgtatttttcctttatcttaatcgccatggtta

SEQ ID NO: 228102 - DNA, 75 bp, synthetic construct
  source 1..75: mol_type = other DNA
ttacgacagcatgcgttatgaactgggtgtagatgcaggttataccttcacctacagcgaagaccaggttctgac

SEQ ID NO: 228103 - DNA, 75 bp, synthetic construct
  source 1..75: mol_type = other DNA
aaagccggttacgacttcaaactgggtgatgcaggttacgtgactccttacggcagcgtttctggtctgttccag

SEQ ID NO: 228104 - DNA, 75 bp, synthetic construct
  source 1..75: mol_type = other DNA
gaagcaagatattctagcttttcacaactctcgacttggattgttatgtctgctttttagaatactcatgcccca

SEQ ID NO: 228105 - DNA, 75 bp, synthetic construct
  source 1..75: mol_type = other DNA
ggcgcgattatcggcatcggtttaaccaatgcacttttaaccggttcgtcagtaatggatgcattaaatctgcgt

SEQ ID NO: 228106 - DNA, 75 bp, synthetic construct
  source 1..75: mol_type = other DNA
tgttaaccggctcatcggtgatggatgcgttaaacctgcgtgaagtgaccaaaattttctcctcgctgattgttt

SEQ ID NO: 228107 - DNA, 75 bp, synthetic construct
  source 1..75: mol_type = other DNA
tatttatacccgcgccatgcagccgcatcttgctgtagtgatggcggcattttttaacttttttggcgtgttgct

SEQ ID NO: 228108 - DNA, 75 bp, synthetic construct
  source 1..75: mol_type = other DNA
gcttgaacgcgtagacattatccctaccagtatggtggcgacgatggctgcagcagaaagcggttggggaacgtc

SEQ ID NO: 228109 - DNA, 75 bp, synthetic construct
  source 1..75: mol_type = other DNA
tggctgatttcaaaacagtatcagggccaatggtcacctgctgagcgtgcgcgtctgaaagacatcgccaaacgc

SEQ ID NO: 228110 - DNA, 75 bp, synthetic construct
  source 1..75: mol_type = other DNA
atggaacatcagagaaaactattccagcaacgcggctatagcgaagatctactgccgaaaacgcaaagtcagcgg

SEQ ID NO: 228111 - DNA, 75 bp, synthetic construct
  source 1..75: mol_type = other DNA
gatttttttccaaatatagatgctgccaactatgttttaaatgcagcaaagtcgaataatgattattgctatatt

SEQ ID NO: 228112 - DNA, 75 bp, synthetic construct
  source 1..75: mol_type = other DNA
ccactgatgtgtggtgccattgcctatattggtggttgtttatattgttttcgtgcaatttacatcaataaatgc

SEQ ID NO: 228113 - DNA, 75 bp, synthetic construct
  source 1..75: mol_type = other DNA
actcgaacgcgtagacattatcccgaccagtatggtagcgacgatggctgccgcagaaagcggttggggaacgtc

SEQ ID NO: 228114 - DNA, 75 bp, synthetic construct
  source 1..75: mol_type = other DNA
ttcaaactgggtgatgctggttacgtgactccttacggcagcgtttctggtctgttccagtctggtgatgactac

SEQ ID NO: 228115 - DNA, 75 bp, synthetic construct
  source 1..75: mol_type = other DNA
tagtcggaattccagggcaaggtgtcgctgttgcttcaaatggcacatctccaacatttgggagcaacagtactg

SEQ ID NO: 228116 - DNA, 75 bp, synthetic construct
  source 1..75: mol_type = other DNA
gatggcgaagacctgtatctcaaggaggtaacccactggatgccgctgccagaaccgccgcaggaggtgaatcaa

SEQ ID NO: 228117 - DNA, 75 bp, synthetic construct
  source 1..75: mol_type = other DNA
ttaagccacggttttatcgcaaggtaagggtggtttatcaggacgaaaacaagacctgtgcatacgccattcata

SEQ ID NO: 228118 - DNA, 75 bp, synthetic construct
  source 1..75: mol_type = other DNA
ctatatgaccgacaagttgaactgattgagagcatccgacttcatcaactgtcctcaactttcgacgttgtaaca

SEQ ID NO: 228119 - DNA, 75 bp, synthetic construct
  source 1..75: mol_type = other DNA
caaggactaccgcctgtcagaacagctatatgaccgacaagttgaactgattgagagtatccggcttcatcaact

SEQ ID NO: 228120 - DNA, 75 bp, synthetic construct
  source 1..75: mol_type = other DNA
gtggataaaaaactaattgcatttttgtgcacacttataattactggttgctcgaatgggatcggggattcacct

SEQ ID NO: 228121 - DNA, 75 bp, synthetic construct
  source 1..75: mol_type = other DNA
tatcgattttccgattcgtttggtggtaacccaccattatattcgtgcggtcttagtgcgctgtaatatccaacg

SEQ ID NO: 228122 - DNA, 75 bp, synthetic construct
  source 1..75: mol_type = other DNA
ttacctgaaaaaatcaggaaacagttggctgatgctcttcgagtgcgactttacgcggtgaatttattcgtggct

SEQ ID NO: 228123 - DNA, 75 bp, synthetic construct
  source 1..75: mol_type = other DNA
caacaagtcgctttcttgttgaggcgcagttggcatcaattcttgccgaaagtgagatactctcgctcgctgaac

SEQ ID NO: 228124 - DNA, 75 bp, synthetic construct
  source 1..75: mol_type = other DNA
agcatgcgccccgacaccagaagatatgttggtatatacgggaagagccagaagacttgcttcatttcttaaaga

SEQ ID NO: 228125 - DNA, 75 bp, synthetic construct
  source 1..75: mol_type = other DNA
atgtcgtgccgatcctgtcggcaacggccacggccggggggatctttatggcgctgatgcgcaaaacctttgtcc

SEQ ID NO: 228126 - DNA, 75 bp, synthetic construct
  source 1..75: mol_type = other DNA
ctaaatatatccagggaaatggttctctggataatattgctacatatgcggcgagtttgggaacagaaccattaa

SEQ ID NO: 228127 - DNA, 75 bp, synthetic construct
  source 1..75: mol_type = other DNA
tacagaagattgatttctgaactgagccaagttagcgaagaaacaatagagtccttagttccgaagatatcgaat

SEQ ID NO: 228128 - DNA, 75 bp, synthetic construct
  source 1..75: mol_type = other DNA
ttcttcttatcagaatcagcacatgagtgtgatcaggaacgaatgattaatacatacagaagattgatttctgaa

SEQ ID NO: 228129 - DNA, 75 bp, synthetic construct
  source 1..75: mol_type = other DNA
cccgtcgcagggaatgttgtccagttttgtcccgacggatagccagattatcggccaggtttataagtgcccgaa

SEQ ID NO: 228130 - DNA, 75 bp, synthetic construct
  source 1..75: mol_type = other DNA
gtgacagagatcgaggttgaaaaaaaggttatctatgttgagacgactaaaggcggtcagccgccactattcagt

SEQ ID NO: 228131 - DNA, 75 bp, synthetic construct
  source 1..75: mol_type = other DNA
gacggcaaacacatctatggggaccttggtgcccgattcacgctggtggagttctctgatatggagtgccccttc

SEQ ID NO: 228132 - DNA, 75 bp, synthetic construct
  source 1..75: mol_type = other DNA
gttctccgatatggagtgcccattctgcaagcgattccacgacacacccaaacaaattgtggatgccagcaaagg

SEQ ID NO: 228133 - DNA, 75 bp, synthetic construct
  source 1..75: mol_type = other DNA
aagagattcgttttaaggtcgagtgcaatcagcaaatctttgcggataaaattttactacaacgaatgttatcga

SEQ ID NO: 228134 - DNA, 75 bp, synthetic construct
  source 1..75: mol_type = other DNA
aacagagaatatactttttcttgccagagcagataaaaacaatgttttggtgaaactggatttgctttctctcaa

SEQ ID NO: 228135 - DNA, 75 bp, synthetic construct
  source 1..75: mol_type = other DNA
atttgcccctatatttccagacacctgttatcacttaccccatcactggcccactgccgcagatattcccgtggc

SEQ ID NO: 228136 - DNA, 75 bp, synthetic construct
  source 1..75: mol_type = other DNA
cccgtcgcaggggatgttgtccagcttcgttccgactgatagccagattatcggccaggtttataagtgcccgaa

SEQ ID NO: 228137 - DNA, 75 bp, synthetic construct
  source 1..75: mol_type = other DNA
gaccacactgatgggttacacacagtggtgttgttcctcaccggactgttgccacacaaaaaagcctgcttccgg

SEQ ID NO: 228138 - DNA, 75 bp, synthetic construct
  source 1..75: mol_type = other DNA
tggtgctgttcatctccggactgcagccacataaaaagatctgcttccggtgtaaaagtcgctcctgcccgcact

SEQ ID NO: 228139 - DNA, 75 bp, synthetic construct
  source 1..75: mol_type = other DNA
tgtggctaaattggcttcagccagacataacatgcttgaacagtataaaattaatagcattataatttgcattgt

SEQ ID NO: 228140 - DNA, 75 bp, synthetic construct
  source 1..75: mol_type = other DNA
aaataggtttctggtatgtgatagccctcgcaggacagtctaatggtatggcctacggtgaaggtattcccctgc

SEQ ID NO: 228141 - DNA, 75 bp, synthetic construct
  source 1..75: mol_type = other DNA
accgtgcatcattcgacgggcatcgcttcatgcagggggaattaatagagacgctggttacactttccagtccct

SEQ ID NO: 228142 - DNA, 75 bp, synthetic construct
  source 1..75: mol_type = other DNA
ttagttagtcatgcttataaaggagataagtcacgccaagatcaaatcgctgaaagattaaatggtcgatattca

SEQ ID NO: 228143 - DNA, 75 bp, synthetic construct
  source 1..75: mol_type = other DNA
ggagtatggcaaagcccggtgccggaggaattgtaccgacgcttaattccgcaagcgccaatgattggtcactaa

SEQ ID NO: 228144 - DNA, 75 bp, synthetic construct
  source 1..75: mol_type = other DNA
gtaattggttacgcaatttatgtaggcgtatggcaaagcccggtgccggaggaattgtatcgacgcttaattcca

SEQ ID NO: 228145 - DNA, 75 bp, synthetic construct
  source 1..75: mol_type = other DNA
ggcagatcactgcctgcatgatgttcaggatatgagtggatatcaccatccggctgctgatttgcataaagggga

SEQ ID NO: 228146 - DNA, 75 bp, synthetic construct
  source 1..75: mol_type = other DNA
taaagagcaggatattggcaagtatgaaaatgtatttattgaaggattacaagaagtagaagctttcttgaagaa

SEQ ID NO: 228147 - DNA, 75 bp, synthetic construct
  source 1..75: mol_type = other DNA
tgaaacctcctgttccatttaaaccagtcaatgggcgtagattaataaatttagatggattagattgtatttctc

SEQ ID NO: 228148 - DNA, 75 bp, synthetic construct
  source 1..75: mol_type = other DNA
gccgaattacatgggggaagtgctacgtatcactatctcaataagcataatgtgttccggattatgttaccgcaa

SEQ ID NO: 228149 - DNA, 75 bp, synthetic construct
  source 1..75: mol_type = other DNA
atagtcaacattcaagatttcacctaatcaagctcaaagaacttgattgtgtctgcttgttttcgggaggattag

SEQ ID NO: 228150 - DNA, 75 bp, synthetic construct
  source 1..75: mol_type = other DNA
tccccttcatgagccatctcgatggattgctctaaagaaggaacttgaaagcgctttgcatttccttagcggaga

SEQ ID NO: 228151 - DNA, 75 bp, synthetic construct
  source 1..75: mol_type = other DNA
tggtgcaatagatcttctggctgcagggcgcgctccacttttggttagtcatgcttataagggggataagtctcg

SEQ ID NO: 228152 - DNA, 75 bp, synthetic construct
  source 1..75: mol_type = other DNA
gtgttgctggacgcattaaaactggcgaatcgcaccggatttatcagccattttgtcatcgaaggcgaagcgatg

SEQ ID NO: 228153 - DNA, 75 bp, synthetic construct
  source 1..75: mol_type = other DNA
ccactttgatttccgtgaagcgattgagaatgtggtgatagacgtttcacatgcccatttctgggacatcacgtc

SEQ ID NO: 228154 - DNA, 75 bp, synthetic construct
  source 1..75: mol_type = other DNA
actggctgggtaacgtccgtggagacgtcctcgccggtattgttgtcgcgctcgcgcttatccctgaagcgatcg

SEQ ID NO: 228155 - DNA, 75 bp, synthetic construct
  source 1..75: mol_type = other DNA
tggtggcgaccgataacctggcgtttggcgtgctcaccggcgtgctgattgcctcgctgaacttcgccaccaagg

SEQ ID NO: 228156 - DNA, 75 bp, synthetic construct
  source 1..75: mol_type = other DNA
gcccgctggcgtgatgcgccggaaggggcggtgatgatgctccggtgtccgtcgcgtccctttgtggtgccggta

SEQ ID NO: 228157 - DNA, 75 bp, synthetic construct
  source 1..75: mol_type = other DNA
tgagtcggtacagcgatacatcgtgaagccgggagaagtccacgccgtaaggccgcacccgttaccatcaggaca

SEQ ID NO: 228158 - DNA, 75 bp, synthetic construct
  source 1..75: mol_type = other DNA
gagaatgtggtgatagacgtttcacatgcccatttctgggacatcacgtccgtcagcgccctggataaggtggtc

SEQ ID NO: 228159 - DNA, 75 bp, synthetic construct
  source 1..75: mol_type = other DNA
ttctggatcgcttccgcgcggaacacccgtcggtggagatcaaactcaccactggtgatgcggcagatgcaatgg

SEQ ID NO: 228160 - DNA, 75 bp, synthetic construct
  source 1..75: mol_type = other DNA
ccggtgcgtaatcaggtatctgtcgaaaagcccgactggtctacagtgccgtttatcatggccgatcaggggccg

SEQ ID NO: 228161 - DNA, 75 bp, synthetic construct
  source 1..75: mol_type = other DNA
cgatgagaaaacgccgtttgaactgggcgtgtgtgcacaaaaaaagcggctgcatgagccgctgattgaggcgtt

SEQ ID NO: 228162 - DNA, 75 bp, synthetic construct
  source 1..75: mol_type = other DNA
cgtgagtgcgctggacagagtagtcatcaagtttcggcgcgaaggcacggaagtggagattaagggtatgaatga

SEQ ID NO: 228163 - DNA, 75 bp, synthetic construct
  source 1..75: mol_type = other DNA
actggtgatgcggcggacgcaatggaaaaagttgtaacgggggaagcggatctggcgattgccgggaagccggag

SEQ ID NO: 228164 - DNA, 75 bp, synthetic construct
  source 1..75: mol_type = other DNA
gtttatcatggccgatcaggggccggtgcgccgccgcattgagttgtggttccgacgcaataaaatcagtaaccc

SEQ ID NO: 228165 - DNA, 75 bp, synthetic construct
  source 1..75: mol_type = other DNA
gcgaacttgttgatgccgcgattgaacttgctggcgatttttattccatgatgggttacgagcatcgacctggtt

SEQ ID NO: 228166 - DNA, 75 bp, synthetic construct
  source 1..75: mol_type = other DNA
tatcgccttcctttactgcatctgggcggtagtcggttctggcgcacaagaggtcatgtggtcattcgtcacgct

SEQ ID NO: 228167 - DNA, 75 bp, synthetic construct
  source 1..75: mol_type = other DNA
ctgaattacaaccggctgcataaaaacccgtatcccttagggaaggtgcgaataagcaggtcatttcttcccaag

SEQ ID NO: 228168 - DNA, 75 bp, synthetic construct
  source 1..75: mol_type = other DNA
catttatggatggttggtgacgattatcggtgcgctggggctctcgatggtatacgccaaaatgtcgttcctcga

SEQ ID NO: 228169 - DNA, 75 bp, synthetic construct
  source 1..75: mol_type = other DNA
aatctttgcgaggcaggacgggctaaattaaaccgttccttaccacgtaaaggtatctggaaacttgggtattat

SEQ ID NO: 228170 - DNA, 75 bp, synthetic construct
  source 1..75: mol_type = other DNA
acgaactttatcgcgcagacgccggtacgctcagctttctggatggcgcggacacgccaagaaatcccgtcggaa

SEQ ID NO: 228171 - DNA, 75 bp, synthetic construct
  source 1..75: mol_type = other DNA
gctctctcgacttaagcgtgcaggaggccgaggaggatatagaacaacgggaagaactctatacaacaaacgggg

SEQ ID NO: 228172 - DNA, 75 bp, synthetic construct
  source 1..75: mol_type = other DNA
aagtgatggtggtcgtggtgccggaacacggcggcgcgctgaagggcgacagaatgcaggtatctggccttgtat

SEQ ID NO: 228173 - DNA, 75 bp, synthetic construct
  source 1..75: mol_type = other DNA
caaacgcggtggtgattcaataccagaacaaaccttacgttcggttgaatggtggtgattggttgccatacccgc

SEQ ID NO: 228174 - DNA, 75 bp, synthetic construct
  source 1..75: mol_type = other DNA
gcaagagcaactggtgtttcaaatggcctgccgtgcttttgaggttattcgcggttctgatgtgatggacgccgt

SEQ ID NO: 228175 - DNA, 75 bp, synthetic construct
  source 1..75: mol_type = other DNA
tgatatgcctgcgcaaaccgcgccgccgacaaccgcaaaccttaatgcctggctgagtaatttctataacgccga

SEQ ID NO: 228176 - DNA, 75 bp, synthetic construct
  source 1..75: mol_type = other DNA
gcttccactgcatgacggcggtaatgactccaacttattgatagtgttttatgttcagataatgcccgatgactt

SEQ ID NO: 228177 - DNA, 75 bp, synthetic construct
  source 1..75: mol_type = other DNA
agaatgcaggtatctggcctacgtgatatccctagtccatcaattactgatgtccccgttggcgtgaaattcttc

SEQ ID NO: 228178 - DNA, 75 bp, synthetic construct
  source 1..75: mol_type = other DNA
ctgaccatggcaatccaggcggggataaaaacatccggatttgcggcctatcagatggcgcttgttgtcacaaat

SEQ ID NO: 228179 - DNA, 75 bp, synthetic construct
  source 1..75: mol_type = other DNA
accggaatacagggcaccttttcttcgtatggccacagtcagtgttttgtttgttcttctgtgtgaatactctgt

SEQ ID NO: 228180 - DNA, 75 bp, synthetic construct
  source 1..75: mol_type = other DNA
gagggttttgctgctctgcgtgaatggatgtatgagacgcgttatggctggctgatctggcgtctgtgtgtctac

SEQ ID NO: 228181 - DNA, 75 bp, synthetic construct
  source 1..75: mol_type = other DNA
accgattcctggttggcagagtacgcttgagcaacgtggatttgtcggctgtgcgcggcacttcattgaatgcgt

SEQ ID NO: 228182 - DNA, 75 bp, synthetic construct
  source 1..75: mol_type = other DNA
ccgtggcggaagaattgcagacaggctacagcaaccccacgccggagttgctgaccatggcaatccaggcgggga

SEQ ID NO: 228183 - DNA, 75 bp, synthetic construct
  source 1..75: mol_type = other DNA
ttctcactggaatattcgctatggatagccagtgacgagaaggaatctcttgggatggttacaactgcattagca

SEQ ID NO: 228184 - DNA, 75 bp, synthetic construct
  source 1..75: mol_type = other DNA
tcaaaggcaattctcatttcctgatggcggaaaagaataatcaggagattgccgggatactggcatcgtggttac

SEQ ID NO: 228185 - DNA, 75 bp, synthetic construct
  source 1..75: mol_type = other DNA
ttcatcctagtgttcctcatctttttgcagaccttgcagaacttgctacggttataaattattctggtcgttatg

SEQ ID NO: 228186 - DNA, 75 bp, synthetic construct
  source 1..75: mol_type = other DNA
tccgaaaaacctcgtcgattcagagcgtattctcaccgaactacgcactgaaggttatgacgtagtaccgagcta

SEQ ID NO: 228187 - DNA, 75 bp, synthetic construct
  source 1..75: mol_type = other DNA
atacgggagcaggaatgcgcggccagctaaaaaggaagggaaagatgcttattctgtatctgctgctactggcag

SEQ ID NO: 228188 - DNA, 75 bp, synthetic construct
  source 1..75: mol_type = other DNA
cttcgtatggccacagtcagtgttttgtttgttctgctgtgtgaatactctgtttttgccggaccggggcgttga

SEQ ID NO: 228189 - DNA, 75 bp, synthetic construct
  source 1..75: mol_type = other DNA
tgaccaacgcccgcgcgattggcgagtttggtgcggtgtcggtggtttccggctcgattcgcggcgaaacacttt

SEQ ID NO: 228190 - DNA, 75 bp, synthetic construct
  source 1..75: mol_type = other DNA
aacatgttaaaacggtacacgcatctccgggcatatcagctggtcagcaaactcgatgccaggcgtaaacagacc

SEQ ID NO: 228191 - DNA, 75 bp, synthetic construct
  source 1..75: mol_type = other DNA
gcatgcgccgtatatgcgcgttgagtttccagatactggcgcggttatcaaaggcgaggctggcgacaatatcgg

SEQ ID NO: 228192 - DNA, 75 bp, synthetic construct
  source 1..75: mol_type = other DNA
ccttccctgaatttattaatcagcaatgggtccgccgctacgatatgacggtgcgcctgcgccggaaggttgtgc

SEQ ID NO: 228193 - DNA, 75 bp, synthetic construct
  source 1..75: mol_type = other DNA
aagcgggcgaagaactgcgcgttttcgcccagcaaacgctgttgcagtatcagcagctgcgccacaccatcgatc

SEQ ID NO: 228194 - DNA, 75 bp, synthetic construct
  source 1..75: mol_type = other DNA
tgatgaaaaaacgccgtttgagctgggcgtgtgcgtacaaaaaaagcggcttcatgagccgctgattgaggcgtt

SEQ ID NO: 228195 - DNA, 75 bp, synthetic construct
  source 1..75: mol_type = other DNA
atcgcttccgcgcggaacacccgtcggtggagattaaactcacgactggtgatgcggcagatgcgatggaaaagg

SEQ ID NO: 228196 - DNA, 75 bp, synthetic construct
  source 1..75: mol_type = other DNA
tcagaaaccctgattaccagatggtttttgaatggcggatggagcgcttacagcgcattcgccagaaccctgaaa

SEQ ID NO: 228197 - DNA, 75 bp, synthetic construct
  source 1..75: mol_type = other DNA
gtaaagacgatgagtggtatcacaaggagtgcgagaaaattgataacccagtcatcgttgcccaggaactggatc

SEQ ID NO: 228198 - DNA, 75 bp, synthetic construct
  source 1..75: mol_type = other DNA
tttcctgaaactggcgcggttatcaaaggtgaggctggcgataatatcggtcgtggtgaccgtacgaccctttat

SEQ ID NO: 228199 - DNA, 75 bp, synthetic construct
  source 1..75: mol_type = other DNA
ttcgcggttcgtggagtgagaagaagcacgcgccatatatgcgtgttgagtttcctgaaactggtgccgttatca

SEQ ID NO: 228200 - DNA, 75 bp, synthetic construct
  source 1..75: mol_type = other DNA
cgacgaaatcatttcgataagcagcgagatagaaaatattgaccgcctgctgatggagctttcacagcctacgtg

SEQ ID NO: 228201 - DNA, 75 bp, synthetic construct
  source 1..75: mol_type = other DNA
attgacctgagctcggttaatggcatggcgaacccgttcgcgcagaagcgtcacggcgggaagataccggtattc

SEQ ID NO: 228202 - DNA, 75 bp, synthetic construct
  source 1..75: mol_type = other DNA
gactcagccctgaaactgggccaggcgcgcggcgtggcgattgtggcggcggtgaatcaggaattgccggtattt

SEQ ID NO: 228203 - DNA, 75 bp, synthetic construct
  source 1..75: mol_type = other DNA
gcaaccgcgtctgaatccgctgcactgcaatacctggcgccgtatgccggttgcgcaatgggtgaatacttccgt

SEQ ID NO: 228204 - DNA, 75 bp, synthetic construct
  source 1..75: mol_type = other DNA
taagtgacggtgttatccgcatccacggcttggccgattgtatgcagggtgaaatgatctccctgccgggtaacc

SEQ ID NO: 228205 - DNA, 75 bp, synthetic construct
  source 1..75: mol_type = other DNA
ccgactcgtgaagccgctgaaagcctgttcgagaacctgttcttctctgaagaccgctatgacttgtctgcggtt

SEQ ID NO: 228206 - DNA, 75 bp, synthetic construct
  source 1..75: mol_type = other DNA
tattacccgtagaccaattcatatgccaaacgacgcgatcgtcgaagacatcaaggaaatgctaaaaggctataa

SEQ ID NO: 228207 - DNA, 75 bp, synthetic construct
  source 1..75: mol_type = other DNA
catttgctttccgatgacgaaaaagttgagttaacaaaagccgtcgttgaagaggtcggtaatgaagttaccatt

SEQ ID NO: 228208 - DNA, 75 bp, synthetic construct
  source 1..75: mol_type = other DNA
tgagcgacgagtactactcgaagtatctgcctgggttgatcaaatccggcaaagtgacgatggcagagctggacg

SEQ ID NO: 228209 - DNA, 75 bp, synthetic construct
  source 1..75: mol_type = other DNA
gcgaacgttaccagtgacaaaggcattatcgacttcctgaatcagtatgaagaagcggtaaaagtcgatccgcgc

SEQ ID NO: 228210 - DNA, 75 bp, synthetic construct
  source 1..75: mol_type = other DNA
tgacggcttccatgagtcgtccggtgaagcagcttaaaggctttgagaaaatcaccctgaaaccgggcgaaactc

SEQ ID NO: 228211 - DNA, 75 bp, synthetic construct
  source 1..75: mol_type = other DNA
ttccgggtcaaactgaatctatttactgccagctagatggcggctggaaatgcattgcacattacggtgcggcaa

SEQ ID NO: 228212 - DNA, 75 bp, synthetic construct
  source 1..75: mol_type = other DNA
aagtatctgcctgggttgatcaaatccggcaaagtgacgatggaagagctggatgacgctgcccgtcatgtactg

SEQ ID NO: 228213 - DNA, 75 bp, synthetic construct
  source 1..75: mol_type = other DNA
atcaccctgaagccgggcgaaactcagaccgtcagcttcccgattgatatcgaggcgctgaagttctggaatcaa

SEQ ID NO: 228214 - DNA, 75 bp, synthetic construct
  source 1..75: mol_type = other DNA
aggtcgtcacggtaacaagggtgtaatttctaagatcaacccgatcgaagatatgccttacgatgaaaacggtac

SEQ ID NO: 228215 - DNA, 75 bp, synthetic construct
  source 1..75: mol_type = other DNA
atacaacatatggagacaatcgacctgaatgtgcgatattttttatccaatatgatgaaaataaacgaattgcac

SEQ ID NO: 228216 - DNA, 75 bp, synthetic construct
  source 1..75: mol_type = other DNA
tccctgggcagaccgaagcgatatattgccagcagaacagcgaatggcagtgcgtggggcattacgattcagaag

SEQ ID NO: 228217 - DNA, 75 bp, synthetic construct
  source 1..75: mol_type = other DNA
ttgcacagcttcctggtggcggtagtgggcgctatcctggtgctgggcgtattccgcctcctgcgaagagaataa

SEQ ID NO: 228218 - DNA, 75 bp, synthetic construct
  source 1..75: mol_type = other DNA
gcggagctgttcctgcgttgggatcgcgacgagttgccgggcgttattgatgcgctggcaaatgagatgcagcgc

SEQ ID NO: 228219 - DNA, 75 bp, synthetic construct
  source 1..75: mol_type = other DNA
caaaaatttttcgccgtactgtggctcggtcgcgacagttttgtgcgtttctcgccgtcagtttcgctgcgccgt

SEQ ID NO: 228220 - DNA, 75 bp, synthetic construct
  source 1..75: mol_type = other DNA
atggagaatcgaagacgatgaatacttgaaaaattgcaaaattattaaaaaaggatttagtaaaaaaattgcttt

SEQ ID NO: 228221 - DNA, 75 bp, synthetic construct
  source 1..75: mol_type = other DNA
gaaggccgcttcgttgaagacctggtaacttgtcgtagtaaaggtgaatccagcttgttcagccgcgaccaggtt

SEQ ID NO: 228222 - DNA, 75 bp, synthetic construct
  source 1..75: mol_type = other DNA
atccggtatcgtttatattggtgcggaagtgaccggtggcgacattctggttggtaaggttacgccgaaaggtga

SEQ ID NO: 228223 - DNA, 75 bp, synthetic construct
  source 1..75: mol_type = other DNA
cgcaggtaaagtggttgctaaagactatattgatgagtctaccggcgagctgatctgtgctgcgaacatggagct

SEQ ID NO: 228224 - DNA, 75 bp, synthetic construct
  source 1..75: mol_type = other DNA
ttaatttacacagcttcctggtggcggtggtcggcgctatcctggttctgggggtatttcgcctcctgcgaagag

SEQ ID NO: 228225 - DNA, 75 bp, synthetic construct
  source 1..75: mol_type = other DNA
cgacggtgcgaaagaagcagaaattaaagagctgctgaaacttggcgacctgccgacttccggtcagatccgcct

SEQ ID NO: 228226 - DNA, 75 bp, synthetic construct
  source 1..75: mol_type = other DNA
gaagctcgacaaactgccgcgcgatcgctggctggagctaggcctgacagacgaagagaaacaaaatcagctgga

SEQ ID NO: 228227 - DNA, 75 bp, synthetic construct
  source 1..75: mol_type = other DNA
ctcgggcgttgacgccaaagagaaaatctcagcgggctacttccgtgctatccgtaactactatcgcttcggttg

SEQ ID NO: 228228 - DNA, 75 bp, synthetic construct
  source 1..75: mol_type = other DNA
aacagtcagggcggcgagagcagaaaccccgcattaagcgcaaaatccgacgctgaaagagtgatgataaaaatg

SEQ ID NO: 228229 - DNA, 75 bp, synthetic construct
  source 1..75: mol_type = other DNA
ggcagcttgcggaacggggagacctgacccccgccgactggagcaatctggaactgtattgcgtcaactactcca

SEQ ID NO: 228230 - DNA, 75 bp, synthetic construct
  source 1..75: mol_type = other DNA
atgaactggtggcctgctttgataatcccgatctgactttctccgcccgcatcttacggtctatgattgatactg

SEQ ID NO: 228231 - DNA, 75 bp, synthetic construct
  source 1..75: mol_type = other DNA
tctccggcaatttgttcttctttcctgcaaggtaaaccgacgtcgctgccgtttgagaaaaccgagtgcggcatg

SEQ ID NO: 228232 - DNA, 75 bp, synthetic construct
  source 1..75: mol_type = other DNA
aattggttgtgaaactgcacaattcccgctgccgcaggtgggcaaagatctgttccgggatctgaaacgtgttgc

SEQ ID NO: 228233 - DNA, 75 bp, synthetic construct
  source 1..75: mol_type = other DNA
tttggtaaaaatattaacaggagagaatgggggaaagctttagaaaagttgaaaaaagatttacgcttacgaggt

SEQ ID NO: 228234 - DNA, 75 bp, synthetic construct
  source 1..75: mol_type = other DNA
ccgccacagaacgattattgcttttgccgttgatggcaataaagtctttatcgctggcgtttaccatggtggaca

SEQ ID NO: 228235 - DNA, 75 bp, synthetic construct
  source 1..75: mol_type = other DNA
ggaagcagatgaagatatagaggaaagggaagaactttataaaaagaatggggcgcaacctgactatttaagtta

SEQ ID NO: 228236 - DNA, 75 bp, synthetic construct
  source 1..75: mol_type = other DNA
taacagggaaaggcgctgaattgcttgaacgtatgcgcgccactttgcctgatatgaaaactccagagtacagtg

SEQ ID NO: 228237 - DNA, 75 bp, synthetic construct
  source 1..75: mol_type = other DNA
catcgggtgacggacaccaccctgaaggtggtggcagccgatccgaatacggtgtccggtatcaagtccgtgggg

SEQ ID NO: 228238 - DNA, 75 bp, synthetic construct
  source 1..75: mol_type = other DNA
gcggaagtgccgttcagcgggtggaaacacttaagcctgatatcgtcatcattgatgtcgatatccccggagtta

SEQ ID NO: 228239 - DNA, 75 bp, synthetic construct
  source 1..75: mol_type = other DNA
cgtgaagagccgctggaaattctgcgtgaagacgattttattgccgagcgcgaagcgtctaaacgccgtcagcag

SEQ ID NO: 228240 - DNA, 75 bp, synthetic construct
  source 1..75: mol_type = other DNA
cgcttcggtctgaaactggtttatggttctacgctggtgagtgtgctttctgcatcaatcgcagcactggtgctg

SEQ ID NO: 228241 - DNA, 75 bp, synthetic construct
  source 1..75: mol_type = other DNA
tccagggcatcctgggctacatcttctatccgattgcatgggtgatgggtgttccttccagtgaagcactgcaag

SEQ ID NO: 228242 - DNA, 75 bp, synthetic construct
  source 1..75: mol_type = other DNA
gctcggatttgccaacgaagggactaacttcgtctttggtagcatgaatgatcaaggcctggcattcttcttcct

SEQ ID NO: 228243 - DNA, 75 bp, synthetic construct
  source 1..75: mol_type = other DNA
tccattaacgcctgaagcgcgggatgcgttcgtcaccgaactgcttaagaaaatgacagttgatgagaaaattgg

SEQ ID NO: 228244 - DNA, 75 bp, synthetic construct
  source 1..75: mol_type = other DNA
atcaccctgaaaccgggcgaaactcagaccgtcagcttcccgatcgatattgaggcgctgaagttctggaatcaa

SEQ ID NO: 228245 - DNA, 75 bp, synthetic construct
  source 1..75: mol_type = other DNA
ccgaccatgaagcgtgacggcaaagtgactgccagcgtgcaggtgacgaacaccggtaagcgcgagggggccacg

SEQ ID NO: 228246 - DNA, 75 bp, synthetic construct
  source 1..75: mol_type = other DNA
aggaacgcattgcacgcgcggcaacggctgaagtagcgattgtggcgatccagaaaatggaagaacgtctggcgg

SEQ ID NO: 228247 - DNA, 75 bp, synthetic construct
  source 1..75: mol_type = other DNA
cgcaaagccgtggaagaccttgccacgcggggattcagcatagtgaacagccagggcggtgagagccgtaacccg

SEQ ID NO: 228248 - DNA, 75 bp, synthetic construct
  source 1..75: mol_type = other DNA
gcgaagaggattttgttgccgagcgtgaggcatcaaaacgtcgtcagcaggaaatggaagccgcagatgctgagc

SEQ ID NO: 228249 - DNA, 75 bp, synthetic construct
  source 1..75: mol_type = other DNA
acggcgcgagcagcgcgcagaagtgttgaaagcgcgtatggaacagcatcagcggcatcaggaaggcgtactggc

SEQ ID NO: 228250 - DNA, 75 bp, synthetic construct
  source 1..75: mol_type = other DNA
ttgaaagcgcgtatggagcagcatcaacggcatcaggaaggtgtgctggcctactcaattgttaatttactttcg

SEQ ID NO: 228251 - DNA, 75 bp, synthetic construct
  source 1..75: mol_type = other DNA
tcgctggttgcggcggaaattgaccctaacgtcgaaatctggatgttgtttactgacatcatcttgatttatgcg

SEQ ID NO: 228252 - DNA, 75 bp, synthetic construct
  source 1..75: mol_type = other DNA
gccggtaaaaaccagcatggtcagcctgtgcgaacagttatcgaaactggggatctggacacgtctgcactacgt

SEQ ID NO: 228253 - DNA, 75 bp, synthetic construct
  source 1..75: mol_type = other DNA
gccagatattggctatatgcctggtcatctgacctggtactttggtgaagaactgaaaaaaatgggaatgaatat

SEQ ID NO: 228254 - DNA, 75 bp, synthetic construct
  source 1..75: mol_type = other DNA
gccagagataggctatatgccgggtcatctcacctggtacttcggcgaagagctgaagaaaatgggcatgaacat

SEQ ID NO: 228255 - DNA, 75 bp, synthetic construct
  source 1..75: mol_type = other DNA
ccggcgacagtccttttgcagcgaatgcgctgggtaaactcgcagcacaggaaatgctggctgcataccagggtt

SEQ ID NO: 228256 - DNA, 75 bp, synthetic construct
  source 1..75: mol_type = other DNA
gctttcacggcctatcctgtacctgtcacgctttatcctggagagacgtagtgattactacacgctcttgcgtag

SEQ ID NO: 228257 - DNA, 75 bp, synthetic construct
  source 1..75: mol_type = other DNA
caagggttgctgataaacatcctcccgatgctggaagcgaaggactcatcgcgcatagagaatatcgtaactacc

SEQ ID NO: 228258 - DNA, 75 bp, synthetic construct
  source 1..75: mol_type = other DNA
actgttctcaacgggcaaccatccgattgaaacgttgctgccgctgtatcacctgtatgcagcaggtttcgagtt

SEQ ID NO: 228259 - DNA, 75 bp, synthetic construct
  source 1..75: mol_type = other DNA
agcgcagacggcgcagcgttcaggaaaaaatcgccattgttcagcagagctttgagcccggaatgaccgtgtcgc

SEQ ID NO: 228260 - DNA, 75 bp, synthetic construct
  source 1..75: mol_type = other DNA
aataccaggaaggaagtctcacggctgtggctgcaggagaacaggttgttccggcctctgagcttgctgccgcca

SEQ ID NO: 228261 - DNA, 75 bp, synthetic construct
  source 1..75: mol_type = other DNA
cgctatgtcgcgtgcacaacggcatattgacgggttactcaaacctgttggtagcctgggaaagctggaggcgct

SEQ ID NO: 228262 - DNA, 75 bp, synthetic construct
  source 1..75: mol_type = other DNA
gttgacccgaccggtgcgggagactgctttggtggcgcgtggattgcctgccgccagctagggtttgacgcccat

SEQ ID NO: 228263 - DNA, 75 bp, synthetic construct
  source 1..75: mol_type = other DNA
cgacattagatctgttcgcgcacgagcgtcgaccgggacgaccgaaaactaatccgctttcgcgcgatgaacagc

SEQ ID NO: 228264 - DNA, 75 bp, synthetic construct
  source 1..75: mol_type = other DNA
cttatcatgcctacaagtctgtgccgaaccgtaggccggataaggcgttcacgccgcatccggcagttggcgcac

SEQ ID NO: 228265 - DNA, 75 bp, synthetic construct
  source 1..75: mol_type = other DNA
gatttagatccattggttaaaatggctattgcgcactatcagtttgagtgcattcccccgttcccggatgggaac

SEQ ID NO: 228266 - DNA, 75 bp, synthetic construct
  source 1..75: mol_type = other DNA
gaaaatcaggactatattttggtttccctaaatcgggaaaccaaaggtcgaggaggcgatcgccgtagcaaagac

SEQ ID NO: 228267 - DNA, 75 bp, synthetic construct
  source 1..75: mol_type = other DNA
tggccgggctcctgaagaagtggttgggattggcgcaaacctgccgacagataaactggctaataaaattgatgt

SEQ ID NO: 228268 - DNA, 75 bp, synthetic construct
  source 1..75: mol_type = other DNA
ctcaaagcccgtattttctggttaatcggaccacagtgtatcggttggtttgccgggatgctggttgtggggcaa

SEQ ID NO: 228269 - DNA, 75 bp, synthetic construct
  source 1..75: mol_type = other DNA
acaaggtgcaagtaagatcagcggtcctttcagcctgaatatcaatcaggaaagcggattactgattgaaggttt

SEQ ID NO: 228270 - DNA, 75 bp, synthetic construct
  source 1..75: mol_type = other DNA
catggtgacgaagaacaaggaagcactactgcgggaggcggcacagcttgaccagtcaagtttcgttgtccagcg

SEQ ID NO: 228271 - DNA, 75 bp, synthetic construct
  source 1..75: mol_type = other DNA
aagaaactgcgatggttgaacgtaacgaaaaaggccgccagatccgccgatacttcatcgagtgcgaaaagaaac

SEQ ID NO: 228272 - DNA, 75 bp, synthetic construct
  source 1..75: mol_type = other DNA
cgtttgaccctcgtgtctacggttgccgtattaaccttgagcatattcgcggcctctttcccgatggcgatttca

SEQ ID NO: 228273 - DNA, 75 bp, synthetic construct
  source 1..75: mol_type = other DNA
atacatccaaacgtattcgggagatgatctggcagcaaatctcccaactggcaggttgcggaaatgtggtcatgg

SEQ ID NO: 228274 - DNA, 75 bp, synthetic construct
  source 1..75: mol_type = other DNA
tgaatcgaataacgaggttattcgattaacgccaacagatattctttgccatcgcaattatttttatcaaaaatg

SEQ ID NO: 228275 - DNA, 75 bp, synthetic construct
  source 1..75: mol_type = other DNA
agtatctcaacatcgtcaagaactcctctcttgccgccgctattggctatcccgatatggtttcgctgtttgctg

SEQ ID NO: 228276 - DNA, 75 bp, synthetic construct
  source 1..75: mol_type = other DNA
ttgaaaaggatattcgctctacactgctagatcctgatgctggtcggttcacgaatatgcgagctattcagttag

SEQ ID NO: 228277 - DNA, 75 bp, synthetic construct
  source 1..75: mol_type = other DNA
ataacaccgaaagctatcgccagccgcgccgcgagaagtcgaaaggcggaacgggcgacgagctgctgaccaact

SEQ ID NO: 228278 - DNA, 75 bp, synthetic construct
  source 1..75: mol_type = other DNA
cgtttctgggcgttggtgaatctagtgacgcttaccatatttcggccccgcatccgcagggcgaaggtgcgatcc

SEQ ID NO: 228279 - DNA, 75 bp, synthetic construct
  source 1..75: mol_type = other DNA
tcgccggatattccgcataaatcagaagttcagggcgtgatgctctatttgcgtacggctaatgaagtccagcaa

SEQ ID NO: 228280 - DNA, 75 bp, synthetic construct
  source 1..75: mol_type = other DNA
atggatccggcgtgggatgcggctattcagcgtgccggtttgttgcgggtacaggacacccacgagctgttttcg

SEQ ID NO: 228281 - DNA, 75 bp, synthetic construct
  source 1..75: mol_type = other DNA
gggcgcggcgggcattaccgaagcagcaatcagtatgttgatcttacagcgtgatttaccgctgcccgcccaaga

SEQ ID NO: 228282 - DNA, 75 bp, synthetic construct
  source 1..75: mol_type = other DNA
tggcgaaggcgcggggctaatgctgctgacccgcgaaccgcagcccatcgcattgatgggcgttggtgaatcgag

SEQ ID NO: 228283 - DNA, 75 bp, synthetic construct
  source 1..75: mol_type = other DNA
tgcgcagcttacgccagatgacgtcggctatatcaacctgcacggtaccgccacacaactcaacgaccagattga

SEQ ID NO: 228284 - DNA, 75 bp, synthetic construct
  source 1..75: mol_type = other DNA
actcctcgcaagaggcacgacgtttattcagcgaagccgggctgccgacctaccgtaccccggaaggaaccatca

SEQ ID NO: 228285 - DNA, 75 bp, synthetic construct
  source 1..75: mol_type = other DNA
aggctgtaaaacctgcattattctttctgccccggcatcacaacatgaagagttacgtacctgcgcccagcgcca

SEQ ID NO: 228286 - DNA, 75 bp, synthetic construct
  source 1..75: mol_type = other DNA
atgatttatatttccgccgtcggcatgatcaacgccctgggaaataaccttgatgaaatcgcagccaacctgact

SEQ ID NO: 228287 - DNA, 75 bp, synthetic construct
  source 1..75: mol_type = other DNA
agcacgatccggttttcgggccgttgatcatgctgggtgaaggcggtgtggagtggcgtcctgaagatcaagccg

SEQ ID NO: 228288 - DNA, 75 bp, synthetic construct
  source 1..75: mol_type = other DNA
tgcttgttccgcccgattttgccagaagatgagccacaacttcagcaattcatttcgcgagtcaccaaagaagat

SEQ ID NO: 228289 - DNA, 75 bp, synthetic construct
  source 1..75: mol_type = other DNA
aatcgtggcatggtggcgctggcccgcaagctcgggtttagtgtcgatatccagctcgaagaggggatcgttggg

SEQ ID NO: 228290 - DNA, 75 bp, synthetic construct
  source 1..75: mol_type = other DNA
atgatttatatttccgccgttggcatgatcaacgccctgggaaataatcttgatgagatcgcagccaacctgact

SEQ ID NO: 228291 - DNA, 75 bp, synthetic construct
  source 1..75: mol_type = other DNA
aaaggttttctgcctttagaaaatgtgctggaagtcattgccgattatgacgtcagtgtctgcatcaactgggcg

SEQ ID NO: 228292 - DNA, 75 bp, synthetic construct
  source 1..75: mol_type = other DNA
acaacggttttggcctcgcctccagcgatgaagagcagcgtcaggcctgcgtggcgtactatcgccacttgttga

SEQ ID NO: 228293 - DNA, 75 bp, synthetic construct
  source 1..75: mol_type = other DNA
gctgcaccgttagcaacgaatcctaatgttatgcaagcgacggacgcttttgcccgctcattgaaagaaatcgcc

SEQ ID NO: 228294 - DNA, 75 bp, synthetic construct
  source 1..75: mol_type = other DNA
tcatagtgtcttataatcataaaaatttcatagattgttgtataaagtccgttattgcacaattatctgcttcat

SEQ ID NO: 228295 - DNA, 75 bp, synthetic construct
  source 1..75: mol_type = other DNA
atcgccgaacgtcacgcgatgctgaataatgagttgcgtaaaatttcccgactggaaatggtgctggcgattgtc

SEQ ID NO: 228296 - DNA, 75 bp, synthetic construct
  source 1..75: mol_type = other DNA
tttatggcacgaaggccaaagtggcgaaagctgctggcgttgatccatctgctgtttctcaatggggagaactgg

SEQ ID NO: 228297 - DNA, 75 bp, synthetic construct
  source 1..75: mol_type = other DNA
gaggcatccggcggggaaattcagtacgaccccaaagtttatgacgaatatcgtaaggcaaagcgggcggggcgg

SEQ ID NO: 228298 - DNA, 75 bp, synthetic construct
  source 1..75: mol_type = other DNA
aaagactcaagtaaacttatcggaaataaggaccacgcattacgggggctatcatcgccgatggtcgggattcgg

SEQ ID NO: 228299 - DNA, 75 bp, synthetic construct
  source 1..75: mol_type = other DNA
tttcacccgctgggcgatcaatggttactccgtcatacgccagagagctggaaatttgtcgtcaccgcagtgatg

SEQ ID NO: 228300 - DNA, 75 bp, synthetic construct
  source 1..75: mol_type = other DNA
acacgcgccgtttgcaccattctgcgcagaaagcctgatgaccacagatcatgttcgcgagttatttaatgtagc

SEQ ID NO: 228301 - DNA, 75 bp, synthetic construct
  source 1..75: mol_type = other DNA
tttacggtacgaaagctaaagtagcgaaagctgctggcgttgacccatctgctgtttctcaatggcaagagctgg

SEQ ID NO: 228302 - DNA, 75 bp, synthetic construct
  source 1..75: mol_type = other DNA
ataaacataggaatgcagtgcaggatttaatttctttaggtttttgttctcgacaagatgatggtgtggtgataa

SEQ ID NO: 228303 - DNA, 75 bp, synthetic construct
  source 1..75: mol_type = other DNA
aacgagagaataagccccagttggcgtatgtgagtcaggtcagtgagagcaatggtccgtatgtccggttcatgc

SEQ ID NO: 228304 - DNA, 75 bp, synthetic construct
  source 1..75: mol_type = other DNA
ggtttacttatagggctggtggcgttgcgtatttggtagggaaactatcaaaatgcgtagaatattttggacgtc

SEQ ID NO: 228305 - DNA, 75 bp, synthetic construct
  source 1..75: mol_type = other DNA
atgctaaatagctggcctttagccaaagacttgcaggtactggtggaaatcgtccatagcgggagttttagtgct

SEQ ID NO: 228306 - DNA, 75 bp, synthetic construct
  source 1..75: mol_type = other DNA
acgacgctacttaatcgctctgcccgcggtgtggcgctaaccgaaagcggtcaacgttgctatgaacatgcgtta

SEQ ID NO: 228307 - DNA, 75 bp, synthetic construct
  source 1..75: mol_type = other DNA
acgtggcgggccttaaacaggcaattaaaacgccatcggaagagtacgcgaagattggtattgagaaagacggta

SEQ ID NO: 228308 - DNA, 75 bp, synthetic construct
  source 1..75: mol_type = other DNA
tgcgtcgatccgaactgtgtctctgtgtgcccggtctctgcgctgaaaaaagatccgaaaaccggcattgtccat

SEQ ID NO: 228309 - DNA, 75 bp, synthetic construct
  source 1..75: mol_type = other DNA
cacaacagaatttaagagcgtatctttttacggaaatggcttagatctaattttagacatagatattcttttcac

SEQ ID NO: 228310 - DNA, 75 bp, synthetic construct
  source 1..75: mol_type = other DNA
ccatttcgatttcgccctgtcgatgatcaaactgcgtggctttggcggcaaaactgagttctgggatcacaacct

SEQ ID NO: 228311 - DNA, 75 bp, synthetic construct
  source 1..75: mol_type = other DNA
gtgaaagcggtgaactggcttttactgctgagccggctgacgtggccattatcatcggcagcgccattaaagggg

SEQ ID NO: 228312 - DNA, 75 bp, synthetic construct
  source 1..75: mol_type = other DNA
aactgactgatacccttatccagcagaacggctaccagggcttcagctatgctgatctcgctgacggtctgggaa

SEQ ID NO: 228313 - DNA, 75 bp, synthetic construct
  source 1..75: mol_type = other DNA
atgtctacttatgacaaaatacttcgcatggcggatacattgatccagcaacgaggatttttggggttcagttac

SEQ ID NO: 228314 - DNA, 75 bp, synthetic construct
  source 1..75: mol_type = other DNA
tatccgcacaacccacatacagaagacttaagccagtttgcatacactgtaagaagcaacgattattctctggtt

SEQ ID NO: 228315 - DNA, 75 bp, synthetic construct
  source 1..75: mol_type = other DNA
aggccgacgatgacaaggcaacctggtatttcaaacgcagctctgcgatttcccgaaccggttattccgagtact

SEQ ID NO: 228316 - DNA, 75 bp, synthetic construct
  source 1..75: mol_type = other DNA
atgctgatgcctgcgcgctgttggcgcagatcaaaatcaccaatccggtcagtctggactatccacaagcaaaag

SEQ ID NO: 228317 - DNA, 75 bp, synthetic construct
  source 1..75: mol_type = other DNA
ctgaagttctgcgaaaaactgatggaaaaggcggtgggcttcacctcccgttttgattgcgctattcatgtggcg

SEQ ID NO: 228318 - DNA, 75 bp, synthetic construct
  source 1..75: mol_type = other DNA
ttatcgaaactggggatctggacgcgtcttcactacgtttatccttacccgcatgtggatgacgttatcccgctg

SEQ ID NO: 228319 - DNA, 75 bp, synthetic construct
  source 1..75: mol_type = other DNA
cgttaagccgggcgatatcctgcgtgtgaaagtcgagcatgccgacgagtacgatttgtggggtagtcgggttta

SEQ ID NO: 228320 - DNA, 75 bp, synthetic construct
  source 1..75: mol_type = other DNA
atgagcaaagtaactccccagccgaaaatcggctttgtttcccttggctgtccgaaaaaccttgtcgattcagag

SEQ ID NO: 228321 - DNA, 75 bp, synthetic construct
  source 1..75: mol_type = other DNA
gtccggcagcaactcgcgtgatgttattaggctccggtgaactgggtaaagaagtggcaatcgagtgtcagcgtc

SEQ ID NO: 228322 - DNA, 75 bp, synthetic construct
  source 1..75: mol_type = other DNA
accgctgttcgaccgtgaagtcgaaggttttggcgaagtgttccgtatgctgtcgtttgaagagattggcaccgc

SEQ ID NO: 228323 - DNA, 75 bp, synthetic construct
  source 1..75: mol_type = other DNA
ctcaggtatctgcgtggatcgccagcgacgatgtgcaagtggtgctgattacaggtggtactggcctgacagaag

SEQ ID NO: 228324 - DNA, 75 bp, synthetic construct
  source 1..75: mol_type = other DNA
caggcatgggagtacgctcagcaaggcggtcgcgccggagcgggccgcgtaattgttgaaggcgtcgttaagttt

SEQ ID NO: 228325 - DNA, 75 bp, synthetic construct
  source 1..75: mol_type = other DNA
aatttctcaggatctctcagagtttgccctgcatgtacgtgccttcctcggacttccggttggcgggatccgtca

SEQ ID NO: 228326 - DNA, 75 bp, synthetic construct
  source 1..75: mol_type = other DNA
ccgtcgcctggcggcagaagaacttcagcttcccacctcaacgtatcgttttgccgatagcgaaagtcttttccg

SEQ ID NO: 228327 - DNA, 75 bp, synthetic construct
  source 1..75: mol_type = other DNA
agtggcgaaagtgatgctggatgacgtgaagtcgttacatatttttgtggccgacagcacgccgctctatgcccg

SEQ ID NO: 228328 - DNA, 75 bp, synthetic construct
  source 1..75: mol_type = other DNA
cattatatgatcaggaagcattgactgaacttatcctgcgtaacgctccccccccctcagccgtgacccctttgc

SEQ ID NO: 228329 - DNA, 75 bp, synthetic construct
  source 1..75: mol_type = other DNA
tcctgagacaggtgtttttgtcagaaatgctcgaaattcagaaatatgtgcattatatgatcaggaagcattgac

SEQ ID NO: 228330 - DNA, 75 bp, synthetic construct
  source 1..75: mol_type = other DNA
tagcaattctgtgagtcagcagatttctgccattcagaatgatcagaaacttaaacagaaagtggtgaatatgct

SEQ ID NO: 228331 - DNA, 75 bp, synthetic construct
  source 1..75: mol_type = other DNA
gacgctaaaaaaataatcggccgggctgtgggaatgaaagtaaccggctcatttaaaccgtctggtctgtttcct

SEQ ID NO: 228332 - DNA, 75 bp, synthetic construct
  source 1..75: mol_type = other DNA
attgtgctgtaaggatgattactggcggttacaaatatctgcagcgtatatcagtcgcaggtactccgcgttatg

SEQ ID NO: 228333 - DNA, 75 bp, synthetic construct
  source 1..75: mol_type = other DNA
atgcagcttaaacgtgtggcagaagctaaactgccaaccccctggggcgatttcctgatggtgggatttgaagaa

SEQ ID NO: 228334 - DNA, 75 bp, synthetic construct
  source 1..75: mol_type = other DNA
tcaacggcactatatccaacgaaaccgctcttctcgttaatgcccgtgatttacactctttcctcgatgtaggta

SEQ ID NO: 228335 - DNA, 75 bp, synthetic construct
  source 1..75: mol_type = other DNA
ttgccgaagagatgcagatcctgcgtgagattttcaactctggctggcagcacaactggggatttgtgccgttta

SEQ ID NO: 228336 - DNA, 75 bp, synthetic construct
  source 1..75: mol_type = other DNA
ctccagaaatgattatcagaaaagagaaatgtcattttaatatagcaaaacaatgtttttgcgcattacccatat

SEQ ID NO: 228337 - DNA, 75 bp, synthetic construct
  source 1..75: mol_type = other DNA
agctgtatgacattgcgtttgagaccatctacatggtgacgaagaacagagatgcgttactgagggaagtaacac

SEQ ID NO: 228338 - DNA, 75 bp, synthetic construct
  source 1..75: mol_type = other DNA
cattccgaatgtctgaccggtgacgccctgttcagcttgcgctgcgattgtggcttccagctcgaagcggcactg

SEQ ID NO: 228339 - DNA, 75 bp, synthetic construct
  source 1..75: mol_type = other DNA
ctttctcgtgagatagcagataatatcaaaaactttcagggcaaaacgattcgtagttatgatgaggcgatggct

SEQ ID NO: 228340 - DNA, 75 bp, synthetic construct
  source 1..75: mol_type = other DNA
tgtgatcacatttgaccaagactcatctgttgatagtgatctaattgaggtactgtattcagaatatacaaaaat

SEQ ID NO: 228341 - DNA, 75 bp, synthetic construct
  source 1..75: mol_type = other DNA
ccccgtgtatctcgatttcgatttatgttaaaggggatcaaagatggacttttgaaaaaacattcatttataaaa

SEQ ID NO: 228342 - DNA, 75 bp, synthetic construct
  source 1..75: mol_type = other DNA
tctgcatttggtgttatggcagtcgatgaaaacgataaaattatcgaatttgttgagaaaccggctaacccgcca

SEQ ID NO: 228343 - DNA, 75 bp, synthetic construct
  source 1..75: mol_type = other DNA
aggccgacgatgacaaagcaacctggtatttcaaacgcagctctgcgatttcccgaaccggttattccgaatact

SEQ ID NO: 228344 - DNA, 75 bp, synthetic construct
  source 1..75: mol_type = other DNA
agtaaagaaggtgaagtaacgctggcgcatattctggtaaatactcaagcgggtaaaccggattatccaaaggcg

SEQ ID NO: 228345 - DNA, 75 bp, synthetic construct
  source 1..75: mol_type = other DNA
gatcatgtgattttatctatcgaggcattcattgaataccttgaaaggctcggtttcaaggtggttcgcgaatga

SEQ ID NO: 228346 - DNA, 75 bp, synthetic construct
  source 1..75: mol_type = other DNA
tatgccagtaccgattgaagaagcctccgcatttggcgttatggcggttgatgagaacgataaaattatcgaatt

SEQ ID NO: 228347 - DNA, 75 bp, synthetic construct
  source 1..75: mol_type = other DNA
atgcccatcatcgaagctgcctgtgcgatatataacaactgtcacgaacggtgcaatagtgatccacacccaacg

SEQ ID NO: 228348 - DNA, 75 bp, synthetic construct
  source 1..75: mol_type = other DNA
cctgccgtttgctgtgcgacgaatccacactacaacagtggcgctatccgccttccggattcggcatcacctacc

SEQ ID NO: 228349 - DNA, 75 bp, synthetic construct
  source 1..75: mol_type = other DNA
cgcatgctgatcgaccacgtcgagaaaggcgcgcgttgcaccgtggcctgtatgcctgtgcctattgaagaggcc

SEQ ID NO: 228350 - DNA, 75 bp, synthetic construct
  source 1..75: mol_type = other DNA
gtgtaatgttggcgcgccagctgccattaaaatctgttgccctgatcctggccggtggccgcggtacccgcttaa

SEQ ID NO: 228351 - DNA, 75 bp, synthetic construct
  source 1..75: mol_type = other DNA
gaagaggatgcacgtcgtttctatcgttcagaagaaggcattgtgctggttacgcgcgaaatgctacggaagtta

SEQ ID NO: 228352 - DNA, 75 bp, synthetic construct
  source 1..75: mol_type = other DNA
ggtccaggatatcagtggcgtgctcgccgtcttcgcagagcgtcgtcaggaccgcaacggcccgtatgtcgtatt

SEQ ID NO: 228353 - DNA, 75 bp, synthetic construct
  source 1..75: mol_type = other DNA
gtgagcagtgattttcagcttatcgccggaacggtgcgcgatttgcgccagttggttgccgaaggcaaatttcgt

SEQ ID NO: 228354 - DNA, 75 bp, synthetic construct
  source 1..75: mol_type = other DNA
cactggttaatttaattggcggtgataataaaccactcggtttccagggcggtatcgcggtcctttccgtggtgg

SEQ ID NO: 228355 - DNA, 75 bp, synthetic construct
  source 1..75: mol_type = other DNA
ttctattggcgaccagcagatggtggaaattgccaaagtgctgagctttgagtcgaaagtcatcattatggatga

SEQ ID NO: 228356 - DNA, 75 bp, synthetic construct
  source 1..75: mol_type = other DNA
agtcgaaagtcatcattatggatgaaccgactgatgcgctgaccgataccgaaaccgaatccttgttccgcgtca

SEQ ID NO: 228357 - DNA, 75 bp, synthetic construct
  source 1..75: mol_type = other DNA
aagcaccacctacaacgacgtctatgcgggatgatttacgtgatatctggcaaaacgaccagtggcgtattgtcg

SEQ ID NO: 228358 - DNA, 75 bp, synthetic construct
  source 1..75: mol_type = other DNA
aaagtataggaatatctagcatgccatatttcattagagtattcaaatatttttttggaataacaccaaaacaat

SEQ ID NO: 228359 - DNA, 75 bp, synthetic construct
  source 1..75: mol_type = other DNA
agaaatatatccactctttatggggggctgtgatattcagagagaaaaaataattacggaaaactccattgcacc

SEQ ID NO: 228360 - DNA, 75 bp, synthetic construct
  source 1..75: mol_type = other DNA
gcattcacatagagagtaaaaaaaaacttgatatggaattgcagtttttaatagatgagatgcaagctgggaagg

SEQ ID NO: 228361 - DNA, 75 bp, synthetic construct
  source 1..75: mol_type = other DNA
ttcggcggcgctcttatcggctggatgctggcttatggcggatatgatgcggcagaaaaagcgcagaacagcgcc

SEQ ID NO: 228362 - DNA, 75 bp, synthetic construct
  source 1..75: mol_type = other DNA
caaaacgaccagtggcggattgtcggtttactaaccattttcaatatcctggcggtgtgcgtacgcggtggggcg

SEQ ID NO: 228363 - DNA, 75 bp, synthetic construct
  source 1..75: mol_type = other DNA
gtttgtgctcaaactggggttggccttcggcggcgctcttatcggctggatgctggcttatggcggatatgatgc

SEQ ID NO: 228364 - DNA, 75 bp, synthetic construct
  source 1..75: mol_type = other DNA
caatgacgatatatcgccaacatccggcctcccgcatttttcgctactgcaccggcagataccagtggcacggca

SEQ ID NO: 228365 - DNA, 75 bp, synthetic construct
  source 1..75: mol_type = other DNA
caaaataaaaagcaaggtgaaccacataagaacttaacctgggtaacctcttattctcactggttcgatgaagaa

SEQ ID NO: 228366 - DNA, 75 bp, synthetic construct
  source 1..75: mol_type = other DNA
ttaggtctctacaaactgacggatctacagcaaaaagataaccttgccgccgccaatccgcaggtcgttaaagag

SEQ ID NO: 228367 - DNA, 75 bp, synthetic construct
  source 1..75: mol_type = other DNA
ttcagccaggaaattatgacaagttaatttctgctatggatttctaccctactgctctggatgctgccgatatca

SEQ ID NO: 228368 - DNA, 75 bp, synthetic construct
  source 1..75: mol_type = other DNA
aatttaaactactgcacttttttatgacccatcccgaacgcgtgtacagtcgcgaacaactgttaaatcatgtct

SEQ ID NO: 228369 - DNA, 75 bp, synthetic construct
  source 1..75: mol_type = other DNA
cgcgagcagctgttaaaccacgtctggggaaccaacgtgtatgtggaagaccgcacggtcgatgtccacattcgt

SEQ ID NO: 228370 - DNA, 75 bp, synthetic construct
  source 1..75: mol_type = other DNA
aatttaaactgctgcacttttttatgacgcatcctgagcgcgtgtacagccgcgagcagctgttaaaccacgtct

SEQ ID NO: 228371 - DNA, 75 bp, synthetic construct
  source 1..75: mol_type = other DNA
gaatacagtaccgaaggaaagccgaatattatcgtactgaccatggatgatcttgggtatggacaactaccgttt

SEQ ID NO: 228372 - DNA, 75 bp, synthetic construct
  source 1..75: mol_type = other DNA
ctggcatggcacctttttccgtggtcaacacgttttcttgacgtttttatcgaaaaagcagaacaccctttctac

SEQ ID NO: 228373 - DNA, 75 bp, synthetic construct
  source 1..75: mol_type = other DNA
accggcaaatataaatggtccggcagtatctgccattatgctggccgggaagttcaggacatacgcggcgttctg

SEQ ID NO: 228374 - DNA, 75 bp, synthetic construct
  source 1..75: mol_type = other DNA
cttcacgcgcagcgattatgacaggacgtgcgcctgctcgttttggcgtttactcaaatactgatgctcaggatg

SEQ ID NO: 228375 - DNA, 75 bp, synthetic construct
  source 1..75: mol_type = other DNA
ttataagcacgtcagtatctttaatactggcatctggtatggccgcatttgccgctcatgcagcagatgatgtaa

SEQ ID NO: 228376 - DNA, 75 bp, synthetic construct
  source 1..75: mol_type = other DNA
aagaaacaaggcgagccacataaaaatctgacctggataacatcttattctcactggtttgatgaggaaaatatt

SEQ ID NO: 228377 - DNA, 75 bp, synthetic construct
  source 1..75: mol_type = other DNA
gatgtagtccgtgatggtgatgaatttttcgaaacacagagccgcaatgtaaccgactggatgccgctaccagaa

SEQ ID NO: 228378 - DNA, 75 bp, synthetic construct
  source 1..75: mol_type = other DNA
tggaggtcgctccaggcaatgctattgagaagggggccggccgaaaagggtatttccccagtacgacgtttacgc

SEQ ID NO: 228379 - DNA, 75 bp, synthetic construct
  source 1..75: mol_type = other DNA
tacacgatatgttgcaggacgcgaaggcgcgggaactggcgattggtcatggcgtattacgtggcgcattaacct

SEQ ID NO: 228380 - DNA, 75 bp, synthetic construct
  source 1..75: mol_type = other DNA
tcaccctgcccggacgacgaccgggacgccccggacgtcgcatctccgtcattgccggccttgagtggaaagaca

SEQ ID NO: 228381 - DNA, 75 bp, synthetic construct
  source 1..75: mol_type = other DNA
atgagcacatcagagattatccctgtcaccctgcccggacgtcgtccgggacgccccggacgtcgtgtctccgtc

SEQ ID NO: 228382 - DNA, 75 bp, synthetic construct
  source 1..75: mol_type = other DNA
atacggctcgtcaccctcggcgtgctgggcatcgcccttgccggcagcgccctgtggggctacagccgctggcag

SEQ ID NO: 228383 - DNA, 75 bp, synthetic construct
  source 1..75: mol_type = other DNA
aatgcggctataacagtacttcatatttcatatgtgcatttaaagattattatggtgtcacaccatctcattatt

SEQ ID NO: 228384 - DNA, 75 bp, synthetic construct
  source 1..75: mol_type = other DNA
aacagatgcagaacgagctgaaagctttacagcgtaagcttggcattactttcgttttcgtcacccacgatcagg

SEQ ID NO: 228385 - DNA, 75 bp, synthetic construct
  source 1..75: mol_type = other DNA
ttcatccacagatcaacttttgcctcaccgctttcgccgccaccaccatttccggattgcttttgcaacttccca

SEQ ID NO: 228386 - DNA, 75 bp, synthetic construct
  source 1..75: mol_type = other DNA
ataaagcccctgaaaacgggcataatacgtgatgtgcttgaggacgctaaatcacgggaattaccgattggtcat

SEQ ID NO: 228387 - DNA, 75 bp, synthetic construct
  source 1..75: mol_type = other DNA
aagcagcaaaacatccagcggcaggatacgggaggtggtgagagtgataacagacagcgtggcacagaaacttga

SEQ ID NO: 228388 - DNA, 75 bp, synthetic construct
  source 1..75: mol_type = other DNA
tctgttgttgctggatgagtcgctctcagcgctggattacaaactgcgcaagcaaatgcagaacgagctgaaagc

SEQ ID NO: 228389 - DNA, 75 bp, synthetic construct
  source 1..75: mol_type = other DNA
cgacaccttcaataccgagcaggtcgaagtgattaaagggccgtccggcaccgactacgggcgcagcgcgccgac

SEQ ID NO: 228390 - DNA, 75 bp, synthetic construct
  source 1..75: mol_type = other DNA
ggtatggaccgcctggtgcgtttcgcaaccctgatggcagacagtaaagcaaccgttccgcagcacctggcagga

SEQ ID NO: 228391 - DNA, 75 bp, synthetic construct
  source 1..75: mol_type = other DNA
gtgtttacaccccagacgaattacaggaaacggcaccgcgcgttgagcgagacattactccgcaaacgactactg

SEQ ID NO: 228392 - DNA, 75 bp, synthetic construct
  source 1..75: mol_type = other DNA
caccaggctggactctaaaagacgaagaaggctgcggtgttcgcgtatgggcaaccatgaagggcgaggatcaac

SEQ ID NO: 228393 - DNA, 75 bp, synthetic construct
  source 1..75: mol_type = other DNA
acactgagcttggtgtactggaacagacggcccaggcttacattgaatcgcatggtgccattgaacgtcatcttg

SEQ ID NO: 228394 - DNA, 75 bp, synthetic construct
  source 1..75: mol_type = other DNA
ggcgcgagggaaagctgctattaccttcttcagagagcccccagctacttcctgtgactctcgatgcagctgccg

SEQ ID NO: 228395 - DNA, 75 bp, synthetic construct
  source 1..75: mol_type = other DNA
gaggtaacgttccggcacgggacgctccgcttcaatggcaatgtcagcgaaaaactcctgactctgctgatacag

SEQ ID NO: 228396 - DNA, 75 bp, synthetic construct
  source 1..75: mol_type = other DNA
atatctctgttggcgcgggcgcacgctatatcggcagtatgcataaaggttcagacggcgcggtgggaacgccag

SEQ ID NO: 228397 - DNA, 75 bp, synthetic construct
  source 1..75: mol_type = other DNA
cagcaacttcgctcttgcacagtctggcagcggtaacagcgccaaccgcaccgactttaaaccgcaaaaagcgaa

SEQ ID NO: 228398 - DNA, 75 bp, synthetic construct
  source 1..75: mol_type = other DNA
gccccatctgcgggaacggcggccctgaatcattccggaaaagttgatactcataacttttacggcacggattcc

SEQ ID NO: 228399 - DNA, 75 bp, synthetic construct
  source 1..75: mol_type = other DNA
tcaaatgcgaacaaggttaacctgaaatttgaagaggcgaagcctgttctcgaagaccagctggccaaatcaatc

SEQ ID NO: 228400 - DNA, 75 bp, synthetic construct
  source 1..75: mol_type = other DNA
ggcgaatgtgctgaaggccgataagatggatctgcgggagtctcagggatggctgaaccgtggttatgaaggcgc

SEQ ID NO: 228401 - DNA, 75 bp, synthetic construct
  source 1..75: mol_type = other DNA
ttaccctggtcagttccactctggccctttcagggtgtggtgcgatgagcacagcaatcaagaagcgtaaccttg

SEQ ID NO: 228402 - DNA, 75 bp, synthetic construct
  source 1..75: mol_type = other DNA
accgtttccaatatcatcggcaccaccgacgaaaacggtcagtacaccggactaaaagccctgctggcggcggag

SEQ ID NO: 228403 - DNA, 75 bp, synthetic construct
  source 1..75: mol_type = other DNA
cagtacgaaatgccggttacaacgaatacggcggtataaactgtgaggtgcagtttgaaggcgcggtgaatgaaa

SEQ ID NO: 228404 - DNA, 75 bp, synthetic construct
  source 1..75: mol_type = other DNA
gaccaggcaaaacccgtgaccgttgttgtgcgtgtgccgcagggggaaacggaagacgaaaccacgactaatatc

SEQ ID NO: 228405 - DNA, 75 bp, synthetic construct
  source 1..75: mol_type = other DNA
tttccgcttctggggtaaccgtacctgctctgatgacccgcttttcctgtttgagaactacacccgcaccgcgca

SEQ ID NO: 228406 - DNA, 75 bp, synthetic construct
  source 1..75: mol_type = other DNA
gtgaaagcctaccgccagaatttcagccagcgtgagctgatggtcatctggccggatttcctcgcatgggatacg

SEQ ID NO: 228407 - DNA, 75 bp, synthetic construct
  source 1..75: mol_type = other DNA
atcgccgaccagtcaaaaccggtcaccgttgtcgtgcgtgtggaagacggcaccggcgacgacgaggaaacgaaa

SEQ ID NO: 228408 - DNA, 75 bp, synthetic construct
  source 1..75: mol_type = other DNA
acggtgttaccggcatcagcgcgtccgtattctgggatttgcaggagtccggtaccgatgctgacctgcttaacg

SEQ ID NO: 228409 - DNA, 75 bp, synthetic construct
  source 1..75: mol_type = other DNA
ttcttggtgtgccggggctggacaccaaagaggttgccgtcgcactggcatcggtatgccaggaactgaatgcat

SEQ ID NO: 228410 - DNA, 75 bp, synthetic construct
  source 1..75: mol_type = other DNA
ggccagttcgctggatgccatttctgaccaggcaaaacccgtgaccgttgttgtgcgtgtgccgcagggtgaaac

SEQ ID NO: 228411 - DNA, 75 bp, synthetic construct
  source 1..75: mol_type = other DNA
ttaacaaagccggtgttaccacgcttatccgcaatgacggtttcaagttttggggaaaccgcacctgctcagatg

SEQ ID NO: 228412 - DNA, 75 bp, synthetic construct
  source 1..75: mol_type = other DNA
agccagcgtgaagggatgctgatctggcccgactttactggctgggacacggtgctgaatgccgaagcaacggca

SEQ ID NO: 228413 - DNA, 75 bp, synthetic construct
  source 1..75: mol_type = other DNA
ttgataagccaattaccgcaacgctgattcgtgacatcattgatggcattaatgccaaattccgcgaactgaaaa

SEQ ID NO: 228414 - DNA, 75 bp, synthetic construct
  source 1..75: mol_type = other DNA
ggataccacggcgaacgcgaccgagaccgcctgggcgaccgcccgcgcgctgggcctgcgcgccaaaatcgacca

SEQ ID NO: 228415 - DNA, 75 bp, synthetic construct
  source 1..75: mol_type = other DNA
aacttgaggagcgcggtttatggcgacgtgcggcgacccgatgggctgaggttcttcttcacgcagaaacggaca

SEQ ID NO: 228416 - DNA, 75 bp, synthetic construct
  source 1..75: mol_type = other DNA
cagctttcttccaaagctgcagacttgtttgatcagtatctggtttatcgcccggactggctaactcaatgggaa

SEQ ID NO: 228417 - DNA, 75 bp, synthetic construct
  source 1..75: mol_type = other DNA
ttccacgtatgccacagcccgcagcgcgaagtggaagttttgcacgatcgcctgctggcgatgctggaagaagat

SEQ ID NO: 228418 - DNA, 75 bp, synthetic construct
  source 1..75: mol_type = other DNA
tgatatacgcgataactggaaactactcggtgaacatgccactgactttgccgcagagcttcgaaaaggaggcaa

SEQ ID NO: 228419 - DNA, 75 bp, synthetic construct
  source 1..75: mol_type = other DNA
acaaaaatgaaaatagttttctcagaggttacagaaggtggcagagttacaaaaataaaattcacctatcagcag

SEQ ID NO: 228420 - DNA, 75 bp, synthetic construct
  source 1..75: mol_type = other DNA
aaaagtataactgcttggttgaatatgtcagaaaatgagtatgaaactatattgaacaaggcaattaaacggtta

SEQ ID NO: 228421 - DNA, 75 bp, synthetic construct
  source 1..75: mol_type = other DNA
gcgcagtatggtgacgcggtgccgttatctctgcttcgcgatgagctggcgcaacgcctggatcaggaacgtatc

SEQ ID NO: 228422 - DNA, 75 bp, synthetic construct
  source 1..75: mol_type = other DNA
aaattacaaactaaagaaattagcttactcaattatcatgttgcgaaaatacatgacacctctggcacgttagat

SEQ ID NO: 228423 - DNA, 75 bp, synthetic construct
  source 1..75: mol_type = other DNA
tgatattataattcttctaaaaaatgcagccaaatccaagcataaaagtagtctttatttactgtattgtctatt

SEQ ID NO: 228424 - DNA, 75 bp, synthetic construct
  source 1..75: mol_type = other DNA
atcagctatatcgggcgttccattcaggataacagtgaacgtttcccgtcggtactggtgcaggaactgatcgac

SEQ ID NO: 228425 - DNA, 75 bp, synthetic construct
  source 1..75: mol_type = other DNA
gagaagcacaggcctggcaagcgccgttgtggaaggcgttggtggaatataccgacgaactcgggcaaccgcgct

SEQ ID NO: 228426 - DNA, 75 bp, synthetic construct
  source 1..75: mol_type = other DNA
gcgctacaggcgctgggtaaacatattgaaatccatctcctgtttaccaacccttgccgttattactggggcgat

SEQ ID NO: 228427 - DNA, 75 bp, synthetic construct
  source 1..75: mol_type = other DNA
gccgaggggcatatgtgggcaaacgataagcccgtcaccgccacgttaattcgcgacattatcggcggtattaac

SEQ ID NO: 228428 - DNA, 75 bp, synthetic construct
  source 1..75: mol_type = other DNA
cgaaaccgaaggtgaacgcgttgggcagattaacgctctttcggttatcgaatttccgggccatccgcgcgcttt

SEQ ID NO: 228429 - DNA, 75 bp, synthetic construct
  source 1..75: mol_type = other DNA
gtatgtccttgcaactctgtatcgggctgcagctacacatcctaaaattaaattattacaatttaaattaatacc

SEQ ID NO: 228430 - DNA, 75 bp, synthetic construct
  source 1..75: mol_type = other DNA
tagctactgagttgctgagcgtggcgcaaagcctgcgtggatttgcttacctgtcagcgtatggctgcaagacgg

SEQ ID NO: 228431 - DNA, 75 bp, synthetic construct
  source 1..75: mol_type = other DNA
catttgattgacgaaaacgatcctttattcagtgatactcaaccgcgactgcaatttgcgctggagcagctgctg

SEQ ID NO: 228432 - DNA, 75 bp, synthetic construct
  source 1..75: mol_type = other DNA
ggcgtcgttacaggccatcgctgaccagtcaaaaccggtcaccgttgttgtgcgcgtggaagacggcaccggcga

SEQ ID NO: 228433 - DNA, 75 bp, synthetic construct
  source 1..75: mol_type = other DNA
ctcgctggtttttgatctcggtggcggcacgttcgacgttacggtgctcgagtacgccacgccggtgattgaagt

SEQ ID NO: 228434 - DNA, 75 bp, synthetic construct
  source 1..75: mol_type = other DNA
attttctcgccgattattgaacgaaacaccacagtaccggtgtcgcgtgtagaaacttattcaaccatgcacccg

SEQ ID NO: 228435 - DNA, 75 bp, synthetic construct
  source 1..75: mol_type = other DNA
tttttcgaatttaaaaacactgtcgatatgatggggagcgaagacttttgtcagttcctgcgggatgatgaagag

SEQ ID NO: 228436 - DNA, 75 bp, synthetic construct
  source 1..75: mol_type = other DNA
ttatggtactgctacttaataacgatgtctggtgtaagagtcgtgaggtggtggttctcagaaatctgattgagc

SEQ ID NO: 228437 - DNA, 75 bp, synthetic construct
  source 1..75: mol_type = other DNA
cccggtgcctcctctcgaaaacctgaccctgcgccagcgtatcaccgataaatatctggcaaatctggtcacctt

SEQ ID NO: 228438 - DNA, 75 bp, synthetic construct
  source 1..75: mol_type = other DNA
actttgagtcaatttcatctaatgttatttacagaataaaaaatggtgtaattgataggtatgaacttaattttt

SEQ ID NO: 228439 - DNA, 75 bp, synthetic construct
  source 1..75: mol_type = other DNA
cgaacacccaaacaacttgttaatatcggcactgttgcaaagttagcgatgaggcagccttttgtcttattcaaa

SEQ ID NO: 228440 - DNA, 75 bp, synthetic construct
  source 1..75: mol_type = other DNA
aagccggtaaaaaaggcacgctgtctgcttccctgcaggctatcgccgaccagtcaaaacccgtcaccgtagtcg

SEQ ID NO: 228441 - DNA, 75 bp, synthetic construct
  source 1..75: mol_type = other DNA
tttccgcttttggggtaaccgcacctgctctgatgacccgcttttcctgtttgagaactacacccgcaccgcgca

SEQ ID NO: 228442 - DNA, 75 bp, synthetic construct
  source 1..75: mol_type = other DNA
atgagtgactatcatcacggcgtgcaggtgctggagattaacgacggcacccgcgtcatttccaccatatccact

SEQ ID NO: 228443 - DNA, 75 bp, synthetic construct
  source 1..75: mol_type = other DNA
gaaaacctgaccctgcgccagcgtattacttccagatacctggcaagtctggtcacctcggttaacagcaattaa

SEQ ID NO: 228444 - DNA, 75 bp, synthetic construct
  source 1..75: mol_type = other DNA
ttttcctgtttgagaactacacccgcaccgcgcaggtgctggccgatacgatggccgaggcgcacatgtgggcgg

SEQ ID NO: 228445 - DNA, 75 bp, synthetic construct
  source 1..75: mol_type = other DNA
actgaaagccctgatgggcgcagagtcggttaccggcgttaaaccgcgcattctcggcgtaccgggactggacac

SEQ ID NO: 228446 - DNA, 75 bp, synthetic construct
  source 1..75: mol_type = other DNA
aaaaaacaggcatgaaagccttgttatctgcccagtcacagcttggcgttaaaccgcgcattctcggtgtgccag

SEQ ID NO: 228447 - DNA, 75 bp, synthetic construct
  source 1..75: mol_type = other DNA
gacggacacaatggcagaagcgcacatgtgggcagtggacaaaccgctgaacccgtcgctggcgcgcgacatcat

SEQ ID NO: 228448 - DNA, 75 bp, synthetic construct
  source 1..75: mol_type = other DNA
aaaccgcgcattctcggcgtgccaggccatgataacaaagccgttgcgactgagttgctgagcgtggcgcaaagc

SEQ ID NO: 228449 - DNA, 75 bp, synthetic construct
  source 1..75: mol_type = other DNA
gacgaaaacggtcagtacaccggactgaaagccctgctggcggcggagtcggtaaccggtgttaaaccgcgtatt

SEQ ID NO: 228450 - DNA, 75 bp, synthetic construct
  source 1..75: mol_type = other DNA
ggcgatcacttaccgcgaaaacttcagccagcgcgaagggatgctgatctggcctgactttactggctgggacac

SEQ ID NO: 228451 - DNA, 75 bp, synthetic construct
  source 1..75: mol_type = other DNA
aaatttacgaagagccgaagaatttatttgttgccggattcattggcgagatcaatatgttcaacgccacggtga

SEQ ID NO: 228452 - DNA, 75 bp, synthetic construct
  source 1..75: mol_type = other DNA
cgcaacgtcatctccaccctcagataaacttttgcatcaccgcatttgccgccaccacgatttctggtttgcttt

SEQ ID NO: 228453 - DNA, 75 bp, synthetic construct
  source 1..75: mol_type = other DNA
cggtggtgaagatggaaaaaacatcagaaaaaggcggtcgcccgacgtccaacggtaaacgtttcacctcgccgg

SEQ ID NO: 228454 - DNA, 75 bp, synthetic construct
  source 1..75: mol_type = other DNA
tccagtcgttaagatggaaaaaacggcggaaaaaggcggtcgcccggcgtccaacggtaagcgttttacctcgcc

SEQ ID NO: 228455 - DNA, 75 bp, synthetic construct
  source 1..75: mol_type = other DNA
gctgggtgagtggcgcgatttaactgacgatgagttaatcgacctgtttaaactcattgaaaattcctcttccga

SEQ ID NO: 228456 - DNA, 75 bp, synthetic construct
  source 1..75: mol_type = other DNA
aaataagtatgagccagtaagtgccttacggctatttaattactgtctgattgccgcattattatgcgctggtga

SEQ ID NO: 228457 - DNA, 75 bp, synthetic construct
  source 1..75: mol_type = other DNA
catcgctgctggtaaaacaaagtccggcaatgcactacggtcacggctggatttatttaccttgtgggaaaaagt

SEQ ID NO: 228458 - DNA, 75 bp, synthetic construct
  source 1..75: mol_type = other DNA
ggcgtattacgtacagcattagccaataaacgcattcagcgcagtgagctggaaaagcaggcgatggaaaccgtc

SEQ ID NO: 228459 - DNA, 75 bp, synthetic construct
  source 1..75: mol_type = other DNA
tgaagaagcctacgccgccgacccggaaatgatcgcttctgcggcctgcgatattcaggccgtacgtacccgcga

SEQ ID NO: 228460 - DNA, 75 bp, synthetic construct
  source 1..75: mol_type = other DNA
tttgcgtatttatcactgcgccactgatacgtaaagccgtacgtgctacatccttattgatgctttatactttta

SEQ ID NO: 228461 - DNA, 75 bp, synthetic construct
  source 1..75: mol_type = other DNA
taattaaagcctttgtctccagcgggcaatttttattgccgctaattatcagcctgttagtgtgggctgaaatgt

SEQ ID NO: 228462 - DNA, 75 bp, synthetic construct
  source 1..75: mol_type = other DNA
tgaacgtcagcttaagcggcattccactgggcgagtggcgcgatttaactgacgatgaactcatcgatcttttta

SEQ ID NO: 228463 - DNA, 75 bp, synthetic construct
  source 1..75: mol_type = other DNA
atcctcatatgttaaggcatgcttgcggttatgaactggcggagcgtggtgccgatacccgtttaattcaggatt

SEQ ID NO: 228464 - DNA, 75 bp, synthetic construct
  source 1..75: mol_type = other DNA
atctcgggcatcgaaatattcgccatactgtgcgttataccgccagtaatgctgctcgttttgccggattatggg

SEQ ID NO: 228465 - DNA, 75 bp, synthetic construct
  source 1..75: mol_type = other DNA
agaaaacgccctggcgctatggttttctgaacctgatgcgccgcgtggatgtgcagttgtgtaccgtccctgcag

SEQ ID NO: 228466 - DNA, 75 bp, synthetic construct
  source 1..75: mol_type = other DNA
aacaatattaaataagatcaaatcgttgtctctttatatgattgttaactgttgctttctctttgttgtgttata

SEQ ID NO: 228467 - DNA, 75 bp, synthetic construct
  source 1..75: mol_type = other DNA
gcgtaactgggaagaatgataatcatgacgggtcttttcgcctacaaatatactatttcctatgtattttaatat

SEQ ID NO: 228468 - DNA, 75 bp, synthetic construct
  source 1..75: mol_type = other DNA
ggctatcaatttctccaatatgatgtttattgttaccgtcgccttactggtcgtgcgggataagcgtctgggaaa

SEQ ID NO: 228469 - DNA, 75 bp, synthetic construct
  source 1..75: mol_type = other DNA
gcaaccgcgtctgaatccgctgcactgcaatacctggcaccgtatgccggttgcgcaatgggcgaatatttccgt

SEQ ID NO: 228470 - DNA, 75 bp, synthetic construct
  source 1..75: mol_type = other DNA
cacaacgaaggtactattgtttctgtaagtgatggtgttatccgcattcacggcctggccgattgtatgcagggt

SEQ ID NO: 228471 - DNA, 75 bp, synthetic construct
  source 1..75: mol_type = other DNA
tgttgcttaccgtcagatctccctgctgctccgtcgtccaccaggacgtgaagcattcccgggcgacgttttcta

SEQ ID NO: 228472 - DNA, 75 bp, synthetic construct
  source 1..75: mol_type = other DNA
tcgccagtgtgagctggcagcaaggacgcctgcaccttagcctttacagccttggactgtggggaccgaacggtc

SEQ ID NO: 228473 - DNA, 75 bp, synthetic construct
  source 1..75: mol_type = other DNA
agctacagcttaaaccacacgcagcccctccggctgttactggcggtccatatcagcttggctggaccgcctggg

SEQ ID NO: 228474 - DNA, 75 bp, synthetic construct
  source 1..75: mol_type = other DNA
atagctcgctgccggatcacgttcgcctggcggcatcggcccatctggtgcgcgaatcccgcaacccggacggct

SEQ ID NO: 228475 - DNA, 75 bp, synthetic construct
  source 1..75: mol_type = other DNA
atgatgatgaacgctttctttccggcaatggcgcttatggtgctagtgggttgttctacaccaccaccagaacag

SEQ ID NO: 228476 - DNA, 75 bp, synthetic construct
  source 1..75: mol_type = other DNA
tataccttccggaaagagcagtttgtctgttcttttgacgcggatggccattttttgcatctttccatgcgttaa

SEQ ID NO: 228477 - DNA, 75 bp, synthetic construct
  source 1..75: mol_type = other DNA
aatggcgtaatggcgggggggtttgcccgctatgtctggcttaatcgactgcattactatgcgatcagttatgtg

SEQ ID NO: 228478 - DNA, 75 bp, synthetic construct
  source 1..75: mol_type = other DNA
tcgtcgtgggttttcttctgcttgctgccggtgtttctgtttattatatcccgtccattatccgttctgtgtcgt

SEQ ID NO: 228479 - DNA, 75 bp, synthetic construct
  source 1..75: mol_type = other DNA
taaaaccgttcctacaggaacggtaaagcgtcagactgggttaagcgatgatattgacccgtttaatcagagcca

SEQ ID NO: 228480 - DNA, 75 bp, synthetic construct
  source 1..75: mol_type = other DNA
gccggggcgctgggcgaagctggagccagtggttggattgacacccattttagcgatcgctttttgggggctatg

SEQ ID NO: 228481 - DNA, 75 bp, synthetic construct
  source 1..75: mol_type = other DNA
caatcgatgcactgaaacgtattggtcaggtaaaagatgaaaacattaccgttgtttgggtgccaggtgcttatg

SEQ ID NO: 228482 - DNA, 75 bp, synthetic construct
  source 1..75: mol_type = other DNA
atcaatgacagcctgctggaaggtgcgattgacgcactgaaacgtatcggtcaggtaaaagatgaaaacattacc

SEQ ID NO: 228483 - DNA, 75 bp, synthetic construct
  source 1..75: mol_type = other DNA
gaaaaaactcggcgcacgcgtcaacattgaaatcgatccacaaactcaggcagtggtagatacggtagaacgtgt

SEQ ID NO: 228484 - DNA, 75 bp, synthetic construct
  source 1..75: mol_type = other DNA
ttcataatgccgaacgcgttcgccagctggctcacgacggtcatgagctggtgtatgtgccatgccaccgtagcc

SEQ ID NO: 228485 - DNA, 75 bp, synthetic construct
  source 1..75: mol_type = other DNA
tgaccattcaggcgatgctgcgtggcggcacgcgtccgattacgctgattccgatctatatcggttatgagcacg

SEQ ID NO: 228486 - DNA, 75 bp, synthetic construct
  source 1..75: mol_type = other DNA
tgcgttggcgaacgaaatgcagcgtcaggggctgattacactgcaaaatgacgagttgcatatcaatccagcgca

SEQ ID NO: 228487 - DNA, 75 bp, synthetic construct
  source 1..75: mol_type = other DNA
atggtgccagtatcggtgatgtttggtcgcgcgccggggcgtgaaaaaggcgaagtgaacccgccgctgcgtatg

SEQ ID NO: 228488 - DNA, 75 bp, synthetic construct
  source 1..75: mol_type = other DNA
caacgcgccggagttcttcgacaaggcggtgttcagttctctggtgctgacgctgcgtgatgaagggtatatcag

SEQ ID NO: 228489 - DNA, 75 bp, synthetic construct
  source 1..75: mol_type = other DNA
ggtacgctggagaaagagagccgcactgtggcacaacgtctttccgtgctgcacggcatcaacgcaccggagttc

SEQ ID NO: 228490 - DNA, 75 bp, synthetic construct
  source 1..75: mol_type = other DNA
cgtcggtgtgagcaaatgcctgcgtgatatccagacccacgcggagtacatcaacgacaaggcagggttcttctg

SEQ ID NO: 228491 - DNA, 75 bp, synthetic construct
  source 1..75: mol_type = other DNA
aaagctggcgacattaaagcgttacgttgaagctatgggaggcaaattaagcctggatgttgagcttcccacagg

SEQ ID NO: 228492 - DNA, 75 bp, synthetic construct
  source 1..75: mol_type = other DNA
cgaatccgttgcaaacgatggaaatgctaataaacatataccttcctgagtataaaaaagacttacaagaactca

SEQ ID NO: 228493 - DNA, 75 bp, synthetic construct
  source 1..75: mol_type = other DNA
cgttgattaatgccgtcgccgatatgtttaaaggccacatcaataccggactggcacgctgggcgatcgccagtc

SEQ ID NO: 228494 - DNA, 75 bp, synthetic construct
  source 1..75: mol_type = other DNA
atgggcgtcattttgatgagcctgaatatggcctcgctggagacactttggcagactaatgccgcgggcgtctcg

SEQ ID NO: 228495 - DNA, 75 bp, synthetic construct
  source 1..75: mol_type = other DNA
tgaaattggcgggcatttaatgtcaggtcatattatgaccaccgcagaagtaacgaaaatattaacttcggaaaa

SEQ ID NO: 228496 - DNA, 75 bp, synthetic construct
  source 1..75: mol_type = other DNA
cgcaatatctttaaacaacgcagcaaacgaagtaatgaatatgtggcttcagtcgctggtgaataatgaacgcga

SEQ ID NO: 228497 - DNA, 75 bp, synthetic construct
  source 1..75: mol_type = other DNA
agacatgtttaaaggatacatcaatacagggatgacgcgctggggagtcgccacgctgctgacgattgccacctg

SEQ ID NO: 228498 - DNA, 75 bp, synthetic construct
  source 1..75: mol_type = other DNA
tttgtggcaacgtccattgccggaggcctgttagatacaccgatttttgaacatacgccgacggtggcgttggct

SEQ ID NO: 228499 - DNA, 75 bp, synthetic construct
  source 1..75: mol_type = other DNA
gatgacgacgaaaagaataccgtcgctttaaccgacggaaaacgagggaaccctaataccctcatcatctctgaa

SEQ ID NO: 228500 - DNA, 75 bp, synthetic construct
  source 1..75: mol_type = other DNA
gcaggcaatgaagatagagaacaaaacctacagtgccccactgaagcccggctaccgcagcctgattcattcgcc

SEQ ID NO: 228501 - DNA, 75 bp, synthetic construct
  source 1..75: mol_type = other DNA
tagggcatgaacatcgtgcaatttttgacagccgagtaaaagagatcaacatcatctccgagtcaggcctctaca

SEQ ID NO: 228502 - DNA, 75 bp, synthetic construct
  source 1..75: mol_type = other DNA
tttttcattttgaatcagaagcaaccattcgagccattgttattgatggaaatccttggtttgttgccaaagacg

SEQ ID NO: 228503 - DNA, 75 bp, synthetic construct
  source 1..75: mol_type = other DNA
ctggatacaggctaatgtactgaaagcagataagatggatttgcgagagtcacaggggtggttaagtaagggata

SEQ ID NO: 228504 - DNA, 75 bp, synthetic construct
  source 1..75: mol_type = other DNA
tgagggcgctgtgactggcgccgctcttggggcggggattaccgcttacaactccagttccgcgggagcaaccct

SEQ ID NO: 228505 - DNA, 75 bp, synthetic construct
  source 1..75: mol_type = other DNA
accagacccgtgtggtatcgaatgcgaacaaggttaatctgaagtttgatgaggcgaagcctgttctggaagacc

SEQ ID NO: 228506 - DNA, 75 bp, synthetic construct
  source 1..75: mol_type = other DNA
atgtgaactataccatgatcacggatgtgcagattgcagagcgtactaaggcaacggtgacaacggataatgttg

SEQ ID NO: 228507 - DNA, 75 bp, synthetic construct
  source 1..75: mol_type = other DNA
agtatctacaccgtgggttcgctgctttgtgtatttattaccgctccactcattcgtaataccgttcgagcaaca

SEQ ID NO: 228508 - DNA, 75 bp, synthetic construct
  source 1..75: mol_type = other DNA
cgggcactggtggcactgggggagcgtccggattacacgctgattatgcgctatgtgaataatattgccgatctg

SEQ ID NO: 228509 - DNA, 75 bp, synthetic construct
  source 1..75: mol_type = other DNA
ccctgctgcgtccggccgttgagctgaataccgccgtggtatcgggcgtggcggcgtatgtctgtgtgcaggccc

SEQ ID NO: 228510 - DNA, 75 bp, synthetic construct
  source 1..75: mol_type = other DNA
atgagctgatgggggatgagtttatcccgctcatcaacaaaggcggcggggcgggtatcgaagtgacggcctata

SEQ ID NO: 228511 - DNA, 75 bp, synthetic construct
  source 1..75: mol_type = other DNA
gagcgcacttccgcgcaggtgacgactgacaatgtggctgcgctgaagcagggaacgtcgggttataaagtgcag

SEQ ID NO: 228512 - DNA, 75 bp, synthetic construct
  source 1..75: mol_type = other DNA
atgggcaccgcaattaaaaagcgtaatctggaagtcaaaacccagatgagtgaaaccatctggcttgaaccttcc

SEQ ID NO: 228513 - DNA, 75 bp, synthetic construct
  source 1..75: mol_type = other DNA
acagatcgcaccgtttatctgcaaatcaaaaatacctccgataaggatatgagtggccttcagggaaaaattaac

SEQ ID NO: 228514 - DNA, 75 bp, synthetic construct
  source 1..75: mol_type = other DNA
cccgtgtggtttcaaatgcgaacaaggttaacctgaaatttgaagaggcgaagcctgttctcgaagaccagctgg

SEQ ID NO: 228515 - DNA, 75 bp, synthetic construct
  source 1..75: mol_type = other DNA
cagcctgagttcacagataaaatactctccaggaaacccggggcggttcaaattgccgatgcagtcaaagccaga

SEQ ID NO: 228516 - DNA, 75 bp, synthetic construct
  source 1..75: mol_type = other DNA
aaaaaagaacaaatggtagtgtccgctattgtcagtacacctcaaccatctggcttgaacctgcgagcgaacgca

SEQ ID NO: 228517 - DNA, 75 bp, synthetic construct
  source 1..75: mol_type = other DNA
accactctcggtgttggactggctaccggtctgattggcatggccgcggatgcaatggtggaagatataaattac

SEQ ID NO: 228518 - DNA, 75 bp, synthetic construct
  source 1..75: mol_type = other DNA
ggagcatcacctgctggattacaaaggcgtggagaaacgttttagccagattcaacccttacgttacccgagatg

SEQ ID NO: 228519 - DNA, 75 bp, synthetic construct
  source 1..75: mol_type = other DNA
tcttcgaacgccatagtgctgacaaccattaaagatgggcaatgcctgacatcgacacgtaaaaatcacgatcgc

SEQ ID NO: 228520 - DNA, 75 bp, synthetic construct
  source 1..75: mol_type = other DNA
tctcgatgcaacagccgaacagccagaatcgcccgctgagtccccggcccccctcagtatcagctgcgaggtaac

SEQ ID NO: 228521 - DNA, 75 bp, synthetic construct
  source 1..75: mol_type = other DNA
aaggtcgaataaatattcgccgactgaagaacggattttctaccgttcacccgttacgttttgatgagcgtgaag

SEQ ID NO: 228522 - DNA, 75 bp, synthetic construct
  source 1..75: mol_type = other DNA
gaagctggaaccgtaacgcagactcatcctcatatgttaaggcatgcttgtggttatgaactggcggagcgtggt

SEQ ID NO: 228523 - DNA, 75 bp, synthetic construct
  source 1..75: mol_type = other DNA
gcaccgttttcctgcaaatcaaaaacacatctgacaaggatatgagcggattgcaggcaaaaatcagtgatgccg

SEQ ID NO: 228524 - DNA, 75 bp, synthetic construct
  source 1..75: mol_type = other DNA
gctggcgggcagagagttagtcaaagagttattgcaggaagagtgtgagccgcaaaaactggctgcggcgctgtt

SEQ ID NO: 228525 - DNA, 75 bp, synthetic construct
  source 1..75: mol_type = other DNA
tggcgaaatgcccgatggtggttgggtatcgcatgaagcctttcaccttctggctggcgaagcggttggtgaaaa

SEQ ID NO: 228526 - DNA, 75 bp, synthetic construct
  source 1..75: mol_type = other DNA
ttgaagctggaaccgtaacgcagactcatcctcatatgttaaggcatgcttgcggttatgaactggcggagcgtg

SEQ ID NO: 228527 - DNA, 75 bp, synthetic construct
  source 1..75: mol_type = other DNA
ttgcccgggccacgccaggcagtgagcgcactggatttggtgtttctgagcaatcgtgggctttatattccgtcg

SEQ ID NO: 228528 - DNA, 75 bp, synthetic construct
  source 1..75: mol_type = other DNA
ttattgtcggcctactcaatacgctactggtttctgcattgtgtattgtgttcgcttctgttttgggcttcttta

SEQ ID NO: 228529 - DNA, 75 bp, synthetic construct
  source 1..75: mol_type = other DNA
agactgagtggggacgggcgttggcagctaatggcaagaaaggaaaggtgattctcggctcgataatgcgcaagc

SEQ ID NO: 228530 - DNA, 75 bp, synthetic construct
  source 1..75: mol_type = other DNA
tgcctgtatgcgcaaattgctgaccatcctgaacgcgatgatcagaaagaatgaagaatggaatgagtccaacca

SEQ ID NO: 228531 - DNA, 75 bp, synthetic construct
  source 1..75: mol_type = other DNA
gatactgcagccatcctacgaggtgaatatctacagccaggatgatgaatcgcgggggcggggcagagggatatc

SEQ ID NO: 228532 - DNA, 75 bp, synthetic construct
  source 1..75: mol_type = other DNA
atgaacaacctgccagatgccatgtgtgcgggataaagagcaaagatgttttctccctcgcagaagatggacaga

SEQ ID NO: 228533 - DNA, 75 bp, synthetic construct
  source 1..75: mol_type = other DNA
gagtggggacgggcgttccgcgaccgtctggcggctaatggcaagaaaggaaaggtgattctcggcgcgatgatg

SEQ ID NO: 228534 - DNA, 75 bp, synthetic construct
  source 1..75: mol_type = other DNA
gcgttccgcgaccgtctggcggctaatggcaagaaaggaaaggtgattctcggcgcgatgatgcgcaagctggca

SEQ ID NO: 228535 - DNA, 75 bp, synthetic construct
  source 1..75: mol_type = other DNA
tgcaatacctggcaccgtatgccggttgtgcaatgggcgaatacttccgtgaccgtggcgaagatgcgctgatca

SEQ ID NO: 228536 - DNA, 75 bp, synthetic construct
  source 1..75: mol_type = other DNA
ggcgttccgcgaccgtctggcggctaatggcaagaaaggaaaggtgattctcggcgcgatgatgcgcaagctggc

SEQ ID NO: 228537 - DNA, 75 bp, synthetic construct
  source 1..75: mol_type = other DNA
cgatgatgcgcaagctggcacaggtggcgtatggagtgctgaagtcaggcgtgccgttcgatgcgtcacggcata

SEQ ID NO: 228538 - DNA, 75 bp, synthetic construct
  source 1..75: mol_type = other DNA
cgcaagctggcacaggtggcgtatggagtgctgaagtcaggcgtgccgttcgatgcgtcacggcataatccggta

SEQ ID NO: 228539 - DNA, 75 bp, synthetic construct
  source 1..75: mol_type = other DNA
cgaacagggtaacctctccaggcgtgaaatcagtgcgcttgtcggtatggttccagtaaaccgggactcgggcac

SEQ ID NO: 228540 - DNA, 75 bp, synthetic construct
  source 1..75: mol_type = other DNA
tttggtgttctggcagcggtccgttttcgccagggaatgaaggtcatccgctaccgtcgcaatctgcggcgtctg

SEQ ID NO: 228541 - DNA, 75 bp, synthetic construct
  source 1..75: mol_type = other DNA
ggtgcggatctggtcgattgaaatggcactgagcagtgaggacggtaaaaaaatatacgatccgattctggatgg

SEQ ID NO: 228542 - DNA, 75 bp, synthetic construct
  source 1..75: mol_type = other DNA
caggtaccttcagccgggctggctgtaccggatggcccgtcagcttgagctgaaaacggagcataccgtcccccg

SEQ ID NO: 228543 - DNA, 75 bp, synthetic construct
  source 1..75: mol_type = other DNA
gcgcaggtagtggggaactttaacagcctggtgatgctgcgggtgcggcatacggaaacggcagaactgatgacg

SEQ ID NO: 228544 - DNA, 75 bp, synthetic construct
  source 1..75: mol_type = other DNA
cggctttcgctggctgcccacgcatacccagcggctgtatctgtgtcgcctgccacagtgtgagcactggctgcg

SEQ ID NO: 228545 - DNA, 75 bp, synthetic construct
  source 1..75: mol_type = other DNA
gcatgaccctatcctcgacggcctgcgttccgctgtacgctacgacaaaacctatttcgacaagatcgtcgcctc

SEQ ID NO: 228546 - DNA, 75 bp, synthetic construct
  source 1..75: mol_type = other DNA
tgtcattaaacaaagattagcccgaagtggtggcggaaaatcaggcggttaccggacaataattttttaccgcgt

SEQ ID NO: 228547 - DNA, 75 bp, synthetic construct
  source 1..75: mol_type = other DNA
atttcattggccacacggaaatcttcgggcaactgactgacaccccagatcccctgacgatgttccaggttcgcg

SEQ ID NO: 228548 - DNA, 75 bp, synthetic construct
  source 1..75: mol_type = other DNA
gcatacgcaaaaaatgaacgtgaaaatataaccgctactgaggaagtgcatttcggaaggggctcctcacgtact

SEQ ID NO: 228549 - DNA, 75 bp, synthetic construct
  source 1..75: mol_type = other DNA
atgcgcattttcaaaaatgcctggtttgaacgcttcgcacgaaaaaatcggatttccaataaagctctgcgagaa

SEQ ID NO: 228550 - DNA, 75 bp, synthetic construct
  source 1..75: mol_type = other DNA
atttcgaaaagcggctccccatgttctcaatcttactgatgaacaactggcacaattgattctacagggccagtt

SEQ ID NO: 228551 - DNA, 75 bp, synthetic construct
  source 1..75: mol_type = other DNA
cgaatccgtcgatgccatccgccgctgggagcctcgctgccagctgatgtcggttaaacccgccgtcgacggcga

SEQ ID NO: 228552 - DNA, 75 bp, synthetic construct
  source 1..75: mol_type = other DNA
aaaacctttgtgaacaccacgctgggcgagacctgggaagaggccgtgggcgaaaaactcgatcaccaggtactg

SEQ ID NO: 228553 - DNA, 75 bp, synthetic construct
  source 1..75: mol_type = other DNA
tcagcgcccggggtgatgaaattccgccgccgcgctccatcactttccatatctggacggcgtacagtccgttca

SEQ ID NO: 228554 - DNA, 75 bp, synthetic construct
  source 1..75: mol_type = other DNA
ccgcctcgggcctgacctggctggccttttgcccggaacaagaacgcaaggaattaatcgaaatgttagcctccc

SEQ ID NO: 228555 - DNA, 75 bp, synthetic construct
  source 1..75: mol_type = other DNA
gaggagatgagttaggtggcgcacagactcatgtcaaagatgttatattaggattaataaataagtacaacatag

SEQ ID NO: 228556 - DNA, 75 bp, synthetic construct
  source 1..75: mol_type = other DNA
aattctctatgcccgtatgaaagccgatcccacgcctgcggatgaagccacgtcgtatgccatccgttttcctga

SEQ ID NO: 228557 - DNA, 75 bp, synthetic construct
  source 1..75: mol_type = other DNA
gcccttatgaaagccgatcccacgcctgcggatgaagccacgtcgtatgccatccgttttcctgatgatccggag

SEQ ID NO: 228558 - DNA, 75 bp, synthetic construct
  source 1..75: mol_type = other DNA
ctggatttgtgacaataccaggatgtggacgcgtgacggcctgacattttacagcgccggtgatgaggagatgcc

SEQ ID NO: 228559 - DNA, 75 bp, synthetic construct
  source 1..75: mol_type = other DNA
ttttattgaacacaaatcccgtaacagcctgcttttccagccgacagattctgcggctgaagatttcatgaaagc

SEQ ID NO: 228560 - DNA, 75 bp, synthetic construct
  source 1..75: mol_type = other DNA
agagtcttcatatactcccgggcaatgggaaacactgccgtttcaggttgccatcatgaacagcatggggaatga

SEQ ID NO: 228561 - DNA, 75 bp, synthetic construct
  source 1..75: mol_type = other DNA
cattacgtgtgtccgtgcaacgctggcagcttgatctggctgtactggcaaaatcccgggaagaagagacgaccc

SEQ ID NO: 228562 - DNA, 75 bp, synthetic construct
  source 1..75: mol_type = other DNA
accttgaagcgctggcgagagcacgaagagatgaacaggatgaggatgatatgagcatggaagagatcgcggctg

SEQ ID NO: 228563 - DNA, 75 bp, synthetic construct
  source 1..75: mol_type = other DNA
cggaacttgaccagaccgacggacgctggatttgtgacaataccgggatgtggacgtgtgacggcctgacatttt

SEQ ID NO: 228564 - DNA, 75 bp, synthetic construct
  source 1..75: mol_type = other DNA
agtctgctttttcagcccacggattctgccgctgaagattttatgaagtctcacgtggaggcgacgattcgggac

SEQ ID NO: 228565 - DNA, 75 bp, synthetic construct
  source 1..75: mol_type = other DNA
gtgttatctcgttggagatattcatggcgtattttggatgataacgaggcgcaaaaaatgaaaaagacagctatc

SEQ ID NO: 228566 - DNA, 75 bp, synthetic construct
  source 1..75: mol_type = other DNA
ccgtcgttgattacctgatctctaaaggtatcccgtctgacaagatctccgcacgtggtatgggcgaatccaacc

SEQ ID NO: 228567 - DNA, 75 bp, synthetic construct
  source 1..75: mol_type = other DNA
cagtggcactggctggtttcgctaccgtagcgcaggccactccgaaagataacacctggtacactggtgctaaac

SEQ ID NO: 228568 - DNA, 75 bp, synthetic construct
  source 1..75: mol_type = other DNA
gaacatggggcgaatcgtcgttgacgtcgatggtcttgagctcgctgaactgattaacaaagtcgctgaaaacgg

SEQ ID NO: 228569 - DNA, 75 bp, synthetic construct
  source 1..75: mol_type = other DNA
cttctgccagccctcatcagttgccggaagacaatacagtgatacaaagcgtgatgccattaaccactgaaacag

SEQ ID NO: 228570 - DNA, 75 bp, synthetic construct
  source 1..75: mol_type = other DNA
ggatgaacgtgacgctaccgaaacaccggcgacttctgccagccctcatcagttgccggaagacaatacagtgat

SEQ ID NO: 228571 - DNA, 75 bp, synthetic construct
  source 1..75: mol_type = other DNA
cgattctgtttttcgccgtttacctgcttatctttttcctgcgcgtcggctggacccacgtcggttattcagtcg

SEQ ID NO: 228572 - DNA, 75 bp, synthetic construct
  source 1..75: mol_type = other DNA
ggcgcatttagttcgctggcgttggtgttatgcgggattattacctcgctggttgcaccatttcttttcccgatt

SEQ ID NO: 228573 - DNA, 75 bp, synthetic construct
  source 1..75: mol_type = other DNA
cactatctgttttatcggtagcgtggtagcaatggttacaggaactgccgtggcattgatgatgggtgcttcacc

SEQ ID NO: 228574 - DNA, 75 bp, synthetic construct
  source 1..75: mol_type = other DNA
caataacgcccaggtggttgtggataacctcaacaatgacaccgtattgtttattgataatgactctgcactttc

SEQ ID NO: 228575 - DNA, 75 bp, synthetic construct
  source 1..75: mol_type = other DNA
gcggaatgccaggcacataccgggcattgtcggggaatggactggggtctgccggttccgccagcgtcatgattg

SEQ ID NO: 228576 - DNA, 75 bp, synthetic construct
  source 1..75: mol_type = other DNA
aataaatatattgtacgaggctaatgtggtcgttgtaacgacgatagaaaataaaaatttcaaatataaaaataa

SEQ ID NO: 228577 - DNA, 75 bp, synthetic construct
  source 1..75: mol_type = other DNA
ctacgatgttcttccgcagttcaccgatgaagccggacgcaaaacattaaaagaattcatcccggttcagggcgt

SEQ ID NO: 228578 - DNA, 75 bp, synthetic construct
  source 1..75: mol_type = other DNA
gcgactgattcgttatgcgatgggtgattacactttggataaccttgccaatggcgaatggcgagaagtgacaga

SEQ ID NO: 228579 - DNA, 75 bp, synthetic construct
  source 1..75: mol_type = other DNA
aaatctgcccgtgttggctatacaaagatgttgctgggagtcgccgggtattttattgagcataaatcccgaaac

SEQ ID NO: 228580 - DNA, 75 bp, synthetic construct
  source 1..75: mol_type = other DNA
gaatatctggatcgtcggtacggcaggcgaggcggatcatacactctatcagagcaaaatgaccggacggctggc

SEQ ID NO: 228581 - DNA, 75 bp, synthetic construct
  source 1..75: mol_type = other DNA
aatggcaggaagtgtttcttccctgaacgtttcggttgcaaccggaatttgcttatttgaagcggtgcgtcagcg

SEQ ID NO: 228582 - DNA, 75 bp, synthetic construct
  source 1..75: mol_type = other DNA
acgcagtgcaggccctgcaggagcgcgcccctgaacgttttcaggaagtctttattttaaaaggccgtgaagata

SEQ ID NO: 228583 - DNA, 75 bp, synthetic construct
  source 1..75: mol_type = other DNA
tttggcgatgatgcgacgccgtttggcctgaaatgggagaaaggcaaaccggaaacggtgtattacctgtgtgaa

SEQ ID NO: 228584 - DNA, 75 bp, synthetic construct
  source 1..75: mol_type = other DNA
tttcccgtgtctgctgggacatcggggggatcgatggtgaaatagtttatcggagatcaaaaaaacacggtgttt

SEQ ID NO: 228585 - DNA, 75 bp, synthetic construct
  source 1..75: mol_type = other DNA
atgaagaagaggactacagcaataggatctgaaatcagtaaaaaagatatcacccgtctgggctttcgttcgtca

SEQ ID NO: 228586 - DNA, 75 bp, synthetic construct
  source 1..75: mol_type = other DNA
gtacgaaatccgttacgaacttaatggccagactatttatgtattgcgcctgtggcacactcgagaaaacaggta

SEQ ID NO: 228587 - DNA, 75 bp, synthetic construct
  source 1..75: mol_type = other DNA
attgagggctctgtatggccaaaatccattcgcggctcgacgcctaaaatcaaaggcacctgtcagatcgaaaaa

SEQ ID NO: 228588 - DNA, 75 bp, synthetic construct
  source 1..75: mol_type = other DNA
atctggctgtgctggcggcatcccgcaaggatgcaactgcacaaccgacccttgaagaactggcagcgaagctgt

SEQ ID NO: 228589 - DNA, 75 bp, synthetic construct
  source 1..75: mol_type = other DNA
gttaactcatccacgtatgggagaacagttgtttcagtttgaacccagggaggtcagacggatttttgctggcga

SEQ ID NO: 228590 - DNA, 75 bp, synthetic construct
  source 1..75: mol_type = other DNA
acaccggggggatcgatggtgaaattgtctatcagaggtcaaaaaaacacggtgttttccgggtgctgccggtaa

SEQ ID NO: 228591 - DNA, 75 bp, synthetic construct
  source 1..75: mol_type = other DNA
ggtcgtgcattacacggcggcggtgcctgcccgggtggtttatctgacggcgggcattgactcgcagcgaaaccg

SEQ ID NO: 228592 - DNA, 75 bp, synthetic construct
  source 1..75: mol_type = other DNA
gaagtggggacggacaccgcaaaagaaattctctatgcccgtatgaaagccgatcccacgcctgcggatgaagcc

SEQ ID NO: 228593 - DNA, 75 bp, synthetic construct
  source 1..75: mol_type = other DNA
tatgtctggggatgggctccgggagaggaagcctttctggtggataaaatcatcattatggggcgtcccgatgag

SEQ ID NO: 228594 - DNA, 75 bp, synthetic construct
  source 1..75: mol_type = other DNA
cgtgacggtctgacgtttttcagcgccgcggataatgaaattccgccgccgcgctccatcacgttccatatctgg

SEQ ID NO: 228595 - DNA, 75 bp, synthetic construct
  source 1..75: mol_type = other DNA
agagtcgtcttataccccggggcgatgggaaacactgccgtttcaggttggcatcatgaactgtatgggcaacga

SEQ ID NO: 228596 - DNA, 75 bp, synthetic construct
  source 1..75: mol_type = other DNA
atgatccccggcaccacagttcttgccggaaccggcagtgaagaaggggctgtgaccacgaccacaccgtttggt

SEQ ID NO: 228597 - DNA, 75 bp, synthetic construct
  source 1..75: mol_type = other DNA
caaaatcatcacaactgggccgcctgtgcgcggatgctggaaaccgacgtcgccaacctgcataggctggcgaaa

SEQ ID NO: 228598 - DNA, 75 bp, synthetic construct
  source 1..75: mol_type = other DNA
gttaactcatccacgtatgggggaacagttatttcagtttgaacccagggaggtcagacggatttttgctggcga

SEQ ID NO: 228599 - DNA, 75 bp, synthetic construct
  source 1..75: mol_type = other DNA
ggcaaaatcccgggaagaagagacgacccggccaacccttaaagaactggcagcgaagctgtccggaggagtgaa

SEQ ID NO: 228600 - DNA, 75 bp, synthetic construct
  source 1..75: mol_type = other DNA
ggaattaacgtcattgatgccgatattattgcgcgtcaggtggttgaaccaggtgcacctgcgctacatgccatt

SEQ ID NO: 228601 - DNA, 75 bp, synthetic construct
  source 1..75: mol_type = other DNA
caccagcagtagttcgctcacgggcagcaacgccgcagatttacaaagcagttttctgactttgctggtggcgca

SEQ ID NO: 228602 - DNA, 75 bp, synthetic construct
  source 1..75: mol_type = other DNA
gcgtcattgccgacttcgacgacaaacagatcgagcaagcgctggctgatgtcgacgtccccattgttggggttg

SEQ ID NO: 228603 - DNA, 75 bp, synthetic construct
  source 1..75: mol_type = other DNA
gtaggggaatatttacaggcgtcacaatcggaatgggatattttcattgaagaagatttccgcgcccgcattgat

SEQ ID NO: 228604 - DNA, 75 bp, synthetic construct
  source 1..75: mol_type = other DNA
tagagcatattttctcgcttttattatttctccttttgctggcctggttgcagataagattggttcttccctgaa

SEQ ID NO: 228605 - DNA, 75 bp, synthetic construct
  source 1..75: mol_type = other DNA
agaaaatgaaatcagcgtgggcaccgaagtgtcaagcaccaccggctggacacatacctttaccaacacgcaact

SEQ ID NO: 228606 - DNA, 75 bp, synthetic construct
  source 1..75: mol_type = other DNA
tttctactctgtatttaaaaaagcgtatgacacgacgcctaaagagtatcgcgatgtaaatagcgaggtaatgct

SEQ ID NO: 228607 - DNA, 75 bp, synthetic construct
  source 1..75: mol_type = other DNA
gttgggccactgaacgcgaatatgcatttcgtcagcttgtcgccgaagaaaagtatcgcggagtggtttatcagg

SEQ ID NO: 228608 - DNA, 75 bp, synthetic construct
  source 1..75: mol_type = other DNA
gaaggccgcttagttagaactgatgacccttatgtacatcttgatttagaagagccgtctgtagattctgtcagc

SEQ ID NO: 228609 - DNA, 75 bp, synthetic construct
  source 1..75: mol_type = other DNA
atgctcaaacccgacagcctgcgcagggcgctgactgatgccgtcacggtactgaaaactaaccccgatatgctg

SEQ ID NO: 228610 - DNA, 75 bp, synthetic construct
  source 1..75: mol_type = other DNA
gcaggcacactcagcgatcgccgacgcacggatggcggcaggggtggtaaacgctattgctgcatatcatctgga

SEQ ID NO: 228611 - DNA, 75 bp, synthetic construct
  source 1..75: mol_type = other DNA
taaccgcctggacggaacgcgaagcgcgtaaccgttgcccgtccggttgtgtcgctgtattcgccgcccgtattc

SEQ ID NO: 228612 - DNA, 75 bp, synthetic construct
  source 1..75: mol_type = other DNA
gaagcggatgatcaagaagattacagcctacccacatacgtgcctgaattatttcaggatccaccagaaaaggat

SEQ ID NO: 228613 - DNA, 75 bp, synthetic construct
  source 1..75: mol_type = other DNA
atcatgatcgccaaaaaatcataggaagaccaacgctttacattgtgattgatgtgtttagtcggatgatcacgg

SEQ ID NO: 228614 - DNA, 75 bp, synthetic construct
  source 1..75: mol_type = other DNA
atgatggcgatctggttggctattcaattaactacgctattgatctgcagaccgatggcggcacctggcagacgg

SEQ ID NO: 228615 - DNA, 75 bp, synthetic construct
  source 1..75: mol_type = other DNA
tcattcgacgttcctgggatttatgccgggcgctatctggtacgtgtacgcgccatcaatgccgcagaaatttca

SEQ ID NO: 228616 - DNA, 75 bp, synthetic construct
  source 1..75: mol_type = other DNA
ttcgttcgatgtcgggctggacggaaacataccgcagcctggctatatcatcgctgtggcagacgagctgctttc

SEQ ID NO: 228617 - DNA, 75 bp, synthetic construct
  source 1..75: mol_type = other DNA
gacaacttccggctacgaacgcagccatcgtatcgatttaccacaggcaggcagtacatggacggtgcgcctgcg

SEQ ID NO: 228618 - DNA, 75 bp, synthetic construct
  source 1..75: mol_type = other DNA
ggtgttttcgtatgcggaagtcatcgacagcaagcttcgttatcctttaacagcgctcctgtatgtcgaagtgga

SEQ ID NO: 228619 - DNA, 75 bp, synthetic construct
  source 1..75: mol_type = other DNA
ggtaatgacttataatgattcatccagttctgggcacgcaagacacgtctgtgttatagcaaacgttaaaggtaa

SEQ ID NO: 228620 - DNA, 75 bp, synthetic construct
  source 1..75: mol_type = other DNA
tgtcgagcacggtcggagatgtgtcttcttctctgagcaagcttgagcagacagtggcgacggctgataccgcgc

SEQ ID NO: 228621 - DNA, 75 bp, synthetic construct
  source 1..75: mol_type = other DNA
gccgcaagggcggcagctccagttcacgaacccctaccgaacagcctgatgatctgcaatctgtagcgaaggcaa

SEQ ID NO: 228622 - DNA, 75 bp, synthetic construct
  source 1..75: mol_type = other DNA
cgcaggtaaacagcatcacggcgacggtgaacgggcatacctcagccatcacaaccaacgctcaggctatagcga

SEQ ID NO: 228623 - DNA, 75 bp, synthetic construct
  source 1..75: mol_type = other DNA
gtatcctgaccaataacaaggatcgcatcgtgtcgttcgatgttggtcttgacggtaagatcccacagcctggtt

SEQ ID NO: 228624 - DNA, 75 bp, synthetic construct
  source 1..75: mol_type = other DNA
ccgatggtctggctgcagcagtaggttcgaataagcagacagcagaagcaatcattgggaacgccctggctattg

SEQ ID NO: 228625 - DNA, 75 bp, synthetic construct
  source 1..75: mol_type = other DNA
cgcgttatccgcgttccagatacctacgaccctgaaacccgcacttatagcggtacatggaccggtgcgtttaag

SEQ ID NO: 228626 - DNA, 75 bp, synthetic construct
  source 1..75: mol_type = other DNA
cagtacgcagccggaatgggcattggtgttcagaatacgccagagggcatgcagtcacaggttctgttcctggct

SEQ ID NO: 228627 - DNA, 75 bp, synthetic construct
  source 1..75: mol_type = other DNA
aaaaagatatggtgattggtccggtacgtttgctggcaaagagcggcggcaagtcgggtgactttaaggtggaag

SEQ ID NO: 228628 - DNA, 75 bp, synthetic construct
  source 1..75: mol_type = other DNA
cataagcgaattaaaaatctgtcagcgtcagttcggctatggaaatgattctggtgtcagagctattattcgata

SEQ ID NO: 228629 - DNA, 75 bp, synthetic construct
  source 1..75: mol_type = other DNA
gcctcaatcgagtcgatatagcatagatgaaaatttcatgttattgaaaaacatgaacaagataatagattatga

SEQ ID NO: 228630 - DNA, 75 bp, synthetic construct
  source 1..75: mol_type = other DNA
tctgcggcgcaccattatggacagatgtggcgcggcaaccgcgtcatgctatcggggagccgaccagtaattatc

SEQ ID NO: 228631 - DNA, 75 bp, synthetic construct
  source 1..75: mol_type = other DNA
tcgtggcgaattccgcaatttccacgtttgcgggagtccagaaaggacaaaaaacctggacggagtttggggcca

SEQ ID NO: 228632 - DNA, 75 bp, synthetic construct
  source 1..75: mol_type = other DNA
aaaaagatatggtaattggtccggtacgtttgctggcgaagagcggcggcaagtcgggtgactttaaggtggaag

SEQ ID NO: 228633 - DNA, 75 bp, synthetic construct
  source 1..75: mol_type = other DNA
gtcgatggtgttactctcgctgaactgattaacaaggtcgctgaaaacggttattcactccgcgtggtggatgaa

SEQ ID NO: 228634 - DNA, 75 bp, synthetic construct
  source 1..75: mol_type = other DNA
gttgccctgtatcgaacaggcccgggaggatgtccgtactcttcgtcacctgcagcttctgcaccagaaccggta

SEQ ID NO: 228635 - DNA, 75 bp, synthetic construct
  source 1..75: mol_type = other DNA
cgacttctgccagccctcatcagttgccggaagacaatacagtgatacagagcgtgatgccattaaccactgaaa

SEQ ID NO: 228636 - DNA, 75 bp, synthetic construct
  source 1..75: mol_type = other DNA
ctctgtttctggcttgcgaagggattcagcaggattttcggatgaagcaggccacgctgtccccacggtatacca

SEQ ID NO: 228637 - DNA, 75 bp, synthetic construct
  source 1..75: mol_type = other DNA
atgccaccattatcgccatgaacagactcgccaaaaatgcaggcctcaaacgaggggtgcctatctttaaatgcc

SEQ ID NO: 228638 - DNA, 75 bp, synthetic construct
  source 1..75: mol_type = other DNA
gaaaacgctcgcaaaattatgcacctacgccagtaagcgatgggcagcaactggtggtgtggtcgtccttacaga

SEQ ID NO: 228639 - DNA, 75 bp, synthetic construct
  source 1..75: mol_type = other DNA
cccgcgtgcgtcgtggtattgaccgcgttattaaccgtacgttcacgctggcgcttctggtctggctgatctgta

SEQ ID NO: 228640 - DNA, 75 bp, synthetic construct
  source 1..75: mol_type = other DNA
aatatagtcaggaattacgcgatgccggacaggagtatattccgcagcttattgatgattattcggaaagcgtta

SEQ ID NO: 228641 - DNA, 75 bp, synthetic construct
  source 1..75: mol_type = other DNA
gctcagcggcacataccgaaattacgcgcgttgctgggcgttgatcgcgagtttcttgaacttagtgaaaaaatc

SEQ ID NO: 228642 - DNA, 75 bp, synthetic construct
  source 1..75: mol_type = other DNA
ggcgagacggtgatcgaagcgaaagagctgaccaaaaagtttggcgattttgccgccaccgatcacgtcaacttt

SEQ ID NO: 228643 - DNA, 75 bp, synthetic construct
  source 1..75: mol_type = other DNA
agaggtcgacggcgcgctgcatgtcagctatgcccctgagccgccgctgcctgagccggtgacgcgccggtcgag

SEQ ID NO: 228644 - DNA, 75 bp, synthetic construct
  source 1..75: mol_type = other DNA
ttcgttatatgtttactaataatgatgatattactgataaatgtattctgagtaatagtgtagcaaagtctaacc

SEQ ID NO: 228645 - DNA, 75 bp, synthetic construct
  source 1..75: mol_type = other DNA
attgtgctggtggcgtctcgccaaagaagccggggcgaatgaagagaagcatgctgctattgctgaacgctacgg

SEQ ID NO: 228646 - DNA, 75 bp, synthetic construct
  source 1..75: mol_type = other DNA
tgcgtttttcttttcgtctctggtgtgcgcgggttctggccgttgccctgaccggaatttcggctgcccgggcgg

SEQ ID NO: 228647 - DNA, 75 bp, synthetic construct
  source 1..75: mol_type = other DNA
ctggggtaaattcggtacaattattgtagtcggtgtcgtcctgattgtggcggtcgtctggctggccggaaaatc

SEQ ID NO: 228648 - DNA, 75 bp, synthetic construct
  source 1..75: mol_type = other DNA
actctcaaaggctatattaatgacggcattgtgattggcgggctggttgcggcagccgtggcctttattgtggtg

SEQ ID NO: 228649 - DNA, 75 bp, synthetic construct
  source 1..75: mol_type = other DNA
caacccgatcccacgatggagcaggcctttattcagttgatccacgactgggataaggagcatagcaatgagtaa

SEQ ID NO: 228650 - DNA, 75 bp, synthetic construct
  source 1..75: mol_type = other DNA
tgatgaccagcccgcacgagggcaaccgcaaactgttgcaacgggcattgaaactgccgcaggtcagcgacggca

SEQ ID NO: 228651 - DNA, 75 bp, synthetic construct
  source 1..75: mol_type = other DNA
tgaacggttatctcaattgcgaagatttaatcgacccggtggtgacctttgccaatagcccggaaagctacatgc

SEQ ID NO: 228652 - DNA, 75 bp, synthetic construct
  source 1..75: mol_type = other DNA
ccacctgggtgcagattgtctacgactggctggatgcgctgaaagatccgaacggcgtcaagacatttattaaca

SEQ ID NO: 228653 - DNA, 75 bp, synthetic construct
  source 1..75: mol_type = other DNA
cccgtaggcgcaacttatcagatcacctcttatccgacccaaaactactcttgtggctcaggggtgttctcggtt

SEQ ID NO: 228654 - DNA, 75 bp, synthetic construct
  source 1..75: mol_type = other DNA
tcaggcagacaccacgggtactgcaggtgtttctggcggtactgagctgactgcgtctggctcggctaaccagat

SEQ ID NO: 228655 - DNA, 75 bp, synthetic construct
  source 1..75: mol_type = other DNA
ggcacctacagcgacgacgacctgcaggcgatgcaggacgaatacgacgaactgggccagcagatgtctgacatg

SEQ ID NO: 228656 - DNA, 75 bp, synthetic construct
  source 1..75: mol_type = other DNA
ctggtcaccgaggtatggttggctctgctatttgccgtcaattatcactgcgtgctgatatcgaattagtggtca

SEQ ID NO: 228657 - DNA, 75 bp, synthetic construct
  source 1..75: mol_type = other DNA
aaacacacaaagaactcgatctaaccgtacagaaggatgttgatgcattttttgagcaagagaaaattgatcagg

SEQ ID NO: 228658 - DNA, 75 bp, synthetic construct
  source 1..75: mol_type = other DNA
gatgtcggtgatcaccaatgcctacgccaacgttgcgtcatcattttttggtgccaagttccagcgtaatattga

SEQ ID NO: 228659 - DNA, 75 bp, synthetic construct
  source 1..75: mol_type = other DNA
tggtagtgttctggtcggctctgttttatcacctgccgttgctggcggaactggaaggcgaacaggccgacggca

SEQ ID NO: 228660 - DNA, 75 bp, synthetic construct
  source 1..75: mol_type = other DNA
aaacagttatgggaaaacagttccatgccggtggatatgtatcagcgcctttgtcttgatcctgtgcatcagttg

SEQ ID NO: 228661 - DNA, 75 bp, synthetic construct
  source 1..75: mol_type = other DNA
ttcctgtgaagacagaatgttctgatgtccggacggatattcccggggaaacggtgccggaggggtattttacac

SEQ ID NO: 228662 - DNA, 75 bp, synthetic construct
  source 1..75: mol_type = other DNA
actgccaggtagtcgagagtccatctggttcacgaaaatggtgcaaatacgagcacaagacaggttgtattgcgt

SEQ ID NO: 228663 - DNA, 75 bp, synthetic construct
  source 1..75: mol_type = other DNA
tattcaatttttacatgctctgtgtgcagcctttacttggattatttctcgtgggttacagtatatggagcttct

SEQ ID NO: 228664 - DNA, 75 bp, synthetic construct
  source 1..75: mol_type = other DNA
aattatgcgtggggaaattatgagtccggtggcacaattacagtgacatgcctcaaccttcctggtgccggaatc

SEQ ID NO: 228665 - DNA, 75 bp, synthetic construct
  source 1..75: mol_type = other DNA
tttgggttggaaatatcgttataatttaaaacaaggactagaattaacatataaatggtttataaataatcttga

SEQ ID NO: 228666 - DNA, 75 bp, synthetic construct
  source 1..75: mol_type = other DNA
caatagaagatttaggcaacggggtcaaaagaaaagttttggctcatggtggcaatatgatggcagtagaggtcc

SEQ ID NO: 228667 - DNA, 75 bp, synthetic construct
  source 1..75: mol_type = other DNA
ttcacttcaagttcaatactggttgtaaaaccgttatccgggctgacggtatgcgtcagagtcgtaatggtccat

SEQ ID NO: 228668 - DNA, 75 bp, synthetic construct
  source 1..75: mol_type = other DNA
ctcacttcgagttcaatgctggttgtaaaaccgttatccgggctgacggtatgtgtcagggtggtaatggtccat

SEQ ID NO: 228669 - DNA, 75 bp, synthetic construct
  source 1..75: mol_type = other DNA
ctcatgaccgcccagctcgacggcgtggtagagcgctgcaatcaacgctggctgaccggagagggcaacgtatga

SEQ ID NO: 228670 - DNA, 75 bp, synthetic construct
  source 1..75: mol_type = other DNA
gcgcaatgtcggccagctcgtcggcgacctgatgcaggtgcaggactgcgccactgttcgtcgtgacccggcgca

SEQ ID NO: 228671 - DNA, 75 bp, synthetic construct
  source 1..75: mol_type = other DNA
gtgacctcgaatgtctggagcatatgcgcaatgtcggccagctcgtcggcgacctgatgcaggtgcaggactgcg

SEQ ID NO: 228672 - DNA, 75 bp, synthetic construct
  source 1..75: mol_type = other DNA
aggcgtttgtcacgctggcagagtccagttcatttaacaacgccgctaaattacttaatattacgcaacctgcat

SEQ ID NO: 228673 - DNA, 75 bp, synthetic construct
  source 1..75: mol_type = other DNA
gaacgtacaactcgcaaggttacgttaacaaaagcaggaaaaatgttactcccggaagcaagggaattaataaaa

SEQ ID NO: 228674 - DNA, 75 bp, synthetic construct
  source 1..75: mol_type = other DNA
aatctatcaaaaatatttttgaaggtagtataccaagtctaaaaaacaataatgaacttaaggaaaaattgtatt

SEQ ID NO: 228675 - DNA, 75 bp, synthetic construct
  source 1..75: mol_type = other DNA
acataatatcaatattgagaacactttattccatttcaagatcatcaatcctcacttcaagctccagactggtcg

SEQ ID NO: 228676 - DNA, 75 bp, synthetic construct
  source 1..75: mol_type = other DNA
gatggcaggaagcgtttcttccctgaacgtttcggtagcgaccggcatttgtttatttgaagcagtacgccagcg

SEQ ID NO: 228677 - DNA, 75 bp, synthetic construct
  source 1..75: mol_type = other DNA
tttattttaaaaggccgtgaagataaacgtctgttgccgctgattcacgcccttgagtccttgggcgtggttatc

SEQ ID NO: 228678 - DNA, 75 bp, synthetic construct
  source 1..75: mol_type = other DNA
gatcttcaccccggaacacttgaatttgagcgccatcgcctgacccgtgctcaggcgacggcgcaggaactgaaa

SEQ ID NO: 228679 - DNA, 75 bp, synthetic construct
  source 1..75: mol_type = other DNA
tgatgggccatatggggcacggtaatatgaatcatatgaaccacggcgggaagttcgatttccaccatgccaata

SEQ ID NO: 228680 - DNA, 75 bp, synthetic construct
  source 1..75: mol_type = other DNA
gcgtgggcgacatgatgctgcatccgttccatatccacggcacgcagttccgtatcttgtcagaaaatggcaaac

SEQ ID NO: 228681 - DNA, 75 bp, synthetic construct
  source 1..75: mol_type = other DNA
cgatcaggcgatggccggaatggatcacagccagatgatgggccatatggggcacggcaatatgaatcatatgaa

SEQ ID NO: 228682 - DNA, 75 bp, synthetic construct
  source 1..75: mol_type = other DNA
gtatttgcggcggaacgcccaacgttaccgatccctgatttgctcacgaccgatgcccgtaatcgcattcagtta

SEQ ID NO: 228683 - DNA, 75 bp, synthetic construct
  source 1..75: mol_type = other DNA
aagcggtaacggttgatatctataaccaactggcggaagagacgacgttgcactggcacgggctggaagtaccgg

SEQ ID NO: 228684 - DNA, 75 bp, synthetic construct
  source 1..75: mol_type = other DNA
tcaatggctgtaatgcccgctcgctcaatttcgccaccagcgacaatcgcccgctgtatgtgattgccagcgacg

SEQ ID NO: 228685 - DNA, 75 bp, synthetic construct
  source 1..75: mol_type = other DNA
gccccgcgcggctggctgcgcctgcgtttgctcaatggctgtaacgcccgctcgctcaatttcgctaccagtgac

SEQ ID NO: 228686 - DNA, 75 bp, synthetic construct
  source 1..75: mol_type = other DNA
cagttccgtatcttgtcagaaaatggcaaaccgccagcgactcatcgcgcgggctggaaagataccgttaaggta

SEQ ID NO: 228687 - DNA, 75 bp, synthetic construct
  source 1..75: mol_type = other DNA
attcctggtatgactttgcatattcaccatcagaacaggaggaagcaaaaagaaaaataaaagaggatttaatga

SEQ ID NO: 228688 - DNA, 75 bp, synthetic construct
  source 1..75: mol_type = other DNA
ggagttcgatgctccccatgctaaagcgttttatgactttatccaacgccgtaattttatatggttactattacg

SEQ ID NO: 228689 - DNA, 75 bp, synthetic construct
  source 1..75: mol_type = other DNA
ctgctgattggtattttcaaatatattgctgatgtttttgattctcgcctgtcagggactatctatctggtgggc

SEQ ID NO: 228690 - DNA, 75 bp, synthetic construct
  source 1..75: mol_type = other DNA
agtctgcccttgaaaaactttgcgcacgtcggggtaatacctggtacccgatttttcatctggctccccctgcgg

SEQ ID NO: 228691 - DNA, 75 bp, synthetic construct
  source 1..75: mol_type = other DNA
agtctgctcttgaaaaactttgtgcacgtcgcggtaatgtctggtacccggtttttcatctggctccgcctgctg

SEQ ID NO: 228692 - DNA, 75 bp, synthetic construct
  source 1..75: mol_type = other DNA
ttattttgcaacatatgaagggatagatgccacattagcgtgcgtttccggagaacatgtcggaataggttatta

SEQ ID NO: 228693 - DNA, 75 bp, synthetic construct
  source 1..75: mol_type = other DNA
gcaagggtaatgaggtgctttatgactctgccgccgtcataaaatggtatgccgaaatctggcggatccggcgcg

SEQ ID NO: 228694 - DNA, 75 bp, synthetic construct
  source 1..75: mol_type = other DNA
aatatagctaaaactactttaacattggcagagtctttttatataatgatggcaccatttgttaataagaaaaaa

SEQ ID NO: 228695 - DNA, 75 bp, synthetic construct
  source 1..75: mol_type = other DNA
ctttatctacgtatatacgccgctgctgcaaagccattttgccactgggctggtggtgggcggcttgtatctggg

SEQ ID NO: 228696 - DNA, 75 bp, synthetic construct
  source 1..75: mol_type = other DNA
tgataatgaaaaatacacaataacgcgagttattgatgtgtgctcactaaggcgttttagttttatatcttataa

SEQ ID NO: 228697 - DNA, 75 bp, synthetic construct
  source 1..75: mol_type = other DNA
ctgaactggaccagagcaacgggcggtggatctgtgaaaacacggggatgtggacccgtgacggtctgacgtttt

SEQ ID NO: 228698 - DNA, 75 bp, synthetic construct
  source 1..75: mol_type = other DNA
ccatacgcggctcgacgcccaaaaccaaaggcacctgccagatcgaaaaagccgctaacgagtcggcgcatttca

SEQ ID NO: 228699 - DNA, 75 bp, synthetic construct
  source 1..75: mol_type = other DNA
ttaattcttaatccacagtgctatgcccatcatgatgagacatctttaattacagttaatattacaagagaggat

SEQ ID NO: 228700 - DNA, 75 bp, synthetic construct
  source 1..75: mol_type = other DNA
tgcctgggtggtgcggcagcaaaaaactaccgtgaaaaatccgtggacgtggtctgctatgacgaactttcctcg

SEQ ID NO: 228701 - DNA, 75 bp, synthetic construct
  source 1..75: mol_type = other DNA
atcggtagtgggtacgcgtttacaaatcaatgaagaaaaccgtgattatctggcggggaaggccattgcctgcgc

SEQ ID NO: 228702 - DNA, 75 bp, synthetic construct
  source 1..75: mol_type = other DNA
ccctgacacgggctattgatattctcaatttgattgcccgcattggcccctgtagcgccgcgacaatcatcgaca

SEQ ID NO: 228703 - DNA, 75 bp, synthetic construct
  source 1..75: mol_type = other DNA
catcatggctgcgtgatccatcagtctgagcttgaccagagtaacgggcggtggatctgtgaaaacacgggtatg

SEQ ID NO: 228704 - DNA, 75 bp, synthetic construct
  source 1..75: mol_type = other DNA
tgatgaaattccgccgccgcgctccatcacgttccatatctggacggcgtacagtccgttcaccacctgggtaca

SEQ ID NO: 228705 - DNA, 75 bp, synthetic construct
  source 1..75: mol_type = other DNA
ttttctacctctgtgaacatcatggctgcgtgatccatcagtctgagcttgaccagagcaacgggcggtggatct

SEQ ID NO: 228706 - DNA, 75 bp, synthetic construct
  source 1..75: mol_type = other DNA
aaccaccctggtggccgggattgtattgatcaaatcaggtacccgtaaagcgcgtaaacctgaactggaggtgaa

SEQ ID NO: 228707 - DNA, 75 bp, synthetic construct
  source 1..75: mol_type = other DNA
atggctgttgtgcaacaggcacaacgtaatctctgtctggaaagttatgaccgtatagaacaaacgttaaaacat

SEQ ID NO: 228708 - DNA, 75 bp, synthetic construct
  source 1..75: mol_type = other DNA
ggggcggaagtagttatgtcccgtagcaaggttaagatttgctcttgtgtgtggggaaccttagtcaattacttt

SEQ ID NO: 228709 - DNA, 75 bp, synthetic construct
  source 1..75: mol_type = other DNA
ctgatcaaaattattatctgcctaaagaatcgtcatacggtgatggggaatggaaaacactgccgttccaggtcg

SEQ ID NO: 228710 - DNA, 75 bp, synthetic construct
  source 1..75: mol_type = other DNA
atcgatggtgaaatcgtgtatcagagatcaaaaaaacacggtgttttccgggtgctgccggtgaaaggtgcttca

SEQ ID NO: 228711 - DNA, 75 bp, synthetic construct
  source 1..75: mol_type = other DNA
tgcgtttttatgtgccctgcccgcactgtggggaggagcagtatctgaaatttggcgatgaatccacgccttttg

SEQ ID NO: 228712 - DNA, 75 bp, synthetic construct
  source 1..75: mol_type = other DNA
tttcccgtgtctgctgggacaccggggggatcgatggtgaaatcgtctaccagaggtcaaaaaacacggtgtttt

SEQ ID NO: 228713 - DNA, 75 bp, synthetic construct
  source 1..75: mol_type = other DNA
gtgccatgtctgaaagacctttttccatggctggggcgtaaacatcgtgacaatactctcacgctgaaacgcttt

SEQ ID NO: 228714 - DNA, 75 bp, synthetic construct
  source 1..75: mol_type = other DNA
ccgggcctaagcgcggcgatgaaagataacctcgaatttattaatacccacccgaatctggtcggattcctgatg

SEQ ID NO: 228715 - DNA, 75 bp, synthetic construct
  source 1..75: mol_type = other DNA
accttgaagcgctggcgagggcacgaagagatgagcaggatgaggatgatatgagcatggaagagatcgcggctg

SEQ ID NO: 228716 - DNA, 75 bp, synthetic construct
  source 1..75: mol_type = other DNA
tttatgtctggggctgggctcctggcgaagaagcttttctgattgacaagcagatcatcatggggagaccggaag

SEQ ID NO: 228717 - DNA, 75 bp, synthetic construct
  source 1..75: mol_type = other DNA
ggctgtggcagaaaaactgagctttgagttattgctggaaaaagtctgccactatgatgcgcaggttcccctgcg

SEQ ID NO: 228718 - DNA, 75 bp, synthetic construct
  source 1..75: mol_type = other DNA
gtggtcttgcagcgggttctgcatttttattcctttttgccccaacggcattcgcggcggaacaaaccgttgaag

SEQ ID NO: 228719 - DNA, 75 bp, synthetic construct
  source 1..75: mol_type = other DNA
atgacgcctgtattgcgctggccgattacgttgccgggagccaggagtcattcattggtttgatgaatggttatg

SEQ ID NO: 228720 - DNA, 75 bp, synthetic construct
  source 1..75: mol_type = other DNA
cgcgttaccggcgagctgattgcgcatcacttcgtcaacaaaacacagtacaaagattacgccattctctatcgc

SEQ ID NO: 228721 - DNA, 75 bp, synthetic construct
  source 1..75: mol_type = other DNA
gcggcggtgacctttactaataaagcagcgcgcgagatgaaagagcgtgtagggcagacgctggggcgtaaagag

SEQ ID NO: 228722 - DNA, 75 bp, synthetic construct
  source 1..75: mol_type = other DNA
caaagattacgccattctttatcgtggtaaccatcagtcgcgggtgtttgaaaaattcctgatgcaaaaccgcat

SEQ ID NO: 228723 - DNA, 75 bp, synthetic construct
  source 1..75: mol_type = other DNA
gacgcctatctgaaagacggtaaacctgctggcgtgactctctatcaactcactcgctcacagtatgaggagcta

SEQ ID NO: 228724 - DNA, 75 bp, synthetic construct
  source 1..75: mol_type = other DNA
cgatgaagcttgcagaattcctaaataatccagaaaacacaggaaacatcgtagataaaggtgacatctacgtca

SEQ ID NO: 228725 - DNA, 75 bp, synthetic construct
  source 1..75: mol_type = other DNA
attatgtgcaggtagaaggcattcccacacaagacgcacttgaagccttgcgcaatggcgtaaccttaaatgatg

SEQ ID NO: 228726 - DNA, 75 bp, synthetic construct
  source 1..75: mol_type = other DNA
tacctcatgaccgcccagctagacagcgtggtcgagcgctgcaatcagcactggctgaccggggagggtaatgta

SEQ ID NO: 228727 - DNA, 75 bp, synthetic construct
  source 1..75: mol_type = other DNA
gagctgatgcaggtgcaggactgtacggccgttcgtcgtgaccctgctcagcagtcacagctcacctccgtgatt

SEQ ID NO: 228728 - DNA, 75 bp, synthetic construct
  source 1..75: mol_type = other DNA
atgaaacacatcaccattaccgcccgtgatctcgaatgccttgagcacatgcgcaacatcggccagctcgtcaat

SEQ ID NO: 228729 - DNA, 75 bp, synthetic construct
  source 1..75: mol_type = other DNA
caggtgcaactgatgactctgcacgcgtcaaaagggctggagtttccttatgtctacatggtcggtatggaagaa

SEQ ID NO: 228730 - DNA, 75 bp, synthetic construct
  source 1..75: mol_type = other DNA
ggctggcagaaatccagcgtctggcggagcgggagccgattgccgcggtgcgcgatctgatccacggcatggatt

SEQ ID NO: 228731 - DNA, 75 bp, synthetic construct
  source 1..75: mol_type = other DNA
ccgatatgccctttgcgctgctgcttctcgcgcccagcttattactgctggggggtctggtggcctggccaatgg

SEQ ID NO: 228732 - DNA, 75 bp, synthetic construct
  source 1..75: mol_type = other DNA
agatgtggtaagccagttggcgtaacgctttatcagttaactcggcaacaatataaggaactcagcgaatgttaa

SEQ ID NO: 228733 - DNA, 75 bp, synthetic construct
  source 1..75: mol_type = other DNA
atggtgattgggcagacaaaccctggcgtggcacaggggaatattatgccaatatcagttatctggatgcacagg

SEQ ID NO: 228734 - DNA, 75 bp, synthetic construct
  source 1..75: mol_type = other DNA
ttttattgagcataaatcccgtaacagcctgctcttccagccgacagattccgcagctgaagattttatgaaagc

SEQ ID NO: 228735 - DNA, 75 bp, synthetic construct
  source 1..75: mol_type = other DNA
taagcctttcttcctttatgtcgcttttaccgaagtgcatagccccctggcttcgcccaaaaaatacctcgacat

SEQ ID NO: 228736 - DNA, 75 bp, synthetic construct
  source 1..75: mol_type = other DNA
caaatttactgactactatgcccccgcccctttaagttcaccttcacgcgctgggctattaaccggccggatgcc

SEQ ID NO: 228737 - DNA, 75 bp, synthetic construct
  source 1..75: mol_type = other DNA
atttcgtacaggtattcgctcatggatcccggcgggaaaagatgtggcgctggggcgtaatgaattaaccattgc

SEQ ID NO: 228738 - DNA, 75 bp, synthetic construct
  source 1..75: mol_type = other DNA
cacacaagacgcacttgaagccttgcgcaatggcgtaaccttaaatgatggccctaccctgcccgcaggcgtaga

SEQ ID NO: 228739 - DNA, 75 bp, synthetic construct
  source 1..75: mol_type = other DNA
aacgtaaaagtattcccaccagctggctgaagattactttatatgaaggacgtaatcgccaggtgcgccgcatga

SEQ ID NO: 228740 - DNA, 75 bp, synthetic construct
  source 1..75: mol_type = other DNA
ccgggtaaacgcaccggaaaaatctattatgtgcaggtggaaggtattcccacacaagacgcacttgaagccttg

SEQ ID NO: 228741 - DNA, 75 bp, synthetic construct
  source 1..75: mol_type = other DNA
ggtatatgcttatgccgccctgcgcgtttcggtacagcggtggcaactggaccttgacgcgctggcgaggtcacg

SEQ ID NO: 228742 - DNA, 75 bp, synthetic construct
  source 1..75: mol_type = other DNA
tggaaaacactgccgttccaggtcgccattatgaacagcatggggcacgacaggatccgcactgttaatctgatt

SEQ ID NO: 228743 - DNA, 75 bp, synthetic construct
  source 1..75: mol_type = other DNA
aaatcaataaaaaaggcgaggatgtcaatattggctggcatgcactggcgaaagcctacgggaacggaaagcaaa

SEQ ID NO: 228744 - DNA, 75 bp, synthetic construct
  source 1..75: mol_type = other DNA
gtgcctgccttacacatcaacaccggcggggatatgttgctccacattcattgcgcccataacggactcgttctg

SEQ ID NO: 228745 - DNA, 75 bp, synthetic construct
  source 1..75: mol_type = other DNA
cgttatctcggaatcaaagagaacatccctcacctccttgtagagcctgatgcttccttaccttcgctcgctaaa

SEQ ID NO: 228746 - DNA, 75 bp, synthetic construct
  source 1..75: mol_type = other DNA
cgtttcaacggcagaattgcaggatgccacacccgccgcgctggtggcgcatgtgacatcgcgcaaatgctacgg

SEQ ID NO: 228747 - DNA, 75 bp, synthetic construct
  source 1..75: mol_type = other DNA
ctgatgaaccgtaagttctcggaagaagcagcaagctggatgcaggaacaacgtgccagcgcttatgtgaaaatt

SEQ ID NO: 228748 - DNA, 75 bp, synthetic construct
  source 1..75: mol_type = other DNA
ctgatgaaccgtaagttctcggaagaagcagcaagctggatgcaggaacaacgtgccagcgcctacgttaaaatc

SEQ ID NO: 228749 - DNA, 75 bp, synthetic construct
  source 1..75: mol_type = other DNA
tgccgaaattattcatatcggtcaggcgattatggaacagaaaggtggcggcaacaccattgagtacttcgttaa

SEQ ID NO: 228750 - DNA, 75 bp, synthetic construct
  source 1..75: mol_type = other DNA
accagtacccgcaggaacgccggaaggagcaagccgaaatcgagaagaaacggattgaggctcttaacaagcggc

SEQ ID NO: 228751 - DNA, 75 bp, synthetic construct
  source 1..75: mol_type = other DNA
acggatgaaaacggtaatacctcttctgaatccgtcagtgttgctcttgacccggaaaatgagcttgaacgctgg

SEQ ID NO: 228752 - DNA, 75 bp, synthetic construct
  source 1..75: mol_type = other DNA
ctttcaatcgtcagagctattgtcagtggtgagcgcgatccttcagtattgatccagtatcgtgatgtcagatgt

SEQ ID NO: 228753 - DNA, 75 bp, synthetic construct
  source 1..75: mol_type = other DNA
gcgctaccgtaatcgcgtactcgacgggcttaaacgaagggcaaaatcactgggttactctctccagcaagatcc

SEQ ID NO: 228754 - DNA, 75 bp, synthetic construct
  source 1..75: mol_type = other DNA
aggaaaagatccgtgaatgtgacgatcaaatcgaaaattcattaatacagctcagcaccgggactgaaaatcctg

SEQ ID NO: 228755 - DNA, 75 bp, synthetic construct
  source 1..75: mol_type = other DNA
cacgctgccaacgtggttggtctgaccgatcagaccgatctcttctacaccatgaaagccgcgctgggtctgtag

SEQ ID NO: 228756 - DNA, 75 bp, synthetic construct
  source 1..75: mol_type = other DNA
agtctgggagtaagtcgcctctctgcggtggcggttatcgcaaccacaatgtccattgagtgggggattctggaa

SEQ ID NO: 228757 - DNA, 75 bp, synthetic construct
  source 1..75: mol_type = other DNA
agcggttgtaatgattatgccgatgcattttgccacgacgctagcgcgcgcggtttcgccgattactgcggtggt

SEQ ID NO: 228758 - DNA, 75 bp, synthetic construct
  source 1..75: mol_type = other DNA
gaacaacccatgcgtcagtgggtgttgagcttcccgtttcagctgcgtttcctgtttggggtcgtttgcgggaag

SEQ ID NO: 228759 - DNA, 75 bp, synthetic construct
  source 1..75: mol_type = other DNA
attgcggtcacggttggtgcaatcggtatcgcctgttttactgccttacacctgatcaagaaaacgccacgcaag

SEQ ID NO: 228760 - DNA, 75 bp, synthetic construct
  source 1..75: mol_type = other DNA
attgccgtcacggttggcgctatcggtgtcgcctgttttactgccttacaactgatcaagaaaacgccacgcaag

SEQ ID NO: 228761 - DNA, 75 bp, synthetic construct
  source 1..75: mol_type = other DNA
ttttttgataccgatttgcatttcatttgataccgctgaaaaacgccgatacgcaacttatttgatactaaatcg

SEQ ID NO: 228762 - DNA, 75 bp, synthetic construct
  source 1..75: mol_type = other DNA
ccctgttaccgttactgtttacccctgtgacaaaagcccggataccagagatgcctgttctggaaaatcgagctg

SEQ ID NO: 228763 - DNA, 75 bp, synthetic construct
  source 1..75: mol_type = other DNA
atgatctcatatcagggacttgttcgcaccttccttagcgataaacctgcaaaaaatattattttgctgattggc

SEQ ID NO: 228764 - DNA, 75 bp, synthetic construct
  source 1..75: mol_type = other DNA
gaaaaggatcgattaccgaacagctgcttaacgctcgtgccgacgttacgcttggcggcggcgcaaaaacctttg

SEQ ID NO: 228765 - DNA, 75 bp, synthetic construct
  source 1..75: mol_type = other DNA
ggccagcgatattctccggtgagattgatgtgttcccaggggataggagaagtcgcttgatatctagtatgacgt

SEQ ID NO: 228766 - DNA, 75 bp, synthetic construct
  source 1..75: mol_type = other DNA
gcgtcaaaacctataacggcgctctgggcgttgatattcacgaaaaggatcaccccaccattctggaaatggcaa

SEQ ID NO: 228767 - DNA, 75 bp, synthetic construct
  source 1..75: mol_type = other DNA
gaatttgccaaaaaagatggtaacaccctggtagtggtaacggctgaccatgctcacgccagccaaattgtcccg

SEQ ID NO: 228768 - DNA, 75 bp, synthetic construct
  source 1..75: mol_type = other DNA
gtacaacgattatatctcagcgatcgcctatgcacgggcggaagaagaatgggagagaaaattctccccctgtcc

SEQ ID NO: 228769 - DNA, 75 bp, synthetic construct
  source 1..75: mol_type = other DNA
tcactactgccggagccgcaaagctggcagccgccactgtccccggcgggaaaaaagtaaccctgtctgcaatgg

SEQ ID NO: 228770 - DNA, 75 bp, synthetic construct
  source 1..75: mol_type = other DNA
tttttcagtgcttacagaagttggaaataacgaatataaggacagtcgttttgttttatgtgggttaaatggcaa

SEQ ID NO: 228771 - DNA, 75 bp, synthetic construct
  source 1..75: mol_type = other DNA
gccggaacaggcgcaagcagagggaaataattgtctcgatttacgtatatggttcgcagaagttcaatacactcc

SEQ ID NO: 228772 - DNA, 75 bp, synthetic construct
  source 1..75: mol_type = other DNA
gcattttcatggctatgcttaactggtagatattacaaaaatagcacatccttgccaaggaaaagaaaagataac

SEQ ID NO: 228773 - DNA, 75 bp, synthetic construct
  source 1..75: mol_type = other DNA
cactggctgattttcagcgagcattaaagaataaatacggtcttggcgaaggcgacagctacaagccatggcttc

SEQ ID NO: 228774 - DNA, 75 bp, synthetic construct
  source 1..75: mol_type = other DNA
atgcctggacctaaaaagaatgcagaaggtctgatcaccgagcgcggcgacatggtggtttacgtggcagggttc

SEQ ID NO: 228775 - DNA, 75 bp, synthetic construct
  source 1..75: mol_type = other DNA
ttccttgcgggttacggcatcaagttctacctcatctgtcaggatattaaccagctgcgtagccgtgagacaggt

SEQ ID NO: 228776 - DNA, 75 bp, synthetic construct
  source 1..75: mol_type = other DNA
ttggtttttctgtccagggaaccaaaagggtacagacgaagaaaacctacaaacatcgtcttctggctatgatcg

SEQ ID NO: 228777 - DNA, 75 bp, synthetic construct
  source 1..75: mol_type = other DNA
ttctgcaacttccggtgattaatgcagtgagtgccattcagcgtcagggcaatacactggtgattgaacgcacgc

SEQ ID NO: 228778 - DNA, 75 bp, synthetic construct
  source 1..75: mol_type = other DNA
cgaatcatgctgaacatgattgttcgcctgctggccgataagatggagtttgagcgcgtcgataacaaccttacg

SEQ ID NO: 228779 - DNA, 75 bp, synthetic construct
  source 1..75: mol_type = other DNA
ctccatgtactttacaagcacaaaaatgaaggtacgccagcaacgcttccgtatgttgactccatcatggccgac

SEQ ID NO: 228780 - DNA, 75 bp, synthetic construct
  source 1..75: mol_type = other DNA
aaaaagcgcgctggaataccttcgacagcctgtgtctggtattcagtgtggcgacattttttgttgctcccgtgc

SEQ ID NO: 228781 - DNA, 75 bp, synthetic construct
  source 1..75: mol_type = other DNA
aatacaccttcagcaccgctgagccggaagagatgacggtaatcagtggcgcgctgaatgtgttactgcctgacg

SEQ ID NO: 228782 - DNA, 75 bp, synthetic construct
  source 1..75: mol_type = other DNA
agtacagccgccagacaattgccgccagctcacgggcggcaggttgatgatgacgggcaaggctgtcgcaaatcc

SEQ ID NO: 228783 - DNA, 75 bp, synthetic construct
  source 1..75: mol_type = other DNA
gaaacacaggccagacagatggcggcacgtctggaatgcggtggggtgtttatcaatggttattgtgccagcgat

SEQ ID NO: 228784 - DNA, 75 bp, synthetic construct
  source 1..75: mol_type = other DNA
tatacctggttcggcttcagtcagttaaagaaaattcccagcgtctttgtgatgaacggtatgcaggagactctt

SEQ ID NO: 228785 - DNA, 75 bp, synthetic construct
  source 1..75: mol_type = other DNA
gagcaaatacattgcttggtgtaccagtcgataaacggtttgttttacgcctgggtaaacaagtagtgggtattg

SEQ ID NO: 228786 - DNA, 75 bp, synthetic construct
  source 1..75: mol_type = other DNA
gagattacgtcttggaaggcgcagcctgtcggacagattcaatacttggtacttgatgcgacctatgaatcggtt

SEQ ID NO: 228787 - DNA, 75 bp, synthetic construct
  source 1..75: mol_type = other DNA
tcactgccgttaagccgaagtatcagacctatgtggtggtgatcggtgaaagcgcgcgtcgcgatgccctcggtg

SEQ ID NO: 228788 - DNA, 75 bp, synthetic construct
  source 1..75: mol_type = other DNA
tccgcaggcctgcgaccggacacaaggcaaatatgaaacctttgtgcaatcgaaagaaacgtcgtgctatctcta

SEQ ID NO: 228789 - DNA, 75 bp, synthetic construct
  source 1..75: mol_type = other DNA
aacctatgtcgtcgtcattggcgaaagtgcacgtcgcgatgccctcggcgcctttggcggtcactggaacaatac

SEQ ID NO: 228790 - DNA, 75 bp, synthetic construct
  source 1..75: mol_type = other DNA
cttttgctatggcggacattgcctcgcgtgcaaaaagtcctggtcggcgtcagttcgttagtggcagcctgttat

SEQ ID NO: 228791 - DNA, 75 bp, synthetic construct
  source 1..75: mol_type = other DNA
ctcggaaccgatattttcgacccgaagccttaaaaacaaaaatccgccccgagaggcggattttttatatcacca

SEQ ID NO: 228792 - DNA, 75 bp, synthetic construct
  source 1..75: mol_type = other DNA
cagcctgtgtctggtattcagcgtggcgacattttttgtcgctccggttcaaaacctggcctggggcggcgtatt

SEQ ID NO: 228793 - DNA, 75 bp, synthetic construct
  source 1..75: mol_type = other DNA
caccacctttaactacccgacgatggcggaagcctatcgggtagctgcgttaaacggtttaaaccgcctgtttta

SEQ ID NO: 228794 - DNA, 75 bp, synthetic construct
  source 1..75: mol_type = other DNA
ctggagtgatcggctgtgaatatgcgtcgatcttccgcggtatggatgtaaaagtggatctgatcaacacccgcg

SEQ ID NO: 228795 - DNA, 75 bp, synthetic construct
  source 1..75: mol_type = other DNA
gttccccgatggttggtactttctaccgcaccccaagcccggacgcgaaagcgttcatcgaagtgggtcagaaag

SEQ ID NO: 228796 - DNA, 75 bp, synthetic construct
  source 1..75: mol_type = other DNA
tgtctgtccagaaagatggtcgcagaattgaatatacggcggcttctctggatgagcttaaccgggcgatcaatg

SEQ ID NO: 228797 - DNA, 75 bp, synthetic construct
  source 1..75: mol_type = other DNA
tttctaaacgtgtaggtctttctccaacgccgtgccttgagcgtgtgcgtcgactggaaagacaagggtttattc

SEQ ID NO: 228798 - DNA, 75 bp, synthetic construct
  source 1..75: mol_type = other DNA
aatatacggcggcttctctggatgagcttaaccgggcgatcaatgatgcggagtcggtactggggacaacccgcc

SEQ ID NO: 228799 - DNA, 75 bp, synthetic construct
  source 1..75: mol_type = other DNA
aattagataacgataatacgctttctgctgccctgctcgatttcttcaatgaaatgaatgaggacggcacactgg

SEQ ID NO: 228800 - DNA, 75 bp, synthetic construct
  source 1..75: mol_type = other DNA
tcaacggcaaacccttcgggctggattatgaactggccaaacagtttgctgactatcttggcgttaaactgaaag

SEQ ID NO: 228801 - DNA, 75 bp, synthetic construct
  source 1..75: mol_type = other DNA
atgagtaaacctttcactattattacgttttttcaagctgggacgcgcacgacacagagaattaaccaattgaaa

SEQ ID NO: 228802 - DNA, 75 bp, synthetic construct
  source 1..75: mol_type = other DNA
atcgataccgacgcgccgctgtttggcgacggtttagggctggactctatcgatgccctggaactgggactggca

SEQ ID NO: 228803 - DNA, 75 bp, synthetic construct
  source 1..75: mol_type = other DNA
atgcaagcgctttatctggaaattaaaaaccttatcatcagcaccctcaatctggacgagttgactcctgatgat

SEQ ID NO: 228804 - DNA, 75 bp, synthetic construct
  source 1..75: mol_type = other DNA
cggatctggtttgccctcgctgcgtacaatatgggctatgcgcatatgctggatgcccgcgccctgaacggcaaa

SEQ ID NO: 228805 - DNA, 75 bp, synthetic construct
  source 1..75: mol_type = other DNA
tggtcgttcactgctgctgctgcaaaaagtgggcttgatcaaactgaaagatggcgttggcctgctgccgaccgt

SEQ ID NO: 228806 - DNA, 75 bp, synthetic construct
  source 1..75: mol_type = other DNA
ctctgcaacgggaagcgcaggaacaaaaacgaggtttatgggctgacagtaatccggttccaccgtgggaatggc

SEQ ID NO: 228807 - DNA, 75 bp, synthetic construct
  source 1..75: mol_type = other DNA
tcgatgcccctgaaaagaaacaggctttcgggcactggtcagcaaatcagcttaaagctctgctcgcaggacaat

SEQ ID NO: 228808 - DNA, 75 bp, synthetic construct
  source 1..75: mol_type = other DNA
ttaccggctctgcaacaggaagcacagacacagaagcgcggcctgtgggctgatcctaatcctgtccccccgtgg

SEQ ID NO: 228809 - DNA, 75 bp, synthetic construct
  source 1..75: mol_type = other DNA
cgaatccgtcgatgccatccgacgctgggagccccgctgccagcttatgtcagttaaacccgccgtcgacggcga

SEQ ID NO: 228810 - DNA, 75 bp, synthetic construct
  source 1..75: mol_type = other DNA
gggaaagttattcgcgttctcgatggcgacaccatagaaattaaaacactacccgcaaaaattgttgtgtatgaa

SEQ ID NO: 228811 - DNA, 75 bp, synthetic construct
  source 1..75: mol_type = other DNA
aaagcggatatcgccatcatcgctaccgcgcagaatggcaacaaaatgaccaaaaactatcgtgccagctacaac

SEQ ID NO: 228812 - DNA, 75 bp, synthetic construct
  source 1..75: mol_type = other DNA
gaagcagcaaacaaagtgtttaacggcggagctgttaaaggctgggaatttttaggctgtttccacaatttgtaa

SEQ ID NO: 228813 - DNA, 75 bp, synthetic construct
  source 1..75: mol_type = other DNA
cggcagtgggagctctgattggatctctggcactggtaggctgtggcccggatgaaaaagatccgaatcacatta

SEQ ID NO: 228814 - DNA, 75 bp, synthetic construct
  source 1..75: mol_type = other DNA
aaagtgggcttgatcaaactgaaagatggcgttggcctgctgccgaccgttcttgatgttgttgagaacccaaaa

SEQ ID NO: 228815 - DNA, 75 bp, synthetic construct
  source 1..75: mol_type = other DNA
atgaagaatgatgagctggccacacgacgcgctgaggcgatagccggcgatcggtgcttcacgaaagggcgcctg

SEQ ID NO: 228816 - DNA, 75 bp, synthetic construct
  source 1..75: mol_type = other DNA
aggttatgaaactttactgaatactgacctgcgtcaggaacgtgaacagcttggtcgctttatgcagatggttgt

SEQ ID NO: 228817 - DNA, 75 bp, synthetic construct
  source 1..75: mol_type = other DNA
cgactatgttctgccaaacgaagcattgagcaaaggcgatatcgacgctaacgctttccagcacaaaccgtacct

SEQ ID NO: 228818 - DNA, 75 bp, synthetic construct
  source 1..75: mol_type = other DNA
tgcgacagcggcatgatcccgtggctgctggtcgccgaactggtgtgcctgaaaggaaaaacgctgggcgaactg

SEQ ID NO: 228819 - DNA, 75 bp, synthetic construct
  source 1..75: mol_type = other DNA
tggctgaatgcgcagcaacaatcccgtgtgagtcagtggctaggggagtatacgcagcagaggttgtcgctggcg

SEQ ID NO: 228820 - DNA, 75 bp, synthetic construct
  source 1..75: mol_type = other DNA
ggcgcaaattcagtgttaaaaccagaaatcacacgcggattcgaatattctgactgttgggtagatgatgcccgt

SEQ ID NO: 228821 - DNA, 75 bp, synthetic construct
  source 1..75: mol_type = other DNA
cgatagcgtgggaatgcggtgaaaacataatcctgtttaaccctgacacagttgaagcatacgcaaaacgtgcgg

SEQ ID NO: 228822 - DNA, 75 bp, synthetic construct
  source 1..75: mol_type = other DNA
cagaaacggttgggctcttgcgtatagtgattatgctgaaggctggaacgactgccgcgccaccatgcttaaggg

SEQ ID NO: 228823 - DNA, 75 bp, synthetic construct
  source 1..75: mol_type = other DNA
gctggctatgtaaacactctgtccgctgatttggtgagagataatgtcgaacgtattttggagggagaaatgatt

SEQ ID NO: 228824 - DNA, 75 bp, synthetic construct
  source 1..75: mol_type = other DNA
tccgcatctgcgcccggcgtggatgattcgcattggtctgtttatgtacgatcatctgggtaaacgcaccagcct

SEQ ID NO: 228825 - DNA, 75 bp, synthetic construct
  source 1..75: mol_type = other DNA
gtcgccgaactggtgtgcctgaaaggaaaaacgctgggcgaactggtgcgcgaccggatggcggcattcccggca

SEQ ID NO: 228826 - DNA, 75 bp, synthetic construct
  source 1..75: mol_type = other DNA
ttaatgcatggagaaatgccgtctctatatgggaccctgtttgtcgagaaatttttgatgatctaataaaacctc

SEQ ID NO: 228827 - DNA, 75 bp, synthetic construct
  source 1..75: mol_type = other DNA
attggcccggcatggacgaaagagagtgtgctaccgggtggcgccattgaaggcgaccgcgacgattatgccgct

SEQ ID NO: 228828 - DNA, 75 bp, synthetic construct
  source 1..75: mol_type = other DNA
tgaccgaatcgctggcacgtcactacgcgcgcacttacggcagcaacagcgaactgctgctcggcaatgcggggg

SEQ ID NO: 228829 - DNA, 75 bp, synthetic construct
  source 1..75: mol_type = other DNA
gggtgaaacagttcttcgacgacgggatgcatctgccctcaccttatggcattcgcctgatcaaaggcagccata

SEQ ID NO: 228830 - DNA, 75 bp, synthetic construct
  source 1..75: mol_type = other DNA
gggggtatgtgtgttgacgggttcggtgagtatgtgggtcactcgctgcctgatggaacgcaccagctttacact

SEQ ID NO: 228831 - DNA, 75 bp, synthetic construct
  source 1..75: mol_type = other DNA
cgccgtgccgttccccgggctgccgccacgacacttaaccgtgtggcggagtccatcatcgcgaaaacggcctct

SEQ ID NO: 228832 - DNA, 75 bp, synthetic construct
  source 1..75: mol_type = other DNA
tccgcctgcaacgggccagcgcagacagggtttatgcgaaggtcatcatcaacaccggtaatctgcccgccataa

SEQ ID NO: 228833 - DNA, 75 bp, synthetic construct
  source 1..75: mol_type = other DNA
aaaaatgaccgttttgttatctccctttgccacggtccggcggcttttctggcacttcgccgcagcgataaccca

SEQ ID NO: 228834 - DNA, 75 bp, synthetic construct
  source 1..75: mol_type = other DNA
ccaaaaataccgcgcaaagtctggggattaccgatcgcaccgatgccgagcaaagcctcagcggcggcgtgcgtt

SEQ ID NO: 228835 - DNA, 75 bp, synthetic construct
  source 1..75: mol_type = other DNA
gctcgcggtcgctctctggccatccattccctggtttggtaaagccgacaaccgtatcgccgccattcaagcgcg

SEQ ID NO: 228836 - DNA, 75 bp, synthetic construct
  source 1..75: mol_type = other DNA
cgtgcgatcaatgatgctgagttggtactggggacaacccgccgtcgccgtcgtccgctgggagtgaggttatga

SEQ ID NO: 228837 - DNA, 75 bp, synthetic construct
  source 1..75: mol_type = other DNA
cactcgtcaaacacaagctgggactgatgcgtgagcaagatatcagcaccaagcgctttcgcgaacttgcttccg

SEQ ID NO: 228838 - DNA, 75 bp, synthetic construct
  source 1..75: mol_type = other DNA
agcagcgtcgccatgatatgggctcggtgcgccaggttattgatctggacgtcgggctgtttcaattagccggac

SEQ ID NO: 228839 - DNA, 75 bp, synthetic construct
  source 1..75: mol_type = other DNA
atcacggctggtgggtcgtcagccatgaacaaaaattatggttgccgaagggagaattgccatatggcgaagcgg

SEQ ID NO: 228840 - DNA, 75 bp, synthetic construct
  source 1..75: mol_type = other DNA
cagcaataacattagctacaatagtatttaatttaatagataagtttaactcccgtaagaaaacaccatcagatc

SEQ ID NO: 228841 - DNA, 75 bp, synthetic construct
  source 1..75: mol_type = other DNA
gggtgcatagcaggtacatcgataacactagcagcgatagtttttaatctgatcgataagtttaattctcgtaaa

SEQ ID NO: 228842 - DNA, 75 bp, synthetic construct
  source 1..75: mol_type = other DNA
gtgctatcgcgcggcccggatgaactgattgtggtgattgatgaccagttcgagcaggcactgccgcaacaaacg

SEQ ID NO: 228843 - DNA, 75 bp, synthetic construct
  source 1..75: mol_type = other DNA
gtcacattttaaaattaaagacctgatgaaccatgacgatccggtttccctgtacatcgtcactcagccaaacga

SEQ ID NO: 228844 - DNA, 75 bp, synthetic construct
  source 1..75: mol_type = other DNA
ggactgggtggatcagtcgctgattaaatatgatgaaaatggcaatccgtggtcggcttacggcggtgattttgg

SEQ ID NO: 228845 - DNA, 75 bp, synthetic construct
  source 1..75: mol_type = other DNA
gcctgggtcgaacgctggaaggcggcgggccattaccaggccgaagcggcgttgttgcagtgcacggcagataca

SEQ ID NO: 228846 - DNA, 75 bp, synthetic construct
  source 1..75: mol_type = other DNA
gcagcggctaagaataaagcacagaatgataaattcacgtttaatggagttgaattcacaacaacaactgcagcg

SEQ ID NO: 228847 - DNA, 75 bp, synthetic construct
  source 1..75: mol_type = other DNA
ctcattggctggaaaggagaaccgctgacagaaactacacttacattgttgatgaaatcgctcacgaaggaccac

SEQ ID NO: 228848 - DNA, 75 bp, synthetic construct
  source 1..75: mol_type = other DNA
ctcattggctggaaaggagaaccgctgacagaaaaaggcacttgtagattcaatctgtcaatgcaacaccccttt

SEQ ID NO: 228849 - DNA, 75 bp, synthetic construct
  source 1..75: mol_type = other DNA
tctgttgagacggcggcggcgatgttgcgtggtaatccgggcaaacggctgattaaccgttcagtagaacgagct

SEQ ID NO: 228850 - DNA, 75 bp, synthetic construct
  source 1..75: mol_type = other DNA
atgaccaaagaccatgcacaaggtgtatttatccgttttattgattttcgcggtgaactgttattacgcgcatca

SEQ ID NO: 228851 - DNA, 75 bp, synthetic construct
  source 1..75: mol_type = other DNA
gaacttccgtaccagaccgtacgcgaaatcattagcgaagctgaaaaggcacgtcaggttaatggcgatgaaccc

SEQ ID NO: 228852 - DNA, 75 bp, synthetic construct
  source 1..75: mol_type = other DNA
cggtgaactgttattacgcgcatccgctattgatggagtggctccggcggggaaaaacggagccgccgaagccac

SEQ ID NO: 228853 - DNA, 75 bp, synthetic construct
  source 1..75: mol_type = other DNA
cgccgggacaaaacctgttggtgttgatttcactgctgttgcgaaagatctgactactgcgacaggtaaaacagt

SEQ ID NO: 228854 - DNA, 75 bp, synthetic construct
  source 1..75: mol_type = other DNA
accgggactaactctgattctgacctgtcttctattcaggacgaaatcaaatcccgtctggatgaaattgatcgc

SEQ ID NO: 228855 - DNA, 75 bp, synthetic construct
  source 1..75: mol_type = other DNA
taactactgttggccgcgatgttaaattggatgcttctgcacttaaagccaaccaatcgcttgtcgtgtataaag

SEQ ID NO: 228856 - DNA, 75 bp, synthetic construct
  source 1..75: mol_type = other DNA
atgaactggttttcaaatcatttgggaaaaatatggttggcaactctggctctcatggccgccggttgggtatcg

SEQ ID NO: 228857 - DNA, 75 bp, synthetic construct
  source 1..75: mol_type = other DNA
gtgaacttcattccttgtcaccatgtgaatgccgtcgggccaatgggcggcattacttctgccagtatgccgatg

SEQ ID NO: 228858 - DNA, 75 bp, synthetic construct
  source 1..75: mol_type = other DNA
ttgcagatccccggctgggattttcagggcgcgtgcctggggctggatattcgtcgcgtggtagaaaccggcatt

SEQ ID NO: 228859 - DNA, 75 bp, synthetic construct
  source 1..75: mol_type = other DNA
atgtttacatcagtagcgcaagccaatgctgcggttatcgaacaaattcgtcgcgctcgtccacactggctggat

SEQ ID NO: 228860 - DNA, 75 bp, synthetic construct
  source 1..75: mol_type = other DNA
caacaaaaccggacgcgccgaataagccggagatgaatatcttcgagctcggcatcagacccgatcgggacaacg

SEQ ID NO: 228861 - DNA, 75 bp, synthetic construct
  source 1..75: mol_type = other DNA
tgaaaccgcttgcggacggtatcaacgtaccgggtgggttttccgccacgccgcagaaagcatggtcgggcgaca

SEQ ID NO: 228862 - DNA, 75 bp, synthetic construct
  source 1..75: mol_type = other DNA
agaaacagcgctgggccagaccttctctgtcgtggccacgcccgtaaaaagtgaaggtcgcgtctatcgactgat

SEQ ID NO: 228863 - DNA, 75 bp, synthetic construct
  source 1..75: mol_type = other DNA
aaggggcatgtgtgggtgcatgtctgtttgaaggctgggcgaaagatgaagcgcaggcactggcaatgctggagc

SEQ ID NO: 228864 - DNA, 75 bp, synthetic construct
  source 1..75: mol_type = other DNA
acgctccagaaaattctggggcacgcaaagattcagacaacgatgatttatgcccatcttgcgccggattacctg

SEQ ID NO: 228865 - DNA, 75 bp, synthetic construct
  source 1..75: mol_type = other DNA
tgatcgccgtccgctgtcagtgcttattgacttgtggtggaaataccacggccagctaatgaagtcagggcataa

SEQ ID NO: 228866 - DNA, 75 bp, synthetic construct
  source 1..75: mol_type = other DNA
agggggaagtgaacttcattccttgtcaccatgtgaatgccgtcgggccaatgggcggcattacttctgccagta

SEQ ID NO: 228867 - DNA, 75 bp, synthetic construct
  source 1..75: mol_type = other DNA
caaggtctgtttttcaccggcttctcgcaggagcaggcgaacccggatatgggcgatagcgcgattaccgaaacc

SEQ ID NO: 228868 - DNA, 75 bp, synthetic construct
  source 1..75: mol_type = other DNA
atgctgcggttatcgaacaaattcgtcgggctcgtccacactggctggatgtgcaaccggcttcttcacttatca

SEQ ID NO: 228869 - DNA, 75 bp, synthetic construct
  source 1..75: mol_type = other DNA
ccgtcattaatgggaggcggcggcgtcgatggggccattcatcgcgcagcgggtccggccctgctggatgcctgt

SEQ ID NO: 228870 - DNA, 75 bp, synthetic construct
  source 1..75: mol_type = other DNA
gcgtgaagctgctgtggggaaccgctaactgctttacaaaccctcgctatggcgcgggtgcggcgacgaacccag

SEQ ID NO: 228871 - DNA, 75 bp, synthetic construct
  source 1..75: mol_type = other DNA
aaagctgtctgtatggaacgatataaaggatgagaacgttgaaaaaacgttcaccgacactctaaatacgatttt

SEQ ID NO: 228872 - DNA, 75 bp, synthetic construct
  source 1..75: mol_type = other DNA
tcgcggcatcgagcgcacttatacccgtgatttgctcgtggaagtttttctcgacggacgcgctaacggcctgaa

SEQ ID NO: 228873 - DNA, 75 bp, synthetic construct
  source 1..75: mol_type = other DNA
agggtgatattactaaactagccgttgatgttattgttaatgcggctaatccgtcactaatggggggcggcggcg

SEQ ID NO: 228874 - DNA, 75 bp, synthetic construct
  source 1..75: mol_type = other DNA
tatggttaccctcgtgcggcagcggctgaaatcgcagtaaaaaccgtttcagaatttattacccgtcacgcttta

SEQ ID NO: 228875 - DNA, 75 bp, synthetic construct
  source 1..75: mol_type = other DNA
caggtaccgaagacgatgcgatgctgctggccgatgtgccttacccgcagcgcaaatatcagcagatgggtctta

SEQ ID NO: 228876 - DNA, 75 bp, synthetic construct
  source 1..75: mol_type = other DNA
cgcatgcaaacgttgttgacggcaaatttgtgtattccagcagcacaaccaaaagtcgctacacgaacgctcttg

SEQ ID NO: 228877 - DNA, 75 bp, synthetic construct
  source 1..75: mol_type = other DNA
gtcggaaacgttcaaagacctgatcgagaacgcggtggacagcaacgaaaaaattgctggcatggctaacgatat

SEQ ID NO: 228878 - DNA, 75 bp, synthetic construct
  source 1..75: mol_type = other DNA
acggcgaccgtgcaggccgcgatgccgcctggcgagcgctggaaacggcgatgccctatatggctgatggtcgcc

SEQ ID NO: 228879 - DNA, 75 bp, synthetic construct
  source 1..75: mol_type = other DNA
gctctctgcgtttctgtttaacagcctgatgccgcaagttgatctgagcacacctgacgggcgtgcgcgtttaag

SEQ ID NO: 228880 - DNA, 75 bp, synthetic construct
  source 1..75: mol_type = other DNA
tacctgaactcgccggaaacagacattttccataaaggccgccagctttacggtctttatgaagcgcagcaggat

SEQ ID NO: 228881 - DNA, 75 bp, synthetic construct
  source 1..75: mol_type = other DNA
agaccgttaatcgcagtgccgtccggccaggtatgctggttaaacacaaagatggtacctggacggcatcagcta

SEQ ID NO: 228882 - DNA, 75 bp, synthetic construct
  source 1..75: mol_type = other DNA
gcccggaagaagcacagaagcgtgcaaaacgttatctgacggcaatgcccgcctgggctcataaagcggatgaat

SEQ ID NO: 228883 - DNA, 75 bp, synthetic construct
  source 1..75: mol_type = other DNA
agaggcttccctgagacttgaaggaatggaccccagtggtacgccactgtacgagtccgttaaggcacgtattat

SEQ ID NO: 228884 - DNA, 75 bp, synthetic construct
  source 1..75: mol_type = other DNA
atgtccatgactcccgattcacagttacgtattgagggctttcgcaaagcagaggcttccctgagacttgaagga

SEQ ID NO: 228885 - DNA, 75 bp, synthetic construct
  source 1..75: mol_type = other DNA
aaaaaaacgcagctacctacgtttatctgaacggtacacgcctgactgtagagcttccgtaccagatcattcgcg

SEQ ID NO: 228886 - DNA, 75 bp, synthetic construct
  source 1..75: mol_type = other DNA
tctgaacggcacgcgcctgaccgtagaacttccgtaccagactgtacacggaatcattagcgaagctgaaaaagc

SEQ ID NO: 228887 - DNA, 75 bp, synthetic construct
  source 1..75: mol_type = other DNA
caggttaatggcgataaaccctatatcgaaattatttgtatggattcagaagcagaaatccagaaggcagattaa

SEQ ID NO: 228888 - DNA, 75 bp, synthetic construct
  source 1..75: mol_type = other DNA
agacagtaaaccgcggcgcagttcagccggggatgcttgtaaaacacaaagactcaacctggacggcatcagcta

SEQ ID NO: 228889 - DNA, 75 bp, synthetic construct
  source 1..75: mol_type = other DNA
catcgcggcatcgagcgcacttatacccgtgatttgctcgtggaagtttttctcgacggacgcggtaacggcctg

SEQ ID NO: 228890 - DNA, 75 bp, synthetic construct
  source 1..75: mol_type = other DNA
agactgttaaccgcggcgccgttctcccagggatgctcgttaagcatcgggaaagcacctggacagcatcagcaa

SEQ ID NO: 228891 - DNA, 75 bp, synthetic construct
  source 1..75: mol_type = other DNA
tcttgctgctatatttggtactgatgaagacttctggagtaatctgcagaagttgcaagatcgcccagagcaacg

SEQ ID NO: 228892 - DNA, 75 bp, synthetic construct
  source 1..75: mol_type = other DNA
gagcaacaaaaaaggcgtgatgagcgtgctgatggttccgtcctgctgaaactgtccggaaaaatccacaaacag

SEQ ID NO: 228893 - DNA, 75 bp, synthetic construct
  source 1..75: mol_type = other DNA
aaccggtgctgattcagaccagttcaatgggtgtgattggcggcgcacgttgtcagtatcacctgcgccagattc

SEQ ID NO: 228894 - DNA, 75 bp, synthetic construct
  source 1..75: mol_type = other DNA
gccaacgacgagcaacccgatcccaccatggagcaagcctttattcagttgatccacgactgggataaggagcat

SEQ ID NO: 228895 - DNA, 75 bp, synthetic construct
  source 1..75: mol_type = other DNA
gtcgggcgcagactgaaaaaatcacccgtatgagcgaggcgttcggcctgaaaagcattgcctcacatgctaccg

SEQ ID NO: 228896 - DNA, 75 bp, synthetic construct
  source 1..75: mol_type = other DNA
atgaatgatgccgttattacgctgaacggtctggaaaaacgctttccgggcatggacaagcccgccgtcgcgccg

SEQ ID NO: 228897 - DNA, 75 bp, synthetic construct
  source 1..75: mol_type = other DNA
taaatcgaccacctttaagatgatgtgcggtttgctggtgccgacctccggtcaggcgctggtgctggggatgga

SEQ ID NO: 228898 - DNA, 75 bp, synthetic construct
  source 1..75: mol_type = other DNA
aaggcgtcacggtgatggtcaccacccactttatggatgaagcggaatattgcgaccgcatcgggctggtgtatc

SEQ ID NO: 228899 - DNA, 75 bp, synthetic construct
  source 1..75: mol_type = other DNA
acggcttggaaaaacgctttccgggcatggataagcccgccgtcgcgccactcgactgcaccattcacgctggtt

SEQ ID NO: 228900 - DNA, 75 bp, synthetic construct
  source 1..75: mol_type = other DNA
cgccagccagcgcggcgaagcgcgttcggctactttgccgttacctgcggtgattctggaaaaagtgcgtgaagg

SEQ ID NO: 228901 - DNA, 75 bp, synthetic construct
  source 1..75: mol_type = other DNA
ggaacagccctttggcagtgaggaaacgcgcgctggcgcacgaaatcgggtagcaaatgcccgccgtttacttcc

SEQ ID NO: 228902 - DNA, 75 bp, synthetic construct
  source 1..75: mol_type = other DNA
ggtatttccgtcgggaatggcgtcgctatctcggggctgtcgccttgcttgtcattatcgcgatgctgcaactgg

SEQ ID NO: 228903 - DNA, 75 bp, synthetic construct
  source 1..75: mol_type = other DNA
tgttgctgctcgatgaacccggcgtcggcgttgaccctatctcacggcgcgaactgtggcagatggtgcatgagc

SEQ ID NO: 228904 - DNA, 75 bp, synthetic construct
  source 1..75: mol_type = other DNA
aacttttgctcgcctgctggagtttacgtctcttggcccgtttaccggacgcctggcgggcaagctctccggtgg

SEQ ID NO: 228905 - DNA, 75 bp, synthetic construct
  source 1..75: mol_type = other DNA
cgttataccggtattgatgagattggtcgtaaggaaggggcgatcggcgtgtttaccgccgggaaactcacccgc

SEQ ID NO: 228906 - DNA, 75 bp, synthetic construct
  source 1..75: mol_type = other DNA
gacttttgctcgcctgctggagtttacatctcttggcccgtttaccggacgcctggcgggcaagctctccggtgg

SEQ ID NO: 228907 - DNA, 75 bp, synthetic construct
  source 1..75: mol_type = other DNA
gcatggccttctggcatgatttagcggctccggtcattgctggcattcttgccagtctgatcgtgaactcgctga

SEQ ID NO: 228908 - DNA, 75 bp, synthetic construct
  source 1..75: mol_type = other DNA
ctttctggcacgacctggcagcaccgatcctggcgggaattattaccgcagcgattgtcagctggtggcgtaacc

SEQ ID NO: 228909 - DNA, 75 bp, synthetic construct
  source 1..75: mol_type = other DNA
cctgctcacgcaagagaaccagctcacagggctacaacgagaacgtttacagatactcaatcagcaggcagttct

SEQ ID NO: 228910 - DNA, 75 bp, synthetic construct
  source 1..75: mol_type = other DNA
cgaacctgcagctgccaatggttccgtcgcctggaatcctctcgatgaaatccgtgtgggtactgaaaacgaagt

SEQ ID NO: 228911 - DNA, 75 bp, synthetic construct
  source 1..75: mol_type = other DNA
tgaccttaaaggtgaactgtgggcgatgacggcgggctggcgtaaagaatacgccaagaatctgtgtctgaaatt

SEQ ID NO: 228912 - DNA, 75 bp, synthetic construct
  source 1..75: mol_type = other DNA
ttgaacgtgcggcaagtaccgagaacgagaaagatctctaccagcgtcagctggatgtgttcctcgatccgaacg

SEQ ID NO: 228913 - DNA, 75 bp, synthetic construct
  source 1..75: mol_type = other DNA
gtccgcgcaggtctttctacctggggcgcagacctgaacagcaatgcctgcgctacgttgaaagaggcaggtgct

SEQ ID NO: 228914 - DNA, 75 bp, synthetic construct
  source 1..75: mol_type = other DNA
taattgacactgacgtataccctacccctggcgaatttgttgcggcatgcaatggtagccatgaagcaacgttca

SEQ ID NO: 228915 - DNA, 75 bp, synthetic construct
  source 1..75: mol_type = other DNA
ctatttgtcgctcctgggaaaaaccaattaagatcatagggacaatggtagaacatcgcatattccgcagaaaaa

SEQ ID NO: 228916 - DNA, 75 bp, synthetic construct
  source 1..75: mol_type = other DNA
caatgccgccggaaattcctggatgttcgaaaaccggatgcgtcatgtggtggatggcgattacaccccgcattc

SEQ ID NO: 228917 - DNA, 75 bp, synthetic construct
  source 1..75: mol_type = other DNA
acccggcacggctgtaatggtttcttccactatcgccagtgctgatgcgcaggaaattgccactgctctggctgc

SEQ ID NO: 228918 - DNA, 75 bp, synthetic construct
  source 1..75: mol_type = other DNA
ccagtttctggtggtgcagtaaaagccgctaacggtgaaatgactgtcatggcctccggtagcgatattgccttt

SEQ ID NO: 228919 - DNA, 75 bp, synthetic construct
  source 1..75: mol_type = other DNA
atgattacttttgatcaggcaaccgtagatagctccggtgcctttctcatcggggagctggagcgactcgaccag

SEQ ID NO: 228920 - DNA, 75 bp, synthetic construct
  source 1..75: mol_type = other DNA
aaaaaagctactgccattcctggtatcgaactcgatattcagcctacccgtaacaacctcaccttgtgggggcag

SEQ ID NO: 228921 - DNA, 75 bp, synthetic construct
  source 1..75: mol_type = other DNA
tggacaacgacgagcaggtttacatcggtgatgacgcactcggcctgaaaggtctggcaaacctcgtcggtgtga

SEQ ID NO: 228922 - DNA, 75 bp, synthetic construct
  source 1..75: mol_type = other DNA
caaaatacccagagcattactaacctgaacaatcaggtcactaatctggatactcgcgttactaatatcgaaaac

SEQ ID NO: 228923 - DNA, 75 bp, synthetic construct
  source 1..75: mol_type = other DNA
tgcccatatgggtggcttttttgcagcgcaaatgaaattcgctggatacgacgtcattattatcgaagggaaggc

SEQ ID NO: 228924 - DNA, 75 bp, synthetic construct
  source 1..75: mol_type = other DNA
acgctgaacctgccactagtggggtacacctggacccgcgatatccaactgcgtgaagatgtctccatcgcagat

SEQ ID NO: 228925 - DNA, 75 bp, synthetic construct
  source 1..75: mol_type = other DNA
cggggcgcgatggggcgaggtagcggcactggagcagcgccgtgttcttcattgtcgaatcactttttcaaaaac

SEQ ID NO: 228926 - DNA, 75 bp, synthetic construct
  source 1..75: mol_type = other DNA
gccagctaatgaagtcagggcataacacgcgccttaaattgctgcgcttgagtgaggcaatggatgacccgtgcg

SEQ ID NO: 228927 - DNA, 75 bp, synthetic construct
  source 1..75: mol_type = other DNA
ggcattcatgttcgaactctatgaaaatgagcgtgcttatcgcaaacatctcaatgccgccccatacaaagcatt

SEQ ID NO: 228928 - DNA, 75 bp, synthetic construct
  source 1..75: mol_type = other DNA
cttattgactctaaaccaaatgttcccggatgtggatatgattcaatgggtttacctgctaaaggattcccacga

SEQ ID NO: 228929 - DNA, 75 bp, synthetic construct
  source 1..75: mol_type = other DNA
atgattgccgcaaagcctcataaggactatcacgaattgctaggattgctacttgaacgtggcatgattatcaat

SEQ ID NO: 228930 - DNA, 75 bp, synthetic construct
  source 1..75: mol_type = other DNA
gagtggccgtagtaaaatcattcagccactggaaacctctcgtgtgaataaagtctatgtgagaaatggcgagaa

SEQ ID NO: 228931 - DNA, 75 bp, synthetic construct
  source 1..75: mol_type = other DNA
tcgcccggagatgccagatttcaccattcatgaatatacgccgctgatggattcttctgatatgacgccagaaga

SEQ ID NO: 228932 - DNA, 75 bp, synthetic construct
  source 1..75: mol_type = other DNA
ttttgtttttcgtcgccgtcatctgcaacaaggtaaggcattgagtgaattacattatcgcgcgccgtggtatcc

SEQ ID NO: 228933 - DNA, 75 bp, synthetic construct
  source 1..75: mol_type = other DNA
actgaagcgcacaatgaaaacgcgtcacctgattatgctttccttgggcggcgtgattggcacaggattattctt

SEQ ID NO: 228934 - DNA, 75 bp, synthetic construct
  source 1..75: mol_type = other DNA
tctgaaatctttaaatgcttttggactggatttagcaaggttgctaagtatcaaaattcacaaattagcgatgga

SEQ ID NO: 228935 - DNA, 75 bp, synthetic construct
  source 1..75: mol_type = other DNA
cagggcgacgccactctactacgcatgttgttgcgtaacctggtagaaaacgcccatcgctatagtcccgaaggc

SEQ ID NO: 228936 - DNA, 75 bp, synthetic construct
  source 1..75: mol_type = other DNA
tgcatcacgggcagtttttcctgcaaaaccggcaagagacttccggcacgcgggcctggatacggctgaaaaaag

SEQ ID NO: 228937 - DNA, 75 bp, synthetic construct
  source 1..75: mol_type = other DNA
tctggaactgctggcgaaaacgcatcacattgatgtagcaccgttagtggcacggcttgatcagatgatggagag

SEQ ID NO: 228938 - DNA, 75 bp, synthetic construct
  source 1..75: mol_type = other DNA
tgttcagcgaggacagcgtcaactggcagcagtatgtcgccaacctgccgcagagcgcggcggtgtccgagaacg

SEQ ID NO: 228939 - DNA, 75 bp, synthetic construct
  source 1..75: mol_type = other DNA
taatcttttttatagtgtcttggctctgtcactcattcttttatatgccactttcatatcaacagatctgaaaat

SEQ ID NO: 228940 - DNA, 75 bp, synthetic construct
  source 1..75: mol_type = other DNA
cgttattccagtctcaccaaaggttgccggtaaaacgctgttaggtcagcaaggttacggcacgctggcggaggt

SEQ ID NO: 228941 - DNA, 75 bp, synthetic construct
  source 1..75: mol_type = other DNA
tggaagcagaagatatcgataccggcaaaaaatacacctggcaggcgcgcggcctggtgaacgccaccggcccgt

SEQ ID NO: 228942 - DNA, 75 bp, synthetic construct
  source 1..75: mol_type = other DNA
ctcgcgcagtttgccatgattttctggcacgacctggcagcaccgatcctggcgggaattattaccgcagcgatt

SEQ ID NO: 228943 - DNA, 75 bp, synthetic construct
  source 1..75: mol_type = other DNA
tcgccaggaattaagcgaccgtaaatcattcggcgaagatgccgaacggctggctaataacaaatggcttgataa

SEQ ID NO: 228944 - DNA, 75 bp, synthetic construct
  source 1..75: mol_type = other DNA
ttactgataaatatgaattaacccgcacacactctgaagtgctggaagcggtgaaagtggttaaaccgggtaaaa

SEQ ID NO: 228945 - DNA, 75 bp, synthetic construct
  source 1..75: mol_type = other DNA
cggataaatctcgtggaatgtctgaacgtgtttttcaggaaaaaatacaggccctgaatgatgctgtggagcggg

SEQ ID NO: 228946 - DNA, 75 bp, synthetic construct
  source 1..75: mol_type = other DNA
ttcaaaacaatatcagacccgggagcagcagagagctagggaaggtgcgaataagcaggtcatttcttcccaagc

SEQ ID NO: 228947 - DNA, 75 bp, synthetic construct
  source 1..75: mol_type = other DNA
gaaaatgcaggctctgaatgatgctctggaacgagaaaaagaaattgtcagacagaaaaacgagcagctcgatat

SEQ ID NO: 228948 - DNA, 75 bp, synthetic construct
  source 1..75: mol_type = other DNA
aatatgctctccatgagcgcagacacttttggaaaatcttttttttggtgggatggtggcaactattttaggatg

SEQ ID NO: 228949 - DNA, 75 bp, synthetic construct
  source 1..75: mol_type = other DNA
aaagttttgaacgtgaatttattgagcagaccggcgtgaaactggtggttggcaaaggtggtatggggccgctga

SEQ ID NO: 228950 - DNA, 75 bp, synthetic construct
  source 1..75: mol_type = other DNA
gcgtacaactctcagtgacggttcaggctcgtgactatgcgctgattatcagtacaggtgtgctggcaggtctgt

SEQ ID NO: 228951 - DNA, 75 bp, synthetic construct
  source 1..75: mol_type = other DNA
gttatggggttggcgataaaaatcagcaacgccagcaggaattactgcggattgaaggtgatgctgccaacttac

SEQ ID NO: 228952 - DNA, 75 bp, synthetic construct
  source 1..75: mol_type = other DNA
gtattaaaccagcttgtgcgttcgggaaaggtagcgagcagttcgctggagcaagtgacgacagcgatagtaaaa

SEQ ID NO: 228953 - DNA, 75 bp, synthetic construct
  source 1..75: mol_type = other DNA
aaacaaacggcttttgctgtgcgcatgttgcctgcacaaatgactgatattgtagttggattgtccacaggccag

SEQ ID NO: 228954 - DNA, 75 bp, synthetic construct
  source 1..75: mol_type = other DNA
aattacagccgaaaaatacaggaaacgcggcgagagctaacaggagaggctcaggcagaacgagaagcagcaaaa

SEQ ID NO: 228955 - DNA, 75 bp, synthetic construct
  source 1..75: mol_type = other DNA
ccattaacacgaacttccgatggttctcttggtgtcagagctattaatagtaaaagtggtaatggaggcggagat

SEQ ID NO: 228956 - DNA, 75 bp, synthetic construct
  source 1..75: mol_type = other DNA
cgaatccagattcgatagctgaaataaatggtttggtgataataaaactatcagagaaaaaagggtggcttccat

SEQ ID NO: 228957 - DNA, 75 bp, synthetic construct
  source 1..75: mol_type = other DNA
gtctgatcgcggttcatatgcggctggttttttctcaatatattctactgctgagcgagccatacactcgattat

SEQ ID NO: 228958 - DNA, 75 bp, synthetic construct
  source 1..75: mol_type = other DNA
gggatgcggcggcctcaaaagaggcagcgaaatcatcagaaacgaacgcagcctcgagcgccagtaatgccgctt

SEQ ID NO: 228959 - DNA, 75 bp, synthetic construct
  source 1..75: mol_type = other DNA
tatccctggattaatagatcgaagagtaaatatggttcttggccccaacgtaaacccatcagattttgcaggtaa

SEQ ID NO: 228960 - DNA, 75 bp, synthetic construct
  source 1..75: mol_type = other DNA
acggtgctcatgggcttacgccaacaataattatatagacgacactggttgcggtaggatcgatctatctggttc

SEQ ID NO: 228961 - DNA, 75 bp, synthetic construct
  source 1..75: mol_type = other DNA
aggcgctagttatattcttgccaacttttataccggtgtaggtagttgccgtacgcttcaaattaaagctcacta

SEQ ID NO: 228962 - DNA, 75 bp, synthetic construct
  source 1..75: mol_type = other DNA
gtaaatagaacaggcgacagttatattcttgccaacttttataccggagtcggaagttgccggaccctgcagatg

SEQ ID NO: 228963 - DNA, 75 bp, synthetic construct
  source 1..75: mol_type = other DNA
accctgttaaggtcgcttggcgttcaggctttcaatatcgatccacgccgatggcacaaaattaaaacctattta

SEQ ID NO: 228964 - DNA, 75 bp, synthetic construct
  source 1..75: mol_type = other DNA
tgatagtaggcattcttattccaattctattaaatggttgttcgtcaagaaaaaatagagctcatcttgacccca

SEQ ID NO: 228965 - DNA, 75 bp, synthetic construct
  source 1..75: mol_type = other DNA
ttatagttcatgtttatctctatccctcatagctttatctaccttaatttacctgctattaaccaaagctatcaa

SEQ ID NO: 228966 - DNA, 75 bp, synthetic construct
  source 1..75: mol_type = other DNA
cgctttcaaaagcgctggcggatgggcttgatacggtgtatgtcgctgaatttggccgcgactattgggaagaaa

SEQ ID NO: 228967 - DNA, 75 bp, synthetic construct
  source 1..75: mol_type = other DNA
atgaagcgtttcgtaacgggactggtggttggcaaattcgcgcctttgcattgtggtcatgaacggttgatcaat

SEQ ID NO: 228968 - DNA, 75 bp, synthetic construct
  source 1..75: mol_type = other DNA
cagaagctaatcactatcttatatgtgacacgtcgccactcacgaccttgttctatgcccttgatcaatatggtc

SEQ ID NO: 228969 - DNA, 75 bp, synthetic construct
  source 1..75: mol_type = other DNA
atgcccctaaatgatatgcagattcgccgtgctaaacctgaagttaaagcctatacacttggggatgggcaaggg

SEQ ID NO: 228970 - DNA, 75 bp, synthetic construct
  source 1..75: mol_type = other DNA
tcatattttgaacttctggatacaatatctcggttacaatcaaaatataatcttatattaaagatgcatcacaat

SEQ ID NO: 228971 - DNA, 75 bp, synthetic construct
  source 1..75: mol_type = other DNA
ccggcatttgaggcgcacatcagcctgccaggtgcaaccgccgccggtgaaaaagccggaccgtcagaggaataa

SEQ ID NO: 228972 - DNA, 75 bp, synthetic construct
  source 1..75: mol_type = other DNA
tcacacttgccgatgcgcgttctcgtcgcgacgatgcccgaaaactggtagccgaaggaaagaatccgagtgagg

SEQ ID NO: 228973 - DNA, 75 bp, synthetic construct
  source 1..75: mol_type = other DNA
cgatatgctattgctaccggaagagcagagtttaatcctgcggcagatctgtccagtgccctcgaagtacacaaa

SEQ ID NO: 228974 - DNA, 75 bp, synthetic construct
  source 1..75: mol_type = other DNA
aattaaaccgctagagctgttaaatgtactgcgtaaaattgagaagcgtggcgcattggagaaaatgcgaaaagt

SEQ ID NO: 228975 - DNA, 75 bp, synthetic construct
  source 1..75: mol_type = other DNA
tgaacgtactgagtcggggtgtctataccggcacgcatatcgacgggtttcacggccatcatacgttatcagatg

SEQ ID NO: 228976 - DNA, 75 bp, synthetic construct
  source 1..75: mol_type = other DNA
cctttgacaccacggcggaagaatccggtcagatgatggcacagtggcgcactgcctttaaactgacacagggag

SEQ ID NO: 228977 - DNA, 75 bp, synthetic construct
  source 1..75: mol_type = other DNA
aggtcgtaaaaaccatcgcgaaaacggggctggcgctgctgacatttggtgttgccattggctcgctgtcgcgga

SEQ ID NO: 228978 - DNA, 75 bp, synthetic construct
  source 1..75: mol_type = other DNA
ttgaaaaggcggtcaacggttacaccgaaacccaggcgaacagtggtgcggtgatgtatgcgctttatttctcct

SEQ ID NO: 228979 - DNA, 75 bp, synthetic construct
  source 1..75: mol_type = other DNA
tacggttaactggctggataataaagggctgtttctggcttcagactggacgcctttttttgatcgtaaagagta

SEQ ID NO: 228980 - DNA, 75 bp, synthetic construct
  source 1..75: mol_type = other DNA
cagccatcacccttgaatcgaagatggctgatgtccgcaaagtggtggacggtctggatacgccggatgcgttta

SEQ ID NO: 228981 - DNA, 75 bp, synthetic construct
  source 1..75: mol_type = other DNA
aggatatgcgtcagatatcatggaagcgtttcagaacgatatttttccttttgtgggtacgagacctgtcggcga

SEQ ID NO: 228982 - DNA, 75 bp, synthetic construct
  source 1..75: mol_type = other DNA
cacttaccaaaaatatagaagaaaataatatttgtaatacacatttctgtctgttaattgaattatctggagttc

SEQ ID NO: 228983 - DNA, 75 bp, synthetic construct
  source 1..75: mol_type = other DNA
gcaaaaaaaatgatgtatcactaagttatttttctcttagtttaaaaaagttattacatactcataatatattaa

SEQ ID NO: 228984 - DNA, 75 bp, synthetic construct
  source 1..75: mol_type = other DNA
aggaatttttaaataaatattttgagcatattaattctctgttttgttctgttgggtcaagtaagttcgctataa

SEQ ID NO: 228985 - DNA, 75 bp, synthetic construct
  source 1..75: mol_type = other DNA
ttctcctgaaatgtatgaggagctttctggaaaacttcgtgctatgcggagtgagcttgaggttactcaatcgca

SEQ ID NO: 228986 - DNA, 75 bp, synthetic construct
  source 1..75: mol_type = other DNA
tttttatcttgcaccgctgttctggctgattgtggggggaacctggggacccgttacgctgatggggtatgcgtt

SEQ ID NO: 228987 - DNA, 75 bp, synthetic construct
  source 1..75: mol_type = other DNA
cgctgggtaatactttatcaggtgccgtattcatgggattgggttattggtatgctacgccgaaagcgaatcgtc

SEQ ID NO: 228988 - DNA, 75 bp, synthetic construct
  source 1..75: mol_type = other DNA
ggcagcctgagttcacagataaaacactctccaggaaacccggggcggttcaaacagagtcagagaacgccttcg

SEQ ID NO: 228989 - DNA, 75 bp, synthetic construct
  source 1..75: mol_type = other DNA
gtgcattggagaaaatgcgcaaagttcggcagcgatgttcagaagtttttcgctatgccatagccaccgggagag

SEQ ID NO: 228990 - DNA, 75 bp, synthetic construct
  source 1..75: mol_type = other DNA
ctatacacttggagatgggcaagggctgtcattgcttatagaacctaatggaagcaagagctggcggttccgtta

SEQ ID NO: 228991 - DNA, 75 bp, synthetic construct
  source 1..75: mol_type = other DNA
aaggtgacgcggcgaaaaaagcggctaaccgttttgcggtgccaccaccaccccgcctggtggtgaataatgata

SEQ ID NO: 228992 - DNA, 75 bp, synthetic construct
  source 1..75: mol_type = other DNA
ttgttatcaacagatttaccgctttcggggtgcgaataatgcgctttcccatcctgcactgaagaatgcggaccg

SEQ ID NO: 228993 - DNA, 75 bp, synthetic construct
  source 1..75: mol_type = other DNA
agataatgaacccgttatggtttttaacggagagaggaatgtaccggcagacagtctgaaaccgcagcctctgat

SEQ ID NO: 228994 - DNA, 75 bp, synthetic construct
  source 1..75: mol_type = other DNA
aggtgttaacgcgtctggcgcagttctctctggcgcgtgaaccgcatgtcgataaggtggagacgccgaaggcag

SEQ ID NO: 228995 - DNA, 75 bp, synthetic construct
  source 1..75: mol_type = other DNA
attacattcgaacagcccggcccaggactatttcgcaaatattaccctgaatacgctcgaccccaaccatattga

SEQ ID NO: 228996 - DNA, 75 bp, synthetic construct
  source 1..75: mol_type = other DNA
caggatgcaaggggggcaaagggcttcagacgaatcttaaggattctaatagatcttcatgtacagaagatggtc

SEQ ID NO: 228997 - DNA, 75 bp, synthetic construct
  source 1..75: mol_type = other DNA
aattctgctgcccaccagtacatggctgaaatgcataaaaaaatgatgaaagctaaacccggagctaccaacgaa

SEQ ID NO: 228998 - DNA, 75 bp, synthetic construct
  source 1..75: mol_type = other DNA
cggagatgcataaaaaaatgatgaaaggcaaaccaggggccaccaacgaatcagcaacgtcattttcagaaatga

SEQ ID NO: 228999 - DNA, 75 bp, synthetic construct
  source 1..75: mol_type = other DNA
gcttcatgtcgcggattgggtgccggttcgccttgcgggtgtggtttatgccttgatcggccacggtgagaaagc

SEQ ID NO: 229000 - DNA, 75 bp, synthetic construct
  source 1..75: mol_type = other DNA
ggcacaggtggagagcgccatcagcgaggtgctgtacaacgtggatgaactggacggcagcggggtgattaatct

SEQ ID NO: 229001 - DNA, 75 bp, synthetic construct
  source 1..75: mol_type = other DNA
atgccgtttgagcgtcccggattaagcgaactgcgtgagaaaagccggtcgtatgtgaccggccagctggatgag

SEQ ID NO: 229002 - DNA, 75 bp, synthetic construct
  source 1..75: mol_type = other DNA
gttgatgggcgatgcgccgcgcagtatgacgatggtggtcaccgaatggcgtttaccacgcgtgctgatggcgct

SEQ ID NO: 229003 - DNA, 75 bp, synthetic construct
  source 1..75: mol_type = other DNA
agaccatacgtgacatcacccatactaaatcgccacagcacaaggcgctgtatgccgctacagctggagcgacgg

SEQ ID NO: 229004 - DNA, 75 bp, synthetic construct
  source 1..75: mol_type = other DNA
aattataaactgggcggtgcacagcaacatgatagcgtacgcctcgatccgtgggtgtttatgttctcagcagga

SEQ ID NO: 229005 - DNA, 75 bp, synthetic construct
  source 1..75: mol_type = other DNA
ggcaaacagtcttcctgcgggaacaacctgggcctggagtggtttgtcattgcaggagaaactggccagcggtca

SEQ ID NO: 229006 - DNA, 75 bp, synthetic construct
  source 1..75: mol_type = other DNA
ctcaaagacccacaagttatggcaagttatgttgagttgatttttgacatgatgaagcaaggtgcagaacaggcg

SEQ ID NO: 229007 - DNA, 75 bp, synthetic construct
  source 1..75: mol_type = other DNA
caattgtggttgagcagatagaaaagcacgacaagtcgattgccctcaaaggcgacttgccgcaagcggtgaagc

SEQ ID NO: 229008 - DNA, 75 bp, synthetic construct
  source 1..75: mol_type = other DNA
ggaaaaaaatcaccgctggcgttcatgctgaaaatggtcatattgccgtgcaactgtggcataccggacgtattt

SEQ ID NO: 229009 - DNA, 75 bp, synthetic construct
  source 1..75: mol_type = other DNA
atgccattgtggtggtggagaacgtcgaacgtattatgcgcgacgacggattgcctgcccgtgaagccacggaaa

SEQ ID NO: 229010 - DNA, 75 bp, synthetic construct
  source 1..75: mol_type = other DNA
tgcaatggtgctggcgatcggcttgctggtggacgatgccattgtggtggtagagaacgtcgaacgcattatgcg

SEQ ID NO: 229011 - DNA, 75 bp, synthetic construct
  source 1..75: mol_type = other DNA
ggataattaatataaaaacaggtgtggagtgggtattttatgatggtcgtttttggttagattttcgtaaatcca

SEQ ID NO: 229012 - DNA, 75 bp, synthetic construct
  source 1..75: mol_type = other DNA
aatatgccgacgaactggaacacattacggcaaaagccttttgcgaaggcatcggtctgaataccgatctgctgt

SEQ ID NO: 229013 - DNA, 75 bp, synthetic construct
  source 1..75: mol_type = other DNA
ggattggctttggcgatgctatgggattcaatgctggcagtatcaacaatataacgggatttggtgctgtagaat

SEQ ID NO: 229014 - DNA, 75 bp, synthetic construct
  source 1..75: mol_type = other DNA
ataaatttggcgcaactgatccttattctgaatcagttgcggtaaatttaattttagattttaaacaaggcaatg

SEQ ID NO: 229015 - DNA, 75 bp, synthetic construct
  source 1..75: mol_type = other DNA
gagcttaacccacagcgtgccgaaagtttctacggtggcggcgcggaaggctataccgattacccgacgttgtaa

SEQ ID NO: 229016 - DNA, 75 bp, synthetic construct
  source 1..75: mol_type = other DNA
cttagtgcgggaacgcgtacttctctgcgcgatgaaaatggtcaggcgatccgcgtcgagacatctatgccgcgt

SEQ ID NO: 229017 - DNA, 75 bp, synthetic construct
  source 1..75: mol_type = other DNA
tggtggtttcttcctgttgttcaaagccacgatggagctgaacgaacggctggaagggaaagacagcaataatcc

SEQ ID NO: 229018 - DNA, 75 bp, synthetic construct
  source 1..75: mol_type = other DNA
cgggaaaatcggtgcattgccttcgccaaatacccagcaactgacggcaacggtgcgtgcgcagtctcgtttgca

SEQ ID NO: 229019 - DNA, 75 bp, synthetic construct
  source 1..75: mol_type = other DNA
tatcgcgctggcagcaatggtgggcggcattgtcacttcgctgttggtctggctgctcgcctggcgtaacggtat

SEQ ID NO: 229020 - DNA, 75 bp, synthetic construct
  source 1..75: mol_type = other DNA
ggggaactctaccagtggccagcgtggtaatagccgccagattgatatccgaggtatgggccctgaaaatacgtc

SEQ ID NO: 229021 - DNA, 75 bp, synthetic construct
  source 1..75: mol_type = other DNA
ggaatggaccgagccgggcaacggtaatcagaaagttgttcgcgtgtcatatacatggaagttggcggatgttcc

SEQ ID NO: 229022 - DNA, 75 bp, synthetic construct
  source 1..75: mol_type = other DNA
cgtagtgcttaccgcagctgccactgccctggcggggccgatttcctttattgctttagtcgcgccacacattgc

SEQ ID NO: 229023 - DNA, 75 bp, synthetic construct
  source 1..75: mol_type = other DNA
gcgcttgccgggccgatttcctttattgctttagtcgcgccgcacattgcccgacgcattagcggcaccgctcgc

SEQ ID NO: 229024 - DNA, 75 bp, synthetic construct
  source 1..75: mol_type = other DNA
ccgacgcattagcggcaccgctcgctgggggctgacccaggcggcgctatgtggcgcgctgttactgctggcagc

SEQ ID NO: 229025 - DNA, 75 bp, synthetic construct
  source 1..75: mol_type = other DNA
gattaccgtgtcaaaatgtatgacccggaatcaggtgggcaaattgatgtgcgcaacaatgagagcatggtctgg

SEQ ID NO: 229026 - DNA, 75 bp, synthetic construct
  source 1..75: mol_type = other DNA
ccagctgcagggcgcagagacggttacttctctatctatcgtcagggagggaccaccaccgacgagggagaacgc

SEQ ID NO: 229027 - DNA, 75 bp, synthetic construct
  source 1..75: mol_type = other DNA
tggtgagtaatcttcaggacccgctggcgcgtgttgaaggcgtagggagtctgcaagtttttggggctgaatatg

SEQ ID NO: 229028 - DNA, 75 bp, synthetic construct
  source 1..75: mol_type = other DNA
tattttgcttttggggctcggttgcgggtgttcaggcagcccaaaatgttacggcggatgtaacttacgatttgg

SEQ ID NO: 229029 - DNA, 75 bp, synthetic construct
  source 1..75: mol_type = other DNA
tatgctgatatcgtgcttaacgttctcgatcccaaccatatcgacgtgttcttcccggagttcgcccacgccacg

SEQ ID NO: 229030 - DNA, 75 bp, synthetic construct
  source 1..75: mol_type = other DNA
cagcaactacgcgcaagatctgaccatgttggacatgtgcttgtacgatggttttaacggtaatgccatcagtta

SEQ ID NO: 229031 - DNA, 75 bp, synthetic construct
  source 1..75: mol_type = other DNA
ggcattactgacgatgggcgtggcgattggcacattgacacgcataacaaaaatcatgggtagcgtgatgaatat

SEQ ID NO: 229032 - DNA, 75 bp, synthetic construct
  source 1..75: mol_type = other DNA
acccgtagccgaacccgcgctaaacggattgcgcctgaatttgcgcattgtctccattgtcatgtttaacttcgc

SEQ ID NO: 229033 - DNA, 75 bp, synthetic construct
  source 1..75: mol_type = other DNA
ctgagccggaatgcttccggaggtattccgcgctcataccctgaatggaaagcgattttgtttccccgtgatggt

SEQ ID NO: 229034 - DNA, 75 bp, synthetic construct
  source 1..75: mol_type = other DNA
gttgcaaatttttatacaggcgtaggtagttgtcggactctccaaatccgagcgcaccataaaaatggtggattg

SEQ ID NO: 229035 - DNA, 75 bp, synthetic construct
  source 1..75: mol_type = other DNA
attgctggcggtcagcgtggccattccgggatggcagtatctgacacagccatcaccggcggagcagcaactcag

SEQ ID NO: 229036 - DNA, 75 bp, synthetic construct
  source 1..75: mol_type = other DNA
gcccggatgtggactggcgttacgtggaaacgctctgcctgcgtctgtatgaacacaatggcgtggaattacaga

SEQ ID NO: 229037 - DNA, 75 bp, synthetic construct
  source 1..75: mol_type = other DNA
tccttgggattgggcaaagttttgccggaacgggatcgacctatggggcgttggcgtggttggctcgctgcatat

SEQ ID NO: 229038 - DNA, 75 bp, synthetic construct
  source 1..75: mol_type = other DNA
atgaatgacgttacagttgttacatcagttacttacccatcacccgagtcgttggctctggtggctgatgtgcaa

SEQ ID NO: 229039 - DNA, 75 bp, synthetic construct
  source 1..75: mol_type = other DNA
ctgcatttgctttagggcaaacaggaagcactgtcggaaatgataaagctgttggctggaactggaatagcgggg

SEQ ID NO: 229040 - DNA, 75 bp, synthetic construct
  source 1..75: mol_type = other DNA
catacgcgttactacgccgagcacgtccagcggtggcggaattactaacgctcaattcacttatattaatcatgg

SEQ ID NO: 229041 - DNA, 75 bp, synthetic construct
  source 1..75: mol_type = other DNA
tggcgcagttattgaggtatttaataacggcagtagctcaaacaattatacgattcgtataacaacggcaacaac

SEQ ID NO: 229042 - DNA, 75 bp, synthetic construct
  source 1..75: mol_type = other DNA
gtgactctgctacgagataatggtgcttttaatgcaaaggcatggatagcgcgttgtgcctgggcgtatgcaaat

SEQ ID NO: 229043 - DNA, 75 bp, synthetic construct
  source 1..75: mol_type = other DNA
ggctggaactggaatagcggggtctataacgcaaatattggtggcgcatcgacattaatcctccacttcaatatg

SEQ ID NO: 229044 - DNA, 75 bp, synthetic construct
  source 1..75: mol_type = other DNA
gctgactgtcagcgtggtcattccgggatggcagtttctgacacagccatcatcggcggagcagcaactcagggc

SEQ ID NO: 229045 - DNA, 75 bp, synthetic construct
  source 1..75: mol_type = other DNA
aatggcagcgagcagcagcaaaaacaggttgaaatggcactgaatctgttgattaatcgttatcagatgaaacat

SEQ ID NO: 229046 - DNA, 75 bp, synthetic construct
  source 1..75: mol_type = other DNA
caactgatggtacttttccccgacaatccccgtgttcaggaaatggtggataactggcagaagagcgtaaggagt

SEQ ID NO: 229047 - DNA, 75 bp, synthetic construct
  source 1..75: mol_type = other DNA
cgctactggcgcaggcactcaggcttgaagctccggatgtgcaggaacatcagaccctgccgcactcccgtctgg

SEQ ID NO: 229048 - DNA, 75 bp, synthetic construct
  source 1..75: mol_type = other DNA
taccattgctgcacatatgccgctgaaactggctgacaaacagtccgttctggagatgtccgacgttaacgaacg

SEQ ID NO: 229049 - DNA, 75 bp, synthetic construct
  source 1..75: mol_type = other DNA
tgtatgttgtttctgaaacaaaagcagagcccacatcctcccttcagaaatccccgcccacgtttctgaaaccgt

SEQ ID NO: 229050 - DNA, 75 bp, synthetic construct
  source 1..75: mol_type = other DNA
cagctgctgcagcaactgagggtactttttcccgacaatccccgtgttcaggaaatggtggataactggcagaag

SEQ ID NO: 229051 - DNA, 75 bp, synthetic construct
  source 1..75: mol_type = other DNA
gcggcgatagtacggctcctgcctctgccatgtcgctgatcatgctgttgcagttgatccagaaacgaaaccccg

SEQ ID NO: 229052 - DNA, 75 bp, synthetic construct
  source 1..75: mol_type = other DNA
tgcgtcagagtggataaccctttccggtcagcagataatgcgactgacagaattacccccggcatacaacctgca

SEQ ID NO: 229053 - DNA, 75 bp, synthetic construct
  source 1..75: mol_type = other DNA
caccggcagagcagcaactcagggtgctgctgacatcaccaccggatgtgctttcagcagaccagatgacacagc

SEQ ID NO: 229054 - DNA, 75 bp, synthetic construct
  source 1..75: mol_type = other DNA
acacagccatcaccggcggagcagcaactcagggcgctgctggcaccaccaccggatatgctttcagcagaccag

SEQ ID NO: 229055 - DNA, 75 bp, synthetic construct
  source 1..75: mol_type = other DNA
ggattatgctgccctgcgcgatgaaatcagcaaactgacccacccggcacgcccggatgtggactggcgttatgt

SEQ ID NO: 229056 - DNA, 75 bp, synthetic construct
  source 1..75: mol_type = other DNA
gctggaacgaaggcatgacccgcttacagcagctggctgagcgcctgaaccgtctggatgaacagcggggaaaat

SEQ ID NO: 229057 - DNA, 75 bp, synthetic construct
  source 1..75: mol_type = other DNA
aagtcgaaggtgtcctgcccggcgcgcgggtttatgccaaaaacatttcggctgaaggactgcaaagcggcaagc

SEQ ID NO: 229058 - DNA, 75 bp, synthetic construct
  source 1..75: mol_type = other DNA
attacgcgcgggtgcgcacattcaaacagttgttgtcgagttttcagcgcaaccgcgacctggtcagcgttggtg

SEQ ID NO: 229059 - DNA, 75 bp, synthetic construct
  source 1..75: mol_type = other DNA
acaggttatcgatcatcaggctgtacaggcctgggcggacagcctcggtactgaccatccgttaccggtgccacg

SEQ ID NO: 229060 - DNA, 75 bp, synthetic construct
  source 1..75: mol_type = other DNA
gcctatgccacgcgcattgccgaagattttcgcgatcgtggtcagcatgtgttgctgattatggactccctcacc

SEQ ID NO: 229061 - DNA, 75 bp, synthetic construct
  source 1..75: mol_type = other DNA
cccactcctgcgaatgcagggtgccgcctatgccacgcgcattgccgaggattttcgcgatcgtggtcagcatgt

SEQ ID NO: 229062 - DNA, 75 bp, synthetic construct
  source 1..75: mol_type = other DNA
aaaccgctcgatggcctcccctcccccgatacgactgaaaccggtgcgctgattaccccgccgtttaacccgtta

SEQ ID NO: 229063 - DNA, 75 bp, synthetic construct
  source 1..75: mol_type = other DNA
ctgctcgcacaggtcagtttatccatttcacctgatacccgcgttggcgatttagggaaggtgcgaataagcggg

SEQ ID NO: 229064 - DNA, 75 bp, synthetic construct
  source 1..75: mol_type = other DNA
gccgaaatatgccggacaggacaaagtaaacccaggctctattattctctccgctgagatgatgctgcgccatat

SEQ ID NO: 229065 - DNA, 75 bp, synthetic construct
  source 1..75: mol_type = other DNA
tggcggtatcggtatcgcccctggcgcaaacatcggtgacgaatgcgccttgtttgaagctacccacggtactgc

SEQ ID NO: 229066 - DNA, 75 bp, synthetic construct
  source 1..75: mol_type = other DNA
aagaagttaaatctcacctgaaaaaaggctgggtaaaaactcctgaagaaaccgcaacgaagcaaaaagtggcta

SEQ ID NO: 229067 - DNA, 75 bp, synthetic construct
  source 1..75: mol_type = other DNA
atgaataaattagagaaatatagagttcatcagatcggggaaccatcggtaattaataatataccggccttgcaa

SEQ ID NO: 229068 - DNA, 75 bp, synthetic construct
  source 1..75: mol_type = other DNA
ggagccgcagcccaaagcagcgccccgcgccccgcgtaagacccggagcgtgacaccggcaaaacgtggacgccc

SEQ ID NO: 229069 - DNA, 75 bp, synthetic construct
  source 1..75: mol_type = other DNA
gatcaccccgccttttaacccgttgcaacgtaccccaattgagcatgtgctggacaccggagtgcgcccaatcaa

SEQ ID NO: 229070 - DNA, 75 bp, synthetic construct
  source 1..75: mol_type = other DNA
agcttcaataacaacagagcaattagtgactctgctacgagataatggtgcttttaatgcaaaagcatggatagc

SEQ ID NO: 229071 - DNA, 75 bp, synthetic construct
  source 1..75: mol_type = other DNA
caacaaaactgcaaacagcacgcacaataggcggcgtatcattcgatggctccgccaatatcaatctgccgggtg

SEQ ID NO: 229072 - DNA, 75 bp, synthetic construct
  source 1..75: mol_type = other DNA
caaggtcaataaaaacgtcctggaatatctaaaaaaacactatccggatgaagaccaaaaaggtatgggtaaaac

SEQ ID NO: 229073 - DNA, 75 bp, synthetic construct
  source 1..75: mol_type = other DNA
agtgcacgccagactttcaacggtgggatcaccggggcgctgacagggaacgccgacaccgcgacgaaattaaaa

SEQ ID NO: 229074 - DNA, 75 bp, synthetic construct
  source 1..75: mol_type = other DNA
taaccagtagcagaagtgatgttgctgcaagttcgctggcagttaaaaaagcctacgatctggcgaacagtaagt

SEQ ID NO: 229075 - DNA, 75 bp, synthetic construct
  source 1..75: mol_type = other DNA
gcaagaactattggtggtgtttcatttaatggcaccgcaaacatcgacctgccgggcgtgaataaaacaggcaat

SEQ ID NO: 229076 - DNA, 75 bp, synthetic construct
  source 1..75: mol_type = other DNA
aagattccgttcccggcgttaataccaaagggaatcaggacacctctggtaatgcggctacagcgaccaaattgc

SEQ ID NO: 229077 - DNA, 75 bp, synthetic construct
  source 1..75: mol_type = other DNA
gcccggaagaagaggatgaaaaaccgtgggttaacgatgataaaccgcaggtgattgtggtgggcttcggacgtt

SEQ ID NO: 229078 - DNA, 75 bp, synthetic construct
  source 1..75: mol_type = other DNA
gttatcgaccatcaggctgtacaggcctgggcggacagcctcagtactgaccatccgttaccggtgccacgctga

SEQ ID NO: 229079 - DNA, 75 bp, synthetic construct
  source 1..75: mol_type = other DNA
ggcgcatcgacattaatcctccactttaatatgaatgcggggagttgccctgctgtacagttccgcgtgaattac

SEQ ID NO: 229080 - DNA, 75 bp, synthetic construct
  source 1..75: mol_type = other DNA
ccagtggtcgtgccgtattgtctcaggaacaggacggcattaaatcacacgcccacagtgccagtgcatccagta

SEQ ID NO: 229081 - DNA, 75 bp, synthetic construct
  source 1..75: mol_type = other DNA
ttaaccgctgcgcatgttgctgcttttgccagaagagcaacggatacgtatgccgatgcggatggtggcgttccc

SEQ ID NO: 229082 - DNA, 75 bp, synthetic construct
  source 1..75: mol_type = other DNA
ccgctgagatgatgctgcgccacatgggttggacggaagcggctgacatgattgttaaaggtatggaaggcgcaa

SEQ ID NO: 229083 - DNA, 75 bp, synthetic construct
  source 1..75: mol_type = other DNA
ccgctgagatgatgctgcgccatatgggttggacggaagcggctgacgttattgttaaaggtatggaaggcgcaa

SEQ ID NO: 229084 - DNA, 75 bp, synthetic construct
  source 1..75: mol_type = other DNA
ccgctgagatgatgctgcgccaaatgggttggacggaagcggctgactttattgttaaaggtatggaaggcgcaa

SEQ ID NO: 229085 - DNA, 75 bp, synthetic construct
  source 1..75: mol_type = other DNA
aacctatgacttcgaacgtctgatggatggcgctaatctgctgaaatgttcagagtttggtgacgcgatcatcga

SEQ ID NO: 229086 - DNA, 75 bp, synthetic construct
  source 1..75: mol_type = other DNA
aacctatgacttcgaacgtctgatggaaggcgctaaactgctgaaatgttcagagtttggtgaagcgatcatcga

SEQ ID NO: 229087 - DNA, 75 bp, synthetic construct
  source 1..75: mol_type = other DNA
ccgctgagatgatgctgcgccagatgggttggacggaagcggctgacatcattgttaaaggtatggaaggcgcaa

SEQ ID NO: 229088 - DNA, 75 bp, synthetic construct
  source 1..75: mol_type = other DNA
gattacgtcattaatggccttataacaaccgccagcccgtgggaagaaggtggtcgtattcgttatgacctgtta

SEQ ID NO: 229089 - DNA, 75 bp, synthetic construct
  source 1..75: mol_type = other DNA
gtttggtagtcgtattgccacgaacggacttaatccaaacgatttgcctgctggctgggctggcggtgttcgcac

SEQ ID NO: 229090 - DNA, 75 bp, synthetic construct
  source 1..75: mol_type = other DNA
gccggaacaggaaccgatccgggaccaagaacctgttcaggctcagtatgtgaaatttcttaccagacattgatt

SEQ ID NO: 229091 - DNA, 75 bp, synthetic construct
  source 1..75: mol_type = other DNA
agtattcgctatgacaaaatttccacactgtcatcatccaacaatcaaagtagcgatccggggccaagaacatgt

SEQ ID NO: 229092 - DNA, 75 bp, synthetic construct
  source 1..75: mol_type = other DNA
aggtgaatatctccatttgaatggtcaggcaacattaaatgcgaaatgtacgcctaatggtctggtggggcgaga

SEQ ID NO: 229093 - DNA, 75 bp, synthetic construct
  source 1..75: mol_type = other DNA
tctgtttcatcagatcttagtgtgggtggaacttcgacccttaatggtcctgtaaatatcaacaacaacctgaaa

SEQ ID NO: 229094 - DNA, 75 bp, synthetic construct
  source 1..75: mol_type = other DNA
aacctatgacttcgaacgtctgatggacggcgctaatctgctgaaatgttcagagtttggtgatgcgatcatcga

SEQ ID NO: 229095 - DNA, 75 bp, synthetic construct
  source 1..75: mol_type = other DNA
ttcttcgcgctggtagtgctgggaattgtggcgcgcctgtgcgggttaagcgtctggatcctgattcgtattctg

SEQ ID NO: 229096 - DNA, 75 bp, synthetic construct
  source 1..75: mol_type = other DNA
gatacaggaactcagatcagaggtggtgagaaaaagagcagcttttcgcgcaccatcccattctcaaaaggctat

SEQ ID NO: 229097 - DNA, 75 bp, synthetic construct
  source 1..75: mol_type = other DNA
gatacaggaactcggatcagatgtggtgagaaaaagagcaactttccgcacaccattccgttatcagaaagttat

SEQ ID NO: 229098 - DNA, 75 bp, synthetic construct
  source 1..75: mol_type = other DNA
ttaatcgtgtggcggatgcgcagcagtatggcggctcaatgcagaaagaatatgccgcccgtgccgcgacgacgg

SEQ ID NO: 229099 - DNA, 75 bp, synthetic construct
  source 1..75: mol_type = other DNA
actgcgtttaatatgacgcaggatgaagtggctgggctggctgacaaaatcaactaccttggtaataccggcccg

SEQ ID NO: 229100 - DNA, 75 bp, synthetic construct
  source 1..75: mol_type = other DNA
agggaatgcgcgttatcgatttgccgaaaacaggcgatccctttatgaaaataacccatgacgttgggtattcac

SEQ ID NO: 229101 - DNA, 75 bp, synthetic construct
  source 1..75: mol_type = other DNA
ccagggtgtttcggtgggcatacgaacgaggaaaggtgaagatgaatccttgccagggcgtaaagcaatttaaag

SEQ ID NO: 229102 - DNA, 75 bp, synthetic construct
  source 1..75: mol_type = other DNA
tggcggtatcggtatcgcccctggcgcaaacatcggtgacgaatgcgccctgtttgaagccacccacggtactgc

SEQ ID NO: 229103 - DNA, 75 bp, synthetic construct
  source 1..75: mol_type = other DNA
gccgaaatacgccggtcaggacaaagtaaaccctggctctattattctctccgctgagatgatgttacgccatat

SEQ ID NO: 229104 - DNA, 75 bp, synthetic construct
  source 1..75: mol_type = other DNA
cttatctggtttgtcggcaccttcgtggcgggcaaggccagcttacgcttaaggaatttacccgtatgatcgaag

SEQ ID NO: 229105 - DNA, 75 bp, synthetic construct
  source 1..75: mol_type = other DNA
tctgaaagcaaaaggtatctctgatctggaaggcagcctggaagagaagcaagcaatttccgggcataagaaccc

SEQ ID NO: 229106 - DNA, 75 bp, synthetic construct
  source 1..75: mol_type = other DNA
cttgaaggaaccttgcaggaaaagcaacaaatttcaggtcacaaaacaatcacacagacagccagatacgatcga

SEQ ID NO: 229107 - DNA, 75 bp, synthetic construct
  source 1..75: mol_type = other DNA
tgtgaataccaaagggatgagcgatcctgtccagatgctgcgggcgctgacaggagatgccgggttcgatgacat

SEQ ID NO: 229108 - DNA, 75 bp, synthetic construct
  source 1..75: mol_type = other DNA
tctcaatttaataatgatgaggataaacttgcggaatatcttaaggaaaaatataaaaggactcgaaagcgtgtt

SEQ ID NO: 229109 - DNA, 75 bp, synthetic construct
  source 1..75: mol_type = other DNA
ttctcgccacctggtaataattatgaacgcttgcagggtaagctaactgggtggtcaagcattcgggtaagcatt

SEQ ID NO: 229110 - DNA, 75 bp, synthetic construct
  source 1..75: mol_type = other DNA
gatgggcattggcgctatcgattatgctattaacggcggcatacaaccgtcgcgggtggtggtggtcgatatcga

SEQ ID NO: 229111 - DNA, 75 bp, synthetic construct
  source 1..75: mol_type = other DNA
ctggcggccagcaaaggcattgagctgatatatgtgaataccaaaggaatggccgatccggtacagaagctgcgg

SEQ ID NO: 229112 - DNA, 75 bp, synthetic construct
  source 1..75: mol_type = other DNA
gaagtgggtaaaaatcttaccgacaaatataaaaaaggtcagcgatttgttttacagcctgcgatggggttaccc

SEQ ID NO: 229113 - DNA, 75 bp, synthetic construct
  source 1..75: mol_type = other DNA
ctgacggcaccgtcaaagtgctggtcgagggggtacagcgcgcgcgtatttctgcgctctctgacaatggcgaac

SEQ ID NO: 229114 - DNA, 75 bp, synthetic construct
  source 1..75: mol_type = other DNA
atgctggtcgcgcagaaagaagcttcaacggatgagccaggtgtaaacgatcttttcaccgtcgggaccgtggcc

SEQ ID NO: 229115 - DNA, 75 bp, synthetic construct
  source 1..75: mol_type = other DNA
ttgagaaacgcattcgcaaccgcgttaaaaagcagatggagaaatcccagcgtgagtactatctgaacgagcaaa

SEQ ID NO: 229116 - DNA, 75 bp, synthetic construct
  source 1..75: mol_type = other DNA
ttataccgaagatgaaaaactgaatatcgccaaacgtcacctgctgccgaagcagattgaacgtaatgcactgaa

SEQ ID NO: 229117 - DNA, 75 bp, synthetic construct
  source 1..75: mol_type = other DNA
ctggcgtggacggaagtgggcggtgacttgctgaccattgaaaccgcgtgcgttccggggaaaggcaaactgacc

SEQ ID NO: 229118 - DNA, 75 bp, synthetic construct
  source 1..75: mol_type = other DNA
acttgctgaccatcgagacagcgtgtgttccaggcaaaggtaaactcacttacactggttcgctgggcgaagtga

SEQ ID NO: 229119 - DNA, 75 bp, synthetic construct
  source 1..75: mol_type = other DNA
attgcccttagcgccactgggcagttacagccgtcgtttatggtgacccatatcggtggcctggatgcggtgcca

SEQ ID NO: 229120 - DNA, 75 bp, synthetic construct
  source 1..75: mol_type = other DNA
cttctacaggaagaacaagcgtaggtgaatatttacaaataaatggcacggcgactgaaaatactgtatgtgcgc

SEQ ID NO: 229121 - DNA, 75 bp, synthetic construct
  source 1..75: mol_type = other DNA
atgaataaaaaacagtttattaagtcaacaacgtcaagcaaggaagagctagagaaagagctaaactccctgaaa

SEQ ID NO: 229122 - DNA, 75 bp, synthetic construct
  source 1..75: mol_type = other DNA
agagaaagagctaaactccctgaaatatgctctgtgtctggtttactcaagactgccaatggaagataaaaacgc

SEQ ID NO: 229123 - DNA, 75 bp, synthetic construct
  source 1..75: mol_type = other DNA
tgctgccggaacaggaaccgatccgggaccaagaacctgttcaggttcagtatgtgaaattacttaccagacatt

SEQ ID NO: 229124 - DNA, 75 bp, synthetic construct
  source 1..75: mol_type = other DNA
tttctggaaaaactgtaatatctcgtggcgatacctatactcaaaactggttcagaatattaggtgatggaggtc

SEQ ID NO: 229125 - DNA, 75 bp, synthetic construct
  source 1..75: mol_type = other DNA
tgaaacagatcggtgaagcagttaatggctatataaatatccgttatgataaattatcaaccttatccaatgctg

SEQ ID NO: 229126 - DNA, 75 bp, synthetic construct
  source 1..75: mol_type = other DNA
aaatctataacgattactccttgtcaaaaaaatccattggttttttatagccagcatgttcacacagttactcaa

SEQ ID NO: 229127 - DNA, 75 bp, synthetic construct
  source 1..75: mol_type = other DNA
gcttgcctgtcggtccaattgctgaaaaggaacgatggcagcacgatatgctgattcgttttcctgaagatgctg

SEQ ID NO: 229128 - DNA, 75 bp, synthetic construct
  source 1..75: mol_type = other DNA
gcgaagtactgattcgctggcatcaccccgtcagcggaattatcccaccagatcagtttatcccgctggcagagt

SEQ ID NO: 229129 - DNA, 75 bp, synthetic construct
  source 1..75: mol_type = other DNA
gtttgtacaaatggtcggagtggatgaaatctccgggcatatagtagaaaatgttattgagctggctcgtcggtt

SEQ ID NO: 229130 - DNA, 75 bp, synthetic construct
  source 1..75: mol_type = other DNA
gtaacgcagatactcagcgtgaattaagcaatctgctgctgaagcgcccccaacttcgtgcactgagcctggcaa

SEQ ID NO: 229131 - DNA, 75 bp, synthetic construct
  source 1..75: mol_type = other DNA
agaaaaactttcatttgcagaaggttcactttgccattcaaaggattcaatttgcgttggagtcctattctaatt

SEQ ID NO: 229132 - DNA, 75 bp, synthetic construct
  source 1..75: mol_type = other DNA
gaatctggcgggaatcgttgacactggccgtcaactggctactatcaatggtgattctacgttatccgtttctcc

SEQ ID NO: 229133 - DNA, 75 bp, synthetic construct
  source 1..75: mol_type = other DNA
cactgcgaccatcgcggcctgccgctggcccttatcagcaaggaagggacaacagaatggtgcgcagaatacgat

SEQ ID NO: 229134 - DNA, 75 bp, synthetic construct
  source 1..75: mol_type = other DNA
ttggataacatatgggccatctgggcaccccatttctaatatgcaaggtacgccagaaaaacccagtgatataag

SEQ ID NO: 229135 - DNA, 75 bp, synthetic construct
  source 1..75: mol_type = other DNA
cagtgacaaagttggacccaaaacagtatttttggttgctgcactgttgtggtctgttttttgtggtatgaccgg

SEQ ID NO: 229136 - DNA, 75 bp, synthetic construct
  source 1..75: mol_type = other DNA
ctgctttagaaacggttcagtacaaccgaagtaagggggcttacatctgtgcattttgtttagatgagcagaaaa

SEQ ID NO: 229137 - DNA, 75 bp, synthetic construct
  source 1..75: mol_type = other DNA
gataatcccggtcggcactcaaacttttttgacctgtaacagaataaccatatccgtgcggctcttctcgtcaga

SEQ ID NO: 229138 - DNA, 75 bp, synthetic construct
  source 1..75: mol_type = other DNA
cgctggctggcatcgtgcggcctgactgtggcgcagatgcaaagccagatggacccggtatacacgccggcgcga

SEQ ID NO: 229139 - DNA, 75 bp, synthetic construct
  source 1..75: mol_type = other DNA
gtcatcattctgggatggatgaacgatgaaaacacgctgcgcacctacggtaaaaaaacagatgcctataccgta

SEQ ID NO: 229140 - DNA, 75 bp, synthetic construct
  source 1..75: mol_type = other DNA
cacgggtaaaatttggtgctggtcgctatcgtctcttctttcgttatagtgaaaaagagaaagtcatcattctgg

SEQ ID NO: 229141 - DNA, 75 bp, synthetic construct
  source 1..75: mol_type = other DNA
ctataacaacaaaagaccttggtaattggataacatatgggccatctgggcaccccatttctaatatgcaaggta

SEQ ID NO: 229142 - DNA, 75 bp, synthetic construct
  source 1..75: mol_type = other DNA
ccagctgcagcagctcatccgcctgccgggtcagcagtatgatgaggagtccggcctctattacaaccgccaccg

SEQ ID NO: 229143 - DNA, 75 bp, synthetic construct
  source 1..75: mol_type = other DNA
cagtaaggaaggggcaacagaatggtgcgcagaatacgatgagtggggcaacctgctgaatgaagagaacccgca

SEQ ID NO: 229144 - DNA, 75 bp, synthetic construct
  source 1..75: mol_type = other DNA
gtgcaggtgggtgatgtttttgcggtggcgctgaccgatattccacagggagaaacaggcgacggcataaccgaa

SEQ ID NO: 229145 - DNA, 75 bp, synthetic construct
  source 1..75: mol_type = other DNA
atgactgaagaacagaaattccagttagagatttataaactggtcatgaaccagaacgcagcagccgaggaagca

SEQ ID NO: 229146 - DNA, 75 bp, synthetic construct
  source 1..75: mol_type = other DNA
ccggaaaccctcgatccgatcaacctgctgggcgtgctgcgtcgtgctcgcgggagctttgttatcgtgaccaac

SEQ ID NO: 229147 - DNA, 75 bp, synthetic construct
  source 1..75: mol_type = other DNA
atcatgacgccgcgcggtgaaataagctgggttgacgctaatctcggggtcgatgaaatccgcgagcagctgctc

SEQ ID NO: 229148 - DNA, 75 bp, synthetic construct
  source 1..75: mol_type = other DNA
acgcatggacggcaaggctggaggcgcatgatgagcgtgcgtcggaacttttttgtaccgtcagtgatgaactga

SEQ ID NO: 229149 - DNA, 75 bp, synthetic construct
  source 1..75: mol_type = other DNA
gcagccgcagaagaagcatttcagttcattggcactgacgagttgaagcttgagctattcaaaattcacttccag

SEQ ID NO: 229150 - DNA, 75 bp, synthetic construct
  source 1..75: mol_type = other DNA
gaaaaaaaccgtggctgaagtcgagcactccagtgccgaagtgacgacaaacattgaggcattggctaaaacaaa

SEQ ID NO: 229151 - DNA, 75 bp, synthetic construct
  source 1..75: mol_type = other DNA
cacagggtgaaacaggcgacggcatgaccgaaggtgtgtttatgctgcctaagctgaaaacggatgacatgaaaa

SEQ ID NO: 229152 - DNA, 75 bp, synthetic construct
  source 1..75: mol_type = other DNA
gccgccggatgcaccgactgcactgacggccgtgggcgactaccgcaacgtgattctgaattgggttaacccgga

SEQ ID NO: 229153 - DNA, 75 bp, synthetic construct
  source 1..75: mol_type = other DNA
gcacacaaattttatttaggtaaagtggggcaaggattcctttaccttattttttgctggacattcattccggca

SEQ ID NO: 229154 - DNA, 75 bp, synthetic construct
  source 1..75: mol_type = other DNA
gctgacactggcgtctcgctctctgcgtgggattatgacaccgcgcggcgaaattagctgggttgacgctaatct

SEQ ID NO: 229155 - DNA, 75 bp, synthetic construct
  source 1..75: mol_type = other DNA
ttctcgatgccgtcttctcgctggatgcggtgattaccgcagttgggatggtcaaccacctgccggtgatgatgg

SEQ ID NO: 229156 - DNA, 75 bp, synthetic construct
  source 1..75: mol_type = other DNA
cggggggatattcttgctgtttaaagcgacaacggagctgcatgaacggctggaaaaccgcgatcatgattctgg

SEQ ID NO: 229157 - DNA, 75 bp, synthetic construct
  source 1..75: mol_type = other DNA
cacttgcaggcaacggtgaagaacactggaaattaacccgcccgcttagccagcatgcggcattgattgaggccg

SEQ ID NO: 229158 - DNA, 75 bp, synthetic construct
  source 1..75: mol_type = other DNA
atgcaaggcgcgcagatattacaaacgacgttatgcgcggctatcgatcgcacgctgtggctgtgtgaatctaac

SEQ ID NO: 229159 - DNA, 75 bp, synthetic construct
  source 1..75: mol_type = other DNA
caggccggaatcgggcatatcgtcgcggtacatgtgaaagacaccaaacctggcgtcttcaaaaacgtgccgttt

SEQ ID NO: 229160 - DNA, 75 bp, synthetic construct
  source 1..75: mol_type = other DNA
atggaacagttcaagaagaaaaagttaccgctgtttattgcaggtgcgggtggtaaaaaaagcagcaaaagctcc

SEQ ID NO: 229161 - DNA, 75 bp, synthetic construct
  source 1..75: mol_type = other DNA
aattcccctctttacgtagcgttgataaaagctctggcgatacaaatggcactacggtgaagtacaaattccaga

SEQ ID NO: 229162 - DNA, 75 bp, synthetic construct
  source 1..75: mol_type = other DNA
gcctattagcggcaatactgtcggttaatgattgcggttatctcaaatcttcggtcaactcacgagagtaccatt

SEQ ID NO: 229163 - DNA, 75 bp, synthetic construct
  source 1..75: mol_type = other DNA
tatcaaaatccgagtaccgtcaaactacaacgaatacaccaatacttatgtcggcgtatgggacggtacttttaa

SEQ ID NO: 229164 - DNA, 75 bp, synthetic construct
  source 1..75: mol_type = other DNA
gccgcgcgcaggtgacgctggcaatggagatcatggattatccattgatgaactccatcagcaaggcgctgggct

SEQ ID NO: 229165 - DNA, 75 bp, synthetic construct
  source 1..75: mol_type = other DNA
aatgcagccatctcgtatgcaaaccgcttgcctgcgcctgttgataatcaaagctgaacagcaaaaaatcccgcc

SEQ ID NO: 229166 - DNA, 75 bp, synthetic construct
  source 1..75: mol_type = other DNA
attttgtcgagatgtcggtagatgaaacggacgatcgcctttcgcgcctcgactggagccgcgagcagcgtctgg

SEQ ID NO: 229167 - DNA, 75 bp, synthetic construct
  source 1..75: mol_type = other DNA
taaaactcacaaccagggcgtgttcgacgtttacactccggacatcctgcgttgccgtaaatccggtgttctgac

SEQ ID NO: 229168 - DNA, 75 bp, synthetic construct
  source 1..75: mol_type = other DNA
aaagcacaaatatcaacttatttcggcttgagccactgtgagacggaggaggcaatctcagatcttgtacagcgc

SEQ ID NO: 229169 - DNA, 75 bp, synthetic construct
  source 1..75: mol_type = other DNA
tggggactctacggctttttgtccgaaatgttttgagaatgagcataaaaaaatacatatgcagtcccgtgaaag

SEQ ID NO: 229170 - DNA, 75 bp, synthetic construct
  source 1..75: mol_type = other DNA
tccgcaaagctgaacgctggggaccgcgcacgctcgatcttgatatcatgttgtttggtaatcaggtcataaaca

SEQ ID NO: 229171 - DNA, 75 bp, synthetic construct
  source 1..75: mol_type = other DNA
cggagctggtctttcctgatggcgcattgttgcaaaatatacttaatactcggaatttttcacaacctgcaatct

SEQ ID NO: 229172 - DNA, 75 bp, synthetic construct
  source 1..75: mol_type = other DNA
atcggtgatatccctgaaagctgcattcttgccgtttcttcgttttaccgcaccccaccgctggggccgcaggat

SEQ ID NO: 229173 - DNA, 75 bp, synthetic construct
  source 1..75: mol_type = other DNA
agtgattcaaaacctcgtatcttgttggtcgatcaggttctaggtgatttatccattcagggggccatggctagt

SEQ ID NO: 229174 - DNA, 75 bp, synthetic construct
  source 1..75: mol_type = other DNA
aatatcgtcaaaaaagatctgctgcgcgatccaggtctgcaccgttcgatgtttgctaacggcctgtcgaccgtg

SEQ ID NO: 229175 - DNA, 75 bp, synthetic construct
  source 1..75: mol_type = other DNA
tcatcatctccattaccaccctggcggtcacggttttaggttccgtgctgtttcgtggtttcctggcaattatcc

SEQ ID NO: 229176 - DNA, 75 bp, synthetic construct
  source 1..75: mol_type = other DNA
cctggacgccaacgccgaacactcggcgcgaatatgcgaaacgaggggagagtttgcccgcatttgttcctgcgg

SEQ ID NO: 229177 - DNA, 75 bp, synthetic construct
  source 1..75: mol_type = other DNA
atattggcaggttgtatgccatccatggtaccaatgccaattttggtattgggctccgggtaagtcagggctgta

SEQ ID NO: 229178 - DNA, 75 bp, synthetic construct
  source 1..75: mol_type = other DNA
ccattccgcagcaactgattttgcccgccactgttcgtaaagggattgtggttaacgtcgctgagatgcgtcttt

SEQ ID NO: 229179 - DNA, 75 bp, synthetic construct
  source 1..75: mol_type = other DNA
cggagctggtctttcctgatggaacgatattagaaaacttattaagaaaaaataaatttcatgaattaaataaat

SEQ ID NO: 229180 - DNA, 75 bp, synthetic construct
  source 1..75: mol_type = other DNA
caattctaggcgctgccggaatgaaagcgacagatcgcgagtttggattagtcagcgagcaggtcgtaaaaatcc

SEQ ID NO: 229181 - DNA, 75 bp, synthetic construct
  source 1..75: mol_type = other DNA
ttcagctctggtagcaataaataatgatatgccttttgattctgtgataaatcagataaaccaacatgcagataa

SEQ ID NO: 229182 - DNA, 75 bp, synthetic construct
  source 1..75: mol_type = other DNA
ggtggctcgcaccgtcgctacgcagacgtaggcgacatcatcaagatcaccatcaaagaagcaattccgcgtggt

SEQ ID NO: 229183 - DNA, 75 bp, synthetic construct
  source 1..75: mol_type = other DNA
gtcattcgcttcgatggtaatgcttgtgttcttctgaacaacaacagcgagcagcctatcggtacgcgtattttt

SEQ ID NO: 229184 - DNA, 75 bp, synthetic construct
  source 1..75: mol_type = other DNA
agaaaaatcctcgactcaacgaaaagcaaaggttatttcgggctgactttttatgatggaggcgcccgcagtttc

SEQ ID NO: 229185 - DNA, 75 bp, synthetic construct
  source 1..75: mol_type = other DNA
tgcaacggttccggcggtgaagggaacgccgaacgctggggcaatctggaaaatgagaacggcgatatttccggt

SEQ ID NO: 229186 - DNA, 75 bp, synthetic construct
  source 1..75: mol_type = other DNA
aaaaggcgttgccagtagtcaatgtgatacagcataacctgagcagttatgagcaactactgcgtggcaagggag

SEQ ID NO: 229187 - DNA, 75 bp, synthetic construct
  source 1..75: mol_type = other DNA
aaggtcaaaaaaggtgatgtgctgaagccggtagtggtgcgcaccaacaagggtgttcgtcgcccggacggttct

SEQ ID NO: 229188 - DNA, 75 bp, synthetic construct
  source 1..75: mol_type = other DNA
aggataagtctcatcctgttcataaagcgatggagttctttgcgaaaaagagcaaagagtactctaacggtgata

SEQ ID NO: 229189 - DNA, 75 bp, synthetic construct
  source 1..75: mol_type = other DNA
ggtaatcaggtgctgccgtttggcgaccttgccaccatcggcttctttgtagcgatggcggtcgcggtgcatcgt

SEQ ID NO: 229190 - DNA, 75 bp, synthetic construct
  source 1..75: mol_type = other DNA
cgggatcatctccaatgacctgggcgtcgcaaattgcgctggtggctattccgattgcgattctggttaacgtgg

SEQ ID NO: 229191 - DNA, 75 bp, synthetic construct
  source 1..75: mol_type = other DNA
taaaagtctacccggttgataaagcaccgtttatcgagaaagtacaaccgatgtacgcaaacttcgctaaagata

SEQ ID NO: 229192 - DNA, 75 bp, synthetic construct
  source 1..75: mol_type = other DNA
gtcgatatggcagaaaacagcgtgatggcactgaccactatgcgtcacggtgaagtggcaaaatcctttagcctt

SEQ ID NO: 229193 - DNA, 75 bp, synthetic construct
  source 1..75: mol_type = other DNA
gcagttatattaaaagcagctaaagaatcaatgagctacatgaaagacttgtggagcgaggaagagaaacaagaa

SEQ ID NO: 229194 - DNA, 75 bp, synthetic construct
  source 1..75: mol_type = other DNA
cagcgaacgtaccgggcttgaaagtgaactgatggctgtcagcgaggaaattgccgggattaccggaatcagcgg

SEQ ID NO: 229195 - DNA, 75 bp, synthetic construct
  source 1..75: mol_type = other DNA
caacaatgttaatgggaagatcacaacgccatttgttatcgaaaacagcattgcatatatgaacggtgcttatat

SEQ ID NO: 229196 - DNA, 75 bp, synthetic construct
  source 1..75: mol_type = other DNA
ctgggacgtaaactgaataatcaaggtcactcaattggcattgctctcggtgcttgtaccgtccctgccgcaggc

SEQ ID NO: 229197 - DNA, 75 bp, synthetic construct
  source 1..75: mol_type = other DNA
gatcgacggcggtgaaggcgtactgctgattatcaaaaactacactggcgatattcttaacttcgaaacagcaac

SEQ ID NO: 229198 - DNA, 75 bp, synthetic construct
  source 1..75: mol_type = other DNA
cccacaattcagccttcgacgatgaattcctgtggctggaagagttgcacgatgaaaaatcactacaatgggtca

SEQ ID NO: 229199 - DNA, 75 bp, synthetic construct
  source 1..75: mol_type = other DNA
tgctgtatggttacggcggtttttccgagtcactgctaccggactatctgggggacgaggcaccggcctggctgg

SEQ ID NO: 229200 - DNA, 75 bp, synthetic construct
  source 1..75: mol_type = other DNA
gtcaccggatggcggtgatgccactgaaattcgtgaattcgatctggtgaccagatgtttcattaaagacgggtt

SEQ ID NO: 229201 - DNA, 75 bp, synthetic construct
  source 1..75: mol_type = other DNA
atgaaatagactggaaaataccggaaaactgcatcatagagcaggccaagggtaaaaaatggtccgagcaggata

SEQ ID NO: 229202 - DNA, 75 bp, synthetic construct
  source 1..75: mol_type = other DNA
caccaacgctactgaaaaatatcgggcgagaagatgtgccggaatttaaatttaatccgctctttacgacgctgt

SEQ ID NO: 229203 - DNA, 75 bp, synthetic construct
  source 1..75: mol_type = other DNA
gaaaaatatcattgagggcgatggcattgaacgctatgaactggactggaatataaaaccacaaaatattatcac

SEQ ID NO: 229204 - DNA, 75 bp, synthetic construct
  source 1..75: mol_type = other DNA
ttgattatcaaaaattacaccggcgatattcttaacttcgaaacagcaaccgagttactgcacgatagcggcgta

SEQ ID NO: 229205 - DNA, 75 bp, synthetic construct
  source 1..75: mol_type = other DNA
acttcatggactggctggctaaacagtacatcactgcactgaacatcattcactacatgcacgacaagtacagct

SEQ ID NO: 229206 - DNA, 75 bp, synthetic construct
  source 1..75: mol_type = other DNA
tggatgtgtacatcgaacgtgacctgaaagctggtaagatcaccgaacaagaagcgcaggaaatggttgaccacc

SEQ ID NO: 229207 - DNA, 75 bp, synthetic construct
  source 1..75: mol_type = other DNA
gtcaaacaatcatttcatcccactccccacaaatagcggtaaacttcgagccagattcaataataagattgcttg

SEQ ID NO: 229208 - DNA, 75 bp, synthetic construct
  source 1..75: mol_type = other DNA
tatcaaagctaaaagataaagaaaagtggcactatgcagggattaatcgatgtttagatatagctggtatagaaa

SEQ ID NO: 229209 - DNA, 75 bp, synthetic construct
  source 1..75: mol_type = other DNA
cgctggtaagcgccattgtcgaaactggcgtgcgcgtgccgtctatgtgcctttccgcccatcgccgtttcccgc

SEQ ID NO: 229210 - DNA, 75 bp, synthetic construct
  source 1..75: mol_type = other DNA
aagagtcataaacgaaaaaaatttcgtaatcgaattaaaagattgtgacggaatatcaaaagctaaagtaacaat

SEQ ID NO: 229211 - DNA, 75 bp, synthetic construct
  source 1..75: mol_type = other DNA
tttctgaaacgccgccgcctcttgattatgttttacctaacatggttgccggtacggtgggggccttggtttcac

SEQ ID NO: 229212 - DNA, 75 bp, synthetic construct
  source 1..75: mol_type = other DNA
taaatagccaatacgtacaacttggtacaaataacaatattaatatacaagagctctctgagttcttctcaaaaa

SEQ ID NO: 229213 - DNA, 75 bp, synthetic construct
  source 1..75: mol_type = other DNA
catgcagcaagtggatgcttacatcagatggtataacgagcggcgtataaaattatcgctgggtgccgtcagcac

SEQ ID NO: 229214 - DNA, 75 bp, synthetic construct
  source 1..75: mol_type = other DNA
tgtcaaaacgttaaatgctggcgaacgaccgatgatacacagtggcagaggtgggcattatcgctggccaggctg

SEQ ID NO: 229215 - DNA, 75 bp, synthetic construct
  source 1..75: mol_type = other DNA
atggcattgaatgataagagtgcttgcgttcgagctacggcaatcgagtcaacggccagggaaagatcatcaaaa

SEQ ID NO: 229216 - DNA, 75 bp, synthetic construct
  source 1..75: mol_type = other DNA
aacgcgtcgtcgtttccgtgacggcctgaaagagagcgttgagatggcaagccgcgcgcaggtgacgctggcgat

SEQ ID NO: 229217 - DNA, 75 bp, synthetic construct
  source 1..75: mol_type = other DNA
gactggagccgcgaacagcgtctggcgctggtgaatgctattgttgaaaccggcgtgcgtgtgccgtccatgtgc

SEQ ID NO: 229218 - DNA, 75 bp, synthetic construct
  source 1..75: mol_type = other DNA
aaaagcgttggcattaagctaacagcaaagaagacaggtgtttattaccgtagctatgagctgaagctgcctaag

SEQ ID NO: 229219 - DNA, 75 bp, synthetic construct
  source 1..75: mol_type = other DNA
gcgagttatgtggtcgtcaacactcaggccactggtggcacagcgaatgcccttgtcaatttttccatcacctat

SEQ ID NO: 229220 - DNA, 75 bp, synthetic construct
  source 1..75: mol_type = other DNA
attgaactgatgggtggttcacccactccaatttcatttggcgaagtttatactgcgatgcagcaaggtgtagta

SEQ ID NO: 229221 - DNA, 75 bp, synthetic construct
  source 1..75: mol_type = other DNA
tttttgctttatcagcttatgtagcgggtactcgcagtttctatgcgaaaaaaccgattacaaagccagaagatc

SEQ ID NO: 229222 - DNA, 75 bp, synthetic construct
  source 1..75: mol_type = other DNA
ttagctaaagagttacatacaaatgtaataggacctgacacgctatggacgtggtgggggcgaggaactaatggt

SEQ ID NO: 229223 - DNA, 75 bp, synthetic construct
  source 1..75: mol_type = other DNA
gctgccgattgtcatcattattttttctaaaatattaggcatgaaggcaggcgattgctttaaagcgggtctgca

SEQ ID NO: 229224 - DNA, 75 bp, synthetic construct
  source 1..75: mol_type = other DNA
aatgcgttagccaatcgtgtgacacaattacagagtaaatttgaaggtgatatcagtgccgcaataaggaccgaa

SEQ ID NO: 229225 - DNA, 75 bp, synthetic construct
  source 1..75: mol_type = other DNA
tcgactagaatggcttgaaaagcactctcaatttatcctcgtttggtatgctatattgagtgcggtactttcaat

SEQ ID NO: 229226 - DNA, 75 bp, synthetic construct
  source 1..75: mol_type = other DNA
accgtgaagcgcgattaaaaggtgaagtgcgaaatgaagatggcgcgcttatgtcgccagttaagccccgaacgg

SEQ ID NO: 229227 - DNA, 75 bp, synthetic construct
  source 1..75: mol_type = other DNA
gttcttaaagaaattcttgggcatgccgatattaagatgacaatgatctatgcacatttctccccagatcattta

SEQ ID NO: 229228 - DNA, 75 bp, synthetic construct
  source 1..75: mol_type = other DNA
aatggaagaagtgaacaaaaaaccatggctgggggaaaaggaagatcggcgacacctatcagaattaattgagca

SEQ ID NO: 229229 - DNA, 75 bp, synthetic construct
  source 1..75: mol_type = other DNA
cacggaaggggcaacagcgtggtgcgcagaatatgatgaatggggcaacctgctgagtgatgagaacccgcatca

SEQ ID NO: 229230 - DNA, 75 bp, synthetic construct
  source 1..75: mol_type = other DNA
taaaaacaaaaacaggtaaagatattgcagcggcggtagcagttgaaaccaaagcaagaactgacgctaacgatg

SEQ ID NO: 229231 - DNA, 75 bp, synthetic construct
  source 1..75: mol_type = other DNA
gatgaaagtgttgcggctgtagaagaaatgcagagaacagttgctgaggtaggaagagtaagttcagaaatcaca

SEQ ID NO: 229232 - DNA, 75 bp, synthetic construct
  source 1..75: mol_type = other DNA
agcgccgatctgcagatcactgatatggcgatcgctcctgtttccggggatgtagaaaaatcagcggctgaaact

SEQ ID NO: 229233 - DNA, 75 bp, synthetic construct
  source 1..75: mol_type = other DNA
tagtgatgtttgcgccgttctttatttttatcttcgggccactgttacaatacaacattttagtaggatcgattg

SEQ ID NO: 229234 - DNA, 75 bp, synthetic construct
  source 1..75: mol_type = other DNA
aaaatgcgtccgtcaaaaagaacagttcgcttcgaaactcagcctggataccagctccagcatgactggggcgaa

SEQ ID NO: 229235 - DNA, 75 bp, synthetic construct
  source 1..75: mol_type = other DNA
ttcgatatccgccatgtgtcctgggacagctatatcgaggttggtggtaatcgttacagcgttcccgaagcgctg

SEQ ID NO: 229236 - DNA, 75 bp, synthetic construct
  source 1..75: mol_type = other DNA
tttctgcatctgacggaaagcctggcacaaagcgtgacacatattgccgtgaagcgcggtcaacggcccgcgaag

SEQ ID NO: 229237 - DNA, 75 bp, synthetic construct
  source 1..75: mol_type = other DNA
attaccggaaaatgtcacctggttatccccggaaggggagtttcagaagtggaacggcacatcctgggtgaaaga

SEQ ID NO: 229238 - DNA, 75 bp, synthetic construct
  source 1..75: mol_type = other DNA
caaaccggaactgatattgccgcagcggttgctgtagagacaaaggcaaggactgatgccgatagtgcattgtcc

SEQ ID NO: 229239 - DNA, 75 bp, synthetic construct
  source 1..75: mol_type = other DNA
gaagaagtatcgggtgttgctgaaccgtgttgatacatcaactgcaccggatattgaatggccaacaggacccat

SEQ ID NO: 229240 - DNA, 75 bp, synthetic construct
  source 1..75: mol_type = other DNA
acccggtccgttaccggaaaatgttacctggttgtcgccggaaggggaatatcagaagtggaacggtacagcctg

SEQ ID NO: 229241 - DNA, 75 bp, synthetic construct
  source 1..75: mol_type = other DNA
gatctggaaattgcaacggaggaagaaatctcgttgctggaagcatggaaaaagtatcgggtattgctgaaccgt

SEQ ID NO: 229242 - DNA, 75 bp, synthetic construct
  source 1..75: mol_type = other DNA
cgttatttatttctgaacttggcccattaccggaaaatgtcacctggttatccccggaaggggagtttcagaagt

SEQ ID NO: 229243 - DNA, 75 bp, synthetic construct
  source 1..75: mol_type = other DNA
ccgtaaaacggtttatgacgtggcatcaggggactcgttatttatttctgaactcggtccattaccggaaaatgt

SEQ ID NO: 229244 - DNA, 75 bp, synthetic construct
  source 1..75: mol_type = other DNA
aagaaatctcgttgctggaagcatggaaaaagtatcgggtattgctgaaccgtgttgatacgtcaacttcacagg

SEQ ID NO: 229245 - DNA, 75 bp, synthetic construct
  source 1..75: mol_type = other DNA
gggtgaaagatgcagaagcagaaaaactgtttcggataagggaggcggaagaaacaaaaaacagcctgatgcagg

SEQ ID NO: 229246 - DNA, 75 bp, synthetic construct
  source 1..75: mol_type = other DNA
caccaaaagagacggcgactacggctccagtacagacggcatccccggcgcaaaccacggcaacaccagccgctg

SEQ ID NO: 229247 - DNA, 75 bp, synthetic construct
  source 1..75: mol_type = other DNA
atctcttccacgccgactcaggggcaaaccccgacggcagcggatgggcagcaacgtgttgaagtgcagggcgat

SEQ ID NO: 229248 - DNA, 75 bp, synthetic construct
  source 1..75: mol_type = other DNA
ggcgaaaacgcaaaccgctgaacgtccggccactacgcgtccagctcgtcagcaggcggtgattgaaccgaaaaa

SEQ ID NO: 229249 - DNA, 75 bp, synthetic construct
  source 1..75: mol_type = other DNA
gcgtatattgttgatattgccactcaggttggttgctctgagcggactgtcagacggtacctgaaatacccggaa

SEQ ID NO: 229250 - DNA, 75 bp, synthetic construct
  source 1..75: mol_type = other DNA
accagctacagcatgactggggagaagttgaggctgaggttgccgggcaacgatgcagggttaacttcgcggtta

SEQ ID NO: 229251 - DNA, 75 bp, synthetic construct
  source 1..75: mol_type = other DNA
gaagaggcgaaaaaggcagtgtctacattgccagccgatgtccaggccaagaatccgtgggcgaaaccattacgc

SEQ ID NO: 229252 - DNA, 75 bp, synthetic construct
  source 1..75: mol_type = other DNA
gtggatcgcaacggagaaagaaaccttgttgctggaagcctggaaaaagtatcgggtgttgctgaaccgtgttga

SEQ ID NO: 229253 - DNA, 75 bp, synthetic construct
  source 1..75: mol_type = other DNA
tacggaagcagaaaaagtgttccggatacgggaggcggaagaaacaaaaaacagcctcatgcaggtagccagtga

SEQ ID NO: 229254 - DNA, 75 bp, synthetic construct
  source 1..75: mol_type = other DNA
cgggaaccacgtctgcggaaaatacccagcaggatgtttctctgccgccgatttcttctacgccgacccaggggc

SEQ ID NO: 229255 - DNA, 75 bp, synthetic construct
  source 1..75: mol_type = other DNA
tattgtgtcttgtgcatgagtatgtacctgcatcatcaaagcgcctgcagataagccggtggtttgcagaaggtt

SEQ ID NO: 229256 - DNA, 75 bp, synthetic construct
  source 1..75: mol_type = other DNA
gggctgtaacctggcggggcggcagatacgacaggctgccgtaaatcgcctgtggctgatggcagtgctggcgca

SEQ ID NO: 229257 - DNA, 75 bp, synthetic construct
  source 1..75: mol_type = other DNA
tgcggctggtttttgttgatggacgctacgtgcccgcactgagcgatgtaactgaaggcagcgggtatgaagtga

SEQ ID NO: 229258 - DNA, 75 bp, synthetic construct
  source 1..75: mol_type = other DNA
gttatatcgaggttggcggtaatcgttacagcgttcccgaagcgctgtgtggtcagccggtatcgatacgaatat

SEQ ID NO: 229259 - DNA, 75 bp, synthetic construct
  source 1..75: mol_type = other DNA
gagtggcgcgaagtgttccaggatctcaatcatcacggggtttatcacagcggggaagtggttgggctggggaat

SEQ ID NO: 229260 - DNA, 75 bp, synthetic construct
  source 1..75: mol_type = other DNA
tgcggctggtgtttgtcgatggacgctacgtgccatcacttagcgatacgaccgaaggcagcggctatgaggtga

SEQ ID NO: 229261 - DNA, 75 bp, synthetic construct
  source 1..75: mol_type = other DNA
gaagcgcggtcaacggccggcaaagccattgctgttaatgcatattacccagggcgtggcaggtgaagaggtgaa

SEQ ID NO: 229262 - DNA, 75 bp, synthetic construct
  source 1..75: mol_type = other DNA
ccattgctgttaatgcatatcacccagggcgtggcaggtgaagaggtgaacactgcccattaccggcatcatctg

SEQ ID NO: 229263 - DNA, 75 bp, synthetic construct
  source 1..75: mol_type = other DNA
gacggttatatcgaggtacggggtaatcgttactccgtaccggaggcctggtgtggccgcccggtctccatccgg

SEQ ID NO: 229264 - DNA, 75 bp, synthetic construct
  source 1..75: mol_type = other DNA
tgataaaacaaatgcgccagcagagggcgtacattgtcgatattgcggctcagattggttgctctgaacggacgg

SEQ ID NO: 229265 - DNA, 75 bp, synthetic construct
  source 1..75: mol_type = other DNA
atccgccacgtgtcccgggacagctatatcgaggttggtggtaatcgttacagcgttcccgaagcgctgtgtggt

SEQ ID NO: 229266 - DNA, 75 bp, synthetic construct
  source 1..75: mol_type = other DNA
ctggagcagtggatggctgacgatgccgacaggcgagaacttcgccagttcaggcagacaccggaacagcgcttc

SEQ ID NO: 229267 - DNA, 75 bp, synthetic construct
  source 1..75: mol_type = other DNA
atcgacgcgctggtagaacaggcgcgcgagcgcgtaataaaaacaggggagttaacgcgaaccgaggtcgatgaa

SEQ ID NO: 229268 - DNA, 75 bp, synthetic construct
  source 1..75: mol_type = other DNA
ccgctacttcggtggttgtgtgaaaacggtgctggttgataaccagaaggctgcggtgctgaagaataacaacgg

SEQ ID NO: 229269 - DNA, 75 bp, synthetic construct
  source 1..75: mol_type = other DNA
gtagtcaatggggtgctctggccgtggattttcttgctgatgcgtaaagtccgtcagcagtttgcagtgcaataa

SEQ ID NO: 229270 - DNA, 75 bp, synthetic construct
  source 1..75: mol_type = other DNA
atgaccagctgatcgacatggcatttatcactcaactgaccggcttaaccgataagtggttttataagctcatca

SEQ ID NO: 229271 - DNA, 75 bp, synthetic construct
  source 1..75: mol_type = other DNA
tggctttggtggtaaagagaaacgctttgcaatcaatacgcagatcaccagtcgacaggacgcataccgattaat

SEQ ID NO: 229272 - DNA, 75 bp, synthetic construct
  source 1..75: mol_type = other DNA
gcggaccagtgttgttaacgttaatgaacgccagtcatcgaggatttgttattctcaaacttgcgcccccctggc

SEQ ID NO: 229273 - DNA, 75 bp, synthetic construct
  source 1..75: mol_type = other DNA
gcactaggcgggttgatcgtgggtctgctttccctgttcacacctgcagtgtggggcaacggctatagcaccgta

SEQ ID NO: 229274 - DNA, 75 bp, synthetic construct
  source 1..75: mol_type = other DNA
tgttctggagtagtgtagtcaatggtgtgctctggccgtggattttcttgctgatgcgcaaaatccgtcagcagt

SEQ ID NO: 229275 - DNA, 75 bp, synthetic construct
  source 1..75: mol_type = other DNA
gccgttggagactatcgtaatgtgatactgaattgggttaatccagattcggtagaccttgatcacattaatgtt

SEQ ID NO: 229276 - DNA, 75 bp, synthetic construct
  source 1..75: mol_type = other DNA
atctaagtttgaaggagatatcagcgcggcgattagtacagagcaggaggctcgtacatctgccgatgaagctct

SEQ ID NO: 229277 - DNA, 75 bp, synthetic construct
  source 1..75: mol_type = other DNA
cgtgtgttgaatgagggggagcattgcacgcctgagctggtaaaagctgtctttgacgttgatgttcacgcatca

SEQ ID NO: 229278 - DNA, 75 bp, synthetic construct
  source 1..75: mol_type = other DNA
ttcgccattctgaccatcctgcctgcggcgctggtggttattgccgaacacgtcgggcatctggtggtaacggcc

SEQ ID NO: 229279 - DNA, 75 bp, synthetic construct
  source 1..75: mol_type = other DNA
cgttgggttatgaagtcgcattgggcggctttattatgtgtggcgtgctgttctgtctggtttctttcatcgtga

SEQ ID NO: 229280 - DNA, 75 bp, synthetic construct
  source 1..75: mol_type = other DNA
gaacgccagtcatcgaggatttgttattctcaaacttgcgcccccctggcaactggcactcggcgggttgatcgt

SEQ ID NO: 229281 - DNA, 75 bp, synthetic construct
  source 1..75: mol_type = other DNA
cctctgccgtgggccacttacagcttcctttcagtcgccttcgcttacttcttctttgtccgcaaaatggaagtg

SEQ ID NO: 229282 - DNA, 75 bp, synthetic construct
  source 1..75: mol_type = other DNA
gaatagaaccgaaggttttctttccgccgttaataatcgtcggcatactttgttggcttacagtcagagacctgg

SEQ ID NO: 229283 - DNA, 75 bp, synthetic construct
  source 1..75: mol_type = other DNA
ccaaagggttgttcggtactatcgtcgacaacttctatctcgtcgccttgatcttcgcgatgggtaccagtctgg

SEQ ID NO: 229284 - DNA, 75 bp, synthetic construct
  source 1..75: mol_type = other DNA
tatcactcaactgaccggcctgacagataagtggttttacaggctcatcagggatggggcctttccggctcccat

SEQ ID NO: 229285 - DNA, 75 bp, synthetic construct
  source 1..75: mol_type = other DNA
cagaaattcaggcgtggttgcaggaaaataaatactatcaatatcagctacctggtgccgggaaaccgcatctgt

SEQ ID NO: 229286 - DNA, 75 bp, synthetic construct
  source 1..75: mol_type = other DNA
gtccgtatcaggttcgataccttaatccgttgaccaaagtggcggataaatgtgatttctgcgccgagacccggc

SEQ ID NO: 229287 - DNA, 75 bp, synthetic construct
  source 1..75: mol_type = other DNA
caaattggggcgaagttcacgatggctacagagtgaagtggaagcatggctacaggagcgtatcgctcaatctcg

SEQ ID NO: 229288 - DNA, 75 bp, synthetic construct
  source 1..75: mol_type = other DNA
gacccgtgactatgcgctgattattagtactggtgtactgatgggactgtgcggtccactgtttttaaagctaat

SEQ ID NO: 229289 - DNA, 75 bp, synthetic construct
  source 1..75: mol_type = other DNA
tggcaacacttctggctgcgaccacacatgcgcccattatgtcgacactgatgatatgtgaaatgaccggggagt

SEQ ID NO: 229290 - DNA, 75 bp, synthetic construct
  source 1..75: mol_type = other DNA
cctggatcctgtggactgtactcggtagtaacactctgctgttgatggataaaaacatcatcaacattccaaatc

SEQ ID NO: 229291 - DNA, 75 bp, synthetic construct
  source 1..75: mol_type = other DNA
tgatcgaacagtacggtgtcgcgcgcgccatcatcgaaacctgggctgctctaccgttcagcaccgccaccatgt

SEQ ID NO: 229292 - DNA, 75 bp, synthetic construct
  source 1..75: mol_type = other DNA
ggggccgttaccgtgggcgacttacagtttcctttccgtcgccttcgcgtacttcttcttcgttcgtaaaatgga

SEQ ID NO: 229293 - DNA, 75 bp, synthetic construct
  source 1..75: mol_type = other DNA
gtttatgcaagtattctccagtatcacagtcctgcaattattcagtttctctcagcggaatttcaggcatctgta

SEQ ID NO: 229294 - DNA, 75 bp, synthetic construct
  source 1..75: mol_type = other DNA
tttctctcagcggaatttcaggcatctgtacaggcttttggggcggatgccatcattaaacgccaccgcgtgcat

SEQ ID NO: 229295 - DNA, 75 bp, synthetic construct
  source 1..75: mol_type = other DNA
ccgccagtccggcgacaactggcagcacccaaacgcccgccagggccaacgccaattgaattgctgaaacaggaa

SEQ ID NO: 229296 - DNA, 75 bp, synthetic construct
  source 1..75: mol_type = other DNA
caagcgttccgtatgacgcagaaagatattgatgacgcgccaatggtgccgagcattccgcctctgctggcggca

SEQ ID NO: 229297 - DNA, 75 bp, synthetic construct
  source 1..75: mol_type = other DNA
aacagattgaagtgatggcgaaatcgccggtgaaagatgtctggacggtatatcagtgccagcattgcctttata

SEQ ID NO: 229298 - DNA, 75 bp, synthetic construct
  source 1..75: mol_type = other DNA
taacataacaattctgcaggatgctgttaattttgaaatggcaactgatgaggaggtttcgatgctatcttcctg

SEQ ID NO: 229299 - DNA, 75 bp, synthetic construct
  source 1..75: mol_type = other DNA
ctgtatcacatttgcctcgagatgcgttcaaaggggattgagcgccagatgaccgaaggggagttaaaacggctt

SEQ ID NO: 229300 - DNA, 75 bp, synthetic construct
  source 1..75: mol_type = other DNA
atgactgagcagcaaatccggcaggtctgccgccagtgcatggagcgttgtcgggcgggtgaaacatggcctccg

SEQ ID NO: 229301 - DNA, 75 bp, synthetic construct
  source 1..75: mol_type = other DNA
atgacattcagaatgagtgaacaatcacggaccataaaaatttataatctactggctggaaccaatgagtttatt

SEQ ID NO: 229302 - DNA, 75 bp, synthetic construct
  source 1..75: mol_type = other DNA
ggagtgtatcgaacgaaatctcagtccaggcggcagtgccgacctgctgatccttacctggtttttagcacagat

SEQ ID NO: 229303 - DNA, 75 bp, synthetic construct
  source 1..75: mol_type = other DNA
aaagatatggcgctggaagatttccaccgtagcgcactggcaattcagggctggttaccgcgtttcattgaattt

SEQ ID NO: 229304 - DNA, 75 bp, synthetic construct
  source 1..75: mol_type = other DNA
gggacatgttatcagtttatctctccggcccgccgcagacgcagcatgtgttttgtctatccccggaggcccggg

SEQ ID NO: 229305 - DNA, 75 bp, synthetic construct
  source 1..75: mol_type = other DNA
tgctgacaggactgtttgctctcgtttcttttcccgctctgggaaataccaacctcgaacaattaaaacaaaaag

SEQ ID NO: 229306 - DNA, 75 bp, synthetic construct
  source 1..75: mol_type = other DNA
ataagattgatgagaagaaaggcaccgttcagcaagtgtgggaatacggtaaagaacgtggctacgatttctata

SEQ ID NO: 229307 - DNA, 75 bp, synthetic construct
  source 1..75: mol_type = other DNA
atcaacggcgataccaacgttgcatcgcgcggtggcgaggggggcctgcgctggctacagcgcgaggcgcaaaca

SEQ ID NO: 229308 - DNA, 75 bp, synthetic construct
  source 1..75: mol_type = other DNA
gactttcttttatgcatagtaaagtagatgctcatccatattatgatggtttggggaaaggagttaagaaatatt

SEQ ID NO: 229309 - DNA, 75 bp, synthetic construct
  source 1..75: mol_type = other DNA
actcgttgctgactctaaggttggatggtagaagtcgactttccttaacttcaagtcaaggttcatccgatttac

SEQ ID NO: 229310 - DNA, 75 bp, synthetic construct
  source 1..75: mol_type = other DNA
tcgcgcacacgggtctggcaggcgaagaatggctgaaagccttcccgctgcaggctttccagtacggtgatggtg

SEQ ID NO: 229311 - DNA, 75 bp, synthetic construct
  source 1..75: mol_type = other DNA
ctgcgctgggtgcgctgtccattgacgatgacggctggtgccagctattgcctgccggttatttcagtgcccgtg

SEQ ID NO: 229312 - DNA, 75 bp, synthetic construct
  source 1..75: mol_type = other DNA
taaaggtttcaaacaggtctcgatagagcaagtcattgaatggaatcctcaggtaatttttgtgcagaatcgtta

SEQ ID NO: 229313 - DNA, 75 bp, synthetic construct
  source 1..75: mol_type = other DNA
ggcccgctgactactccggttggtggcggtattcgttctctgaacgtagcactgcgccaggaactggatctctac

SEQ ID NO: 229314 - DNA, 75 bp, synthetic construct
  source 1..75: mol_type = other DNA
tgaagaagaatcacaaactatggcgatgaagctcgctaaagaaatcatttctgatgtgagaaggggattcagatg

SEQ ID NO: 229315 - DNA, 75 bp, synthetic construct
  source 1..75: mol_type = other DNA
catattctgaaaaacacattaggtccaaaactgctttgggcactgaactcatctgcaaaagatagggcgctcagg

SEQ ID NO: 229316 - DNA, 75 bp, synthetic construct
  source 1..75: mol_type = other DNA
tcagcaggaactggagggcgcccggctgcgcgcgttatcggagcgtttccgcgcaacccgtgtgcgagcacaaaa

SEQ ID NO: 229317 - DNA, 75 bp, synthetic construct
  source 1..75: mol_type = other DNA
accgattttgatgcggcgttgcagtcaaacgatatggcccgcgtcgatgaggtcaggcggcgggcgagcgtttat

SEQ ID NO: 229318 - DNA, 75 bp, synthetic construct
  source 1..75: mol_type = other DNA
ttaaccgaacggggtacgaatctttccggcgggcagaggcagcgaatagcgctggcgcgggcgctcattactgca

SEQ ID NO: 229319 - DNA, 75 bp, synthetic construct
  source 1..75: mol_type = other DNA
ggcacgcgtgtgctgggaacgtaagaaacttagtgtcatcgtggtggtagcgtcagtatcgactattttgctggc

SEQ ID NO: 229320 - DNA, 75 bp, synthetic construct
  source 1..75: mol_type = other DNA
ttattgctgaaagcatcagcttgccggaaatcccggcagacgtgctggcacgttatccagcagtagttgaagcga

SEQ ID NO: 229321 - DNA, 75 bp, synthetic construct
  source 1..75: mol_type = other DNA
ttattgctgaaagcatcagcctgccagagatcccggcagacgtgctggcgcgttacccagcagtagttgaagcca

SEQ ID NO: 229322 - DNA, 75 bp, synthetic construct
  source 1..75: mol_type = other DNA
atctgcacgcgtttgctgcacatcagtcgttgttgaaggcctacgaaaagctgcagcgcgcaaagcagcattctg

SEQ ID NO: 229323 - DNA, 75 bp, synthetic construct
  source 1..75: mol_type = other DNA
taacgaaaccaggcatcatctttggcaacctgatctcggtgattgggggattcctgctggcctcaaagggcagca

SEQ ID NO: 229324 - DNA, 75 bp, synthetic construct
  source 1..75: mol_type = other DNA
atctgcacgcgtttgctgcacatcagtcgttgttgaaggcctacgaaagctgcagcgcgccaaagcagcattctg

SEQ ID NO: 229325 - DNA, 75 bp, synthetic construct
  source 1..75: mol_type = other DNA
ggcgctggcttctgcactcggtgaatatttcgagcgtctctcaaccaactacttttttgctgacttctggctggg

SEQ ID NO: 229326 - DNA, 75 bp, synthetic construct
  source 1..75: mol_type = other DNA
cggcaatcaattaccgctgcaaattagctggcagtatcaggaagaaacgcgtgagtgcgaattttacgagaacga

SEQ ID NO: 229327 - DNA, 75 bp, synthetic construct
  source 1..75: mol_type = other DNA
taagttggagtcattaccccgaattacacttaaaacgactcaacagcttaacgttggcttgccacgcattacttg

SEQ ID NO: 229328 - DNA, 75 bp, synthetic construct
  source 1..75: mol_type = other DNA
cgcgcactgatgaccggcgacagcgattttctggccacgtcccacaatagccacaacgaattgtggccggctgaa

SEQ ID NO: 229329 - DNA, 75 bp, synthetic construct
  source 1..75: mol_type = other DNA
ttaattataaaaatataacatggaagcaccatatcgcgagtacggaatcatatagttgttgggaagaaaggattt

SEQ ID NO: 229330 - DNA, 75 bp, synthetic construct
  source 1..75: mol_type = other DNA
gtcagagaaaactggcagtggaaacccgcggtggcgtactgccgctatgccgatgattttgtcctcatcgtcaaa

SEQ ID NO: 229331 - DNA, 75 bp, synthetic construct
  source 1..75: mol_type = other DNA
agaactgattgttgaacgaacaaaagctggcctggaagctgctcgcgcacagggacgaattggtggacgacgtcc

SEQ ID NO: 229332 - DNA, 75 bp, synthetic construct
  source 1..75: mol_type = other DNA
ttcggtacgccaacagagataaccatcctgcaggaaatcatcaatgcacgttacgaaagcgttttaccgacaatt

SEQ ID NO: 229333 - DNA, 75 bp, synthetic construct
  source 1..75: mol_type = other DNA
aaccgccgcattatttaaacgctcaatgggcagtaataccaactggcggttaggcagcgacacatttaacgcacc

SEQ ID NO: 229334 - DNA, 75 bp, synthetic construct
  source 1..75: mol_type = other DNA
agatgacaaacatgatctcatatcagggacttgttcgcaccttccatagtttaattgccgtctggaaagacggtg

SEQ ID NO: 229335 - DNA, 75 bp, synthetic construct
  source 1..75: mol_type = other DNA
atgatttttaccaaaatcattaggggattcatcagtacttcgcatccggataaaacggcagcgttatttaaacgt

SEQ ID NO: 229336 - DNA, 75 bp, synthetic construct
  source 1..75: mol_type = other DNA
attattcatgcccttgcctgttgttacaaaccccggaataaaacctcaaaggaaaacaacagattttcagatttc

SEQ ID NO: 229337 - DNA, 75 bp, synthetic construct
  source 1..75: mol_type = other DNA
aaaccgctgcgttatttaaacgtgccatgggcagtaataccaactggcacttaggcaatggcacatttaacgcgc

SEQ ID NO: 229338 - DNA, 75 bp, synthetic construct
  source 1..75: mol_type = other DNA
ggcacgtttgacgtcacggtgctcgaatacgccacgccggtgattgaagttcacgcctccgctggcgataacttc

SEQ ID NO: 229339 - DNA, 75 bp, synthetic construct
  source 1..75: mol_type = other DNA
gtttttatggccgcgataggtagcacaccgtttgagcgcggtgacgaagccgaaggatttttaattgtcactgca

SEQ ID NO: 229340 - DNA, 75 bp, synthetic construct
  source 1..75: mol_type = other DNA
atgtgtggacgctttgcccaatcccaaacgcgtgaagattaccttgcgcttctcgcggaagatattgaacgcgat

SEQ ID NO: 229341 - DNA, 75 bp, synthetic construct
  source 1..75: mol_type = other DNA
tcatatcagggagaaataattaaggctaatcttcctaagatgcgagccatgactatttcaggattgtgtaccttc

SEQ ID NO: 229342 - DNA, 75 bp, synthetic construct
  source 1..75: mol_type = other DNA
ctgtgtgccagcaaaccagttcacctggcaccctgtgtcgcgcgcggtgggtaatgtcaaaaaccagggcgcgga

SEQ ID NO: 229343 - DNA, 75 bp, synthetic construct
  source 1..75: mol_type = other DNA
atgtgtggacgctttgcccaatcccaaacgcgtgaagattacctcgcgtttctcgcggaagatattgaacgcgat

SEQ ID NO: 229344 - DNA, 75 bp, synthetic construct
  source 1..75: mol_type = other DNA
tatctatcgcgctgatggacaacctgtttttatggccgcgataggtagcacaccgtttgagcgcggtgacgaagc

SEQ ID NO: 229345 - DNA, 75 bp, synthetic construct
  source 1..75: mol_type = other DNA
atgatgaaaagtacgctaaaaaaaatatatagaacattgttattaattcaaatggccccgtttttagtgtgggcg

SEQ ID NO: 229346 - DNA, 75 bp, synthetic construct
  source 1..75: mol_type = other DNA
ctggcccggcaccaccgtcaccctgcgggaaatccggcctgacagcgtaatgctgagcgacggcacccgcctcag

SEQ ID NO: 229347 - DNA, 75 bp, synthetic construct
  source 1..75: mol_type = other DNA
agtcaaccttgccaactgggccatcggtcctaaacagcacggagctcgcaatagcttgatcgcctggatgcctgc

SEQ ID NO: 229348 - DNA, 75 bp, synthetic construct
  source 1..75: mol_type = other DNA
gaggcgctgtgggctgcttgttgtgaatacttcgagtgggtggaagctaacccgctatgggagatgaaggcattc

SEQ ID NO: 229349 - DNA, 75 bp, synthetic construct
  source 1..75: mol_type = other DNA
ctgggagaacaggtacaacatgtgatgaatgataatcccttctccggccacctgtttatcttccgtggccgacgg

SEQ ID NO: 229350 - DNA, 75 bp, synthetic construct
  source 1..75: mol_type = other DNA
accatttgtgcatacagttctatgcaaggttctggttctacgtggaaatattctatcttttgcatgcggaagctg

SEQ ID NO: 229351 - DNA, 75 bp, synthetic construct
  source 1..75: mol_type = other DNA
gccaccggtaaaaatctggcggagcagattcgcgatcactatccgcgtcccgtagtgtggttctattgggttcag

SEQ ID NO: 229352 - DNA, 75 bp, synthetic construct
  source 1..75: mol_type = other DNA
ctacgaattttttacgggaaatatacgcaggttgatcccgcagagttctttctcaacctcaccatctgtattgct

SEQ ID NO: 229353 - DNA, 75 bp, synthetic construct
  source 1..75: mol_type = other DNA
gctgcttaactccgtcatctgcatggcggtgtggctggcgcgcggaaacctggcgaaggtcgtcattacggaata

SEQ ID NO: 229354 - DNA, 75 bp, synthetic construct
  source 1..75: mol_type = other DNA
taaccggctttaattctgcttacagaacgtcatcaaccagtgacacggtatcgatgaattacagttggtgggctg

SEQ ID NO: 229355 - DNA, 75 bp, synthetic construct
  source 1..75: mol_type = other DNA
tcttccggcacagctttccggtggtgaacagcaacgggtggcgctggcgcgagcctttaacggtcggcctgatgt

SEQ ID NO: 229356 - DNA, 75 bp, synthetic construct
  source 1..75: mol_type = other DNA
atgcaaacgccataatctgtgccctgatcgtcgtcaggctgatgttcttcagtaaaagcggtaagcggcacaggc

SEQ ID NO: 229357 - DNA, 75 bp, synthetic construct
  source 1..75: mol_type = other DNA
gatgctgaacgtcgccatatgcgtcgcggtgtggcgctcccgcggtaatctcgccaaagtttttcagaaggccgg

SEQ ID NO: 229358 - DNA, 75 bp, synthetic construct
  source 1..75: mol_type = other DNA
cgtagtgtggttctattgggttcaggcggaaattattgcgatggcgaccgacctggcggaatttattggcgcagc

SEQ ID NO: 229359 - DNA, 75 bp, synthetic construct
  source 1..75: mol_type = other DNA
ttgatgggcgatctggtgaacagcaaacgcgtaaaacaggctggctgggtgattgtggtattggtagtggcgctg

SEQ ID NO: 229360 - DNA, 75 bp, synthetic construct
  source 1..75: mol_type = other DNA
tattcgtttccatatcccgctgtgggtgcgccggacagtgaccatgttaccgtcatttattgtcatcctgatggg

SEQ ID NO: 229361 - DNA, 75 bp, synthetic construct
  source 1..75: mol_type = other DNA
cacgtaactatgggctggcgcgtcattacgatccgtttatcgtcaacaccgtggtcggctttattgggccggagt

SEQ ID NO: 229362 - DNA, 75 bp, synthetic construct
  source 1..75: mol_type = other DNA
aacgcgtaaaacagacaggctgggtgattgtggtgctggtcgtggcgctgaatatctggttgttggtggggacgg

SEQ ID NO: 229363 - DNA, 75 bp, synthetic construct
  source 1..75: mol_type = other DNA
ttgatgggcgatctggtgaacagcaaacgcgtaaaacagacaggctgggtgattgtggtgctggtcgtggcgctg

SEQ ID NO: 229364 - DNA, 75 bp, synthetic construct
  source 1..75: mol_type = other DNA
cgcgttcaccagggttacgaccatcgcggcgtggcgctctctgcgggtgttcagcggatggtacgttccgatctt

SEQ ID NO: 229365 - DNA, 75 bp, synthetic construct
  source 1..75: mol_type = other DNA
acatgccggacgcttcctttgccggtcagcaggaaaccttcctcaacgtgcagggttttgatgctgttctcgtgg

SEQ ID NO: 229366 - DNA, 75 bp, synthetic construct
  source 1..75: mol_type = other DNA
atcatgatgtgtgaaattccgtccaacgccttgctggcagagcagttcctcgaatatttcgacggcttctcaatt

SEQ ID NO: 229367 - DNA, 75 bp, synthetic construct
  source 1..75: mol_type = other DNA
agtcatccatgacatcagcgaaatgaaccgcatcgaacctggcgacgtgctggttactgacatgaccgacccgga

SEQ ID NO: 229368 - DNA, 75 bp, synthetic construct
  source 1..75: mol_type = other DNA
actgtttcttgtgccgaaggtgataccggttacgtctatgctgagttgctggaatttagcgtgaaaagctccagc

SEQ ID NO: 229369 - DNA, 75 bp, synthetic construct
  source 1..75: mol_type = other DNA
tcgccgaaggccgtgctatcggtcatcgcattggcgcggggccggtgaaagtcattcatgacatcagcgaaatga

SEQ ID NO: 229370 - DNA, 75 bp, synthetic construct
  source 1..75: mol_type = other DNA
aatacagagaaaagtgcgcagaaaaatgcgcaaattgatgatcaaaaaagtgcgcagaaatctgacggcaactcc

SEQ ID NO: 229371 - DNA, 75 bp, synthetic construct
  source 1..75: mol_type = other DNA
caatatgtgggaaaaaaccgtaatgaagcaatagcagtagttaagagtgaaaaaatcaaaaacagtagcaaacct

SEQ ID NO: 229372 - DNA, 75 bp, synthetic construct
  source 1..75: mol_type = other DNA
ggcctgaatgcagaaatcagggacaacgtccgctttggactggagtttgagaaatccgcctttggtaagtacaac

SEQ ID NO: 229373 - DNA, 75 bp, synthetic construct
  source 1..75: mol_type = other DNA
ggcaaaaatgcctccctgggggaaatgattactaacctttccggaatgggtgtttccgttccgaatggtttcgcc

SEQ ID NO: 229374 - DNA, 75 bp, synthetic construct
  source 1..75: mol_type = other DNA
gctgccagagataaactcagagcggaaaccgatattctgaccagccagcgtcggggcgttgttacgcctgtcagt

SEQ ID NO: 229375 - DNA, 75 bp, synthetic construct
  source 1..75: mol_type = other DNA
tagatgatgcagtcggaatggaacttgccgatgaactggtgtttacccgggcccgcgcactttcagtaacaggaa

SEQ ID NO: 229376 - DNA, 75 bp, synthetic construct
  source 1..75: mol_type = other DNA
ccagtggattatcgacactcccttccagcctgagctggaaaatgccatccgcgaagcctatgcccagctttctgc

SEQ ID NO: 229377 - DNA, 75 bp, synthetic construct
  source 1..75: mol_type = other DNA
tctgcgccttttacaacgcgcccgcaagctgggcgagcggctgctggtcggcgtatcgtccgacgccctgaacat

SEQ ID NO: 229378 - DNA, 75 bp, synthetic construct
  source 1..75: mol_type = other DNA
ccgcttcctcggtctggaaaagaaaactcgtttctatcaggcttccacttctgaactgtacggtctggtgcagga

SEQ ID NO: 229379 - DNA, 75 bp, synthetic construct
  source 1..75: mol_type = other DNA
ggtgatgtgattatcgccgttgatccgcgttacttccgtccggcagaagttgaaacgctgctcggtgacccgacc

SEQ ID NO: 229380 - DNA, 75 bp, synthetic construct
  source 1..75: mol_type = other DNA
cgatatgcgtaaatccttcaacgggctggaagaacaggtacaatatgtgctggatgagaaccccttctcaggtca

SEQ ID NO: 229381 - DNA, 75 bp, synthetic construct
  source 1..75: mol_type = other DNA
gggcgctttaatagtgctccaaacgagagccaacactgcttcttcctgcgttcaggtgtactacccttataataa

SEQ ID NO: 229382 - DNA, 75 bp, synthetic construct
  source 1..75: mol_type = other DNA
actggcaatgctcctcgataagctggacaggcgtcagccaaaaacatcccgccttaacgccctgacaatgttgta

SEQ ID NO: 229383 - DNA, 75 bp, synthetic construct
  source 1..75: mol_type = other DNA
ggattactgagtggttttaatacggcataccgcggtgcaattcatgccccgtcagcatctgccactgtgaacaac

SEQ ID NO: 229384 - DNA, 75 bp, synthetic construct
  source 1..75: mol_type = other DNA
aactgcgcaaattcggcagaaacgaaacgcaacagcagatcgggcaatcctcaccccgttgcccggtttagcgac

SEQ ID NO: 229385 - DNA, 75 bp, synthetic construct
  source 1..75: mol_type = other DNA
aatcgtccggctatcgtgcgccgcacgatgggatcgaaaaaaatccgcatggtctacgcgccgactcaggaacat

SEQ ID NO: 229386 - DNA, 75 bp, synthetic construct
  source 1..75: mol_type = other DNA
gcctggaggaaggccagtttatctggcctgcggtacgtgacggcaaggtatccattacccgctcgcaactggcaa

SEQ ID NO: 229387 - DNA, 75 bp, synthetic construct
  source 1..75: mol_type = other DNA
caggacggtgctcttatcttccagggacacccggttattcatgcagggcaaactgtttctgcatcgcagagtgac

SEQ ID NO: 229388 - DNA, 75 bp, synthetic construct
  source 1..75: mol_type = other DNA
gttcaggtcggtgtcgacaaaaaacatgagctggacggactggatttgtttaccggcttcactgtcacacacact

SEQ ID NO: 229389 - DNA, 75 bp, synthetic construct
  source 1..75: mol_type = other DNA
gtcctcgcgccgctacgcgttgcagcaagcacatggccggatgaagcgctgaaatgggggcatctgcgcaatatc

SEQ ID NO: 229390 - DNA, 75 bp, synthetic construct
  source 1..75: mol_type = other DNA
ggccggacacaaccgcccggtgttcattcaccacattatcgccgccgacactatggacgaaatggtgatggagcg

SEQ ID NO: 229391 - DNA, 75 bp, synthetic construct
  source 1..75: mol_type = other DNA
ttactggacaagatggctcatatctggctgaatttttattaaataaaggttatgaagtgcacggtatcaaacgcc

SEQ ID NO: 229392 - DNA, 75 bp, synthetic construct
  source 1..75: mol_type = other DNA
cctaccaagatctaattatcaaccacgaaatcgacattcaccgctgcaacatctgggcagggatggggatgggta

SEQ ID NO: 229393 - DNA, 75 bp, synthetic construct
  source 1..75: mol_type = other DNA
ccagccagcgcgggccacggtctgaacatgcaggacggcggaaatatactggtatttttctcacactggtgggac

SEQ ID NO: 229394 - DNA, 75 bp, synthetic construct
  source 1..75: mol_type = other DNA
cagcgagcattagccgatgtgaccctctcgctggatgcggccgactggttcgatatcaaagaccccatccataac

SEQ ID NO: 229395 - DNA, 75 bp, synthetic construct
  source 1..75: mol_type = other DNA
tatttaatggcgaacgtgacgtttcggaaatgcctttaccggaagaaatgctactgactggaaacgctgagtcag

SEQ ID NO: 229396 - DNA, 75 bp, synthetic construct
  source 1..75: mol_type = other DNA
ccaccggtatgcaaacaaaaaatctgccgttaactaattctttgttacagaatgattacgcagaaagtatttttg

SEQ ID NO: 229397 - DNA, 75 bp, synthetic construct
  source 1..75: mol_type = other DNA
ttaaccgttacaaactgcctttatcagaatcagaggcattttattctgccgcagaccatcgccgcgcagaactgg

SEQ ID NO: 229398 - DNA, 75 bp, synthetic construct
  source 1..75: mol_type = other DNA
ggcagaattccttcttgataaagggtatgaagtgcatggcattaaacgtcgagcatcttcatttaatacggagcg

SEQ ID NO: 229399 - DNA, 75 bp, synthetic construct
  source 1..75: mol_type = other DNA
tatttaaccatgaatctccgcgtcgtggcgaaactttcgttacgcgcaaaattacccgtgcaattgccaacattg

SEQ ID NO: 229400 - DNA, 75 bp, synthetic construct
  source 1..75: mol_type = other DNA
tataccgcggatgttgatgctattggtacattacgcttactggaagcgatccgcatccttggcttagagaagaaa

SEQ ID NO: 229401 - DNA, 75 bp, synthetic construct
  source 1..75: mol_type = other DNA
ggtttcattcgaatcacctgaatacactgctgacgtggatgcgatggggactttacgtctgctggaagcgattcg

SEQ ID NO: 229402 - DNA, 75 bp, synthetic construct
  source 1..75: mol_type = other DNA
gtgctacagcaggccgatggcgaagtgctggcgattgataagcaggagatcgaaacgcaggtcgaggtcaaaagc

SEQ ID NO: 229403 - DNA, 75 bp, synthetic construct
  source 1..75: mol_type = other DNA
taaatcgggtcaggatagcgtaccgttgcttggcgacattccctggttcgggcaattatttcgtcatgacggaaa

SEQ ID NO: 229404 - DNA, 75 bp, synthetic construct
  source 1..75: mol_type = other DNA
ttctatcaggaagtgaatgatggtgtgatgttagtaatgagtggtatacagggaacattcaaggtaacaagatga

SEQ ID NO: 229405 - DNA, 75 bp, synthetic construct
  source 1..75: mol_type = other DNA
gttatctcgattcgcatctgggagataatgaaggggaattctttttgtttctgcatgacgtggcgatgaatagcg

SEQ ID NO: 229406 - DNA, 75 bp, synthetic construct
  source 1..75: mol_type = other DNA
acgacgcattctggaagatataaagggtataaaagtcgtcggagaggcatcgtgcggtgaagacgccgttaagtg

SEQ ID NO: 229407 - DNA, 75 bp, synthetic construct
  source 1..75: mol_type = other DNA
cgttaagccagatcgaaccagaaaaaacagaaagcccatttgccagtttgtctgaacgtgaattgcagattatgc

SEQ ID NO: 229408 - DNA, 75 bp, synthetic construct
  source 1..75: mol_type = other DNA
tctttaaccacgaatcacctcgccgtggcgagacctttgttactcgtaaaataacacgcgggatagcaaatattg

SEQ ID NO: 229409 - DNA, 75 bp, synthetic construct
  source 1..75: mol_type = other DNA
tacactgctgatgttgatgcgataggaacattgcgtcttcttgaagctatcaggatattggggctggaaaaaaag

SEQ ID NO: 229410 - DNA, 75 bp, synthetic construct
  source 1..75: mol_type = other DNA
gcgattttatatcaatggccgctctagaattgggtattactcttaagtttgaaggagagggtgttgacgagaagg

SEQ ID NO: 229411 - DNA, 75 bp, synthetic construct
  source 1..75: mol_type = other DNA
ttttgcaccttacgaaattcatgcatatgcttttggttcttgggaattctttatctcattctttgaagtaataga

SEQ ID NO: 229412 - DNA, 75 bp, synthetic construct
  source 1..75: mol_type = other DNA
aattccgcaaaaagagacaacccctttctatccccgttcaccttacgcagttgcgaagctttatgcatattggat

SEQ ID NO: 229413 - DNA, 75 bp, synthetic construct
  source 1..75: mol_type = other DNA
acaagagcaaccggaagattatgttattgcaacaggcgtccaatactcggtacgtcaattcgttgactttgccgc

SEQ ID NO: 229414 - DNA, 75 bp, synthetic construct
  source 1..75: mol_type = other DNA
aaggtgaaacctggttgtggggtgatgcggaaaacttccaaaacagattggccataatttcaaagcataagctgc

SEQ ID NO: 229415 - DNA, 75 bp, synthetic construct
  source 1..75: mol_type = other DNA
aaccggtggttgtaaaagaattcggtggagcggtagttcagtcggttagaatacctgcctgtcacgcaggggggc

SEQ ID NO: 229416 - DNA, 75 bp, synthetic construct
  source 1..75: mol_type = other DNA
atggcagaaaccaaaattgttgtcggcccgcagccgttcagtgtaggtgaagagtacccgtggctggctgagtgt

SEQ ID NO: 229417 - DNA, 75 bp, synthetic construct
  source 1..75: mol_type = other DNA
gcccgcagccgttcagtgtaggggaagagtacccgtggctggcggagcgtgacgaagatggtgcagtggtcacgt

SEQ ID NO: 229418 - DNA, 75 bp, synthetic construct
  source 1..75: mol_type = other DNA
cgtgtggttaagcgcggtctgtcccggatgaaaaagcctttattagcacgtcatataaatgtagacgaagtcgcc

SEQ ID NO: 229419 - DNA, 75 bp, synthetic construct
  source 1..75: mol_type = other DNA
caggtcatcagcagaaagatctacggtagcgtaaaactcagctttgttcacgatcaccaacatcgtaaatggctc

SEQ ID NO: 229420 - DNA, 75 bp, synthetic construct
  source 1..75: mol_type = other DNA
ttaagaagcctcgagttaacgctcgaggttttttttcgtctgtatatctattattgccagaatcgcaaaaatcct

SEQ ID NO: 229421 - DNA, 75 bp, synthetic construct
  source 1..75: mol_type = other DNA
tttctggcacgcatgttccttaccctgactttatattttcaaatagacagtatgcgccattggcaaatgaaataa

SEQ ID NO: 229422 - DNA, 75 bp, synthetic construct
  source 1..75: mol_type = other DNA
gcatggtcgggcgatctgcttcgccgacggatggttcgaatggaagaaggaaggcgacacgaagcagccctactt

SEQ ID NO: 229423 - DNA, 75 bp, synthetic construct
  source 1..75: mol_type = other DNA
caccatttgaacgtggcgatgaagctgaggggttcctgattgtaactactgctgcggataaagggctggtagata

SEQ ID NO: 229424 - DNA, 75 bp, synthetic construct
  source 1..75: mol_type = other DNA
agtgcgcatcgcagcagtgcgtttgaggccgggcagtttattatggattatctcaaaacccgcgcaccgttctgg

SEQ ID NO: 229425 - DNA, 75 bp, synthetic construct
  source 1..75: mol_type = other DNA
aagccgggcagtttattatggattatctcaaaacccgcgcaccgttctggaagcgcgaagccacgccggaaggcg

SEQ ID NO: 229426 - DNA, 75 bp, synthetic construct
  source 1..75: mol_type = other DNA
atataattgaaaaatgtttaaatctagacccttctaaacgccccactgcagatgagctcgtgtcattatgtggtc

SEQ ID NO: 229427 - DNA, 75 bp, synthetic construct
  source 1..75: mol_type = other DNA
agaaaaagaatagcgggaccagtatcagtgcgttagcgcgcgaatacggtgtttccagagcgactatagccgcgc

SEQ ID NO: 229428 - DNA, 75 bp, synthetic construct
  source 1..75: mol_type = other DNA
cgatcaaatatctaagcttgattatggtatcgcgaaactgttgtataccttcttcatcgctgagaacagcgatgc

SEQ ID NO: 229429 - DNA, 75 bp, synthetic construct
  source 1..75: mol_type = other DNA
gaaaaattgaaaacgttttttctgacatatcaacatctatcgagcgttcaatttcagactttgatcgcagtcata

SEQ ID NO: 229430 - DNA, 75 bp, synthetic construct
  source 1..75: mol_type = other DNA
agtggccctgtgtggcaggatgcgccggggccgacacaggaagaactgactcaggcggcagagtatgagcgccag

SEQ ID NO: 229431 - DNA, 75 bp, synthetic construct
  source 1..75: mol_type = other DNA
acagcaccaacaacctgggaaatcataacagaaaaattcaaatcttttgaatcaaacgacctttttacatgttca

SEQ ID NO: 229432 - DNA, 75 bp, synthetic construct
  source 1..75: mol_type = other DNA
tgtttagtcaatgtgttgggcgattttggtttagatctaaactcaaaaaaaactgaactatatgaagacatcata

SEQ ID NO: 229433 - DNA, 75 bp, synthetic construct
  source 1..75: mol_type = other DNA
caaatagacgcagtcaaatgcactaccgcctctcgcaataccttcaatttcatgataaaaaacatcatccctaac

SEQ ID NO: 229434 - DNA, 75 bp, synthetic construct
  source 1..75: mol_type = other DNA
tctctaccgctcagcaagatacggagaaccagaggttagagcttgagcaatctggctggacgtttgattactggt

SEQ ID NO: 229435 - DNA, 75 bp, synthetic construct
  source 1..75: mol_type = other DNA
gtgccgcagcggcacagcgtatcggcgagctggtatctgtacacgttatccgcgtccgcacggcgacctggaaga

SEQ ID NO: 229436 - DNA, 75 bp, synthetic construct
  source 1..75: mol_type = other DNA
agcggcgaccgatgccggtgccgcagcggcacagcgtattggcgagctagtatctgtccacgttattccgcgtcc

SEQ ID NO: 229437 - DNA, 75 bp, synthetic construct
  source 1..75: mol_type = other DNA
attgagccggaagagcgcaaggtgctggaagagattgccggtgttctgggtcttcgtctggagaattacctgtga

SEQ ID NO: 229438 - DNA, 75 bp, synthetic construct
  source 1..75: mol_type = other DNA
agaaaaagagtagcggaatcagtgtcagtgcgttagcgcgtgaatacggcgtttccagagcaactatagccgcgt

SEQ ID NO: 229439 - DNA, 75 bp, synthetic construct
  source 1..75: mol_type = other DNA
agaaaaagaatagcggcgctagtgttagcgcattagcgcgtgaatacggcgtttccagagcgactatagcaacta

SEQ ID NO: 229440 - DNA, 75 bp, synthetic construct
  source 1..75: mol_type = other DNA
tctggattcagggaaaactgcgtatgtggggacgctggtcgtatattggttgcggcaggccaaggagtatgttct

SEQ ID NO: 229441 - DNA, 75 bp, synthetic construct
  source 1..75: mol_type = other DNA
ccctggctactgcaatcacaatcccgaaacctctgtgctggcgcattacaggctggcgggaacgtgcggaacagc

SEQ ID NO: 229442 - DNA, 75 bp, synthetic construct
  source 1..75: mol_type = other DNA
atgtagaacttcgagatggatttacttcaattgagaaaatgaatgtgatcctcgctacaagtaactttggggata

SEQ ID NO: 229443 - DNA, 75 bp, synthetic construct
  source 1..75: mol_type = other DNA
atggcattcagtaatcccttcgatgatccacagggagcgttttacattttgcgcaatgcgcaggggcaattcagt

SEQ ID NO: 229444 - DNA, 75 bp, synthetic construct
  source 1..75: mol_type = other DNA
gactggcgggaacgtgcggaacagcgataaagccacacgatatgcaggccgcgattgcctgtaactcatgccacg

SEQ ID NO: 229445 - DNA, 75 bp, synthetic construct
  source 1..75: mol_type = other DNA
atggtggatttacgtaaagcggcgcggggccagatgtgccaggtcagaatccctggctactgcaatcacaatccc

SEQ ID NO: 229446 - DNA, 75 bp, synthetic construct
  source 1..75: mol_type = other DNA
tcagagcactgaaagaaatttcaaagatggaaagcgaagtagcgaaaaaagccgtggccaatgctcacatggacg

SEQ ID NO: 229447 - DNA, 75 bp, synthetic construct
  source 1..75: mol_type = other DNA
atgactgatggttatgactgctaccagaacgcactggctgagcgaataaacgggatcctgaaaaatgagttttta

SEQ ID NO: 229448 - DNA, 75 bp, synthetic construct
  source 1..75: mol_type = other DNA
ataaaaatgccatgagtatcgccaacgtcgagcgcattaagtccattgaaaatctggataatttacacacccggg

SEQ ID NO: 229449 - DNA, 75 bp, synthetic construct
  source 1..75: mol_type = other DNA
ccatggcgtcttaaggatatatcatcaagattatatctcagcgaaagtttactaaagaggaaattgaaagaagag

SEQ ID NO: 229450 - DNA, 75 bp, synthetic construct
  source 1..75: mol_type = other DNA
aaatgccaaatccggcggtggtaagggggtggttatcggtgagatgtcaacgccacgatgtttgaccgtcttata

SEQ ID NO: 229451 - DNA, 75 bp, synthetic construct
  source 1..75: mol_type = other DNA
agctcgtgaaagcttatttccgttgcccggagtttgtcactttccatcatgtggatctgccgtcgctcgaagaac

SEQ ID NO: 229452 - DNA, 75 bp, synthetic construct
  source 1..75: mol_type = other DNA
tttgttgattggccagcagtagatggtggcgatgaggacgacgacgatgattttggtgatcatatagaccagatc

SEQ ID NO: 229453 - DNA, 75 bp, synthetic construct
  source 1..75: mol_type = other DNA
atctacacgcgtttgctgcgcatcagtcgctgttaaaagcctacgaaaagctgcagcgtgccaaagcggcattct

SEQ ID NO: 229454 - DNA, 75 bp, synthetic construct
  source 1..75: mol_type = other DNA
caacctcgaaacgcactttattgattccagcggtttaatctcctgggacctgttcaagcaggatgccgattatcc

SEQ ID NO: 229455 - DNA, 75 bp, synthetic construct
  source 1..75: mol_type = other DNA
atctgcacgcgtttgctgcacatcagtcgttgttgaaggcctacgaaaagctgcaacgcgccaaagcagcattct

SEQ ID NO: 229456 - DNA, 75 bp, synthetic construct
  source 1..75: mol_type = other DNA
gtgggataaaccgccgctcattaacgcacggtctgaaactgcagccaccagcagaatgtttaaactgctctggca

SEQ ID NO: 229457 - DNA, 75 bp, synthetic construct
  source 1..75: mol_type = other DNA
gtttgttgactggagcttctccggcaccacggaagaagagttcgccacgctgatggctatcttcaaaaaggaaga

SEQ ID NO: 229458 - DNA, 75 bp, synthetic construct
  source 1..75: mol_type = other DNA
ggcaatgagtggcgaagcggcgttttatggcttgcaaccggtagatagcgatctgcacgcatttgcagcgcatca

SEQ ID NO: 229459 - DNA, 75 bp, synthetic construct
  source 1..75: mol_type = other DNA
atgccggactgggtacaaaccggttttaccgagtacctgcgtcgttttccaaaagatatgccttttgagctgatt

SEQ ID NO: 229460 - DNA, 75 bp, synthetic construct
  source 1..75: mol_type = other DNA
ggcaagccctgggacacaccgcagttagccgctgaactggaacgatggaagcttgatggccgcgacgtcagcctg

SEQ ID NO: 229461 - DNA, 75 bp, synthetic construct
  source 1..75: mol_type = other DNA
tttgtcgattggccagcagtagagggtggcgatgaggacgacgatgattttggggatcatgtagaccagatcgta

SEQ ID NO: 229462 - DNA, 75 bp, synthetic construct
  source 1..75: mol_type = other DNA
atgtgcaataacacccgtccggacgcagccgccgaagcaatcagaacgctgatgcacgcgctgattgatatttct

SEQ ID NO: 229463 - DNA, 75 bp, synthetic construct
  source 1..75: mol_type = other DNA
attatgaaggctgggatttattgaaatacaatgaagatgtcggtgaattacaccgcaccgatgccaacggtaatc

SEQ ID NO: 229464 - DNA, 75 bp, synthetic construct
  source 1..75: mol_type = other DNA
cctggcggagatggttgcccaggcactgcgtgacagttgcaccccaaccaacccgcgcgaaccggatgcccgcgc

SEQ ID NO: 229465 - DNA, 75 bp, synthetic construct
  source 1..75: mol_type = other DNA
atggctcttaacagtctgaaatatgcaggtgtgacagagacagaattacttctgctcagtgcaataaaaatcgac

SEQ ID NO: 229466 - DNA, 75 bp, synthetic construct
  source 1..75: mol_type = other DNA
acccgctcgcaactggcaatgctcctcgataagctggactggcgtcagccaaaacatcccgccttaacgccctga

SEQ ID NO: 229467 - DNA, 75 bp, synthetic construct
  source 1..75: mol_type = other DNA
cggcggcgcatagtaagcgactcgtcagaaccgtattgatatttactgagagctcagatcaactttccagggcaa

SEQ ID NO: 229468 - DNA, 75 bp, synthetic construct
  source 1..75: mol_type = other DNA
gtacatcgccagtcagacgcggcttggtcgggatattcgccgtagcgccatttttgccgccctgcatgttgaggg

SEQ ID NO: 229469 - DNA, 75 bp, synthetic construct
  source 1..75: mol_type = other DNA
tctgcgccagcgcattaacgaagccgcacaggcggtgatggtggcttacgcgatgggcggggaccttgaccagct

SEQ ID NO: 229470 - DNA, 75 bp, synthetic construct
  source 1..75: mol_type = other DNA
ctggcaatgctcctcgataaactggactggcgtcaacccaaaacatcccgccttaatgcactgacaatgttgtaa

SEQ ID NO: 229471 - DNA, 75 bp, synthetic construct
  source 1..75: mol_type = other DNA
ggtggtgctgactgtccttagccgcgaaggcgatggaactgcagaaaaagacctgctggacatggtggaaaaagc

SEQ ID NO: 229472 - DNA, 75 bp, synthetic construct
  source 1..75: mol_type = other DNA
tctttgccgccctgcatgttgagggggtgcagcgtgtggagctggcttctcctctggcggatgtggtcctgaaca

SEQ ID NO: 229473 - DNA, 75 bp, synthetic construct
  source 1..75: mol_type = other DNA
ctacatcagcgcgcagcaccgcctcgggcgtgatatccgtctgtcagccatttatgcggcgctgcatgttgaggg

SEQ ID NO: 229474 - DNA, 75 bp, synthetic construct
  source 1..75: mol_type = other DNA
tgctggaaggcgaagacgctgaaaccaacgcgctgcgcgcaaaacgtcgttgcccgaaatgcggcacggcgatgg

SEQ ID NO: 229475 - DNA, 75 bp, synthetic construct
  source 1..75: mol_type = other DNA
ccggcagatgattcgaccattccgccgacaccggcagtgatggaatctgacaccgattatcgtctgcgtattcag

SEQ ID NO: 229476 - DNA, 75 bp, synthetic construct
  source 1..75: mol_type = other DNA
gcgcaggcggtgatggtggcttacgcgatgggcggcgatcttgaccagctcgctgccaactacaacgtgaaacgc

SEQ ID NO: 229477 - DNA, 75 bp, synthetic construct
  source 1..75: mol_type = other DNA
atttgctggatgtggtggagaaagccctgaacagtgagaatgtccgcccggtggctgaccgtctgacggttcgca

SEQ ID NO: 229478 - DNA, 75 bp, synthetic construct
  source 1..75: mol_type = other DNA
tccggacaaaaagtcgcagatgatgagcaaggttgctggcatgtacgacatgcaggcttcagccggtcgcgttgc

SEQ ID NO: 229479 - DNA, 75 bp, synthetic construct
  source 1..75: mol_type = other DNA
gaggtaaccgatacaccgagtgaggcgcagttattctctgcaataatctggcaggagagtggcggaaatcagtac

SEQ ID NO: 229480 - DNA, 75 bp, synthetic construct
  source 1..75: mol_type = other DNA
atgcgtctgacagcaaaacaggtgacatggctaaaactttgcctgcatcttgccggattgttgccgttgctctgg

SEQ ID NO: 229481 - DNA, 75 bp, synthetic construct
  source 1..75: mol_type = other DNA
tgtcggagtcgggcctgacgaccggatgcctccaggcagccgggagccgaagatgcgcgtgcgacaggaagtcgc

SEQ ID NO: 229482 - DNA, 75 bp, synthetic construct
  source 1..75: mol_type = other DNA
ctgaagaatctgtcagcagatcagatcatgccgctaatcggtgacgcccgtctgccggatgaggttaaccgagag

SEQ ID NO: 229483 - DNA, 75 bp, synthetic construct
  source 1..75: mol_type = other DNA
tcctgcattgatgaatgctcgtaattctattatcgcttatgggaaagcccacggacagagcgatgaggaaataga

SEQ ID NO: 229484 - DNA, 75 bp, synthetic construct
  source 1..75: mol_type = other DNA
ggcttcttcactcgaagattggcaccttgaaacgctacacatccctgaaccggagcgtgacctttatcgcgcaca

SEQ ID NO: 229485 - DNA, 75 bp, synthetic construct
  source 1..75: mol_type = other DNA
gcgcaggcggtgatggtggcttatgcgatgggcggcgatctggaccagctcgccgccaattacaacgtgaaacgc

SEQ ID NO: 229486 - DNA, 75 bp, synthetic construct
  source 1..75: mol_type = other DNA
atggcagtgattgacctttcacagttgcctgcaccgcagattgtggatgtgccggactttgagacgctgcttgcc

SEQ ID NO: 229487 - DNA, 75 bp, synthetic construct
  source 1..75: mol_type = other DNA
gtaattttgcttgctttagcgttcacttcaacccaggcgatgcagcgaaaactcggcaaacactggcaacagttg

SEQ ID NO: 229488 - DNA, 75 bp, synthetic construct
  source 1..75: mol_type = other DNA
attatggtgactcacgacctgcaactggcggcacgctgcgatcgctgcttacgactggttaacgggcagttgcag

SEQ ID NO: 229489 - DNA, 75 bp, synthetic construct
  source 1..75: mol_type = other DNA
gagcggatgaaacgccgtaacccgcacctggtatttctgtcccagcaggctctggatattttcattgccatgaaa

SEQ ID NO: 229490 - DNA, 75 bp, synthetic construct
  source 1..75: mol_type = other DNA
gcgatgttttctggtaaagagtaccagatactgcttcctggtgaaattcacattaaagaaagtggtaagcgataa

SEQ ID NO: 229491 - DNA, 75 bp, synthetic construct
  source 1..75: mol_type = other DNA
tgtcttcaggctttaactcaacttgaggattacatcaaaaaacatggagccagcaaccctctcacattgcagatc

SEQ ID NO: 229492 - DNA, 75 bp, synthetic construct
  source 1..75: mol_type = other DNA
tgtcgatcacgcgctgacgcgcattaagggcgaaaacgactggagcagcgagcaattaagctggctcgatcgttt

SEQ ID NO: 229493 - DNA, 75 bp, synthetic construct
  source 1..75: mol_type = other DNA
gaaaggcgattgcgttgccaccggttaaagaaaattatccgggcgagaagtttgttgaatggcacagaaaagagg

SEQ ID NO: 229494 - DNA, 75 bp, synthetic construct
  source 1..75: mol_type = other DNA
tctgggaactacaaaacgcggaactgtgctcaaccagtggtagccgccagccgccccgacgtgaactcattgaat

SEQ ID NO: 229495 - DNA, 75 bp, synthetic construct
  source 1..75: mol_type = other DNA
tacaataagctgggcaataaaaaataaagagttcgtcaaaactaacttgaataaaggtaagcagttttcagaaga

SEQ ID NO: 229496 - DNA, 75 bp, synthetic construct
  source 1..75: mol_type = other DNA
atcagcccgcagggagaagtgatcaatgacaccctggaagacgatcaggattttgaagtcgccgactttaaccgt

SEQ ID NO: 229497 - DNA, 75 bp, synthetic construct
  source 1..75: mol_type = other DNA
tcgcccgcgcgatctcacccgtaaagggctggtcgagctacaggagtggtttgaccgccagcactttgaggaatc

SEQ ID NO: 229498 - DNA, 75 bp, synthetic construct
  source 1..75: mol_type = other DNA
taccatttcatgggcgattaaaaataaagaatttataaaaagtaatttaaaaaaaggaaagcagtttggtgatga

SEQ ID NO: 229499 - DNA, 75 bp, synthetic construct
  source 1..75: mol_type = other DNA
atctcacccgtaaagggctggtcgagctacaggagtggtttgaccgccagcactttgaggaatcttccctgcgca

SEQ ID NO: 229500 - DNA, 75 bp, synthetic construct
  source 1..75: mol_type = other DNA
ctggagagcgtcgacaccatgcgtccggtggtggtgcgcccgaaggtggaactgcaaacgctggtcaacgaaatt

SEQ ID NO: 229501 - DNA, 75 bp, synthetic construct
  source 1..75: mol_type = other DNA
ccgaagcggatggccgcagttttgccgagcacagccatgaacaaactggtggcgaagctccagcgtatcatcggt

SEQ ID NO: 229502 - DNA, 75 bp, synthetic construct
  source 1..75: mol_type = other DNA
gctggcaatgctcctcgataagctggactggcgtcagccaaaaacatcccgtcttaacgcactgacaatgttgta

SEQ ID NO: 229503 - DNA, 75 bp, synthetic construct
  source 1..75: mol_type = other DNA
gaaggcgacggaacagcagaaaaagatctactggatgtggtggaaaaagccctgaacagtgagaacgtccgcccg

SEQ ID NO: 229504 - DNA, 75 bp, synthetic construct
  source 1..75: mol_type = other DNA
atgccgattatcgacctgaaccagctacccgcaccagatgtggtcgaggagctggactttgaaagcattctcgct

SEQ ID NO: 229505 - DNA, 75 bp, synthetic construct
  source 1..75: mol_type = other DNA
gtggctgaccgtctgacggttcgcagcgcagaaatcatcccgtaccgggtggatgccaccatttttctctatccg

SEQ ID NO: 229506 - DNA, 75 bp, synthetic construct
  source 1..75: mol_type = other DNA
gtggctgaccgtctgacggttcgcagcgcggaaatcatcccgtaccgcgtggaagccaccatttttctctacccg

SEQ ID NO: 229507 - DNA, 75 bp, synthetic construct
  source 1..75: mol_type = other DNA
ggaactggatctacctgaacggctgattatcagcgatacacaggcggcgcggtgtgcttcggtcaccatcacgag

SEQ ID NO: 229508 - DNA, 75 bp, synthetic construct
  source 1..75: mol_type = other DNA
tgcatggaagatgaacattatcgtcatgcggcgtatggcttgatgttgcaggaacaagcgccgacgctgaaagtg

SEQ ID NO: 229509 - DNA, 75 bp, synthetic construct
  source 1..75: mol_type = other DNA
atgcccgccgttgacctttcacagttaccggaacccgccatcatcgcggagcctgattttgaagcaattctggct

SEQ ID NO: 229510 - DNA, 75 bp, synthetic construct
  source 1..75: mol_type = other DNA
cctgaatggcgaggacgtcagaccggtggccgaccgcgtgaccgtacagtctgccgccatcgttgaataccagat

SEQ ID NO: 229511 - DNA, 75 bp, synthetic construct
  source 1..75: mol_type = other DNA
tagtttgtttacgacaaaagtaacggaagcgtacttgtctttattagcgcatggcgcgaaagcgaccgtggcgaa

SEQ ID NO: 229512 - DNA, 75 bp, synthetic construct
  source 1..75: mol_type = other DNA
agtgatgcgtacgctggaactggaatctgaacccgttaccaaattgttgcaggagaacgcttaccgtgagttgct

SEQ ID NO: 229513 - DNA, 75 bp, synthetic construct
  source 1..75: mol_type = other DNA
atggcagtgattgacctttcgcagttacctgcgccgcagattgtggatgtgacggactttgagacgctgcttgcc

SEQ ID NO: 229514 - DNA, 75 bp, synthetic construct
  source 1..75: mol_type = other DNA
cgatgatttcgaaaagttattaaataataacctattaaatttacctgttggcacagaatgcggggcttatcttaa

SEQ ID NO: 229515 - DNA, 75 bp, synthetic construct
  source 1..75: mol_type = other DNA
atacgtttccggtcgtgataccaccagacgtgagcatatgagggaactttatcgatatcttgaactgaaagcctt

SEQ ID NO: 229516 - DNA, 75 bp, synthetic construct
  source 1..75: mol_type = other DNA
ctcgaaagataagctgaaaggatcgctgggtgagctcaagcagctttctggcagcgcgtcttatcaggcctgtgc

SEQ ID NO: 229517 - DNA, 75 bp, synthetic construct
  source 1..75: mol_type = other DNA
tggttaatgcccagaagtcacgaccgctggcggcattatggggagacggttccacctcatcctctgacggccaga

SEQ ID NO: 229518 - DNA, 75 bp, synthetic construct
  source 1..75: mol_type = other DNA
aagtcgagcgatggactgccttctcgcgacattttactcatcttaagaatccgctaatccgtcctcaggataatc

SEQ ID NO: 229519 - DNA, 75 bp, synthetic construct
  source 1..75: mol_type = other DNA
cttccacaatatcaccactggccgacctgatttacaacatgttgccacacccaaaaattacagaaatactggatg

SEQ ID NO: 229520 - DNA, 75 bp, synthetic construct
  source 1..75: mol_type = other DNA
tgaaacattctccagtgcgttagagctggggcgcaaaacgctggttacgcttgggatgcacccgcatcaggcaca

SEQ ID NO: 229521 - DNA, 75 bp, synthetic construct
  source 1..75: mol_type = other DNA
acaacctccgcaacgcgatgaaaagcgccaaaggtccaggcaacttccgcaacctgtttatgtactcgcctaacg

SEQ ID NO: 229522 - DNA, 75 bp, synthetic construct
  source 1..75: mol_type = other DNA
ggcctgcccggctatctttctgccattccgtccgccctgctcaatgagtccgccacgctgttccgacgcaaatat

SEQ ID NO: 229523 - DNA, 75 bp, synthetic construct
  source 1..75: mol_type = other DNA
cctgcaccggtcgctccaccgaaaccaaaaccggtggagccgcctaagccgaaagtagaagcaccgcctgcgccg

SEQ ID NO: 229524 - DNA, 75 bp, synthetic construct
  source 1..75: mol_type = other DNA
gccggaaggcgcagcggaagaggtgcgggcaggtgatgccgcagcaccgtcgctcgatccggccactattgcagc

SEQ ID NO: 229525 - DNA, 75 bp, synthetic construct
  source 1..75: mol_type = other DNA
aatgcgcattaccgtgctggagcgggatatcagcgccgttaacctgatgcgcaaatatggctacaaagtttatta

SEQ ID NO: 229526 - DNA, 75 bp, synthetic construct
  source 1..75: mol_type = other DNA
actacatatcaatgatcaactgttgtcacacttgtctccgctgggctgggagcacataaatctgacaggagacta

SEQ ID NO: 229527 - DNA, 75 bp, synthetic construct
  source 1..75: mol_type = other DNA
tgcattgcgtcggcgagtacaggcggggctgaataaaggtgaggcacgtaacgcactggcgcgggcggtatttat

SEQ ID NO: 229528 - DNA, 75 bp, synthetic construct
  source 1..75: mol_type = other DNA
ttccggtggcgatccatggctcgcaatagaaaacatactcccatggcctgaatttgtcgccagtctggaggaaac

SEQ ID NO: 229529 - DNA, 75 bp, synthetic construct
  source 1..75: mol_type = other DNA
aaaaatcccaccctctgatgcgctgctgaagcatatcgccagcaggctaaaacttaccggggatctctggcctgc

SEQ ID NO: 229530 - DNA, 75 bp, synthetic construct
  source 1..75: mol_type = other DNA
gaggccagatccatcctgactgacgaagttattgatctgcacgagcgtattctgagtagtctgttcagcagggca

SEQ ID NO: 229531 - DNA, 75 bp, synthetic construct
  source 1..75: mol_type = other DNA
aatttgtcgccagtctggaggaaacacgccatctcgccagaaaaaataattttgacccgctgcatattattaccg

SEQ ID NO: 229532 - DNA, 75 bp, synthetic construct
  source 1..75: mol_type = other DNA
ccgattttcagcagcccggcgtcatgcgatcctggtgtgcgtgctggaagaagccagagccacactgacagacga

SEQ ID NO: 229533 - DNA, 75 bp, synthetic construct
  source 1..75: mol_type = other DNA
catcactcgaagacattcaggcctggtatatccgtgatgaaacttattccgcagcccttgcagagctggtgaatg

SEQ ID NO: 229534 - DNA, 75 bp, synthetic construct
  source 1..75: mol_type = other DNA
ctcgtactgacaaaggcattctcctggcggaagaaatgctggcctaccttcggcaaaacaaggttatgtttcctg

SEQ ID NO: 229535 - DNA, 75 bp, synthetic construct
  source 1..75: mol_type = other DNA
ctgagggaaatcggccgcattgagcgaacactgtttatgctggactggtttcgcgatccttcactgcgtcgcaga

SEQ ID NO: 229536 - DNA, 75 bp, synthetic construct
  source 1..75: mol_type = other DNA
aagcaaccggataccggcttccggtaagtttcgtcggctgcggccagctaaagtaggaaggtcaaaaaacgacct

SEQ ID NO: 229537 - DNA, 75 bp, synthetic construct
  source 1..75: mol_type = other DNA
attgggggagattagagatcggaaaccggaaaatcaaagttatcgcgccagtggattgactttattgacggcggc

SEQ ID NO: 229538 - DNA, 75 bp, synthetic construct
  source 1..75: mol_type = other DNA
tcaacacatgtgcttgatggattgttgtaccacgaaagcgacctggatatcagggaacattacacagatacagcg

SEQ ID NO: 229539 - DNA, 75 bp, synthetic construct
  source 1..75: mol_type = other DNA
gatcagctgctgcgctccaatccccgcctgagccattacggcaacgaaatcaccgcactgatcacccgtttcact

SEQ ID NO: 229540 - DNA, 75 bp, synthetic construct
  source 1..75: mol_type = other DNA
cacaaaactatcgtcagcgacaaaggccgcgcggtatttaacggtttgatcaacgtcgcgcagcacgccatcaaa

SEQ ID NO: 229541 - DNA, 75 bp, synthetic construct
  source 1..75: mol_type = other DNA
atagccagtttgtcagcattgcgggggagatatccccacagcagcgtgatgccttagcgttaacgttagacgccg

SEQ ID NO: 229542 - DNA, 75 bp, synthetic construct
  source 1..75: mol_type = other DNA
ccacgtccttcctcggcgtagcgttaggcttatttgattatctggcagatttgtttcagcgttcaaataccgttg

SEQ ID NO: 229543 - DNA, 75 bp, synthetic construct
  source 1..75: mol_type = other DNA
cccgcagagcggctgcggaaattaaaaagtttgaaaaacgcgatctggcacaggcagtgattaacgctgcatacc

SEQ ID NO: 229544 - DNA, 75 bp, synthetic construct
  source 1..75: mol_type = other DNA
tgctggagcctgacatcaatcaggagctttatggcatgccggaatacctgagcgcactcaattccgcgtggctga

SEQ ID NO: 229545 - DNA, 75 bp, synthetic construct
  source 1..75: mol_type = other DNA
gattaacccggacgtcctggcgatgagcggtcatatcgccagacgctgcagtgagcagaagcgggtgcgtatccc

SEQ ID NO: 229546 - DNA, 75 bp, synthetic construct
  source 1..75: mol_type = other DNA
gattaacccggacgtcctggcgatgggcggtcatatcgccagacgctgcagtgagcagaagcgggtacgtatccc

SEQ ID NO: 229547 - DNA, 75 bp, synthetic construct
  source 1..75: mol_type = other DNA
tgttgatcgttgtgtcgtactctgcgaacccggaggaacgccactttttaataatgttgcaaaacttgaagctcg

SEQ ID NO: 229548 - DNA, 75 bp, synthetic construct
  source 1..75: mol_type = other DNA
ccacttacagccgcgttcatcggtgctgatggtgttatccagagtattcaggatatgcagcccaacagcgacaca

SEQ ID NO: 229549 - DNA, 75 bp, synthetic construct
  source 1..75: mol_type = other DNA
ctgctggaggtgatattacccgccactatgccgcgcagtgacgaactttatctgcgtgccatttcccgcttctac

SEQ ID NO: 229550 - DNA, 75 bp, synthetic construct
  source 1..75: mol_type = other DNA
gcaccgaagaggagtttcacattgcgggaggcagcaccgatacgttgcaggcgctggcgcaggtgcgccacgtca

SEQ ID NO: 229551 - DNA, 75 bp, synthetic construct
  source 1..75: mol_type = other DNA
agaacctggaagagattcggaaattcgtatcgtgggtatcgctctgccactgcctgcagcgcggcaataacgggg

SEQ ID NO: 229552 - DNA, 75 bp, synthetic construct
  source 1..75: mol_type = other DNA
acgcgggttacatcatgtatgtgaccgacccggcgcagagcgcgaccgacgtcgaatcgctgcgcgaggcgatgc

SEQ ID NO: 229553 - DNA, 75 bp, synthetic construct
  source 1..75: mol_type = other DNA
atgagcaagcgcaagccacgcaaaacagtcaccacgaccgccagcgccccacaaaaaatggaggcgttcaccttc

SEQ ID NO: 229554 - DNA, 75 bp, synthetic construct
  source 1..75: mol_type = other DNA
taaatgagagtaagcgaattcaagaacaaaagaacatttacgcacaccttcaattaaaacataataaatcattaa

SEQ ID NO: 229555 - DNA, 75 bp, synthetic construct
  source 1..75: mol_type = other DNA
ctatgtggaatgcgtacagatggaccgttggtatgagccgcccgtcagctttgacggactggcgcgaaccttccg

SEQ ID NO: 229556 - DNA, 75 bp, synthetic construct
  source 1..75: mol_type = other DNA
tacgtttattgcgggcgtgctgctggcggaaagcgaatatcgccatgaactggaaacggctatcgatccgtttaa

SEQ ID NO: 229557 - DNA, 75 bp, synthetic construct
  source 1..75: mol_type = other DNA
cgccagccaaatacacacggcgcggcgtcgacgattcgattttctggtttgtggaaaacttcacgctgccgcatg

SEQ ID NO: 229558 - DNA, 75 bp, synthetic construct
  source 1..75: mol_type = other DNA
ctggcgcgtcattacgatccgtttatcgtcaacaccgtggtcggctttattgggccggagtatctctacaacgac

SEQ ID NO: 229559 - DNA, 75 bp, synthetic construct
  source 1..75: mol_type = other DNA
ttttgtgggttggtggctggctgtgctggcggttatggcgcagcggcaagctcacaggagcgcgtggcggcaaag

SEQ ID NO: 229560 - DNA, 75 bp, synthetic construct
  source 1..75: mol_type = other DNA
atggatccttttgtgattccacgggtatccctgccgccgcaaaacctggaaaagtttcggaaaaccgtatcgtgg

SEQ ID NO: 229561 - DNA, 75 bp, synthetic construct
  source 1..75: mol_type = other DNA
gtggacgacattgcctttacccgcaaagggctgacctcggaagtggtcgcggcggtagcgaagatttgctccaac

SEQ ID NO: 229562 - DNA, 75 bp, synthetic construct
  source 1..75: mol_type = other DNA
gaactgcgttcgggggatgtgctggcaggcgttgcagcggcaagctcgcaggagcgcgtggcggcaaagcaggtg

SEQ ID NO: 229563 - DNA, 75 bp, synthetic construct
  source 1..75: mol_type = other DNA
tcaccggagtttgaacgctggctggaaagcatgggcattatggcaaacggtcgcctgaccaaacgggcgggcgat

SEQ ID NO: 229564 - DNA, 75 bp, synthetic construct
  source 1..75: mol_type = other DNA
cggggaacacattacgcctttttgcgattgcccggtttttgccggtttatccccgctggcgcggggaacactcta

SEQ ID NO: 229565 - DNA, 75 bp, synthetic construct
  source 1..75: mol_type = other DNA
gcggggaacacgtaacgtggcgacgaccggcgattgatttcagcggtttatccccgctggcgcggggaacactcg

SEQ ID NO: 229566 - DNA, 75 bp, synthetic construct
  source 1..75: mol_type = other DNA
gcgcggggaacaccgcgcgatcgcgtcttcaatgtttacgaccttcggtttatccccgctggcgcggggaacaca

SEQ ID NO: 229567 - DNA, 75 bp, synthetic construct
  source 1..75: mol_type = other DNA
acaccgagtagccaacgagcagggatttgtcggcagcggtttatccccgctggcgcggggaacactcagacatct

SEQ ID NO: 229568 - DNA, 75 bp, synthetic construct
  source 1..75: mol_type = other DNA
acgtcgcgcttcccgcaaacggaaaacgcggtgcaggtttatccccgctggcgcggggaacacaccgccccacgg

SEQ ID NO: 229569 - DNA, 75 bp, synthetic construct
  source 1..75: mol_type = other DNA
aacagcagcacccatgaccacgtcggtttatccccgctggcgcggggaacacacacgcccttatcaaatagctgt

SEQ ID NO: 229570 - DNA, 75 bp, synthetic construct
  source 1..75: mol_type = other DNA
cgctggcgcggggaacacactaagcatacatatctgtttttaaacaaatttattccacatcaacaatctaccaac

SEQ ID NO: 229571 - DNA, 75 bp, synthetic construct
  source 1..75: mol_type = other DNA
gcgcggggaacacttatccagactcccgattgttttgccgtccgccggtttatccccgctggcgcggggaacact

SEQ ID NO: 229572 - DNA, 75 bp, synthetic construct
  source 1..75: mol_type = other DNA
gcggcggtttatccccgctggcgcggggaacacaactgaagggccgccgctacccggttaacacccggtttatcc

SEQ ID NO: 229573 - DNA, 75 bp, synthetic construct
  source 1..75: mol_type = other DNA
acatatcctccagaacacgcgcctcatttcgactcggtttatccccgctggcgcggggaacactgctctgtcgtt

SEQ ID NO: 229574 - DNA, 75 bp, synthetic construct
  source 1..75: mol_type = other DNA
cgcccggtttatccccgctggcgcggggaacactcacgcgctgttacccagtccctttttttcagcggtttatcc

SEQ ID NO: 229575 - DNA, 75 bp, synthetic construct
  source 1..75: mol_type = other DNA
cggtttatccccgcaggcgcggggaactctcattcgcaatcatccactgactcaggggctgcggtttatccccgc

SEQ ID NO: 229576 - DNA, 75 bp, synthetic construct
  source 1..75: mol_type = other DNA
ggcgcggggaactcaagcccgtggcgcgggtcgccgctggcgtcaacggtttatccccgctgccgcggggaactc

SEQ ID NO: 229577 - DNA, 75 bp, synthetic construct
  source 1..75: mol_type = other DNA
tccggcatttcgtaatgcggcagcgtctgttgcccagctgtacgacgcgctgcacaaaccggagatgcaggactc

SEQ ID NO: 229578 - DNA, 75 bp, synthetic construct
  source 1..75: mol_type = other DNA
tcttcaaccgcaatggcgttgcagctaatgcgcgagaaagggatgaatcgcagcgaatccggtcagttaggtttc

SEQ ID NO: 229579 - DNA, 75 bp, synthetic construct
  source 1..75: mol_type = other DNA
aatggctgacgttatcggaagcctcagagaggctatcagtattcttaggtgaaaaggtttctgttgctgattgtt

SEQ ID NO: 229580 - DNA, 75 bp, synthetic construct
  source 1..75: mol_type = other DNA
tgtaccggcaccctggagttccgtggtgtacaggccgatctcggtgaagtggtggcgtggcgcaacaccttctgg

SEQ ID NO: 229581 - DNA, 75 bp, synthetic construct
  source 1..75: mol_type = other DNA
caaacctatcgcgtactggcaccaatggcctacgcgaagatcaaaaacattatcgaacgcaacgttaccagtggc

SEQ ID NO: 229582 - DNA, 75 bp, synthetic construct
  source 1..75: mol_type = other DNA
ccgtacgactacccgctctccagccgcttcgatgagaacgatgcgattctggtgatggataacgtgctgatccca

SEQ ID NO: 229583 - DNA, 75 bp, synthetic construct
  source 1..75: mol_type = other DNA
cgatgccggtgatatcgctggcgcgctggaaattgcgccatacgcgctgaagcacggcctcacctctgactatcg

SEQ ID NO: 229584 - DNA, 75 bp, synthetic construct
  source 1..75: mol_type = other DNA
gaacacatagaccccgaacaacaatacgcgcaaaccgacggtttatccccgctggcgcggggaacactaccgtac

SEQ ID NO: 229585 - DNA, 75 bp, synthetic construct
  source 1..75: mol_type = other DNA
tcgcggtttatccccgctggcgcggggaacacgcggaaacagcttcctggatgctgcgttattgcggtttatccc

SEQ ID NO: 229586 - DNA, 75 bp, synthetic construct
  source 1..75: mol_type = other DNA
cctcgatggttatcatccctttttctatcctgctgatgggctgggtaatgtcgagttcgtattcagaaaagaaaa

SEQ ID NO: 229587 - DNA, 75 bp, synthetic construct
  source 1..75: mol_type = other DNA
ccatgcgcgctcacgctgccggtgagtctgtggatccccgcctgctgacggacacccttgaactgaccgccacgg

SEQ ID NO: 229588 - DNA, 75 bp, synthetic construct
  source 1..75: mol_type = other DNA
ttcaccgaggaggtggcgcttgcggccatgcgcgctcacgctgccggtgagtctgtggatccccgcctgctgacg

SEQ ID NO: 229589 - DNA, 75 bp, synthetic construct
  source 1..75: mol_type = other DNA
cagggcggacgttctacacccacatttctgaccagtacgcgccatttcacaccaaggtcgtgaacgtcggcgtgc

SEQ ID NO: 229590 - DNA, 75 bp, synthetic construct
  source 1..75: mol_type = other DNA
ggcgctactacgaactgtgcgcgctgtcggagatgaagaacgcgttgcgttccggcgacatctgggtgcaggggt

SEQ ID NO: 229591 - DNA, 75 bp, synthetic construct
  source 1..75: mol_type = other DNA
gctgggagcacatcaacctaaccggcgattacgtctggcggcagagccgcagactggaagacgggaagtttcggc

SEQ ID NO: 229592 - DNA, 75 bp, synthetic construct
  source 1..75: mol_type = other DNA
aacacggtgtatatagaaagggccatcgaatcactaaaacgaaaggggctccagattaatgagccgttggtttct

SEQ ID NO: 229593 - DNA, 75 bp, synthetic construct
  source 1..75: mol_type = other DNA
tactatccgtgagatacaccgtaaacagctaagaaaggttccctcatcggcaccgctggattttattcctgagag

SEQ ID NO: 229594 - DNA, 75 bp, synthetic construct
  source 1..75: mol_type = other DNA
agggttcaggcaggtctgaacaaaggggaagcccggaatgcccttgccagagccgtcttcatgcatcgtctgggt

SEQ ID NO: 229595 - DNA, 75 bp, synthetic construct
  source 1..75: mol_type = other DNA
cgtcatctgcacccctatgccatgcgaactgacaaaggatttatgctggcggaagaaatgctcagctggctacat

SEQ ID NO: 229596 - DNA, 75 bp, synthetic construct
  source 1..75: mol_type = other DNA
ctggcgaacaaacctcaagctgggacaggggaaataccgttcattacgctcagtagatagcagtctatataaaaa

SEQ ID NO: 229597 - DNA, 75 bp, synthetic construct
  source 1..75: mol_type = other DNA
tctgagtagtctgttcagcagggcaaaacgtactcaggccgagcggctccagcaaacgggaaagctgattcagag

SEQ ID NO: 229598 - DNA, 75 bp, synthetic construct
  source 1..75: mol_type = other DNA
cctgggacgagttcaccgagagcgtcagcgaggccgagctgctggcccggccggaaggcttcgaccacctgcacc

SEQ ID NO: 229599 - DNA, 75 bp, synthetic construct
  source 1..75: mol_type = other DNA
cttacgttctggtgacatctgggtaaagggatctcgccgctaccggaatttcgatgattatctgatcccatctgg

SEQ ID NO: 229600 - DNA, 75 bp, synthetic construct
  source 1..75: mol_type = other DNA
ttgatggcctgctgtaccatgaaagcgatctggaaattaccgagcattacaccgataccgcaggcttcactgaac

SEQ ID NO: 229601 - DNA, 75 bp, synthetic construct
  source 1..75: mol_type = other DNA
ctggtaaacgcgcaggggaaacgtccattagcagcattctggggcgacgggacaacatcgtcatcagacgggcag

SEQ ID NO: 229602 - DNA, 75 bp, synthetic construct
  source 1..75: mol_type = other DNA
taaaggcgacggttgcggtcattgtgcggcgtgtaatttacgcgccaacggtttgaatcattatctggccgataa

SEQ ID NO: 229603 - DNA, 75 bp, synthetic construct
  source 1..75: mol_type = other DNA
tatatgcgtatcaggtaaaagcagaagccgtaattaccggcgtctgtgaaacggatttctccggctacccggatt

SEQ ID NO: 229604 - DNA, 75 bp, synthetic construct
  source 1..75: mol_type = other DNA
acagttggccgttcagaccgattgccaggcatatcttcaggcccgtatgacgcttcttgcatcgcgtctggaaga

SEQ ID NO: 229605 - DNA, 75 bp, synthetic construct
  source 1..75: mol_type = other DNA
atgaacctgaagccgatggtatcccgaatacgtttgtcccagggcgtaatattctgttcctgacgctggcggcga

SEQ ID NO: 229606 - DNA, 75 bp, synthetic construct
  source 1..75: mol_type = other DNA
gatgaagtccattgcgtgacgttcgattacggtcagcgccatcgcgcagagattgacgtggcacgcgaactggca

SEQ ID NO: 229607 - DNA, 75 bp, synthetic construct
  source 1..75: mol_type = other DNA
aacggtttgaatcattatctggccgataaaccgacggtgatggcagcgatgaagcagaaaaccgggttgaagtaa

SEQ ID NO: 229608 - DNA, 75 bp, synthetic construct
  source 1..75: mol_type = other DNA
aggcgttacttaacgccagagaatccggggaagatccctggactgcaatagaagatgtccttccctggcaggaat

SEQ ID NO: 229609 - DNA, 75 bp, synthetic construct
  source 1..75: mol_type = other DNA
ctctcacctttcgccgttgggctgggagcatatcaatcttaatggggattatgtctggcgtaataatcttaaact

SEQ ID NO: 229610 - DNA, 75 bp, synthetic construct
  source 1..75: mol_type = other DNA
atatggccaggagccgggcgtacaaatttatacgcacatatcagatcaatatagcccgttctacaccaaagtgat

SEQ ID NO: 229611 - DNA, 75 bp, synthetic construct
  source 1..75: mol_type = other DNA
atacgcatatctcagaccaatacagcccgttctacgccaaagtgatcagccgggtgcgcgactcaacccacgtgc

SEQ ID NO: 229612 - DNA, 75 bp, synthetic construct
  source 1..75: mol_type = other DNA
aaaggggatgataagtttatcaccaccgactatttgcaacagtgccctcgacagcctgctcatatcagagggtga

SEQ ID NO: 229613 - DNA, 75 bp, synthetic construct
  source 1..75: mol_type = other DNA
acggtgaatgtgccggcctttgaatgggttcatgtgcagctccatcagcaaaaggggatgataagtttatcacca

SEQ ID NO: 229614 - DNA, 75 bp, synthetic construct
  source 1..75: mol_type = other DNA
agctgcgcgggaagatttgcgtgcgcgttatcttgcatggaaggagcactggcgtaaacccgacttacgttacgg

SEQ ID NO: 229615 - DNA, 75 bp, synthetic construct
  source 1..75: mol_type = other DNA
agccgctaaagcagtaacactgcgccgccagtgggctcctcatcgtccggtatggattgccaccagcactcacga

SEQ ID NO: 229616 - DNA, 75 bp, synthetic construct
  source 1..75: mol_type = other DNA
ggctgctaaagcagtgacgctgcgccgccagtgggcgccacatcgcccggtatggattgccaccagtactcatga

SEQ ID NO: 229617 - DNA, 75 bp, synthetic construct
  source 1..75: mol_type = other DNA
ggctgccaaagcagtaacgctgcgccgccagtgggcacctcatcgcccggtatggattgccaccagcactcacga

SEQ ID NO: 229618 - DNA, 75 bp, synthetic construct
  source 1..75: mol_type = other DNA
ccacgtcatttctcggcgttgcgttaggcttatttgattatctggcagatttgtttcagcgttcaaataccgttg

SEQ ID NO: 229619 - DNA, 75 bp, synthetic construct
  source 1..75: mol_type = other DNA
aagaagatggtgcacgttttgtcgctctgggcgcaaaaaataatcaggtgaccgttaccggtagcctgaagtttg

SEQ ID NO: 229620 - DNA, 75 bp, synthetic construct
  source 1..75: mol_type = other DNA
tccctaatttattgctcattcttgttccacgtcatccggaacgcttcccggatgcgattaacctggtccgccagg

SEQ ID NO: 229621 - DNA, 75 bp, synthetic construct
  source 1..75: mol_type = other DNA
taaagccgctattggtcgtctgaaaggtgaggaactggcgcaatataatttatggctggattatctggacgcact

SEQ ID NO: 229622 - DNA, 75 bp, synthetic construct
  source 1..75: mol_type = other DNA
tttgtggctggattatctggacgcactggaactggttgatacctccagtgcgccagatattgaatggcctacgcc

SEQ ID NO: 229623 - DNA, 75 bp, synthetic construct
  source 1..75: mol_type = other DNA
ccctaactattctctgaaggctccggttaagcaaagctggttaaaagactacggtcaccagatggggctattagt

SEQ ID NO: 229624 - DNA, 75 bp, synthetic construct
  source 1..75: mol_type = other DNA
tctacttgggttaaaaaatccagcgtagcaaatgcagtcaaagaaggtgatttcactgcagttgctcacttcaat

SEQ ID NO: 229625 - DNA, 75 bp, synthetic construct
  source 1..75: mol_type = other DNA
gtgctgcattatactgcgattgttaagaagtcgtcagccaataatgcccaagtcactgagggtgctttttctgca

SEQ ID NO: 229626 - DNA, 75 bp, synthetic construct
  source 1..75: mol_type = other DNA
agcaaaaaaagggactgtgaagctggcttttagtggtccaagggtttctggtcataatgaggagttagataccag

SEQ ID NO: 229627 - DNA, 75 bp, synthetic construct
  source 1..75: mol_type = other DNA
cgatttatttaaccgctttctgttcagcgccaaaattatttttctggtggtgatgctggtattgctgctaccgca

SEQ ID NO: 229628 - DNA, 75 bp, synthetic construct
  source 1..75: mol_type = other DNA
ccgcgccgcggcgaaaccttcgttacccgcaaaatcacccgcgcaatcgccaacatcgcccaggggctggagtcg

SEQ ID NO: 229629 - DNA, 75 bp, synthetic construct
  source 1..75: mol_type = other DNA
taaaaatgcagtggatgatgctgcaacaggaacagccggaagatttcgttatcgctaccggcgttcagtactccg

SEQ ID NO: 229630 - DNA, 75 bp, synthetic construct
  source 1..75: mol_type = other DNA
tacctggagctgtgggtgggtatgatgataaatattgctctgtatctcatgcaggcgaagcctcaacggatttta

SEQ ID NO: 229631 - DNA, 75 bp, synthetic construct
  source 1..75: mol_type = other DNA
ggcaatattgcgctgctggcgtgtgcaggtccgatgggcattggcgctatcgattacgccattaacggaggtata

SEQ ID NO: 229632 - DNA, 75 bp, synthetic construct
  source 1..75: mol_type = other DNA
atcacggctcttattttgctgcggcgtcgctggcagagcctatgtgctgcattattggcgcttatcatgccaatt

SEQ ID NO: 229633 - DNA, 75 bp, synthetic construct
  source 1..75: mol_type = other DNA
tctcggcaatatggattccctgcgtgactggggccatgccaaagactacgtaaaaatgcagtggatgatgctgca

SEQ ID NO: 229634 - DNA, 75 bp, synthetic construct
  source 1..75: mol_type = other DNA
aagcataaaacttttcaggacaggctcaagcgcctgaaacttgcggaggaagcctatggctttacagtgtcctga

SEQ ID NO: 229635 - DNA, 75 bp, synthetic construct
  source 1..75: mol_type = other DNA
tacttccgcttaagctatacggctatccagagtgatagcgtgaaaattgcgaaggcagaaattactcagttaaga

SEQ ID NO: 229636 - DNA, 75 bp, synthetic construct
  source 1..75: mol_type = other DNA
taataccctgaaagatggtgaaaacgtgctgcattatactgctgttgttaagaagtcgtcagccgttggtgccgc

SEQ ID NO: 229637 - DNA, 75 bp, synthetic construct
  source 1..75: mol_type = other DNA
atgaatcctggaaacattactaaggaagctctcaacaactatcgcgcggcgataaaaagctggctgacactacgt

SEQ ID NO: 229638 - DNA, 75 bp, synthetic construct
  source 1..75: mol_type = other DNA
ctgaacttgctactatgttatacaaatatgaatataagccaggcaaaaaggatactagatttaatatatcatctg

SEQ ID NO: 229639 - DNA, 75 bp, synthetic construct
  source 1..75: mol_type = other DNA
tactctgcgtaaacagcaggctacctggaaagaaaaagacggcgctgctgacgcagaagaccgcgttaccatcga

SEQ ID NO: 229640 - DNA, 75 bp, synthetic construct
  source 1..75: mol_type = other DNA
ctggttgccggtatcaccgatatgcgaaatggctttaacggtctgacctcaaaagttcagaacgtcctgaaggat

SEQ ID NO: 229641 - DNA, 75 bp, synthetic construct
  source 1..75: mol_type = other DNA
ctgaatgtttgccagaaactggagattaatgttcctgtttatgcggggatgccacagcccattatgcgtcaacaa

SEQ ID NO: 229642 - DNA, 75 bp, synthetic construct
  source 1..75: mol_type = other DNA
acgcagttcgaaaactacggcctggctggcggcccggtgcacgacgccacctgcatcggttatctgattaaccct

SEQ ID NO: 229643 - DNA, 75 bp, synthetic construct
  source 1..75: mol_type = other DNA
cagttgttgcctgagccccgtctgggcaaaagcaggcctgttcagctgggtcgtaccggtttgttggggctgaaa

SEQ ID NO: 229644 - DNA, 75 bp, synthetic construct
  source 1..75: mol_type = other DNA
ggcgataccgtgaaaatactttgggctgatgctgatggtctgtgcctgtttatcaaacgcctggaagagggacag

SEQ ID NO: 229645 - DNA, 75 bp, synthetic construct
  source 1..75: mol_type = other DNA
gccggtcacccgcgatggaaaggttcaccttactccggctcagttgtccatgcttcctgagggcatcaactggaa

SEQ ID NO: 229646 - DNA, 75 bp, synthetic construct
  source 1..75: mol_type = other DNA
ggcagtcaggttaaactgctgtggtccaccggtgacggactgagcctcctgaccaaacggctggagcgtgggcgc

SEQ ID NO: 229647 - DNA, 75 bp, synthetic construct
  source 1..75: mol_type = other DNA
tttatctggcctgcggtgcgtgacggcaagatatccattacccgctcgcaactggcaatgctcctcgataagctg

SEQ ID NO: 229648 - DNA, 75 bp, synthetic construct
  source 1..75: mol_type = other DNA
atgacctgcactgatatctctgttgagccatcaggttatattggatttgtcaggatttacatctcagcgaaaggt

SEQ ID NO: 229649 - DNA, 75 bp, synthetic construct
  source 1..75: mol_type = other DNA
tgaatgataatcccttctccggtcgcctgtttatcttccgtggccgacggggtgacaccgtcaaaattctttggg

SEQ ID NO: 229650 - DNA, 75 bp, synthetic construct
  source 1..75: mol_type = other DNA
ctgggtgaacaggtacaacatgtgctggatgagaaccccttctccggtcacctgctcatcttccgtggccgacgg

SEQ ID NO: 229651 - DNA, 75 bp, synthetic construct
  source 1..75: mol_type = other DNA
ctgggagaacaggtacaacatgtgctggatgagaaccccttctcaggtcacctgtttatctttcgtggccgacgg

SEQ ID NO: 229652 - DNA, 75 bp, synthetic construct
  source 1..75: mol_type = other DNA
catcgttaaagtcttcaccaagcgtatcagcaagaaattcaatctgatgctggaaaccaaagttactgccgttga

SEQ ID NO: 229653 - DNA, 75 bp, synthetic construct
  source 1..75: mol_type = other DNA
gcaagctttctgacatcgcaccgaccatgttgtcgctaatgggtatggaaatcccgcaagagatgactggtaagc

SEQ ID NO: 229654 - DNA, 75 bp, synthetic construct
  source 1..75: mol_type = other DNA
gtgtttgccaaattaccggcactggtcgagcgtgccggaaatggcattagcggcggcggatcgattactgcattt

SEQ ID NO: 229655 - DNA, 75 bp, synthetic construct
  source 1..75: mol_type = other DNA
ccaggctgaaatgacaagacttggccctcagtatcaaattgacgtcaagcttcgggagttcggtcgcaccgcacg

SEQ ID NO: 229656 - DNA, 75 bp, synthetic construct
  source 1..75: mol_type = other DNA
ttaaggcactttcggaaaaatggcttgaactgaagaaaatagagatttgtgcgaatgcacttaatcgttaccagt

SEQ ID NO: 229657 - DNA, 75 bp, synthetic construct
  source 1..75: mol_type = other DNA
atatcagtcgagacatacttatgcctgctggtcgctgacagctggtgctaacccggcatttatagcaaaccagat

SEQ ID NO: 229658 - DNA, 75 bp, synthetic construct
  source 1..75: mol_type = other DNA
taccgccgttgccggtttgcaggctgcttatgctcgcgacgaaaacgacgaattcgtgaaagcgaccgttatccg

SEQ ID NO: 229659 - DNA, 75 bp, synthetic construct
  source 1..75: mol_type = other DNA
cgatccgaaagttatcccgtccatcgcctataccgaaccagaagttgcatgggtgggtctgactgagaaagaagc

SEQ ID NO: 229660 - DNA, 75 bp, synthetic construct
  source 1..75: mol_type = other DNA
cagaaccgcagcgttacgacgccgtgctggtcgcgattggtcgtgtgccgaacggtaaaaacatcgatgcgggca

SEQ ID NO: 229661 - DNA, 75 bp, synthetic construct
  source 1..75: mol_type = other DNA
acaagattcgtacttggaaagagaaagtgatcaatcagctgaccggtggtctggctggtatggcgaaaggccgca

SEQ ID NO: 229662 - DNA, 75 bp, synthetic construct
  source 1..75: mol_type = other DNA
atggagtacggtaaatacgaaacgctcgcaagagccgggtattcaggcgcggcccgtccgcagggtgactggcag

SEQ ID NO: 229663 - DNA, 75 bp, synthetic construct
  source 1..75: mol_type = other DNA
agcccgccctcagggggactggcaggcatccgcagcgctgacccgccagcaatacgacgactggcgcaccagata

SEQ ID NO: 229664 - DNA, 75 bp, synthetic construct
  source 1..75: mol_type = other DNA
gatttacgcggtgagtttatccgtggatgggacgacgggcgcaagattgacgaggggcgtaagttgctttcatgg

SEQ ID NO: 229665 - DNA, 75 bp, synthetic construct
  source 1..75: mol_type = other DNA
agctttttgactgcgtacgtcacacactgaaatcccttgaactttcaaaacatcagtatgtagctgccgttcata

SEQ ID NO: 229666 - DNA, 75 bp, synthetic construct
  source 1..75: mol_type = other DNA
cgcgccgtcagccgcgtctggtatttgatacccgcgagctggagagcattgaaacctttgccaatggtgtttccg

SEQ ID NO: 229667 - DNA, 75 bp, synthetic construct
  source 1..75: mol_type = other DNA
tggccagctggttcgctgaccttcaggaaatggaagatattaccctgaacgcggcggaagctatcgggcatggtt

SEQ ID NO: 229668 - DNA, 75 bp, synthetic construct
  source 1..75: mol_type = other DNA
gcctgcgtaacgaaaaatttgtctccctgattgatgtgatgaaagacggcagtcagtgggtaaatttctatggcg

SEQ ID NO: 229669 - DNA, 75 bp, synthetic construct
  source 1..75: mol_type = other DNA
ccatattgcggaagtgcagcgtatgcaggcgctgatcaggctgaaggagagtgtgaaggaagagcggttgtcact

SEQ ID NO: 229670 - DNA, 75 bp, synthetic construct
  source 1..75: mol_type = other DNA
gatgggcacaggtccgcagggggctataaagcgcgaactgttttctgataaggaaagtctgtgggggtacacgac

SEQ ID NO: 229671 - DNA, 75 bp, synthetic construct
  source 1..75: mol_type = other DNA
tggatattgagcgggaagcgattgagcaggacagcgtattttatcccgaagccagcccggagcggctggcggaac

SEQ ID NO: 229672 - DNA, 75 bp, synthetic construct
  source 1..75: mol_type = other DNA
gctggcagaactgccatgaactgtttgcccgcagtggactgatgttacagaaactacatcatggtcttgtgattg

SEQ ID NO: 229673 - DNA, 75 bp, synthetic construct
  source 1..75: mol_type = other DNA
gtgttcgtcctgatccagcgcgggcagtccttcgtcgatgccaacaactatccggttgaagtctgcaaggtaact

SEQ ID NO: 229674 - DNA, 75 bp, synthetic construct
  source 1..75: mol_type = other DNA
agccgggcatctggaagcgcagtatcagcaggaaaaggcactggcgcagcagattatgacgttgcgtcaggaagg

SEQ ID NO: 229675 - DNA, 75 bp, synthetic construct
  source 1..75: mol_type = other DNA
aacgcccttacagcgtggtgctgctcgacgaagtggaaaaggcgcatcgcgacgtgatgaacctgttctatcagg

SEQ ID NO: 229676 - DNA, 75 bp, synthetic construct
  source 1..75: mol_type = other DNA
attttgagcgcgacgccgcgctggagcgccgcttccagatggtgaaagtggacgagccggatgatgacaccgcct

SEQ ID NO: 229677 - DNA, 75 bp, synthetic construct
  source 1..75: mol_type = other DNA
gcgcagtgaagagtattaccacgaatatatcaggcagcagacacgtttatcggagagccatgatgagaattacag

SEQ ID NO: 229678 - DNA, 75 bp, synthetic construct
  source 1..75: mol_type = other DNA
atgcccaatagcttcgataagccgcagacgcgcccagcacataactctgatgccgaacccttttttcccaaaaac

SEQ ID NO: 229679 - DNA, 75 bp, synthetic construct
  source 1..75: mol_type = other DNA
tgccaggctattcaccgcacactggctgaagcgggattatggatgcgtgttcagcatggtcacctggttatctgt

SEQ ID NO: 229680 - DNA, 75 bp, synthetic construct
  source 1..75: mol_type = other DNA
gaatgacagctacagccatgaaatcagtaaatccgttgacgatacgattgaactggttcgcgcctatcttaaata

SEQ ID NO: 229681 - DNA, 75 bp, synthetic construct
  source 1..75: mol_type = other DNA
aaagggcttatgctgcagaaacagcatcatggtcttgtgattgtggatgcgtttaatcatgagctgacaccggtg

SEQ ID NO: 229682 - DNA, 75 bp, synthetic construct
  source 1..75: mol_type = other DNA
agcggccatatcgccagacgctgcagtgagcagaagcgggtgcgtatccccgctatgaaagtcagcgaatggggc

SEQ ID NO: 229683 - DNA, 75 bp, synthetic construct
  source 1..75: mol_type = other DNA
agcggtcatatcgccagacgctgcagtgagcagaagcgggtgcgtatccccgccatgaaagtcagcgaatggggc

SEQ ID NO: 229684 - DNA, 75 bp, synthetic construct
  source 1..75: mol_type = other DNA
gaggaccgggacaacattcttgaggcgctggtcaatctgggtcatgaagcggtggcagccctgccgcagggtaac

SEQ ID NO: 229685 - DNA, 75 bp, synthetic construct
  source 1..75: mol_type = other DNA
caatgacgaactccggctggatgacggcaaccgtggggaagatggtaaggacggctctgcactgtggccgttcgg

SEQ ID NO: 229686 - DNA, 75 bp, synthetic construct
  source 1..75: mol_type = other DNA
catcagtacgtggctgccgttcatacggacacggataatctgcatgtgcatgttgccgtgaatcgtgtacatcct

SEQ ID NO: 229687 - DNA, 75 bp, synthetic construct
  source 1..75: mol_type = other DNA
gctgaaatcactcggccttgccgaccatcagtatgtctctgccgtgcatactgatacagataatctgcacgtcca

SEQ ID NO: 229688 - DNA, 75 bp, synthetic construct
  source 1..75: mol_type = other DNA
aacgatggacagtttaatcaggtctttgctgaaatggtggcatggtacaatgtgacgggattctctgaacatgga

SEQ ID NO: 229689 - DNA, 75 bp, synthetic construct
  source 1..75: mol_type = other DNA
gacgcccgctgaaacgtgaggcactcaaaaccacgcagtcggtcagagtggcggaacggctgcgcatttatcccg

SEQ ID NO: 229690 - DNA, 75 bp, synthetic construct
  source 1..75: mol_type = other DNA
gggtgctgactggcaggcaaaccggattaaggtttatcgttctttggggcacccgacagacccgcaggaagcaat

SEQ ID NO: 229691 - DNA, 75 bp, synthetic construct
  source 1..75: mol_type = other DNA
tggcactgataccgtcagccgaacagcgttcacagctggagatgctgctggggccaactgattgcagccgcctgt

SEQ ID NO: 229692 - DNA, 75 bp, synthetic construct
  source 1..75: mol_type = other DNA
ctaccgctgcaacaggggctggcgctatccgcgatcccggtcatttttacgtcgtttggttttcacggcagcgtg

SEQ ID NO: 229693 - DNA, 75 bp, synthetic construct
  source 1..75: mol_type = other DNA
gcttttgccatgtggacactggcggcgggcgtcggtctgttagccgtgtggttactgctgttgacaatggacgcg

SEQ ID NO: 229694 - DNA, 75 bp, synthetic construct
  source 1..75: mol_type = other DNA
cacgggtcaacgacaactttatcccacgtaccgaatatccgtcaggttatgcttttgccatgtggacactggcgg

SEQ ID NO: 229695 - DNA, 75 bp, synthetic construct
  source 1..75: mol_type = other DNA
aacaccggacgaatcgattcgtgctgaggtgttcagctacatcccaaggcaaaagctggctgaaatcatcacgct

SEQ ID NO: 229696 - DNA, 75 bp, synthetic construct
  source 1..75: mol_type = other DNA
gcatgaatgtgctggggttgttgtcgaagtgggtaaaaatctcactggcaaatataaaaaagggcagcgttttgt

SEQ ID NO: 229697 - DNA, 75 bp, synthetic construct
  source 1..75: mol_type = other DNA
taaaaacttcaaagtgccgtttaatttctacaacgtccattacaacagtacgcacattgtcggcacgtccggcgg

SEQ ID NO: 229698 - DNA, 75 bp, synthetic construct
  source 1..75: mol_type = other DNA
tcccaggcggtaaaaaactcatttataacggcgtgaccatgccgctcactgccattgccgattttgccgaaaaag

SEQ ID NO: 229699 - DNA, 75 bp, synthetic construct
  source 1..75: mol_type = other DNA
ctaactttgcaacagtgcccatttcgccttacccgtcttttatatacccggagctggataagcaacgaacgtcct

SEQ ID NO: 229700 - DNA, 75 bp, synthetic construct
  source 1..75: mol_type = other DNA
cgccttcaggatgcactgcgccgccgggacatctggcttgaaaacagtgatcgctggggagatcctcgcgagaag

SEQ ID NO: 229701 - DNA, 75 bp, synthetic construct
  source 1..75: mol_type = other DNA
atacattcacgttgccagaggatattttaaaaggggaactgagagctctaaatttaaatataaacaacgaattat

SEQ ID NO: 229702 - DNA, 75 bp, synthetic construct
  source 1..75: mol_type = other DNA
tttagtcgccctgggcggcgtcgtgcttggtggttttctggattatctggcgctacgaaaaacgcatctgacgta

SEQ ID NO: 229703 - DNA, 75 bp, synthetic construct
  source 1..75: mol_type = other DNA
gctgctgaaaatggtttcagtgtgatcagtagttcactgggcatttcacgctggaaaaatatgcagcaggttaac

SEQ ID NO: 229704 - DNA, 75 bp, synthetic construct
  source 1..75: mol_type = other DNA
aaactactactgcactcttgctgtgctccatgttccggtgaagtgatggaggcgcttcaggcctcgggaatcgac

SEQ ID NO: 229705 - DNA, 75 bp, synthetic construct
  source 1..75: mol_type = other DNA
agcaagcgcgaacaattctatcagcaggaatattgtggctgcgtgtattcactgcgcgataccaatctacaccgc

SEQ ID NO: 229706 - DNA, 75 bp, synthetic construct
  source 1..75: mol_type = other DNA
tatataatgctttttttaatttagaagcagctaaagctcacgttaaagctaacgaaaaaattccttccgacattc

SEQ ID NO: 229707 - DNA, 75 bp, synthetic construct
  source 1..75: mol_type = other DNA
tggtcaataagaaccgtactgatttcatcattgaactggcttaccaggaagctaaaaacatcatcctggatcaac

SEQ ID NO: 229708 - DNA, 75 bp, synthetic construct
  source 1..75: mol_type = other DNA
cagacaactggtttgagcgagccaaaggaatggaatgggagcctgaacgagggatccgttgtaccatgtgttttg

SEQ ID NO: 229709 - DNA, 75 bp, synthetic construct
  source 1..75: mol_type = other DNA
ctcgaaccaggcacccagctccgctggatggcggcactggcggtggtgatcgctttttgctctgcctcccaggat

SEQ ID NO: 229710 - DNA, 75 bp, synthetic construct
  source 1..75: mol_type = other DNA
tgtaggccccgtagcgggctggtttgttgaagctcacggctggtcgacattctatctgttctctgttgcggccgc

SEQ ID NO: 229711 - DNA, 75 bp, synthetic construct
  source 1..75: mol_type = other DNA
tttagtcgccctttctggcgtcgtgcttggtggtttgctggattatctggcgctacgaaaaacgcatctgacgta

SEQ ID NO: 229712 - DNA, 75 bp, synthetic construct
  source 1..75: mol_type = other DNA
gggcacgctggcaaaacgctatctgggacgctacggtcagtggctgacgggcttcagtatgatgttcttaatgta

SEQ ID NO: 229713 - DNA, 75 bp, synthetic construct
  source 1..75: mol_type = other DNA
tttacaaccgcaaggtaaactgttgttcagtgaaatcaactggcttgctggttattcaccggatcaagttcagta

SEQ ID NO: 229714 - DNA, 75 bp, synthetic construct
  source 1..75: mol_type = other DNA
gaaagtcagaattgccgaacgtacgtttactacctttggctcacgcggcggggtggtgtttgtaataaacggggc

SEQ ID NO: 229715 - DNA, 75 bp, synthetic construct
  source 1..75: mol_type = other DNA
accattggcacaggccagtccacctttgctggaaaaacggcgaccacctggggctataacggcaatttattgggg

SEQ ID NO: 229716 - DNA, 75 bp, synthetic construct
  source 1..75: mol_type = other DNA
caggacaacagcgacgagtacggcatttcacaaatctttattgccattgaagtggacaaactgatcgacggttcc

SEQ ID NO: 229717 - DNA, 75 bp, synthetic construct
  source 1..75: mol_type = other DNA
tacccggccacgaatttaccactctactggcagaaaaccgtcgtaacggtattactgtggatgacagcgtatggg

SEQ ID NO: 229718 - DNA, 75 bp, synthetic construct
  source 1..75: mol_type = other DNA
aagttaaccgcctggcaggtcgtcagctcccggtcgatggtggctttgatgatgagggcaatttgaccaaagaac

SEQ ID NO: 229719 - DNA, 75 bp, synthetic construct
  source 1..75: mol_type = other DNA
gtattacataatcagggaataacattagaaaacgaacatatgaaaatagaggaaattagttcaagcgataataaa

SEQ ID NO: 229720 - DNA, 75 bp, synthetic construct
  source 1..75: mol_type = other DNA
cggtgcctccgttgccgaagtaaccgaagataacagcgacgaatacggtatctcacaaatcttcatcgccatcga

SEQ ID NO: 229721 - DNA, 75 bp, synthetic construct
  source 1..75: mol_type = other DNA
cgcttacccggccatgaatttactaccctgctggccgaaaaccgccgtaacggtattaccgttgatgacagcgtg

SEQ ID NO: 229722 - DNA, 75 bp, synthetic construct
  source 1..75: mol_type = other DNA
aggctttcaacatatcgactacgcacttggctgcacggggcatgtcgactgtgaagtacggatgctacgtgatct

SEQ ID NO: 229723 - DNA, 75 bp, synthetic construct
  source 1..75: mol_type = other DNA
tccgtttgcgcaaacttactgccgccgataatcccgccatcgccagcgtcatccgccaggtatccgcagaatacg

SEQ ID NO: 229724 - DNA, 75 bp, synthetic construct
  source 1..75: mol_type = other DNA
aagcgattggtttgtatgaacatttaggttttcaacatatcgactatgcacttggctgcacgggccatgtagatt

SEQ ID NO: 229725 - DNA, 75 bp, synthetic construct
  source 1..75: mol_type = other DNA
atgaaagtgacatttgagcagttaaaagcagcctttaatcgggtcttaatttcacgcggcgttgacagcgaaacg

SEQ ID NO: 229726 - DNA, 75 bp, synthetic construct
  source 1..75: mol_type = other DNA
ccgttagcggcactgcctttcgggtgacaattccagcggtgttgcaaatcgcctgtctgcggcgaatggttagcg

SEQ ID NO: 229727 - DNA, 75 bp, synthetic construct
  source 1..75: mol_type = other DNA
gcccgattgctcacccataatgaaaaaggcaaaactcgcctctccagcgtactgatgcgcaacgaactgtttaaa

SEQ ID NO: 229728 - DNA, 75 bp, synthetic construct
  source 1..75: mol_type = other DNA
cgacagataaccctaacttcgctcttgagattttgaatgcaaacttatggtttgcagagaatggtgggccatacc

SEQ ID NO: 229729 - DNA, 75 bp, synthetic construct
  source 1..75: mol_type = other DNA
atacgaaaaactgactgccgaaggcgtgaaagcgcgcgtggtttccatgccgtctaccgacgcattcgacaagca

SEQ ID NO: 229730 - DNA, 75 bp, synthetic construct
  source 1..75: mol_type = other DNA
ccttcggtgaatctgctccggcagagcaactgttcgaagagttcggtttcaccgttgacaacgtcgttgcgaaag

SEQ ID NO: 229731 - DNA, 75 bp, synthetic construct
  source 1..75: mol_type = other DNA
aggttgcccgcagtcgcgccaccccgttattggatttgatcatgacagcgttgacgccccatccaccgcaaaaac

SEQ ID NO: 229732 - DNA, 75 bp, synthetic construct
  source 1..75: mol_type = other DNA
atgaaacagcgtcaggtgatggtttacacccacgattccatcggtctgggtgaagatggcccgactcaccagccg

SEQ ID NO: 229733 - DNA, 75 bp, synthetic construct
  source 1..75: mol_type = other DNA
aacggtgccatcatcggtatgaataccttcggtgaatctgcaccggcagagcagttgttcgaagagttcggcttc

SEQ ID NO: 229734 - DNA, 75 bp, synthetic construct
  source 1..75: mol_type = other DNA
aaagctttcaatttaagattgacaaattaaaagaaaattttcctaacgacagggagagcatattccatatcaatg

SEQ ID NO: 229735 - DNA, 75 bp, synthetic construct
  source 1..75: mol_type = other DNA
tgtgtccgttgcttttagcacctctgatggcaatggcagatgctcccaaatcccccgtcactgcaactgcaagca

SEQ ID NO: 229736 - DNA, 75 bp, synthetic construct
  source 1..75: mol_type = other DNA
ggcgccgcagcattttgctgcagctcagttcaataatggtgaaactcagccgatggatctcatcataaaacagac

SEQ ID NO: 229737 - DNA, 75 bp, synthetic construct
  source 1..75: mol_type = other DNA
atgaagtccaactttaaatttcttttgtgtccgttgcttttagcaccactgatggcaatggcagatgctcccacc

SEQ ID NO: 229738 - DNA, 75 bp, synthetic construct
  source 1..75: mol_type = other DNA
gctggcgtcggctaagcgataacagccagtggattcaggtttcgctggtcttccagactttacagcagatgcgtg

SEQ ID NO: 229739 - DNA, 75 bp, synthetic construct
  source 1..75: mol_type = other DNA
ctgacattgccgaagtcctgtggcgtgatttcctgaaacataacccgcagaatccgtcctgggctgaccgtgacc

SEQ ID NO: 229740 - DNA, 75 bp, synthetic construct
  source 1..75: mol_type = other DNA
ttaatgtgtctgccgaggttgccggatctgtggcactgttatctgctgattctaaccatttgtcagatatgcagt

SEQ ID NO: 229741 - DNA, 75 bp, synthetic construct
  source 1..75: mol_type = other DNA
tccgtttgcgcaaacttaccgtcgccgataatcctgctatcgcccacgtcattcgtcaggtatccgccgaatacg

SEQ ID NO: 229742 - DNA, 75 bp, synthetic construct
  source 1..75: mol_type = other DNA
atgattgaattagaatcgcgcgtactggcagatattcccgttctacatgcttatcccgttgggcaaaaagaaact

SEQ ID NO: 229743 - DNA, 75 bp, synthetic construct
  source 1..75: mol_type = other DNA
tttccaccgctgatacctgaaacggcagcacagcagaatgaattcaataacattgtcgcgccgctggcagagtgg

SEQ ID NO: 229744 - DNA, 75 bp, synthetic construct
  source 1..75: mol_type = other DNA
ttggagcgcaaatcgatattgctggtggggcaacgccatcaactaaaacacctgatttttgggataatggagata

SEQ ID NO: 229745 - DNA, 75 bp, synthetic construct
  source 1..75: mol_type = other DNA
tcggtactgaaccttattgccgcgtgaccgcccagtacaaccaggatatgcgctactggctggaaacaccgacta

SEQ ID NO: 229746 - DNA, 75 bp, synthetic construct
  source 1..75: mol_type = other DNA
tcttaaaatcttggttgaaaaatgttggtaaaattgccacatcaacacgagataagctcaatccatccatggatg

SEQ ID NO: 229747 - DNA, 75 bp, synthetic construct
  source 1..75: mol_type = other DNA
ggcccggtgatcattacctgtcaccctcatcgggtgggcctaagcagctgtgtggcagtgacggtggaggacaga

SEQ ID NO: 229748 - DNA, 75 bp, synthetic construct
  source 1..75: mol_type = other DNA
cagcagcgtggcggtggcactggaaggggggacggggcaaaaggtgcatcttctgctgacggtaagtggtcatga

SEQ ID NO: 229749 - DNA, 75 bp, synthetic construct
  source 1..75: mol_type = other DNA
cagcagtgtggcggtgacactggaagggcggtcgggccggcaggtaaatctcctgctgaccgtgagcggtcatga

SEQ ID NO: 229750 - DNA, 75 bp, synthetic construct
  source 1..75: mol_type = other DNA
acaattctccgcgcctgcgttggttgttaatagcgatgccgttcctggaacgattattgcgacagtaaatgcgaa

SEQ ID NO: 229751 - DNA, 75 bp, synthetic construct
  source 1..75: mol_type = other DNA
tctggaaacagagcgtggtctgaacctttccattcaggccgttccccgtgaaggcgcggggcgtaccattcagct

SEQ ID NO: 229752 - DNA, 75 bp, synthetic construct
  source 1..75: mol_type = other DNA
aagcaccgttctatgcagcagctgcgcttacttacaagaaccataatggtatgggtagtaaattaattgctgcct

SEQ ID NO: 229753 - DNA, 75 bp, synthetic construct
  source 1..75: mol_type = other DNA
atctactcgttgattgaaaatactatgcgggaaaataatagcctaaccgaactccgcgacacccttctccccaaa

SEQ ID NO: 229754 - DNA, 75 bp, synthetic construct
  source 1..75: mol_type = other DNA
tcctgatgttcgtggaatacgcacgtaacgctgtacgtatggctgcactgatgaaacagcgtcaggtgatggttt

SEQ ID NO: 229755 - DNA, 75 bp, synthetic construct
  source 1..75: mol_type = other DNA
ctgaagttgagctggctgttgccgcttacgaaaaactgactgccgaaggcgtgaaagcgcgcgtggtttccatgc

SEQ ID NO: 229756 - DNA, 75 bp, synthetic construct
  source 1..75: mol_type = other DNA
acaatgctaatagggatagttagtggtgttgcgattctttatactaagaagaaccatccttttttatttttatta

SEQ ID NO: 229757 - DNA, 75 bp, synthetic construct
  source 1..75: mol_type = other DNA
gcttacagtttgccttgaccgcgatataccacttcctttttgtgccactgacgctcggtatggcgttcctgctgg

SEQ ID NO: 229758 - DNA, 75 bp, synthetic construct
  source 1..75: mol_type = other DNA
gttggcggcgattctcttaccgatgatgcgtgaagctgggtataaattaaaccggaccggcggtttgatcggagc

SEQ ID NO: 229759 - DNA, 75 bp, synthetic construct
  source 1..75: mol_type = other DNA
atggtgttacaggccaaatttccattaccaaattgtttctcgcgggtatcgtaccgggtgtcattatgggtatgg

SEQ ID NO: 229760 - DNA, 75 bp, synthetic construct
  source 1..75: mol_type = other DNA
taattgcattcgtcgataacactttcagcataaagatatataatatcactgctatagtttgcctattatcactaa

SEQ ID NO: 229761 - DNA, 75 bp, synthetic construct
  source 1..75: mol_type = other DNA
acaatgctaataggaatagttagtggtgttgcaattctttatactaaaaaaaaccatccttttttatttttatta

SEQ ID NO: 229762 - DNA, 75 bp, synthetic construct
  source 1..75: mol_type = other DNA
acttcttaatttaagtgagaatccgtttgatggtatgaatgtcagacaggaaaagaaacgtaagaaaacactgac

SEQ ID NO: 229763 - DNA, 75 bp, synthetic construct
  source 1..75: mol_type = other DNA
tctatttttcactattttatacagcatataaaaaacgcgcattgggtttgttgatattaacgcttggcatagtgg

SEQ ID NO: 229764 - DNA, 75 bp, synthetic construct
  source 1..75: mol_type = other DNA
agtcagctaaaaaataaaaaagagagtgtattatacattttatattctctgtcatttataattgctggatatgca

SEQ ID NO: 229765 - DNA, 75 bp, synthetic construct
  source 1..75: mol_type = other DNA
ctttctatattttttataggcttgcttgatttaatttggtattctatatttaaagtagataactcgccatttcgt

SEQ ID NO: 229766 - DNA, 75 bp, synthetic construct
  source 1..75: mol_type = other DNA
atgaataatgaacccttacgtcccgatcccgaccgtctgctggaacaaactgccgcgccgcatcgggggaagcta

SEQ ID NO: 229767 - DNA, 75 bp, synthetic construct
  source 1..75: mol_type = other DNA
aatgtccaaagctctggctgtgggccgtagttcgcaggatatcgccgccaccagcgaacagtttattgcctccac

SEQ ID NO: 229768 - DNA, 75 bp, synthetic construct
  source 1..75: mol_type = other DNA
ccgaccggaaggtggcgcttgttttcgtgttacacttcctcagcaaaccgctcctgaacttgaagaatttcatga

SEQ ID NO: 229769 - DNA, 75 bp, synthetic construct
  source 1..75: mol_type = other DNA
agctctggcggtgggccgcagtccgcaggatatcgctgccaccagcgaacaatttattgcctccacgtttcatgc

SEQ ID NO: 229770 - DNA, 75 bp, synthetic construct
  source 1..75: mol_type = other DNA
tttgataagtttgctcgcgggaataaagagtcggcagtaccgggggtaggcttggactggcaatttgtcgggcga

SEQ ID NO: 229771 - DNA, 75 bp, synthetic construct
  source 1..75: mol_type = other DNA
ctcgtggaaataaagagtcggcggtgccgggcgttgggcttgggctggcaatttgtcgggcgattgtggatgtac

SEQ ID NO: 229772 - DNA, 75 bp, synthetic construct
  source 1..75: mol_type = other DNA
cgttaggcgatccggttggcgataatcgttataaagtcaaattgttgcgtaatggtgaaacacgcgagcgtgaag

SEQ ID NO: 229773 - DNA, 75 bp, synthetic construct
  source 1..75: mol_type = other DNA
tggtgataatcatcgccgggctgattgcattatggaaaattcttaatgcgcctgtgccaacgtatcagacactga

SEQ ID NO: 229774 - DNA, 75 bp, synthetic construct
  source 1..75: mol_type = other DNA
gccgcacaacaagcaccgaacattctgacgctggcagatatgagcaccatgctggtaaaagcgcaggtttctgaa

SEQ ID NO: 229775 - DNA, 75 bp, synthetic construct
  source 1..75: mol_type = other DNA
tgaagaaagagtggttaacgctggaagaagtggtcggcagcgcgctgcaaatgctggaaccgggtttatcgtcgc

SEQ ID NO: 229776 - DNA, 75 bp, synthetic construct
  source 1..75: mol_type = other DNA
atgaataacgaacccttacgtcccgaccccgaccgtctgctggaacaaactgccgcgccacatcgcggaaagcta

SEQ ID NO: 229777 - DNA, 75 bp, synthetic construct
  source 1..75: mol_type = other DNA
cggcacgctcgctgtctctgatgtgcaatatctgctgaccttcgcggtgatgttaaccgtcgggctggtgatcgg

SEQ ID NO: 229778 - DNA, 75 bp, synthetic construct
  source 1..75: mol_type = other DNA
ccgttaaaaagcggcgagaaaacctacgggctggtggtggtggaaccggggaatctgcgccagttgatgatcccg

SEQ ID NO: 229779 - DNA, 75 bp, synthetic construct
  source 1..75: mol_type = other DNA
atgctgcaaatctctcatctctatgccgattatggcggcaaaccggcgctggaagatatcaacctgacgctggaa

SEQ ID NO: 229780 - DNA, 75 bp, synthetic construct
  source 1..75: mol_type = other DNA
tgatttcaatggcagaaacatcacagagttggttgagcgttaccgtgttacctataaaacggtgtataaagcaat

SEQ ID NO: 229781 - DNA, 75 bp, synthetic construct
  source 1..75: mol_type = other DNA
ataaaaccgtctacaaggccatcaaacggatgcgacgtctggagcgtaataaataccagccggatttgttttacc

SEQ ID NO: 229782 - DNA, 75 bp, synthetic construct
  source 1..75: mol_type = other DNA
atgactgataacaataccgccctaaagaaagctggcctgaaagtaacgcttccacgtttaaaaatcctggaagtt

SEQ ID NO: 229783 - DNA, 75 bp, synthetic construct
  source 1..75: mol_type = other DNA
cgtatcagatgtttttgcaagctatggaacgaatcattttgaagagaacaaggagggatatgaattactccgtgc

SEQ ID NO: 229784 - DNA, 75 bp, synthetic construct
  source 1..75: mol_type = other DNA
atttagataacacactattcgactggtttagcgtttggtatcatagctttaatgcaatgctaaataaagtcgttg

SEQ ID NO: 229785 - DNA, 75 bp, synthetic construct
  source 1..75: mol_type = other DNA
atgaataagcgcgatgcaatcaatcatattcggcagtttggcgggcgtctggatcgcttccgtaaatcggtcggc

SEQ ID NO: 229786 - DNA, 75 bp, synthetic construct
  source 1..75: mol_type = other DNA
ccacgcggccagactcttgagtcattgattcgtgatatgaaaatctggcgtgatttcaatggcagaaacatcaca

SEQ ID NO: 229787 - DNA, 75 bp, synthetic construct
  source 1..75: mol_type = other DNA
tggacatcaattccattagcgatatcatctgtcatcttatggccaaaagcttgtaaatattttaaaattaaagca

SEQ ID NO: 229788 - DNA, 75 bp, synthetic construct
  source 1..75: mol_type = other DNA
gcggttgcggaagtggcacaggttttcggaacgaagtttgatatcaatggtttatcgttcgatgaatgcctgctg

SEQ ID NO: 229789 - DNA, 75 bp, synthetic construct
  source 1..75: mol_type = other DNA
catccttcgcccgttcctgtacggcggtgcgctgctgggattttctggcgcattgttgtcattaattttgtcaga

SEQ ID NO: 229790 - DNA, 75 bp, synthetic construct
  source 1..75: mol_type = other DNA
atattcgccagttcggtggacgtctggatcgcttccgtaaatcggtcggcggctctggcgacggtggtcgtaacg

SEQ ID NO: 229791 - DNA, 75 bp, synthetic construct
  source 1..75: mol_type = other DNA
acggtagagaatgttaacactgccgttaaacaatatctttctcatccggtgaatacctataccggagtattattg

SEQ ID NO: 229792 - DNA, 75 bp, synthetic construct
  source 1..75: mol_type = other DNA
ttgtagaacatatgatgtttaacggcacaaaaacatggccgggtaataaagtcatcgaaacatttgagtcaatgg

SEQ ID NO: 229793 - DNA, 75 bp, synthetic construct
  source 1..75: mol_type = other DNA
actacgcagaaacaaaatctgcaacaagtgatggcaatcttcagtgaatggagtaatgccgcaacctttgaaaaa

SEQ ID NO: 229794 - DNA, 75 bp, synthetic construct
  source 1..75: mol_type = other DNA
agctatgcaaacaccagtggtaccttgaataacaatatgaacatcactgtaaatagcatccagccagcaaaaaat

SEQ ID NO: 229795 - DNA, 75 bp, synthetic construct
  source 1..75: mol_type = other DNA
tcagccgaataatatgacctttatcgtcgttggtgatatcgacagtaaagaagcgctggcgttgataaaggaaaa

SEQ ID NO: 229796 - DNA, 75 bp, synthetic construct
  source 1..75: mol_type = other DNA
ggcgttgaaaacgctcgaccagcgtccagcagagaaattcgcccagcagatgtatgagaagcgctatgctgatga

SEQ ID NO: 229797 - DNA, 75 bp, synthetic construct
  source 1..75: mol_type = other DNA
atcggaactcaacgtgagtagcgacaatgtctcattaaccggagcggtaagcctggcatcaatgctgacagagat

SEQ ID NO: 229798 - DNA, 75 bp, synthetic construct
  source 1..75: mol_type = other DNA
acccacttcagtgctgtttatcgccggacacgatactaatctggcaaatctcggcggcgcactggagctcaactg

SEQ ID NO: 229799 - DNA, 75 bp, synthetic construct
  source 1..75: mol_type = other DNA
aagcgtctcagaatgctatcgaagcgttcgggccgctgttgccggaattcctcggcggttctgcagacctggcgc

SEQ ID NO: 229800 - DNA, 75 bp, synthetic construct
  source 1..75: mol_type = other DNA
tatgatttatccgcatgctcatccaaaggatcaggtaaatttatggctgcaaattcataccggttcattgcagga

SEQ ID NO: 229801 - DNA, 75 bp, synthetic construct
  source 1..75: mol_type = other DNA
gcgtagagtcatgtccggtagcctcaacattgaccttttcactgcaaaaacctgcggcaaataaaaaagcttttg

SEQ ID NO: 229802 - DNA, 75 bp, synthetic construct
  source 1..75: mol_type = other DNA
gataacacgccgccaggtggtgaactggtgtttgaacgctggcgtcggctaagcgataacagccagtggattcag

SEQ ID NO: 229803 - DNA, 75 bp, synthetic construct
  source 1..75: mol_type = other DNA
aacgtgaacattgcagttcataacatgaaaaacaaagctggcgctgctgaaattaagcaggtccatatgaacaac

SEQ ID NO: 229804 - DNA, 75 bp, synthetic construct
  source 1..75: mol_type = other DNA
caacgcagtgaaggccgaaggcggcaccggcgatgcgatctctggttttgaaggcagtgtaccgaacccatttgt

SEQ ID NO: 229805 - DNA, 75 bp, synthetic construct
  source 1..75: mol_type = other DNA
tgttctcgactattgatgagaaaacgtcgcaagagaaactcacctggttgaatgtgaacgatgcgctttcgattg

SEQ ID NO: 229806 - DNA, 75 bp, synthetic construct
  source 1..75: mol_type = other DNA
tgacgcgcgtattgtgcaggccttgcagaaaggcgaccactgcattgtccacacctgtaacgattctgtagcaag

SEQ ID NO: 229807 - DNA, 75 bp, synthetic construct
  source 1..75: mol_type = other DNA
ttcaacgagattaacaaccagcgtaactggcgcgcaccgctgtttggctattgctgctctggcgtggtttatacc

SEQ ID NO: 229808 - DNA, 75 bp, synthetic construct
  source 1..75: mol_type = other DNA
aaatgccgctacatctggtgcagcaatacggcagttggaccaaccgtaaggtggttgatttctttgtacgttttg

SEQ ID NO: 229809 - DNA, 75 bp, synthetic construct
  source 1..75: mol_type = other DNA
aacatgacgacggtactggcgatatgtcgcgttcacgtaagaagagctttaactggtacaaagaggtgattgcca

SEQ ID NO: 229810 - DNA, 75 bp, synthetic construct
  source 1..75: mol_type = other DNA
acgaagctaataacgccgaaaaagcgcttaataacctgaaagatggtctggctaagctggggcaaaccatctatt

SEQ ID NO: 229811 - DNA, 75 bp, synthetic construct
  source 1..75: mol_type = other DNA
ttagcgaggtggatcaagcgggaaacgggcatcattgccctgcgctggctcagtactgaacaggcaagcagtgtt

SEQ ID NO: 229812 - DNA, 75 bp, synthetic construct
  source 1..75: mol_type = other DNA
atggaactcacttatgatcaaaaggttttgctgaacaatgtcgcaaaaaggtctttcagagacatagccgatcaa

SEQ ID NO: 229813 - DNA, 75 bp, synthetic construct
  source 1..75: mol_type = other DNA
ctgctgctggtcggctccgctggtatttgtgatgccgttgcccggcgctccgcgattatgccgccacccaccgtg

SEQ ID NO: 229814 - DNA, 75 bp, synthetic construct
  source 1..75: mol_type = other DNA
attagcgtgatagatgcgcagacggacagcgacctggatcgcatcgctgccgctgtgatgcaggctaaacaaccg

SEQ ID NO: 229815 - DNA, 75 bp, synthetic construct
  source 1..75: mol_type = other DNA
agcattgtctgcgctttgccttcaatctgtgcccgaaacaggcgaaaggcaatatcaaaagctggaaggcgacgc

SEQ ID NO: 229816 - DNA, 75 bp, synthetic construct
  source 1..75: mol_type = other DNA
tgggaaattattttcacagtcatttccattgtttagtgaagcatataatgaagcgtgctcgcgtgttttcttacc

SEQ ID NO: 229817 - DNA, 75 bp, synthetic construct
  source 1..75: mol_type = other DNA
gaactaactgcggaaccttgagcgcaacggcaatctgggcctttatgttcttcattctcagtaaagaggaactgc

SEQ ID NO: 229818 - DNA, 75 bp, synthetic construct
  source 1..75: mol_type = other DNA
tccactttcccaaatcaccgcgattatcagacgaaagccggggcacgtccccggatgtgcttaatacaacggatg

SEQ ID NO: 229819 - DNA, 75 bp, synthetic construct
  source 1..75: mol_type = other DNA
tccacttcccgaaatcaccgcgtttgtcagatgaaagccggggaacgtccccggatgcgcttaatactactgatg

SEQ ID NO: 229820 - DNA, 75 bp, synthetic construct
  source 1..75: mol_type = other DNA
gttaaagaggttctcgaatccggttggatcacaaccggtccgaagaatcaggcgcttgaacaagccttttgccag

SEQ ID NO: 229821 - DNA, 75 bp, synthetic construct
  source 1..75: mol_type = other DNA
gtttattattcgtgttgatgaacaacgttgtgatatcagccgcgatgcgttgatggaagcactgaaagaaagagg

SEQ ID NO: 229822 - DNA, 75 bp, synthetic construct
  source 1..75: mol_type = other DNA
ggcgcttgagcaagccttttgccagttgacgggaaatcagcatgccatcgcggtcagttcagccaccgccggaat

SEQ ID NO: 229823 - DNA, 75 bp, synthetic construct
  source 1..75: mol_type = other DNA
aagaagacctgattaaactggtcgagtttgataacaaagaatatctctattacaaagcgattgcgccagatatcg

SEQ ID NO: 229824 - DNA, 75 bp, synthetic construct
  source 1..75: mol_type = other DNA
acataagtcactgggtgagccacccataattcctgtagccgctgctattcgtaacgcggtgaagatggctaccgg

SEQ ID NO: 229825 - DNA, 75 bp, synthetic construct
  source 1..75: mol_type = other DNA
ggaaatgccagtgttcaaaacgtgccagcattgcggcgggcgcgggtactcgcgtttccccgtagatcttgtgcg

SEQ ID NO: 229826 - DNA, 75 bp, synthetic construct
  source 1..75: mol_type = other DNA
ggtactcgcgtttccctgtagatcttgtccggcaggcggttaatcagcttgttttcccggtaagccgatcaacat

SEQ ID NO: 229827 - DNA, 75 bp, synthetic construct
  source 1..75: mol_type = other DNA
agaaataccgtgctttctatgaagacgccattgctgaattgttcaaagaagaggcgcgggctgataacgaaatca

SEQ ID NO: 229828 - DNA, 75 bp, synthetic construct
  source 1..75: mol_type = other DNA
ggtatcagcgcatggtatatgctgaaaggtcgtgacttcgccttcgcaaaacgctcctttgctattgctgccagc

SEQ ID NO: 229829 - DNA, 75 bp, synthetic construct
  source 1..75: mol_type = other DNA
tgagccagacccggaacagttatgccaatattgtctggcgctgatccagattctgacggaacagacgcagggatc

SEQ ID NO: 229830 - DNA, 75 bp, synthetic construct
  source 1..75: mol_type = other DNA
tatggtggcgtgtggcttcctgctgctggcaatcatcgcgctctctttctggagtgtcatccgcaaccgcattgg

SEQ ID NO: 229831 - DNA, 75 bp, synthetic construct
  source 1..75: mol_type = other DNA
aaacgctgacggtggatagagctgaagcgcgttccgcgcgtggagaatctgctctattttatgcagaacacgcgt

SEQ ID NO: 229832 - DNA, 75 bp, synthetic construct
  source 1..75: mol_type = other DNA
gacccaggtagcgaagctggaaggttatcaggaagatcaagcgaaaaaactggcaaaacagcaagttgaaggcgc

SEQ ID NO: 229833 - DNA, 75 bp, synthetic construct
  source 1..75: mol_type = other DNA
cggtcagataacgttaaacgggcagaaaatgccactggaagatttcgttggtatgtttgcaatgccggcattaaa

SEQ ID NO: 229834 - DNA, 75 bp, synthetic construct
  source 1..75: mol_type = other DNA
ttacgagcaaaaggatgaaaaagtcgcctttagcggcggcgagttccagttaaatgctgacagagacggcaaagc

SEQ ID NO: 229835 - DNA, 75 bp, synthetic construct
  source 1..75: mol_type = other DNA
agcggcttgactgctatgaccgcctgctggcaccgctgtccccgtcagggtttgacggggcgctggtcaaagccg

SEQ ID NO: 229836 - DNA, 75 bp, synthetic construct
  source 1..75: mol_type = other DNA
agcggcaccgccggatgcaacaaccacggtacaggccatgcagtcctgtcggcgggagcccgcggcgctggagcg

SEQ ID NO: 229837 - DNA, 75 bp, synthetic construct
  source 1..75: mol_type = other DNA
ggtatcagcgcatggtatatgctgaaaggccgtgacttcgccttcgcaaaacgctcctttgctatcgctgcaagc

SEQ ID NO: 229838 - DNA, 75 bp, synthetic construct
  source 1..75: mol_type = other DNA
acagaacaggaaaaacgccgccagggcaacaccacggagctgctggtaacgcaagtaccgggtgaacgcccgacg

SEQ ID NO: 229839 - DNA, 75 bp, synthetic construct
  source 1..75: mol_type = other DNA
gcaacaccacagagctgctggtgacgcaggtgccgggggaacgcccgacggtggtgataaccaccccggctatcg

SEQ ID NO: 229840 - DNA, 75 bp, synthetic construct
  source 1..75: mol_type = other DNA
gaaattaagcaactgttcggcgcaaaaacgctgacggtggataccggcgcagacaacgccgccggaaagctgacc

SEQ ID NO: 229841 - DNA, 75 bp, synthetic construct
  source 1..75: mol_type = other DNA
ttccctggtcatgtgtgcgagtcatcaaaccgtttgtcggtggcggttttggtaataaacaggatgtgctggaag

SEQ ID NO: 229842 - DNA, 75 bp, synthetic construct
  source 1..75: mol_type = other DNA
ttacgacgcctgtttacggcgttgaaaatagccggagtagtaaaagattttgacaccaaagggcgtgaagcctgg

SEQ ID NO: 229843 - DNA, 75 bp, synthetic construct
  source 1..75: mol_type = other DNA
atgcgcagctggctgcgtttgcatatctgttttgacgatcgctatacgcaggatgacggttatgaagcgggactc

SEQ ID NO: 229844 - DNA, 75 bp, synthetic construct
  source 1..75: mol_type = other DNA
acgttgccgcgccagcgttgcgcagtgcggcgctgctgctgaaagagaaaatcatcgctcacgccgcagtcatgc

SEQ ID NO: 229845 - DNA, 75 bp, synthetic construct
  source 1..75: mol_type = other DNA
gtaacgcggtgaagatggctaccggtgttgcaatcaatacactgccgctgacgccaaaacggttatacgaagagt

SEQ ID NO: 229846 - DNA, 75 bp, synthetic construct
  source 1..75: mol_type = other DNA
gtcaaaaggccggaagagccattgctgtcgttaaaagatctggcgatggatgctttttatcatcctgagcgcggc

SEQ ID NO: 229847 - DNA, 75 bp, synthetic construct
  source 1..75: mol_type = other DNA
ttgaaattgagcagatagacctgaaggtctctgagccggagaactggcgtatctgtagccactgtaactacagcg

SEQ ID NO: 229848 - DNA, 75 bp, synthetic construct
  source 1..75: mol_type = other DNA
ctcagagcaaaagcaaagaactttaaattaggtatttgctcagatagtttggtttatcataagataggtgcaagt

SEQ ID NO: 229849 - DNA, 75 bp, synthetic construct
  source 1..75: mol_type = other DNA
ctggttgaagtcccatggaatgaacagacgccggaacagcgtcagcaaacgcttcaacgtcaggcacaacagcgt

SEQ ID NO: 229850 - DNA, 75 bp, synthetic construct
  source 1..75: mol_type = other DNA
ttcacgcatcgataaactcaagcgcagtatcgataagctggagaacgcgccgcgcgatcaaaactttgacagcga

SEQ ID NO: 229851 - DNA, 75 bp, synthetic construct
  source 1..75: mol_type = other DNA
gacgctgaaaaatgaaggcaaactggcggagaactccgatctgccggagctggtttccctgcgcctcgactggga

SEQ ID NO: 229852 - DNA, 75 bp, synthetic construct
  source 1..75: mol_type = other DNA
gcaaaatggcggatgatgccaatgagttgatgattgccggagaagcgaagaagcgaaccgggtttaaagtttgcc

SEQ ID NO: 229853 - DNA, 75 bp, synthetic construct
  source 1..75: mol_type = other DNA
acgccaattttccccccacaccgtagatacatgggtgattcgggctgtgtggaataccttacaaggaaacggcta

SEQ ID NO: 229854 - DNA, 75 bp, synthetic construct
  source 1..75: mol_type = other DNA
ctcgtacctggtgtatcgcaaacagcgtcctcatctgcatgagaagtcgatctacaagatgccgctcggcaagct

SEQ ID NO: 229855 - DNA, 75 bp, synthetic construct
  source 1..75: mol_type = other DNA
attccagatagcggttttcgcttttgtggggattgagctggtcggtacaacggctgcggaaaccaaagatccaga

SEQ ID NO: 229856 - DNA, 75 bp, synthetic construct
  source 1..75: mol_type = other DNA
acaaatcttttagtgacttcgcttccgatctactggggccgtgggcagggtattttactggttggacctactggt

SEQ ID NO: 229857 - DNA, 75 bp, synthetic construct
  source 1..75: mol_type = other DNA
ggcgatttttacctgggaagatgtgccagaaatcccattcgccacggcagggcatgcctggacacttgacgaaaa

SEQ ID NO: 229858 - DNA, 75 bp, synthetic construct
  source 1..75: mol_type = other DNA
taccagccgtatgttgtttggtctggcgcaggaaggcgtcgcgccgaaagcgttcgctaaactctctaaacgcgc

SEQ ID NO: 229859 - DNA, 75 bp, synthetic construct
  source 1..75: mol_type = other DNA
tcgtgtatctgtctgctcggcggcgtggtgatgttgtatgtgaatcctagtgtgattggcgcgttcacgatgatt

SEQ ID NO: 229860 - DNA, 75 bp, synthetic construct
  source 1..75: mol_type = other DNA
gacgctgaaccaatccataacggcggcaatttactaaaacaaagcacgatgtcgacgggcaatgtccaacaaaca

SEQ ID NO: 229861 - DNA, 75 bp, synthetic construct
  source 1..75: mol_type = other DNA
atggtgacgccgttgccatcgtcgtggcccgtgatgaactcacggcagaaaaagcggcgcaattggtcagcattg

SEQ ID NO: 229862 - DNA, 75 bp, synthetic construct
  source 1..75: mol_type = other DNA
caccgtcttctcgcaaatggtggcagaaaccgtgggggttccggtcagcgacgttcgcgttatttcaacacaaga

SEQ ID NO: 229863 - DNA, 75 bp, synthetic construct
  source 1..75: mol_type = other DNA
atggtagatcaggtaaaagtcgttgccgatgatcaggcaccggctgaacagtcgctacggcgcaatcttacaaac

SEQ ID NO: 229864 - DNA, 75 bp, synthetic construct
  source 1..75: mol_type = other DNA
gtcgctacggcgcaatcttacaaaccgacatattcagcttatagccattggcggcgccattggtacgggactgtt

SEQ ID NO: 229865 - DNA, 75 bp, synthetic construct
  source 1..75: mol_type = other DNA
tcaacattgtcatatggaaagcgtgacctctctggcatggatggaagatgattcacgaattaccatcgtttccag

SEQ ID NO: 229866 - DNA, 75 bp, synthetic construct
  source 1..75: mol_type = other DNA
aattattggcaaaaggcgtgtcgcatttgctttccagccaattgacccgcattttacgcacccacgcagcaatga

SEQ ID NO: 229867 - DNA, 75 bp, synthetic construct
  source 1..75: mol_type = other DNA
ccgcaactggcagctgattgccggagaattacagcattttggtggcgatagtatcgccaacaaactgcgcggaca

SEQ ID NO: 229868 - DNA, 75 bp, synthetic construct
  source 1..75: mol_type = other DNA
ggaaagcgcgttcgtcgaaatcaatgagccgcaatccgcatacggacataagtcactgggtgagccaccaataat

SEQ ID NO: 229869 - DNA, 75 bp, synthetic construct
  source 1..75: mol_type = other DNA
gtcccacaaaaagaaacatcagagatagaaatatctccagaaaaaattttactaaatttcttcttaaaacatatt

SEQ ID NO: 229870 - DNA, 75 bp, synthetic construct
  source 1..75: mol_type = other DNA
caaaaacaatgtgcttttgataaaaaagcaagaaatgaaaaacattacaatttaaatatttacgatatgtttttt

SEQ ID NO: 229871 - DNA, 75 bp, synthetic construct
  source 1..75: mol_type = other DNA
ggcactggctacagaaaagcaactatcctgggcagaaacacactatcaagcacaacgccacattcaagagcatat

SEQ ID NO: 229872 - DNA, 75 bp, synthetic construct
  source 1..75: mol_type = other DNA
ctattaggcactatctggaatatagttatgagtgcagtaccaggatttaatgcattagcaggaaccagcagtata

SEQ ID NO: 229873 - DNA, 75 bp, synthetic construct
  source 1..75: mol_type = other DNA
tatttttaacactagaattaaatagttttaaatcaaataaaaagccaaacaaaagagattttgaacatatattta

SEQ ID NO: 229874 - DNA, 75 bp, synthetic construct
  source 1..75: mol_type = other DNA
agctccagctggagctgcagctccagcgatagatcttttcttggcccaaaaaatagaggagcatttaataagaaa

SEQ ID NO: 229875 - DNA, 75 bp, synthetic construct
  source 1..75: mol_type = other DNA
tcattccccaaaatgcccccgtagaaccagtaggattaattgacaggacatttggccaatcagaaaacatacaac

SEQ ID NO: 229876 - DNA, 75 bp, synthetic construct
  source 1..75: mol_type = other DNA
aatgacagaggtaacattatgccgaggaactattgcctctcaggctgaaaacattgtttcttatagtactgcagg

SEQ ID NO: 229877 - DNA, 75 bp, synthetic construct
  source 1..75: mol_type = other DNA
tcaaaaaagcacaaggaaaatcttggaattagcaagcatggaaggtaatgaactttatagcgccactggatttaa

SEQ ID NO: 229878 - DNA, 75 bp, synthetic construct
  source 1..75: mol_type = other DNA
atggcataagcgaaatgctcattgctattgatgaaaaaggtaaccttattgaaccacaaaaggagtcatcagaag

SEQ ID NO: 229879 - DNA, 75 bp, synthetic construct
  source 1..75: mol_type = other DNA
tgctatcttaggtgatgtaaaggagctctttagtgaaaaaagtaataccattaatctaggagggtgttacataga

SEQ ID NO: 229880 - DNA, 75 bp, synthetic construct
  source 1..75: mol_type = other DNA
aattaaataaatcaattttattgaccataaatacatctgatgagaagtataaccatcaaaaagtaatggcagctg

SEQ ID NO: 229881 - DNA, 75 bp, synthetic construct
  source 1..75: mol_type = other DNA
ggatgagtgatttgtctcaggctgtattggaaaactgttcttttaaaaactcgattttgaatgaatgtaattttt

SEQ ID NO: 229882 - DNA, 75 bp, synthetic construct
  source 1..75: mol_type = other DNA
tccagaatactaacgattatacacttgggaaattattttcacagtcatttccattgtttagtgaagcatataatg

SEQ ID NO: 229883 - DNA, 75 bp, synthetic construct
  source 1..75: mol_type = other DNA
aaatgtttatagatgctctggaatctgataaatcagaagtaaaaatggttgctgatactcagcaacaaaagattg

SEQ ID NO: 229884 - DNA, 75 bp, synthetic construct
  source 1..75: mol_type = other DNA
ggaaagagcatcttgatggttggagtttagctccagaacatttaaaaacaataacagaaaaaactaatataggga

SEQ ID NO: 229885 - DNA, 75 bp, synthetic construct
  source 1..75: mol_type = other DNA
attagtaaagttttataaagactctaatggtaacttttatcaagctgacggattaaaaggaggtggacttattcg

SEQ ID NO: 229886 - DNA, 75 bp, synthetic construct
  source 1..75: mol_type = other DNA
ctacggatgtatgtagctatatgcaggatgtaatacgtattggtatggaagcaattccagcagccgaatctaaat

SEQ ID NO: 229887 - DNA, 75 bp, synthetic construct
  source 1..75: mol_type = other DNA
aacaggtaatatcaaagggaaaagctcttcagaaagatttttttgatagttatatagaaaataaagaaaccttac

SEQ ID NO: 229888 - DNA, 75 bp, synthetic construct
  source 1..75: mol_type = other DNA
gatggctctggtaagccagactggcatgattttaataatgcatataactggattttactgtcatcatcggatgat

SEQ ID NO: 229889 - DNA, 75 bp, synthetic construct
  source 1..75: mol_type = other DNA
taaagaaacacctccagacctgaaagatgcacagttggcgggggctattatagttcccgggatggagcttagagg

SEQ ID NO: 229890 - DNA, 75 bp, synthetic construct
  source 1..75: mol_type = other DNA
tgctattttagaacaagataatatatctttatctgtgcaaaataattgtattagtttagcttgttgtcagataca

SEQ ID NO: 229891 - DNA, 75 bp, synthetic construct
  source 1..75: mol_type = other DNA
aactgatggtgcagcatgaagaacgcattcgtaacgggatgaaggcgtactctctgctcgaacaactgcgttctg

SEQ ID NO: 229892 - DNA, 75 bp, synthetic construct
  source 1..75: mol_type = other DNA
gttttattggtcacattttatgcgacacgatgaagaaacagtcgaacagagggcaaattagcacactttttcaac

SEQ ID NO: 229893 - DNA, 75 bp, synthetic construct
  source 1..75: mol_type = other DNA
ttaacccattcaacagaactgtgacgcgccatggcaaatatcgctttgccgatagagctatgaccgccagaaaca

SEQ ID NO: 229894 - DNA, 75 bp, synthetic construct
  source 1..75: mol_type = other DNA
cattgggtaaggattcggtaactgtaacgctacagaacgacactgaaataaccatacctacaaacccgttaccgc

SEQ ID NO: 229895 - DNA, 75 bp, synthetic construct
  source 1..75: mol_type = other DNA
ttcagcgggttaaaagctacatagcgcatcaggagagtaaacagaagtctttccgtgttagtcagaaatgggaac

SEQ ID NO: 229896 - DNA, 75 bp, synthetic construct
  source 1..75: mol_type = other DNA
cgtggctgaatatggccgccaaccgtgggctatcggtgaagtgctgccgacagctgtggcgaactcgtcactgac

SEQ ID NO: 229897 - DNA, 75 bp, synthetic construct
  source 1..75: mol_type = other DNA
aactgccgaagggaagatagtcgtactgcgtagcgatgttgattacttgctggatgaggttatcgatattcaggc

SEQ ID NO: 229898 - DNA, 75 bp, synthetic construct
  source 1..75: mol_type = other DNA
ctcaggtgaaaaacgatgaacaggacgtcgaactggctgatcacgatgcaagaatcaccgcaaacacaaaagcga

SEQ ID NO: 229899 - DNA, 75 bp, synthetic construct
  source 1..75: mol_type = other DNA
ctgttattgttcaggcgacgcggctcgacacatcagtccttccacgcaatatcttctcgcagtcatatctgctgt

SEQ ID NO: 229900 - DNA, 75 bp, synthetic construct
  source 1..75: mol_type = other DNA
caggttctgaaagaacgtggtctgatgaagaagaaaggcttcccggaatcgtatgatatgcatcgcctggtgaag

SEQ ID NO: 229901 - DNA, 75 bp, synthetic construct
  source 1..75: mol_type = other DNA
ctactcgcgagcgcgccagtttaatcctgacgaaaagtgctaatcatgcggtagaagaggtcagactacgcaaat

SEQ ID NO: 229902 - DNA, 75 bp, synthetic construct
  source 1..75: mol_type = other DNA
atattcagccagtcttacctgctgtatgtcataaatcagggagctgatgtcggcgcaattgccgggaaggcaaat

SEQ ID NO: 229903 - DNA, 75 bp, synthetic construct
  source 1..75: mol_type = other DNA
gtgactttgcctacgcccgaaacctacgatgaacttcagaaagcctacgatttttttaatgagaacctgttcagc

SEQ ID NO: 229904 - DNA, 75 bp, synthetic construct
  source 1..75: mol_type = other DNA
gcacagaactacagaccacgattgatagcatgaggcgtaaaacttcactcagtgacaagggattaccccaactca

SEQ ID NO: 229905 - DNA, 75 bp, synthetic construct
  source 1..75: mol_type = other DNA
cccattaacgattaacatcttcaaaggtctgtttaggtgtcagtgtggggctagtgtccatcctaccggaaccaa

SEQ ID NO: 229906 - DNA, 75 bp, synthetic construct
  source 1..75: mol_type = other DNA
agagtatcgaccgtataggccgattagagcatcttgaaacagaagccttgatgaaccgcatcttaggcaacggga

SEQ ID NO: 229907 - DNA, 75 bp, synthetic construct
  source 1..75: mol_type = other DNA
gtcccacaaaaagaaacatcagagatagaaatatctccagagaaaattttactaaatttcttcttaaagcatatt

SEQ ID NO: 229908 - DNA, 75 bp, synthetic construct
  source 1..75: mol_type = other DNA
atggatgcgaataaaatggtcagagatgcaattattagttttgtacatcagattaatgaaataactgaagccagc

SEQ ID NO: 229909 - DNA, 75 bp, synthetic construct
  source 1..75: mol_type = other DNA
catactacggtaacatcatgaaaaaaatcatagttttttttaactctgaaccagcagtggtaatgccagcgatga

SEQ ID NO: 229910 - DNA, 75 bp, synthetic construct
  source 1..75: mol_type = other DNA
atgagaaccgcaataacataccttcggtacagttcagctatacaaggcgttgaaggtgctgactcaaccagacga

SEQ ID NO: 229911 - DNA, 75 bp, synthetic construct
  source 1..75: mol_type = other DNA
cccgctaacgattaacatcttcaaaggtctgtttaggtgtcagtgtggggctagtgttcaccctacagggactaa

SEQ ID NO: 229912 - DNA, 75 bp, synthetic construct
  source 1..75: mol_type = other DNA
atgaagatgatagcgaacacgaactggaggaaggccgcgacccggttgaactcgacgacgagatcatagaagcaa

SEQ ID NO: 229913 - DNA, 75 bp, synthetic construct
  source 1..75: mol_type = other DNA
tcacaacgtaatgaccgccccgctataccgaactactacgaagccgctatagatgctgcaacgttcaataaagct

SEQ ID NO: 229914 - DNA, 75 bp, synthetic construct
  source 1..75: mol_type = other DNA
caggtgagggaactgaaccaaaagcgcacagaactacagactactattgacactctgaagcgtaaaacttcactc

SEQ ID NO: 229915 - DNA, 75 bp, synthetic construct
  source 1..75: mol_type = other DNA
taccgaactactacgaagccgccatagacgctgcaacgttcaacaaagctcaagagattctcgataagaaccgta

SEQ ID NO: 229916 - DNA, 75 bp, synthetic construct
  source 1..75: mol_type = other DNA
atggcacaatttaaagttgatagttttatcgttgagctaggcttcagcgagaacgttattaagggcttgcaaaga

SEQ ID NO: 229917 - DNA, 75 bp, synthetic construct
  source 1..75: mol_type = other DNA
tagctgaagctgttcctggtatggttcaggtattcgctaaagcaaccggaaagactgaacaggaattatttgatg

SEQ ID NO: 229918 - DNA, 75 bp, synthetic construct
  source 1..75: mol_type = other DNA
taaaacagcaggtgcatttatctcaatgcaagctgtattagccagttatcagaagattatggaagttggtttaca

SEQ ID NO: 229919 - DNA, 75 bp, synthetic construct
  source 1..75: mol_type = other DNA
catctaaaccaaaccaaattaatgatggatggtgtcaacgacggatgaaaagtgatccacttatatctccaccaa

SEQ ID NO: 229920 - DNA, 75 bp, synthetic construct
  source 1..75: mol_type = other DNA
gagcaatcacagcagcttattcagctaatatgtctaagctaaaaggctttgaccctattttgcagaaatacatca

SEQ ID NO: 229921 - DNA, 75 bp, synthetic construct
  source 1..75: mol_type = other DNA
aacggtgacagagcagctaatagtcttgatagtctgtcttcagcagcagttaaaacagcaggtgcatttatcagc

SEQ ID NO: 229922 - DNA, 75 bp, synthetic construct
  source 1..75: mol_type = other DNA
agatatccaaagcctgagagatgaaatctccgctttgagtaaacgtattcaggagcctgtgaaagtttcacctgg

SEQ ID NO: 229923 - DNA, 75 bp, synthetic construct
  source 1..75: mol_type = other DNA
aaacgttattaagggcttgcaaagagttgaaaaggcagctttgcagtcagcacaaagaattgaacggaatttgaa

SEQ ID NO: 229924 - DNA, 75 bp, synthetic construct
  source 1..75: mol_type = other DNA
gctattcaggactctacgcagacaatgttaggaaacttaaggaatacttggaacaactcactaacggatatcttc

SEQ ID NO: 229925 - DNA, 75 bp, synthetic construct
  source 1..75: mol_type = other DNA
gatttcgtatttgataaagatgcaaatcaagtaaaagagttcacaaagtcattagctcaaacaacgggtttagat

SEQ ID NO: 229926 - DNA, 75 bp, synthetic construct
  source 1..75: mol_type = other DNA
ttacaggttatgctcgtttaatgggtcgttcagatgagcagattcaaagagcattaacagcattagcacagatgg

SEQ ID NO: 229927 - DNA, 75 bp, synthetic construct
  source 1..75: mol_type = other DNA
ctaatagtcttgatagtttgagttcagcagcagttaaaacagcaggtgcatttatcagctttcaggctgtactat

SEQ ID NO: 229928 - DNA, 75 bp, synthetic construct
  source 1..75: mol_type = other DNA
ctggtttcggtgcttcagctaaagagtctatgggtattcaaggttctgaagaactttttagaaatatgattggct

SEQ ID NO: 229929 - DNA, 75 bp, synthetic construct
  source 1..75: mol_type = other DNA
cgatgttgcttattatcaggtgctggcacaggaaaaacgccaggaggccggacgtcgtaaccgtctcggcataca

SEQ ID NO: 229930 - DNA, 75 bp, synthetic construct
  source 1..75: mol_type = other DNA
aacctggagtgggtgcgtctggcgcaacgagttccggtacgtattcgtctcgataatcagcaagagaacatctgg

SEQ ID NO: 229931 - DNA, 75 bp, synthetic construct
  source 1..75: mol_type = other DNA
ggcagcaacgtattcgtgagacggtgcggcacgcactggatgttcatccccgtctgacggcattgcgggttgatc

SEQ ID NO: 229932 - DNA, 75 bp, synthetic construct
  source 1..75: mol_type = other DNA
gctgtcgttcatcttcggtccactgcgcagcgtgccgatgggggtacgcgtggtcaccggtattagcttcggctt

SEQ ID NO: 229933 - DNA, 75 bp, synthetic construct
  source 1..75: mol_type = other DNA
ggcgctggacccggatgcactctctatcagcggtttgcacaactatgtgaagtatctgaagtcgagcggtcagga

SEQ ID NO: 229934 - DNA, 75 bp, synthetic construct
  source 1..75: mol_type = other DNA
tgcgatttatccatttcatctctctgatgctggtctttggtttcgcaatgtatggagcatggctggcgccggtga

SEQ ID NO: 229935 - DNA, 75 bp, synthetic construct
  source 1..75: mol_type = other DNA
agcattctttagatttacacagtcagctaatgaccagttcacagcggatatgctacttagctcaagctatccaga

SEQ ID NO: 229936 - DNA, 75 bp, synthetic construct
  source 1..75: mol_type = other DNA
ggtaaaacattaggtgaaagtcttggtagtctcatgacttctatgtcacatggtgttgatagcatgaccgatatt

SEQ ID NO: 229937 - DNA, 75 bp, synthetic construct
  source 1..75: mol_type = other DNA
tgcaagttgataaccttagtaatgcttggaaagatacgcttaataatatcttcaaaggttctgaaggtggtctta

SEQ ID NO: 229938 - DNA, 75 bp, synthetic construct
  source 1..75: mol_type = other DNA
tcgcgacagaaggattacaaaactacgggcaaaaagaggtggcgatggacattagctggcacttcctgaccaatg

SEQ ID NO: 229939 - DNA, 75 bp, synthetic construct
  source 1..75: mol_type = other DNA
accttacgcaccaccagcatcgtaccggtcgatctgaacagcctgatgtttaaaatggaaaaaatcctcgcccgc

SEQ ID NO: 229940 - DNA, 75 bp, synthetic construct
  source 1..75: mol_type = other DNA
tgactgccatcacaagattaggtcaggttgctaatacaacagcagacaccgttaataaaaagaatgggaagccat

SEQ ID NO: 229941 - DNA, 75 bp, synthetic construct
  source 1..75: mol_type = other DNA
cgtttgcaggtggatttcttatcgtatacgtcaggaaccctttgaatgaattaataaacggggggatcaggatat

SEQ ID NO: 229942 - DNA, 75 bp, synthetic construct
  source 1..75: mol_type = other DNA
ttcatattcgggaatatcatgatatttctgctgaaacgccgtatgcgccgggagaacaaattaagggagagcaat

SEQ ID NO: 229943 - DNA, 75 bp, synthetic construct
  source 1..75: mol_type = other DNA
tttgatttatatgtggaacatcctgatgtatgccattccgtatacgttatatgcgcttgctgccgggtttcttgt

SEQ ID NO: 229944 - DNA, 75 bp, synthetic construct
  source 1..75: mol_type = other DNA
tggtcaccggtatcagcttcggttttgtcttctacgtactggaccagatcttcggcccgctgacgttggtttacg

SEQ ID NO: 229945 - DNA, 75 bp, synthetic construct
  source 1..75: mol_type = other DNA
tacattattgccgcactaaccccgtatgtaaccgacctcaacaaaacctatcagccaggagaaactgtacagggt

SEQ ID NO: 229946 - DNA, 75 bp, synthetic construct
  source 1..75: mol_type = other DNA
atgatgacagaaaacaaaaagaatcaggaattcaaaatcagaaaaactaaacgggattatgattatgaacgcagg

SEQ ID NO: 229947 - DNA, 75 bp, synthetic construct
  source 1..75: mol_type = other DNA
gactataaatggctggcgcaaatttatgaatcggtgcgtccggtagggcagacaggtgcgcttgtttgggctgcc

SEQ ID NO: 229948 - DNA, 75 bp, synthetic construct
  source 1..75: mol_type = other DNA
tggagctacctgttaaacaagctgatttcgaacgctggcagcacattgatgcagaagagcaggtacaaaaggatc

SEQ ID NO: 229949 - DNA, 75 bp, synthetic construct
  source 1..75: mol_type = other DNA
gaaaatgcgctgggcgttgcccaatgcccacttctatggcctgactggtactccgatttctggcattgatcgtaa

SEQ ID NO: 229950 - DNA, 75 bp, synthetic construct
  source 1..75: mol_type = other DNA
aggtggcgaagcgccgcacttttgccattatttctcacccggacgccggtaagactaccatcaccgagaaggtgc

SEQ ID NO: 229951 - DNA, 75 bp, synthetic construct
  source 1..75: mol_type = other DNA
atgagagaaaataaaagtaatcctgagctcaaaatcagaagtacagaacgagattataaatacatttccagaatt

SEQ ID NO: 229952 - DNA, 75 bp, synthetic construct
  source 1..75: mol_type = other DNA
gccgagcgcgaaacgggcgagcggccagtaactgaagctgataataaacaggcgttgactaagcttttcctcgaa

SEQ ID NO: 229953 - DNA, 75 bp, synthetic construct
  source 1..75: mol_type = other DNA
tctttgatgaggtgacattagcttatcgtggtttaaccgatgagcaaaagaaagttgttgatgctttaggttctg

SEQ ID NO: 229954 - DNA, 75 bp, synthetic construct
  source 1..75: mol_type = other DNA
ggaagtggtaaaagtcttggtgaatctcttggtagtctcatgacttctatgtcacatggtgtcgatagtctgacc

SEQ ID NO: 229955 - DNA, 75 bp, synthetic construct
  source 1..75: mol_type = other DNA
aatgctcaacttgcaatgactattagtgaactatcacgcaaggtagatgctttaacggcagaagctaagaagccc

SEQ ID NO: 229956 - DNA, 75 bp, synthetic construct
  source 1..75: mol_type = other DNA
cgaagaagagattaagcgagcactaacagcattatcacagatggctggtaaaggtcaggtgatggctgaagaatt

SEQ ID NO: 229957 - DNA, 75 bp, synthetic construct
  source 1..75: mol_type = other DNA
ggttatgaaagattagcttctacacctgaacgaatggaagcacaagctaaattaccagagctagctaaagagtct

SEQ ID NO: 229958 - DNA, 75 bp, synthetic construct
  source 1..75: mol_type = other DNA
agacagccacgaattagcggaaacagagcaatcacagcagcttactcagcgaatatgagcaagctaaaaggcctt

SEQ ID NO: 229959 - DNA, 75 bp, synthetic construct
  source 1..75: mol_type = other DNA
gctgcaaatgtagctggaggcttgttaaaccttgcaaacgctgttacttcattcggtgacgctgttaataaagct

SEQ ID NO: 229960 - DNA, 75 bp, synthetic construct
  source 1..75: mol_type = other DNA
gagcaatcacagcagcttattcagcgaatatgtctaagctaaaaggtcttaacccaattgtcgagaaatacatta

SEQ ID NO: 229961 - DNA, 75 bp, synthetic construct
  source 1..75: mol_type = other DNA
ctattacgggtgacatggttaatagtaatgctcaattagctatggctgtatcagagttaggaagaaaggtagacg

SEQ ID NO: 229962 - DNA, 75 bp, synthetic construct
  source 1..75: mol_type = other DNA
attagctcaaacaacgggtttagatatcgctgaactgcaatcacagtttgctggttttggtgcttcagctaaaga

SEQ ID NO: 229963 - DNA, 75 bp, synthetic construct
  source 1..75: mol_type = other DNA
gagaagtgaagaagagattaagcgagcactgacagcattatcacagatggctggtaagggtcagattatggctga

SEQ ID NO: 229964 - DNA, 75 bp, synthetic construct
  source 1..75: mol_type = other DNA
ggttctgaagaactttttaaaaatatgattggctatgctcgtctgatggggagaagtgaagaagagattaagcga

SEQ ID NO: 229965 - DNA, 75 bp, synthetic construct
  source 1..75: mol_type = other DNA
aagatgcaggtcaggtaaaagagttcacaaagtcattagctcaaacaacgggtttagatatcgctgaactgcaat

SEQ ID NO: 229966 - DNA, 75 bp, synthetic construct
  source 1..75: mol_type = other DNA
gagacggtgcggcacgcactgaatgttcatccccgcctgacggcattgcgggttgacctgcgtttcccggatgta

SEQ ID NO: 229967 - DNA, 75 bp, synthetic construct
  source 1..75: mol_type = other DNA
gctggaacgtgctgactatctggcgaaggagcataccaaagttcactgcaccggtgagcgcaactttggctgcag

SEQ ID NO: 229968 - DNA, 75 bp, synthetic construct
  source 1..75: mol_type = other DNA
ccggtgattaccgcgctccggagtctctggccgggatgattaaacaggcgtggtgcagtgcctgggagtggatgt

SEQ ID NO: 229969 - DNA, 75 bp, synthetic construct
  source 1..75: mol_type = other DNA
cccattgctctgggcgtcagggaagcctatgctgctgggtttcagtgaatccagttatcagcaatttttccatga

SEQ ID NO: 229970 - DNA, 75 bp, synthetic construct
  source 1..75: mol_type = other DNA
tgggaggcattgctcaacacccgaggcacaacctggcgtaaactggacgaaaacacccgcaataaaattaccgat

SEQ ID NO: 229971 - DNA, 75 bp, synthetic construct
  source 1..75: mol_type = other DNA
ccggtgattaccgcgctccgggatcactggccggaatgattgaacaggcctggtgcagtgccctgggggtggatg

SEQ ID NO: 229972 - DNA, 75 bp, synthetic construct
  source 1..75: mol_type = other DNA
aaaacactatcacctgatactgctggtcaaccgtgatacctggtgtggtgcgggcgattaccgcgatccggggtc

SEQ ID NO: 229973 - DNA, 75 bp, synthetic construct
  source 1..75: mol_type = other DNA
caacggacgcagctgtgatatcccgcttcatcaatgccctgaaagcccgaatcgacgcttaccagaagcgtaagc

SEQ ID NO: 229974 - DNA, 75 bp, synthetic construct
  source 1..75: mol_type = other DNA
caacggacgcagctgtgatatcccgcttcatcaatgccctgaaagcccgaatccacgcttaccagaaccgtaagc

SEQ ID NO: 229975 - DNA, 75 bp, synthetic construct
  source 1..75: mol_type = other DNA
gggagttcggggtattcaggggcaaaaaacactatcacctcctgctgctggtcaaccgggatacctggtgtcgtg

SEQ ID NO: 229976 - DNA, 75 bp, synthetic construct
  source 1..75: mol_type = other DNA
ttttccgtccaggccggtggtgtggctggatcgtggtgatgacgttggtttacgggatgcgctggatcgtgctgc

SEQ ID NO: 229977 - DNA, 75 bp, synthetic construct
  source 1..75: mol_type = other DNA
cctggtgtcgtgccggtgattaccgtgctccgggatcactggccgggatgattaaacaggcgtggtgcagtgccc

SEQ ID NO: 229978 - DNA, 75 bp, synthetic construct
  source 1..75: mol_type = other DNA
ctctgcgcgcctggtaagcctatgctgctgggtttcagtgattccagttatcagcaatttttccatgaggtgtag

SEQ ID NO: 229979 - DNA, 75 bp, synthetic construct
  source 1..75: mol_type = other DNA
gctgttcagcaaccatcttacgcgcctgctgcggaacaacctgttcaacatgcagcggaacaacctgttcaacag

SEQ ID NO: 229980 - DNA, 75 bp, synthetic construct
  source 1..75: mol_type = other DNA
acgctgtttaccggttggtcctgggtgactattgccgaaaaactgggcggctggattttaaacattctcaccttc

SEQ ID NO: 229981 - DNA, 75 bp, synthetic construct
  source 1..75: mol_type = other DNA
acgacgccgaaactgctggctaatgaaaccgacgcgcgtttcatcggctacggcgcaatgctgatggagtccttc

SEQ ID NO: 229982 - DNA, 75 bp, synthetic construct
  source 1..75: mol_type = other DNA
aaccggctggggcgaatccgttctcgctggatgatttcgaattttcaccgatgaaagcgttagtggatgatggtc

SEQ ID NO: 229983 - DNA, 75 bp, synthetic construct
  source 1..75: mol_type = other DNA
gctggctcgtcagtttgcccagactcagcagcagcgttattccggtgaacaaccggctggggcgaatccgttctc

SEQ ID NO: 229984 - DNA, 75 bp, synthetic construct
  source 1..75: mol_type = other DNA
gaaccggttaaagaaccagaaccgatcaaatcttcgctgaaagcaacttctgttgcagcagtacctccagtagaa

SEQ ID NO: 229985 - DNA, 75 bp, synthetic construct
  source 1..75: mol_type = other DNA
tcgccgcgcagatgggctacctgcctggcacgctgtggctgctggcgggggtagtgctggccggtgcggttcagg

SEQ ID NO: 229986 - DNA, 75 bp, synthetic construct
  source 1..75: mol_type = other DNA
ctcccggatgtaccggcagcaacggacgcagctgtgatatcccgcttcatcaatgccctgaaagcccgaatcgac

SEQ ID NO: 229987 - DNA, 75 bp, synthetic construct
  source 1..75: mol_type = other DNA
gcattgcgggttgacctgcgtctcccggatgtaccggcagcaacggacgcagctgtgatatcccgcttcatcaat

SEQ ID NO: 229988 - DNA, 75 bp, synthetic construct
  source 1..75: mol_type = other DNA
tcgccgcgcagatgggctacctgcctggcacgctgtggctgctggcggggggcgtgctggccggggcggttcagg

SEQ ID NO: 229989 - DNA, 75 bp, synthetic construct
  source 1..75: mol_type = other DNA
cagggatggcgctgatgctctgtgccgtggtgttgttcaagatgaaacgtcaacgttacgcctgggtggcgctgg

SEQ ID NO: 229990 - DNA, 75 bp, synthetic construct
  source 1..75: mol_type = other DNA
gatgttgatggaatccttcgtggcgattatggcgctggtttctgcctgtatcatcgatccgggcgtgtattttgc

SEQ ID NO: 229991 - DNA, 75 bp, synthetic construct
  source 1..75: mol_type = other DNA
ctgtcccgtaaatacgccaaaccaggtgcactgctcgaacaactgctgaaagaagcgcaagaacgcgtgaaataa

SEQ ID NO: 229992 - DNA, 75 bp, synthetic construct
  source 1..75: mol_type = other DNA
gcgcagaacgcgcaacacaaagactggcattgtactgaagagatgatggagctgacccgtgatggcgaagccctg

SEQ ID NO: 229993 - DNA, 75 bp, synthetic construct
  source 1..75: mol_type = other DNA
ctgggtgcaggtaacgcctatatgcgtgaagttggcgcggcactcgacgacggctacaaacagggcgtgctgccg

SEQ ID NO: 229994 - DNA, 75 bp, synthetic construct
  source 1..75: mol_type = other DNA
acgtgctgactatctggcgaaggaacataccaaagctcactgcaccggtgagcgcaattttggctgtagccggag

SEQ ID NO: 229995 - DNA, 75 bp, synthetic construct
  source 1..75: mol_type = other DNA
tcggcctggcgcagcaagatcttgatgaaggtaaatcacaaattgcgcacggcgaaaccgttcgtgaaacggcca

SEQ ID NO: 229996 - DNA, 75 bp, synthetic construct
  source 1..75: mol_type = other DNA
ctttcccgtaaatattccaaaccaggcgcactgctcgaacaactgctgaaagaagcgcaagaacgcgtgaaataa

SEQ ID NO: 229997 - DNA, 75 bp, synthetic construct
  source 1..75: mol_type = other DNA
gcggtgtggctggaacgcgatgatgaaaccggctttcagcaggtgctggaacgtactggctatctggcgaaggag

SEQ ID NO: 229998 - DNA, 75 bp, synthetic construct
  source 1..75: mol_type = other DNA
cagaaacgtaagcatcgggaaggtaaacgcgtgcatcccaccaccctgcattacgtctgggcccgggagtttggg

SEQ ID NO: 229999 - DNA, 75 bp, synthetic construct
  source 1..75: mol_type = other DNA
ggcaacaacgtatccgtgagacggtgctgcgcgcactggatgttcatccccgcctgacggcacttcgggttgacc

SEQ ID NO: 230000 - DNA, 75 bp, synthetic construct
  source 1..75: mol_type = other DNA
aaaatcttccagccgctatccgtggcggtgatgatgctgatggcgctgtcgttcatctttgggcccactgcgtag

SEQ ID NO: 230001 - DNA, 75 bp, synthetic construct
  source 1..75: mol_type = other DNA
actggccgggattattaaacaggcctggtgcagtgccctgggagtggatgccggacgttatgacacgctggcaca

SEQ ID NO: 230002 - DNA, 75 bp, synthetic construct
  source 1..75: mol_type = other DNA
tacagcagatgctgaaacgtgctgactatctcgcgaaagaacacaccaaagccaacggcaccggtgagcgcaatt

SEQ ID NO: 230003 - DNA, 75 bp, synthetic construct
  source 1..75: mol_type = other DNA
actggccgggatgattaaacaggcctggtgcagtgccctgggggtggatgccgggccttatgccacgttggcgca

SEQ ID NO: 230004 - DNA, 75 bp, synthetic construct
  source 1..75: mol_type = other DNA
aacggacgcagctgtgatatcccgcttcatcaatgccctgaaagcccgaatctacgcttaccagaagcgtaagct

SEQ ID NO: 230005 - DNA, 75 bp, synthetic construct
  source 1..75: mol_type = other DNA
aacggacgcagctgtgatatcccgcttcatcaatgccctgaaagcccgaatctacgcttaccagaatcgtaagcg

SEQ ID NO: 230006 - DNA, 75 bp, synthetic construct
  source 1..75: mol_type = other DNA
gacctacaaatacaaccccttctggcagcaacgtattcgtgagacggtgcggcacgcactgaatgttcatccccg

SEQ ID NO: 230007 - DNA, 75 bp, synthetic construct
  source 1..75: mol_type = other DNA
caacggacgcagctgtgatatcccgcttcatcaatgccctgaaagcccgaatcaacgcttaccagaaacgtaagc

SEQ ID NO: 230008 - DNA, 75 bp, synthetic construct
  source 1..75: mol_type = other DNA
aacggacgcagctgtgatatcccgcttcatcaatgccctgaaagcccgaatcgacgcttaccagaaccgtaagcc

SEQ ID NO: 230009 - DNA, 75 bp, synthetic construct
  source 1..75: mol_type = other DNA
aacggacgcagctgtgatatcccgcttcatcaatgccctgaaagcccgaatccacgcttaccagaaacgtaagca

SEQ ID NO: 230010 - DNA, 75 bp, synthetic construct
  source 1..75: mol_type = other DNA
tccgggatcactggccggaatgattcaacaggcctggtgcagtgccctgggggtggatgccgggccttatgccac

SEQ ID NO: 230011 - DNA, 75 bp, synthetic construct
  source 1..75: mol_type = other DNA
atgacctacaaatacaaccccttctggcagcaacgtattcgtgagatggtgctgtgcgcactgaatgttcatccc

SEQ ID NO: 230012 - DNA, 75 bp, synthetic construct
  source 1..75: mol_type = other DNA
ttcatcaatgccctgaaagcccgaatcaacgcttaccagaagcgtaagcgccgtgaaggtaaacgcgtacatccc

SEQ ID NO: 230013 - DNA, 75 bp, synthetic construct
  source 1..75: mol_type = other DNA
tccggggtcactggccgggatgattgaacaggcctggtgcagtgccctgggggtggatgccgggccttatgccac

SEQ ID NO: 230014 - DNA, 75 bp, synthetic construct
  source 1..75: mol_type = other DNA
tccgggctcactggccggaatgattaaacaggcctggtgcagtgccctgggggtggatgccgggccttatgccac

SEQ ID NO: 230015 - DNA, 75 bp, synthetic construct
  source 1..75: mol_type = other DNA
tccgggatcactggccggcatgattaaacaggcctggtgcagtgccctgggggtggatgccgggccttatgccac

SEQ ID NO: 230016 - DNA, 75 bp, synthetic construct
  source 1..75: mol_type = other DNA
aggccaatgaaaacttccaggaatggttgatggccgacaaaaccttgccttttggtaagaatggcgaccatatca

SEQ ID NO: 230017 - DNA, 75 bp, synthetic construct
  source 1..75: mol_type = other DNA
acattgtaaaaacctgtacggtcagggatttaaagaatgattttatgaactgcgatgagaaaggtgagggacaat

SEQ ID NO: 230018 - DNA, 75 bp, synthetic construct
  source 1..75: mol_type = other DNA
tgacgtcacctccggccccttttacggaaggaaccctgattgccgccatgaaaaatgctgccagtcaggtcagcg

SEQ ID NO: 230019 - DNA, 75 bp, synthetic construct
  source 1..75: mol_type = other DNA
agcagacaatgcctctgcctgttctggctaagggggatgaatgtcgtcttgttgaagctgaactgaaagagatga

SEQ ID NO: 230020 - DNA, 75 bp, synthetic construct
  source 1..75: mol_type = other DNA
ggatgtgtttatgcaaaagcaaatcagctggttggcacatctcattaaaaaaggcggggaaatgccgctggcgct

SEQ ID NO: 230021 - DNA, 75 bp, synthetic construct
  source 1..75: mol_type = other DNA
tcgaaagagtgaagggctggtctgtattatttgtgaaacatgaagacgatccgccagtaaaagaagaggcagaaa

SEQ ID NO: 230022 - DNA, 75 bp, synthetic construct
  source 1..75: mol_type = other DNA
gtcagtgcaccagaacctgatgcgggtgggaaacgcattgtggcatatgtttataaatcatcacggagtacggtt

SEQ ID NO: 230023 - DNA, 75 bp, synthetic construct
  source 1..75: mol_type = other DNA
ctgaattcgccccgctggtactggctgaaagagctcgagcggccactgtggtatgccctgcacagggcaaacagc

SEQ ID NO: 230024 - DNA, 75 bp, synthetic construct
  source 1..75: mol_type = other DNA
atctatccgtatatcaacgaaacaattatttccggcggcaccgcgcataagggtggggcggtccatgttattgac

SEQ ID NO: 230025 - DNA, 75 bp, synthetic construct
  source 1..75: mol_type = other DNA
atatgatctccttctgcgctgacgctatcggtattcgcgacgatatgtatctgggcgcaggcaacgcctatatgc

SEQ ID NO: 230026 - DNA, 75 bp, synthetic construct
  source 1..75: mol_type = other DNA
tgccactcaggctctgggtaatgactccaacttattgatagtgttttatgttcagataatgcccgatgactttgt

SEQ ID NO: 230027 - DNA, 63 bp, synthetic construct
  source 1..63: mol_type = other DNA
atgcaggatattcacgaagcaagcctgaacgagtcggttaaatcagagcagtcaccgcgggtg

SEQ ID NO: 230028 - DNA, 75 bp, synthetic construct
  source 1..75: mol_type = other DNA
tgccgtaactgaagtgaatgtctcagggcgtgaagcggacgttgtattctttgaagtcaaatactccaacaacgg

SEQ ID NO: 230029 - DNA, 75 bp, synthetic construct
  source 1..75: mol_type = other DNA
tgtgctggcaggcagggaaagcgacggtgtgtacagtgaatgaaacgaaaggaaaagcattgccgccgttgccgt

SEQ ID NO: 230030 - DNA, 75 bp, synthetic construct
  source 1..75: mol_type = other DNA
tctacattgggggaaggaaagtaggtcaatgtgcaatctggcttaatagcgggcgaaatatggggataggcgata

SEQ ID NO: 230031 - DNA, 75 bp, synthetic construct
  source 1..75: mol_type = other DNA
atgacctctctcgttttttcctattctcatgcagacgaagcactgcgcaatgagcttgagaagcatctttccccc

SEQ ID NO: 230032 - DNA, 75 bp, synthetic construct
  source 1..75: mol_type = other DNA
acttagaaaaaaatggcaagttatgtgtttggcctgacagttatatcatcgatcataatgatatgacctatgcag

SEQ ID NO: 230033 - DNA, 75 bp, synthetic construct
  source 1..75: mol_type = other DNA
agcaggagtctaattatcaggcggatccggccgttccgggcttaagtaaaattgcctggcaagagattgaccgtc

SEQ ID NO: 230034 - DNA, 75 bp, synthetic construct
  source 1..75: mol_type = other DNA
aagatcgtgccagacgtgagggctttgaatatgttgcccgctattttgaaaattcgttagatgaactcaaaaagc

SEQ ID NO: 230035 - DNA, 75 bp, synthetic construct
  source 1..75: mol_type = other DNA
tctgatggtgaacaaaaattaattaattggttagataatcagaaactactatcttccaattcagataactctaat

SEQ ID NO: 230036 - DNA, 75 bp, synthetic construct
  source 1..75: mol_type = other DNA
catcacaggcaaaggatattgcccgcgtgctgggcatcagcaagcgtgagcagggatttatcagcggaggtaaca

SEQ ID NO: 230037 - DNA, 75 bp, synthetic construct
  source 1..75: mol_type = other DNA
aaagcggttttttctggggatgctcccgttatcccgactgcaggggaattgctggtgagcagggaaacagcaggg

SEQ ID NO: 230038 - DNA, 75 bp, synthetic construct
  source 1..75: mol_type = other DNA
gctcagaccgttctggatatcgcacagtccctttatgagactcacaaagcaacaacttatcccaggacagactgt

SEQ ID NO: 230039 - DNA, 75 bp, synthetic construct
  source 1..75: mol_type = other DNA
taatggctggcaatgaggatgcgcaggctaaatgcgttcaggtaatgaacatcagagttaacgagctaaaacagg

SEQ ID NO: 230040 - DNA, 75 bp, synthetic construct
  source 1..75: mol_type = other DNA
gctagacgttgatttccaccgacctgataacgattccttcacatgtgccgtgtatatcaacggtggcaaggttgg

SEQ ID NO: 230041 - DNA, 75 bp, synthetic construct
  source 1..75: mol_type = other DNA
aggccagcgtaaaggaagccctggacaatattcttcccggggaaaaaacagccctgttgtatgatgccggcaagg

SEQ ID NO: 230042 - DNA, 75 bp, synthetic construct
  source 1..75: mol_type = other DNA
tatccggatggcacgcttttcaataccttctatcgcagtagcgccgatccgcttgagggggagcttagaacggtg

SEQ ID NO: 230043 - DNA, 75 bp, synthetic construct
  source 1..75: mol_type = other DNA
tattaatctggaaccttcgggcccgcaatggaccacgatgctcaggggcggtacgtataatgaaaaggcagcatc

SEQ ID NO: 230044 - DNA, 75 bp, synthetic construct
  source 1..75: mol_type = other DNA
ggagtcagaacatgacagcacgcagagagaaacgccagcgacggttgaagcggatgcaggaggcgcgccggaaca

SEQ ID NO: 230045 - DNA, 75 bp, synthetic construct
  source 1..75: mol_type = other DNA
cgcaagagaagctcacctggctgaatgtgaacgatgcgctctcgattgatggtaaaacggtgctgttcgcggcgt

SEQ ID NO: 230046 - DNA, 75 bp, synthetic construct
  source 1..75: mol_type = other DNA
ccgcagatgttccagtttaaccacctgctgcgcgcgctgttccaggccgatcgcaaagtgctggaacaaaatttc

SEQ ID NO: 230047 - DNA, 75 bp, synthetic construct
  source 1..75: mol_type = other DNA
cccgccatctgaacacgaatttctacggcgattttcctgccacggcagacctgaagggaagcatgcttcaccggc

SEQ ID NO: 230048 - DNA, 75 bp, synthetic construct
  source 1..75: mol_type = other DNA
aatgaacctgaagctgacccgtgaagtggcaaatgcggcggaactgctgaaaaacggcggtaaaattacctgtcg

SEQ ID NO: 230049 - DNA, 75 bp, synthetic construct
  source 1..75: mol_type = other DNA
cccggcagaagatccggatgtgccggaagcaaattattacggtgcagcatcacgcacggcgggtaactggacgaa

SEQ ID NO: 230050 - DNA, 75 bp, synthetic construct
  source 1..75: mol_type = other DNA
acatggcattcgcctgactaaccatagtctctatctttacggtcactgcgctgaaggcgattgccgcgaagatga

SEQ ID NO: 230051 - DNA, 75 bp, synthetic construct
  source 1..75: mol_type = other DNA
gcccggctgatggcacctatggcgtcgtaaacgatgaaacaggtgaagagtctttcacgcaactggacaacaacc

SEQ ID NO: 230052 - DNA, 75 bp, synthetic construct
  source 1..75: mol_type = other DNA
atgttacaaaacccgattcatctgcgcttggagcgcctggaaagctggcagcacgttacttttatggcctgctta

SEQ ID NO: 230053 - DNA, 75 bp, synthetic construct
  source 1..75: mol_type = other DNA
cagggcgagggtgactgtatgtcttcaggttacacgggacatccggcgttgtttacggccatggtgaagcagttc

SEQ ID NO: 230054 - DNA, 75 bp, synthetic construct
  source 1..75: mol_type = other DNA
cgagaaggccgcccgaaaagcagagaaagcccggcagtgggctgagcgacaggcgcaggagagggaggccatgcg

SEQ ID NO: 230055 - DNA, 75 bp, synthetic construct
  source 1..75: mol_type = other DNA
acgcgaaaaacggtgcagggtaatatgatgttgcatcaacgcggttacgccaaaatgttcatgatcttcaaagaa

SEQ ID NO: 230056 - DNA, 75 bp, synthetic construct
  source 1..75: mol_type = other DNA
atcctcgaaggttgcctgaaacaggctgagttccttaatgatgcttatgatgatgtgaacttatacgcgcgcatt

SEQ ID NO: 230057 - DNA, 75 bp, synthetic construct
  source 1..75: mol_type = other DNA
cccggcagtacggcattccggcgacactgcgtgggctcgtcaataacgacatgaagaccaccactgacgcggtgc

SEQ ID NO: 230058 - DNA, 75 bp, synthetic construct
  source 1..75: mol_type = other DNA
acgtgggaacagacgccagacgaactgaaacaagtactggacgttgccgccgcgttaaaagcactgcgtgctgaa

SEQ ID NO: 230059 - DNA, 75 bp, synthetic construct
  source 1..75: mol_type = other DNA
caatcacaaagttatatttctgagaaatgcggcttatcacgcagtcaatactacaagattaaagcgtctgtgtaa

SEQ ID NO: 230060 - DNA, 75 bp, synthetic construct
  source 1..75: mol_type = other DNA
tgatgttgcatcaacgcggttacgccaaaatgttcatgatcttcaaagaaaatgaactcgtcggcgttatctctt

SEQ ID NO: 230061 - DNA, 75 bp, synthetic construct
  source 1..75: mol_type = other DNA
atgctggtcaatctcagcgatacattacagaaaaatatggtatttcacggagacagtatttctacgttaagtcat

SEQ ID NO: 230062 - DNA, 75 bp, synthetic construct
  source 1..75: mol_type = other DNA
tggagccgttcggattcctgatccgcattattgagtggtggcagaccggagaaacaccgggcacgtttcgcctgg

SEQ ID NO: 230063 - DNA, 75 bp, synthetic construct
  source 1..75: mol_type = other DNA
tggtggcagaccggagaggcaccgggcacgtttcgcctggatatctgcgtgcaggaccagggcatcactgaagat

SEQ ID NO: 230064 - DNA, 75 bp, synthetic construct
  source 1..75: mol_type = other DNA
ccagtttatcgataatctggtcagccagcagaaagcggcgaatcaggaaaagccagcagaaggggcgctgtactt

SEQ ID NO: 230065 - DNA, 75 bp, synthetic construct
  source 1..75: mol_type = other DNA
ggcctttctttaccaaattcgttttggaacgaagatttttgtgattgtcactatgatagtgggcaattttcttgg

SEQ ID NO: 230066 - DNA, 75 bp, synthetic construct
  source 1..75: mol_type = other DNA
atacgataaagatttaatcattgatgcaatcaccaaaggacaatcacaaagttatatttctgagaaatacggctt

SEQ ID NO: 230067 - DNA, 75 bp, synthetic construct
  source 1..75: mol_type = other DNA
acaatctgagtggtggtgaggcaggcatgacacagcgttatgcgacggagtcatcccgctggcgtgatgcgcctg

SEQ ID NO: 230068 - DNA, 75 bp, synthetic construct
  source 1..75: mol_type = other DNA
gtcacgccgctgaaaaaatcagcaatgggcgatgatggcaccattctttgctgtagctgtgtaccgaagactgca

SEQ ID NO: 230069 - DNA, 75 bp, synthetic construct
  source 1..75: mol_type = other DNA
ctgtagacagggtggtgatcacttctggagtaaatccagattaaacatctcattgctgatgcttgatattgagca

SEQ ID NO: 230070 - DNA, 75 bp, synthetic construct
  source 1..75: mol_type = other DNA
cgccaaaggatactagagctgttagagccaaaaggtacaggggagtcaaaaggtgccggagaatcaaaaggtact

SEQ ID NO: 230071 - DNA, 75 bp, synthetic construct
  source 1..75: mol_type = other DNA
gcgagcaagagttcgctagcctgcaggccattgatcctgatggtaaaggcaaatttgtatttactggaggccgtg

SEQ ID NO: 230072 - DNA, 75 bp, synthetic construct
  source 1..75: mol_type = other DNA
atatgatgatcagcaggctaaacgtcagcaggagctgaatgtttcatcgggggctggctacggtcttagtggtgc

SEQ ID NO: 230073 - DNA, 75 bp, synthetic construct
  source 1..75: mol_type = other DNA
caacatggtggagcgctgctcttccatctattggccaagctgtatgaaaaaaccagtgtcatcatcacaacaaac

SEQ ID NO: 230074 - DNA, 75 bp, synthetic construct
  source 1..75: mol_type = other DNA
tacttttgtgcttattttcatttggttctgtcgcaggtattccggttgctattgatgccagtccggaatgggctg

SEQ ID NO: 230075 - DNA, 75 bp, synthetic construct
  source 1..75: mol_type = other DNA
tctgataacctttgtaaggccagaatagtttcaacggccgctagcattgaacagggaaatgagataaataagcag

SEQ ID NO: 230076 - DNA, 75 bp, synthetic construct
  source 1..75: mol_type = other DNA
atgccttcgatgatagcgataattttactcatcatccttcacatctggctctgtagacagggtggtgctcacttc

SEQ ID NO: 230077 - DNA, 75 bp, synthetic construct
  source 1..75: mol_type = other DNA
tggagatggccgatccgatggtggcacaacgcaccacggggtatctggttgggggaattagcccactggggcaga

SEQ ID NO: 230078 - DNA, 75 bp, synthetic construct
  source 1..75: mol_type = other DNA
cgcgctattagaccgcctgacccatcactgccatatcatcgaaacaggcaacaatagttatcggtttaaagaatc

SEQ ID NO: 230079 - DNA, 75 bp, synthetic construct
  source 1..75: mol_type = other DNA
tgctgacaccagcgggccagaagagggcacggcgagcagcagacgtaactcggtgactagcacctcctctgacac

SEQ ID NO: 230080 - DNA, 75 bp, synthetic construct
  source 1..75: mol_type = other DNA
ttcacccattatcaagaaatatatcccattttaaaaacaggtgctctattctctcctgtattatcgataattggg

SEQ ID NO: 230081 - DNA, 75 bp, synthetic construct
  source 1..75: mol_type = other DNA
acagctgaagctgcgacaaaagatcggttaacgcaggaggcattccaggatccagataaacaaaaagttaatatc

SEQ ID NO: 230082 - DNA, 75 bp, synthetic construct
  source 1..75: mol_type = other DNA
taaaacatcgctgcatgattcgcaggtgccgacttctaattctaatacgtctgttcagaatatggggaatacaga

SEQ ID NO: 230083 - DNA, 75 bp, synthetic construct
  source 1..75: mol_type = other DNA
tgatgcgccgcccgccgccatcgcccaaagctggcctgcgttcgaccccgaccatgcgcccgcctaccccggctt

SEQ ID NO: 230084 - DNA, 75 bp, synthetic construct
  source 1..75: mol_type = other DNA
tactattcaatcgatgtaaaattgttacttcttcgtttgacatggaacaaaaaatgggaaaatttgcagatttta

SEQ ID NO: 230085 - DNA, 75 bp, synthetic construct
  source 1..75: mol_type = other DNA
aggttgaaacgacagattttgtcagattttttttcttagtcttagctggaggttctgtttttttattaaatgaat

SEQ ID NO: 230086 - DNA, 75 bp, synthetic construct
  source 1..75: mol_type = other DNA
cattaagttctcaagaattgagcagcttgcgagctatcgatattgagggtaaagaccgatttgtttttaccgggg

SEQ ID NO: 230087 - DNA, 75 bp, synthetic construct
  source 1..75: mol_type = other DNA
gtcagattcctctagcgaagtggttaatccatatgctgaagttgggggggctcggaatagtctatcggctcatca

SEQ ID NO: 230088 - DNA, 75 bp, synthetic construct
  source 1..75: mol_type = other DNA
tggtattgaaaaacataatcttattaatcttgtaaaagcacgtaagctgcatgaaagagtgtattttatcgattt

SEQ ID NO: 230089 - DNA, 75 bp, synthetic construct
  source 1..75: mol_type = other DNA
tacgccatgacatgggaggattaacgggggggagtaatagcgctgtgaatacttcgaataacccaccagcgccgg

SEQ ID NO: 230090 - DNA, 75 bp, synthetic construct
  source 1..75: mol_type = other DNA
gcttgcttggaggatttgaagttctccatgataaggggccacttgatattctcaatacgcaaattggaccctctg

SEQ ID NO: 230091 - DNA, 75 bp, synthetic construct
  source 1..75: mol_type = other DNA
aatgctgcagaaagtgcaacaaaagatcagttaacgcaagaagcattcaaggaccctgagaaccagaaagttaac

SEQ ID NO: 230092 - DNA, 75 bp, synthetic construct
  source 1..75: mol_type = other DNA
aagaatgtgatgaactttcggatgatatctttttactggcacaacaatacgccagaagcgcatgcgatgcattta

SEQ ID NO: 230093 - DNA, 75 bp, synthetic construct
  source 1..75: mol_type = other DNA
caaagtcggtaaagaaggtgttatcaccgttgaagacggtaccggtctgcaagacgaactggacgtggttgaagg

SEQ ID NO: 230094 - DNA, 75 bp, synthetic construct
  source 1..75: mol_type = other DNA
ctgtggctggcctgatgatcaccaccgagtgcatggttaccgacctgccgaaaaacgatgcagctgacttaggcg

SEQ ID NO: 230095 - DNA, 75 bp, synthetic construct
  source 1..75: mol_type = other DNA
cggcatctatccggacaggaaatacagcgagcaaatcccaaacagtcgtgaaatatatcgtcagaaaaatgacat

SEQ ID NO: 230096 - DNA, 75 bp, synthetic construct
  source 1..75: mol_type = other DNA
aacgcgcaaatcccaaacagtcgtgaaatttatcgccagaaaaatggcatcactgaacaacaaaacttattgctg

SEQ ID NO: 230097 - DNA, 75 bp, synthetic construct
  source 1..75: mol_type = other DNA
actcatatcccggatgacagaagaagagcgaagtaatcttatcgaagcactcaaaacgtcttcaggtgtaaaaca

SEQ ID NO: 230098 - DNA, 75 bp, synthetic construct
  source 1..75: mol_type = other DNA
agtaaagccagcggcgtgaagctggcgctggatggtgatttaattcgctatgacagcaaagagccagggaaaaca

SEQ ID NO: 230099 - DNA, 75 bp, synthetic construct
  source 1..75: mol_type = other DNA
gaaaactggggatgagcgacagcgaaattcgccgtcagttagagaaaggtgacagcttctcttttgaggagacgg

SEQ ID NO: 230100 - DNA, 75 bp, synthetic construct
  source 1..75: mol_type = other DNA
gcttaacccggtgcgcacgggtgggccgatgcaagtcagcattgcttttgccgaacagcataccaaaggctatcc

SEQ ID NO: 230101 - DNA, 75 bp, synthetic construct
  source 1..75: mol_type = other DNA
aaactggcgcagtagaactggaaagcccattcatcctgctggctgacaagaaaatctccaacatccgcgaaatgc

SEQ ID NO: 230102 - DNA, 75 bp, synthetic construct
  source 1..75: mol_type = other DNA
caaagtcggtaaagaaggcgttatcaccgttgaagacggtactggtctgcaggacgaactagacgtggttgaagg

SEQ ID NO: 230103 - DNA, 75 bp, synthetic construct
  source 1..75: mol_type = other DNA
cgctggacggtgatttaattcgttacgacagtaaagaacctgggaaaacagagctggcaacgcgcaaactggcaa

SEQ ID NO: 230104 - DNA, 75 bp, synthetic construct
  source 1..75: mol_type = other DNA
aataagcccaagtttacccaccagcaattagcctcaagatttgatatctggactgaagcacaaaaagataatggt

SEQ ID NO: 230105 - DNA, 75 bp, synthetic construct
  source 1..75: mol_type = other DNA
gattttaccagtaatcccgaaggtgcattaagcagtcaggccaaaaatctgttcagcaagtatggagccttcgat

SEQ ID NO: 230106 - DNA, 75 bp, synthetic construct
  source 1..75: mol_type = other DNA
ggttgttttgaaattggtgtcactatcagtaaccctgtatttactgaagatgccattaagatgagaaaatatgaa

SEQ ID NO: 230107 - DNA, 75 bp, synthetic construct
  source 1..75: mol_type = other DNA
aaatagcgcccaggcgcagaactcgtacaaagatccgagctataacgatgactatggcatcgaaacgccatcggc

SEQ ID NO: 230108 - DNA, 75 bp, synthetic construct
  source 1..75: mol_type = other DNA
aaaataaagcagatcatgagatgttggtcacacaagaacaagaggcctttattaaacagcagaaagaagctgaac

SEQ ID NO: 230109 - DNA, 75 bp, synthetic construct
  source 1..75: mol_type = other DNA
tgatatcattattgacggcttcattttatagcagcgcaggtattccggttgctattgatgccagtccggaatggg

SEQ ID NO: 230110 - DNA, 75 bp, synthetic construct
  source 1..75: mol_type = other DNA
atgaaacgtgtaaaaacattgatgctgatatcattattgacggcttcattttatagtagcgcaggaattccggtt

SEQ ID NO: 230111 - DNA, 75 bp, synthetic construct
  source 1..75: mol_type = other DNA
ggcctgggcggagaatgctcgccattatgccgatactcaggatttgtatagcttgccagaaaaagccgcggatat

SEQ ID NO: 230112 - DNA, 75 bp, synthetic construct
  source 1..75: mol_type = other DNA
catcccgcttatcaggaagccgcgggtatcgttcttctagaagcgatcactgctgggttacctgttttaacaaca

SEQ ID NO: 230113 - DNA, 75 bp, synthetic construct
  source 1..75: mol_type = other DNA
ctgatcaaagtgccggttaaatcgcataccaatcacgggcgcaatgcggagtattttgcctgggtgcaaaaacat

SEQ ID NO: 230114 - DNA, 75 bp, synthetic construct
  source 1..75: mol_type = other DNA
tataaagatccgagctatgacgatgactttggtattgaaacgccatcggcgttagataactttactcaagccatc

SEQ ID NO: 230115 - DNA, 75 bp, synthetic construct
  source 1..75: mol_type = other DNA
cagtcacaaattttgggtgggctactgtcgaatattaataccggtaaaccgggccgcatggtgaccaacgattat

SEQ ID NO: 230116 - DNA, 75 bp, synthetic construct
  source 1..75: mol_type = other DNA
accatttggtaagatttgacggtaaagtctggaaagacgtaacacaaaccaataaacccaagtttacccaccagc

SEQ ID NO: 230117 - DNA, 75 bp, synthetic construct
  source 1..75: mol_type = other DNA
ttgtgacctttatcggtggtctgtacttcatgacgcatcacaagaaagaagagtccgagacgctgcaaagccaga

SEQ ID NO: 230118 - DNA, 75 bp, synthetic construct
  source 1..75: mol_type = other DNA
aacacctgaacagacggtaagaagaagtgactacagagtctcccttggcagaactcaacccacagatattgacta

SEQ ID NO: 230119 - DNA, 75 bp, synthetic construct
  source 1..75: mol_type = other DNA
cagcaggcatggtgtcggaacctggcgggggaaacacagcttgatcaagcggttatcctgattgcagcctgtaaa

SEQ ID NO: 230120 - DNA, 75 bp, synthetic construct
  source 1..75: mol_type = other DNA
ggtgattccaaaatgtggcttgaagcaaataaagcgatgaaatcagctatcaaccttccatggtatcgcaggaaa

SEQ ID NO: 230121 - DNA, 75 bp, synthetic construct
  source 1..75: mol_type = other DNA
gggcaccgggctggtggtgacggaattgatgggccagggcgtgagtgccattaccggtgattattcccgtggtgc

SEQ ID NO: 230122 - DNA, 75 bp, synthetic construct
  source 1..75: mol_type = other DNA
ggtaacgatattgaaacacgcagtaatatacagtgtggttcagtgctgttgccggagatgaaaatcgccgggcag

SEQ ID NO: 230123 - DNA, 75 bp, synthetic construct
  source 1..75: mol_type = other DNA
ctattagcgccaacgtatcagttccagcaaaacaatctcaccccatcccaacaactctaacagggagaacaatcg

SEQ ID NO: 230124 - DNA, 75 bp, synthetic construct
  source 1..75: mol_type = other DNA
cacgtttctatgatcaatggcgatgacggtaaaaaactgtccaaacgtcacggggcagtcagcgtaatgcagtat

SEQ ID NO: 230125 - DNA, 75 bp, synthetic construct
  source 1..75: mol_type = other DNA
atgcgcaatgaaatagccattaatcaccagatgcttcgtgcggcacaaaacaaagcagtaatagccagatttatt

SEQ ID NO: 230126 - DNA, 75 bp, synthetic construct
  source 1..75: mol_type = other DNA
ctgcgtgaaaagcgctacgaccgcgcctacgtcttacccaactccttcaagtccgcattagtgcctttcttcgcg

SEQ ID NO: 230127 - DNA, 75 bp, synthetic construct
  source 1..75: mol_type = other DNA
cggcgtgagtgctaaccgcacgctgcgggcgaaactggcggaaatgatgaaaaagcgtcgtggcgaggtattcta

SEQ ID NO: 230128 - DNA, 75 bp, synthetic construct
  source 1..75: mol_type = other DNA
gcttcaagcgtctggtaatggcgggcggcgtgagtgctaaccgcacactgcgggcgaaactggcggaaatgatga

SEQ ID NO: 230129 - DNA, 75 bp, synthetic construct
  source 1..75: mol_type = other DNA
gtgggatgaaggtccgtactaccagaccaaacgttttgatcgctataacgcggtgatcgatcagatgctggaaga

SEQ ID NO: 230130 - DNA, 75 bp, synthetic construct
  source 1..75: mol_type = other DNA
ctacgcgtcattcgctctccagctgtgtaattgccgaagaaaatggcgatatggagcgtgattacgcctacacta

SEQ ID NO: 230131 - DNA, 75 bp, synthetic construct
  source 1..75: mol_type = other DNA
tgctgcttgtcaatgccacggccacctgtaccgagccgggagccgcaggcaacggctggcagcctgcgcaggtca

SEQ ID NO: 230132 - DNA, 75 bp, synthetic construct
  source 1..75: mol_type = other DNA
tgctgctggtcaatgccccggccacctgtaccgaaccgggtacctctggcaacggctggcaacctgcgcaggtca

SEQ ID NO: 230133 - DNA, 75 bp, synthetic construct
  source 1..75: mol_type = other DNA
tgacctgtgggcataccgcgaaatgctggtcagggtagcggcgcaggaagcggccaaacagaatctggtcgcctt

SEQ ID NO: 230134 - DNA, 75 bp, synthetic construct
  source 1..75: mol_type = other DNA
agcgccgagcaacacaataacagcattaatcatatctacccgcgcatcgcccgtgtgcgtagcgtggaagagatc

SEQ ID NO: 230135 - DNA, 75 bp, synthetic construct
  source 1..75: mol_type = other DNA
atgaatttatcccgtcaggaacaacgtacgttacacgttctcgctaaaggtggacgtattgcgcacgtccgcgat

SEQ ID NO: 230136 - DNA, 75 bp, synthetic construct
  source 1..75: mol_type = other DNA
gcatcccaatgtggtggatgtggccgtgctttcgccggttcccggaacggtggaattatatccgttgctcagtac

SEQ ID NO: 230137 - DNA, 75 bp, synthetic construct
  source 1..75: mol_type = other DNA
aaggcggcagttttaacagccactacggcgtaaaagtttttggcaacagccacggcatgttgcagggttattgct

SEQ ID NO: 230138 - DNA, 75 bp, synthetic construct
  source 1..75: mol_type = other DNA
gactcagtggctgctgaccagctattcggcgcggaaactggggctgaaaagcaccggacatgcgggcggtattca

SEQ ID NO: 230139 - DNA, 75 bp, synthetic construct
  source 1..75: mol_type = other DNA
cagtggctgctgaccagctactcggcgcggaaactggggctgaaaagcactggacacgcaggcggtattcacaac

SEQ ID NO: 230140 - DNA, 75 bp, synthetic construct
  source 1..75: mol_type = other DNA
gcatcccagtattgtcgacgtcgctgttctttctcccgttcccggtactgtcgagctgtatccactgctcagcac

SEQ ID NO: 230141 - DNA, 75 bp, synthetic construct
  source 1..75: mol_type = other DNA
agatattgtcgaccgcattgttcaacataatcttcatgaaatagatgatatcagattaacatcctgtaactcagc

SEQ ID NO: 230142 - DNA, 75 bp, synthetic construct
  source 1..75: mol_type = other DNA
ctttgatatctctctggcgatgtttacccatgtgggtgcggcggcaccgggtaatcctaccgctatcgataccca

SEQ ID NO: 230143 - DNA, 75 bp, synthetic construct
  source 1..75: mol_type = other DNA
atgaacacgaaaaccaaaggtaaggtctcgctcaacctggaaatcgaaccgtttgatgagaatcgtgtgaaaatc

SEQ ID NO: 230144 - DNA, 75 bp, synthetic construct
  source 1..75: mol_type = other DNA
ggggaacgcccgggattagggcagtcagaaagcctctcctgctacgccgtttactcgccgcgtatggcgaccacc

SEQ ID NO: 230145 - DNA, 75 bp, synthetic construct
  source 1..75: mol_type = other DNA
tcctgctggtgggcgaacgtccggggttggggcagtcagaaagcctctcctgctacgccgtttactcgccgcgta

SEQ ID NO: 230146 - DNA, 75 bp, synthetic construct
  source 1..75: mol_type = other DNA
tggctatccttgagcttcagcgtaacagagacgagatagcgcaactcaggcgcgcactggcgcaggaaaaagcgc

SEQ ID NO: 230147 - DNA, 75 bp, synthetic construct
  source 1..75: mol_type = other DNA
cagtgtcgcatggcagaagggaagtgatgattttgcccagacggcaggatttttgtcgatgacggtgaaatggta

SEQ ID NO: 230148 - DNA, 75 bp, synthetic construct
  source 1..75: mol_type = other DNA
agcaacggggtgaaataaaagtgggaataacgggcaatatcagtcagcgagtttcgctgcgtggtagcgtggcgt

SEQ ID NO: 230149 - DNA, 75 bp, synthetic construct
  source 1..75: mol_type = other DNA
gaaattagcgacaaaaatctctacctgactcgcccggatatgggccgccgcctgtgtgcagaagctgttgaagcg

SEQ ID NO: 230150 - DNA, 75 bp, synthetic construct
  source 1..75: mol_type = other DNA
gggtaaatcggcgagtgcgatacgtattggtgatgtggtgcgcgagctggagcccttatcgctggtgaattgcag

SEQ ID NO: 230151 - DNA, 75 bp, synthetic construct
  source 1..75: mol_type = other DNA
tgaaaataaaacacaaactctcatatgttcgtccgactaaccgcgggaaaatttccgaagaagacaccaccgaaa

SEQ ID NO: 230152 - DNA, 75 bp, synthetic construct
  source 1..75: mol_type = other DNA
ctgtgcgctggatttaggttccgctgaagcaaaagcgtggattggtgttgaaaacccgcatcgcgcagacgtatt

SEQ ID NO: 230153 - DNA, 75 bp, synthetic construct
  source 1..75: mol_type = other DNA
gtgcggcaccggtgacctcggaaagctgcgcgctggatttaggttccgctgacgcgaaggcgtggattggtgttg

SEQ ID NO: 230154 - DNA, 75 bp, synthetic construct
  source 1..75: mol_type = other DNA
gcagggcttgctggaagtacgctctgaaatcagtgacaaaaatctctacctgactcgcccggacatggggcgtcg

SEQ ID NO: 230155 - DNA, 75 bp, synthetic construct
  source 1..75: mol_type = other DNA
attgacggaccaaacatctatctgttgtcactgaacccgctttacaaacccattgaactgaatgtcggttacact

SEQ ID NO: 230156 - DNA, 75 bp, synthetic construct
  source 1..75: mol_type = other DNA
atgctggaatggcagccagtttcagccacatcactggcggaaatactgaaacaaagtgaagttcccccggccctt

SEQ ID NO: 230157 - DNA, 75 bp, synthetic construct
  source 1..75: mol_type = other DNA
ctttcttcggcgctgctccggagcaccacaccgccagcgctgccggggaaccgcattccgggtggcgttgtgtgg

SEQ ID NO: 230158 - DNA, 75 bp, synthetic construct
  source 1..75: mol_type = other DNA
cgatgccgcagaaggatatcaccagagtctgatcgacattactccccagcgcgtactggaagaactcaacgcact

SEQ ID NO: 230159 - DNA, 75 bp, synthetic construct
  source 1..75: mol_type = other DNA
gctggcatggctgatcccggtttatctgtggcgtcgggcaaagatcctcgggcaaaaacctgcttatttctgggt

SEQ ID NO: 230160 - DNA, 75 bp, synthetic construct
  source 1..75: mol_type = other DNA
aggattgagcgggatgtcatttgacgaggcatatgatgccgtctcgggtgggcagtactggtttatcacgctgct

SEQ ID NO: 230161 - DNA, 75 bp, synthetic construct
  source 1..75: mol_type = other DNA
ctggcttcgacgctgctccggagcaccacaccaccagcgctgccggggaaccgcattccgggtggcgttgtgtgg

SEQ ID NO: 230162 - DNA, 75 bp, synthetic construct
  source 1..75: mol_type = other DNA
acatacgataatgaagcccgggagtatgtgcctctcactgccctggcggactttcagttttctgatatagaagta

SEQ ID NO: 230163 - DNA, 75 bp, synthetic construct
  source 1..75: mol_type = other DNA
actggagccacgcatcgataaccagcgcctgttccgccatcttgagcctgcgggataccggacaattaaagagtt

SEQ ID NO: 230164 - DNA, 75 bp, synthetic construct
  source 1..75: mol_type = other DNA
cttacgctgctgaaaaatgtgcgtggactggagctgttgacctttgctgaacaggatacctgctgcggatttggc

SEQ ID NO: 230165 - DNA, 75 bp, synthetic construct
  source 1..75: mol_type = other DNA
acgtattaccactgtcagcaacagcgacatcatccggataaacgagtgcccgtgcgcagcgcgatgactggctga

SEQ ID NO: 230166 - DNA, 75 bp, synthetic construct
  source 1..75: mol_type = other DNA
cgtattaccattgtcagcaacagcgacatcatcctgataaacgaagtgcccgtacgtagcgagatgactacttga

SEQ ID NO: 230167 - DNA, 75 bp, synthetic construct
  source 1..75: mol_type = other DNA
cttcttcccgtggaccctgaactacgacgaaatcgacatggtactggaaggggaactgcatgttcgccacgaagg

SEQ ID NO: 230168 - DNA, 75 bp, synthetic construct
  source 1..75: mol_type = other DNA
gaaaaataggcggtatgctggcgctgcgtggcgaagggacgccgtttccggtacaggctgatttccgctctggta

SEQ ID NO: 230169 - DNA, 75 bp, synthetic construct
  source 1..75: mol_type = other DNA
gccctgctcgatacagggaagcgcggtggagttcggcagtgtggtcattaaaggcattgatggcaccaactaccg

SEQ ID NO: 230170 - DNA, 75 bp, synthetic construct
  source 1..75: mol_type = other DNA
atacacagccagacttcgaagccgttccggtgaagcagagcggtgtggaactgatggcatcggagtttaatgcga

SEQ ID NO: 230171 - DNA, 75 bp, synthetic construct
  source 1..75: mol_type = other DNA
ctacaccaccggcaagccacgaccaaaactggaaggtgatgttgagtcgcggcaattgcggctggcagatttagg

SEQ ID NO: 230172 - DNA, 75 bp, synthetic construct
  source 1..75: mol_type = other DNA
cgggcggatattcaggctcgtcggctgaaactgaaagcgttgatgccggatgtggcgctgatgcagaaaacactg

SEQ ID NO: 230173 - DNA, 75 bp, synthetic construct
  source 1..75: mol_type = other DNA
gattatcacactgcgttcgccgctgtatgtgcgtgggacgtttaaaaatccgcaggctggggtgaaagccgggcc

SEQ ID NO: 230174 - DNA, 75 bp, synthetic construct
  source 1..75: mol_type = other DNA
aatccctgagaatacagtttggcgagcgggtaaaagaactgcgcattgccaccggattgagccaggaggcctttg

SEQ ID NO: 230175 - DNA, 75 bp, synthetic construct
  source 1..75: mol_type = other DNA
gtatcttcgtagcatggagacagcaaaatggcgtaggcctaatcctagcggcaactggggtatcgtatcagcggt

SEQ ID NO: 230176 - DNA, 75 bp, synthetic construct
  source 1..75: mol_type = other DNA
tccaatgcttctcttgatgcgattgaggtgctggctaacgctctgagtgttgagccgtggcagttattagcgtct

SEQ ID NO: 230177 - DNA, 75 bp, synthetic construct
  source 1..75: mol_type = other DNA
gttaagccttgtagccgctgtattttcaccaccgtcagcccagaaaaagggcaaaaacatccggcaggcgaacca

SEQ ID NO: 230178 - DNA, 75 bp, synthetic construct
  source 1..75: mol_type = other DNA
tgctgaagctcttgagtatcttcgtagcatggagacagcaaaatggcgtaggcctaatcctagcggcaactgggg

SEQ ID NO: 230179 - DNA, 75 bp, synthetic construct
  source 1..75: mol_type = other DNA
tgagattggattcaaaatatctcatatggagcgtggccttacagtggtcaaaattgcacattcagtgcatgaaaa

SEQ ID NO: 230180 - DNA, 75 bp, synthetic construct
  source 1..75: mol_type = other DNA
ttctcggcaacccgccggatattcccgaagtgacgatggtacatttaccgcgcgtagaagcgacgctggctccgc

SEQ ID NO: 230181 - DNA, 75 bp, synthetic construct
  source 1..75: mol_type = other DNA
atgaaatacacgtttctggtgggaacggggattttgctcctgagcggctggctgacgggcaacatggccgtcgcg

SEQ ID NO: 230182 - DNA, 75 bp, synthetic construct
  source 1..75: mol_type = other DNA
atgaaaggagcttattcggcctgggcgtggttattgctgtgtagcattgtgagcacgcctgtaatggcggggagt

SEQ ID NO: 230183 - DNA, 75 bp, synthetic construct
  source 1..75: mol_type = other DNA
acgggtattgccggttttggtatccgtattcagaaagtaagcgatcactccattttggatttaacgcctggcgca

SEQ ID NO: 230184 - DNA, 75 bp, synthetic construct
  source 1..75: mol_type = other DNA
ccgtcccattgactactcgcttgtttgcaacaatttggcaatggatgacttgcgtttacagatgcaggcgacaac

SEQ ID NO: 230185 - DNA, 75 bp, synthetic construct
  source 1..75: mol_type = other DNA
accgccctgttccgtgaaagggagcaatgttgaatttggcaatgtgtacattaacaaaataaatggcacaaatta

SEQ ID NO: 230186 - DNA, 75 bp, synthetic construct
  source 1..75: mol_type = other DNA
accgccctgttccgtaaaggggagcaatgtgcaatttggcgaagtctacattagcaaaatcaatggcacgaatta

SEQ ID NO: 230187 - DNA, 75 bp, synthetic construct
  source 1..75: mol_type = other DNA
cggggttgctggtatgcagtgtctgtagtttatctgctatggctggtagtaaacctgtggatttaattctgcgcg

SEQ ID NO: 230188 - DNA, 75 bp, synthetic construct
  source 1..75: mol_type = other DNA
tcgcttcaaagggcggcgaatattcatctggaaggcgataaaaagccgatgcaagggcgggcagatattcaggcc

SEQ ID NO: 230189 - DNA, 75 bp, synthetic construct
  source 1..75: mol_type = other DNA
cgttcagcctgtgggcaaagtgctgccttatgaccgcttcgaaaccgataaatgggatgcgatggatgctgatgt

SEQ ID NO: 230190 - DNA, 75 bp, synthetic construct
  source 1..75: mol_type = other DNA
aacgaccgtcattaacggggagaaggttatcagcaccgatattgcaggctttggtatccgtatcgaaaatgccgc

SEQ ID NO: 230191 - DNA, 75 bp, synthetic construct
  source 1..75: mol_type = other DNA
ctaacgacttgcggatgcaacttaagggcaatacctcaacgattaacggcgaaacggtactcagtaccaatatca

SEQ ID NO: 230192 - DNA, 75 bp, synthetic construct
  source 1..75: mol_type = other DNA
gaatagaaaatagcgccgataactcattgtttgccgtcggtgaaaatagctggacgccatttaatatcaataacc

SEQ ID NO: 230193 - DNA, 75 bp, synthetic construct
  source 1..75: mol_type = other DNA
acttatcgtttcaacagccgtattggtgaggtcgcgaaccgttttattcaacagaatcccaatcagttgaaaaag

SEQ ID NO: 230194 - DNA, 75 bp, synthetic construct
  source 1..75: mol_type = other DNA
ggcgattgtgatcctcgaaaaaggccgctttatcagtccgtggaaacatattctggttgatgaatttcaggatat

SEQ ID NO: 230195 - DNA, 75 bp, synthetic construct
  source 1..75: mol_type = other DNA
ttctggttgatgaatttcaggatatctcgccgcagcgggcagcgttgttagcggcattacgcaagcaaaacagtc

SEQ ID NO: 230196 - DNA, 75 bp, synthetic construct
  source 1..75: mol_type = other DNA
cattcactggcgctacatattattcagcaatgtagcaaaaaagtacccacagtcagcaaactggaaaatgacacc

SEQ ID NO: 230197 - DNA, 75 bp, synthetic construct
  source 1..75: mol_type = other DNA
ctcaccgcagcgcgccgctttgttagcggcattacgcaagcaaaacagtcagacgacgttgttcgccgttggcga

SEQ ID NO: 230198 - DNA, 75 bp, synthetic construct
  source 1..75: mol_type = other DNA
agccgttactttgttggacgagagtcagcttgacgctttactggacaagctatctggttatgtcaaaccagaaga

SEQ ID NO: 230199 - DNA, 75 bp, synthetic construct
  source 1..75: mol_type = other DNA
atgacagaatcaatatcccgtcgtccggcatatgctcgtctgttggatcgcgcggtacgcattctggcggtacgc

SEQ ID NO: 230200 - DNA, 75 bp, synthetic construct
  source 1..75: mol_type = other DNA
ctgcgcgaaaaacgctacgaccgtgcctacgtcttacccaactccttcaaatccgcgttagtgcctttcttcgcg

SEQ ID NO: 230201 - DNA, 75 bp, synthetic construct
  source 1..75: mol_type = other DNA
atgacattcgttcatacaatgctgctttatttctgcgctgtggtcagtgcgttatatctggtgagcggtggttat

SEQ ID NO: 230202 - DNA, 75 bp, synthetic construct
  source 1..75: mol_type = other DNA
agcacgccttattagtgctcgcgggagcgggaagtggaaaaacgtcggtgttggtggcgcgtgcgggctggctac

SEQ ID NO: 230203 - DNA, 75 bp, synthetic construct
  source 1..75: mol_type = other DNA
tggcgagatgagcgaaattgcgtctggcgttttacgtcagcaactggatttgattgccacgcgcaccggagaaaa

SEQ ID NO: 230204 - DNA, 75 bp, synthetic construct
  source 1..75: mol_type = other DNA
gccacggcagaggattacgaacgcgttatcgcctggtgctatgaacatggctatcttgatgacagccgctttgtc

SEQ ID NO: 230205 - DNA, 75 bp, synthetic construct
  source 1..75: mol_type = other DNA
gtgaggtggcaaaccggtttattcaacagaacccgaatcagctgaaaaagccgctaaacagtttaagtcttggtg

SEQ ID NO: 230206 - DNA, 75 bp, synthetic construct
  source 1..75: mol_type = other DNA
ccagctggtattacaaagacggcgaagtgctgccggttcctgttgattactcgcgactggcagaaaaaaaacgcc

SEQ ID NO: 230207 - DNA, 75 bp, synthetic construct
  source 1..75: mol_type = other DNA
tgaaggcattcagtatttccgcagtgaagacggacaggatttttatgaatccatggacaaattcacgaagagata

SEQ ID NO: 230208 - DNA, 75 bp, synthetic construct
  source 1..75: mol_type = other DNA
agcgcctgctgaatgaagcaaaggacatcacctccgactggaaaaccgagctggagctgggcaccatcagcgacg

SEQ ID NO: 230209 - DNA, 75 bp, synthetic construct
  source 1..75: mol_type = other DNA
tggctcgtgctttcatcccggattggcgagcacccgcgatggttcgtttagcgtaggtgataaagccgctcagaa

SEQ ID NO: 230210 - DNA, 75 bp, synthetic construct
  source 1..75: mol_type = other DNA
atggaactcagaaatgttacacgttaccaccctgaagatatgccttatggtgaaggcattcagtatttccgcagt

SEQ ID NO: 230211 - DNA, 75 bp, synthetic construct
  source 1..75: mol_type = other DNA
atggaactcagaaacgtttcgcgttattacccggaaaatatgccttatggtaaggatattcagtatttccgcagt

SEQ ID NO: 230212 - DNA, 75 bp, synthetic construct
  source 1..75: mol_type = other DNA
atgaaaaagaaaaaccgcccattacaggcggctaactcagatattcgcacgtctgatattacgccgaccaccagc

SEQ ID NO: 230213 - DNA, 75 bp, synthetic construct
  source 1..75: mol_type = other DNA
ttcaacgtgattccactggcaccgggccatgcctacgggatgtttatggaacgctttaacgagttatcggagtta

SEQ ID NO: 230214 - DNA, 75 bp, synthetic construct
  source 1..75: mol_type = other DNA
cttcatcaggcacaaaaaaagcataccgaaaaggtaatcctctgacgcttgtagaacgtcatcagacattccagg

SEQ ID NO: 230215 - DNA, 75 bp, synthetic construct
  source 1..75: mol_type = other DNA
attacccggaaaacatgccttatggtgaaggtgttcagtatttccgcagtgaagacggacaggatttttacgact

SEQ ID NO: 230216 - DNA, 75 bp, synthetic construct
  source 1..75: mol_type = other DNA
aaaaatagcgataactatatgtattttatgaggttttcatacaaatcagaacatttctcagttatagagcgatac

SEQ ID NO: 230217 - DNA, 75 bp, synthetic construct
  source 1..75: mol_type = other DNA
atagccttgggaagtgggttgtaaatatgattggtaaagcatatgcggggacgctaaatattgcagcgtctgctg

SEQ ID NO: 230218 - DNA, 75 bp, synthetic construct
  source 1..75: mol_type = other DNA
atcagtggaatcgccagtggctggcgcgattaaccgttgcgcctggcagcctgctctatttttccggttatcaac

SEQ ID NO: 230219 - DNA, 75 bp, synthetic construct
  source 1..75: mol_type = other DNA
taaggcatctcgtcattacaaaatcactctattccactgatgaattcggtaacataaccgtgaatccgcttcttg

SEQ ID NO: 230220 - DNA, 75 bp, synthetic construct
  source 1..75: mol_type = other DNA
cgtgaatttttactcactcagcaacgcgctaccgacataatccattacattcacaacgaaggttctaaacatatt

SEQ ID NO: 230221 - DNA, 75 bp, synthetic construct
  source 1..75: mol_type = other DNA
ctgtcgctctataccgcctgtggcggcatcagcccggcgtatacccttccggtggtgctggatgtcggaacgaac

SEQ ID NO: 230222 - DNA, 75 bp, synthetic construct
  source 1..75: mol_type = other DNA
gccgggaaaatttacgaataccaggtgtcgaattgcaaaaggtttggcgctttttgatcggtcagccttatgaaa

SEQ ID NO: 230223 - DNA, 75 bp, synthetic construct
  source 1..75: mol_type = other DNA
ttattaggggtgtattcctctaatagaaatatttttatttttgaatctgaaattaatcatggattggcttatggc

SEQ ID NO: 230224 - DNA, 75 bp, synthetic construct
  source 1..75: mol_type = other DNA
caatgacgatatgggctgggacatcttctttgatcaggattatttaatgtcagaaaaaaaactggctgttaaatg

SEQ ID NO: 230225 - DNA, 75 bp, synthetic construct
  source 1..75: mol_type = other DNA
ggaacctgaaagataatcctcatattggcttagaaatatcagacaccgttcctgatgattatctcgatcagcttt

SEQ ID NO: 230226 - DNA, 75 bp, synthetic construct
  source 1..75: mol_type = other DNA
cgaagcaatcaccgacaagaatgatcgcaacgctgttaataacaatagccagattcagcttaagactaatcattt

SEQ ID NO: 230227 - DNA, 75 bp, synthetic construct
  source 1..75: mol_type = other DNA
atgaaactgatttcaaataaggcaaaattaaaaaagattctcagaaatatctctgctgcaattcgaccgcctaaa

SEQ ID NO: 230228 - DNA, 75 bp, synthetic construct
  source 1..75: mol_type = other DNA
tgaaatctggaaatacaccagtcagagtcgaaatctctgatgatgttccagatgattactgcgaacagcttatgt

SEQ ID NO: 230229 - DNA, 75 bp, synthetic construct
  source 1..75: mol_type = other DNA
aggtgccagctcagttgatgccccttatgttccaacgaaaatcacgaaaaccggtggttatgaactttatatgat

SEQ ID NO: 230230 - DNA, 75 bp, synthetic construct
  source 1..75: mol_type = other DNA
agaacccgtaaaagctcctgaatcgcaatctgacgagcaaatcgaagaaactaagccaatcacacgaccgcaacg

SEQ ID NO: 230231 - DNA, 75 bp, synthetic construct
  source 1..75: mol_type = other DNA
catgaaacaaaaaaaggttttacttactttgagcgtggtgatgtattactggcaaaaataacaccttgtttcgaa

SEQ ID NO: 230232 - DNA, 75 bp, synthetic construct
  source 1..75: mol_type = other DNA
tttctggcgtagaagcggacgatgttatcggcactctggcgcgcgaagcagaaaaagctgggcgtccagtgctga

SEQ ID NO: 230233 - DNA, 75 bp, synthetic construct
  source 1..75: mol_type = other DNA
gcgatgggactgccgctgctggcggtttctggcgtagaagcggacgacgttatcggtactctggcgcgcgaagcc

SEQ ID NO: 230234 - DNA, 75 bp, synthetic construct
  source 1..75: mol_type = other DNA
tgcaccacagctaaaaggttatcagcctgcggttccgctactttctgtatcattcattctgcttctggcagggga

SEQ ID NO: 230235 - DNA, 75 bp, synthetic construct
  source 1..75: mol_type = other DNA
cattaacgttcttattttaggttttgccggttcggtcattgtgactggtggcctgaaattaattgataaaacgct

SEQ ID NO: 230236 - DNA, 75 bp, synthetic construct
  source 1..75: mol_type = other DNA
gttacgccgccgaagatgcagatgtcaccttgcagttgcatctgaaaatgtggccggatctgcaaaaacacaaag

SEQ ID NO: 230237 - DNA, 75 bp, synthetic construct
  source 1..75: mol_type = other DNA
ttatccttgtagatggttcatcttatctttatcgcgcatatcacgcgtttcccccgctgactaacagtgcaggcg

SEQ ID NO: 230238 - DNA, 75 bp, synthetic construct
  source 1..75: mol_type = other DNA
ctggaatatcgacggcctgatcctcactgaacgtacgcacacgccgcgtaccttaaagatgattgaagtggcggg

SEQ ID NO: 230239 - DNA, 75 bp, synthetic construct
  source 1..75: mol_type = other DNA
gttagcggaattggctggttcgccgccaaaaatgacgcagaccgtcagcgtattgtccgtggcatgtttttcctc

SEQ ID NO: 230240 - DNA, 75 bp, synthetic construct
  source 1..75: mol_type = other DNA
actaagcatttatgataaaagcgcgatgcaacttcaacttttagcatcaaacctatcgaatgaatatttcatgta

SEQ ID NO: 230241 - DNA, 75 bp, synthetic construct
  source 1..75: mol_type = other DNA
gggaacaggtgccgtttctttttcgtttgggcaaccccagggaaagtgcattgatttcccggtaatgcagccact

SEQ ID NO: 230242 - DNA, 75 bp, synthetic construct
  source 1..75: mol_type = other DNA
cctatctcggcgcgcgtctcgacgaacgtactatcatcaaacagaagggatacgaacaggcgatgctggatgcag

SEQ ID NO: 230243 - DNA, 75 bp, synthetic construct
  source 1..75: mol_type = other DNA
ctggaatatcgacggactgatcctcaccgaacgtacccacacgccgcgcaccttaaagatgattgaagtggcggg

SEQ ID NO: 230244 - DNA, 75 bp, synthetic construct
  source 1..75: mol_type = other DNA
atgtcgtgatgatcgttattttggtatggatggtcagcggagtgggaaaatcaatcaaaccaccacaaagatgtt

SEQ ID NO: 230245 - DNA, 75 bp, synthetic construct
  source 1..75: mol_type = other DNA
atgtttaccatgttctttctagttaaattaaccatcgcgattgtgattgtctgtgcaatcctttcgccgttttta

SEQ ID NO: 230246 - DNA, 75 bp, synthetic construct
  source 1..75: mol_type = other DNA
ccaacaatatttgcaacagtacaaaatgccaaatgagatacatgaaaatgtggtgataaaaaacagtattatttc

SEQ ID NO: 230247 - DNA, 75 bp, synthetic construct
  source 1..75: mol_type = other DNA
atgcctttaagcgcacaacagttagctgcacagaaaaacctttcgtatgttctggctgagaagctggcgcaacgg

SEQ ID NO: 230248 - DNA, 75 bp, synthetic construct
  source 1..75: mol_type = other DNA
ttatcaaaattgctcagcgtattggcattccgctggcgaccattggtgaagcgtttggcgtgttgcccgagggca

SEQ ID NO: 230249 - DNA, 75 bp, synthetic construct
  source 1..75: mol_type = other DNA
atggaaaagaaattaccccgcattaaagcgctgctaacccccggcgaagtggcgaaacgcagcggtgtggcggta

SEQ ID NO: 230250 - DNA, 75 bp, synthetic construct
  source 1..75: mol_type = other DNA
gagaaataccagcgtcaaccgagtgagtcatttacctctaccagccttacaaaaacctggctgcaactgcagatg

SEQ ID NO: 230251 - DNA, 75 bp, synthetic construct
  source 1..75: mol_type = other DNA
agtcatttacctctaccagccttacaaaaacctggctgcaactgcagatggctcacctggagcgggaagtcttca

SEQ ID NO: 230252 - DNA, 75 bp, synthetic construct
  source 1..75: mol_type = other DNA
ttccggtgaaacagtatgtgactcaggtcaataccgataacagcgtgacctttcgctactttgcccctggggcaa

SEQ ID NO: 230253 - DNA, 75 bp, synthetic construct
  source 1..75: mol_type = other DNA
ggacggcaggaacgtgaggtttttgtcgtgctctatctcgataaccagcatcgtctgctggaacatgaaacgcta

SEQ ID NO: 230254 - DNA, 75 bp, synthetic construct
  source 1..75: mol_type = other DNA
aaagctgtgtgagtggaaaagcgtacggattctggaagcagagtgccgcgcagatcatatccatatgcttgtgga

SEQ ID NO: 230255 - DNA, 75 bp, synthetic construct
  source 1..75: mol_type = other DNA
ggtactatgtcgatacggtgggtaagaacacggcgaagatacaggactacataaagcaccagcttgaagaggata

SEQ ID NO: 230256 - DNA, 75 bp, synthetic construct
  source 1..75: mol_type = other DNA
actttcttgatcaggaattgctcacctggtggatgacggaagataactttcatcaggtcattgatcactttctgg

SEQ ID NO: 230257 - DNA, 75 bp, synthetic construct
  source 1..75: mol_type = other DNA
aaatgtggtgaaagtggactccctgaatgactggggaagcctgcagacctggacaattaaccagaaaaaggctgc

SEQ ID NO: 230258 - DNA, 75 bp, synthetic construct
  source 1..75: mol_type = other DNA
tggtgacaccatccttcttcagggtgaaaccgaatggtcagcagacactacgtatcatcatggcctcggaccatc

SEQ ID NO: 230259 - DNA, 75 bp, synthetic construct
  source 1..75: mol_type = other DNA
gggtgattaatcagaagaaatcatccacaacgagtacgaacgttgataaaaccacgcagcctcacaaaagcgcgg

SEQ ID NO: 230260 - DNA, 75 bp, synthetic construct
  source 1..75: mol_type = other DNA
tcattcatgtatttcatgtcgctgaacagtccatcacacttgcgcggtaagacactccctttgattattcttgat

SEQ ID NO: 230261 - DNA, 75 bp, synthetic construct
  source 1..75: mol_type = other DNA
atcggttttcatgctaaccgccttatgtctccgtttagttctatccgtgcgtgtgtggtggactttgctgatagc

SEQ ID NO: 230262 - DNA, 75 bp, synthetic construct
  source 1..75: mol_type = other DNA
caaatgaaaaatctcatgacaggaataaaaacaatgaggatagtaagggtaaggataataaaaaagacaaccgga

SEQ ID NO: 230263 - DNA, 75 bp, synthetic construct
  source 1..75: mol_type = other DNA
aaatgtggtgaaagtggactccctgaacgattacggtgaactgcagacctggacgattaacaagaagaaaccggc

SEQ ID NO: 230264 - DNA, 75 bp, synthetic construct
  source 1..75: mol_type = other DNA
aaaacgccaacgtcttccgggcagaaggcatctgattcgccgattaatccgtctgataaggcagataaaaaataa

SEQ ID NO: 230265 - DNA, 75 bp, synthetic construct
  source 1..75: mol_type = other DNA
cagcatcaggcgattgtcgatgcaataatccaaagtgacggcgacgcggctttcaaagcgtgtcagaggctttta

SEQ ID NO: 230266 - DNA, 75 bp, synthetic construct
  source 1..75: mol_type = other DNA
tctattactgttacaaataatgacaaggaaagaactttcggtggtcaggcatgggtagataatataattgaaaag

SEQ ID NO: 230267 - DNA, 75 bp, synthetic construct
  source 1..75: mol_type = other DNA
acaatcagtacaaggttacgatcccagcgaatttacattctctaacggtgtattttgcgatgttaaagtgaagtg

SEQ ID NO: 230268 - DNA, 75 bp, synthetic construct
  source 1..75: mol_type = other DNA
tccccagagttaacaaggaaatatctcggcgaaaaagccgctgaaaacttacaatcattacaaggttacgatccc

SEQ ID NO: 230269 - DNA, 75 bp, synthetic construct
  source 1..75: mol_type = other DNA
ggcgaaacctgggctgttgcgccaacatctgacggcggtaaaggcagcgacggaaatttgcggagcgacggtgga

SEQ ID NO: 230270 - DNA, 75 bp, synthetic construct
  source 1..75: mol_type = other DNA
gctgtatgagcagaatatccatctcttgccgcgtgagcagggaccgggaaataccgtctcgctagaagtggaaag

SEQ ID NO: 230271 - DNA, 75 bp, synthetic construct
  source 1..75: mol_type = other DNA
ccgaggtggttgcggcacagttggtgaaagaggtgaaacgctacctggcaagcccggcggcagtggggaatatct

SEQ ID NO: 230272 - DNA, 75 bp, synthetic construct
  source 1..75: mol_type = other DNA
gtttggtgatttgaaattcaaatacaggaacagagagttctggtgcagagggtattacgtcgatacggtgggtaa

SEQ ID NO: 230273 - DNA, 75 bp, synthetic construct
  source 1..75: mol_type = other DNA
tgcagagggtactacgtcgatacggtgggtaagaacacggcgaagatacaggattacataaagcaccagcttgaa

SEQ ID NO: 230274 - DNA, 75 bp, synthetic construct
  source 1..75: mol_type = other DNA
gcaccagcttgaagaggataaaatgggggagcagttatcgattccatatccgggcagcccgtttacgggccgtaa

SEQ ID NO: 230275 - DNA, 75 bp, synthetic construct
  source 1..75: mol_type = other DNA
cggtagcgccggaagttgtacgctggtgctgcaaacggtgctgcccgcgctgtggtttgccgatggaccttcgcg

SEQ ID NO: 230276 - DNA, 75 bp, synthetic construct
  source 1..75: mol_type = other DNA
cattcatcctgcttctggctggtgagttaatcgggcgcggcgtgttctacgggttgcatatgactgtggggatgg

SEQ ID NO: 230277 - DNA, 75 bp, synthetic construct
  source 1..75: mol_type = other DNA
tcgctgtggcactgtgcttgtggattgctccgcagttaaaaggttttcagcctgcggtgccgctgctttccgtgt

SEQ ID NO: 230278 - DNA, 75 bp, synthetic construct
  source 1..75: mol_type = other DNA
tgttgcgccagcatctgaccgcggtaaaagcggctgcggaaatttgtagggcaacggtggaaggcgcggagctgg

SEQ ID NO: 230279 - DNA, 75 bp, synthetic construct
  source 1..75: mol_type = other DNA
tcgatgataaccggccagccatttaccatcaccggcattcgtgccgggcgggcgaaaccggggctgttgcgccag

SEQ ID NO: 230280 - DNA, 75 bp, synthetic construct
  source 1..75: mol_type = other DNA
ggcgctggcgggcgcgggggaatttacggtcgcccatccctcatgccatctgctgaccaatatcgcggtggtgga

SEQ ID NO: 230281 - DNA, 75 bp, synthetic construct
  source 1..75: mol_type = other DNA
ccccccaaaatgagcgtatccggctttatgggatatctgaaagggaaaagcagtctgatgctttacgagcagttt

SEQ ID NO: 230282 - DNA, 75 bp, synthetic construct
  source 1..75: mol_type = other DNA
cgcgtggtattttagtgcgcaatcttctggttgtatttcggcatttccgacgcaagtcgtagacacgattggtgc

SEQ ID NO: 230283 - DNA, 75 bp, synthetic construct
  source 1..75: mol_type = other DNA
ttcagcaacgacgcttctggctgcattccggcatttccaacgcaagttgtagacaccattggggcgggcgacagt

SEQ ID NO: 230284 - DNA, 75 bp, synthetic construct
  source 1..75: mol_type = other DNA
tctggctgcattccggcatttccaacgcaagttgtagacaccattggggcgggcgacagtcatgcaggtggcgta

SEQ ID NO: 230285 - DNA, 75 bp, synthetic construct
  source 1..75: mol_type = other DNA
atgagcggcaccaggttacacacgctgctgtcgcaattaactacgcgtcaaccggtgatggttgtcggtgcggct

SEQ ID NO: 230286 - DNA, 75 bp, synthetic construct
  source 1..75: mol_type = other DNA
aacgttggcggctgtgcactgaatattgccgtggcgttaaagcgcctcggcatcgaagcgggtaatgccttgccg

SEQ ID NO: 230287 - DNA, 75 bp, synthetic construct
  source 1..75: mol_type = other DNA
cgctggcagacgcagtgctgctgggtaatgctgtggcgtcatgggtggtcgggcatcacggcggtgattgtacgc

SEQ ID NO: 230288 - DNA, 75 bp, synthetic construct
  source 1..75: mol_type = other DNA
gctgatggaaaaagtgatgaaggaaaaacagtcgctggagcagggtgcaatgcagccgagctttaaatcggtgac

SEQ ID NO: 230289 - DNA, 75 bp, synthetic construct
  source 1..75: mol_type = other DNA
gtatattatcctttaagaatgatatgtgctctggtaatctggaaaaagatattttgtttattaaaaagaatattt

SEQ ID NO: 230290 - DNA, 75 bp, synthetic construct
  source 1..75: mol_type = other DNA
tacggtgggtaagaacagtaggatatttttaaatgagtataaacctcaaatggttaaacagacttcaccaccaag

SEQ ID NO: 230291 - DNA, 75 bp, synthetic construct
  source 1..75: mol_type = other DNA
ccgccgaacgttttgctttatccgcagagataacaacactaggcaagcaatggcaggagaaatttgccgcgccgt

SEQ ID NO: 230292 - DNA, 75 bp, synthetic construct
  source 1..75: mol_type = other DNA
ctcggtcagggggtgtggtcggagattattcgtaaccggatggcaaaagagggattgctcagcctgctcgataac

SEQ ID NO: 230293 - DNA, 75 bp, synthetic construct
  source 1..75: mol_type = other DNA
aacacgaaaaccaaagggaaggtctcactcaatctggaaatcgaaccgtttgatgagaaccgtgtgaaaatcaaa

SEQ ID NO: 230294 - DNA, 75 bp, synthetic construct
  source 1..75: mol_type = other DNA
gaaacgtaccgcaaatacggaggcgcatttgcgtcaaaagcagactggcggcgcaacaatactcagcagttaatt

SEQ ID NO: 230295 - DNA, 75 bp, synthetic construct
  source 1..75: mol_type = other DNA
aaatcagcggcacaatcttgttccgtgaggactatctgaacaaacctcagactcaacaagcggtcagctatttgc

SEQ ID NO: 230296 - DNA, 75 bp, synthetic construct
  source 1..75: mol_type = other DNA
tccgatcttatgaccggtaagattggtgaaaatccgggttacgatccgctgcaatttatgctcgacgaagcccac

SEQ ID NO: 230297 - DNA, 75 bp, synthetic construct
  source 1..75: mol_type = other DNA
gtcaagtttggtcgtttcgacggcgcacagccacactgcgtcggattaacggatctggtcaccggagacgacggc

SEQ ID NO: 230298 - DNA, 75 bp, synthetic construct
  source 1..75: mol_type = other DNA
tatgacgtattggctaaatggtgggcagatgtcgtcaaaccgaccaaaactcgtctctatatcggtgtcgccttc

SEQ ID NO: 230299 - DNA, 75 bp, synthetic construct
  source 1..75: mol_type = other DNA
gatcgctttgtcctcgacccgggcatccctgaggttcaggactggatcacatcaatagtcgcggaagtggtttcc

SEQ ID NO: 230300 - DNA, 75 bp, synthetic construct
  source 1..75: mol_type = other DNA
tattccttatacaaaaaatggtcgcagtcggacggtatatctaaggaaggtgcgaataagcaggtcatttcttcc

SEQ ID NO: 230301 - DNA, 75 bp, synthetic construct
  source 1..75: mol_type = other DNA
attcatccatcaaagcccttccggcaaacacagatacccgatctacagagcttgaggtatctgataccgaagtta

SEQ ID NO: 230302 - DNA, 75 bp, synthetic construct
  source 1..75: mol_type = other DNA
ttgagggtcgtattcacgggcagcaatatgcgccgtctacctgtaacagagcccttgctattctgaaaacgatgg

SEQ ID NO: 230303 - DNA, 75 bp, synthetic construct
  source 1..75: mol_type = other DNA
agctgaaggcgcaccaacagaatgttgtgttcttggcgataagcactttcttggcttccgcagcctctggaaaaa

SEQ ID NO: 230304 - DNA, 75 bp, synthetic construct
  source 1..75: mol_type = other DNA
atgcttaacgtcatgcacaaacatattgatcgggataacaggtcgttattcattccttatactaagaatggtcgc

SEQ ID NO: 230305 - DNA, 75 bp, synthetic construct
  source 1..75: mol_type = other DNA
cgctacacattccacggtaccaaaaaaagtatcagtattggcagattccctgaaattgatgtggggacagcccgt

SEQ ID NO: 230306 - DNA, 75 bp, synthetic construct
  source 1..75: mol_type = other DNA
gtaggcattcatggacttttcgttgaggcgttaaatgacaaagccaaggcgttttataaaagtttaggctttatc

SEQ ID NO: 230307 - DNA, 75 bp, synthetic construct
  source 1..75: mol_type = other DNA
gatctttttcgccgtagggggaatcggttggttactggcaatgctgaaaaaattgtcaccggcattacgcacact

SEQ ID NO: 230308 - DNA, 75 bp, synthetic construct
  source 1..75: mol_type = other DNA
gttctggctttggcgctgctcaaaggcgacctgcgagcagaagcccagcagcgtgttatcgcctgcatgtttggt

SEQ ID NO: 230309 - DNA, 75 bp, synthetic construct
  source 1..75: mol_type = other DNA
atgctttacgagcagtttggggatttgaaattcaaatacagaaacagggagttctggtgccgagggtactatgtc

SEQ ID NO: 230310 - DNA, 75 bp, synthetic construct
  source 1..75: mol_type = other DNA
gatcttttttgccgttggtggcatcggctggttgctggcaatgctgaaaaagctgtcaccggtattacgcgcgct

SEQ ID NO: 230311 - DNA, 75 bp, synthetic construct
  source 1..75: mol_type = other DNA
cattcattctgcttctggcaggggagttaattggtcgcggtgtgttctacggcttgcacatgaccgtgggcatgg

SEQ ID NO: 230312 - DNA, 75 bp, synthetic construct
  source 1..75: mol_type = other DNA
ggcgtcatctttgtctggatgatggtgcgtgtgtataacagcattgataccgttccgacctggtacagcatctgg

SEQ ID NO: 230313 - DNA, 75 bp, synthetic construct
  source 1..75: mol_type = other DNA
aatcttcatcgccagggatatggagaaacacttgttactcatgctatgaaagttgtgtatcaggcctcgcaagct

SEQ ID NO: 230314 - DNA, 75 bp, synthetic construct
  source 1..75: mol_type = other DNA
aggcgctgaatgaaaaagcccatacgttttataaatcgctgggctttatccctttagtcggggaaaacgaaaatg

SEQ ID NO: 230315 - DNA, 75 bp, synthetic construct
  source 1..75: mol_type = other DNA
cttatcggaatgtcccaagtatcactttaggcagactggctttggacaaatctcttcaaggtcaggggtttggct

SEQ ID NO: 230316 - DNA, 75 bp, synthetic construct
  source 1..75: mol_type = other DNA
tgacagctcatggctgccgctacttcacgacctgacgaacgaaggcatggctttcggtcatgagctggcacaggc

SEQ ID NO: 230317 - DNA, 75 bp, synthetic construct
  source 1..75: mol_type = other DNA
atggtaactccctgcgtgcgctggtgaaatatctcgataacatgagtgaagaagagatccttgagctgaatatcc

SEQ ID NO: 230318 - DNA, 75 bp, synthetic construct
  source 1..75: mol_type = other DNA
gaaattcaaatacaggaacagagagttctggtgcagagggtactacgtcgatacggtgggtaagaacacggcgaa

SEQ ID NO: 230319 - DNA, 75 bp, synthetic construct
  source 1..75: mol_type = other DNA
gcgcaacctacatactgccggaccccggcgaactgaataaacgcgtcctgatccgccagcgggtggatatgcccg

SEQ ID NO: 230320 - DNA, 75 bp, synthetic construct
  source 1..75: mol_type = other DNA
atacccggttgcgttccgggcatgggcgaaggttgtccagaccagtgccaccacctggcaggaaaccgcgcagac

SEQ ID NO: 230321 - DNA, 75 bp, synthetic construct
  source 1..75: mol_type = other DNA
catttttctcgcgttgtgagactggaaggcggtgtagtgagagacatcaatccgccagacgatattcaccgctag

SEQ ID NO: 230322 - DNA, 75 bp, synthetic construct
  source 1..75: mol_type = other DNA
gcagtcacgctgcattatttgcagaacctgcttgagcactcccgccaggacgcggcagctcgtcaaaagaccccc

SEQ ID NO: 230323 - DNA, 75 bp, synthetic construct
  source 1..75: mol_type = other DNA
atgaaaattcgtcaggcgcagaccagcgcaacctacattctgccggaccccggtgaactgaataaacgcgtcctg

SEQ ID NO: 230324 - DNA, 75 bp, synthetic construct
  source 1..75: mol_type = other DNA
cagcgcgatctgaacggagcgcggcgctttctgctgctggagtgtacggagctgggcgaatttacgcagagtcac

SEQ ID NO: 230325 - DNA, 75 bp, synthetic construct
  source 1..75: mol_type = other DNA
ttaacggccgtgagtggggggggtggacgtcaattcgcattggttcagggattgagcgattagctcgcgatttta

SEQ ID NO: 230326 - DNA, 75 bp, synthetic construct
  source 1..75: mol_type = other DNA
cggtcgtcattactctacatggacgctttagccagggctggtatttctgtttcgaagcacgagaatttctcgaaa

SEQ ID NO: 230327 - DNA, 75 bp, synthetic construct
  source 1..75: mol_type = other DNA
cgaaagcgaaccattaccttgatgatgcagatctcgccgtcgtcattactctacatggacgctttagccagggct

SEQ ID NO: 230328 - DNA, 75 bp, synthetic construct
  source 1..75: mol_type = other DNA
aagtggaagtgctgattggtgatgagctggtgatcaccggctgggtggaggcgacccccgttcgttacgatgccc

SEQ ID NO: 230329 - DNA, 75 bp, synthetic construct
  source 1..75: mol_type = other DNA
ggcattgaggtggtgaacagcgatgcgccgtcgggtgttattccggatgtccagcctgatcacggtgaaacggtg

SEQ ID NO: 230330 - DNA, 75 bp, synthetic construct
  source 1..75: mol_type = other DNA
agacgaaaaccattaccgcattgctatcgctgtggctggttttgctgagagcgaactggaaattaccgcccagga

SEQ ID NO: 230331 - DNA, 75 bp, synthetic construct
  source 1..75: mol_type = other DNA
ccagaagaaccccatcaggcgctgtgcgcggttggcgcggccacgtcagtacgtaaagcggtctttaaggtaccg

SEQ ID NO: 230332 - DNA, 75 bp, synthetic construct
  source 1..75: mol_type = other DNA
acgtttattatctgggcatggaacagccctctggatgaagtgacccgtggtcagggaagtattattcccggtagt

SEQ ID NO: 230333 - DNA, 75 bp, synthetic construct
  source 1..75: mol_type = other DNA
atgatacccggagctctgccatgctgagggaaagtgaagcccgggtgaataacctggaggccgtcagggcaagac

SEQ ID NO: 230334 - DNA, 75 bp, synthetic construct
  source 1..75: mol_type = other DNA
cagcaccgtcgctgacgagatcgcatttggtttgaaactgcaaaaatgcccggcggatgaaatcactcaacgtac

SEQ ID NO: 230335 - DNA, 75 bp, synthetic construct
  source 1..75: mol_type = other DNA
tgatcagaagcggccgggggatttaaagctgaatccgaatgaagctttttatcgtgtacttgttaccaccagtaa

SEQ ID NO: 230336 - DNA, 75 bp, synthetic construct
  source 1..75: mol_type = other DNA
cggtctattttctccggaagacggagctggcgcagagcattgccggtctgaagcagagtaaggcgctgctggaca

SEQ ID NO: 230337 - DNA, 75 bp, synthetic construct
  source 1..75: mol_type = other DNA
actgacggcttatgactatgccatttatggtggtcttgacggagtggtgacactggtaagtccggatactttacg

SEQ ID NO: 230338 - DNA, 75 bp, synthetic construct
  source 1..75: mol_type = other DNA
tggcattgtcgataccgtggtggcattttctgcgttggcagtatttacctggtttggcagtggcttattagggaa

SEQ ID NO: 230339 - DNA, 75 bp, synthetic construct
  source 1..75: mol_type = other DNA
gttacgctagagagttaccaaaggagaagcatctgactggtaagatttttactcagcacattgagcgtaacaatc

SEQ ID NO: 230340 - DNA, 75 bp, synthetic construct
  source 1..75: mol_type = other DNA
atctagttaagattgcagctaagctaccagcagatttcaatgagcttcaataccaatttgacgaagacccaatgc

SEQ ID NO: 230341 - DNA, 75 bp, synthetic construct
  source 1..75: mol_type = other DNA
acttgtgacgttgaataataaggtccctcagggtgggtgctgttctagttatattgcaaatcttttattttttaa

SEQ ID NO: 230342 - DNA, 75 bp, synthetic construct
  source 1..75: mol_type = other DNA
gtcggcgggtggcccgattctgacaccctctctggatgcgattaccctggtacccatgttcccgcatacgctgtc

SEQ ID NO: 230343 - DNA, 75 bp, synthetic construct
  source 1..75: mol_type = other DNA
cccagcaacagttagccgatgtgctggaaggccactacatcagcgagaaacgttttttgctggaagcgcaagttt

SEQ ID NO: 230344 - DNA, 75 bp, synthetic construct
  source 1..75: mol_type = other DNA
gattgtttttcgccagataagagaggtgacgtcgtgaaatatgatgactgtactttgcgcagtcataatactccc

SEQ ID NO: 230345 - DNA, 75 bp, synthetic construct
  source 1..75: mol_type = other DNA
cagattatccattccaatattatctctgccccggatgaattacgtgaacagctcagaaatatgacgcgcatgcag

SEQ ID NO: 230346 - DNA, 75 bp, synthetic construct
  source 1..75: mol_type = other DNA
agatcgtgctgcaaatgtcacgaacggtgcaatagtgatccacacccaacgcctgaaatcagatccagggggtaa

SEQ ID NO: 230347 - DNA, 75 bp, synthetic construct
  source 1..75: mol_type = other DNA
caggcttacggcgatacctataggatccggctggagaaagtgattcgtgaaatgggagatccgcgcgccagccag

SEQ ID NO: 230348 - DNA, 75 bp, synthetic construct
  source 1..75: mol_type = other DNA
gcatgtcatgcgtcatacatttgccacacactttatgatgaatggcggaaatattgttacgttacaacgaatcct

SEQ ID NO: 230349 - DNA, 75 bp, synthetic construct
  source 1..75: mol_type = other DNA
cgaaagcgaaccattaccttgatgatgcagatctccctgccgtcatcactctgcatggacgttttagccagggct

SEQ ID NO: 230350 - DNA, 75 bp, synthetic construct
  source 1..75: mol_type = other DNA
actggagagtgaggcaaacaaaaaaaataacagtgcctataaaacaaataaccaggtggcttcctttgaccagcc

SEQ ID NO: 230351 - DNA, 75 bp, synthetic construct
  source 1..75: mol_type = other DNA
cagattggaaagaacggtacgctttccctgagcggcacgccggaaaatggcgctgataaaacctggatgcccgta

SEQ ID NO: 230352 - DNA, 75 bp, synthetic construct
  source 1..75: mol_type = other DNA
gtgaattccaccctttctgtccgtgacggcggtcatctgacggcacaaaaagggctctacagtgacggccgggtt

SEQ ID NO: 230353 - DNA, 75 bp, synthetic construct
  source 1..75: mol_type = other DNA
taaagtcccttgcccgacgctatctcgagttacatgacgaaatcgctgatctggatgtcatgattgcggcaattg

SEQ ID NO: 230354 - DNA, 75 bp, synthetic construct
  source 1..75: mol_type = other DNA
gctatatctcacgcgaagtttatacattacagcataatcaaaacaggcagatcaacagcatcccgataacgactt

SEQ ID NO: 230355 - DNA, 75 bp, synthetic construct
  source 1..75: mol_type = other DNA
gcaatccgttgatatcccgctggcggatccgcatttctggacgatgcaaggttcggtacgtgtggcgcaaatgtg

SEQ ID NO: 230356 - DNA, 75 bp, synthetic construct
  source 1..75: mol_type = other DNA
ttgcttgatacatggtggatgcttgacgggcgcaatcaggcttacggcgatacctacaggatccggctggagaaa

SEQ ID NO: 230357 - DNA, 75 bp, synthetic construct
  source 1..75: mol_type = other DNA
accgtttcgccaatgagtttgcccgcagtaaagccgccagcgaagaggtgatcaacttgctttcgcaggcaaacc

SEQ ID NO: 230358 - DNA, 75 bp, synthetic construct
  source 1..75: mol_type = other DNA
ctggatattacgcgtgcgcaggaagagttaggttatcagccagtcctcaccctggatgaaggtatcgagaaaact

SEQ ID NO: 230359 - DNA, 75 bp, synthetic construct
  source 1..75: mol_type = other DNA
cgccactcgccgcctgggcgaatgggctgtcgcctggggcgtacgtaattttattcatatctcttcaccgtcact

SEQ ID NO: 230360 - DNA, 75 bp, synthetic construct
  source 1..75: mol_type = other DNA
aataattttgataatgatgaactggtgatcgcagaagtcacctataaccaggacgaccggggcacgacgactgaa

SEQ ID NO: 230361 - DNA, 75 bp, synthetic construct
  source 1..75: mol_type = other DNA
gcaatacgtcagaccattcaggacaatggcgtgacccgttatcgccctttgttgattcagcagtcaggcacagca

SEQ ID NO: 230362 - DNA, 75 bp, synthetic construct
  source 1..75: mol_type = other DNA
gctttgccactccagcagagcggaaaaaacctgctcagaatcgtcagtgaactggctgcaccatttggcatcacc

SEQ ID NO: 230363 - DNA, 75 bp, synthetic construct
  source 1..75: mol_type = other DNA
cgtattgatatttactgagaggtcagatcaactttccagggcaacagatcgcgtacccggtttgccggccaatcc

SEQ ID NO: 230364 - DNA, 75 bp, synthetic construct
  source 1..75: mol_type = other DNA
ggcgattatcagagttacttgatgcgtggtggatgcttgacgggcgtaatcaggcttacggggatagctacaggg

SEQ ID NO: 230365 - DNA, 75 bp, synthetic construct
  source 1..75: mol_type = other DNA
accgggtgacgttctttaacaccaaaaacggaaaatcccgttcggttcctgtggcggattcggtcgtgcctctga

SEQ ID NO: 230366 - DNA, 75 bp, synthetic construct
  source 1..75: mol_type = other DNA
catcgcacactgcgcagcatcgtgcagaagctgatcgacgagttgaatattgactgtcgtattcgttccgtcccc

SEQ ID NO: 230367 - DNA, 75 bp, synthetic construct
  source 1..75: mol_type = other DNA
gattaatcgacaaaacctgcgttattctttcatgtttcccattgcatcatgggggaaatcacggaagaatgcgca

SEQ ID NO: 230368 - DNA, 75 bp, synthetic construct
  source 1..75: mol_type = other DNA
agttaggttatcagccagtcatcaccctggatgaaggcatcgaaaaaactgccgcctggctgcgcgaccacggaa

SEQ ID NO: 230369 - DNA, 75 bp, synthetic construct
  source 1..75: mol_type = other DNA
tattatgaatacctctgcgattgtgctggcgtggccaatgctttctatcatcgtagataaaagctatgccccgag

SEQ ID NO: 230370 - DNA, 75 bp, synthetic construct
  source 1..75: mol_type = other DNA
tctcactggacggtgcgggaacaaaaacaacgggcgttattcgctgcgaccagcccagaaccattgatatgggag

SEQ ID NO: 230371 - DNA, 75 bp, synthetic construct
  source 1..75: mol_type = other DNA
gagtttacaaattagtgacattggaacggttgtcacgggctctacacccccgaagaacgacagtgataactatgg

SEQ ID NO: 230372 - DNA, 75 bp, synthetic construct
  source 1..75: mol_type = other DNA
gcctactcctatgttaactcgcccgataatcccgatctggagttttacctggtcaccgtccccgatggcaaatta

SEQ ID NO: 230373 - DNA, 75 bp, synthetic construct
  source 1..75: mol_type = other DNA
aagctggcagcaacagacgcgtacgtcgcaagccgcgccggttcagtcgcagccgcgccagtcaaaaccggcttc

SEQ ID NO: 230374 - DNA, 75 bp, synthetic construct
  source 1..75: mol_type = other DNA
tttgcccgcactgtcggctttgctgtgtcgctggatggtgccggcatacgtaccaccggtgttgtgcgttgcgat

SEQ ID NO: 230375 - DNA, 75 bp, synthetic construct
  source 1..75: mol_type = other DNA
gcacagtgttggtggggatcgtgggtaatgactccaacttattgatagtgttttatgttcagataatgcccgatg

SEQ ID NO: 230376 - DNA, 75 bp, synthetic construct
  source 1..75: mol_type = other DNA
atgtactggtggtttgccgcgcgcgaattacgccgcagaaatatccataacgccttcaaattgaatctgtttgag

SEQ ID NO: 230377 - DNA, 75 bp, synthetic construct
  source 1..75: mol_type = other DNA
ttaggacttgactctcaaagcttttggctggccgcgctctattgcacgctcattccttcgatggcctcttctacg

SEQ ID NO: 230378 - DNA, 75 bp, synthetic construct
  source 1..75: mol_type = other DNA
ggagctgtatacctttgcgaaattatttcagcgcgttacaaaaaaaaataacggaaaaagcactaatgttgtaac

SEQ ID NO: 230379 - DNA, 75 bp, synthetic construct
  source 1..75: mol_type = other DNA
aactcgcctgcctgaaagacgagaagaaagccttgatgcagcaactgctgaccgggaaacgtcgggtgaaagtgg

SEQ ID NO: 230380 - DNA, 75 bp, synthetic construct
  source 1..75: mol_type = other DNA
ggctggcggcgctctattgcacgctgatcccctcaatggcttcttccacgccgactggcattctgcgcgctgtcg

SEQ ID NO: 230381 - DNA, 75 bp, synthetic construct
  source 1..75: mol_type = other DNA
agcgtccggcaagtcttcctggaagtagcagattgcgaaacgctatggatgctggcaaccggtacagcgattggc

SEQ ID NO: 230382 - DNA, 75 bp, synthetic construct
  source 1..75: mol_type = other DNA
tgagttaaattttgatcgcactccgaatatcctgacaacattcaaccacactactttaggtggtggcgagagatg

SEQ ID NO: 230383 - DNA, 75 bp, synthetic construct
  source 1..75: mol_type = other DNA
ggtacgaccaccgtgataccgggaaatcaacaagctatgagccaggtcaggctccatattccgttgaagaattag

SEQ ID NO: 230384 - DNA, 75 bp, synthetic construct
  source 1..75: mol_type = other DNA
accgcatggatgacactcaaacccatgggagccgttaagcgtaacgctgtcggaagaggcgcgttcctccagcta

SEQ ID NO: 230385 - DNA, 75 bp, synthetic construct
  source 1..75: mol_type = other DNA
cactggcatccaacgcgtaaccaacgtgcgccgcagcgtatcgacacgctgcaacttgataatttcctcaccact

SEQ ID NO: 230386 - DNA, 75 bp, synthetic construct
  source 1..75: mol_type = other DNA
gatccgcgatctgatcataaagacgccgtacaatcctggcgaacggctgccaccggagcgtgaaattgcagaaat

SEQ ID NO: 230387 - DNA, 75 bp, synthetic construct
  source 1..75: mol_type = other DNA
ttttgaccgtacgccaaatatcctgacaacattcaaccacactacgttaggtggtggcgagaaatggctcggcag

SEQ ID NO: 230388 - DNA, 75 bp, synthetic construct
  source 1..75: mol_type = other DNA
gccgtgggcaggatatttcaccggctggacttactggttctgctgggttgtaaccggtatggcagacgtggttgc

SEQ ID NO: 230389 - DNA, 75 bp, synthetic construct
  source 1..75: mol_type = other DNA
cattcagacggtggtcagccgggaaacggtagcgggttcacttaccggccggataccggcgttgattgaaagtgg

SEQ ID NO: 230390 - DNA, 75 bp, synthetic construct
  source 1..75: mol_type = other DNA
tatggatgctggcaaccggtacagcgattggcccttatttgtcgattctgcaattaggcaaagatttagatcgct

SEQ ID NO: 230391 - DNA, 75 bp, synthetic construct
  source 1..75: mol_type = other DNA
gcacagcattatcaattgcacttgcccagcaggccgtagcagctcaagagagcgatacactgactgtatggtcca

SEQ ID NO: 230392 - DNA, 75 bp, synthetic construct
  source 1..75: mol_type = other DNA
gtttgccgtcaactggaaggatgatgtgcatcgggaaaaaggcgcaccgcacgcttcttatgatcgctatgaaga

SEQ ID NO: 230393 - DNA, 75 bp, synthetic construct
  source 1..75: mol_type = other DNA
ggttttcgctttcgtggggattgagctggtaggtacaacagctgcggaaaccaaagatccggagaaatcactgcc

SEQ ID NO: 230394 - DNA, 75 bp, synthetic construct
  source 1..75: mol_type = other DNA
aatctgcgcttaacctatcgactcttcgtagtatgctaattttagttccacctgtaatcgagcagaagaaaatcg

SEQ ID NO: 230395 - DNA, 75 bp, synthetic construct
  source 1..75: mol_type = other DNA
atcgacgctgttacgagtaatggcaggtcttcttacgcccacagccggtacggttatgctgcaacaacaggcgat

SEQ ID NO: 230396 - DNA, 75 bp, synthetic construct
  source 1..75: mol_type = other DNA
ctgaagatccttcaggtacgagtggcgtacacacatgacaatttttctcctcgtcagctaagggcctttaccctg

SEQ ID NO: 230397 - DNA, 75 bp, synthetic construct
  source 1..75: mol_type = other DNA
ctgtaccgcagacgccagcctcaccgcccggcccggaaggcgaaccacagccaggaaacaccccggtctcttttc

SEQ ID NO: 230398 - DNA, 75 bp, synthetic construct
  source 1..75: mol_type = other DNA
tgaaaccgtggctgaacaggagcctgtgctggatatgaccggtgtggtggatacgacctttgatgacaaggtgcg

SEQ ID NO: 230399 - DNA, 75 bp, synthetic construct
  source 1..75: mol_type = other DNA
tgacgtaccagtctgtaccggtgcctaaccggatacagcgtaaggtgtttacccgtaatgagggaaaacagggac

SEQ ID NO: 230400 - DNA, 75 bp, synthetic construct
  source 1..75: mol_type = other DNA
cgggagacagcgccgaaaacatcagactctcccgtccgcaaagcacttccggcaacacttccccgtgacaggcag

SEQ ID NO: 230401 - DNA, 75 bp, synthetic construct
  source 1..75: mol_type = other DNA
aagcgtcgtcagaggtggtcaggcagtcagacctggccctgttgacagatgtacaggcagcccttcagcaggaaa

SEQ ID NO: 230402 - DNA, 75 bp, synthetic construct
  source 1..75: mol_type = other DNA
tatggtggtcttgacggcgtggtgacactggtaagtccggatactttacgtgaccagaaacgtccgggagactta

SEQ ID NO: 230403 - DNA, 75 bp, synthetic construct
  source 1..75: mol_type = other DNA
cctgaaatagattttcaagccatatatttcaaaaacggtatttatcactgggctctaattaaagaaaaattgctt

SEQ ID NO: 230404 - DNA, 75 bp, synthetic construct
  source 1..75: mol_type = other DNA
cattgggcaggctcgttgatatttttagcgtttattggtttggtgatgaaacttattttttaggtttactgaaag

SEQ ID NO: 230405 - DNA, 75 bp, synthetic construct
  source 1..75: mol_type = other DNA
gcatcgatgaactgtttaaacgcgttgatgatgctttgtatcgagcgaaaaatgatggacgcaaccgcgtgctgg

SEQ ID NO: 230406 - DNA, 75 bp, synthetic construct
  source 1..75: mol_type = other DNA
cggggccggcgatgtccttaaaatgggtatcggtggcggcgcatcgaaagccgcacagacgctcagtgactacta

SEQ ID NO: 230407 - DNA, 75 bp, synthetic construct
  source 1..75: mol_type = other DNA
tgctggggctgttggcgctctcgtgtgccggtaaagggatgacgcccgccatgtttggcgtactggtgattgtgc

SEQ ID NO: 230408 - DNA, 75 bp, synthetic construct
  source 1..75: mol_type = other DNA
ggccaatattgatacaggctatgcttttaaaagcaaagatttcactcaatcagattctggtattccaattattcg

SEQ ID NO: 230409 - DNA, 75 bp, synthetic construct
  source 1..75: mol_type = other DNA
gaaattttgtgatatggccaatattgatacaggctatgcttttaaaagcaaagatttcactcaatcagattctgg

SEQ ID NO: 230410 - DNA, 75 bp, synthetic construct
  source 1..75: mol_type = other DNA
gcatatgacctgatccaggtgatgcttggcgcgattgttatttcgatgctgggcttcccgcaggagtcattgcta

SEQ ID NO: 230411 - DNA, 75 bp, synthetic construct
  source 1..75: mol_type = other DNA
aatcggctactgtagattcaattggtcaacgcaacagttatgtgaaaacatggggttgcggaggttttttgaatg

SEQ ID NO: 230412 - DNA, 75 bp, synthetic construct
  source 1..75: mol_type = other DNA
tgccggtaaagggatgacgcccgccatgtttggcgtactggtgattgtgcaatcgtacgccaagtcgatcagcga

SEQ ID NO: 230413 - DNA, 75 bp, synthetic construct
  source 1..75: mol_type = other DNA
gtccctccctgccgtatatcccgtccgggagctttgcaaaatctgtcctgattgagggggcggatgccaatgcgt

SEQ ID NO: 230414 - DNA, 75 bp, synthetic construct
  source 1..75: mol_type = other DNA
cgtcaggtttgtggttatctggccgctggccacaatggccctgatggctctgtttgttttatggaaggacaacac

SEQ ID NO: 230415 - DNA, 75 bp, synthetic construct
  source 1..75: mol_type = other DNA
atgacgcaacgggatgttttgtggggctggaagcctggggggatgtctccagtgaacgtgccattgtacgcaccc

SEQ ID NO: 230416 - DNA, 75 bp, synthetic construct
  source 1..75: mol_type = other DNA
aatcccgtcacggcgaccggtgagcctgtaccgcagacgcctgcctcaccgcccggcccggaaggcgaaccacag

SEQ ID NO: 230417 - DNA, 75 bp, synthetic construct
  source 1..75: mol_type = other DNA
ggtggaaatgccgaacagcaagacgtatgacgcaacgggatgttttgtggggctggaagcctggggggatgtgtc

SEQ ID NO: 230418 - DNA, 75 bp, synthetic construct
  source 1..75: mol_type = other DNA
gcaatatcagctgcctgaaggacggcaaaactattgatagccgattaaggggcatgtcagcttccggggtaaaaa

SEQ ID NO: 230419 - DNA, 75 bp, synthetic construct
  source 1..75: mol_type = other DNA
cctgactgggaaacccggcatttccgatttaagactctgaatctggaaaactcagaattcacaactgcacgtaac

SEQ ID NO: 230420 - DNA, 75 bp, synthetic construct
  source 1..75: mol_type = other DNA
ggaatgactattactggttttaaaccttcccctatccccggaatttttgaattcaggacaggcagtaacacaatt

SEQ ID NO: 230421 - DNA, 75 bp, synthetic construct
  source 1..75: mol_type = other DNA
tgcaggcattatgtttattaacgctctgttttataccgttgtacgttcccaccccatccgggtcatcgcttacct

SEQ ID NO: 230422 - DNA, 75 bp, synthetic construct
  source 1..75: mol_type = other DNA
gctatcatgtatctcgcttatattctccaattaactctatcaaatcaattgttgcagactttgcagaagcacatt

SEQ ID NO: 230423 - DNA, 75 bp, synthetic construct
  source 1..75: mol_type = other DNA
cattaccagatgattactttattcagattacatccgagaaacgagtgataaaggctggtgcctgggtatgggtga

SEQ ID NO: 230424 - DNA, 75 bp, synthetic construct
  source 1..75: mol_type = other DNA
atggcttgtggctttatgttgctggcatttgatgcccgacatgcagcggctggcggtcaagcgtcaatgggcgtg

SEQ ID NO: 230425 - DNA, 75 bp, synthetic construct
  source 1..75: mol_type = other DNA
ccgacctgcattttgctgaaaaataacggcctgcatattgagctgcaaattgatgccaacgggcggattggcaaa

SEQ ID NO: 230426 - DNA, 75 bp, synthetic construct
  source 1..75: mol_type = other DNA
acgttttgtggatgaagaagttttgcctggcgtggaactggatgctgccgcgttctggcacaatgttgatgagat

SEQ ID NO: 230427 - DNA, 75 bp, synthetic construct
  source 1..75: mol_type = other DNA
tgccagcgatttgatcttcctcggcgtgaaacagccaaacggctataccgaaccgttattacacgcatggcgttt

SEQ ID NO: 230428 - DNA, 75 bp, synthetic construct
  source 1..75: mol_type = other DNA
aataacatcattatcgcttatgtttttggctttctggcgggaatggcaaacagttttctcgatgcaggcacttat

SEQ ID NO: 230429 - DNA, 75 bp, synthetic construct
  source 1..75: mol_type = other DNA
tcaaaatcgaaaatacctttttgagtgaagatcaggtagatcaactggcattgtatgcaccgcaagccacggtta

SEQ ID NO: 230430 - DNA, 75 bp, synthetic construct
  source 1..75: mol_type = other DNA
gaataccctgaaaatgggcattatggatgaagaacgccgaacctcgctaaacttacgtagctgtatcgcccaggc

SEQ ID NO: 230431 - DNA, 75 bp, synthetic construct
  source 1..75: mol_type = other DNA
ttgatcaccgtagtatctactcaattgactgtactaaaatcgaagccccagcatggaataagttaacggcctttg

SEQ ID NO: 230432 - DNA, 75 bp, synthetic construct
  source 1..75: mol_type = other DNA
ggactatatcggttacgacatcctgctgcagtacattcaggagctgatacagcaggcccgggcgatggtggccac

SEQ ID NO: 230433 - DNA, 75 bp, synthetic construct
  source 1..75: mol_type = other DNA
agtgtacctatgacaattacagtactgggaaaaggctttatttccagtaccaccatccccgtcttcaaatacctg

SEQ ID NO: 230434 - DNA, 75 bp, synthetic construct
  source 1..75: mol_type = other DNA
gctggcggcactttcgcatgatttacgcacgccgcttacggtgctgttcggtcaggcagaaatcttaacgctcga

SEQ ID NO: 230435 - DNA, 75 bp, synthetic construct
  source 1..75: mol_type = other DNA
tcgtttacatgttcccgacaggcgcagtgaacgagacgcattgatcgcagcaacggcgctggtacatgggatgac

SEQ ID NO: 230436 - DNA, 75 bp, synthetic construct
  source 1..75: mol_type = other DNA
tcagacatttgcagaaaaatttactgtgaccgaggaattactgcagtctttaaaaaaaaacagcgttatccggag

SEQ ID NO: 230437 - DNA, 75 bp, synthetic construct
  source 1..75: mol_type = other DNA
tatcgactggcaagggctggcatttcgcggtaataatcaacaagtattgttggaacaattagaaaatcaagggat

SEQ ID NO: 230438 - DNA, 75 bp, synthetic construct
  source 1..75: mol_type = other DNA
atctgctggagaacgcggtgaaatacgcaggcgcgcaggccaaaattggtatcgacgcccatgtggctggcgatc

SEQ ID NO: 230439 - DNA, 75 bp, synthetic construct
  source 1..75: mol_type = other DNA
accatcgcaagcgtatgtttatcgctatttatttcatatataatgaagttttttttatccagactattacatgcg

SEQ ID NO: 230440 - DNA, 75 bp, synthetic construct
  source 1..75: mol_type = other DNA
taatgaaaccttagactgtttaaactatgcattaatatgtttccagtggtatctatctaagttaggtagtcaacc

SEQ ID NO: 230441 - DNA, 75 bp, synthetic construct
  source 1..75: mol_type = other DNA
caggcgcgggtagcccgttaccgcgaacaacgcacacggcacttatatgaaatgtccaaagctctggctgtgggc

SEQ ID NO: 230442 - DNA, 75 bp, synthetic construct
  source 1..75: mol_type = other DNA
gaaccttactgctggcgtgcgttatcaggcgcgggtagcccgttaccgcgaacaacgcacacggcacttatatga

SEQ ID NO: 230443 - DNA, 75 bp, synthetic construct
  source 1..75: mol_type = other DNA
gaacagaccattttcgataagtttgcccggggaaataaagagtcggcggtgccgggagtcgggcttgggctggca

SEQ ID NO: 230444 - DNA, 75 bp, synthetic construct
  source 1..75: mol_type = other DNA
acgctgtttgaaccaggtgaaatggttcgtgttaatgatggtccgttcgctgacttcaacggtgtcgttgaagag

SEQ ID NO: 230445 - DNA, 75 bp, synthetic construct
  source 1..75: mol_type = other DNA
ttgcacaaggcgtgagatggaatacaatttcgcgcctttgtttttatgggccttgcccgtaaacgatttttatat

SEQ ID NO: 230446 - DNA, 75 bp, synthetic construct
  source 1..75: mol_type = other DNA
aagtgtctgtttctatcttcggtcgtgcgaccccggtagagctggacttcagccaggttgaaaagcctaacccag

SEQ ID NO: 230447 - DNA, 75 bp, synthetic construct
  source 1..75: mol_type = other DNA
ttgggagggcgcacttaacgaactgttatcctttgattttgtgattgaaagaggggcattactcataaaggctgg

SEQ ID NO: 230448 - DNA, 75 bp, synthetic construct
  source 1..75: mol_type = other DNA
aaggcatttaggtggcacggatattcaagcgggaaatcaatcctttggtggaagttcggctagagaggtagcccg

SEQ ID NO: 230449 - DNA, 75 bp, synthetic construct
  source 1..75: mol_type = other DNA
ttatgcggagtacatggagttgggtaagtatcgtctcggctatctctctcgcatgaagagcgtcaccaacccgcc

SEQ ID NO: 230450 - DNA, 75 bp, synthetic construct
  source 1..75: mol_type = other DNA
ccgagtgcatcgtcacggatatgaactatgacgataccgttcgcctgaccatgcaacacgcgcagcagcacggct

SEQ ID NO: 230451 - DNA, 75 bp, synthetic construct
  source 1..75: mol_type = other DNA
ctgccgcgctactgctggcctgtggcgcgaccgtttccccggcaatggcgggcggcaaaatcgtcaacctgacgc

SEQ ID NO: 230452 - DNA, 75 bp, synthetic construct
  source 1..75: mol_type = other DNA
agtgccggtgaaacagagtggtacaaccttatcggcagcggaatttaacgccagtgccacaattgtggtggatta

SEQ ID NO: 230453 - DNA, 75 bp, synthetic construct
  source 1..75: mol_type = other DNA
aataacatcgtatgagattgcggattacatgatccgcactaagtctcttctatcagcgaaagaactcgcagcaat

SEQ ID NO: 230454 - DNA, 75 bp, synthetic construct
  source 1..75: mol_type = other DNA
tgatgaaaaactccagaacgaactctatatgacgcaggacgaaaaggaacgccgggagcaccagccttgggtaat

SEQ ID NO: 230455 - DNA, 75 bp, synthetic construct
  source 1..75: mol_type = other DNA
tacatgatccgcactaaatctcttctatcagcgaaagaactcgcagcaatccttgaaaaggaatacccgcatctg

SEQ ID NO: 230456 - DNA, 75 bp, synthetic construct
  source 1..75: mol_type = other DNA
tgttacgcgcggacggcaatcttgtctggaacatggcgattaaccgggaaaccaacgaactggatgaagacaaaa

SEQ ID NO: 230457 - DNA, 75 bp, synthetic construct
  source 1..75: mol_type = other DNA
aaagcgcaaatcggtaaagggatgtgggcaatgccggatctgatggcagacatgtacagccagaagggcgatcag

SEQ ID NO: 230458 - DNA, 75 bp, synthetic construct
  source 1..75: mol_type = other DNA
atgagatgcattcggtgatggaagcgggcccgatgctgcgtaaaaaccagatgaaatcgacgccgtggatcaaag

SEQ ID NO: 230459 - DNA, 75 bp, synthetic construct
  source 1..75: mol_type = other DNA
ccaacaagagctggataacaacgtgcaggggattctggggtacgtggtgcgctgggtggagcaggggattggttg

SEQ ID NO: 230460 - DNA, 75 bp, synthetic construct
  source 1..75: mol_type = other DNA
tgccagcgatttaatcttcctcggtgtgaaacagccaaacggttataccgaaccgttattacacgcctggcgttt

SEQ ID NO: 230461 - DNA, 75 bp, synthetic construct
  source 1..75: mol_type = other DNA
caggggattctggggtacgtggtgcgttgggtggagcaggggattggttgttcaaaagtgccggatattcacaac

SEQ ID NO: 230462 - DNA, 75 bp, synthetic construct
  source 1..75: mol_type = other DNA
gggcaatgccggatctgatggcagacatgtacagccagaagggcgatcagttacgtgccggggcgaacacggcct

SEQ ID NO: 230463 - DNA, 75 bp, synthetic construct
  source 1..75: mol_type = other DNA
ggtgagcatgatacgtccggaaaaagggcatgacttcatgctggaggtactccactgtctgaagcaacgaggagt

SEQ ID NO: 230464 - DNA, 75 bp, synthetic construct
  source 1..75: mol_type = other DNA
ctcctaatataggcggacaggaactgcaggctattgcccagatgtgtgccatacggcggctggggcatcaggtga

SEQ ID NO: 230465 - DNA, 75 bp, synthetic construct
  source 1..75: mol_type = other DNA
tccggaacagcctgcatcctccttctgtcctggccctccggcggctgatagtgacattcaggccggaaatggtgg

SEQ ID NO: 230466 - DNA, 75 bp, synthetic construct
  source 1..75: mol_type = other DNA
tgctgtttatccgcaacgtgggtcatttgatgaccattcctgtgatttgggacagcgaaggcaatgaaatcccgg

SEQ ID NO: 230467 - DNA, 75 bp, synthetic construct
  source 1..75: mol_type = other DNA
aaagataaagcggcctataaatctttcctgcgtgaactgggctacctggtgccgcaaccggagcgcgtgacggtg

SEQ ID NO: 230468 - DNA, 75 bp, synthetic construct
  source 1..75: mol_type = other DNA
atgcaggcacataaagataaaaaaatcgtcatgtactgcaccggcggcattcgttgtgaaaaagccagtgcctgg

SEQ ID NO: 230469 - DNA, 75 bp, synthetic construct
  source 1..75: mol_type = other DNA
acgaaaaaaaaaggctaccttcggcttgccctgacaaaatagccctcttcccacgaagagggccgctaaccttaa

SEQ ID NO: 230470 - DNA, 75 bp, synthetic construct
  source 1..75: mol_type = other DNA
tggcggtcatgagcacccatattcagcgatggctaacgagttcgccgcccagcttcgcaaaggaggcggccagtg

SEQ ID NO: 230471 - DNA, 75 bp, synthetic construct
  source 1..75: mol_type = other DNA
cggcaaactgacattaccgcgcgttgaacaggcggtgaatgatgccgcgcatttcaccccttttcattgggttga

SEQ ID NO: 230472 - DNA, 75 bp, synthetic construct
  source 1..75: mol_type = other DNA
cagactttagtcctagtaaaagattttttgtaagtatgctaactcgagatatcgacttaaacgatgccatacttg

SEQ ID NO: 230473 - DNA, 75 bp, synthetic construct
  source 1..75: mol_type = other DNA
tccgttattcagctccctgatgaagggatataacgcggttctgagtggcaacattacgggtgagcagagtacggt

SEQ ID NO: 230474 - DNA, 75 bp, synthetic construct
  source 1..75: mol_type = other DNA
tctcaggctgctcaactaaatattgataatgtatgggctagagattatttagacctcgcacaaaataagggggtg

SEQ ID NO: 230475 - DNA, 75 bp, synthetic construct
  source 1..75: mol_type = other DNA
tctttggtcaagttgatggtctgaactttgcactccagtatcagggtaacaacgagaaaagcggattatttgatc

SEQ ID NO: 230476 - DNA, 75 bp, synthetic construct
  source 1..75: mol_type = other DNA
aatgaaagcagtggtccattcggccaggaaggttctggtaatggtaaaggacgtggcattaccaaagaaaatggc

SEQ ID NO: 230477 - DNA, 75 bp, synthetic construct
  source 1..75: mol_type = other DNA
gtgatacctacgctggcgccgacaatttcatgaatggtcgtgctaacaacgttgctacctatcgtaacaatggtt

SEQ ID NO: 230478 - DNA, 75 bp, synthetic construct
  source 1..75: mol_type = other DNA
gccagacggcaaactgacattaccgcgcgttgaacaggcggtgaatgatgccgcgcatttcctaccccttttcat

SEQ ID NO: 230479 - DNA, 75 bp, synthetic construct
  source 1..75: mol_type = other DNA
gtgtgcaggtaacctgtcagacgccggaacaggcccagctccctcgctgggttgccacgcgagccaaacagctca

SEQ ID NO: 230480 - DNA, 75 bp, synthetic construct
  source 1..75: mol_type = other DNA
ggtaacctgctggcgctggctcaggcactggagcgtttatcgctgctctggccagacggcaaattgacattaccg

SEQ ID NO: 230481 - DNA, 75 bp, synthetic construct
  source 1..75: mol_type = other DNA
ggtttatctgcagcagaggcacttgaacgctatggtgttgagtttaatgggaaaaaacaaataatcggtttccgg

SEQ ID NO: 230482 - DNA, 75 bp, synthetic construct
  source 1..75: mol_type = other DNA
aaagaaacagataatcggttttcgggttggagccggagcaaccggtgttacatcttatggggtgggacaggcata

SEQ ID NO: 230483 - DNA, 75 bp, synthetic construct
  source 1..75: mol_type = other DNA
gataacctgaattcaggatctggaggattgatttttgatgagggacaatattattcaatcaccgggaaagataaa

SEQ ID NO: 230484 - DNA, 75 bp, synthetic construct
  source 1..75: mol_type = other DNA
ttagatattgtacatgcacgtcgtataattctactttaagctttaaagcctatttatataggcaatatcttgtgt

SEQ ID NO: 230485 - DNA, 75 bp, synthetic construct
  source 1..75: mol_type = other DNA
aatgacctataccgacagcagtgcagacagtgatgcgttcagcgggaagacaaaatccgtggggggcggtctgta

SEQ ID NO: 230486 - DNA, 75 bp, synthetic construct
  source 1..75: mol_type = other DNA
tcgaattcaacgctgaaactggggggcgacgttccggtattcattgatatgtatgatggcatcaatatcaccggt

SEQ ID NO: 230487 - DNA, 75 bp, synthetic construct
  source 1..75: mol_type = other DNA
gactgatttttgatgagggacaacattactcaatcaccgggaaagataaaacgtataaaggtgcgggtattgata

SEQ ID NO: 230488 - DNA, 75 bp, synthetic construct
  source 1..75: mol_type = other DNA
tggccgtggaacggtcaaactggggcaggccgatgcgctggataaaaatagtgattacagaggtatttattttac

SEQ ID NO: 230489 - DNA, 75 bp, synthetic construct
  source 1..75: mol_type = other DNA
gacagtgatgcgttcagcgggaagacaaaatccgtggggggcggcctgtatgcttcagcgctgtttaattccggc

SEQ ID NO: 230490 - DNA, 75 bp, synthetic construct
  source 1..75: mol_type = other DNA
gcctgtgcagcacagatggataccaggaatttctggatccgtgattatcttgatcttgcccagaataaaggcgca

SEQ ID NO: 230491 - DNA, 75 bp, synthetic construct
  source 1..75: mol_type = other DNA
catgccggaacacaaaaaaatgccgacagcagcctgattattgacgggaatattgatacacacaatgatatcact

SEQ ID NO: 230492 - DNA, 75 bp, synthetic construct
  source 1..75: mol_type = other DNA
ctgataatacctggatgcccgtactgacatacatgacagaaggctatgatttaaccggtgataacgccacgctga

SEQ ID NO: 230493 - DNA, 75 bp, synthetic construct
  source 1..75: mol_type = other DNA
tggcggcggaacaattgaattcaccgataacctgaactcaggaaccggaggaatgatttttgatgaggggcaaca

SEQ ID NO: 230494 - DNA, 75 bp, synthetic construct
  source 1..75: mol_type = other DNA
tgtacggaaaagtagcgggcctgcactacttctctgatgatgctggcagcgatggcgacaagtcatatgcccgta

SEQ ID NO: 230495 - DNA, 75 bp, synthetic construct
  source 1..75: mol_type = other DNA
gcagaagtttgggcactgtcaacaaaatatgatgccaacaacgtctatgctgctgtgatgtacggtgaatctcac

SEQ ID NO: 230496 - DNA, 75 bp, synthetic construct
  source 1..75: mol_type = other DNA
cgtatataccgcttatcagatcaacctgcttgataagagtgattatgttctcgctcatggactgaacaccgacga

SEQ ID NO: 230497 - DNA, 75 bp, synthetic construct
  source 1..75: mol_type = other DNA
aggaaggttccggtagtggtgatggccgtagcctttccaaagaaaatggtgatggtttcggtatgtcaacatcct

SEQ ID NO: 230498 - DNA, 75 bp, synthetic construct
  source 1..75: mol_type = other DNA
cagtgggaatacaacctgcaagcaaatggcacagaaggcgatggagataactctgctacccgtctggcattcgca

SEQ ID NO: 230499 - DNA, 75 bp, synthetic construct
  source 1..75: mol_type = other DNA
tttcatgaacggtcgtaccaacggtgttgcaacctaccgtaacaatggcttctttggtcaggttgatggcttgaa

SEQ ID NO: 230500 - DNA, 75 bp, synthetic construct
  source 1..75: mol_type = other DNA
tggcgaaattatttttagcttcgaaaattacagcaattgagttttcagagcgaatttgtgttgaacggagaagat

SEQ ID NO: 230501 - DNA, 75 bp, synthetic construct
  source 1..75: mol_type = other DNA
catgggatacaccctgaccagcgccttcggggatgcggcgtctgatgcgaccaccatcggggtctcctcttcttc

SEQ ID NO: 230502 - DNA, 75 bp, synthetic construct
  source 1..75: mol_type = other DNA
atgattgtgatttcccgacatgttgctatccccgatggtgagcttgatatcaccgccattcgtgcgcagggcgcg

SEQ ID NO: 230503 - DNA, 75 bp, synthetic construct
  source 1..75: mol_type = other DNA
aatatgactccgggttctattgatacaggtgttgccgatcgagaaggcaatacaataatgcgtgatcaacttatc

SEQ ID NO: 230504 - DNA, 75 bp, synthetic construct
  source 1..75: mol_type = other DNA
tcaaaatcgaaaatacctttttgagtgaagatcaagtagatcaactggcattgtatgcgccgcaagccacggtta

SEQ ID NO: 230505 - DNA, 75 bp, synthetic construct
  source 1..75: mol_type = other DNA
agcctgattctgatagggctgattatgaattcgatgataatggacttaggattgaagtccaatctatcctggaaa

SEQ ID NO: 230506 - DNA, 75 bp, synthetic construct
  source 1..75: mol_type = other DNA
attcgtgaggcttatggtccggcatcgatttttgctggttcctacggctggcgttcaaacggcgtgctgcataag

SEQ ID NO: 230507 - DNA, 75 bp, synthetic construct
  source 1..75: mol_type = other DNA
gcatccgatgtggctggagccggatgagtggcagggcaatgccgaaccagaacagttgcaggtactttctgctca

SEQ ID NO: 230508 - DNA, 75 bp, synthetic construct
  source 1..75: mol_type = other DNA
ctggcggcaccgatgcagtagataaaatccccgttgcccgtatcgttgaagcattagaaaaccccggtggcgcat

SEQ ID NO: 230509 - DNA, 75 bp, synthetic construct
  source 1..75: mol_type = other DNA
attcgtgatgcttatggaccggcgtcgatttttgctggttcctacggctggcgttcaaacggtgtattgcataaa

SEQ ID NO: 230510 - DNA, 75 bp, synthetic construct
  source 1..75: mol_type = other DNA
aataaagatggtaataaactggatttgtacggaaaagtagcgggcctgcactacttctctgatgatgctagcagc

SEQ ID NO: 230511 - DNA, 75 bp, synthetic construct
  source 1..75: mol_type = other DNA
gtctttcttatcattttgccaatggtggtaaccccacgcggcgttctgcggtgctctcttccatgcagggtagct

SEQ ID NO: 230512 - DNA, 75 bp, synthetic construct
  source 1..75: mol_type = other DNA
gcgagagtgacggaatagcgaaaaccgccgaatgggcggcagagatttgtggtgttggcgcagcgaaaatccgcg

SEQ ID NO: 230513 - DNA, 75 bp, synthetic construct
  source 1..75: mol_type = other DNA
ggcacacccggcggcggttttggtctttcttaccattttgccaatggtggtaaccccacgcgccgcgctgcggtg

SEQ ID NO: 230514 - DNA, 75 bp, synthetic construct
  source 1..75: mol_type = other DNA
ccgttcttactgccgcccactgggggcccatgctggttgaaaccgacggtgaaacagtcttcagctcgcgtggtg

SEQ ID NO: 230515 - DNA, 75 bp, synthetic construct
  source 1..75: mol_type = other DNA
ttggccaactcatcctcacgttattctgttcttactgccgctcactgggggcccatgctggttgaaaccgacggc

SEQ ID NO: 230516 - DNA, 75 bp, synthetic construct
  source 1..75: mol_type = other DNA
ctggggatcgcccatacgctggtggaaaatggttggcacgacgaagcgtttctgacgcgttgcaccacaggttat

SEQ ID NO: 230517 - DNA, 75 bp, synthetic construct
  source 1..75: mol_type = other DNA
agctggcggctattttccaccaaaataccaccatgctgatggctggctggggaatgcagcgccaacagtttggtg

SEQ ID NO: 230518 - DNA, 75 bp, synthetic construct
  source 1..75: mol_type = other DNA
ttccaatggtgcgcaaaggctttcttgcgtcaccggaaaacccgcaaggcattcgtgggcaggatgaatttgttc

SEQ ID NO: 230519 - DNA, 75 bp, synthetic construct
  source 1..75: mol_type = other DNA
tcgccgtaatggcgcatctcttggtgagatgatcaaagaagagatggggccagtaccggggactatcgcgctgtt

SEQ ID NO: 230520 - DNA, 75 bp, synthetic construct
  source 1..75: mol_type = other DNA
atgctctcagtcgtggcgcagccgggtagccgggcaatcagtcagatgttgcgccagagtggcgttgatgcaggc

SEQ ID NO: 230521 - DNA, 75 bp, synthetic construct
  source 1..75: mol_type = other DNA
gtggacggtgtgacggcttattacggacgtgacagtggtttccggatggacagtgaggcgcgtgagtaccgttct

SEQ ID NO: 230522 - DNA, 75 bp, synthetic construct
  source 1..75: mol_type = other DNA
agactatcacttatttaagtgatactggttgtctggagattcagggggccagtctactgccagacatcaatgtat

SEQ ID NO: 230523 - DNA, 75 bp, synthetic construct
  source 1..75: mol_type = other DNA
atgtcaattgagcatattttaatcgggaagcatcatggtggttctgatgactggcgtacaccgtatcgtttattt

SEQ ID NO: 230524 - DNA, 75 bp, synthetic construct
  source 1..75: mol_type = other DNA
accgatgatataagccgtcagtcatgggatggtgaacgggtattctgtaacccaccatacagcgacattccgtcg

SEQ ID NO: 230525 - DNA, 75 bp, synthetic construct
  source 1..75: mol_type = other DNA
tttcgatggatggtgctgcaactaagcatgacacgctgttaccacggttcaccgatgatattcacaatcaatcgt

SEQ ID NO: 230526 - DNA, 75 bp, synthetic construct
  source 1..75: mol_type = other DNA
caccctgaccaaccagattaaagccctgacgcaaaaaaacaacgcacagttggtcgtgttagtggttgaaacaac

SEQ ID NO: 230527 - DNA, 75 bp, synthetic construct
  source 1..75: mol_type = other DNA
gacgggcaatgtcggcatcagcggcggaaatagtggcgcgcgtgaatcgacctataccattaccatagagcgcct

SEQ ID NO: 230528 - DNA, 75 bp, synthetic construct
  source 1..75: mol_type = other DNA
cgcagaaacgtgggattgccaacggcgatatggtgcgggtgtttaaccatcgtggcgaagttcggctaccagcca

SEQ ID NO: 230529 - DNA, 75 bp, synthetic construct
  source 1..75: mol_type = other DNA
tacagatgcacagtccggacaaattattcgcaacagtattattccagcatttaaaaatggcgaccttgctggcgg

SEQ ID NO: 230530 - DNA, 75 bp, synthetic construct
  source 1..75: mol_type = other DNA
tcttcattcgacaatgacaatttccgcggtggtggcggttcatctggtggcggtggcgcttccgggcgctggtaa

SEQ ID NO: 230531 - DNA, 75 bp, synthetic construct
  source 1..75: mol_type = other DNA
cggcagaaaagtgcgtgattcaatgcgtaaagccaaccagccatcacgtcataccagaagcaattctaactacag

SEQ ID NO: 230532 - DNA, 75 bp, synthetic construct
  source 1..75: mol_type = other DNA
cagcgttttgctggcgatgattgggacgtttggcaatgtgtgctgggcgctggcggggcatctgtttcagcgatt

SEQ ID NO: 230533 - DNA, 75 bp, synthetic construct
  source 1..75: mol_type = other DNA
tggtggtgattttcatcctcggtcagcttctcaaacgtactctgggtgggcagaccggcgatacgctgggagcgg

SEQ ID NO: 230534 - DNA, 75 bp, synthetic construct
  source 1..75: mol_type = other DNA
ctggtattaagcgagttggctctgcgtggcgaaccgatccttgcatcgctggcggcagcatgtgcggtcagccgc

SEQ ID NO: 230535 - DNA, 75 bp, synthetic construct
  source 1..75: mol_type = other DNA
tggttttaatatttttgtgattcctccggagtatcgggttcagctcgatcgggaaaataaaatctatcatatcag

SEQ ID NO: 230536 - DNA, 75 bp, synthetic construct
  source 1..75: mol_type = other DNA
gctacttaaacgtactctgggagggcaaactggcgatacgttaggggcggctattgaactgggggaactggtttt

SEQ ID NO: 230537 - DNA, 75 bp, synthetic construct
  source 1..75: mol_type = other DNA
gatttttgttgtactggcaaagattctggtgttaagcgaattggctctgcgtggcgaaccgatccttgcatcgct

SEQ ID NO: 230538 - DNA, 75 bp, synthetic construct
  source 1..75: mol_type = other DNA
gtcttcatggtgctgcaggcatggtgtggcgcaccactggcggcactgtttagcgtacttgtgctggcgctgatg

SEQ ID NO: 230539 - DNA, 75 bp, synthetic construct
  source 1..75: mol_type = other DNA
aagattaccaactgtctgttggctccctctgccaatgaacttggcgaaccacaggaagaacaaagctgcatccgg

SEQ ID NO: 230540 - DNA, 75 bp, synthetic construct
  source 1..75: mol_type = other DNA
acaaacccgccgggcatacgcttcagaacccggtggacggtgtgacggcttattacggacgtgacagtggtttcc

SEQ ID NO: 230541 - DNA, 75 bp, synthetic construct
  source 1..75: mol_type = other DNA
gggatggtgaacgggtattctgtaacccaccatacagcgacactaaaacattcctcgtaaaagcgtctgaagcag

SEQ ID NO: 230542 - DNA, 75 bp, synthetic construct
  source 1..75: mol_type = other DNA
tatcacatcgtttttcggcgcatttgttatcacccggtggttatgccggaaaattatcagcctttttgataaaag

SEQ ID NO: 230543 - DNA, 75 bp, synthetic construct
  source 1..75: mol_type = other DNA
ggctctcaatttcggggctattcagcgtggcgtgaaacttgataatgcgcaaaccagaattgtgaataacacagt

SEQ ID NO: 230544 - DNA, 75 bp, synthetic construct
  source 1..75: mol_type = other DNA
actgacgcaggattccgcagcgattgtatcaccgggttctgatgcggtaacgctgacagacacgatgaacaacat

SEQ ID NO: 230545 - DNA, 75 bp, synthetic construct
  source 1..75: mol_type = other DNA
ggcaaaacgacttgccccacaattgatgaaccatccaccggaatcttcacgttcagaaagagaaaaagataatga

SEQ ID NO: 230546 - DNA, 75 bp, synthetic construct
  source 1..75: mol_type = other DNA
cggggcttgccgaatacggcccctttttacctcacgggctgcagttggagctgccggacattccgaccaccacca

SEQ ID NO: 230547 - DNA, 75 bp, synthetic construct
  source 1..75: mol_type = other DNA
tttacctcacgggctgcaggtggagctgccggacattccgaccaccaccaccaccgtgcagaccgtccagctatg

SEQ ID NO: 230548 - DNA, 75 bp, synthetic construct
  source 1..75: mol_type = other DNA
atgaaagtctacgcgatgcagggcgacaccctcgacgcgctttgcgcccggtattacgggcgcactgagggcgtg

SEQ ID NO: 230549 - DNA, 75 bp, synthetic construct
  source 1..75: mol_type = other DNA
gtattacgggcgcactgagggcgtggtcgaggcggtgctgcaggctaatcccggtctgtctgagctgggcgtcat

SEQ ID NO: 230550 - DNA, 75 bp, synthetic construct
  source 1..75: mol_type = other DNA
tgcaaaacggcttgccccgcaactgatgaatcgtccaccagaatcttcatgttcagaaagagaaaaagataatga

SEQ ID NO: 230551 - DNA, 75 bp, synthetic construct
  source 1..75: mol_type = other DNA
tgagccagcgtgcggcgggcctgcgtgccaaagtcgacctggacaaagggtactggtggtcatcctccaatcagg

SEQ ID NO: 230552 - DNA, 75 bp, synthetic construct
  source 1..75: mol_type = other DNA
actggtactgaaaccggacagcgacggtcagccttatgttgaaggtcaggactactcgcttgatgcacagaccgg

SEQ ID NO: 230553 - DNA, 75 bp, synthetic construct
  source 1..75: mol_type = other DNA
ccgccccaatgggagacgtcaatacgctggtgcagtgcctgtctgagaaagatgcagcggcgtttggcagccagc

SEQ ID NO: 230554 - DNA, 75 bp, synthetic construct
  source 1..75: mol_type = other DNA
acacgctcgacgccatttgtgtccggtattacgggcgcactgagggcgtggtcgagaccgtgctcgccgcaaatc

SEQ ID NO: 230555 - DNA, 75 bp, synthetic construct
  source 1..75: mol_type = other DNA
ccgccccgatgggggacgtcaatacgctggtgcagtgcctgtctgagaaagatgcagcggcgtttggcagccagc

SEQ ID NO: 230556 - DNA, 75 bp, synthetic construct
  source 1..75: mol_type = other DNA
atattagtaggtgaaagcaaaatcactccctgggccattccatctggctcaatttatcctcccatgaaaatgtaa

SEQ ID NO: 230557 - DNA, 75 bp, synthetic construct
  source 1..75: mol_type = other DNA
gtaccatgcgatttttgccgaaaggatgattcaacaccctgcggtacagcgtatttgcaatgccaattactctgc

SEQ ID NO: 230558 - DNA, 75 bp, synthetic construct
  source 1..75: mol_type = other DNA
cagctcaggagcaagctgcacaatacaacccgtcagataccccgccagcgtcgcctgaaggcgtggcttttacta

SEQ ID NO: 230559 - DNA, 75 bp, synthetic construct
  source 1..75: mol_type = other DNA
tcaccattgatccccctaccgtagatgacagaaaagcttccattgccttcaatgcaaccagctcagaagaaatta

SEQ ID NO: 230560 - DNA, 75 bp, synthetic construct
  source 1..75: mol_type = other DNA
aaaagcaattcccaacagggcttcaaccggaaaaatgaacggtttttcgtttgagtacgccaacatttcattcaa

SEQ ID NO: 230561 - DNA, 75 bp, synthetic construct
  source 1..75: mol_type = other DNA
cgtctgcgtttctccggccctaagacatcaatcatctgttctccaatgactagtctaaaaactagtattaagact

SEQ ID NO: 230562 - DNA, 75 bp, synthetic construct
  source 1..75: mol_type = other DNA
gaaattgcccgtacctgggaactggaaaaagatgaagtgataagcccactgccggtttatgcctcaacctttgaa

SEQ ID NO: 230563 - DNA, 75 bp, synthetic construct
  source 1..75: mol_type = other DNA
cgatcatggcccgcaaatgacggcaatccgcgacggcgtccggggcaaagataaactggatgtgcccattaagtt

SEQ ID NO: 230564 - DNA, 75 bp, synthetic construct
  source 1..75: mol_type = other DNA
agaaaatatggaaagagcatcctccacaaggttcctacaaacttctcagaagtctattcaacacatcatctgaaa

SEQ ID NO: 230565 - DNA, 75 bp, synthetic construct
  source 1..75: mol_type = other DNA
gagaaatagcaaaaaaatatatcaaagaaatcaacaataaaaatattattgttccaagagtattaaattttgatg

SEQ ID NO: 230566 - DNA, 75 bp, synthetic construct
  source 1..75: mol_type = other DNA
gaggtaagcaatttacaggagtagttgtctatgcacttgaaccggcttcacaccataaaactgatcccagggtta

SEQ ID NO: 230567 - DNA, 75 bp, synthetic construct
  source 1..75: mol_type = other DNA
caacaatatttgaacaacaactgtatacagaccttgattcattatcctattccaccgcataaacaaaaagcatac

SEQ ID NO: 230568 - DNA, 75 bp, synthetic construct
  source 1..75: mol_type = other DNA
tgccagtgccagtgccagtgccagtgccagtgccatcatgcgagtctgaagagcaggctgcaaaccgggaaacga

SEQ ID NO: 230569 - DNA, 75 bp, synthetic construct
  source 1..75: mol_type = other DNA
ctgaaggtgtggcttttattactcaaccaaattgttgtacttctaaagcccaggggactgtcactgctgcatgcc

SEQ ID NO: 230570 - DNA, 75 bp, synthetic construct
  source 1..75: mol_type = other DNA
ttatggtgctggcggcggcgctactttctacgtttctgaccaacgatgttgcgctgttcattgttgttccgctga

SEQ ID NO: 230571 - DNA, 75 bp, synthetic construct
  source 1..75: mol_type = other DNA
ggttaacggcaatcggtttatcgcaggtgatcagtaacgtgccgagtaccatattgttgctgaactatgtgccgc

SEQ ID NO: 230572 - DNA, 75 bp, synthetic construct
  source 1..75: mol_type = other DNA
gtacggcacctggttgtggaaggcgctgcatcttgactttggtatctcattcgccagccaacgcccggtgctgga

SEQ ID NO: 230573 - DNA, 75 bp, synthetic construct
  source 1..75: mol_type = other DNA
cccggatcgctggcaaatttgattgcgttacggatggcgaacgatcgccgcatctggtggcgtttccatctctat

SEQ ID NO: 230574 - DNA, 75 bp, synthetic construct
  source 1..75: mol_type = other DNA
tggcgtgatgatgctgacactattgctgctgtgctggtgttgtttccctggaagggcgttgcagtatcatactgg

SEQ ID NO: 230575 - DNA, 75 bp, synthetic construct
  source 1..75: mol_type = other DNA
taaatacagtggctgggtggaagcatctgataacgatgaacactatgcccgtgtaaaaagaatcacttatcgcag

SEQ ID NO: 230576 - DNA, 75 bp, synthetic construct
  source 1..75: mol_type = other DNA
tctggcggactatggcgccgctgactcgcgatgccatcagcgcaatgtgggatgagcttgaggaagaatcagtgg

SEQ ID NO: 230577 - DNA, 75 bp, synthetic construct
  source 1..75: mol_type = other DNA
ctagctgaagaaggaggccgaaaagtcagtcaactcgactggaaattcaataacgctgcaattattaaaggtgca

SEQ ID NO: 230578 - DNA, 75 bp, synthetic construct
  source 1..75: mol_type = other DNA
tcgccgtccgtttcatcgcgtttctcggcgtgtcgatgcctaacttctggctggcgtttttactggtgatggcgt

SEQ ID NO: 230579 - DNA, 75 bp, synthetic construct
  source 1..75: mol_type = other DNA
atgccccaggtatcggtcggggctgctggctggactactctcggtcagaaagggggtaatatgattgaccgtgac

SEQ ID NO: 230580 - DNA, 75 bp, synthetic construct
  source 1..75: mol_type = other DNA
tcgtctgataacgatgagcattatgacccgagtaaaagaatcacatatcgagaaaaagtcaaagaccagaattac

SEQ ID NO: 230581 - DNA, 75 bp, synthetic construct
  source 1..75: mol_type = other DNA
tccatttactaacccaacttgatgcgccgcgcgataaacgtacctatttccgtgagataaattacatcgccgcgg

SEQ ID NO: 230582 - DNA, 75 bp, synthetic construct
  source 1..75: mol_type = other DNA
atctttgccattttcgatatacagaacaatacgtcaattcaaaagaacaaaaaataattctcaggtaggggttaa

SEQ ID NO: 230583 - DNA, 75 bp, synthetic construct
  source 1..75: mol_type = other DNA
ggaaggtctgtatctggttgcggtggattaccctgaccgatttgatcttccaaagccgccaatgggcccgctatt

SEQ ID NO: 230584 - DNA, 75 bp, synthetic construct
  source 1..75: mol_type = other DNA
tccggatttatcgccagcgtgctgggcggacataatgcgattacctccgaaaccgagtggcccacggtgagctgg

SEQ ID NO: 230585 - DNA, 75 bp, synthetic construct
  source 1..75: mol_type = other DNA
ccgacggtttctacgactactttatctactgatgcaaaaacagcaggccttacaccatttactattcaactaacg

SEQ ID NO: 230586 - DNA, 75 bp, synthetic construct
  source 1..75: mol_type = other DNA
tcagattcagctactgaatgcagatggggttaaagttattaaacttggtcaggctgctgcagctcagaatgtgga

SEQ ID NO: 230587 - DNA, 75 bp, synthetic construct
  source 1..75: mol_type = other DNA
gcagaggattgcatacaacaacttcaacataagcttaagttgaaatttggtctttcattttcaaatacgattaat

SEQ ID NO: 230588 - DNA, 75 bp, synthetic construct
  source 1..75: mol_type = other DNA
gatgatgctgtaccgtgagccccatgtgtcactgccgttgctaccgttctcttttcgtgactacgtgcaggcgct

SEQ ID NO: 230589 - DNA, 75 bp, synthetic construct
  source 1..75: mol_type = other DNA
gatacatcactggctgcacttcattttattatccagatcattcagggctggggtgatgaccacctgcaccagttt

SEQ ID NO: 230590 - DNA, 75 bp, synthetic construct
  source 1..75: mol_type = other DNA
gaaaggcgctgcaataccatacggggtgcaaacaccggagtggaaaccgcggctggtgtggagttgtctggggct

SEQ ID NO: 230591 - DNA, 75 bp, synthetic construct
  source 1..75: mol_type = other DNA
tttttcccgcattttcaacgtcgaagatcgtggtcaggcgctgattgccgatttcaaaaaacgtgaagccgacct

SEQ ID NO: 230592 - DNA, 75 bp, synthetic construct
  source 1..75: mol_type = other DNA
tagggcaagaggcggcaagtgctgcagcattgctgcgcgatttctccacctatgagaaaccgaaggaaaccgctg

SEQ ID NO: 230593 - DNA, 75 bp, synthetic construct
  source 1..75: mol_type = other DNA
gcctctgctgtcgacatttccatcgctgcacccgcgcccggcacaaccctctacacatggttcccggttcagcat

SEQ ID NO: 230594 - DNA, 75 bp, synthetic construct
  source 1..75: mol_type = other DNA
tgaagccctggcaggcgagctggatggtgtcgttatcaccgttccggcgtactttgacgatgcccagcgtcaggg

SEQ ID NO: 230595 - DNA, 75 bp, synthetic construct
  source 1..75: mol_type = other DNA
tggtgggcggttctactcgcgtgccgctggtgcgtgaacgggtaggcgaatttttcggtcgtccaccgctgactt

SEQ ID NO: 230596 - DNA, 75 bp, synthetic construct
  source 1..75: mol_type = other DNA
actataggtcgcacggggagtggtttagcctcaatcgttgtcatttgaaagagctaaaagaaatgcctggtaacg

SEQ ID NO: 230597 - DNA, 75 bp, synthetic construct
  source 1..75: mol_type = other DNA
gtggcgggacgtttgatatttccattctgcgcttaagtcgcggcgtgtttgaagtgctggcgaccggcggtgatt

SEQ ID NO: 230598 - DNA, 75 bp, synthetic construct
  source 1..75: mol_type = other DNA
gatgccgacggtcttttgagcgtgacggcgatggagaaatccaccggcgttgaggcgtctattcaggtcaaacct

SEQ ID NO: 230599 - DNA, 75 bp, synthetic construct
  source 1..75: mol_type = other DNA
ggtgtcgttatcaccgttccggcgtactttgacgatgcccagcgtcagggcaccaaagacgcggcgcgtctggcg

SEQ ID NO: 230600 - DNA, 75 bp, synthetic construct
  source 1..75: mol_type = other DNA
ttacctggactacttactctggtgtcgtgacagaaataaagcagagatagtcaaacgttttgaatttaccttccg

SEQ ID NO: 230601 - DNA, 75 bp, synthetic construct
  source 1..75: mol_type = other DNA
tgtctttcaaaactttctggcagaacaagaaccaaaatcatattttgagattatctacggtaaagaggtacatct

SEQ ID NO: 230602 - DNA, 75 bp, synthetic construct
  source 1..75: mol_type = other DNA
tgacccggcagcggtacaccttttgagttgggcgggggcggcatatattgtctggctggcgtggaaaatcgccac

SEQ ID NO: 230603 - DNA, 75 bp, synthetic construct
  source 1..75: mol_type = other DNA
atttcattaaatccacaaaaaaactgcctgctgtatacagatttaatttccaggtcagccagcgatattaagaaa

SEQ ID NO: 230604 - DNA, 75 bp, synthetic construct
  source 1..75: mol_type = other DNA
atgagcttattgctattcggtgtaatctgattcaacttgcatcggagtttatttcattaaatccacaaaaaaact

SEQ ID NO: 230605 - DNA, 75 bp, synthetic construct
  source 1..75: mol_type = other DNA
ttacggtcagatcattgctggatgatgcatctcgttatcttatccccatgtaccagcgtaactatgcctggggag

SEQ ID NO: 230606 - DNA, 75 bp, synthetic construct
  source 1..75: mol_type = other DNA
ccagtctggcatcgaggatttcatcctgcttttcatcctgagcttgagttcgctgatgaagctgagttgcttcga

SEQ ID NO: 230607 - DNA, 75 bp, synthetic construct
  source 1..75: mol_type = other DNA
cgaaaccattgaaggtagcaaaggtaaagttcagctgctcggctccggttctatcctgcgtcacgtccgtgaagc

SEQ ID NO: 230608 - DNA, 75 bp, synthetic construct
  source 1..75: mol_type = other DNA
ccggtgtgttgcgtacggatcaacaactttctgatcaggcttatgcgcgtatcaaaaaggactttgaggaacggc

SEQ ID NO: 230609 - DNA, 75 bp, synthetic construct
  source 1..75: mol_type = other DNA
gtaaaaataatacccccgtcacaacgcccgggatgcttgcggaagaacttgggttgtcatacgacacctataccg

SEQ ID NO: 230610 - DNA, 75 bp, synthetic construct
  source 1..75: mol_type = other DNA
gcgacctggaagatatgaatccgcgtcccggtggtgatgtctatctcacaccgatgaacatgaccacgaaaccct

SEQ ID NO: 230611 - DNA, 75 bp, synthetic construct
  source 1..75: mol_type = other DNA
tccggtgaccgccgttggcagcgtggcggaagacaaccttcgcgaactgggtcatgtcaccctgcgcttcgatgg

SEQ ID NO: 230612 - DNA, 75 bp, synthetic construct
  source 1..75: mol_type = other DNA
aacatgctgcacccgctggaaactccgcgcgttccgtacattactcaggtgatgaacgatgcgccggctgtggca

SEQ ID NO: 230613 - DNA, 75 bp, synthetic construct
  source 1..75: mol_type = other DNA
catggcggttgttttccgattgaggattttatagatggtttctggcgacctgcacaggagtacggtgatttttaa

SEQ ID NO: 230614 - DNA, 75 bp, synthetic construct
  source 1..75: mol_type = other DNA
tggatcacataaaaaatatgaaaatatatatatagggtataatagtcgtcttgatgaaattcaagcggcaatgtt

SEQ ID NO: 230615 - DNA, 75 bp, synthetic construct
  source 1..75: mol_type = other DNA
agctacaacgcacggatttcgtcagagtacccgcgtgctggcagggatgagtctgggatttttaatcgtcatgtt

SEQ ID NO: 230616 - DNA, 75 bp, synthetic construct
  source 1..75: mol_type = other DNA
actttctgaccaggcttatgcgcgtatcaaaaaggattttgaggaacggcatgtcgggctgggaaactctcatcg

SEQ ID NO: 230617 - DNA, 75 bp, synthetic construct
  source 1..75: mol_type = other DNA
gtgtggaaccgaagctgaacagccagtggcagccggtttatcaggtgacgtttccggatggttctgtggatgtgc

SEQ ID NO: 230618 - DNA, 75 bp, synthetic construct
  source 1..75: mol_type = other DNA
tgaaagctatggaactggccttcgaagaagcgattacaccgtatttacaggcgagcggcgctatcggcaaagcct

SEQ ID NO: 230619 - DNA, 75 bp, synthetic construct
  source 1..75: mol_type = other DNA
aaccaggagatcctcggcatcactggcgttgagcgttcgctgtcggcgatgattgacgatccacaaagcgaggta

SEQ ID NO: 230620 - DNA, 75 bp, synthetic construct
  source 1..75: mol_type = other DNA
aaagcaacagaactggctaggtcctgtcctgatacccagataatttctgtttcagaccgtgaaggtgatatttac

SEQ ID NO: 230621 - DNA, 75 bp, synthetic construct
  source 1..75: mol_type = other DNA
aaagaaccggttgccccgatccctgtcggagatgagcttcgccgtgtcggtaccgcaaaccagacaaaaatctca

SEQ ID NO: 230622 - DNA, 75 bp, synthetic construct
  source 1..75: mol_type = other DNA
tcctcacaaagaaaatatcactgaaagagctcagcagtttaaaagagttttagttttacaggatacaacagaact

SEQ ID NO: 230623 - DNA, 75 bp, synthetic construct
  source 1..75: mol_type = other DNA
ctcggtcattccgattatcctcgcctcgtgggtcagctgctggattgaaaaacgcagcaacgcgatactgccttc

SEQ ID NO: 230624 - DNA, 75 bp, synthetic construct
  source 1..75: mol_type = other DNA
ggcctcggaaaacgacatcctggcgccgatgaccggcagcgtgctggcgctggatcaggtgcctgacagtacctt

SEQ ID NO: 230625 - DNA, 75 bp, synthetic construct
  source 1..75: mol_type = other DNA
cctttatcttcggctgcgttgctggcgccatcggcggcgcgatggttggttttagcgacagccacgtctactctt

SEQ ID NO: 230626 - DNA, 75 bp, synthetic construct
  source 1..75: mol_type = other DNA
gttgctgatttatctcgttttgagaaagggatgacatatctacctggtagttatgaggttgaaatatgggtcaat

SEQ ID NO: 230627 - DNA, 75 bp, synthetic construct
  source 1..75: mol_type = other DNA
aacaccgagaaagagcacctaaggcagttcgcttcctacaggatctgactgaatctattgagcagacattaggaa

SEQ ID NO: 230628 - DNA, 75 bp, synthetic construct
  source 1..75: mol_type = other DNA
tttattcgcgggcgtattggttttgaactgcctgcctggtttatcccgaaagacgaaaagcaggtgccaacaggt

SEQ ID NO: 230629 - DNA, 75 bp, synthetic construct
  source 1..75: mol_type = other DNA
agttcgcgctgagtttaatgcccatgtcggtattcgtggtttatttaatgttcgctatcgtaataaacctgttcc

SEQ ID NO: 230630 - DNA, 75 bp, synthetic construct
  source 1..75: mol_type = other DNA
caaacaggtacggcttttcagattattggttatcgttactcgacggaaggattttattcgttgagtgataccaca

SEQ ID NO: 230631 - DNA, 75 bp, synthetic construct
  source 1..75: mol_type = other DNA
gtggctatattccacctgaagaatgggataatggtatcccggcagttcttattaattatgatttttctggcaata

SEQ ID NO: 230632 - DNA, 75 bp, synthetic construct
  source 1..75: mol_type = other DNA
ttgcgggaacaacatggaggagcaacaatacgatgcctgttgctgttcagccaggagcttttctgccatccgcga

SEQ ID NO: 230633 - DNA, 75 bp, synthetic construct
  source 1..75: mol_type = other DNA
gcattgtgctgacggtacacgacgaggtgatcaccgaagcacctgacacagaagatttcaacgataaagcgcttt

SEQ ID NO: 230634 - DNA, 75 bp, synthetic construct
  source 1..75: mol_type = other DNA
atgtccaatatactatggggtgacctagaaacctattgcgaaatccctattacgaacggtacccatgcgtatgcc

SEQ ID NO: 230635 - DNA, 75 bp, synthetic construct
  source 1..75: mol_type = other DNA
ggtagaccttgaacaaaaacgcctggcaaaacgcacgcaggtgatgaccgacggcgaagtgcaggcagccacgca

SEQ ID NO: 230636 - DNA, 75 bp, synthetic construct
  source 1..75: mol_type = other DNA
tcactggtaactttctgaaaaatacagatgttcttaaatatttcgactataccgttcataacaatgtagataacg

SEQ ID NO: 230637 - DNA, 75 bp, synthetic construct
  source 1..75: mol_type = other DNA
aggttaagaaaatgaacatggacggtgtgcgtcatatccgcgaccgtttcaatgtgccggtgtctgatgcagata

SEQ ID NO: 230638 - DNA, 75 bp, synthetic construct
  source 1..75: mol_type = other DNA
gatctctaccactatcgctttcgttcgtgccctgaacgtaatgctgaagaacaagtcgatcaaagacaggctggt

SEQ ID NO: 230639 - DNA, 75 bp, synthetic construct
  source 1..75: mol_type = other DNA
catgggatgccgcaatggcggacgctaaaccggaagataccgtgctggtgtgtggttcattccacacggtcgcac

SEQ ID NO: 230640 - DNA, 75 bp, synthetic construct
  source 1..75: mol_type = other DNA
tgtgagcgagtcgccacgtgttatttttgatgtcgcgcataatccacatgcggcggaatatctcaccgggcgtat

SEQ ID NO: 230641 - DNA, 75 bp, synthetic construct
  source 1..75: mol_type = other DNA
atacgatgcctgttgctgttcagccaggagcttttctgccatccgcgagccagtgtgacagttgatgaaggatgt

SEQ ID NO: 230642 - DNA, 75 bp, synthetic construct
  source 1..75: mol_type = other DNA
aggcgtcccgcaagacaaagcgaaggacaaagaaggtaaagcgctgatccagctgttctgtaagccacgcccgaa

SEQ ID NO: 230643 - DNA, 75 bp, synthetic construct
  source 1..75: mol_type = other DNA
gtgggataacggtattacagcttttttgctgaattatgacttttctggtaataacgatcgtgttgattactcttc

SEQ ID NO: 230644 - DNA, 75 bp, synthetic construct
  source 1..75: mol_type = other DNA
ccgcttgtcccgcaaccgaatgccgcaacagcgctggcggcactgcgtgccagcgggctggaggtcagtgaaaat

SEQ ID NO: 230645 - DNA, 75 bp, synthetic construct
  source 1..75: mol_type = other DNA
cttgttcacctgcgcaagtcgtatcgcagatgaccaggtgaatatttggaagaaggtggcagccaaagagggcaa

SEQ ID NO: 230646 - DNA, 75 bp, synthetic construct
  source 1..75: mol_type = other DNA
tattccaacgcactcaaagcaaacccgggggacgcagacgccttaaagacggttcagcgtcaatgggtaagtatg

SEQ ID NO: 230647 - DNA, 75 bp, synthetic construct
  source 1..75: mol_type = other DNA
tgttagtggcatcgccgggtgcatttgcagccagctttgactgccaaaaggcttcgacagcaatcgaacataaaa

SEQ ID NO: 230648 - DNA, 75 bp, synthetic construct
  source 1..75: mol_type = other DNA
cgcagggccagcagggctggggtgtgccgatattctggcgcgcgctggcgttcatgttgatgtctttgatcgcca

SEQ ID NO: 230649 - DNA, 75 bp, synthetic construct
  source 1..75: mol_type = other DNA
gagtttgaactgcccgccgatgtgctgattatggcctttggtttccaggcgcatgccatgccgtggttgcagggc

SEQ ID NO: 230650 - DNA, 75 bp, synthetic construct
  source 1..75: mol_type = other DNA
agagtatccgctgacggaagttgaaggtaagcgagtcgtggtattgggcgggggcgatacgactatggattgttt

SEQ ID NO: 230651 - DNA, 75 bp, synthetic construct
  source 1..75: mol_type = other DNA
gttacgttccggagatatttgggtaaaagggtcgcgtcgttacagaaattttgatgattatcttatcccggtcac

SEQ ID NO: 230652 - DNA, 75 bp, synthetic construct
  source 1..75: mol_type = other DNA
acagcagcccggttgcagaaaaaaatattgccacactgaactacgtcatgctggcagcggcgcagacataccggg

SEQ ID NO: 230653 - DNA, 75 bp, synthetic construct
  source 1..75: mol_type = other DNA
ggacggcggcttttcacaggtatccttttcagacagtggtacagccacgcccccggtatttgaaagtgtgtccga

SEQ ID NO: 230654 - DNA, 75 bp, synthetic construct
  source 1..75: mol_type = other DNA
cgggggcggcaaaagccattggtctggtgatcccggaactgagcggcaaactgaaaggtcatgcgcaacgcgtgc

SEQ ID NO: 230655 - DNA, 75 bp, synthetic construct
  source 1..75: mol_type = other DNA
atgtaacacgaggcttgaaagtttgggatttcccatttgatgaaaataagatgcatttttttactataaaaaaag

SEQ ID NO: 230656 - DNA, 75 bp, synthetic construct
  source 1..75: mol_type = other DNA
ctggtcgccagaatatgtattggtatgtaaccttaaagcctattttgtaaataaagctatcaacatggggttagt

SEQ ID NO: 230657 - DNA, 75 bp, synthetic construct
  source 1..75: mol_type = other DNA
cgcgcaaagaggtggttaatgcgcgcgaggaaggtgtcgagtttcagttcaatgttcaaccgcaatatatcgctt

SEQ ID NO: 230658 - DNA, 75 bp, synthetic construct
  source 1..75: mol_type = other DNA
ctcgtgaaaacggagggctgactctgcttaatccgacgccgtattatctgacagtgactgacttaaaggccggaa

SEQ ID NO: 230659 - DNA, 75 bp, synthetic construct
  source 1..75: mol_type = other DNA
atgtcgcaggctgctctgaacacgcgaaatagcgaagaagaaatctcttctcgccgcaataatggaacgcgtctg

SEQ ID NO: 230660 - DNA, 75 bp, synthetic construct
  source 1..75: mol_type = other DNA
tattgatgccacaaacggacagatgccggaggacagggaaagtttgttctgggtgaatgtcaaggccatcccggc

SEQ ID NO: 230661 - DNA, 75 bp, synthetic construct
  source 1..75: mol_type = other DNA
gccctattttcacgctaatcgacactcgtcactggtacgttatcgccaacttccgcgaaaccgatctgaaaaata

SEQ ID NO: 230662 - DNA, 75 bp, synthetic construct
  source 1..75: mol_type = other DNA
agtgatggacgtcaccggctggctggggggctataacttccagtgggcgtggtcgagtgcgtgggcttgtgcgca

SEQ ID NO: 230663 - DNA, 75 bp, synthetic construct
  source 1..75: mol_type = other DNA
atgacgatactctggatagcaacgacactattgtttctgtggcgtcatgcaccacgaactgtctcgcgccaatgg

SEQ ID NO: 230664 - DNA, 75 bp, synthetic construct
  source 1..75: mol_type = other DNA
ggcagcctgagttcacagataaaacactctccaggaaacccggggcggttcactgtcatgcttgtgaaattgcct

SEQ ID NO: 230665 - DNA, 75 bp, synthetic construct
  source 1..75: mol_type = other DNA
gcgcagttccggcacgcaagcctgtattgaagtctgcccaacacaggcgttacggctgatggacgataaagggtt

SEQ ID NO: 230666 - DNA, 75 bp, synthetic construct
  source 1..75: mol_type = other DNA
gtatttaccctcccagacgcatctgagaaaagtctttgctggtggtgatgctgttcatggcgcggatctggtcgt

SEQ ID NO: 230667 - DNA, 75 bp, synthetic construct
  source 1..75: mol_type = other DNA
cgcagggccagcggggctggggtgtgctgatattctggcacgcgcgggcgttcacgttgatgtctttgatcgtca

SEQ ID NO: 230668 - DNA, 75 bp, synthetic construct
  source 1..75: mol_type = other DNA
gcgtatccacgttgtagggaaaggccaggctgcgaatccggtggcctgccatcactgcaacaatgccccttgcgt

SEQ ID NO: 230669 - DNA, 75 bp, synthetic construct
  source 1..75: mol_type = other DNA
agctcatgggattgccggagtctgaagagtatccgctgacggatgtggaaggtaagcgagtcgtggtattgggcg

SEQ ID NO: 230670 - DNA, 75 bp, synthetic construct
  source 1..75: mol_type = other DNA
atgctgccgaaacgcacctggtggaatctgaccaaaagcgtgctggccttccactttttacgccacttcccggcg

SEQ ID NO: 230671 - DNA, 75 bp, synthetic construct
  source 1..75: mol_type = other DNA
tcgttattacgatcctcgtcctcgcctgttcggtatgcgcacgaatgtgttccgccggatgcatcgcaaaattgt

SEQ ID NO: 230672 - DNA, 75 bp, synthetic construct
  source 1..75: mol_type = other DNA
tggcagggcagacgatatcatcggactgtgacccgccccggggggggatcatccggcgaaaaaaacgatcgcccc

SEQ ID NO: 230673 - DNA, 75 bp, synthetic construct
  source 1..75: mol_type = other DNA
ccactttttacgccacttcccggcgctggttggctggcttccggcacacacaccacgtctggcgcaggttgaccc

SEQ ID NO: 230674 - DNA, 75 bp, synthetic construct
  source 1..75: mol_type = other DNA
cgccacgtctggcgcaagttgatccgcccgcgcagccggcaatggaaactcaggatcgggtagaaactgaaaata

SEQ ID NO: 230675 - DNA, 75 bp, synthetic construct
  source 1..75: mol_type = other DNA
ataatctgaacagcattatcgccgcagattgtcagcaggtcgatgagaccatgctgccaaaacgcacctggtgga

SEQ ID NO: 230676 - DNA, 75 bp, synthetic construct
  source 1..75: mol_type = other DNA
taatctactcaaagcgcaagggtatgacacggccatgatgggtaagctgcatctgaatgcaggcggcgatcgtac

SEQ ID NO: 230677 - DNA, 75 bp, synthetic construct
  source 1..75: mol_type = other DNA
aatctctggacgctctgtaccgaatgccatcgacaaaagtctgctcgtgaagcggcgggtggtatgccggacccg

SEQ ID NO: 230678 - DNA, 75 bp, synthetic construct
  source 1..75: mol_type = other DNA
gtgaatattctgaagggtgaacagcgtcgtgtcagtggcagtgcacgtgtttccctcaagcgtcatatctggctc

SEQ ID NO: 230679 - DNA, 75 bp, synthetic construct
  source 1..75: mol_type = other DNA
caggggatcaccgcgacgctgccagtagtggtggtcgcggaacactttggcgcggatgatgagcgactggcgcgt

SEQ ID NO: 230680 - DNA, 75 bp, synthetic construct
  source 1..75: mol_type = other DNA
cgacgctcgccgagatcctgaagttcgtcaatgaagtcccgtttgaggcgatccgctttattctcgattctgcga

SEQ ID NO: 230681 - DNA, 75 bp, synthetic construct
  source 1..75: mol_type = other DNA
gctggaagtgctgaaagacgcaactgcgcaggcaattgccgatgccaaagcactgctggcggcggggaaagtctc

SEQ ID NO: 230682 - DNA, 75 bp, synthetic construct
  source 1..75: mol_type = other DNA
aagaaaatcgccagccgggagaagcgcaggtattgctggtctggcgcgataacgaagaacaccgcgatgatatag

SEQ ID NO: 230683 - DNA, 75 bp, synthetic construct
  source 1..75: mol_type = other DNA
atggcgaaagtcggtctgcgggaacagaaccgactttcaggtgcaaatcgtaacacactcattgcgggaggaatt

SEQ ID NO: 230684 - DNA, 75 bp, synthetic construct
  source 1..75: mol_type = other DNA
cagagcgggcggaatatcggcatcaataatgtggtcagtgaatggtcaacattacccgaatcaggtaagaaaaat

SEQ ID NO: 230685 - DNA, 75 bp, synthetic construct
  source 1..75: mol_type = other DNA
gtgacagtgaactcgatcaccgcattgcacttcagtttggtggtggtaatgaggaaatgaatctctggacgctct

SEQ ID NO: 230686 - DNA, 75 bp, synthetic construct
  source 1..75: mol_type = other DNA
actacgtacaaaaatacatcttacaatgttaatgccgcagatggcgttataacccgtaccggaactgaaatcccg

SEQ ID NO: 230687 - DNA, 75 bp, synthetic construct
  source 1..75: mol_type = other DNA
gatgccgcgcagtttggctcgactcaggctaactttactatcccgcaggcgctgaaggcgatttatgaccacggc

SEQ ID NO: 230688 - DNA, 75 bp, synthetic construct
  source 1..75: mol_type = other DNA
atggcaaacactgctgagatattcaattttcctgtgccggatgtggcacaaaaggagcggcgcgtggcagatctc

SEQ ID NO: 230689 - DNA, 75 bp, synthetic construct
  source 1..75: mol_type = other DNA
agattgtaagcaggtcgatgagaccatgctgccgaaacgcacctggtggaacctgactaaaagcgtgctggcgtt

SEQ ID NO: 230690 - DNA, 75 bp, synthetic construct
  source 1..75: mol_type = other DNA
cgccgcgtctggcgcaagttgatccccccgcacaaccgacgatggaaactcaggatcggatagaaactgaaaata

SEQ ID NO: 230691 - DNA, 75 bp, synthetic construct
  source 1..75: mol_type = other DNA
ctggttggctggcttccggcgcacacgccgcgtctggcgcaggttgacccgcccgctcagccgacaatggaaact

SEQ ID NO: 230692 - DNA, 75 bp, synthetic construct
  source 1..75: mol_type = other DNA
gtaccgaatgccatcgacaaaagtctgctcgtgaagcggtgagtggtatgccggacccgatgctgccggaggtgt

SEQ ID NO: 230693 - DNA, 75 bp, synthetic construct
  source 1..75: mol_type = other DNA
catgttgaaaatatggagaaccatgtttggcatttatttgtcctgaaaacgcaaaaacgagaagcattacagtta

SEQ ID NO: 230694 - DNA, 75 bp, synthetic construct
  source 1..75: mol_type = other DNA
tgttttggcaataactgaaaataatctagtccctgtattgactgaaccagatcctttgacattcaacttaagtgc

SEQ ID NO: 230695 - DNA, 75 bp, synthetic construct
  source 1..75: mol_type = other DNA
aacagacgccttatcttcgtgcggtcgatattttgcgggcgcggcaggctacaggtctgctgcgccgctgctata

SEQ ID NO: 230696 - DNA, 75 bp, synthetic construct
  source 1..75: mol_type = other DNA
gagcatatcgacgccggtatatcactgtgcgacgccgtgaattttattgtagaaaaatacgatttggttcgcaca

SEQ ID NO: 230697 - DNA, 75 bp, synthetic construct
  source 1..75: mol_type = other DNA
gaaacggatggattacgcggtcgcaaggataacctttgggaaggcggaattcgtgttccagccattattaaatat

SEQ ID NO: 230698 - DNA, 75 bp, synthetic construct
  source 1..75: mol_type = other DNA
tgcgtggaaaaagatatcgacgtggcggccgaatccctgaaagtcgccgaagccttccgtattcatacctttatt

SEQ ID NO: 230699 - DNA, 75 bp, synthetic construct
  source 1..75: mol_type = other DNA
gtatggtaagttcttaaagtataaagccgatattgataatgattcattaatgaaagccagaggtgataaaccgga

SEQ ID NO: 230700 - DNA, 75 bp, synthetic construct
  source 1..75: mol_type = other DNA
cgcaggcggcgaagccatgcctgtcgcccgtgactatctggcaaatgctacttagtcgtctgctggaacagcatt

SEQ ID NO: 230701 - DNA, 75 bp, synthetic construct
  source 1..75: mol_type = other DNA
aaacataataaattgccaaaacaaagccgcactggagaacataattcatcaactaaaaaagacaaaagaattata

SEQ ID NO: 230702 - DNA, 75 bp, synthetic construct
  source 1..75: mol_type = other DNA
ttttaagaaattcaacaataaatctattggtgaaaatattgctacactcagaaatgaattagcacatgttgaccg

SEQ ID NO: 230703 - DNA, 75 bp, synthetic construct
  source 1..75: mol_type = other DNA
ataactgtgagtctatgggagcaacctttaataataaatgcgccggcacttttggtctgatgggaacatttagct

SEQ ID NO: 230704 - DNA, 75 bp, synthetic construct
  source 1..75: mol_type = other DNA
accggcctgatgacccgcagccactacagaatggtgaacaacatcaccctgggtaaacactgtgaggtgaaacca

SEQ ID NO: 230705 - DNA, 75 bp, synthetic construct
  source 1..75: mol_type = other DNA
tctctacaatctgaaatctgatcgttatgaaacacttaatctgatcggtaaaaaaccagatattgaaaaacagat

SEQ ID NO: 230706 - DNA, 75 bp, synthetic construct
  source 1..75: mol_type = other DNA
tattctggccataactgctaatagattagttccagttctaactgaaccagatctaattacatataacctaagccc

SEQ ID NO: 230707 - DNA, 75 bp, synthetic construct
  source 1..75: mol_type = other DNA
atgccgtttgagttcgccggaatcatcagcggcctgtatgaacgcgtacctaacatcgacaaagccattatttcc

SEQ ID NO: 230708 - DNA, 75 bp, synthetic construct
  source 1..75: mol_type = other DNA
tggtggagtataaagtggctcgcatcgccaccaccatgccttacattccaggttttctttccttccgcgaatatc

SEQ ID NO: 230709 - DNA, 75 bp, synthetic construct
  source 1..75: mol_type = other DNA
gcgttatcgcttaaatcttctcttgaagatatcctgcttgagatagcctcgctggtagataacgcattggatctg

SEQ ID NO: 230710 - DNA, 75 bp, synthetic construct
  source 1..75: mol_type = other DNA
actggatatgatcatctctgactgtccgatcgattccactcagcaggaagggctgttttccatgaaaattggcga

SEQ ID NO: 230711 - DNA, 75 bp, synthetic construct
  source 1..75: mol_type = other DNA
agaaggttccgtggttggcgcagcggaggcgctttatttaacaccacaaaccattaccgggcagatccgggcgct

SEQ ID NO: 230712 - DNA, 75 bp, synthetic construct
  source 1..75: mol_type = other DNA
ttgagaactcaacatgttacaaaacccaattcatctgcgtctggagcgcctggaaagctggcagcatgtcacttt

SEQ ID NO: 230713 - DNA, 75 bp, synthetic construct
  source 1..75: mol_type = other DNA
taccccaattacgccgtattctgtcagcaaaccggcttcggcgatgggcagatttaccgccgcattctcgatctc

SEQ ID NO: 230714 - DNA, 75 bp, synthetic construct
  source 1..75: mol_type = other DNA
tcgccgggtgattttgaatcagtgcaaaccatcgctcgccaggtcaaaaacagccgcgtatgtgcgttagctcgc

SEQ ID NO: 230715 - DNA, 75 bp, synthetic construct
  source 1..75: mol_type = other DNA
agccttccgtattcatacctttattgctacctccccaatgcacatcgccaccaagctgcgcagtacgctggatga

SEQ ID NO: 230716 - DNA, 75 bp, synthetic construct
  source 1..75: mol_type = other DNA
ttaacgccggtgccaccaccatcaacattccggacaccgtgggctacaccatgccgtttgagttcgccggaatca

SEQ ID NO: 230717 - DNA, 75 bp, synthetic construct
  source 1..75: mol_type = other DNA
tgcttcgaatccacccacgaaatgctgctggagcaattaagccagcataaactggatatgatcatttccgactgt

SEQ ID NO: 230718 - DNA, 75 bp, synthetic construct
  source 1..75: mol_type = other DNA
agaaggttctgtggttggcgcagcggaggcgctttatttaacaccacaaaccattaccggacagattcgggcgct

SEQ ID NO: 230719 - DNA, 75 bp, synthetic construct
  source 1..75: mol_type = other DNA
ctttcctgaagctggcggataaaaaaggccaggtgttcgattacgacctggaagcactggccttcatcggtaagc

SEQ ID NO: 230720 - DNA, 75 bp, synthetic construct
  source 1..75: mol_type = other DNA
tttagcgccgggaccggtggcggtaatacttttgatggtgagtaccagcgaaaggatgatgaccgcgaccgcctt

SEQ ID NO: 230721 - DNA, 75 bp, synthetic construct
  source 1..75: mol_type = other DNA
ggtagaggcgttgaaaaccggggcgctggattatctcatcaagccgctggatttcgataacctacagtcgacgct

SEQ ID NO: 230722 - DNA, 75 bp, synthetic construct
  source 1..75: mol_type = other DNA
ggcatcccgtttgtgaagccggttgcctacgcggcggccaagtccgggctgtataacttcacccgctattgcgcc

SEQ ID NO: 230723 - DNA, 75 bp, synthetic construct
  source 1..75: mol_type = other DNA
gtaaggtgcattacaacgggcagcgcagcaagccaagcaaaatcgtcgagctgaatgccacgctcactctgcgcc

SEQ ID NO: 230724 - DNA, 75 bp, synthetic construct
  source 1..75: mol_type = other DNA
atgaaagaaaaacctgctgttgaggttcgactggataaatggctatgggctgcccgtttttataaaacccgcgcg

SEQ ID NO: 230725 - DNA, 75 bp, synthetic construct
  source 1..75: mol_type = other DNA
atacttttgatggtgagtatcagcgaaaggataatgaccacgatcgtcttgaccataaagacgatcgccaggatt

SEQ ID NO: 230726 - DNA, 75 bp, synthetic construct
  source 1..75: mol_type = other DNA
ccttaaaggaagaactgaagcgccgtgggattgctcgtaacttttacgacgataccaacctgcaagctttagtta

SEQ ID NO: 230727 - DNA, 75 bp, synthetic construct
  source 1..75: mol_type = other DNA
atctctgctcgcgccggttacaaaaacgctttgaagcacgtgatactcattttctgtgcctgtatctacaatatt

SEQ ID NO: 230728 - DNA, 75 bp, synthetic construct
  source 1..75: mol_type = other DNA
ccctgaagagtgaactgaagcggcgcggaattgcgcgtaacttttatgacgataccaatctacaagcgttagtga

SEQ ID NO: 230729 - DNA, 75 bp, synthetic construct
  source 1..75: mol_type = other DNA
tggataagctacgtgagatctaccctcaacgtaagtttgtgatgagccgctttgaaagaagatcgaagcgcagcg

SEQ ID NO: 230730 - DNA, 75 bp, synthetic construct
  source 1..75: mol_type = other DNA
tgttgcgggttcccgatccactgcgggatgcgcatcagcgagacagacaattgcgtcagtctatcaaacgtctgg

SEQ ID NO: 230731 - DNA, 75 bp, synthetic construct
  source 1..75: mol_type = other DNA
cgagaagcgcagattgagcagcagttacgcgaactaacgttactgccgctcaacattaaacatatgtcggtaaag

SEQ ID NO: 230732 - DNA, 75 bp, synthetic construct
  source 1..75: mol_type = other DNA
ggggtttgatgtcgcttccattgagaaagctctggcacacaatgagcgcaatgaaaaccgcattcgcggtgcatc

SEQ ID NO: 230733 - DNA, 75 bp, synthetic construct
  source 1..75: mol_type = other DNA
atgacggagctggaaagacatttgctgaacgccttagagcaactgcaacaggactatatgcagcggctgaacgaa

SEQ ID NO: 230734 - DNA, 75 bp, synthetic construct
  source 1..75: mol_type = other DNA
ctgattgagctgcataccgacaatctcgataaattcttcactccgcgcccaaaagtggactggcctgcccactca

SEQ ID NO: 230735 - DNA, 75 bp, synthetic construct
  source 1..75: mol_type = other DNA
ggcgagggcaaacgcgccgacctggtgctggcgcatcgcaaggacaatcatattcatatcgaccacgtctggcgt

SEQ ID NO: 230736 - DNA, 75 bp, synthetic construct
  source 1..75: mol_type = other DNA
gcgacatcatgggctattgcatcactgccctgctcttctccggcgtcattttcgtcattggtttaacgctgttct

SEQ ID NO: 230737 - DNA, 75 bp, synthetic construct
  source 1..75: mol_type = other DNA
atcccggtgggcgatactctgttcagtggttttaacattttcatcactgtggcgttgattgtggtgatgccattt

SEQ ID NO: 230738 - DNA, 75 bp, synthetic construct
  source 1..75: mol_type = other DNA
ctgattatccgttgctcattgcctgcgcctacattggttttctcacctggggtggcggtttctctggctcaatgc

SEQ ID NO: 230739 - DNA, 75 bp, synthetic construct
  source 1..75: mol_type = other DNA
cacgatgacgccacgcacgcccacgttgccgaatcccaccagcttggcagcgtgatcgccgaatttcccaccacg

SEQ ID NO: 230740 - DNA, 75 bp, synthetic construct
  source 1..75: mol_type = other DNA
cgctcaccgatgcgcagatgcagcagtacgaagaagagcaactggcgcttgccgcacgctggtcacagcctaatc

SEQ ID NO: 230741 - DNA, 75 bp, synthetic construct
  source 1..75: mol_type = other DNA
gctgcggcgcagcgctattttcataagccagccagcaaacttactcagtcggaagccgcgttactggcagcagtg

SEQ ID NO: 230742 - DNA, 75 bp, synthetic construct
  source 1..75: mol_type = other DNA
atgattatcaataacgtcaaactggtgctggaaaacgaagtggtacacggttcgctggaggtgcaggacggcgaa

SEQ ID NO: 230743 - DNA, 75 bp, synthetic construct
  source 1..75: mol_type = other DNA
gaaggttgactggcccgcccactcggcaatgagcagccacgatgcactgatggtggcaagcggcatcaccaccgt

SEQ ID NO: 230744 - DNA, 75 bp, synthetic construct
  source 1..75: mol_type = other DNA
cctgtgccgcgcgcgacaaattgcgctcgccagccacgatgacgccacgcacgcccacgttgccgaatcccacca

SEQ ID NO: 230745 - DNA, 75 bp, synthetic construct
  source 1..75: mol_type = other DNA
catgactattaccggctttacaccgcttgctgatagcaccgttgaagcccgcgcgcgtcgagggcgtaaaggggc

SEQ ID NO: 230746 - DNA, 75 bp, synthetic construct
  source 1..75: mol_type = other DNA
tggccgctaatggcgtcaggcgttacatgactattaccggctttacgccgcttgctgacagcactgttgaagccc

SEQ ID NO: 230747 - DNA, 75 bp, synthetic construct
  source 1..75: mol_type = other DNA
gcagacggaaagcttaatgctatcaacccagattctggtcaattgataagcaatgagaatgtaaggccgttgatt

SEQ ID NO: 230748 - DNA, 75 bp, synthetic construct
  source 1..75: mol_type = other DNA
cagggaagctgagaacagtggcatcagaaggaaatgttgcacgattcacccaacgttttggtcgttttgttagca

SEQ ID NO: 230749 - DNA, 75 bp, synthetic construct
  source 1..75: mol_type = other DNA
tcacctggtccctggcgttaaatcggcagaagagcagacggtaccgcagctaaaaaccgcggcgcaggctgcact

SEQ ID NO: 230750 - DNA, 75 bp, synthetic construct
  source 1..75: mol_type = other DNA
tggcgaaaccattaattgataccgggcaatatcgcagagcgattacccatattgtgagggataaagatgccgact

SEQ ID NO: 230751 - DNA, 75 bp, synthetic construct
  source 1..75: mol_type = other DNA
ttcgactggtaatccggaaattcacaacatgaaatcattaaccacggaaacagcgctggatattctgattacgtg

SEQ ID NO: 230752 - DNA, 75 bp, synthetic construct
  source 1..75: mol_type = other DNA
gagttttatgaggcagcagccagaatgagcgtcaggcaggtcttcctgggagtggcagaaaaattgtcagaaaaa

SEQ ID NO: 230753 - DNA, 75 bp, synthetic construct
  source 1..75: mol_type = other DNA
cgaaaatggggtggcgtttgttgctaaagctgttcagcaaactattgatggtatgacgatgaagtttcttcagga

SEQ ID NO: 230754 - DNA, 75 bp, synthetic construct
  source 1..75: mol_type = other DNA
tggcggggctggcctcctgttgggtagacggtatgccgtttatcgattctgttcgatttgcgcagggatgttcgt

SEQ ID NO: 230755 - DNA, 75 bp, synthetic construct
  source 1..75: mol_type = other DNA
gcaaactgagaactgttgcttcagaaggtaacgtggcgcgctttaaccagcgtttcggtcgttttgttgacacca

SEQ ID NO: 230756 - DNA, 75 bp, synthetic construct
  source 1..75: mol_type = other DNA
tcacacttatccggcgttatggcgtcagtctcattcatctggatgccagcgctgaatgtctgcctgacctgccca

SEQ ID NO: 230757 - DNA, 75 bp, synthetic construct
  source 1..75: mol_type = other DNA
tcaaaatcacacccgttctatacgggcaaactgagaaccgttgcatcagaaggaaatgtggcacgatttacccag

SEQ ID NO: 230758 - DNA, 75 bp, synthetic construct
  source 1..75: mol_type = other DNA
agcggtgggcttaaaatgaccgctcgcgaagtgatggatattgacgaagcccgggaaaaatatgctcgcgggctt

SEQ ID NO: 230759 - DNA, 75 bp, synthetic construct
  source 1..75: mol_type = other DNA
tcggcgtgctggccgaagagccggaacaaattgaacaatcctacgccagcgccgcgccatccggcagtacgctgt

SEQ ID NO: 230760 - DNA, 75 bp, synthetic construct
  source 1..75: mol_type = other DNA
gaccagtacgcgccgttcagcacccgcgtggtgaatgtcggcgtccgcgattccacctatgtgctcgacggcctg

SEQ ID NO: 230761 - DNA, 75 bp, synthetic construct
  source 1..75: mol_type = other DNA
acgccactggcagcgtcgggcgctccagcctgtaccgcctgatgagccactgtttatggcattacttttttccat

SEQ ID NO: 230762 - DNA, 75 bp, synthetic construct
  source 1..75: mol_type = other DNA
cgtggccggagcaggtggtattagatggggaacgtgaaacgttaggtctgtacctgacgggacaccctatcaacc

SEQ ID NO: 230763 - DNA, 75 bp, synthetic construct
  source 1..75: mol_type = other DNA
aaaagaatggcgttaccttttattattttgggtgtggctgccggcgctgcggcattcggcggaaaaaagcttacg

SEQ ID NO: 230764 - DNA, 75 bp, synthetic construct
  source 1..75: mol_type = other DNA
agcattttgcaaaagttaatcaatacgttgatgaaattctcactgcactgaacagaatgcatgctgtatttatta

SEQ ID NO: 230765 - DNA, 75 bp, synthetic construct
  source 1..75: mol_type = other DNA
tgaaagggatccgcaattttgaggataaagttacggtaactttagcgttacgggacaaaaaacgctttgacggtg

SEQ ID NO: 230766 - DNA, 75 bp, synthetic construct
  source 1..75: mol_type = other DNA
gaaaaaaggtctgattcaaactcatcacaacacttaaacagcaaccaggaaaaggtcattagctacctggcgaaa

SEQ ID NO: 230767 - DNA, 75 bp, synthetic construct
  source 1..75: mol_type = other DNA
tcatgaaggctgcccgcactgctggcgtggcgtgacaggacgaacagtgatcgcagaagtcatctccccggatgc

SEQ ID NO: 230768 - DNA, 75 bp, synthetic construct
  source 1..75: mol_type = other DNA
gaaatcagcatctgctgggaaaaatcaacagcggacaggttgatccgctggcggcccattacatctctcccatcg

SEQ ID NO: 230769 - DNA, 75 bp, synthetic construct
  source 1..75: mol_type = other DNA
cgtggcgtgacaggacgaacagtgatcgcagaagtcatctccccggatgcccgttttttccagttgtaccgggaa

SEQ ID NO: 230770 - DNA, 75 bp, synthetic construct
  source 1..75: mol_type = other DNA
aggaaatcatataaaagacaatgactcaatgtctattcgttatagatcaaaatattattccagagagtacgcttt

SEQ ID NO: 230771 - DNA, 75 bp, synthetic construct
  source 1..75: mol_type = other DNA
aaaaatgagcgtactgacggcggacatctctacggtgcggactacaccagagccaacggcgacggttttggtatt

SEQ ID NO: 230772 - DNA, 75 bp, synthetic construct
  source 1..75: mol_type = other DNA
gcggcgacacatggagccagaaagatgtctttatgacctaccgcacgactggtgtagcgacttatcgcaactacg

SEQ ID NO: 230773 - DNA, 75 bp, synthetic construct
  source 1..75: mol_type = other DNA
ccaaagacgaacctttaaaaaccagcaacggacacagcaagccgaaagccaaaaaatctggcggcaaacgtgtcg

SEQ ID NO: 230774 - DNA, 75 bp, synthetic construct
  source 1..75: mol_type = other DNA
ggtgatcccgtggctggcaaaaagctggacccattcgcaagatggtaaaacctggaccttcaccctgcgtgatgg

SEQ ID NO: 230775 - DNA, 75 bp, synthetic construct
  source 1..75: mol_type = other DNA
ctatgcatcgcatgtacggggttggtgactataagtcaaattcctcttctctaccctcacactcggggctaaagg

SEQ ID NO: 230776 - DNA, 75 bp, synthetic construct
  source 1..75: mol_type = other DNA
caacaaccggaaagtaaaactcctgggcttgattattttgaccagaatctcgatccagcatttggcaattatttt

SEQ ID NO: 230777 - DNA, 75 bp, synthetic construct
  source 1..75: mol_type = other DNA
aaatgttgaggctgatttgaaactggctgaaaggtatgccggggagcaaaaccgccctcattcgatttcgctgat

SEQ ID NO: 230778 - DNA, 75 bp, synthetic construct
  source 1..75: mol_type = other DNA
gcaggaaacgccgccgcacatcgcagttggagcccgaataaaagtgagttcgaacaaatgctagaagctatagaa

SEQ ID NO: 230779 - DNA, 75 bp, synthetic construct
  source 1..75: mol_type = other DNA
tgaaagcgactttacccgtgccgtagatattcgcaccgataacatcgtcgcaacgggcattacctatcagttcta

SEQ ID NO: 230780 - DNA, 75 bp, synthetic construct
  source 1..75: mol_type = other DNA
ggtgtggcaacctatcgcaactacgatttctttggcttaattgaagggctgaactttgccgcgcaatatcaaggc

SEQ ID NO: 230781 - DNA, 75 bp, synthetic construct
  source 1..75: mol_type = other DNA
cagcagccggaaagcaaagtacccggacttgattatttcgacaataaactcgacccggcatttggtgattatttc

SEQ ID NO: 230782 - DNA, 75 bp, synthetic construct
  source 1..75: mol_type = other DNA
ttgtcaggaatgtcgcaagccatcgccaaagaagaacctttaaaaaccagcaacggacacagcaagccgaaagca

SEQ ID NO: 230783 - DNA, 75 bp, synthetic construct
  source 1..75: mol_type = other DNA
gatgttgaaactcttacctgccaacgatactcgccgtgcggtgattgaacgtagtatcgcgcaggcgatgcaaca

SEQ ID NO: 230784 - DNA, 75 bp, synthetic construct
  source 1..75: mol_type = other DNA
cgaactgatgcaggaaggcaaaagtaagcaagagattgtcgattatatggtggcgcgttacggtaactttgttac

SEQ ID NO: 230785 - DNA, 75 bp, synthetic construct
  source 1..75: mol_type = other DNA
aacgatacccgtcgagcggtgattgaacgcagtatcgcgcaggcgatgcagcatttgtcgccgcagcaaagtaaa

SEQ ID NO: 230786 - DNA, 75 bp, synthetic construct
  source 1..75: mol_type = other DNA
gttgtcgcggatcgcaggtgaaattcccagtattctgcacgggctccccctgtctggggcgtcggtggacgccgg

SEQ ID NO: 230787 - DNA, 75 bp, synthetic construct
  source 1..75: mol_type = other DNA
agtactgtttatcgccaccttgatcgttggtgctatcgtgaactttgtgataggccagttagtggagaaaacagg

SEQ ID NO: 230788 - DNA, 75 bp, synthetic construct
  source 1..75: mol_type = other DNA
gcagatctgtttatgtcaattcacgccgacggttttactaacccaaaagcagcaggcgcttcggtttttgccctt

SEQ ID NO: 230789 - DNA, 75 bp, synthetic construct
  source 1..75: mol_type = other DNA
gatgcgcgtttaacgcgttctggcgatacgtttatcccactgtacgatcgcgttgaaatcgcccataaacacggc

SEQ ID NO: 230790 - DNA, 75 bp, synthetic construct
  source 1..75: mol_type = other DNA
tgctgatgctgatgatctccggctcggcgctggcaaccatcgacgtgttgcagtttaaagatgaagcacaggaac

SEQ ID NO: 230791 - DNA, 75 bp, synthetic construct
  source 1..75: mol_type = other DNA
aaaaaagcgcgtacagaagcagagcattttacgaaggctgtgtttgaccgtattgaattcctgaggagccaatca

SEQ ID NO: 230792 - DNA, 75 bp, synthetic construct
  source 1..75: mol_type = other DNA
gaagaaggcattgaaccgcgtctggctgccagtattggttttatgtcgaaaatgactggcaagcccgatcatctg

SEQ ID NO: 230793 - DNA, 75 bp, synthetic construct
  source 1..75: mol_type = other DNA
cgggagccttttttctctcggcctttgtttgggcgttaattgccgtgattttctggcaagccggaggcggtgatt

SEQ ID NO: 230794 - DNA, 75 bp, synthetic construct
  source 1..75: mol_type = other DNA
cgtaggactttttgcattgttctggtttatctacagcccgcaccgttggcaatactggtcaatactcggtactgc

SEQ ID NO: 230795 - DNA, 75 bp, synthetic construct
  source 1..75: mol_type = other DNA
gtttgttcttgctgtttccgtcgattgttgccggtacgattacgctcggactgatgacgcaaattaccaacgttt

SEQ ID NO: 230796 - DNA, 75 bp, synthetic construct
  source 1..75: mol_type = other DNA
gtcgtgaacttgagtcagcaggtgcagctattagccgggcaagtcgaccgcttgagtcggttatttatcacgaac

SEQ ID NO: 230797 - DNA, 75 bp, synthetic construct
  source 1..75: mol_type = other DNA
gcgaactggcaacaactgcgtcatatcgaaggggccgctcaacgcgtacaggaagacacgatgcgctttgcctct

SEQ ID NO: 230798 - DNA, 75 bp, synthetic construct
  source 1..75: mol_type = other DNA
tttatttatagcccgcatcgttggcaatactggtcaatactcggtactgcgttgattatcttcgtcacctggttt

SEQ ID NO: 230799 - DNA, 75 bp, synthetic construct
  source 1..75: mol_type = other DNA
gatggacgtcgttctggtgccgcaaggtacgctaatcgagcaaattcgctgtggtggagctggacttggtggttt

SEQ ID NO: 230800 - DNA, 75 bp, synthetic construct
  source 1..75: mol_type = other DNA
ctgatgtttatgattgcgggtctgctgctacataaaacgccaatggcttatatgcgtgctatcagcgcggcagca

SEQ ID NO: 230801 - DNA, 75 bp, synthetic construct
  source 1..75: mol_type = other DNA
tcaatgttgcgaacaaagacaccttcccggtaatgaccttttttagttctgcactgattaacttcgccgttccgt

SEQ ID NO: 230802 - DNA, 75 bp, synthetic construct
  source 1..75: mol_type = other DNA
gtatttcaacatcgcccgcattctctatttgcaagtcgataacgttttcggtttgttcttgctgtttccgtcaat

SEQ ID NO: 230803 - DNA, 75 bp, synthetic construct
  source 1..75: mol_type = other DNA
tatttgcaggtcgataacgttttcggtttgttcttgctgtttccgtcaattgtcgccggtacgattacgctcggc

SEQ ID NO: 230804 - DNA, 75 bp, synthetic construct
  source 1..75: mol_type = other DNA
ggttgagttgatgtctatctacaaacgtctgcgcagctttgaacatgagctggatggtgacaaaattcaggaagt

SEQ ID NO: 230805 - DNA, 75 bp, synthetic construct
  source 1..75: mol_type = other DNA
gtggtcggttttattgggccggagtatctctacaacgaccgccagattatccgcgcaggcttagaagatcacttt

SEQ ID NO: 230806 - DNA, 75 bp, synthetic construct
  source 1..75: mol_type = other DNA
atggctcgttacgatctcgtagatcgactcaatactacctttcgccagatggagcaagaactggccgcatttgcc

SEQ ID NO: 230807 - DNA, 75 bp, synthetic construct
  source 1..75: mol_type = other DNA
aaaatcgcagcagcaaggccgctgttcgtctgcccggcgtgttgtgttatcaggtcgataatctttcacaagcgg

SEQ ID NO: 230808 - DNA, 75 bp, synthetic construct
  source 1..75: mol_type = other DNA
ggcgctggcgctgcgtcatttccgtcatctgtttattcagcaacagtcagaaaaccgcagcagcaaggttgctgt

SEQ ID NO: 230809 - DNA, 75 bp, synthetic construct
  source 1..75: mol_type = other DNA
gatactgtcttctatcaccacaacgaacacttcagtgagcatactacccacgaatatcgtgatggtgaatttgta

SEQ ID NO: 230810 - DNA, 75 bp, synthetic construct
  source 1..75: mol_type = other DNA
ctaccaacatatgttggtacagatgatggtatttccggttcgataatgcttgtaccaacagggagggaatacgat

SEQ ID NO: 230811 - DNA, 75 bp, synthetic construct
  source 1..75: mol_type = other DNA
atgtgcagcaccgttacaaaccccaggcgcagccgcttcgcttaatcattccacggctgcacctgtatgttgcag

SEQ ID NO: 230812 - DNA, 75 bp, synthetic construct
  source 1..75: mol_type = other DNA
tgtcacgctgatcggcgaagaagagagcagtatctacgcgcgtcagcgcgacgggcgttttggcatgattttcca

SEQ ID NO: 230813 - DNA, 75 bp, synthetic construct
  source 1..75: mol_type = other DNA
ttatgccattcaacttatcgacgatgataaggggaaaagaaaagatagtatttcatctttaatcctcaaattaaa

SEQ ID NO: 230814 - DNA, 75 bp, synthetic construct
  source 1..75: mol_type = other DNA
ctgcggttgcagtatctgttctgatggcaacgtctgctcaagctgcagaaatctataacaaagacagtaataaac

SEQ ID NO: 230815 - DNA, 75 bp, synthetic construct
  source 1..75: mol_type = other DNA
ggggtaagatctgcgagagagtgagtgactaccgcactgccgccttttttgaaattggccgtctacttgaatcgt

SEQ ID NO: 230816 - DNA, 75 bp, synthetic construct
  source 1..75: mol_type = other DNA
agtgctttagccgatataggcagcgctaagggcaatccgtgggtacaggatattaaccaccgcgttactttgtga

SEQ ID NO: 230817 - DNA, 75 bp, synthetic construct
  source 1..75: mol_type = other DNA
atgtctaattatggtcttttcgttaagggtaaaatgttgggagcccgccaacgtaataaagttaatggtcagggc

SEQ ID NO: 230818 - DNA, 75 bp, synthetic construct
  source 1..75: mol_type = other DNA
ctttggtgaatcagaatggattcattttaccggtaccggttatctgttacgttccgtcgtctggtcgtcacactc

SEQ ID NO: 230819 - DNA, 75 bp, synthetic construct
  source 1..75: mol_type = other DNA
ttacgctgcgcctgcactttaaccgcccgttacctgctgacattaaactacgccaggattcactgcgtctgcatt

SEQ ID NO: 230820 - DNA, 75 bp, synthetic construct
  source 1..75: mol_type = other DNA
ctggcctctacccgcaccatgctcgggctggatcagccgctgtacgtccagtacggcacctggttgtggaaggcg

SEQ ID NO: 230821 - DNA, 75 bp, synthetic construct
  source 1..75: mol_type = other DNA
gacgtcgccggtcagcgtcacgtcacctgggcgcgtctgcgcggcctgaacgacaaacagaccgaacgccgccat

SEQ ID NO: 230822 - DNA, 75 bp, synthetic construct
  source 1..75: mol_type = other DNA
gcgttaacgcaggtgcgccgctgggatagcgcctgtcagaaattacccgacgctaatctggcgctgatttcagtg

SEQ ID NO: 230823 - DNA, 75 bp, synthetic construct
  source 1..75: mol_type = other DNA
gcgaaaagtgaagtgctggcgtttgtctctaaaccacctgccgaagccgtgcgcctgcgtatcgttaacgcgatg

SEQ ID NO: 230824 - DNA, 75 bp, synthetic construct
  source 1..75: mol_type = other DNA
taaagcgttattagataccacaggtttctggcatgacgattttaataacgccacgccgaacgatatttgcgtggc

SEQ ID NO: 230825 - DNA, 75 bp, synthetic construct
  source 1..75: mol_type = other DNA
agatcaccgtgtggcgctgccggatctgtggcttgaggctgcgggatttgagcgggaggatgcgctgctgccgtg

SEQ ID NO: 230826 - DNA, 75 bp, synthetic construct
  source 1..75: mol_type = other DNA
ccatgttggtgttgcgccggcagatgctgctaatgcgctggggtcgtttatcaacgctcgtcgtcgtctggagtt

SEQ ID NO: 230827 - DNA, 75 bp, synthetic construct
  source 1..75: mol_type = other DNA
aaagctgaccaccgatgcttccgaatgggaagtcttgctggatggcgaaaaagtgggcgaagtgaaatggtcgct

SEQ ID NO: 230828 - DNA, 75 bp, synthetic construct
  source 1..75: mol_type = other DNA
gatgggctacggcggctggcagcacatcattttgcctgcggtttccatcgcctttatgtcgctggcgattaacgc

SEQ ID NO: 230829 - DNA, 75 bp, synthetic construct
  source 1..75: mol_type = other DNA
atgttgcgttacgtattacgccgctttctgctgctgatcccgatggtattcgccgcctcggtgattatttttctg

SEQ ID NO: 230830 - DNA, 75 bp, synthetic construct
  source 1..75: mol_type = other DNA
cctttatgtcgctggcgataaacgcacgtctgctgcgcgccagtatgctggacgtcgccggtcagcgtcacgtga

SEQ ID NO: 230831 - DNA, 75 bp, synthetic construct
  source 1..75: mol_type = other DNA
aagtgcgtgtattgctactcgatgtggtgattggttttggtgcgactgccgatcctgccgcatcgctggtaagcg

SEQ ID NO: 230832 - DNA, 75 bp, synthetic construct
  source 1..75: mol_type = other DNA
tctggccgtatcggttaatggttcagaattgcgtgataccagacaggcgcagcagataatgaagcaattgccaga

SEQ ID NO: 230833 - DNA, 75 bp, synthetic construct
  source 1..75: mol_type = other DNA
tcatgtcggattacaggatgacgatttggctgtgtcattaaatggctctgatctgcgtgattccaaacagtccca

SEQ ID NO: 230834 - DNA, 75 bp, synthetic construct
  source 1..75: mol_type = other DNA
ccgggcgagttattttttccgattttaatccgtcgcagcgtccatggtctggggcttcggataagtcagttagta

SEQ ID NO: 230835 - DNA, 75 bp, synthetic construct
  source 1..75: mol_type = other DNA
cggcggcaatccatttactgccatggtgattggcggagcgttagtgcatccattaattctgactgccttcgagaa

SEQ ID NO: 230836 - DNA, 75 bp, synthetic construct
  source 1..75: mol_type = other DNA
gctaattttcgggtaaaaaatatttttgacataatgagcctttcacctgtcacggtgaataatacattaagcggt

SEQ ID NO: 230837 - DNA, 75 bp, synthetic construct
  source 1..75: mol_type = other DNA
cacacagaagaaaattttgtgtttacgttattcggcacggcatccccgccgttatcggaagggaaagtgcagaaa

SEQ ID NO: 230838 - DNA, 75 bp, synthetic construct
  source 1..75: mol_type = other DNA
attgccacggtgacaggcaccgaacgtgacccgcaatgccgctcgcagcaaatcgccacgctggaagatgcgggg

SEQ ID NO: 230839 - DNA, 75 bp, synthetic construct
  source 1..75: mol_type = other DNA
gatcctgctgcctcgctggtaagcgcctggcagaaagccagtgctgcgcgttcagacaaccaaccgctgtacgcc

SEQ ID NO: 230840 - DNA, 75 bp, synthetic construct
  source 1..75: mol_type = other DNA
aaaccgcctgccgaagctgtgcgtctgaaaattgttaatgccatgaaagcaaccggcaaaccgacggtggcgctg

SEQ ID NO: 230841 - DNA, 75 bp, synthetic construct
  source 1..75: mol_type = other DNA
ggcggtaatttattgaacgcatcagataaactttttatctaccgtttgctttcattattatcgtgttgctggtgg

SEQ ID NO: 230842 - DNA, 75 bp, synthetic construct
  source 1..75: mol_type = other DNA
ccgcaattccggcagttatggcctacaaccgcctcaaccagcgcgtaaacaaactggaactgaattacgacaact

SEQ ID NO: 230843 - DNA, 75 bp, synthetic construct
  source 1..75: mol_type = other DNA
gtggtaatttattgaacgcatcagataaactttttatctgccgtttgctttcattattatcgtattgctggtggt

SEQ ID NO: 230844 - DNA, 75 bp, synthetic construct
  source 1..75: mol_type = other DNA
ggcaccgattatgtctcatggactggcaaccaattcaattggttatctggtaactgacgacaatgcgatggtgtg

SEQ ID NO: 230845 - DNA, 75 bp, synthetic construct
  source 1..75: mol_type = other DNA
caaccgtctcaaccagcgtgtgaacaaactggaactgaattacgataactttatggaagagtttaccgcgattct

SEQ ID NO: 230846 - DNA, 75 bp, synthetic construct
  source 1..75: mol_type = other DNA
acctcccgtggtcaggatgtggcagaaggccgcgcccgcgttgccggtgtcaagcgtccgcgtccccgtgcatga

SEQ ID NO: 230847 - DNA, 75 bp, synthetic construct
  source 1..75: mol_type = other DNA
accggcagggttgttcgctgacagcgccagtgtcaccactttctttgaggcgttttacgaatgcacgggcctgac

SEQ ID NO: 230848 - DNA, 75 bp, synthetic construct
  source 1..75: mol_type = other DNA
gccggatgtgccagtgccacaacgtttttgcaggccttttatggctgccaggcgctgacatcattaggtcagggg

SEQ ID NO: 230849 - DNA, 75 bp, synthetic construct
  source 1..75: mol_type = other DNA
tgctgagtgcgccagcgccacgacgttctatcaggcattttacgaatgtacgggactcactgcagtcggtgacag

SEQ ID NO: 230850 - DNA, 75 bp, synthetic construct
  source 1..75: mol_type = other DNA
tgatgtctataccaacggcgaatggaaagggcgctacgacctgaaaatcaccgccggtaaagacggcaaaatggg

SEQ ID NO: 230851 - DNA, 75 bp, synthetic construct
  source 1..75: mol_type = other DNA
tgaacgtgagtgaactgttgatgacatgtcgaaacgacttagatgatgtcgaaagcgcgctatgtgaggagcgcg

SEQ ID NO: 230852 - DNA, 75 bp, synthetic construct
  source 1..75: mol_type = other DNA
atggctgttgaaaccaaagaaaaaacgtctgcggaaattgccctgaaactcaaacccatcgtcgaagcggcgctg

SEQ ID NO: 230853 - DNA, 75 bp, synthetic construct
  source 1..75: mol_type = other DNA
ctgttacgtggctgaaatcaccggcagcggcgaggatgtggcaaatggcctgtccggtgtgccgggcgttaaaaa

SEQ ID NO: 230854 - DNA, 75 bp, synthetic construct
  source 1..75: mol_type = other DNA
cctgaactggcagcagcagcagggtaaagcgcactggaacagcaaccagacctatctccagcgccctatcccaca

SEQ ID NO: 230855 - DNA, 75 bp, synthetic construct
  source 1..75: mol_type = other DNA
tcaccctgcaggcgcgccaggcgaaccacgagccgttgccgtttgcggcaagtattttctcccccgacggcaagg

SEQ ID NO: 230856 - DNA, 75 bp, synthetic construct
  source 1..75: mol_type = other DNA
acacgcgcgcgatgctgaaccttctgccgtcagggattgcctggagccgtctgcctgacagcgtgcagcaccggc

SEQ ID NO: 230857 - DNA, 75 bp, synthetic construct
  source 1..75: mol_type = other DNA
tggaggtgcgagacaatcttgagcgccgggcttatgaaattgctctggcatcgctggaagcagtatcggatgaac

SEQ ID NO: 230858 - DNA, 75 bp, synthetic construct
  source 1..75: mol_type = other DNA
tggcgatagagaatacatggcatgggatatggcgcttggctggattatctggtgtcaccgcgccgccatgcttca

SEQ ID NO: 230859 - DNA, 75 bp, synthetic construct
  source 1..75: mol_type = other DNA
tttgagcgccgggcttatgaaattgctctggcatcgctggaagcagtatcggatgaacgagcagcctatgaatta

SEQ ID NO: 230860 - DNA, 75 bp, synthetic construct
  source 1..75: mol_type = other DNA
gcagtggctgcacgattttgtgctgcgtgaccgctgggtgctggccgttgccggtacacacggcaaaaccaccac

SEQ ID NO: 230861 - DNA, 75 bp, synthetic construct
  source 1..75: mol_type = other DNA
acttctttgttatcgaagcggatgagtatgactgcgccttcttcgacaaacgttctaaatttgttcattactgcc

SEQ ID NO: 230862 - DNA, 75 bp, synthetic construct
  source 1..75: mol_type = other DNA
cctggcgaccatattctggtgatgagcaacggcggttttggtgggatccatcagaaactgctggatggtctggcg

SEQ ID NO: 230863 - DNA, 75 bp, synthetic construct
  source 1..75: mol_type = other DNA
ttattacgttttgaaggattaactggggttgggcttagcagatatgagggtgactccactatcaaaaacgcatat

SEQ ID NO: 230864 - DNA, 75 bp, synthetic construct
  source 1..75: mol_type = other DNA
cgtatgcagaggctgccgttgacatgccggatgacgtgacagtaccggtacgcagtgaggtgataaatctgcgga

SEQ ID NO: 230865 - DNA, 75 bp, synthetic construct
  source 1..75: mol_type = other DNA
gacggtgaatgttgtcatcaaatccgcgtcgggacagcggtatgtggcgacagtgacaacggacagtgaagggca

SEQ ID NO: 230866 - DNA, 75 bp, synthetic construct
  source 1..75: mol_type = other DNA
gagcgaaggttattgttgcagactgtaatatcagtgagtcaacacttgtctggctactgaataatgcaggtaagg

SEQ ID NO: 230867 - DNA, 75 bp, synthetic construct
  source 1..75: mol_type = other DNA
tgctgtctgaactcgtgtgcgcctgccatgcacgaaaggggaatgtttcctgcccgttgatcgcgtcactacagg

SEQ ID NO: 230868 - DNA, 75 bp, synthetic construct
  source 1..75: mol_type = other DNA
atcgtcgccgcataacggttgcagcactgcggcggatgaaacgaaaaacaggaagtaatctcctcactgtaaagc

SEQ ID NO: 230869 - DNA, 75 bp, synthetic construct
  source 1..75: mol_type = other DNA
tgcgctggctcagacccgccataaacagtggagtctggcgaaaaaagtgctggtgggtctggtgatgggtgtggt

SEQ ID NO: 230870 - DNA, 75 bp, synthetic construct
  source 1..75: mol_type = other DNA
acgctttataacaagccagatcaagagatcatgctttttatgtatgcctttgagcatgaacaagtattctcatct

SEQ ID NO: 230871 - DNA, 75 bp, synthetic construct
  source 1..75: mol_type = other DNA
ttgcttttggatacttaaatagttttacagcgatgcttactgctcagcaactaacgtctgatgcaaaaattaatt

SEQ ID NO: 230872 - DNA, 75 bp, synthetic construct
  source 1..75: mol_type = other DNA
ggacccgatgtggattgcgacgctggtcggtattgttaccgttagttccgcaggcgttgccggtgtcggtggtgg

SEQ ID NO: 230873 - DNA, 75 bp, synthetic construct
  source 1..75: mol_type = other DNA
cttgtcctttatcccgaaaaacccgtttgccgatcttaccggagccaatccgacgtcaattatcagcgtggtaat

SEQ ID NO: 230874 - DNA, 75 bp, synthetic construct
  source 1..75: mol_type = other DNA
tcggtacgcttttgtttaccacgctgattgcggcgctggtcggtgtgctggtcaccaacctgtttggtttgacgg

SEQ ID NO: 230875 - DNA, 75 bp, synthetic construct
  source 1..75: mol_type = other DNA
ctctctgaatatcgcgggatatcttcgtttttattgaaatattcctctgctgacgtagacaattatcgttctacg

SEQ ID NO: 230876 - DNA, 75 bp, synthetic construct
  source 1..75: mol_type = other DNA
ttcggcgtggcttttatataagaatcaggttaaggctgttgatgtaacaacctaccctgagattaactggcctcc

SEQ ID NO: 230877 - DNA, 75 bp, synthetic construct
  source 1..75: mol_type = other DNA
ctggatgtactcgatcatttacgcgccgaaggctttaatcgcctgagcatgggcgtgcaggacttcaacaaagaa

SEQ ID NO: 230878 - DNA, 75 bp, synthetic construct
  source 1..75: mol_type = other DNA
atactttttgtgtgctgcttgataccgatgaagtcagggccactttcagggtgattatgacgctgattggctcca

SEQ ID NO: 230879 - DNA, 75 bp, synthetic construct
  source 1..75: mol_type = other DNA
ggagtcggaacaggttctggcagtaccactgtaacaggtaatgctacggtaaatgttaacgtgactgtgtcaaat

SEQ ID NO: 230880 - DNA, 75 bp, synthetic construct
  source 1..75: mol_type = other DNA
caaattatctgcaatgggggccagcgcctcatctatttcggcaacgttatcaggatattcacgtgcggcagcgtc

SEQ ID NO: 230881 - DNA, 75 bp, synthetic construct
  source 1..75: mol_type = other DNA
tgaccgcaggtacgctgaccagccagtggcttaagcaaaccgataagtccattctggacagcgaagacgacgccg

SEQ ID NO: 230882 - DNA, 75 bp, synthetic construct
  source 1..75: mol_type = other DNA
ggcgatatcaccggcacaaccggtaaaaatgcagctgaaccgccccgggaatcctggagactaaacttcctgaga

SEQ ID NO: 230883 - DNA, 75 bp, synthetic construct
  source 1..75: mol_type = other DNA
gggaagagctcgattatctgcgccaactcagcaagctgctggcaacggaaaaaccccatctggcccgctttttgg

SEQ ID NO: 230884 - DNA, 75 bp, synthetic construct
  source 1..75: mol_type = other DNA
ccagcgatcaggtgcaggtggtttttgggccaggcaaagcgcatcgtgccgcaaaagccatgagcgagctgctgg

SEQ ID NO: 230885 - DNA, 75 bp, synthetic construct
  source 1..75: mol_type = other DNA
gcattgattttcgcgatcttgtttttgtgacaggcaacgagccagtgacggatacccgaaaggttgccgtagcat

SEQ ID NO: 230886 - DNA, 75 bp, synthetic construct
  source 1..75: mol_type = other DNA
agcgtctggagacccgccccgttgatcgcctgtttacgggtattcccgttcgggggctggcctccacgctgtatc

SEQ ID NO: 230887 - DNA, 75 bp, synthetic construct
  source 1..75: mol_type = other DNA
gggatgcagatgatgcgtgttgccgacagtcgctggccggaaagcctgcaacagcaacaggcctcgacacaatgg

SEQ ID NO: 230888 - DNA, 75 bp, synthetic construct
  source 1..75: mol_type = other DNA
aatccaatgcgcgttataataatgaattaattgaagctgcagtaagagttattgaaagtggatggtatatctcag

SEQ ID NO: 230889 - DNA, 75 bp, synthetic construct
  source 1..75: mol_type = other DNA
gcattgacttcaaagaactggtttttattaccaacaatgaccctgtcaccgattcatttatggtggcgaaagcat

SEQ ID NO: 230890 - DNA, 75 bp, synthetic construct
  source 1..75: mol_type = other DNA
ttcgcctctattctgagcgcggttgcccgtctgcataacgcatctcagttaggcaaaatcagttttctgaccatc

SEQ ID NO: 230891 - DNA, 75 bp, synthetic construct
  source 1..75: mol_type = other DNA
tggaccaggtaaagcgcatcgtgccgcaaaagcgatgagcgaactgctgggcgaagccccggtacaggatgccgc

SEQ ID NO: 230892 - DNA, 75 bp, synthetic construct
  source 1..75: mol_type = other DNA
ttagccgggctgttcctgatcgccgtggtatttggcgtgcatcagggctttattcctgtttacctcgcgttaatg

SEQ ID NO: 230893 - DNA, 75 bp, synthetic construct
  source 1..75: mol_type = other DNA
gtctggtctggtggcgctgccgctgatgacttccgcacaaggcatccttccggcaatggcggtttatgctggcgg

SEQ ID NO: 230894 - DNA, 75 bp, synthetic construct
  source 1..75: mol_type = other DNA
gacggcgctctttgtcaaagcgaagagaagagcttcttgaagaactatggggtgaggaacttgatgatttaaata

SEQ ID NO: 230895 - DNA, 75 bp, synthetic construct
  source 1..75: mol_type = other DNA
taaatgcgttgctggcagataaattactgccgctgttgcaagacgatgacattatctggatccacgattatcacc

SEQ ID NO: 230896 - DNA, 75 bp, synthetic construct
  source 1..75: mol_type = other DNA
aactggaaccgggtgagctgtactacttcgccggtattgacgaagcgcgcttcaagcgcccggtcgtgcctggcg

SEQ ID NO: 230897 - DNA, 75 bp, synthetic construct
  source 1..75: mol_type = other DNA
ttcatctttatggcttgatttctcctatggacgaaattatgaattttgccagagaaaacaatctattggtattgg

SEQ ID NO: 230898 - DNA, 75 bp, synthetic construct
  source 1..75: mol_type = other DNA
cagtggcgaaagtgtgctatgcacaaatggtgaaacagttcctgagtcgtgacccgttcgaatgcgtgctgtgtg

SEQ ID NO: 230899 - DNA, 75 bp, synthetic construct
  source 1..75: mol_type = other DNA
gtgactgacatgaatatccttgatttgttcctgaaggctagccttctggttaaacttatcatgttgattttgatt

SEQ ID NO: 230900 - DNA, 75 bp, synthetic construct
  source 1..75: mol_type = other DNA
cgcaagttgcccagcaagagaaaacaccagaggttattacacctgagcagggcggtatctgttcaccgatgacgg

SEQ ID NO: 230901 - DNA, 75 bp, synthetic construct
  source 1..75: mol_type = other DNA
gacaccgtaaaactggacggcaaattcttttccgctcacgtcaacgtgggtgacaaggtcaatacaggcgatcgg

SEQ ID NO: 230902 - DNA, 75 bp, synthetic construct
  source 1..75: mol_type = other DNA
tcattcctgcttttgtcagggagatctaccatgcttattggctatgtacgtgtgtcaacaaatgaccagaacaca

SEQ ID NO: 230903 - DNA, 75 bp, synthetic construct
  source 1..75: mol_type = other DNA
gtgaagaagcgttacgttattgcgctggtgataatcattgccggactgattgcgttatggagaattcttaacgca

SEQ ID NO: 230904 - DNA, 75 bp, synthetic construct
  source 1..75: mol_type = other DNA
cttattgcgtgtgaaaatccatacattacctgaagatactgcgattcggcaaagtattgctgaaaaatatattcg

SEQ ID NO: 230905 - DNA, 75 bp, synthetic construct
  source 1..75: mol_type = other DNA
atggcgctgacaaagaaacagcgggaaaaactgcgtatgaaattcggcggtcgttgtgcgtactgcagctgtgaa

SEQ ID NO: 230906 - DNA, 75 bp, synthetic construct
  source 1..75: mol_type = other DNA
ggtctgaaccggactattcccgccatcttgaacaggcgcgaacggtcgggcatgacatcagggaatggctggaca

SEQ ID NO: 230907 - DNA, 75 bp, synthetic construct
  source 1..75: mol_type = other DNA
atgaacgaacaatccctggccaaatcaccagaagccttgcgcgcaatggtcgccgggacactggccaattttcag

SEQ ID NO: 230908 - DNA, 75 bp, synthetic construct
  source 1..75: mol_type = other DNA
tgtggcctgatctggactatctcgttctcgatatgccgccgggcactggtgatattcagttgacgctggcgcaga

SEQ ID NO: 230909 - DNA, 75 bp, synthetic construct
  source 1..75: mol_type = other DNA
tcccgttctgtcataaactttgttacttctgtggttgcaataagattgtcactcgccagcagcacaaggccgatc

SEQ ID NO: 230910 - DNA, 75 bp, synthetic construct
  source 1..75: mol_type = other DNA
accgcgctggagttttcagaagacttcggcgaacaggcgtttttacaagccgtggcgcgctatcctgagcgtcca

SEQ ID NO: 230911 - DNA, 75 bp, synthetic construct
  source 1..75: mol_type = other DNA
accagtttgaacgtgcgaacggttcgacttatcgggaattggaaatcgcgctgccccgtgaactgacaccggaac

SEQ ID NO: 230912 - DNA, 75 bp, synthetic construct
  source 1..75: mol_type = other DNA
tctggaccgaacgcggggctgcacgtcacgctaaaatgctcgaaaccgatcaggcgtgggatgtattcgaacggc

SEQ ID NO: 230913 - DNA, 75 bp, synthetic construct
  source 1..75: mol_type = other DNA
ctcgtgaggttgtcgatacgctcaacgccaaaccgatgttttacattaaggtgtgcaacaacgagccactcacaa

SEQ ID NO: 230914 - DNA, 75 bp, synthetic construct
  source 1..75: mol_type = other DNA
tatatctgcccggtggtatccgactgtgctgccgggcagcgcaactggctgatgtattcagggcgcttcgccatg

SEQ ID NO: 230915 - DNA, 75 bp, synthetic construct
  source 1..75: mol_type = other DNA
tcgtcaactggctgaccgcgttgctgcccagctctactggcagggagaagttattcctggcgagatctccttccg

SEQ ID NO: 230916 - DNA, 75 bp, synthetic construct
  source 1..75: mol_type = other DNA
catggcctggcaaccaattcaattggttatctggtcactgacgacaatgcgatggtgtggcgtggtccgatggcg

SEQ ID NO: 230917 - DNA, 75 bp, synthetic construct
  source 1..75: mol_type = other DNA
aacctgccagccaggacactacaggatctgataaaaacatgtgctgataagctggcacagaagagcctgtctctt

SEQ ID NO: 230918 - DNA, 75 bp, synthetic construct
  source 1..75: mol_type = other DNA
atggcgaaaaaaccaggtgaaaacacaggaaaaaacggcggaatataccaagaagttggcccgcgcggcggtaag

SEQ ID NO: 230919 - DNA, 75 bp, synthetic construct
  source 1..75: mol_type = other DNA
aaaacgtcaacatgatggaagtggcaatcgatgaagcctgtgtgcgcattattgctaaacgtcagccgacggcga

SEQ ID NO: 230920 - DNA, 75 bp, synthetic construct
  source 1..75: mol_type = other DNA
gaaggggcaggatttccgtcacgtcggtggtgatgagctggataaactgctggcgggaaaagaccccaaagagta

SEQ ID NO: 230921 - DNA, 75 bp, synthetic construct
  source 1..75: mol_type = other DNA
tttgtgagtttatcttctactacgtgaagggtcaggatttccgtcatgtaggcggtgatgagctggataaactgc

SEQ ID NO: 230922 - DNA, 75 bp, synthetic construct
  source 1..75: mol_type = other DNA
atgcacgcttatcttcattgtctttcccactcgccgctggtggggtatgtcgacccggcacaagaggtactcgat

SEQ ID NO: 230923 - DNA, 75 bp, synthetic construct
  source 1..75: mol_type = other DNA
cccactcgccgttggtggggtatgtcgacccggcgcaagaggtactcgatgaggtcaatggcgtgattgccagcg

SEQ ID NO: 230924 - DNA, 75 bp, synthetic construct
  source 1..75: mol_type = other DNA
acggttaacgatccttatagcgatcaagttgttatcgataaaggtagcgttaatggcgtttatgaaggccagccg

SEQ ID NO: 230925 - DNA, 75 bp, synthetic construct
  source 1..75: mol_type = other DNA
ggcttaccgccacgtagtgcgaatgccggacggttctctgctcaaccgctactgggacgaccgtgacacgccgcg

SEQ ID NO: 230926 - DNA, 75 bp, synthetic construct
  source 1..75: mol_type = other DNA
agagtaccatcgccaacatctcggcgctgaaaggtgatagagagacagaagcgctgtttcgccaaaaagccagcg

SEQ ID NO: 230927 - DNA, 75 bp, synthetic construct
  source 1..75: mol_type = other DNA
aacccgcgaaccgcaagatcacatcccgtggtcttctctgctggcgctgccgcagtcgtacattgtccccggagg

SEQ ID NO: 230928 - DNA, 75 bp, synthetic construct
  source 1..75: mol_type = other DNA
gaaggggcaggatttccgtcatgtaggcggtgatgagctggataaactgctggcgggaaaagacccgaaagagta

SEQ ID NO: 230929 - DNA, 75 bp, synthetic construct
  source 1..75: mol_type = other DNA
ggtcgatctctgttatgaactggatccgtatgaattaaaactggatgagatgctcgaggcagagccagaacccga

SEQ ID NO: 230930 - DNA, 75 bp, synthetic construct
  source 1..75: mol_type = other DNA
tatccgttgcaggatgggtttggctggactaacggtgtggtacgccgtttaattggtttgtacggcgaaccataa

SEQ ID NO: 230931 - DNA, 75 bp, synthetic construct
  source 1..75: mol_type = other DNA
atggcgggcattaatctcaataaaaaattatggcgtattccgcagcagggcatggtacgcggcgtttgcgccggg

SEQ ID NO: 230932 - DNA, 75 bp, synthetic construct
  source 1..75: mol_type = other DNA
ttcatattgccaaagagtatctctacttcgcgatatttttctcattaagtgttgagacactcaatattatccgtg

SEQ ID NO: 230933 - DNA, 75 bp, synthetic construct
  source 1..75: mol_type = other DNA
cgccgtcaataaaaatactggcgttaacctttttattgtttgtcggtgtattgctggttgccgatagtctcaaca

SEQ ID NO: 230934 - DNA, 75 bp, synthetic construct
  source 1..75: mol_type = other DNA
ctaggacgttacgcactgcgcctcgcgcatggtaatggcgaatacctcattcatggtaccagtgcgccggacagc

SEQ ID NO: 230935 - DNA, 75 bp, synthetic construct
  source 1..75: mol_type = other DNA
gctattcctgataaagatcaggatagatatcttcatatcacaattagctttcgtgaaaatgagctgccaattgaa

SEQ ID NO: 230936 - DNA, 75 bp, synthetic construct
  source 1..75: mol_type = other DNA
ttgcaggggctggaaacgccggtgatggaaacgcgtgtggggcagaaaatccctaacccaacctggacgcctacg

SEQ ID NO: 230937 - DNA, 75 bp, synthetic construct
  source 1..75: mol_type = other DNA
tgggcgatctgatttgggttgattttgacccgacaaaaggtagcgagcaagccggacatcgtccggctgttgtcc

SEQ ID NO: 230938 - DNA, 75 bp, synthetic construct
  source 1..75: mol_type = other DNA
aagcgccgggtggcggagacaccgggcaggcgtgtatgcgcggactgcgggggtgacattccggctgcccgtctg

SEQ ID NO: 230939 - DNA, 75 bp, synthetic construct
  source 1..75: mol_type = other DNA
tggatgccgtcgatcgcgagctggcggcaagtgaaaagcgtttacgtgaaatggaacgttatgtgacgtccgata

SEQ ID NO: 230940 - DNA, 75 bp, synthetic construct
  source 1..75: mol_type = other DNA
tatccggtggtgtcagtcggaggtgacccttatcgtctgatgaccacggatatggccagtgtgccggccactgtc

SEQ ID NO: 230941 - DNA, 75 bp, synthetic construct
  source 1..75: mol_type = other DNA
ctaacgcctggcttgcgctcggtacactgacgctgctggagatcgttcttgggatcgacaatattattttccttt

SEQ ID NO: 230942 - DNA, 75 bp, synthetic construct
  source 1..75: mol_type = other DNA
gcctgctgttccggcaggaaagacgaagtaaggaaaaaggtatggatgattcagattgtgctcaggctgtcatgg

SEQ ID NO: 230943 - DNA, 75 bp, synthetic construct
  source 1..75: mol_type = other DNA
ctggaaaaacagggcagcaataaatcgagcattctggatgccaccattttcctggccgataaaaacgacttcgcg

SEQ ID NO: 230944 - DNA, 75 bp, synthetic construct
  source 1..75: mol_type = other DNA
accattttcctggctgataaaaacgacttcgcggcgatgaataaagcgtgggatgcctgggttgtggcgggtcat

SEQ ID NO: 230945 - DNA, 75 bp, synthetic construct
  source 1..75: mol_type = other DNA
atgatgactatcgttcgtattgacgccgaagcccgctggtctgatgtggtgatccacaacaacacgctctactac

SEQ ID NO: 230946 - DNA, 75 bp, synthetic construct
  source 1..75: mol_type = other DNA
tgtcagccctgaaagaaaagcatgctgttcctgcaggactacgaagttgtcataccgcggttgccggtaatttga

SEQ ID NO: 230947 - DNA, 75 bp, synthetic construct
  source 1..75: mol_type = other DNA
gaaagcttgacgtgagggatggttttatccttaacgaagtgatgtgcgggatatcgaaagatagtatgacagtta

SEQ ID NO: 230948 - DNA, 75 bp, synthetic construct
  source 1..75: mol_type = other DNA
ggtgcttatgatttctgggatcctgctattgaatgttacagagataattttagccatccgataaaaaaactagat

SEQ ID NO: 230949 - DNA, 75 bp, synthetic construct
  source 1..75: mol_type = other DNA
aacaatacagggttaaatcgcagttactggagagactggggaatgtgttgtttttcacgttgctttataaccagg

SEQ ID NO: 230950 - DNA, 75 bp, synthetic construct
  source 1..75: mol_type = other DNA
gcggagaaaacagcgccgccgcgttgctggagaaaatcaaagctgaacgcgcagccagcgggggtaaaaaagcct

SEQ ID NO: 230951 - DNA, 75 bp, synthetic construct
  source 1..75: mol_type = other DNA
aatggaatatagttcagatcgaagaaattttagctttacaggatgatggaaagattgttcatcaaggttggagtc

SEQ ID NO: 230952 - DNA, 75 bp, synthetic construct
  source 1..75: mol_type = other DNA
gcagtttgtataaggttttgagcagggacagcgattcggctgagctggacgcctggtttgctgaaccgccgctga

SEQ ID NO: 230953 - DNA, 75 bp, synthetic construct
  source 1..75: mol_type = other DNA
cggcaaagtgttcgattttttcgaggcgttagcggaagatcgcggcgtggagttgcggtttgttggcgacaagtg

SEQ ID NO: 230954 - DNA, 75 bp, synthetic construct
  source 1..75: mol_type = other DNA
tgtcagccctgaaagaaaaatatgctgttcctgctgagctgagaagctgtcataccgcagttaatggtaatttga

SEQ ID NO: 230955 - DNA, 75 bp, synthetic construct
  source 1..75: mol_type = other DNA
atgactaagaaaataaaatgtgcttaccacctttgcaaaaaagacgttgaagaaagtaaagctattgaaagaatg

SEQ ID NO: 230956 - DNA, 75 bp, synthetic construct
  source 1..75: mol_type = other DNA
atgactaagaaaataaaatatgcttaccacctttgcaataaaggaattaaagaaagcaaaagcattaaaagacca

SEQ ID NO: 230957 - DNA, 75 bp, synthetic construct
  source 1..75: mol_type = other DNA
tgccagacggtcgatcatctggtgcaagttatcgtcgaaaaccccggtacgcccattgcgcccgagcacttaccg

SEQ ID NO: 230958 - DNA, 75 bp, synthetic construct
  source 1..75: mol_type = other DNA
tgtgctgctggaagaaaatcagatcccagcccgcaccgtgctgcgcgcgctggatattgtaaaacgtgattatga

SEQ ID NO: 230959 - DNA, 75 bp, synthetic construct
  source 1..75: mol_type = other DNA
gaagggacaggatttccgtcatgtaggcggtgatgagctggataaactgctggcagaaaaagatagcgataaata

SEQ ID NO: 230960 - DNA, 75 bp, synthetic construct
  source 1..75: mol_type = other DNA
cgtattggcgaccgctgccagaatatttgtgagtttatcttctactacgtgaaggggcaggatttccgggtgatg

SEQ ID NO: 230961 - DNA, 75 bp, synthetic construct
  source 1..75: mol_type = other DNA
tattcctgcaggactgcgaagttgtcataccgcggttgccggtaatttgatcattgaaggccatgtgcctgcgac

SEQ ID NO: 230962 - DNA, 75 bp, synthetic construct
  source 1..75: mol_type = other DNA
tggcttttggcctttcacttcctgcaatggcaggtgaaaaagtaatagacatgtacaagtctgaaaactgtggtt

SEQ ID NO: 230963 - DNA, 75 bp, synthetic construct
  source 1..75: mol_type = other DNA
aatcgcaagtgaaaaagtcatagatatgtacaaatctgaacactgtgggtgctgttccttatggggcaaggcgat

SEQ ID NO: 230964 - DNA, 75 bp, synthetic construct
  source 1..75: mol_type = other DNA
ttaagtgatgaagagaaggctgggttacgctattccgcgaataattacgtgaaatggaaggacgaatatctggat

SEQ ID NO: 230965 - DNA, 75 bp, synthetic construct
  source 1..75: mol_type = other DNA
gccagaaaaatgtggtgttcaacgataaacgctttggctgcgtgtacagcctgaaggccagcttttcaggtgtgc

SEQ ID NO: 230966 - DNA, 75 bp, synthetic construct
  source 1..75: mol_type = other DNA
atgaaaaaagtggttctaatggtcctggctctcggcctttcactgcctgcgatggcgagtgaaaaagtgattgat

SEQ ID NO: 230967 - DNA, 75 bp, synthetic construct
  source 1..75: mol_type = other DNA
tttcctgctctacgtacgttattccgccgccggatggcagggtgacatggatttaccgccgcagccgctgatacc

SEQ ID NO: 230968 - DNA, 75 bp, synthetic construct
  source 1..75: mol_type = other DNA
ttacaggcagtgaaaccatcgtcagggatgctgttgccaaatggcgtaaaggctggatcccaccggttactactg

SEQ ID NO: 230969 - DNA, 75 bp, synthetic construct
  source 1..75: mol_type = other DNA
gtcgaaagtctgccatttgccgataacgcatttgatattgttatcagccgttattctgcccatcactggcatgat

SEQ ID NO: 230970 - DNA, 75 bp, synthetic construct
  source 1..75: mol_type = other DNA
tggtggtaatatcaccacggtgacaagtaaagtttctggttatatttctgctatagaggtgcgcgataatcagag

SEQ ID NO: 230971 - DNA, 75 bp, synthetic construct
  source 1..75: mol_type = other DNA
gtgtaaaaaaaggcgatattatcctgcgtctcgatgatcgggattatcgtgcaaatgtcgccaggcttgaggcaa

SEQ ID NO: 230972 - DNA, 75 bp, synthetic construct
  source 1..75: mol_type = other DNA
aatatgtctttgtatggatatacacgctctacgacacgcaagttgaagcacaaagaaaacagatcaaactgttta

SEQ ID NO: 230973 - DNA, 75 bp, synthetic construct
  source 1..75: mol_type = other DNA
cgagaatgcgtacgccagaagcgttagtagacgctattcgcaagcgcatcgacagaggtgagaacgtattttgcc

SEQ ID NO: 230974 - DNA, 75 bp, synthetic construct
  source 1..75: mol_type = other DNA
taggatgttgaggcaaacagccagtgcatttggagaccaactctcttggtggcaagagcagaactgtctgtgcgc

SEQ ID NO: 230975 - DNA, 75 bp, synthetic construct
  source 1..75: mol_type = other DNA
aactccagtttcgacagtaggatgttgaggcaaacagccagtgcatttggagaccaactctcttggtggcaagag

SEQ ID NO: 230976 - DNA, 75 bp, synthetic construct
  source 1..75: mol_type = other DNA
taccaacagagcgcatcgacagaggtgagaacgtattttgccttgcagaatgatggctctttcaccagtgatatc

SEQ ID NO: 230977 - DNA, 75 bp, synthetic construct
  source 1..75: mol_type = other DNA
atgggctgcggagcagggcatgccagctttgtcgctgcgcaaaacgtgagcgcggtggtggcgtatgacttatct

SEQ ID NO: 230978 - DNA, 75 bp, synthetic construct
  source 1..75: mol_type = other DNA
aagcggccaatgcacggcaactgacaaatatcactactcgcaagggatatgctgaatgcctgccatttgccgatc

SEQ ID NO: 230979 - DNA, 75 bp, synthetic construct
  source 1..75: mol_type = other DNA
ttgtgtgatgttcttataggtgcatgtattgaatcagtttatcaattaatggactctaaggtactcaatcaaaat

SEQ ID NO: 230980 - DNA, 75 bp, synthetic construct
  source 1..75: mol_type = other DNA
tcagctatcaggcaccgggccagcgcgatgcggtacgccgggctctgttcgccccaccgggcagtacgctgttgg

SEQ ID NO: 230981 - DNA, 75 bp, synthetic construct
  source 1..75: mol_type = other DNA
tcaccacttcgccgctatcgccggtgctggtccgctggtcggtccggttctcgccgcgcagatgggctacctgcc

SEQ ID NO: 230982 - DNA, 75 bp, synthetic construct
  source 1..75: mol_type = other DNA
acgacgccgaaactgctggctaatgaaaccgacgcgcgtttcatcggttatggcgcaatgctgatggagtccttc

SEQ ID NO: 230983 - DNA, 75 bp, synthetic construct
  source 1..75: mol_type = other DNA
tgaaagagcatcgtttcttcgcgatgatcatcaaaaaagagtacggcgggctggagttctcggcttatgcccagt

SEQ ID NO: 230984 - DNA, 75 bp, synthetic construct
  source 1..75: mol_type = other DNA
cctggcggggcgcattacgttcttctcgataatcacaattggatcaccatcgaacaacttcaaaggaaactagac

SEQ ID NO: 230985 - DNA, 75 bp, synthetic construct
  source 1..75: mol_type = other DNA
tgagtgggaacgtgagaactggtatcaccgcatcgcgacgctactggtgcaactgtatcatagaggcattgtcca

SEQ ID NO: 230986 - DNA, 75 bp, synthetic construct
  source 1..75: mol_type = other DNA
tgcttgggagaacttgttcagattgatggttctccacatgactggtttgaaggccgggcgccgaaatgctgcctg

SEQ ID NO: 230987 - DNA, 75 bp, synthetic construct
  source 1..75: mol_type = other DNA
acagtgactttgggcccacactggccgcagaaaaactcagagagcgccataatatccggctttcaatcgagaccg

SEQ ID NO: 230988 - DNA, 75 bp, synthetic construct
  source 1..75: mol_type = other DNA
gaagagattccaaccgcaagccattatttgaattgcaaaagcatctcttatctaattacccatgtataacatgcg

SEQ ID NO: 230989 - DNA, 75 bp, synthetic construct
  source 1..75: mol_type = other DNA
gttttggtgaaaccgaatcagcctttgactacatgcttgctacccgtgaatatgttgagaaacatggtaagccgc

SEQ ID NO: 230990 - DNA, 75 bp, synthetic construct
  source 1..75: mol_type = other DNA
aacacccgaattgccggggagaatattaaggtctttgattaccctgatggcaccctcgccttcaaatacggccac

SEQ ID NO: 230991 - DNA, 75 bp, synthetic construct
  source 1..75: mol_type = other DNA
taagactgaatcagcctttgattacatgatggccacccgcgagtatctcgaacaacacggcaagccacttgcatt

SEQ ID NO: 230992 - DNA, 75 bp, synthetic construct
  source 1..75: mol_type = other DNA
ccagattttttattgcactctgtttcagacaactgtcagtcctgcctattgagggagcatcgtataacgaaaaag

SEQ ID NO: 230993 - DNA, 75 bp, synthetic construct
  source 1..75: mol_type = other DNA
accactatcggcagaagaacagcagaacgttcagacaatgccatacacactgccagcaggctttacgcaatttaa

SEQ ID NO: 230994 - DNA, 75 bp, synthetic construct
  source 1..75: mol_type = other DNA
gaactatcaagaaactcatcagttatcgtgtaatacctatgcttgatatcctggtgtgggcagccgttaaaaaaa

SEQ ID NO: 230995 - DNA, 75 bp, synthetic construct
  source 1..75: mol_type = other DNA
tttgtttttgccaccaatggtgatggctttatcttccgtgatgccaccgcaggagaaggtgaatgctatgaaaag

SEQ ID NO: 230996 - DNA, 75 bp, synthetic construct
  source 1..75: mol_type = other DNA
ttttaatggtaattctattaataatcgtagtaaccataatgcaggaaaatcaaactatgcatatttgaatttaca

SEQ ID NO: 230997 - DNA, 75 bp, synthetic construct
  source 1..75: mol_type = other DNA
ccattaacagtggtgctgggtaaagatatcgccggtgagccggtggttgccgatctggcgaaaatgccgcacttg

SEQ ID NO: 230998 - DNA, 75 bp, synthetic construct
  source 1..75: mol_type = other DNA
ggctatcaagaccagtgcagaatcaaattatattaacttaaaatctccgctctttcagcggcagtatattgaaga

SEQ ID NO: 230999 - DNA, 75 bp, synthetic construct
  source 1..75: mol_type = other DNA
tgaaagtccaaaagattttgtgcgtgtgactgatgataatcaggcgcagattttatctagggtaaaagccgatac

SEQ ID NO: 231000 - DNA, 75 bp, synthetic construct
  source 1..75: mol_type = other DNA
atatcggtttgatataagcagaactgcacagagcattcttactctggctcagcagggcaagaggagtcgcaacat

SEQ ID NO: 231001 - DNA, 75 bp, synthetic construct
  source 1..75: mol_type = other DNA
tttaccagcccccgcacttctttttgacgacaaccgaaagactggctcaactcagcatagttggattacggaact

SEQ ID NO: 231002 - DNA, 75 bp, synthetic construct
  source 1..75: mol_type = other DNA
ctcgaaagccctgtatcagagtccctacctcgcctgttcagagatactgtcatggtcgaaatcgacttggcgaat

SEQ ID NO: 231003 - DNA, 75 bp, synthetic construct
  source 1..75: mol_type = other DNA
atgcagaacgtatgcgccgcgccctggtcaatctcaacccggagcaggtgaaaaagaatgataaatacgtcatga

SEQ ID NO: 231004 - DNA, 75 bp, synthetic construct
  source 1..75: mol_type = other DNA
cgcggcgggcgcggtgtgcgtctggtggggctgcatgtgacgttgcttgacccgcaaatggaaagacaactggtg

SEQ ID NO: 231005 - DNA, 75 bp, synthetic construct
  source 1..75: mol_type = other DNA
ggcggttggctaaaacgctgttatcccgataatcaggaaatgcatgtgtcacatgaaatgatttataaaacgctt

SEQ ID NO: 231006 - DNA, 75 bp, synthetic construct
  source 1..75: mol_type = other DNA
agtggtcccagttcaacggcggacattgagcttatcaaagtcgtcggggttcatggtccggtgaaagcggtgtat

SEQ ID NO: 231007 - DNA, 75 bp, synthetic construct
  source 1..75: mol_type = other DNA
gttatacatgggctgggccgcaacgttaacttgttcgaagatttgagaattattgcttataaagaagtattaagt

SEQ ID NO: 231008 - DNA, 75 bp, synthetic construct
  source 1..75: mol_type = other DNA
taacgccaaattccgcgataatccgtcgccattaaccgtggtactgggtaaagatatcgccggtgagccggtggt

SEQ ID NO: 231009 - DNA, 75 bp, synthetic construct
  source 1..75: mol_type = other DNA
aacaaccggtagcaccgcagcagcaatatcagcagccgcaacaaccggttgcaccgcagccgcagtatcagcagc

SEQ ID NO: 231010 - DNA, 75 bp, synthetic construct
  source 1..75: mol_type = other DNA
accttaccggagattattaaaaccggatttggcgaccgtaacgggtataatcaggcgctcagcgagctggaaaac

SEQ ID NO: 231011 - DNA, 75 bp, synthetic construct
  source 1..75: mol_type = other DNA
aaagattacacccgcaaaacactgctcaaagaatatgcctcgctggatgactttacccgcaagtggcaggacgcc

SEQ ID NO: 231012 - DNA, 75 bp, synthetic construct
  source 1..75: mol_type = other DNA
tcgacatgctctgccacgtggtgtatggtcagccgccgttaacccgaaaggagcgtgcggggaacgtccgcaagc

SEQ ID NO: 231013 - DNA, 75 bp, synthetic construct
  source 1..75: mol_type = other DNA
caagctcagcttccggtgattactcaggactattacgacgatggcagcggtaaatcgccacgttattaccagctt

SEQ ID NO: 231014 - DNA, 75 bp, synthetic construct
  source 1..75: mol_type = other DNA
tgatgtgctggtgacttccggtctgggcggtcgtttcccggaaggctatccggtcgcggttgtctcttccgtaaa

SEQ ID NO: 231015 - DNA, 75 bp, synthetic construct
  source 1..75: mol_type = other DNA
tcatggtaaagtacaatcgccggatccagcagcgtaacgggatgggtgagctttatcaatggacccagcaacctc

SEQ ID NO: 231016 - DNA, 75 bp, synthetic construct
  source 1..75: mol_type = other DNA
cgtcaggcggtgctgggtgccgcggtaagtggaaaactaactgaagactggagagataattcgagcctgtctggg

SEQ ID NO: 231017 - DNA, 75 bp, synthetic construct
  source 1..75: mol_type = other DNA
tgagaaatgggtgacggatacggatgcacagcatagcgccgcagtagaagcagcagaagcacagcgccagtcact

SEQ ID NO: 231018 - DNA, 75 bp, synthetic construct
  source 1..75: mol_type = other DNA
tgagaaatgggtgacggataccgatgcacagcatagcggcgcagtagaagcagcagaagcacagcgccagtcact

SEQ ID NO: 231019 - DNA, 75 bp, synthetic construct
  source 1..75: mol_type = other DNA
tgagaaatgggtgacggatactgatgcacagcatagcgtcgcagtagaagcggcagaagcacagcgccagtcact

SEQ ID NO: 231020 - DNA, 75 bp, synthetic construct
  source 1..75: mol_type = other DNA
cggcagaagcacagcgccagtcgctgattgattctgcaatggcttccattagtctgattcaactgaaattgcagg

SEQ ID NO: 231021 - DNA, 75 bp, synthetic construct
  source 1..75: mol_type = other DNA
ctgcagaagcacagcgccagtcgctgattgatactgcaatggcttccattagtctgattcaactgaaattgcagg

SEQ ID NO: 231022 - DNA, 75 bp, synthetic construct
  source 1..75: mol_type = other DNA
cagcagaagcacagcgccagtcgctgattgatcctgcaatggcttccattagtctgattcaactgaaatttcagg

SEQ ID NO: 231023 - DNA, 75 bp, synthetic construct
  source 1..75: mol_type = other DNA
atgcgtcccgcgactatcgccccattaccgccatacgataaatgggatggtgagaaatgggtgacggatactgaa

SEQ ID NO: 231024 - DNA, 75 bp, synthetic construct
  source 1..75: mol_type = other DNA
gaccccgccgaactacgtcactacattctgacaggtgaaacccgcgcattgagtacaggcgttcccgctgatggt

SEQ ID NO: 231025 - DNA, 75 bp, synthetic construct
  source 1..75: mol_type = other DNA
ttcctgaattacacccgtgataccaacaacgacaaagcccgcgcctttggcaccattgaaaaaatggttacaaca

SEQ ID NO: 231026 - DNA, 75 bp, synthetic construct
  source 1..75: mol_type = other DNA
tgagaaatgggtgacggatactgatgcacagcatagcgacgcagtagaagctgcagaagcacagcgccagtcact

SEQ ID NO: 231027 - DNA, 75 bp, synthetic construct
  source 1..75: mol_type = other DNA
atgcgtcccgcgactatcgccccgttagcgccatacgataaatgggatggtgagaaatgggtgacagatactgaa

SEQ ID NO: 231028 - DNA, 75 bp, synthetic construct
  source 1..75: mol_type = other DNA
atgcgtcccgcgactatcgcccccttaacgccatacgataaatgggatggtgagaaatgggtgacggatactgaa

SEQ ID NO: 231029 - DNA, 75 bp, synthetic construct
  source 1..75: mol_type = other DNA
ccggacttaacactgtgctggattacattgacgcggtgacggcaacagataccagcaccgcgccggatgtcatct

SEQ ID NO: 231030 - DNA, 75 bp, synthetic construct
  source 1..75: mol_type = other DNA
aaccgactcggcggtgcgcgccacgcatttggcatccggtattagcgtgaaggttcagtcagagcgtaatcagca

SEQ ID NO: 231031 - DNA, 75 bp, synthetic construct
  source 1..75: mol_type = other DNA
ccacgccggatgacaacggtctggtgattattcccggttcacgcggtgattactcctggcttgtacagcctgttg

SEQ ID NO: 231032 - DNA, 75 bp, synthetic construct
  source 1..75: mol_type = other DNA
acttacaccgcctctcagcccggtacgcaccagaaaatcattatatggccatgaatggcgtcggatgtcgcgcca

SEQ ID NO: 231033 - DNA, 75 bp, synthetic construct
  source 1..75: mol_type = other DNA
cagccatatagcactgggaagcaataaggtttttgtggataagaatgacgggacaggaagttatgtcagcccggt

SEQ ID NO: 231034 - DNA, 75 bp, synthetic construct
  source 1..75: mol_type = other DNA
caggggatgcatctgtccatgaaggacagggactacaatccgctgattggtcgtaccggtgtggatgtgggtaaa

SEQ ID NO: 231035 - DNA, 75 bp, synthetic construct
  source 1..75: mol_type = other DNA
ccatagcggctcgcgtggtttagggcagtctattttacagcggcatattgcctcgttttcgcatcatggtttgcc

SEQ ID NO: 231036 - DNA, 75 bp, synthetic construct
  source 1..75: mol_type = other DNA
atgctggaggatgaaacgctctctttaagcctgaccggtactaacgggcagcttccccgtaaggctttacagagc

SEQ ID NO: 231037 - DNA, 75 bp, synthetic construct
  source 1..75: mol_type = other DNA
tgaagcgggtaaagaatttgcgcaggcttaccccgaccgcgctgcgatgcttaatcttgataaacccggcgcacg

SEQ ID NO: 231038 - DNA, 75 bp, synthetic construct
  source 1..75: mol_type = other DNA
cccgtggcgagcgataacccagcgcactatgcggatgccattcgttataatgctcgaacgcctctgcaaggttct

SEQ ID NO: 231039 - DNA, 75 bp, synthetic construct
  source 1..75: mol_type = other DNA
cccgtgtctggcgcagtcactggataatctactgcgtaacccttatttttgccgggtaatttgcgttaacgacgg

SEQ ID NO: 231040 - DNA, 75 bp, synthetic construct
  source 1..75: mol_type = other DNA
ggcagctacagttcacttacaccgcctctcaggccgcagtcggtaaactcacgcatacaaccgggcagtgacgtc

SEQ ID NO: 231041 - DNA, 75 bp, synthetic construct
  source 1..75: mol_type = other DNA
cccgacgcgccccccacggtgcgcaccacctttctcggcctgtacggcgtggattcgccgctgcccaccgcctat

SEQ ID NO: 231042 - DNA, 75 bp, synthetic construct
  source 1..75: mol_type = other DNA
cgccagccgttcaccgttcgattactacctgcgcggcgtggcgctggatccgctggattaccgctgtaacctggc

SEQ ID NO: 231043 - DNA, 75 bp, synthetic construct
  source 1..75: mol_type = other DNA
cgggctgggtcgcctggtggtcagaccgttgccacgccggagcaagaaacgaagcctgtaagcaaaaaattagca

SEQ ID NO: 231044 - DNA, 75 bp, synthetic construct
  source 1..75: mol_type = other DNA
gacgctatttgcatggcattggctggtaatgaagaaactgacaaagagattttgcgacgcatcgaatctcgtgca

SEQ ID NO: 231045 - DNA, 75 bp, synthetic construct
  source 1..75: mol_type = other DNA
caaaacgcctcccgcgatgcggtaattaaattacagcgtagcgagcgggggattgagtgggggctgtatgccatc

SEQ ID NO: 231046 - DNA, 75 bp, synthetic construct
  source 1..75: mol_type = other DNA
attttgttggcgcgtggtgtcacgatgaagatggcggtttgctgcacgttgccaaccaccatattgcgccaggta

SEQ ID NO: 231047 - DNA, 75 bp, synthetic construct
  source 1..75: mol_type = other DNA
ctgggcggtcgggtgcatcgcgcgtgggataaagtgaaacagcgcgattttgtttatcacaatgaagtcattaaa

SEQ ID NO: 231048 - DNA, 75 bp, synthetic construct
  source 1..75: mol_type = other DNA
tcagcagccgcaacagccggttgcacagcagccgcaatatcagcagccgcaacagccagttgcgccgcagccgca

SEQ ID NO: 231049 - DNA, 75 bp, synthetic construct
  source 1..75: mol_type = other DNA
gtcgtgctggccggtgcggtacaggactttatggtgctgtttatctcctctcgccgtaacggcgcatctctcggt

SEQ ID NO: 231050 - DNA, 75 bp, synthetic construct
  source 1..75: mol_type = other DNA
tgtttccgcactgctgccagtgtggctgatcctcgcaccacgcgactatctggcaaccttcctgaaaatcggcgt

SEQ ID NO: 231051 - DNA, 75 bp, synthetic construct
  source 1..75: mol_type = other DNA
ctgtcaaaactgagtgggttatctgaagccacaatacgaaagtacgtgcaggggaagatctacccaggtatagac

SEQ ID NO: 231052 - DNA, 75 bp, synthetic construct
  source 1..75: mol_type = other DNA
caccgcagcagcaatatcagcagtcgcaacaaccggttgcaccgcagccgcagtatcagcagccgcaacaaccgg

SEQ ID NO: 231053 - DNA, 75 bp, synthetic construct
  source 1..75: mol_type = other DNA
atataattatggatatgagcggaacaaagcaagctggaacagttaaattaataaaatcagatgatggctggcaag

SEQ ID NO: 231054 - DNA, 75 bp, synthetic construct
  source 1..75: mol_type = other DNA
cattaacatccacagttattacaacgatcagccggttgattatctcttctggcaaggaatggcgctgcgactgct

SEQ ID NO: 231055 - DNA, 75 bp, synthetic construct
  source 1..75: mol_type = other DNA
atctgtgggcggcactaccgttaagcgcggtaccgaaggcgaagcgcgtaccgaaaccagcacgccgaagatgga

SEQ ID NO: 231056 - DNA, 75 bp, synthetic construct
  source 1..75: mol_type = other DNA
aaaccaacgaataccagaaactggtatctgtgggcggcactaccgttaagcgcggtaccgaaggcgaagcgcgta

SEQ ID NO: 231057 - DNA, 75 bp, synthetic construct
  source 1..75: mol_type = other DNA
tctacaaggtgcataccgataaatacctgggcggtggtgtggtggactccaacgccatcaaggtgcttgagcttt

SEQ ID NO: 231058 - DNA, 75 bp, synthetic construct
  source 1..75: mol_type = other DNA
ggcaaaggcaaaacgccgctggctgtcggtgactttaagcgcggttatttcatcgttgaccatgaaacgggtatt

SEQ ID NO: 231059 - DNA, 75 bp, synthetic construct
  source 1..75: mol_type = other DNA
agcagaaaaccgccattaaaaatcagatgcgcgacatgctggagaacgcggaaaaagaaaaccgcagtcttaacg

SEQ ID NO: 231060 - DNA, 75 bp, synthetic construct
  source 1..75: mol_type = other DNA
tctacaaggtacataccgataaatacctgggcggcggcgtggtggactccaacgccatcaaggtgcttgagcttt

SEQ ID NO: 231061 - DNA, 75 bp, synthetic construct
  source 1..75: mol_type = other DNA
gaacatttcgtacagcctttacgttcagtgagttagctggcctggatgtaaccactcgttcaactcaattctctt

SEQ ID NO: 231062 - DNA, 75 bp, synthetic construct
  source 1..75: mol_type = other DNA
ccgggcggcgctggaaatcgccagccgcgtctataacggcaacgccacgccgcgtcatttcttatggtgggccaa

SEQ ID NO: 231063 - DNA, 75 bp, synthetic construct
  source 1..75: mol_type = other DNA
cggagaatttaagcgaaggccgtttaccggggcaaactgataacgacatctggttctggcaggcgatatgcgcca

SEQ ID NO: 231064 - DNA, 75 bp, synthetic construct
  source 1..75: mol_type = other DNA
gacaccgaaaagcgcagcctgaacgaagaagagggcaaaaagttcgatgaactccgcgcccaggctgatgcgctt

SEQ ID NO: 231065 - DNA, 75 bp, synthetic construct
  source 1..75: mol_type = other DNA
gatgcgttccatgctggacaaagccgacaccgaaaagcgcagcctgaacgaagaagagggcaaaaagttcgatga

SEQ ID NO: 231066 - DNA, 75 bp, synthetic construct
  source 1..75: mol_type = other DNA
aacccggattctacaaggtccacacggataaatatctgggcggtggtgtggtggattcaaacgccatcaaaattc

SEQ ID NO: 231067 - DNA, 75 bp, synthetic construct
  source 1..75: mol_type = other DNA
tcccggcgctggggaaaaccggacagggaacggccaaaaaagatgacaggcaggtgaatggcgcgttctatcacg

SEQ ID NO: 231068 - DNA, 75 bp, synthetic construct
  source 1..75: mol_type = other DNA
tcgcgctgacgttgccgctggtcgtaagcgcctgcgtatcaacgccacctgtccaggtcccgtgcgtgaagccac

SEQ ID NO: 231069 - DNA, 75 bp, synthetic construct
  source 1..75: mol_type = other DNA
atcatgtgcactggtacaaatacccgctgacatactggctgaatatcatcatgtcgattgcctgtctgcagcgtg

SEQ ID NO: 231070 - DNA, 75 bp, synthetic construct
  source 1..75: mol_type = other DNA
gcaatgcagttaaccggccggaacggcagcgtgctgcgtaccgtaacccatctgaccttgaatgatgtgggagtc

SEQ ID NO: 231071 - DNA, 75 bp, synthetic construct
  source 1..75: mol_type = other DNA
aaagtgagccagggaaaggtgccggatacggcaaacccgtcgatgccgatccagttctgcccggcaccaccgccg

SEQ ID NO: 231072 - DNA, 75 bp, synthetic construct
  source 1..75: mol_type = other DNA
tgttattccttctcgccggtcatgtccctgcggcgtcagcagatgcggcctgtgaggggcgttttgtaaacccga

SEQ ID NO: 231073 - DNA, 75 bp, synthetic construct
  source 1..75: mol_type = other DNA
tgaactgccctgttttttttgaaacatacgatttcgatataattgccgataaagtcaatggattgacaaacgata

SEQ ID NO: 231074 - DNA, 75 bp, synthetic construct
  source 1..75: mol_type = other DNA
cgacagaacaaaagtgcaacaactatctcagaatctttcaaatatttataattctatgagtggagttgctaaagc

SEQ ID NO: 231075 - DNA, 75 bp, synthetic construct
  source 1..75: mol_type = other DNA
caataagtaacccaaacccaaacgttaacacagctgatgtgatggaagcttttattagagcatcaacaagggagc

SEQ ID NO: 231076 - DNA, 75 bp, synthetic construct
  source 1..75: mol_type = other DNA
ggagtgcactttcccgatgaccatcggtgacgtttctgtgtttgatggcgatgcaccggacacggagaatccgtc

SEQ ID NO: 231077 - DNA, 75 bp, synthetic construct
  source 1..75: mol_type = other DNA
tgaacttgatccgacctgggatgatgatgcgctgtcgttaattctctcaccggaagctctggtggtggctaaccc

SEQ ID NO: 231078 - DNA, 75 bp, synthetic construct
  source 1..75: mol_type = other DNA
cgtaccgtaatggtctgggaggctggacatgccacacccaacactaaaaagaattacggttatctcatctggcgt

SEQ ID NO: 231079 - DNA, 75 bp, synthetic construct
  source 1..75: mol_type = other DNA
gtcctgaaaggatggctagattaggctatatgattaaaggattattaaatggggtccttggcaatgtaggaaaaa

SEQ ID NO: 231080 - DNA, 75 bp, synthetic construct
  source 1..75: mol_type = other DNA
aacttacacaagcgaatatgagaaaactacctgttagtttagcgcctctcgccgaacaaaaaatcatcgcagaaa

SEQ ID NO: 231081 - DNA, 75 bp, synthetic construct
  source 1..75: mol_type = other DNA
atgccaatatgatattttatatacagttacaggttcttatggaatacctgtaattgttaacgacaataaaccatt

SEQ ID NO: 231082 - DNA, 75 bp, synthetic construct
  source 1..75: mol_type = other DNA
atacctgggtcgatgaagatgagtatgaagacgacgaagagtatgaagatgaaaatcacggcaaacagcatgaat

SEQ ID NO: 231083 - DNA, 75 bp, synthetic construct
  source 1..75: mol_type = other DNA
gagaaaacagcgccgccgcgttgctggaaaaaatcaaagctgaacgcgcagccagcggaggtaaaaaagcctcgc

SEQ ID NO: 231084 - DNA, 75 bp, synthetic construct
  source 1..75: mol_type = other DNA
gatttaaaccctgactatcttaactaccatttaaatagcattttggggaggcaatattgctactcagtaaaatct

SEQ ID NO: 231085 - DNA, 75 bp, synthetic construct
  source 1..75: mol_type = other DNA
caaatcccacaaatcctgaaacgttttcgtcaggcggtgttggctgctgttgttaatggaaaattatcaaagaac

SEQ ID NO: 231086 - DNA, 75 bp, synthetic construct
  source 1..75: mol_type = other DNA
ttcgacaagcccaatgacaccagcgcggttatccaggctcagaccatccagctatgcgtcacggtggtcttccgg

SEQ ID NO: 231087 - DNA, 75 bp, synthetic construct
  source 1..75: mol_type = other DNA
gtctgaatcatcctgtcggggcgttgctgctgagctatgccggttcacgcttcgacaaacccgatgatattggtg

SEQ ID NO: 231088 - DNA, 75 bp, synthetic construct
  source 1..75: mol_type = other DNA
ctgtgctggcccggttgcgcgagaagctgccccagctgcaggtggagtacttcccggaaaagccgtccgaatacc

SEQ ID NO: 231089 - DNA, 75 bp, synthetic construct
  source 1..75: mol_type = other DNA
gtggatgccaactgccatatccgactgcatcagcaagcgctgccggatggcgcacatattttgattaatgacttc

SEQ ID NO: 231090 - DNA, 75 bp, synthetic construct
  source 1..75: mol_type = other DNA
tggcgaattcacggttaaacgcttgcagctgacaccccatatcgccctgctgacgatgaacccggcctatcccac

SEQ ID NO: 231091 - DNA, 75 bp, synthetic construct
  source 1..75: mol_type = other DNA
gcactccggcgatttaatggttgtcgacaaagctgaaaaacccatgcagggggatattgtcatcgcggaaacaga

SEQ ID NO: 231092 - DNA, 75 bp, synthetic construct
  source 1..75: mol_type = other DNA
gcagttcgacgaagccaataacgccgaaaaagcaatgaacaatctaaaggatggcctggcaaaactggggcaaac

SEQ ID NO: 231093 - DNA, 75 bp, synthetic construct
  source 1..75: mol_type = other DNA
tatacctgataatgtttcctggggattccggggggggggatatttagatataaacggaaaagacactgagttctc

SEQ ID NO: 231094 - DNA, 75 bp, synthetic construct
  source 1..75: mol_type = other DNA
ctcggtttgtttatgcagtttgaccgtctggagctgctggcgtcagttaactttgcgtgctgccggaccgacaac

SEQ ID NO: 231095 - DNA, 75 bp, synthetic construct
  source 1..75: mol_type = other DNA
ttcccatggctggaaggcaccattcgttatacggatgtgcgcacacgcaaatatagccagtgggaagatttcagc

SEQ ID NO: 231096 - DNA, 75 bp, synthetic construct
  source 1..75: mol_type = other DNA
aatatcaaaagctggaaggcgacgccaatgcaactggttaacggcgatgaagtattaacgctaaagttcgattgt

SEQ ID NO: 231097 - DNA, 75 bp, synthetic construct
  source 1..75: mol_type = other DNA
gtcgcgtagcggtagacattgaactgggcggctggcaggaacaactgattctgaccctcaccagtgaagagggcg

SEQ ID NO: 231098 - DNA, 75 bp, synthetic construct
  source 1..75: mol_type = other DNA
tatggctggcaactggcggggatgatgttgattggcgcggcattgatgcgtagtggttggctgaaagggcagtac

SEQ ID NO: 231099 - DNA, 75 bp, synthetic construct
  source 1..75: mol_type = other DNA
aggggccggtggaatggctctggcgtcagttaactttgcgtgctgccggaccggcaatatctaaaacatcaagat

SEQ ID NO: 231100 - DNA, 75 bp, synthetic construct
  source 1..75: mol_type = other DNA
catcggttgtcactatcgggactggtacgtcggctgagcttgcctctggcgggagcgctgcctccacctttgcgg

SEQ ID NO: 231101 - DNA, 75 bp, synthetic construct
  source 1..75: mol_type = other DNA
cttcacggtggtgttgaagcgatcagtaatcgtgccgatggtgttggcaacagtttactggcactgggcgcacag

SEQ ID NO: 231102 - DNA, 75 bp, synthetic construct
  source 1..75: mol_type = other DNA
tactgttcggcttttggccgcaattaagccgctttaagctggtgctggcgattgcttgcgttgggcggatggcgc

SEQ ID NO: 231103 - DNA, 75 bp, synthetic construct
  source 1..75: mol_type = other DNA
tacaccgtctgacgcctggacatgggcatttctcgatctcatcgggcaggtgaaattcctcacgctttttgcgtt

SEQ ID NO: 231104 - DNA, 75 bp, synthetic construct
  source 1..75: mol_type = other DNA
gtggcgtttggtaaacgtgatattgctggtacgggtctgtttgacggtgagtatctggtggccagcaagcaagcg

SEQ ID NO: 231105 - DNA, 75 bp, synthetic construct
  source 1..75: mol_type = other DNA
aacaacttgcggcctggtatcaaccgattccagaaccggttaaagaaccagaaccgatcaaatcttcgttgaaag

SEQ ID NO: 231106 - DNA, 75 bp, synthetic construct
  source 1..75: mol_type = other DNA
ctggattttaaacattctcaccttcgccagtaatcgtacccgtcgcgatgatacctgggtcgatgaagatgagta

SEQ ID NO: 231107 - DNA, 75 bp, synthetic construct
  source 1..75: mol_type = other DNA
gtttcctaataaaacaaatattcaaattgagttgatggataaatatgggttggatttcatcggtgcatcatttac

SEQ ID NO: 231108 - DNA, 75 bp, synthetic construct
  source 1..75: mol_type = other DNA
tttcactgtttttcatcgcagttatgactacaacagcaaacgctgctgtttgcacacccgctatggaaaccgcag

SEQ ID NO: 231109 - DNA, 75 bp, synthetic construct
  source 1..75: mol_type = other DNA
atgtataaacttaataaaaagaaatggcgaacaaatgtctgtgtccgcattttaaaaataatccttcctgcaaca

SEQ ID NO: 231110 - DNA, 75 bp, synthetic construct
  source 1..75: mol_type = other DNA
gcagttgccacgaccgaaacgtatccgcgtgccaactcgtcgtgaactggcgtcttacggtattaagctgccctc

SEQ ID NO: 231111 - DNA, 75 bp, synthetic construct
  source 1..75: mol_type = other DNA
cgggtacgggtttgtttgacggtgagtatctggtcgccagcaaacaagcgggtccgttcgatttcactctcggta

SEQ ID NO: 231112 - DNA, 75 bp, synthetic construct
  source 1..75: mol_type = other DNA
atatagccaatgggaagatttcagcggcgaccagtcgtataaagacaaatcgttcgattttaaacttcgtctgtg

SEQ ID NO: 231113 - DNA, 75 bp, synthetic construct
  source 1..75: mol_type = other DNA
gctgcctggccattgccgtctccagtgcctgtcatgctgaagtattaacctatcctgatccggtaggcccttcgc

SEQ ID NO: 231114 - DNA, 75 bp, synthetic construct
  source 1..75: mol_type = other DNA
aggtcaacaacctgaataaacgtatgggtgacctgcgtgatatcaacggcgaagccggtgcatgggcacgcatca

SEQ ID NO: 231115 - DNA, 75 bp, synthetic construct
  source 1..75: mol_type = other DNA
tatgaacgggaatatcagggccgttaaccagagcactgttattatcggcggagatacagtctttactgataaaaa

SEQ ID NO: 231116 - DNA, 75 bp, synthetic construct
  source 1..75: mol_type = other DNA
atgcgggcaatattaccaacccgtttttgccgggtgagcgataaatattgtcatcgtgcagaatcccacgatgcg

SEQ ID NO: 231117 - DNA, 75 bp, synthetic construct
  source 1..75: mol_type = other DNA
tgccagacggtcgatcacctggtgcaagttaccgtcgaaaaccctggtacgcccattgcgcctgagcacttaccg

SEQ ID NO: 231118 - DNA, 75 bp, synthetic construct
  source 1..75: mol_type = other DNA
gccatcgccccggcgagtcgtgaactgctccatcaacgaattgagcagcgttttcatcagatgttggcttcaggt

SEQ ID NO: 231119 - DNA, 75 bp, synthetic construct
  source 1..75: mol_type = other DNA
ttcaggaggtagatccggttgcggcagcaaggattcatccaaatgatccacaaaggctttcccgggcactggaag

SEQ ID NO: 231120 - DNA, 75 bp, synthetic construct
  source 1..75: mol_type = other DNA
tttcggagattgctaacgaacgctttggataagtacgcccccaaatttaagaaaaaagcaaccaaaaagcgtcca

SEQ ID NO: 231121 - DNA, 75 bp, synthetic construct
  source 1..75: mol_type = other DNA
cagtaacgatgattattctggcaattatatgtctaatccagtagttccaagtgaatatacgaatatacatagcgg

SEQ ID NO: 231122 - DNA, 75 bp, synthetic construct
  source 1..75: mol_type = other DNA
acgaccaagttattgattctgtgaacttcgcccttagatcgttgtcagagttattcgaagcccatggaatgcatg

SEQ ID NO: 231123 - DNA, 75 bp, synthetic construct
  source 1..75: mol_type = other DNA
cgttgcgtccgcatctcaaaatcgatctggtgcaggaaggtttacgtattcagataatcgatagccagaatcgcc

SEQ ID NO: 231124 - DNA, 75 bp, synthetic construct
  source 1..75: mol_type = other DNA
tctggtccaggaaggtctacgtattcagatcatcgatagccagaatcgcccgatgtttagaaccggcagtgccga

SEQ ID NO: 231125 - DNA, 75 bp, synthetic construct
  source 1..75: mol_type = other DNA
aatgctgctgattcgaacgtatgctctatatatgacacgagtgcattacagcaccttataaatattcaggccgac

SEQ ID NO: 231126 - DNA, 75 bp, synthetic construct
  source 1..75: mol_type = other DNA
aactgacgcaaacgtcaggagacgctctaccgtatcaggtgcatcagttcgccatcgctccggcgagccgtgaac

SEQ ID NO: 231127 - DNA, 75 bp, synthetic construct
  source 1..75: mol_type = other DNA
gactgcggttacgggcggcgatcgcatttctaatagtgaaagcccaattcccggtgggggtgatgattacaccca

SEQ ID NO: 231128 - DNA, 75 bp, synthetic construct
  source 1..75: mol_type = other DNA
gcggcccccaaacgcccgtcggggccaacgccaattgagttgctgaaacaggaatatgaacgccggaaagcggct

SEQ ID NO: 231129 - DNA, 75 bp, synthetic construct
  source 1..75: mol_type = other DNA
ctggcgcaatgagtcctggcgatacgacggaagtgataagtacccgtggtctcagcctgtgctgtatcacatttg

SEQ ID NO: 231130 - DNA, 75 bp, synthetic construct
  source 1..75: mol_type = other DNA
atgcagcatcaggtggcacggcatcacgggcagttcaggaaatccgggcagcacgcgaacagtgggaacgtgaca

SEQ ID NO: 231131 - DNA, 75 bp, synthetic construct
  source 1..75: mol_type = other DNA
catggccccctgacctggctgaatttgtggcgctggtttcggaaagcggagccaatccgtttggtctgacggtgg

SEQ ID NO: 231132 - DNA, 75 bp, synthetic construct
  source 1..75: mol_type = other DNA
atagtgaaatcgattgttgtcgcacataaaggcacggttgcggtaacgtcagatgcgcaggggacaaggtttatt

SEQ ID NO: 231133 - DNA, 75 bp, synthetic construct
  source 1..75: mol_type = other DNA
cgtggcctccggacctggctgagtttgtggcgttgatttcggagagcggggcaaatccatttggcctgacggtgg

SEQ ID NO: 231134 - DNA, 75 bp, synthetic construct
  source 1..75: mol_type = other DNA
atggctacgtggcaacagggtattaattctggtggttttcttgctggcatcggtacgcaaaatgagaatgcgcca

SEQ ID NO: 231135 - DNA, 75 bp, synthetic construct
  source 1..75: mol_type = other DNA
atgagtggttacgacggaatcgcaaaacgcctgcagcaggcgatttctgatcccgatgttaaggggatcctgctg

SEQ ID NO: 231136 - DNA, 75 bp, synthetic construct
  source 1..75: mol_type = other DNA
ggcgctcgatacactaatgagcactgaatcaccagcgactattcaggatgctggcagtactacggcaacaggaac

SEQ ID NO: 231137 - DNA, 75 bp, synthetic construct
  source 1..75: mol_type = other DNA
gacctggctgagtttgttgcgctgatttcggagagtggggcaaatccatttggtcttacggtggatgccgtgatg

SEQ ID NO: 231138 - DNA, 75 bp, synthetic construct
  source 1..75: mol_type = other DNA
ccgtcaaatccagaacattacctcgaaagatctcgacgttcgcctcgatccacagaccgtgcccattgaactcga

SEQ ID NO: 231139 - DNA, 75 bp, synthetic construct
  source 1..75: mol_type = other DNA
caccttgggatggctgcgcttggtccgattgattacttcaatgttcaggacaagatggctggtcgccaacttgag

SEQ ID NO: 231140 - DNA, 75 bp, synthetic construct
  source 1..75: mol_type = other DNA
tctggcgtggaagcggcaattgacctggcgggtattgttgaacacgtaaccctgcttgagtttgcgccagaaatg

SEQ ID NO: 231141 - DNA, 75 bp, synthetic construct
  source 1..75: mol_type = other DNA
ggatgtcattgacagccagagcgccagcaagctgattccggcggctgttgaaggcggtctgcatcagattgaaac

SEQ ID NO: 231142 - DNA, 75 bp, synthetic construct
  source 1..75: mol_type = other DNA
tgttgcaaacaaaacccagaactttgaagtcactgcacagtaccagtttgattttggtctgcgtccggcagtctc

SEQ ID NO: 231143 - DNA, 75 bp, synthetic construct
  source 1..75: mol_type = other DNA
cagtattgagagccgcttcaggcagtttctgctttacattgctcagtcagggctgaaagagaaaatctttttccc

SEQ ID NO: 231144 - DNA, 75 bp, synthetic construct
  source 1..75: mol_type = other DNA
cgtcggcttttactacccgatgacccagccgattaaagatgcggtggaaaccgtttatcaacggctggaaggctg

SEQ ID NO: 231145 - DNA, 75 bp, synthetic construct
  source 1..75: mol_type = other DNA
ttttcctcggcatccagccggatatcgtcggcttttactacccgatgacccagccgattaaagatgcggtagaaa

SEQ ID NO: 231146 - DNA, 75 bp, synthetic construct
  source 1..75: mol_type = other DNA
attgtgaaatcgattgttgtcgcacataaaggcaccgttgcggtaacgtcagatgcgcgggggacaagatttgtg

SEQ ID NO: 231147 - DNA, 75 bp, synthetic construct
  source 1..75: mol_type = other DNA
tgagcgcattagagcagctacagcaggactactcgaaaaggctggacgagtgggagaacgccttcgcggaatggc

SEQ ID NO: 231148 - DNA, 75 bp, synthetic construct
  source 1..75: mol_type = other DNA
gtcttcctttgagtaaatcgcgtattttgctcaatccacgcgatattgacattaatatggtgaataacagttgta

SEQ ID NO: 231149 - DNA, 75 bp, synthetic construct
  source 1..75: mol_type = other DNA
gtcttcctacgagtaaatcgcgtattttgctcaatccacgcgatattgacattcatatggtgaataagagttgta

SEQ ID NO: 231150 - DNA, 75 bp, synthetic construct
  source 1..75: mol_type = other DNA
tatctgaatggaaaaaataccgggtcttgctgatgcgcgttgatacatcaaatcccgtctggcctacgcctccgg

SEQ ID NO: 231151 - DNA, 75 bp, synthetic construct
  source 1..75: mol_type = other DNA
aacgggtacttaatcaccctgacgaaacgcaagcccgacgcttaatgacgctggaagatatcgtcagtggttatt

SEQ ID NO: 231152 - DNA, 75 bp, synthetic construct
  source 1..75: mol_type = other DNA
aaacctgcgcgattctgcattcagtgcgggttggtaaagcctgacgcgctggtagaaatcgccacgattgcgcat

SEQ ID NO: 231153 - DNA, 75 bp, synthetic construct
  source 1..75: mol_type = other DNA
agtgctggcgctgacaggggctggtacgttgaatctggcagagcaaacctgtgacacccagtttgatattcgtgt

SEQ ID NO: 231154 - DNA, 75 bp, synthetic construct
  source 1..75: mol_type = other DNA
ctcgacggtaaaaaatccgcggatatcctttcaaccccggctggaaaacgttgagattggcactattctgaaggc

SEQ ID NO: 231155 - DNA, 75 bp, synthetic construct
  source 1..75: mol_type = other DNA
atagtgaaatcgattgttgtcgcacataaaggcacggttgcggtaacgtcagatgcgcgggggacaaggtttgtt

SEQ ID NO: 231156 - DNA, 75 bp, synthetic construct
  source 1..75: mol_type = other DNA
atttcccgcaagcgccgtccactggtggtgtgcggcggtggcgtgcgttactccggtgcgcatgaggcgttacgg

SEQ ID NO: 231157 - DNA, 75 bp, synthetic construct
  source 1..75: mol_type = other DNA
aaactaaaggacagtactaaagaatctaactggcgaacatataccagtagtagcaaatcagttaatcagatgatt

SEQ ID NO: 231158 - DNA, 75 bp, synthetic construct
  source 1..75: mol_type = other DNA
gtttaactatccgatttcgttgaccggaaagatgtcactggctggtgatttctccggtgctgacatagatgccga

SEQ ID NO: 231159 - DNA, 75 bp, synthetic construct
  source 1..75: mol_type = other DNA
aaggtggcggacagcgtgctggtgttccagcatgaagatgacgagcaggtgacaatccgcaatatccgcctgcaa

SEQ ID NO: 231160 - DNA, 75 bp, synthetic construct
  source 1..75: mol_type = other DNA
gcccattgcgcccgagcacttaccgcgattgtttgaccgcttctaccgcgttgacccctcccgccagcgaaaagg

SEQ ID NO: 231161 - DNA, 75 bp, synthetic construct
  source 1..75: mol_type = other DNA
ctggaacggggaaagcaaactgattgatttcctcaaagaaacgccagtaccgctgcgggtttatggcaactggca

SEQ ID NO: 231162 - DNA, 75 bp, synthetic construct
  source 1..75: mol_type = other DNA
atcgggtttgctggaaatcacccaactgcaaggcaaactcaacggtggacaggtatcgctgccggggacgctgga

SEQ ID NO: 231163 - DNA, 75 bp, synthetic construct
  source 1..75: mol_type = other DNA
aaactgattgattttctcaaagaaactccggttcctttgcgggtttatggcaattggcagcaactcaattacagc

SEQ ID NO: 231164 - DNA, 75 bp, synthetic construct
  source 1..75: mol_type = other DNA
catgtcacagaggatgcctggattgagccacaggcggaacttgtttacggtgctgtctccgggaaacagttcagc

SEQ ID NO: 231165 - DNA, 75 bp, synthetic construct
  source 1..75: mol_type = other DNA
ctgcgtgatgcatccggagagaagcgtatcaagggcgagaaagacggccgtatgctgatgtctgtgggtctgaac

SEQ ID NO: 231166 - DNA, 75 bp, synthetic construct
  source 1..75: mol_type = other DNA
gttcagctggaaggaccaggggatgagcctgtccatgaaggacaaggactacaatccgctgattggccgtaccgg

SEQ ID NO: 231167 - DNA, 75 bp, synthetic construct
  source 1..75: mol_type = other DNA
ttgcgaaagcagggtgataattctgttctgacgcagccggtatcatttgctcagaaggactgggagagcagaacg

SEQ ID NO: 231168 - DNA, 75 bp, synthetic construct
  source 1..75: mol_type = other DNA
gggtctgaacgcagaggttcgtgacaacatccgttttggtctggagtttgagaaatcagcctttggtaagtacaa

SEQ ID NO: 231169 - DNA, 75 bp, synthetic construct
  source 1..75: mol_type = other DNA
tgccggcagttgccggtggtgacattgtgtggaagtacagtaagggaagcggagagggaaccctttctcagggcg

SEQ ID NO: 231170 - DNA, 75 bp, synthetic construct
  source 1..75: mol_type = other DNA
acctgaacaaacgtatgggtgacctgcgggacatcaacggcgaggccggtgcatgggcccgtatcatgagcggaa

SEQ ID NO: 231171 - DNA, 75 bp, synthetic construct
  source 1..75: mol_type = other DNA
ccggtggtgatgcggcaggatgcaaagacaccgaatcctgtggaagccgtatcaccggtcccttcaccggctccg

SEQ ID NO: 231172 - DNA, 75 bp, synthetic construct
  source 1..75: mol_type = other DNA
tggctgcactgaccctggcttttgcggtttcttctcatgccgcggataaaaaactggttgtggcgacggataccg

SEQ ID NO: 231173 - DNA, 75 bp, synthetic construct
  source 1..75: mol_type = other DNA
ggctgtttacaagtggaagcattgatattggtgacgcttcccttctgcttaccggtacaccagtgaattcagatg

SEQ ID NO: 231174 - DNA, 75 bp, synthetic construct
  source 1..75: mol_type = other DNA
tccgctttggactggagtttgagaaatccgcctttggtaagtacaacgttgataatgctgtcaacgctaacttcc

SEQ ID NO: 231175 - DNA, 75 bp, synthetic construct
  source 1..75: mol_type = other DNA
tggcagaaaatcccgccgcaacccaaagtgcctcaggccttgcatctgtggggtacaaatcatttttgagtgagg

SEQ ID NO: 231176 - DNA, 75 bp, synthetic construct
  source 1..75: mol_type = other DNA
gggacggtgggaagtccgctcatttctgactggagtctggtgtcaaacccggggtatctgtaccagagtgtcaat

SEQ ID NO: 231177 - DNA, 75 bp, synthetic construct
  source 1..75: mol_type = other DNA
ttttaatttattatcatgctttttacagcatggtgtttatctttgtttttcatgcagttaaaaataaagccatcc

SEQ ID NO: 231178 - DNA, 75 bp, synthetic construct
  source 1..75: mol_type = other DNA
gcggaagtcatgaaagtcttcgagtttttcgaagcctgggccgaagaacgcaatatcacgctcaaatttaacggg

SEQ ID NO: 231179 - DNA, 75 bp, synthetic construct
  source 1..75: mol_type = other DNA
gcgtcgaaaaccacggtggcagtctgcgcatctggtttaattttaaaggtaagcgcgtcagggaaaacctcggtg

SEQ ID NO: 231180 - DNA, 75 bp, synthetic construct
  source 1..75: mol_type = other DNA
cagttctcaccgcacgacgatcgcagaccggaagcggttgctgccgcgttaatcgctcagggtttgcagccggta

SEQ ID NO: 231181 - DNA, 75 bp, synthetic construct
  source 1..75: mol_type = other DNA
gatctcagcgatgagtttgtcaatgaactgacggcagctggcgtggtatttcgctactacgatccccgccctcgc

SEQ ID NO: 231182 - DNA, 75 bp, synthetic construct
  source 1..75: mol_type = other DNA
ataatctgaacggcattatcgccgcagattgtcagcaggtcgatgagaccatgctgccgaaacgcacctggtgga

SEQ ID NO: 231183 - DNA, 75 bp, synthetic construct
  source 1..75: mol_type = other DNA
atacgacgtatcccaccaaaaaagtcacaccggacgaagtatctccagtcacgttaggcgataacctcaccagta

SEQ ID NO: 231184 - DNA, 75 bp, synthetic construct
  source 1..75: mol_type = other DNA
tgtgccggatgtgctggaaacctgccagttgagtatggggctgacagaactggcaccgggaaacctgtggaatac

SEQ ID NO: 231185 - DNA, 75 bp, synthetic construct
  source 1..75: mol_type = other DNA
ggccggtaccagtgcggatgtgttcagtgtgaaaacgcgtgataccggcttcagtcatatcacacctgttgtcag

SEQ ID NO: 231186 - DNA, 75 bp, synthetic construct
  source 1..75: mol_type = other DNA
ctgctgggcattatcggcgggagctaatccaagctttatcgcaaaccagatgggacatgcaaacgcccaaatggt

SEQ ID NO: 231187 - DNA, 75 bp, synthetic construct
  source 1..75: mol_type = other DNA
ggatctgaagaaaatcgagataggtggtaacgcgctcaatcggtatcaatctgtggtgagaaacatgctccctcg

SEQ ID NO: 231188 - DNA, 75 bp, synthetic construct
  source 1..75: mol_type = other DNA
gggcgtgagctactttcttgagcgccgtgagctgggcgttatcaatattggcggaaccggtacgattaccgtcga

SEQ ID NO: 231189 - DNA, 75 bp, synthetic construct
  source 1..75: mol_type = other DNA
tattgtttactaccctgctggcaggaattgcctttcctgcacaggctgaaagcggacacggtgcattttctgtgg

SEQ ID NO: 231190 - DNA, 75 bp, synthetic construct
  source 1..75: mol_type = other DNA
cccgtagagacggtggttattgaccttgcttatgaaggctccggcagtggcgattggcgcactgacggtttcatt

SEQ ID NO: 231191 - DNA, 75 bp, synthetic construct
  source 1..75: mol_type = other DNA
aacgcacgacgtgctgaccggaagtggtgacggtcgccacagcaacacgtctctggcgtggggagctggcgtgca

SEQ ID NO: 231192 - DNA, 75 bp, synthetic construct
  source 1..75: mol_type = other DNA
acttgatgtcttttcaacaccatttgattttgaatctatcgattttcttgcttcaagaaatcaaaaaatgtggaa

SEQ ID NO: 231193 - DNA, 75 bp, synthetic construct
  source 1..75: mol_type = other DNA
cctgctgttttatgtgacctcggcggactccggggcgctggtgctggggaatttcacctcgcagcttaaagatat

SEQ ID NO: 231194 - DNA, 75 bp, synthetic construct
  source 1..75: mol_type = other DNA
tcggcgctgtacccgatcttcggtaaacggattaacgggccgatagggcactcagtggatattgcagcggtgatc

SEQ ID NO: 231195 - DNA, 75 bp, synthetic construct
  source 1..75: mol_type = other DNA
cgtggcccccggacctggctgagtttgttgcgctgatttcggagagtggggcaaatccatttggtcttacggtgg

SEQ ID NO: 231196 - DNA, 75 bp, synthetic construct
  source 1..75: mol_type = other DNA
actggaaggggcgaaacacccgaaagggccaacgccaattgaacggctgaaacaggaatacgaacgccggaaggc

SEQ ID NO: 231197 - DNA, 75 bp, synthetic construct
  source 1..75: mol_type = other DNA
gcaccagagggattgaacgtcagatgactgaaagtgagctgaaacgacttgcggaacgactgttgaccaaatggg

SEQ ID NO: 231198 - DNA, 75 bp, synthetic construct
  source 1..75: mol_type = other DNA
atgagtttacggacatactggggctggtgacgtcattcagctatgcaggagacaagaatcgccagctgacccgtt

SEQ ID NO: 231199 - DNA, 75 bp, synthetic construct
  source 1..75: mol_type = other DNA
ttgaccttgtgattgaaaatccggggaaaccaatccctgaagagcatttatcaaggttgtttgaccgtttttatc

SEQ ID NO: 231200 - DNA, 75 bp, synthetic construct
  source 1..75: mol_type = other DNA
atgctgtgatggaggagtaccgccgctggcgcaacgagtcctggcgatacgacggaagcgataaatacccgtggt

SEQ ID NO: 231201 - DNA, 75 bp, synthetic construct
  source 1..75: mol_type = other DNA
ataaagattttgaagggcctgatcataaggcatcagttacaccagacgagttgtgcttattgtgtgagggaatcc

SEQ ID NO: 231202 - DNA, 75 bp, synthetic construct
  source 1..75: mol_type = other DNA
tcgccagttgacttcgataacctttatcaaggggcaattcacttaacagaatttggttactgtgtgcataactat

SEQ ID NO: 231203 - DNA, 75 bp, synthetic construct
  source 1..75: mol_type = other DNA
ccgttgagtggctggagttagcggtagagcagggttttcaggagtttcgacttcgaatgagtgaaaccaagatca

SEQ ID NO: 231204 - DNA, 75 bp, synthetic construct
  source 1..75: mol_type = other DNA
gccatcatatggtgcgattaaaaaaaatccgctgtcgttatcgcactgcaggcgatggaagcaaaaaagcatcag

SEQ ID NO: 231205 - DNA, 75 bp, synthetic construct
  source 1..75: mol_type = other DNA
aagaactgaagctggattacgaactgaaaccgatggatttcagcggtattattccggcgctgcaaaccaaaaacg

SEQ ID NO: 231206 - DNA, 75 bp, synthetic construct
  source 1..75: mol_type = other DNA
tacatgtgggatagcgaaagaaaagatattgatgcccccgggtattatcggactgagcatttagtgttcgcggag

SEQ ID NO: 231207 - DNA, 75 bp, synthetic construct
  source 1..75: mol_type = other DNA
attttttctcaaaatgatgagttactgagtccaagggataagttcaccagttcagtatttgcacttctactttgt

SEQ ID NO: 231208 - DNA, 75 bp, synthetic construct
  source 1..75: mol_type = other DNA
cctgacagtgattgccaacatgaaatcactgaaattccaggggcgttatactgacagtaactatatttccactct

SEQ ID NO: 231209 - DNA, 75 bp, synthetic construct
  source 1..75: mol_type = other DNA
gtgcagtagaaatttcacttggtagctatgaaaagttagtaacaaattcagaacgaaagaataaagtagtagctc

SEQ ID NO: 231210 - DNA, 75 bp, synthetic construct
  source 1..75: mol_type = other DNA
gcttgatgttttttcaactccatttgattttgaatcgattgattttttggcatcacgaaaccaaaagatgtggaa

SEQ ID NO: 231211 - DNA, 75 bp, synthetic construct
  source 1..75: mol_type = other DNA
tcattgttgatgaaggcattcctgcggatagtctggaaggactgcgaaaggctggggttgaagtgattctggtcg

SEQ ID NO: 231212 - DNA, 75 bp, synthetic construct
  source 1..75: mol_type = other DNA
agactcataccagttcactgtaacattgaccggggcgacagccagcgttacaggtttcctgaaagctggtgatca

SEQ ID NO: 231213 - DNA, 75 bp, synthetic construct
  source 1..75: mol_type = other DNA
ctgcaacagcagaccaaacaggcgttgtataacggagccacaccaattagcttcactgcaacggttactgctgat

SEQ ID NO: 231214 - DNA, 75 bp, synthetic construct
  source 1..75: mol_type = other DNA
cgggcactgttcggactcccgcccatacagccaaaaccccagcagcaaccagaacacgtccagtacagccaagag

SEQ ID NO: 231215 - DNA, 75 bp, synthetic construct
  source 1..75: mol_type = other DNA
tccgtacgtgctggaagagatggaagcagcgaagaacaatgacgtcaacgcgttcgataaactgttgttcaaaca

SEQ ID NO: 231216 - DNA, 75 bp, synthetic construct
  source 1..75: mol_type = other DNA
ctgaaacgtcgtgagcgtatctcggcacgtctgggggatattttaagtcagctttacctcgcctctgccgttctg

SEQ ID NO: 231217 - DNA, 75 bp, synthetic construct
  source 1..75: mol_type = other DNA
atcttcccgaccggacgtcattatctggcaccgtctgacaagctggatcataaagtggcgaagattttacaagtg

SEQ ID NO: 231218 - DNA, 75 bp, synthetic construct
  source 1..75: mol_type = other DNA
tattccaaacgaatcagaatggggttcccttgaaacttgggacagaaatacaccactacgagatgatgaagttga

SEQ ID NO: 231219 - DNA, 75 bp, synthetic construct
  source 1..75: mol_type = other DNA
tttggacccatgggatggaggaacgcctttaagaggtgatgaagttgaaattccttaccttaaagatattgagtt

SEQ ID NO: 231220 - DNA, 75 bp, synthetic construct
  source 1..75: mol_type = other DNA
aagatctggcgcgtgcggcgttaattgaaaaacagaaactgaccgatctgattaagagcctggaacatgaagtga

SEQ ID NO: 231221 - DNA, 75 bp, synthetic construct
  source 1..75: mol_type = other DNA
aatcaactacaacattgatgaaccgagcagttccggtaaaacattatctattgcgtttgttaatcagcgccaata

SEQ ID NO: 231222 - DNA, 75 bp, synthetic construct
  source 1..75: mol_type = other DNA
gcgtaaagaagctgacggcacttacaccgttggcatcaccgagcatgctcaggaactgttaggcgatatggtgtt

SEQ ID NO: 231223 - DNA, 75 bp, synthetic construct
  source 1..75: mol_type = other DNA
atttttgatggatcattaaacgttgcttccttagatccgttatatcaacactttgaaaatatcgatatgaataat

SEQ ID NO: 231224 - DNA, 75 bp, synthetic construct
  source 1..75: mol_type = other DNA
aaccccgtaactaccggcaggatggttatatccgccgtttgccccaggatccttggggggggattatcagctgtt

SEQ ID NO: 231225 - DNA, 75 bp, synthetic construct
  source 1..75: mol_type = other DNA
gtggccacaacgaatgcaggagatgctccagcaaattttgcctcatcgtggtgcgttattaactaatttttatca

SEQ ID NO: 231226 - DNA, 75 bp, synthetic construct
  source 1..75: mol_type = other DNA
gtttatcaaaagcgttaaaccaaccgtggccacaacgaatgcaggagatgctccagcaaattttgcctcatcgtg

SEQ ID NO: 231227 - DNA, 75 bp, synthetic construct
  source 1..75: mol_type = other DNA
gtgttcatagcgaagatcataacggctttaaactgaggttctccaaggcaacgctcagaagggtgggtgcaaata

SEQ ID NO: 231228 - DNA, 75 bp, synthetic construct
  source 1..75: mol_type = other DNA
cgattgatgccagtgccgatatctgggcggcgtttaaccagttacagacctataaaaacgaattgagcgatctgt

SEQ ID NO: 231229 - DNA, 75 bp, synthetic construct
  source 1..75: mol_type = other DNA
ccgcagcgcaatctggccgtcgagttgctggagaaactgctgaacgatggcattcatgcccgtaccaaaaacaac

SEQ ID NO: 231230 - DNA, 75 bp, synthetic construct
  source 1..75: mol_type = other DNA
tgcccgttggttttgtgaaggccgaaccaacttgtgtcacaacgctatcgatcgctggctggagaaacagccagg

SEQ ID NO: 231231 - DNA, 75 bp, synthetic construct
  source 1..75: mol_type = other DNA
acgatgcgctggcagaaaacgaaagtgcggtacgggagctgggtgatgacgtccttaagaaactggctatcgaag

SEQ ID NO: 231232 - DNA, 75 bp, synthetic construct
  source 1..75: mol_type = other DNA
cgatgaacaaagcctggtcgctgtgcagtacgttagatgaagctaaacccttgcaaaaagagatcgcgtttttgt

SEQ ID NO: 231233 - DNA, 75 bp, synthetic construct
  source 1..75: mol_type = other DNA
gccgcacatctacaataagcaaaccaaaaaacgccttgaagcgcgctttaaagatctcaacgacccgttgaaact

SEQ ID NO: 231234 - DNA, 75 bp, synthetic construct
  source 1..75: mol_type = other DNA
agcaaactgatcccggcagcggttgaaggcggcctgcatcagattgaaacagcttctggcgcggtactgaaagca

SEQ ID NO: 231235 - DNA, 75 bp, synthetic construct
  source 1..75: mol_type = other DNA
tgccaatgcatcccgccgcgaactgatggttggcgggttgaatggcggcaaagtgttacgtgtcgtcggcatggc

SEQ ID NO: 231236 - DNA, 75 bp, synthetic construct
  source 1..75: mol_type = other DNA
tagccgtcgatacgaacaacaaacgcatagttgatgggaaactgtatgccattggtcagacagatggcgggaatg

SEQ ID NO: 231237 - DNA, 75 bp, synthetic construct
  source 1..75: mol_type = other DNA
ctgaaaggactctcaaccaccgccacaccaggcactgaaggccgggttgtgccggaagaccgggcacaacgcaga

SEQ ID NO: 231238 - DNA, 75 bp, synthetic construct
  source 1..75: mol_type = other DNA
cgtccgcaggctgaaacagcacgccggcttcgaactgaacaaaacgcactggcgtcccgtcatcagcacggagaa

SEQ ID NO: 231239 - DNA, 75 bp, synthetic construct
  source 1..75: mol_type = other DNA
ccacaacacttgatgccctgtatgacttccggccgctgctcagcccggaaggctggctgcccccggtgattgacg

SEQ ID NO: 231240 - DNA, 75 bp, synthetic construct
  source 1..75: mol_type = other DNA
tgagctaaaaagcccactggcggcgattcgtggcgcggcggaaattttacgcgaaggtccgccgccggaagtggt

SEQ ID NO: 231241 - DNA, 75 bp, synthetic construct
  source 1..75: mol_type = other DNA
gttcctcttcccgatctcggtagtagcgagctgcgtaaactcgcgcaggcgctggaaagtatgcgcgtgaagctg

SEQ ID NO: 231242 - DNA, 75 bp, synthetic construct
  source 1..75: mol_type = other DNA
ggcacaggcgtttgaccaactacaaaatcgcccgtttcgcgccaatatcggcggcattcacaaagtgcgcaacga

SEQ ID NO: 231243 - DNA, 75 bp, synthetic construct
  source 1..75: mol_type = other DNA
gactggttgggcaaaatcaaacgtatacggtgcaagaaggggataaaaaccttcaggccatcgcccgacgttttg

SEQ ID NO: 231244 - DNA, 75 bp, synthetic construct
  source 1..75: mol_type = other DNA
aacagcagaacgttcagacgatgccgtataaactgcccgttggttttacacaattcaaagataataaggcggtag

SEQ ID NO: 231245 - DNA, 75 bp, synthetic construct
  source 1..75: mol_type = other DNA
atgcgtatcggcatgcggttgctgctgggctattttttactggtggcggcctggttcgtactggctatttttgtc

SEQ ID NO: 231246 - DNA, 75 bp, synthetic construct
  source 1..75: mol_type = other DNA
tttgctgccgggatcggtatcgacctgatgttcttctccgtagccgaaccggtaacgcagtatatgcagccgccg

SEQ ID NO: 231247 - DNA, 75 bp, synthetic construct
  source 1..75: mol_type = other DNA
cattagcggccccagttcaacggcggatattgagcttatcaaagtcgtcggagttcatggcccggtgaaagcggt

SEQ ID NO: 231248 - DNA, 75 bp, synthetic construct
  source 1..75: mol_type = other DNA
gttaagtatcactgtacccaccgtgggcagcagtcgattatcgatgcgatggatattactggtggtaaaggcatt

SEQ ID NO: 231249 - DNA, 75 bp, synthetic construct
  source 1..75: mol_type = other DNA
cagtgaagtcgcccgcttgcttaatggcgaagttacgctgcacaacgtgccggaaggcggcgtgctggcctcgct

SEQ ID NO: 231250 - DNA, 75 bp, synthetic construct
  source 1..75: mol_type = other DNA
aatttactggataacgccatcgattttacccccgagagcggtcgcataacgctaagcgccgaagtggatcaggaa

SEQ ID NO: 231251 - DNA, 75 bp, synthetic construct
  source 1..75: mol_type = other DNA
tgttatcggaactcaacgttgcgctggcgctgggattgatcctgttcgtgttgtttatgggcgacacctcgttcc

SEQ ID NO: 231252 - DNA, 75 bp, synthetic construct
  source 1..75: mol_type = other DNA
aaacctgccgtgctgtcggctatcgttaagtatcactgtacccaccgcgggcagcagtcgattattgatgcgatg

SEQ ID NO: 231253 - DNA, 75 bp, synthetic construct
  source 1..75: mol_type = other DNA
ggtcgcagacccacattatcgcaacgactggggattctacgacgataccgtgctggatgaagcatggaaaaaatt

SEQ ID NO: 231254 - DNA, 75 bp, synthetic construct
  source 1..75: mol_type = other DNA
ttctcagtgtggcattccgctttttgccccctttgaaggtaacgcctccgcttctgtttccagcttcttcccgca

SEQ ID NO: 231255 - DNA, 75 bp, synthetic construct
  source 1..75: mol_type = other DNA
ctgaaaaactcgggttatcagaactattacgtacagggagccaatctgcgttttgccggtaaagatgtgttcctg

SEQ ID NO: 231256 - DNA, 75 bp, synthetic construct
  source 1..75: mol_type = other DNA
atgggattactgggcaggattaaacaactgataagtgaaaatgagaaaccggcggaagtcacccgcgtgatggca

SEQ ID NO: 231257 - DNA, 75 bp, synthetic construct
  source 1..75: mol_type = other DNA
caaggtcaacttggcggacaacaaattgtgcagcatgttgataagcctgaatggaaaggcaaaacagcgtttaaa

SEQ ID NO: 231258 - DNA, 75 bp, synthetic construct
  source 1..75: mol_type = other DNA
gtctgtggaaattccccaccgagataaaagaatttaccatcaatcagaataaaaatatgatcgccttctcaggta

SEQ ID NO: 231259 - DNA, 75 bp, synthetic construct
  source 1..75: mol_type = other DNA
gtacaagcatccgctgccgaagaaatttgacctggtgattaccgccaaagcatacggcaataacgccagccgtcc

SEQ ID NO: 231260 - DNA, 75 bp, synthetic construct
  source 1..75: mol_type = other DNA
acggcaataacgccagccgtcctattccggtacgcgtaggcaatgaagaacaaacccttgtgctgggcaatgaag

SEQ ID NO: 231261 - DNA, 75 bp, synthetic construct
  source 1..75: mol_type = other DNA
tgggcgatgaagtaaaaatcgagtacaagcatccgctgccgaagaaatttgacctggtgattaccgccaaagcat

SEQ ID NO: 231262 - DNA, 75 bp, synthetic construct
  source 1..75: mol_type = other DNA
atggcagcgccattacattgtgtttctcaaaaaatcttaagcatcggctacacagcctggtttagtgaggatcgc

SEQ ID NO: 231263 - DNA, 75 bp, synthetic construct
  source 1..75: mol_type = other DNA
ggattacacaatcgcgggcatggtggcttcccagtgcggcattccgctgtttgccccgtttgaaggcaacgcttc

SEQ ID NO: 231264 - DNA, 75 bp, synthetic construct
  source 1..75: mol_type = other DNA
aacatcaccctgtttgccagcgactattttaccggcgacggcattaacgacgcggtgctctacaccttaacgaac

SEQ ID NO: 231265 - DNA, 75 bp, synthetic construct
  source 1..75: mol_type = other DNA
ctatttctcgatccgcacgatacgcgacacgctttccacgcttgtgcatgaaatggttcaccagttgcagcaaca

SEQ ID NO: 231266 - DNA, 75 bp, synthetic construct
  source 1..75: mol_type = other DNA
atgatccgctgccatcttgctcggctcatgggcgaacataagatgcgaatagccgatgttgtcagagaaactggc

SEQ ID NO: 231267 - DNA, 75 bp, synthetic construct
  source 1..75: mol_type = other DNA
tattaacgatcaggcacgccatctggtgcgtttaatgccggtgctgcgctctgagagatcccctcataatttccc

SEQ ID NO: 231268 - DNA, 75 bp, synthetic construct
  source 1..75: mol_type = other DNA
gattgataaagatgaagccgctattctggtgaaagcggaagaaagccgtctgcgcagtattaacgttgatgactt

SEQ ID NO: 231269 - DNA, 75 bp, synthetic construct
  source 1..75: mol_type = other DNA
cccggaagcgggttccgatgcgggcgcgattccggataccgggattgtctgcatgggtgaatggcagggccagca

SEQ ID NO: 231270 - DNA, 75 bp, synthetic construct
  source 1..75: mol_type = other DNA
ggcttttatgttttggtttctttttccgggacgaggcgttataaagaagtataattcccaattattgaaaataga

SEQ ID NO: 231271 - DNA, 75 bp, synthetic construct
  source 1..75: mol_type = other DNA
tgttagctcgtttattacttattgacatggaacagttacctgaactgtgctgtatccctgatgctggtacatggc

SEQ ID NO: 231272 - DNA, 75 bp, synthetic construct
  source 1..75: mol_type = other DNA
gttttagcgcaggggtctccgtcgttgatgctcggatctgatgaggccggagggctattcgacggtaatcttttc

SEQ ID NO: 231273 - DNA, 75 bp, synthetic construct
  source 1..75: mol_type = other DNA
ggaaatctatcggctggaaaaagagttgaaagatgattttttgttaaaggagaaagtttatgagcagaaatacgt

SEQ ID NO: 231274 - DNA, 75 bp, synthetic construct
  source 1..75: mol_type = other DNA
acggacatccgattgatgtcgaggatattaacgatcaggcacgccatctggtgcgtttaatgccggtgctgcgct

SEQ ID NO: 231275 - DNA, 75 bp, synthetic construct
  source 1..75: mol_type = other DNA
gctgggggcgctttgtttacgccatcggtggcaacccggaggcggcgcgtctggcgggggtgaacgtgaagcgcg

SEQ ID NO: 231276 - DNA, 75 bp, synthetic construct
  source 1..75: mol_type = other DNA
gcagattatcaccgggttaattatcgttctggcggtggcattcgacacctacgccaagagccgtcgcggcgcact

SEQ ID NO: 231277 - DNA, 75 bp, synthetic construct
  source 1..75: mol_type = other DNA
gcatgggtgaatggcagggccagcaggtgctggggatgcgtctgacctggaacaaacgctacattacgctggcac

SEQ ID NO: 231278 - DNA, 75 bp, synthetic construct
  source 1..75: mol_type = other DNA
accggaagacggtctgattcgcatgttgccggaggctcgtgcgctgggtatccccgcgctggttaacggactcat

SEQ ID NO: 231279 - DNA, 75 bp, synthetic construct
  source 1..75: mol_type = other DNA
atgaacgtaactgtgtggaagattatctctgtctgcagcatagccatgacctgcatactgtctccctgcattgtc

SEQ ID NO: 231280 - DNA, 75 bp, synthetic construct
  source 1..75: mol_type = other DNA
ataatgatgcgtggatacagagtctgacccgaaaatcacagcaggcatccgcccgcagtaaaaaaacgccgcgtg

SEQ ID NO: 231281 - DNA, 75 bp, synthetic construct
  source 1..75: mol_type = other DNA
ttactcgcctttcacacgctcaatatttgcacctaaagcgcgcagtttgtcttcaatgcgttcgtagccacgatc

SEQ ID NO: 231282 - DNA, 75 bp, synthetic construct
  source 1..75: mol_type = other DNA
acgctaccatgatccgcagacacatgagtttatcgacagaacgcagttaatgcgcagctacactaaaccgaaaaa

SEQ ID NO: 231283 - DNA, 75 bp, synthetic construct
  source 1..75: mol_type = other DNA
atgattattgcgaaagcattaggaacggaaccttgggtaatctggccatcacgctatcacgatccgcagacacat

SEQ ID NO: 231284 - DNA, 75 bp, synthetic construct
  source 1..75: mol_type = other DNA
ggaaggcttatttcaatcggggcgcataatggtagaaagtttgcagcatattctttcggtgcaaacggggattaa

SEQ ID NO: 231285 - DNA, 75 bp, synthetic construct
  source 1..75: mol_type = other DNA
atataaaacacaggtgtctcctgtgggtccagatcgtgggaaggatatcatcgcatcacctgatggatttggatt

SEQ ID NO: 231286 - DNA, 75 bp, synthetic construct
  source 1..75: mol_type = other DNA
ggtgccgatcggggtaaagacatcattgcttcacccgatggattcggttttgaaaatccacgaattatcgttgag

SEQ ID NO: 231287 - DNA, 75 bp, synthetic construct
  source 1..75: mol_type = other DNA
ctgcagcaaccagcgcccgggaaacataacgatgcgtggatacagagtctgacccggaaatcgcagcaggcatca

SEQ ID NO: 231288 - DNA, 75 bp, synthetic construct
  source 1..75: mol_type = other DNA
gtcgtttaaaactttggttaccagagcttttagtgaatgagttctggagaaatcgttctaaagttctctctgaaa

SEQ ID NO: 231289 - DNA, 75 bp, synthetic construct
  source 1..75: mol_type = other DNA
atgaatgtttttattgatacaaatctatatttagaattttacaggatgggtagagataaactagatgagctggat

SEQ ID NO: 231290 - DNA, 75 bp, synthetic construct
  source 1..75: mol_type = other DNA
tcaccttaaagttgaggcaatccactaccgttgactggcaggtgcgcgagagcgtgcgtgcgagattgcgtatcc

SEQ ID NO: 231291 - DNA, 75 bp, synthetic construct
  source 1..75: mol_type = other DNA
ctgtacgctggatgcggcgcagccttataaactagagattgctttcttgtcggcggtaaaagccgctatcagcaa

SEQ ID NO: 231292 - DNA, 75 bp, synthetic construct
  source 1..75: mol_type = other DNA
accggctttgatgccccatgctgtcacactatgtatatcgacaaaccgatgcgcggccataacctgatgcaggct

SEQ ID NO: 231293 - DNA, 75 bp, synthetic construct
  source 1..75: mol_type = other DNA
atattgggaacattaaacgcaggtataaaaaatctatacgccggacaagctgactttacaggtttatcagtagac

SEQ ID NO: 231294 - DNA, 75 bp, synthetic construct
  source 1..75: mol_type = other DNA
aaagctctaccgggtggcagatattgtgtcggcatttctggcattaccaacgccggttgcagaaggcgaaatgga

SEQ ID NO: 231295 - DNA, 75 bp, synthetic construct
  source 1..75: mol_type = other DNA
cctgaaaattaagcgcatgaaatgtgtggcaatggaaggtctcattgaagaagctaatgaggtcatcgaaagtac

SEQ ID NO: 231296 - DNA, 75 bp, synthetic construct
  source 1..75: mol_type = other DNA
caacattacgccaggcagtaaaaaagcgggcgtggtgtggcacactcaaggttccggcaagagtatttcgatgtg

SEQ ID NO: 231297 - DNA, 75 bp, synthetic construct
  source 1..75: mol_type = other DNA
cgaagcaggtacgtcgcccggatgttatcggctatatcaacggtctgcccgtagcggttattgaactgaaaagcc

SEQ ID NO: 231298 - DNA, 75 bp, synthetic construct
  source 1..75: mol_type = other DNA
cactggcagcttaaaacggtagtgcagggcttctttaatagcgaactgctgctcgattacattcgtttctttgtg

SEQ ID NO: 231299 - DNA, 75 bp, synthetic construct
  source 1..75: mol_type = other DNA
agagcctgagccatttgaaaataacattatcattgacgccattttcacgtgcaatctgtgcaacacaagctccag

SEQ ID NO: 231300 - DNA, 75 bp, synthetic construct
  source 1..75: mol_type = other DNA
aaagagaaaaccaaaagtgactggagtcggctggaaaaactggtcggttctgaaccgcgtatcaatgaggtggcc

SEQ ID NO: 231301 - DNA, 75 bp, synthetic construct
  source 1..75: mol_type = other DNA
aatgcccgtgagtcaggcggaattatttttaccaccgtgcaaaaatttgccccgctggatggcgaacagactcac

SEQ ID NO: 231302 - DNA, 75 bp, synthetic construct
  source 1..75: mol_type = other DNA
tggacgaaagaaacaattctctaccccggtgaatcattatcttttataaccagcgccaaaaacaatctaaggaag

SEQ ID NO: 231303 - DNA, 75 bp, synthetic construct
  source 1..75: mol_type = other DNA
gcgtgggcgcagtctgaaatcacagcatggatggcggatcgtattgccgaacgcaaccggggctatgacgcatga

SEQ ID NO: 231304 - DNA, 75 bp, synthetic construct
  source 1..75: mol_type = other DNA
tttgaagtggttcttcatgctggggttgaagacgatgatatcgttaaagcctatattagctatgcggcacaatat

SEQ ID NO: 231305 - DNA, 75 bp, synthetic construct
  source 1..75: mol_type = other DNA
ttggtgatgatgaggttcatgtatggactgctgttttagaccaaatctgtgctaagcatgggatattacttactg

SEQ ID NO: 231306 - DNA, 75 bp, synthetic construct
  source 1..75: mol_type = other DNA
atgtctaaaaaaaacagttcaacgcaaaataaagaacttggactaaagcttcagacgcttcccacttttgcacag

SEQ ID NO: 231307 - DNA, 75 bp, synthetic construct
  source 1..75: mol_type = other DNA
taccggaacccgccatcatcgcggagcctgagtttgaggcaattctggctgacacaaaggccatgatgattgcgg

SEQ ID NO: 231308 - DNA, 75 bp, synthetic construct
  source 1..75: mol_type = other DNA
tcggcggaaaaaacgtggcgtgggcgcagtctgaaatcactgcatggatggcggatcgcattgccgaacgtaacc

SEQ ID NO: 231309 - DNA, 75 bp, synthetic construct
  source 1..75: mol_type = other DNA
gctggatgagcaatttgctgaactgaaagccgatgacgcaatcagcgagcaactggcgcaattaaaagccaaaat

SEQ ID NO: 231310 - DNA, 75 bp, synthetic construct
  source 1..75: mol_type = other DNA
cgctggtggacgatacgctggcacgcatgaagaaagagatcggcgagctggaaaacaaattgagcgaaacacgcg

SEQ ID NO: 231311 - DNA, 75 bp, synthetic construct
  source 1..75: mol_type = other DNA
ggtaaacattcgtgacgataggtttttcgttgctgatgatccacaacttgctcttgtctatggcctaaaatctat

SEQ ID NO: 231312 - DNA, 75 bp, synthetic construct
  source 1..75: mol_type = other DNA
tctttcaccgacatcaggtgacaatggcaattgggatttatttgatgtccttaagaaaatacagtccgttcttga

SEQ ID NO: 231313 - DNA, 75 bp, synthetic construct
  source 1..75: mol_type = other DNA
gttttaatcgattgtccaaatgatactgctacagtaatttactatggttcattagcaaaaaataaatatttaagg

SEQ ID NO: 231314 - DNA, 75 bp, synthetic construct
  source 1..75: mol_type = other DNA
ttaaaagcgcaggctaaagagattgccggatgcgaaaaccgcgtctggctggggtataccgtggctgaaaacggc

SEQ ID NO: 231315 - DNA, 75 bp, synthetic construct
  source 1..75: mol_type = other DNA
gtggatcagatgtataaaaaattaaaattaaccacaataagcgaattgattaaaaatatttattgttcattatcc

SEQ ID NO: 231316 - DNA, 75 bp, synthetic construct
  source 1..75: mol_type = other DNA
gttccgcgcgtggagaatctgctctattttatgcagaacacgcgtaaacggcttgatgaaccgccccggaaatcc

SEQ ID NO: 231317 - DNA, 75 bp, synthetic construct
  source 1..75: mol_type = other DNA
ctatcgttaccggcagtgacccgcgcgggctgccggaattcagtgccatccgcgaggaaataaacaaagccagcc

SEQ ID NO: 231318 - DNA, 75 bp, synthetic construct
  source 1..75: mol_type = other DNA
caggcgaccaacctggattttccgcgtatttatttgtttcgcccaatcccagcaatgaatgcaaaactaactata

SEQ ID NO: 231319 - DNA, 75 bp, synthetic construct
  source 1..75: mol_type = other DNA
taatttattcaatacattacaggggcaactggacgtcaaggttgaagaagaggacgggccagtctatatatcaat

SEQ ID NO: 231320 - DNA, 75 bp, synthetic construct
  source 1..75: mol_type = other DNA
ctgcataagtacaagggtacaacgggcgccatgcgccgggttgtggagccgttcggcttcttcatccgggttaac

SEQ ID NO: 231321 - DNA, 75 bp, synthetic construct
  source 1..75: mol_type = other DNA
tcatcgttgcgcgatccttatgctcctcgacaaggctggaaaccaactatgggatgtacccgtgcacagaatgaa

SEQ ID NO: 231322 - DNA, 75 bp, synthetic construct
  source 1..75: mol_type = other DNA
tcgttgaatggcattcaacttactgcggccatttgctacgaaatcattctcggcgagcaagtgcgcgataacttc

SEQ ID NO: 231323 - DNA, 75 bp, synthetic construct
  source 1..75: mol_type = other DNA
taaagatgcccagggtaactttattactgatggtgtcgttcagcttaatgaggaaaacgtacaagtcaggaacgc

SEQ ID NO: 231324 - DNA, 75 bp, synthetic construct
  source 1..75: mol_type = other DNA
ttgttgttgcagaatggggcagatcctgaatggatacagaagattaccggactttcggcagagcaaatgcaggca

SEQ ID NO: 231325 - DNA, 75 bp, synthetic construct
  source 1..75: mol_type = other DNA
gttcgcttacagcccggacaggaaaggcatccatccgcagactcatctgcctgctatcagcggtgtgctgcaagc

SEQ ID NO: 231326 - DNA, 75 bp, synthetic construct
  source 1..75: mol_type = other DNA
gatgtagatgagttgtgtaagaaagtgacaagttggatgtattcgcatcctggagagagaattagatatgaacgt

SEQ ID NO: 231327 - DNA, 75 bp, synthetic construct
  source 1..75: mol_type = other DNA
agatgttccccctgttaaaaaccgggggactggcggatgttattggggcgttacccgcagcgcaaatagcggacg

SEQ ID NO: 231328 - DNA, 75 bp, synthetic construct
  source 1..75: mol_type = other DNA
tgtgttctttgttatttgccttcacgctgggttctatgggcgaagccggtcgcagttttatacctgatattcagc

SEQ ID NO: 231329 - DNA, 75 bp, synthetic construct
  source 1..75: mol_type = other DNA
tgcgctattaccgggtgaggagcatatcaattccaatcaagtatccagttctattgggtatcttccttttgccga

SEQ ID NO: 231330 - DNA, 75 bp, synthetic construct
  source 1..75: mol_type = other DNA
agcgtttgagatcattgggattgcttcgccgtctctctgatgattgtgcttatgttgagaatccgttcaggagta

SEQ ID NO: 231331 - DNA, 75 bp, synthetic construct
  source 1..75: mol_type = other DNA
tactactcacatgatgacttataacggtgaatttgataagtttgctaagagtgagtttgaacgtagctggacatt

SEQ ID NO: 231332 - DNA, 75 bp, synthetic construct
  source 1..75: mol_type = other DNA
tcactctgcctttttaagaatgtcttgctacttaaataaccctgtgcattccgacgttctagaaccttacgcaaa

SEQ ID NO: 231333 - DNA, 75 bp, synthetic construct
  source 1..75: mol_type = other DNA
ctgcataattgccttaccagtctaaatattcttattcattatctgagatgtcctaaagaatctatggtaaatatt

SEQ ID NO: 231334 - DNA, 75 bp, synthetic construct
  source 1..75: mol_type = other DNA
cttcaatcatttatgaccgttggatttttcgatgataagggatataagacacaagatactactacctggtcgtta

SEQ ID NO: 231335 - DNA, 75 bp, synthetic construct
  source 1..75: mol_type = other DNA
acgacaaaccggttatctggacggtatctgtaacacgcctgttcgagctgtttcgcgatatcagcctcgagtttg

SEQ ID NO: 231336 - DNA, 75 bp, synthetic construct
  source 1..75: mol_type = other DNA
ggctgcaggtcttgctgttggacttgccctgcaggggtcattgtcaaaccttgcagctggtattcttctcgtgat

SEQ ID NO: 231337 - DNA, 75 bp, synthetic construct
  source 1..75: mol_type = other DNA
tgtaaaaagcggtttcaggaacgctgaatatatcggcataagaaactggcttgctggcattcgcatcaaaggaga

SEQ ID NO: 231338 - DNA, 75 bp, synthetic construct
  source 1..75: mol_type = other DNA
ctggaatccctttcttgatggttgggaactgaacgctcagcatgtagatatgattatggggagccatgtattgaa

SEQ ID NO: 231339 - DNA, 75 bp, synthetic construct
  source 1..75: mol_type = other DNA
caacgtacaatggtgagaaatatgttaaagagcaaatctcatcagttcttaataattttgataaactaaaaaatt

SEQ ID NO: 231340 - DNA, 75 bp, synthetic construct
  source 1..75: mol_type = other DNA
gaaggccgaaaagattgacgacgattcggcgctgaaaggcaaatgggcgctgtttgcgaaaatcaccccgaccga

SEQ ID NO: 231341 - DNA, 75 bp, synthetic construct
  source 1..75: mol_type = other DNA
aataacgctatggcttacctcttcaaaagcgggctgtttcacaagctgaaaggcgatgagttaaagctatatacg

SEQ ID NO: 231342 - DNA, 75 bp, synthetic construct
  source 1..75: mol_type = other DNA
ggcatgccctgcatcgtcagactgggaaaagatacggttctgacggggtatattgatgatttcattcccagctat

SEQ ID NO: 231343 - DNA, 75 bp, synthetic construct
  source 1..75: mol_type = other DNA
tgtgttatcctccattattggaggagtgatttttatgtgtaataagcgcaagtttgaatttaccataaataatga

SEQ ID NO: 231344 - DNA, 75 bp, synthetic construct
  source 1..75: mol_type = other DNA
actgaaaaatcgcagcctgaacgatatccttatcgcctgcgtggacggcctgaaaggcttcccggaagcgattaa

SEQ ID NO: 231345 - DNA, 75 bp, synthetic construct
  source 1..75: mol_type = other DNA
ttagatcgactttcacaaataaccgcacgacctattttttggttcatgcttcctccgagcgaggatgaacaggtt

SEQ ID NO: 231346 - DNA, 75 bp, synthetic construct
  source 1..75: mol_type = other DNA
atctgccgatgtcgtcgttcagccgtgggccatatatccagccgccgctgtcggtaaatggtattgagcttactg

SEQ ID NO: 231347 - DNA, 75 bp, synthetic construct
  source 1..75: mol_type = other DNA
cgctggattaactggttcacacagtcgggtgttgatggactgaaatcattccccgccgggcgtgcccgccgctgg

SEQ ID NO: 231348 - DNA, 75 bp, synthetic construct
  source 1..75: mol_type = other DNA
tgtcgcagtctccggtcggcacgtttacggcagacaagttgcgcgtgaccgatatcactaaaaatgcgacttacc

SEQ ID NO: 231349 - DNA, 75 bp, synthetic construct
  source 1..75: mol_type = other DNA
attcgtgagcgttgcattttagataataacgttatcatgatggatagtgttattgctattaaagtgttagcagat

SEQ ID NO: 231350 - DNA, 75 bp, synthetic construct
  source 1..75: mol_type = other DNA
tggtggtacattggcattagctggtacgtctgatatgcattttaaacgtgacatttctgattttgacggaatgga

SEQ ID NO: 231351 - DNA, 75 bp, synthetic construct
  source 1..75: mol_type = other DNA
gtattcaaagttcatacggtattgcacgcatggcccaaatttgggtagataattctggtcgtttatgtagtcgtt

SEQ ID NO: 231352 - DNA, 75 bp, synthetic construct
  source 1..75: mol_type = other DNA
gcattccgtcgaggatattgacggtattccgatggtttcctcggtgcgtaaagaagaccttaaagacccggagct

SEQ ID NO: 231353 - DNA, 75 bp, synthetic construct
  source 1..75: mol_type = other DNA
ggacatattcaccacgatcttagccacgtcttcgacttacaccgtaatttaattgcaaccggctcgatgctgggt

SEQ ID NO: 231354 - DNA, 75 bp, synthetic construct
  source 1..75: mol_type = other DNA
ccaaagagctgctggccgtgctggatgaatcaaaccagtttgccgagctgtttgatgaagagtacagcttcagcg

SEQ ID NO: 231355 - DNA, 75 bp, synthetic construct
  source 1..75: mol_type = other DNA
cgaccgcgtgtaccgccagcccgaacgccgtggggatggcctttgactacatccagaatggtaaaagcaaaacca

SEQ ID NO: 231356 - DNA, 75 bp, synthetic construct
  source 1..75: mol_type = other DNA
accataacccgggaaccggaaagagacctgatttgtgccataagaaccgccgccacaaaaacactaacggacatg

SEQ ID NO: 231357 - DNA, 75 bp, synthetic construct
  source 1..75: mol_type = other DNA
atggtagtagttggtgaaaaagtcggtgccttcggtgcttatcgtgatggactggaagtctatggccgggcgatg

SEQ ID NO: 231358 - DNA, 75 bp, synthetic construct
  source 1..75: mol_type = other DNA
tagtggaagaagcaaagaaataaaaccgatagagaatgcgattgtagaaaaaataatggtgaaagatggcgcttt

SEQ ID NO: 231359 - DNA, 75 bp, synthetic construct
  source 1..75: mol_type = other DNA
acaaataagcaaacatactggtcaggtgaaaacggttttacagtgctgaaatcaggtcatcagggtactgtcatt

SEQ ID NO: 231360 - DNA, 75 bp, synthetic construct
  source 1..75: mol_type = other DNA
cgcagtttgtaagaactattggatacaatacacgtaatgtagcaattgctggttctttacctgtcgggcaaatgc

SEQ ID NO: 231361 - DNA, 75 bp, synthetic construct
  source 1..75: mol_type = other DNA
atacggcgaggatgcagcggtttataccgtgactttcgatgatgctgtagctaacgggctgtacgagcgcgtctg

SEQ ID NO: 231362 - DNA, 75 bp, synthetic construct
  source 1..75: mol_type = other DNA
gaaatgatgctatcttcggcaatcatgtgtggcagacttttggccaatttttcccgctgggagttgaaaaaccct

SEQ ID NO: 231363 - DNA, 75 bp, synthetic construct
  source 1..75: mol_type = other DNA
ggagctggttgaacgactttctgagcgaaataagtcggttcccggtaacaacaacagaatccttttttaattatt

SEQ ID NO: 231364 - DNA, 75 bp, synthetic construct
  source 1..75: mol_type = other DNA
gttgagtatttaaaacaagattcacgaatgaaagaagctatagattttttatcaagctctgaagaaaccataaag

SEQ ID NO: 231365 - DNA, 75 bp, synthetic construct
  source 1..75: mol_type = other DNA
gcgaacctggatatcgatatcccgtatgcgacggacccggcaggaaaccggctgccggacccggaactgcacccg

SEQ ID NO: 231366 - DNA, 75 bp, synthetic construct
  source 1..75: mol_type = other DNA
acgggtgtggcggcgggtacgtgacctgacggggtggatgtcgctgtcgcgtaaaccggagggaacgtggtacgg

SEQ ID NO: 231367 - DNA, 75 bp, synthetic construct
  source 1..75: mol_type = other DNA
actgtgactatacgtggaacgataacggacaactggtgcgcatcagcggcccgcaggagtgccgggagtaccgtt

SEQ ID NO: 231368 - DNA, 75 bp, synthetic construct
  source 1..75: mol_type = other DNA
tagcattgttcagggttcagccggggtgcgcatcggtgccccaaccggtgtggcctgttcctgtcccttatacat

SEQ ID NO: 231369 - DNA, 75 bp, synthetic construct
  source 1..75: mol_type = other DNA
agcggacccaccactaccactacgacagccagcaccgcctggtgttctacacgcggatacagcatggcgagccgc

SEQ ID NO: 231370 - DNA, 75 bp, synthetic construct
  source 1..75: mol_type = other DNA
gtggcagtatgacgaacgcggctggctgacagacatcagccatatcagcgaagggcaccgggtggcggtgtatta

SEQ ID NO: 231371 - DNA, 75 bp, synthetic construct
  source 1..75: mol_type = other DNA
gacctggcacagacgttgtcggcaatctcaaaacactgggttgcaggtctgcatcaatattggtgtgataacaat

SEQ ID NO: 231372 - DNA, 75 bp, synthetic construct
  source 1..75: mol_type = other DNA
tgaagcggcaaatcagccaaaagagcttctgattgttaaagatgccacacatgtcgatttatatgatcgaatgga

SEQ ID NO: 231373 - DNA, 75 bp, synthetic construct
  source 1..75: mol_type = other DNA
gactatacgtggaacgataacggacaactggtgcgcatcagcggcccgcaggagtgccgggagtaccgttacagc

SEQ ID NO: 231374 - DNA, 75 bp, synthetic construct
  source 1..75: mol_type = other DNA
tgaaccctcatcatcagtcgcccgatctggatctcatcgccctgacggacggcgcgggccgctgttttcacctgg

SEQ ID NO: 231375 - DNA, 75 bp, synthetic construct
  source 1..75: mol_type = other DNA
gaattgcgacagaaaatgggaaaacccgacgttacagattcaaatttgaaaaatattatagacgatctttatcgg

SEQ ID NO: 231376 - DNA, 75 bp, synthetic construct
  source 1..75: mol_type = other DNA
cggggtggatgtcgctgtcgcgtaaaccggaggtgacgtggtatggctgggacggagacaggctgacgacggtgc

SEQ ID NO: 231377 - DNA, 75 bp, synthetic construct
  source 1..75: mol_type = other DNA
acaacggcgaactcatccgcatcagcagcccgcgccagacccggagttacagctacagcgacaccggcaggctga

SEQ ID NO: 231378 - DNA, 75 bp, synthetic construct
  source 1..75: mol_type = other DNA
ggcttaaggcacagacggatgccgcaggccggacaacagaatacagcccggatgtggtgacgggcctcatcacgc

SEQ ID NO: 231379 - DNA, 75 bp, synthetic construct
  source 1..75: mol_type = other DNA
atgccacggacccggcaggtaaccgcctgcccgacccggagctgcacccggacagcaccctcagcatgtggccgg

SEQ ID NO: 231380 - DNA, 75 bp, synthetic construct
  source 1..75: mol_type = other DNA
tggtgccaaatgtgaacttttttggcccgaatgctatttccgttgtcggcgaacgctgcaaactgttgggcggta

SEQ ID NO: 231381 - DNA, 75 bp, synthetic construct
  source 1..75: mol_type = other DNA
cgccgccgccatgcaggcgatccgcctcatcgcccgcaacctgcgccaggccgtggccctcggcagcaatctgca

SEQ ID NO: 231382 - DNA, 75 bp, synthetic construct
  source 1..75: mol_type = other DNA
gtgcgacatcatcgtcaccgtgggcggcggcagcccgcacgattgcggcaaaggcatcggcatcgccgccaccca

SEQ ID NO: 231383 - DNA, 75 bp, synthetic construct
  source 1..75: mol_type = other DNA
cacaaccagttaacgtcagccaccgggcctgacgggctggaattgcgccgggaatatgatgaatccggccgtctg

SEQ ID NO: 231384 - DNA, 75 bp, synthetic construct
  source 1..75: mol_type = other DNA
gacgggctggaaatgcgccgcaaatatgatgagtacggacgtctgattcaggaaaccgcccctgacggcgatatc

SEQ ID NO: 231385 - DNA, 75 bp, synthetic construct
  source 1..75: mol_type = other DNA
ccctttcagatggagaatggctcgttgatattgaaggtgcaattagcattcgagaattaacaaaattgcctggca

SEQ ID NO: 231386 - DNA, 75 bp, synthetic construct
  source 1..75: mol_type = other DNA
ttaacgtcagccaccgggccagacgggctggaaatgcgccgcaaatatgatgagtacggacgtctgattcaggaa

SEQ ID NO: 231387 - DNA, 75 bp, synthetic construct
  source 1..75: mol_type = other DNA
cttttaaaaaagagaataaaatattttgcggcgcttcttatcaatattggaaaggcgcttatacttccaaaaaga

SEQ ID NO: 231388 - DNA, 75 bp, synthetic construct
  source 1..75: mol_type = other DNA
aatgatttatggattcggatgcttagagcgcatgaatttaagttagtaaatattgattctgtaacattattttat

SEQ ID NO: 231389 - DNA, 75 bp, synthetic construct
  source 1..75: mol_type = other DNA
atgtctatatccagacaggtacatgcagggtctcatcgaacaatgtcaaagttgaccttccgtcctatcccggag

SEQ ID NO: 231390 - DNA, 75 bp, synthetic construct
  source 1..75: mol_type = other DNA
cgtatccggagtacaaggattctggggtggagtggttgggggagataccagtccattggaatataaatcggttag

SEQ ID NO: 231391 - DNA, 75 bp, synthetic construct
  source 1..75: mol_type = other DNA
acgctgacattctaacaagaaccactattccagactggttaataagagaaattttctcaaactctccgcctgatt

SEQ ID NO: 231392 - DNA, 75 bp, synthetic construct
  source 1..75: mol_type = other DNA
cggtattacagaaatctgaatatagctccggcagaggatggttacagattagcaggtttcccaccggatcaccaa

SEQ ID NO: 231393 - DNA, 75 bp, synthetic construct
  source 1..75: mol_type = other DNA
atgacggatatgtttccacttctcttagtttgagaagtgctcacttagcaggacagtctatattatcaggatatt

SEQ ID NO: 231394 - DNA, 75 bp, synthetic construct
  source 1..75: mol_type = other DNA
accacaaaacgggagaaacggcgacggaaacgctgacacagcctgatgaatcccctaatgatttttatcaaaatc

SEQ ID NO: 231395 - DNA, 75 bp, synthetic construct
  source 1..75: mol_type = other DNA
atccgctccgtataccgtgaaagcgacatcataccgggagaacagaccgccaccagcatactgaagcagcgcaca

SEQ ID NO: 231396 - DNA, 75 bp, synthetic construct
  source 1..75: mol_type = other DNA
ccgttgtgcctggcgcatccggtgcggcagcggcagttaagaatccgcaggcctctaaatgtagtggcacagtaa

SEQ ID NO: 231397 - DNA, 75 bp, synthetic construct
  source 1..75: mol_type = other DNA
cagatggatggctggcgaaacaacgcagaagtggcgcgcggaacaagccgttctccggagatatggccgggacgg

SEQ ID NO: 231398 - DNA, 75 bp, synthetic construct
  source 1..75: mol_type = other DNA
actaccattacgacagcctgcaccgcctggtccattacatccgtatccaatatgaggagccgctggtcgagagcc

SEQ ID NO: 231399 - DNA, 75 bp, synthetic construct
  source 1..75: mol_type = other DNA
actgcgtgagcagtgaaagccgccagtggcttgcgcagtgcgggctgacggtggagcggctggcggcacagatag

SEQ ID NO: 231400 - DNA, 75 bp, synthetic construct
  source 1..75: mol_type = other DNA
accgccaatctgctcccggtgatgctgggtaatattatcggcggtgcagtgctggtgagtatttgttatcgggct

SEQ ID NO: 231401 - DNA, 75 bp, synthetic construct
  source 1..75: mol_type = other DNA
caggttttaacggatatttctgataaagtgaatttatattgggggaatttgcatgatttagtttggaatgaagat

SEQ ID NO: 231402 - DNA, 75 bp, synthetic construct
  source 1..75: mol_type = other DNA
gatggtcagcaatatgtttgtggcaaaaaccggctctgtcggcgcacaggctgattacagcggtccggcctggta

SEQ ID NO: 231403 - DNA, 75 bp, synthetic construct
  source 1..75: mol_type = other DNA
acatcactgtattcatggctgtcgcagcgacggtcagatatgctgtgcttaggttcttggtttgggtaaagccga

SEQ ID NO: 231404 - DNA, 75 bp, synthetic construct
  source 1..75: mol_type = other DNA
cggctgtcaggggcagcaaaaactgctgcagcgggatgcggctgttccggtaccgtcggtgacggtcagcaataa

SEQ ID NO: 231405 - DNA, 75 bp, synthetic construct
  source 1..75: mol_type = other DNA
aatttttactgtttctctttccactgctggcgacaatgcagcttcttaaattgcagatgccaaaatttgccgcat

SEQ ID NO: 231406 - DNA, 75 bp, synthetic construct
  source 1..75: mol_type = other DNA
tttagagtgtgaaataggagctttgcctttaactgttcagcaggcagtacgcgaacgctatgccctgcaactgat

SEQ ID NO: 231407 - DNA, 75 bp, synthetic construct
  source 1..75: mol_type = other DNA
gcaccggaagtgacctttgttatcgacggtggcacgcgctttgtggtgggctggagccttgacctggctgaaaat

SEQ ID NO: 231408 - DNA, 75 bp, synthetic construct
  source 1..75: mol_type = other DNA
gaaccagcccggaataccagaaacaattaagaaacagcaccgctttctatcgaggtatgcgctatgtaccacaag

SEQ ID NO: 231409 - DNA, 75 bp, synthetic construct
  source 1..75: mol_type = other DNA
aagctgtgcaccgcagagctgctggatatctgccagaccgaacttattcctgcgggccttgtggagaacttcagc

SEQ ID NO: 231410 - DNA, 75 bp, synthetic construct
  source 1..75: mol_type = other DNA
tggtgcttaaaccgtggcgcgagagacgcagtctagactggccccctgaatctccagacaaccagtatcacttaa

SEQ ID NO: 231411 - DNA, 75 bp, synthetic construct
  source 1..75: mol_type = other DNA
tcaccaaatagctttacaacaatttgactcatatatagttaattcaaaacttatgaaaatactgcgcgtagatga

SEQ ID NO: 231412 - DNA, 75 bp, synthetic construct
  source 1..75: mol_type = other DNA
ttgactcaagtatagttaattcgaagctaatgaagatactacgtgtagattttgaaaatacaaaatctaatgtct

SEQ ID NO: 231413 - DNA, 75 bp, synthetic construct
  source 1..75: mol_type = other DNA
gccagtacatcccggaaaaacggttagcactggacaaatggataaaatatttagaaaaaataaactctttaaaat

SEQ ID NO: 231414 - DNA, 75 bp, synthetic construct
  source 1..75: mol_type = other DNA
atttaataaagagcaagttaaaatatgatgacgatcttaacacatatttaaaaagaacaattgaaataatgtttg

SEQ ID NO: 231415 - DNA, 75 bp, synthetic construct
  source 1..75: mol_type = other DNA
tggttcctggagcacctcggttccggcggcagatatggcggccctgcgtgatggcgatgccagcgcacaggccag

SEQ ID NO: 231416 - DNA, 75 bp, synthetic construct
  source 1..75: mol_type = other DNA
gcggtgagcggctcgctgggggcgacgctggctgccggtgagttcgcgcaaatcagcatcgacggcggtacaacc

SEQ ID NO: 231417 - DNA, 75 bp, synthetic construct
  source 1..75: mol_type = other DNA
gtcagagctggaccgcaacggtcggcagcggcggaagctggtcggtgtttattccggcgcagcagtttgccggat

SEQ ID NO: 231418 - DNA, 75 bp, synthetic construct
  source 1..75: mol_type = other DNA
ggtgtccggcaccagcacggcgcaaaccgggcagatgctcaccgtcacgcttaacggcactaactaccagaccac

SEQ ID NO: 231419 - DNA, 75 bp, synthetic construct
  source 1..75: mol_type = other DNA
gccataacgtgcaggtcaataccgcgctgccgggcgtcacccttaatccggtggcgacggacgatattatcaatg

SEQ ID NO: 231420 - DNA, 75 bp, synthetic construct
  source 1..75: mol_type = other DNA
tcgatgccagcgcgccaacggtgaccattaacaccattgcgggcgacgacattcttaacgccgccgaagccggag

SEQ ID NO: 231421 - DNA, 75 bp, synthetic construct
  source 1..75: mol_type = other DNA
ccgctgccgatatgggtaatctgcctgacggtgcggtggcaattactgcatctgtgacggatctcagcggtaata

SEQ ID NO: 231422 - DNA, 75 bp, synthetic construct
  source 1..75: mol_type = other DNA
agccgacaccgggcttagcgccagcgactttatcaccagcgtcagtccggtggtggtcaacggctcgctcaccgc

SEQ ID NO: 231423 - DNA, 75 bp, synthetic construct
  source 1..75: mol_type = other DNA
gcgcaccgacgctcaccattaacaccattgccagcgacgatattcttaacgccacggaggcgggaagcccgctca

SEQ ID NO: 231424 - DNA, 75 bp, synthetic construct
  source 1..75: mol_type = other DNA
gacggtgaccatcgccacggtagcgggcgacgatattattaacaacgccgagcagcttgccgggcagaccatcag

SEQ ID NO: 231425 - DNA, 75 bp, synthetic construct
  source 1..75: mol_type = other DNA
ccgaacaacagcagccgttaacccttaacggctcgaccagcgcggaagtcgggcagacggtcaccgtgacctttg

SEQ ID NO: 231426 - DNA, 75 bp, synthetic construct
  source 1..75: mol_type = other DNA
ggttagcgcctccgcccaggacagtgccggaaacagcgccacggcctcgcgcagcgtggcggtagatctcaccgc

SEQ ID NO: 231427 - DNA, 75 bp, synthetic construct
  source 1..75: mol_type = other DNA
cggacaatcctacctttacaccaatgttggcggggccagcaactggacacaatcggccctcggcggcagccagag

SEQ ID NO: 231428 - DNA, 75 bp, synthetic construct
  source 1..75: mol_type = other DNA
ggtcgcctcgataccaacatctattacatgcagggctacagcggccacggcgtcacctgtacccacctcgccggg

SEQ ID NO: 231429 - DNA, 75 bp, synthetic construct
  source 1..75: mol_type = other DNA
acgccgccagtgcgaataaatatgcaccattcgacacgctgaatgagtcaatcacctgcgacgtttgcgtggttg

SEQ ID NO: 231430 - DNA, 75 bp, synthetic construct
  source 1..75: mol_type = other DNA
tcctacagccgcgacatcgacgttatcgaaaaaagctacggcatggacaccgcccgtatgctcggcagcatgatg

SEQ ID NO: 231431 - DNA, 75 bp, synthetic construct
  source 1..75: mol_type = other DNA
gaactgggaacgctacggtaataaacagcttgaattgctggacgccaacgccattcgtcgcgaagtcgccagcga

SEQ ID NO: 231432 - DNA, 75 bp, synthetic construct
  source 1..75: mol_type = other DNA
acatgcagggctacagcggccacggcgtgacctgtacccatctcgccgggcgtttaattgctgaactgctacgcg

SEQ ID NO: 231433 - DNA, 75 bp, synthetic construct
  source 1..75: mol_type = other DNA
ggtcgcctcgataccaacatctattacatgcagggctacagcggccacggcgtcacctgtacccatcttgccggg

SEQ ID NO: 231434 - DNA, 75 bp, synthetic construct
  source 1..75: mol_type = other DNA
gatcgaccgcgacggcacgggcggcacttttgcgacaactaacgtggtcacgctgacgggcgtgcacaccgacct

SEQ ID NO: 231435 - DNA, 75 bp, synthetic construct
  source 1..75: mol_type = other DNA
cgaaggcatttccggctcgaattttaacgacattctgaccggcagcagcggcgataaccaactggaagggcgcgg

SEQ ID NO: 231436 - DNA, 75 bp, synthetic construct
  source 1..75: mol_type = other DNA
aacctacaacgcggtgctgatcaaatccaccggcaccaacgccagcaatatcgaccagacggtcaacaccagctg

SEQ ID NO: 231437 - DNA, 75 bp, synthetic construct
  source 1..75: mol_type = other DNA
tgtgcgaactgccaaaggtcaggtgacggcgaagtatgtgattgtcgccgggaatgcgtatctgggcgataaagt

SEQ ID NO: 231438 - DNA, 75 bp, synthetic construct
  source 1..75: mol_type = other DNA
acatgcagggctacagcggccacggtgtgacctgtacccatctcgccgggcgtctgattgctgaactgctgcgcg

SEQ ID NO: 231439 - DNA, 75 bp, synthetic construct
  source 1..75: mol_type = other DNA
aacgtatcaaacgttatcagattgactgcgactaccgccccggcggcctgtttgtggcgatgaatgataaacagc

SEQ ID NO: 231440 - DNA, 75 bp, synthetic construct
  source 1..75: mol_type = other DNA
gtgattggcccgcagggggagattcagtcgatgatcccgcaattcacccgcgaagtgttaaccactaacgtgaca

SEQ ID NO: 231441 - DNA, 75 bp, synthetic construct
  source 1..75: mol_type = other DNA
agcagcgggtggtatttctcgaaaccaagaacggcaaaaaacgcataatccctgtatctgaagaactggaaaccg

SEQ ID NO: 231442 - DNA, 75 bp, synthetic construct
  source 1..75: mol_type = other DNA
cgggatatataccgcctgtcagggatgttcagcgcactaatcaggctggacgaatttcctggtgacaatccggtt

SEQ ID NO: 231443 - DNA, 75 bp, synthetic construct
  source 1..75: mol_type = other DNA
tactaaagctggtgtgtatactccccataatgatattggttacttggtatatgatgtcgtatatggattatcttt

SEQ ID NO: 231444 - DNA, 75 bp, synthetic construct
  source 1..75: mol_type = other DNA
ttatttattataaaagatttgtcaacaaaaaaaataaattatctatacacggatttcttaaatatccatgtgaga

SEQ ID NO: 231445 - DNA, 75 bp, synthetic construct
  source 1..75: mol_type = other DNA
tacaatcaattaattgataaattatttgaaatcaaagcaatttattcccacgcctcagatttttacgaggctgaa

SEQ ID NO: 231446 - DNA, 75 bp, synthetic construct
  source 1..75: mol_type = other DNA
atcaatgttgattatgatacttgcttgtttattttaaaaaacaaagccctccaacaaacaataaatgataaccac

SEQ ID NO: 231447 - DNA, 75 bp, synthetic construct
  source 1..75: mol_type = other DNA
gtaagtctgtggggggggcaaggttattattatccgtctgtaaagcttagtgagatttataaattacagatgtac

SEQ ID NO: 231448 - DNA, 75 bp, synthetic construct
  source 1..75: mol_type = other DNA
cgcatttcaactcattgttcaaaagtaatagctgagggaattgaatcacaatatattctggataaaattagagat

SEQ ID NO: 231449 - DNA, 75 bp, synthetic construct
  source 1..75: mol_type = other DNA
cgggatatataccgcttgtcagggatgttcagcgcactaatcaagctggatgaattccttggtgacaatccggtt

SEQ ID NO: 231450 - DNA, 75 bp, synthetic construct
  source 1..75: mol_type = other DNA
gacgttatgaactggatacaagaacgggcggacgtggcagcaaacgcatccgcaaaatatttaacaggaaagccg

SEQ ID NO: 231451 - DNA, 75 bp, synthetic construct
  source 1..75: mol_type = other DNA
atgtcattgtctgactctgctctacggctgaatggacctaaagtgggaatgggggaagcattaaatattataaaa

SEQ ID NO: 231452 - DNA, 75 bp, synthetic construct
  source 1..75: mol_type = other DNA
ctgctgaaaaccacgtaccgctacaacgccgccggagaactgacggagattatcctgccgggggatgagacgctg

SEQ ID NO: 231453 - DNA, 75 bp, synthetic construct
  source 1..75: mol_type = other DNA
cggtcaccgtgaagttaggtgccactgttctgactggtgtagtgctggcggacggtacatggaatgtggcgctgg

SEQ ID NO: 231454 - DNA, 75 bp, synthetic construct
  source 1..75: mol_type = other DNA
cgctggtgctggcgggcctggtacggatggctgcgcgggtgttaatggcgaaaccgccgcaggccgttaaccggg

SEQ ID NO: 231455 - DNA, 75 bp, synthetic construct
  source 1..75: mol_type = other DNA
agggatgccgcccttcaacatttttcttagcgaatttatgaccattaccgccggactggcacgtaatcacctgct

SEQ ID NO: 231456 - DNA, 75 bp, synthetic construct
  source 1..75: mol_type = other DNA
agacgcgaatctcccgggtctgcgggtcgataccgtggcgggcgatgatgtggtcaacattatcgagcacggtca

SEQ ID NO: 231457 - DNA, 75 bp, synthetic construct
  source 1..75: mol_type = other DNA
gcggcacggcctcgcacactgtcagcgtggcgctcggtgcaccgatactcgccattaacaccatcgccgtcgatg

SEQ ID NO: 231458 - DNA, 75 bp, synthetic construct
  source 1..75: mol_type = other DNA
aatctgcccgccggaagagtggtcactgttttgctcgggggcaacacctaccaggggttgaccgacagcaacggc

SEQ ID NO: 231459 - DNA, 75 bp, synthetic construct
  source 1..75: mol_type = other DNA
aattgtttcatttatttgataactatggtcttggaaaattagacggtgattggaaacaacggattttagatagca

SEQ ID NO: 231460 - DNA, 75 bp, synthetic construct
  source 1..75: mol_type = other DNA
agtctggcgcaggcttctgactgcctttgccggatgatttcatcatcttgcgtttgcgtgtcttgtattggtgat

SEQ ID NO: 231461 - DNA, 75 bp, synthetic construct
  source 1..75: mol_type = other DNA
aaatggaatctttttaagaaaagttgacgatggtgtaagtgcaatggcaaggcatcagggaaatcatgatggata

SEQ ID NO: 231462 - DNA, 75 bp, synthetic construct
  source 1..75: mol_type = other DNA
cgaggttcttaagcaatcgtccttgcttgacccaacattaatgctgttggcctttgtgtttgtgctaattggctt

SEQ ID NO: 231463 - DNA, 75 bp, synthetic construct
  source 1..75: mol_type = other DNA
acgcctggctgccggatgctcacagtgaagcgccgagtccggtcagcgccctgctctccgccgtattgctgaact

SEQ ID NO: 231464 - DNA, 75 bp, synthetic construct
  source 1..75: mol_type = other DNA
aactctttcatttgtttgatagttatggccttggaaaattagacggagattggaaacaacgaattttagatagca

SEQ ID NO: 231465 - DNA, 75 bp, synthetic construct
  source 1..75: mol_type = other DNA
ggcgctcggcgcgccggtgctcgccattaacaccatcgccgtcgacgacatcatcaacgccacggagaaaggcgc

SEQ ID NO: 231466 - DNA, 75 bp, synthetic construct
  source 1..75: mol_type = other DNA
gcaaactatcagcggccaggtaaccggtgcggcggcgggcagcaccgtcaccgttgaactgggcggtaaaactta

SEQ ID NO: 231467 - DNA, 75 bp, synthetic construct
  source 1..75: mol_type = other DNA
cggcggcggatattcaggcgctgggtaacggcaacctgacagttaacgcctcggtcaccaatggcgttggcaaca

SEQ ID NO: 231468 - DNA, 75 bp, synthetic construct
  source 1..75: mol_type = other DNA
gatgatgtgattaacgccgccgaaaaaggcgcggcgttaacgctctccggcagcacgtcaggcgtcgaagcgggg

SEQ ID NO: 231469 - DNA, 75 bp, synthetic construct
  source 1..75: mol_type = other DNA
gcacgcgggatatcaccattgatgccaatctgccagggctgcgggtggataccgtggcgggcgatgatatcgtca

SEQ ID NO: 231470 - DNA, 75 bp, synthetic construct
  source 1..75: mol_type = other DNA
actgacgccgatggcaacagcggttccgccagccataacgtgcaggttaataccgcgctgccgggcgtcaccatt

SEQ ID NO: 231471 - DNA, 75 bp, synthetic construct
  source 1..75: mol_type = other DNA
agagctactcccttcatacatcaatgaaattcaacgctataaagcaaaatgctatcgagcgaaagacattatacc

SEQ ID NO: 231472 - DNA, 75 bp, synthetic construct
  source 1..75: mol_type = other DNA
cagcccgctataagtcaactctggcatctgtcactcccggtcaggctgatgcggatgcactctttaaaatgcaat

SEQ ID NO: 231473 - DNA, 75 bp, synthetic construct
  source 1..75: mol_type = other DNA
ggtttattattgaagcgaaagctgcgggagcttgatttatttgttcctgttcatattattacaatgacgcattca

SEQ ID NO: 231474 - DNA, 75 bp, synthetic construct
  source 1..75: mol_type = other DNA
tgaaaattcaatcaactattagagggattactgcgcactcttatcctgatgatattgccttgctagatatttata

SEQ ID NO: 231475 - DNA, 75 bp, synthetic construct
  source 1..75: mol_type = other DNA
gttaacctacgttcacactgacaaaaaattactgccatcaacagaagtgatgacaattagagtaaatcgagattt

SEQ ID NO: 231476 - DNA, 75 bp, synthetic construct
  source 1..75: mol_type = other DNA
gtaaaatgaaagccaaaggctgtaagcgccttggattaattacaaaacaggttaaagatgcctggaataaaaaga

SEQ ID NO: 231477 - DNA, 75 bp, synthetic construct
  source 1..75: mol_type = other DNA
ctgccagcgtgatttccggccttgcggacggcacagtgactatcagcgccaccatcaccgatagtgcaggcaaca

SEQ ID NO: 231478 - DNA, 75 bp, synthetic construct
  source 1..75: mol_type = other DNA
ttttgagagttcattttattccggtataaaatttttaccaatgataaatgacagcttacacttaatttcagacga

SEQ ID NO: 231479 - DNA, 75 bp, synthetic construct
  source 1..75: mol_type = other DNA
acgattcagtacgatacgtccagggcaaacattggataattttcgttcgatgattaatgggcttgctttgacaga

SEQ ID NO: 231480 - DNA, 75 bp, synthetic construct
  source 1..75: mol_type = other DNA
aagcgatacaccggtacgtattccttttcttattgaatcaggaaggatcatcccccctaaagggataaaccctcc

SEQ ID NO: 231481 - DNA, 75 bp, synthetic construct
  source 1..75: mol_type = other DNA
ctttgataaacaaaataatagcaatgagctcatctctagcaaaggttatagaaataaaccgcgctcaacaaagct

SEQ ID NO: 231482 - DNA, 75 bp, synthetic construct
  source 1..75: mol_type = other DNA
ttcatactccgcttcttgtgcagatcgatagactttctgaagaaagtgcaccgcaaagtgacacgctcgatcttg

SEQ ID NO: 231483 - DNA, 75 bp, synthetic construct
  source 1..75: mol_type = other DNA
aaaaaaaccattccaatgatgcttgcaaaatgttcattcttagagcacaagtcatctaaaaatacaaagaaaagc

SEQ ID NO: 231484 - DNA, 75 bp, synthetic construct
  source 1..75: mol_type = other DNA
ggcaaaccagcaggtaatgcaatcgactgacccactcacctggtcgaagaccgcgctgacgctgtatcagagcgg

SEQ ID NO: 231485 - DNA, 75 bp, synthetic construct
  source 1..75: mol_type = other DNA
caggtaacagcgcccaggcaacgcatgcttacagcgttgatgccaccgcgccctccgtcaccatcaacaccatcg

SEQ ID NO: 231486 - DNA, 75 bp, synthetic construct
  source 1..75: mol_type = other DNA
ctctgacgctgaacggcaagacttacaccaccaccgtacagacgggtggaagctggagctacactgttggcagtg

SEQ ID NO: 231487 - DNA, 75 bp, synthetic construct
  source 1..75: mol_type = other DNA
tattaaacggctatgtttcccccgaaaactatcgctctaggagcaatggtcgtagtccccaagtcccagctcgtg

SEQ ID NO: 231488 - DNA, 75 bp, synthetic construct
  source 1..75: mol_type = other DNA
atggttccatattgacgatctgccaaagccgcttcatcagccattcgctgaaatgctggcgcagcaggcgctcaa

SEQ ID NO: 231489 - DNA, 75 bp, synthetic construct
  source 1..75: mol_type = other DNA
acaactattacacgctatcttcgctcatcaaccaggggaatgggacgtttgtctgggggcagaacaccattaaca

SEQ ID NO: 231490 - DNA, 75 bp, synthetic construct
  source 1..75: mol_type = other DNA
aacaccatcgccacggacgatgtgattaacgccgcagaaaaaggcgctgatttaaccctttccggcaccaccact

SEQ ID NO: 231491 - DNA, 75 bp, synthetic construct
  source 1..75: mol_type = other DNA
agcaccgacacggggagttcggcaactgactttatcaccagcgataccacgctcacgctgaccggttcgctggga

SEQ ID NO: 231492 - DNA, 75 bp, synthetic construct
  source 1..75: mol_type = other DNA
gatgggcattaatatcgattccctgcaagccgacactggccttagcgccagcgactttatcaccagcgtcagtcc

SEQ ID NO: 231493 - DNA, 75 bp, synthetic construct
  source 1..75: mol_type = other DNA
gtggaagcggggcagactattaccgttattttcggtggtaaaagctacaccaccacggttgccgcggataatagc

SEQ ID NO: 231494 - DNA, 75 bp, synthetic construct
  source 1..75: mol_type = other DNA
gccgcggcgggagataccgttaccatcacgctgggcggcaacacctacaccgccacggtacaggctaatttaagc

SEQ ID NO: 231495 - DNA, 75 bp, synthetic construct
  source 1..75: mol_type = other DNA
acgggcgcggcggcgggcgataccgtcaccgtaacgcttggcgggaaaacctacaccgctaccgtgcagggcaat

SEQ ID NO: 231496 - DNA, 75 bp, synthetic construct
  source 1..75: mol_type = other DNA
aacaccgtctccggcgatgacattattaacgccgccgaacacgggcaggcgctggtgatttccggttccagcact

SEQ ID NO: 231497 - DNA, 75 bp, synthetic construct
  source 1..75: mol_type = other DNA
tgattaacgccgccgaaaaaggggcagatttaaccctttccggcagcacctccggcgtggaagcggggcaaaccg

SEQ ID NO: 231498 - DNA, 75 bp, synthetic construct
  source 1..75: mol_type = other DNA
ggtagctggacaaccaccgtgcctgccgccgatctcagcgcgttacgcgacggcgacgccacggtacaggccagc

SEQ ID NO: 231499 - DNA, 75 bp, synthetic construct
  source 1..75: mol_type = other DNA
acgccgccgaagcgggatcggcgctgaccatcagcggcaccagcacggcggaagccgggcagacggtgaccgtaa

SEQ ID NO: 231500 - DNA, 75 bp, synthetic construct
  source 1..75: mol_type = other DNA
taccgtgactgcgacggtgagcgacaaagcgggtaacccggcaagcgccgaccacgcgctggcggtagatatcac

SEQ ID NO: 231501 - DNA, 75 bp, synthetic construct
  source 1..75: mol_type = other DNA
gctcgcgcgatatcactatcgatgccaatctgcctggtttacgggtcgataccgtggcgggtgatgatgtgatta

SEQ ID NO: 231502 - DNA, 75 bp, synthetic construct
  source 1..75: mol_type = other DNA
gtaggcaataccggtaacggcacgcgtgaaatcaccatcgacgcgaatctgcccggtctgcggattgacaccgtg

SEQ ID NO: 231503 - DNA, 75 bp, synthetic construct
  source 1..75: mol_type = other DNA
ctggcgggtaaccctggcagcgccagcaaaggcgtgaccgtcgataccactgcgccggtgatcagttttaacacc

SEQ ID NO: 231504 - DNA, 75 bp, synthetic construct
  source 1..75: mol_type = other DNA
tcctgtcagcgtctcggtaaccgacaaagccggaaacacgggcagccagtcactgaccgtcacggtcgataccgc

SEQ ID NO: 231505 - DNA, 75 bp, synthetic construct
  source 1..75: mol_type = other DNA
gccgccggtggtgaccattaatccggtggcgaccgacaacgtcatcaacacgccggaacacacccaggcgcaaat

SEQ ID NO: 231506 - DNA, 75 bp, synthetic construct
  source 1..75: mol_type = other DNA
cgctatcttcgctcatcaaccaggggaatgggacgtttgtctgggggcagaacaccattaacaccttcctcagca

SEQ ID NO: 231507 - DNA, 75 bp, synthetic construct
  source 1..75: mol_type = other DNA
acgacagccgcacgctgaccgatggcagttatctctatcaggtgcgggtgattgacactgcgggcaacgtcggtg

SEQ ID NO: 231508 - DNA, 75 bp, synthetic construct
  source 1..75: mol_type = other DNA
gatagatgccaacctgccaggcctgcgggtcgataccgtggcaggcgatgatgtgattaacagcatcgagcacac

SEQ ID NO: 231509 - DNA, 75 bp, synthetic construct
  source 1..75: mol_type = other DNA
tggcggatttacactttctggcagcagtagccatctggcacagggaacagaactcaccgtcacgcttaacggcaa

SEQ ID NO: 231510 - DNA, 75 bp, synthetic construct
  source 1..75: mol_type = other DNA
cagacgagcaccttcccgtggggatggttagcgggtgcagcggtaggtggcggcgcgcttggcgctttgctggca

SEQ ID NO: 231511 - DNA, 75 bp, synthetic construct
  source 1..75: mol_type = other DNA
acggtcataactacagcgccaccaccgacgcgtcgggcaactggaccttaaccgtgccggtgagcgatctggcgg

SEQ ID NO: 231512 - DNA, 75 bp, synthetic construct
  source 1..75: mol_type = other DNA
catcagcggtcaggtcacgggaacggcggctgcggggaacacggtgacggtcatcattggcggcaatcaatacac

SEQ ID NO: 231513 - DNA, 75 bp, synthetic construct
  source 1..75: mol_type = other DNA
gacgatcaccgccagcctgagcgatcgcgcgggcaacagcgacagcgctacccataatgtgaccgttgatctcag

SEQ ID NO: 231514 - DNA, 75 bp, synthetic construct
  source 1..75: mol_type = other DNA
cgactgccgatgcgcaggcgttagctgaagggaaccaggcagtactggttagtggtaaagatgccacgggcaata

SEQ ID NO: 231515 - DNA, 75 bp, synthetic construct
  source 1..75: mol_type = other DNA
cacggtggcaggcgatgatgtgatcaacgcgacggaacacgcccaggcgcagatcatcagcggctccgccactgg

SEQ ID NO: 231516 - DNA, 75 bp, synthetic construct
  source 1..75: mol_type = other DNA
ttcctggagcacctcggttccggcggcagatatggcggccctgcgtgatggcgatgccagcgcacaggccagcgt

SEQ ID NO: 231517 - DNA, 75 bp, synthetic construct
  source 1..75: mol_type = other DNA
acggttaccgatgcggcaggcaacagcgatagtgagacgcacacggtcaccgtcaaccttaccgcgccgaccatt

SEQ ID NO: 231518 - DNA, 75 bp, synthetic construct
  source 1..75: mol_type = other DNA
gctttgcgccagggacggcgttgaccgtggtgataaataaccaaacttatgccgccacggtgttggcgaacggca

SEQ ID NO: 231519 - DNA, 75 bp, synthetic construct
  source 1..75: mol_type = other DNA
actggagcgtcaccgtgcctgcctcggcggtcagtgcgcttggcgaagccacctacagcgtcacggcgagcgtta

SEQ ID NO: 231520 - DNA, 75 bp, synthetic construct
  source 1..75: mol_type = other DNA
gtcgataccgtggcgggcgatgatgtggtcaacagcatcgagcacggtcaggcactggtgataaccggtagcagc

SEQ ID NO: 231521 - DNA, 75 bp, synthetic construct
  source 1..75: mol_type = other DNA
ggcgcggaagatggcgacacggtaactattacgttgggcggtaatacttatacggcgacggtgggcagcaatctc

SEQ ID NO: 231522 - DNA, 75 bp, synthetic construct
  source 1..75: mol_type = other DNA
aggaacggcattaacggtcgtgattaacaacgtcacttacgctgccacggtgttagctgacggtacatggaacct

SEQ ID NO: 231523 - DNA, 75 bp, synthetic construct
  source 1..75: mol_type = other DNA
ggcgctctgaactggacctacagcgacagcgggctggtgagcggtgcctatacctacagcgcgcgagtggtggat

SEQ ID NO: 231524 - DNA, 75 bp, synthetic construct
  source 1..75: mol_type = other DNA
gggtaatcattaatactgtggcgggtgatgacattatcaacgccgctgaaatcgccgttaaccagaccctcagcg

SEQ ID NO: 231525 - DNA, 75 bp, synthetic construct
  source 1..75: mol_type = other DNA
atgttgcggcggtgctggcggatggcacctggagcgtcggcgttccggcggtggatgtcagcgcctggcctgcgg

SEQ ID NO: 231526 - DNA, 75 bp, synthetic construct
  source 1..75: mol_type = other DNA
ggcggcaaaaattacaccaccactgtggaagccaacggtagctggacggtgaatgtgccgcctgccgatctcgct

SEQ ID NO: 231527 - DNA, 75 bp, synthetic construct
  source 1..75: mol_type = other DNA
cagcggcccgcaaaccatcactgccgctattaccgacgcggcaggcaacagcgatgacgccagccgcacggtcac

SEQ ID NO: 231528 - DNA, 75 bp, synthetic construct
  source 1..75: mol_type = other DNA
cggcgatatggatctcttcctgcccgccagccagggaagagctaactacggctcgctgttattcaacaccaacgg

SEQ ID NO: 231529 - DNA, 75 bp, synthetic construct
  source 1..75: mol_type = other DNA
ctttaacgggcaaacctggaccgcaacggtcggcagcggcggaagctggtcggtgtttattccggcgcagcagtt

SEQ ID NO: 231530 - DNA, 75 bp, synthetic construct
  source 1..75: mol_type = other DNA
gttactgcgcaggtaaaaagctcggcgggaaacggcaataacgccaatattagtaacggcacggtgacggttaac

SEQ ID NO: 231531 - DNA, 75 bp, synthetic construct
  source 1..75: mol_type = other DNA
atgtacaaatatagaaagatttttctcccttttttatttttaacttcttttttaagtcacgcgcaaatagcaagc

SEQ ID NO: 231532 - DNA, 75 bp, synthetic construct
  source 1..75: mol_type = other DNA
tccgttttcgtgcgcagccggtgtttccggcgaacgtgaaggcggggggaatacatgggtgcactgacctttgtg

SEQ ID NO: 231533 - DNA, 75 bp, synthetic construct
  source 1..75: mol_type = other DNA
taagtcaggcggcttgtttctggcttttgtattttgaagatttcatgaaatatgttcgtaataggctctgtgcat

SEQ ID NO: 231534 - DNA, 75 bp, synthetic construct
  source 1..75: mol_type = other DNA
gcagcacggcggaagcggggcagacggtgaccgtcaccctcaatggcacaaactataccggcaccgtacagacgg

SEQ ID NO: 231535 - DNA, 75 bp, synthetic construct
  source 1..75: mol_type = other DNA
aacgaactttgccgcaggtacagtagtgaccgtattgcttaacggcaaaggctacagcgctaccattcagaacaa

SEQ ID NO: 231536 - DNA, 75 bp, synthetic construct
  source 1..75: mol_type = other DNA
gcgctggcggcagatgaacgggcgcaaatcagccttgatggtggcgttacctgggccactttaaccgttaacggc

SEQ ID NO: 231537 - DNA, 75 bp, synthetic construct
  source 1..75: mol_type = other DNA
gtagctggagcgtcagcgttcccacttcagccttaggcgcgctgaccgcaagcaattacaccgtcagcgccacgg

SEQ ID NO: 231538 - DNA, 75 bp, synthetic construct
  source 1..75: mol_type = other DNA
acgggcgcaaatcagcctcgacggcggtgtcacctggaccacgttaaccgttatcggcaccagctggagctatgc

SEQ ID NO: 231539 - DNA, 75 bp, synthetic construct
  source 1..75: mol_type = other DNA
ccaacggcaactggagcatcggcgtgcctgccagcgtgatttccgcgctggcgcagggcgatgtgaccattaccg

SEQ ID NO: 231540 - DNA, 75 bp, synthetic construct
  source 1..75: mol_type = other DNA
atgaccaattgtggcgctaatattaatgctttgaataatatcaaagttgtatatatgaatattgagaaaaaccat

SEQ ID NO: 231541 - DNA, 75 bp, synthetic construct
  source 1..75: mol_type = other DNA
acgcacaagagtttttgcagctcttatcacaacatgatcaacaggaaagagaacaaatctcagaattaacagttg

SEQ ID NO: 231542 - DNA, 75 bp, synthetic construct
  source 1..75: mol_type = other DNA
ttgatggtaagtcattacggggtacttacgataaatcgaaacgtaatgccgtgatccatagggtcagtgctttta

SEQ ID NO: 231543 - DNA, 75 bp, synthetic construct
  source 1..75: mol_type = other DNA
ttttttattatatcttttagattcatttcatatctatcggcatgatattagtgataaattggttccttattttca

SEQ ID NO: 231544 - DNA, 75 bp, synthetic construct
  source 1..75: mol_type = other DNA
tgaattacttcgcaaaaaaattacagattcaacacattccatcaaatctctcactctctctgaatctccttctta

SEQ ID NO: 231545 - DNA, 75 bp, synthetic construct
  source 1..75: mol_type = other DNA
ggtagtgacagttttaaagaaacccaattgtatcgtgaatatcataagaaaaaaaatggtaaaactgaaagtata

SEQ ID NO: 231546 - DNA, 75 bp, synthetic construct
  source 1..75: mol_type = other DNA
tattgatacggaagaagttaaacacaaatttttctcctatgaccaaaaggatgaactagcagcagatattcattc

SEQ ID NO: 231547 - DNA, 75 bp, synthetic construct
  source 1..75: mol_type = other DNA
ggggtgaattttttacagtatgagggagtcaggatcgaaaaattacctttattgaatgtttattggccaacatca

SEQ ID NO: 231548 - DNA, 75 bp, synthetic construct
  source 1..75: mol_type = other DNA
atggccttcgtcagtctgaaaccgtgggaagagcgtaatggtgacgaaaacagtgcggaagcggtaatccatcgt

SEQ ID NO: 231549 - DNA, 75 bp, synthetic construct
  source 1..75: mol_type = other DNA
atgttgtacagctaatcgtccttccaaaatatcttatgagcaatattgctcccagtgaagttattaaaggaaaaa

SEQ ID NO: 231550 - DNA, 75 bp, synthetic construct
  source 1..75: mol_type = other DNA
ggaaatatgaaggcgatcaactataccaaacatataaaggttattatcgacaagggaaatattacccatataaag

SEQ ID NO: 231551 - DNA, 75 bp, synthetic construct
  source 1..75: mol_type = other DNA
aattgtagaacattatctaaagatgccacttttcgtgaagtttttcgaagtttattattatacattttagattct

SEQ ID NO: 231552 - DNA, 75 bp, synthetic construct
  source 1..75: mol_type = other DNA
tgggcgaagccagctacacggtgacggcgaacgtcaccgacagcgcgggcaacagcaattccgccagccataacg

SEQ ID NO: 231553 - DNA, 75 bp, synthetic construct
  source 1..75: mol_type = other DNA
ggtgcaaattgttgggagcaccattaccaacgccgggtcgataacgttaaccatcgacaatagtcaggccgccgt

SEQ ID NO: 231554 - DNA, 75 bp, synthetic construct
  source 1..75: mol_type = other DNA
cgatggcagccacaccctgaccgccacggtcaatgacaaagcgggcaacccggcgagcaccacgcataatctggc

SEQ ID NO: 231555 - DNA, 75 bp, synthetic construct
  source 1..75: mol_type = other DNA
gccactggcggcaacggctcagacgtggtgaatggctttacggtagggacatgggaaggcaccgccgacaccgat

SEQ ID NO: 231556 - DNA, 75 bp, synthetic construct
  source 1..75: mol_type = other DNA
cctgacggtggatcttgttgcgccggtcgttaccattaacacggtagcgggcgatgacatcattaacgccacaga

SEQ ID NO: 231557 - DNA, 75 bp, synthetic construct
  source 1..75: mol_type = other DNA
gttttgctcggcggcaacacctaccagggggtgaccgacagcaacggcaactggcaggtaggcgtgcctgcggca

SEQ ID NO: 231558 - DNA, 75 bp, synthetic construct
  source 1..75: mol_type = other DNA
gatagatgcgatcagcggagataacgtactgaatgagctggagtctcagcagccgctaacgttaagcggcaccag

SEQ ID NO: 231559 - DNA, 75 bp, synthetic construct
  source 1..75: mol_type = other DNA
ccatcagcggtaccagcaccgccgaaaccgggcagacggtcaccgtcacccttaacggtgcaacctacaccggta

SEQ ID NO: 231560 - DNA, 75 bp, synthetic construct
  source 1..75: mol_type = other DNA
gttacgctcaacgggcaaaattacaccaccactgccgatgcttccggtaactggagcgtgaccgttccggcgtca

SEQ ID NO: 231561 - DNA, 75 bp, synthetic construct
  source 1..75: mol_type = other DNA
gggcgcggcggcgggtgatgtggtaaccgtcacgctgaacggtaaaaactacaccaccacgctggatgcctccgg

SEQ ID NO: 231562 - DNA, 75 bp, synthetic construct
  source 1..75: mol_type = other DNA
tcaacaccattgccagcgataacatcatcaacgccagcgaagcggcggcgggcgtaacggtgtccggcaccagca

SEQ ID NO: 231563 - DNA, 75 bp, synthetic construct
  source 1..75: mol_type = other DNA
tcgaaaacggtggtggtcgatacgattaaccctaccgccacgccaaccattgtgtcgtataccgatgatgtcggg

SEQ ID NO: 231564 - DNA, 75 bp, synthetic construct
  source 1..75: mol_type = other DNA
cggtagcagtagcggactggcggcgggcgcggcgttgacggtggttatcaatagcgtcacctacggcgcaacggt

SEQ ID NO: 231565 - DNA, 75 bp, synthetic construct
  source 1..75: mol_type = other DNA
tgagttttcctcaatttcagtaccaccatttccaaaaataaaaaacgttatcaagaaatttattttgcctaaacc

SEQ ID NO: 231566 - DNA, 75 bp, synthetic construct
  source 1..75: mol_type = other DNA
tatttttcggagccatttgatgtctctgttgttaataaaaatgatgatttaagttgttatgatgttttatggtac

SEQ ID NO: 231567 - DNA, 75 bp, synthetic construct
  source 1..75: mol_type = other DNA
atgccgccggtggcggcctggcggcaccccgtcacggggtgccggaaacggacttagtggaaagcggaatgacag

SEQ ID NO: 231568 - DNA, 75 bp, synthetic construct
  source 1..75: mol_type = other DNA
ttggcgaggctcgccccagctggcaaatctggaaggagctggggcaacagttagggcttgggcaatactatccgt

SEQ ID NO: 231569 - DNA, 75 bp, synthetic construct
  source 1..75: mol_type = other DNA
ctctccagccatcttttccatctggccacagcttttggttcacccaatacctttactcatgcttcaacctgccct

SEQ ID NO: 231570 - DNA, 75 bp, synthetic construct
  source 1..75: mol_type = other DNA
atgatgaactgtatttcatacagggcaaggtggcggtgcataccaatggcgcgacccagtatgtccctttgctca

SEQ ID NO: 231571 - DNA, 75 bp, synthetic construct
  source 1..75: mol_type = other DNA
caggccgcgattgagcaggcgatcgtgcagatccgcgaagcgggcaaagcgccggggatcctgatcgccaatgag

SEQ ID NO: 231572 - DNA, 75 bp, synthetic construct
  source 1..75: mol_type = other DNA
tattgccagtgtataattgtgaatcttatgttgatgagtgtattaaatctattcgcgatcaaacatataaaaacc

SEQ ID NO: 231573 - DNA, 75 bp, synthetic construct
  source 1..75: mol_type = other DNA
ttgacgatgatggtcatcaggttaaacccactgacggcccaactgacggggaatgttgcaggtgtaatcaagctg

SEQ ID NO: 231574 - DNA, 75 bp, synthetic construct
  source 1..75: mol_type = other DNA
tcgtgtggcagtcagtcaaaagaggttgtcggcctggcggcctccgcttaaaaggactttatgcccgcccggcgt

SEQ ID NO: 231575 - DNA, 75 bp, synthetic construct
  source 1..75: mol_type = other DNA
ctgggaaatattgagcgtgaagggggcttgtaccagaaaaaagccgcggcaacctacaataagctggccggagag

SEQ ID NO: 231576 - DNA, 75 bp, synthetic construct
  source 1..75: mol_type = other DNA
tgtgccgattaaacgcggcaagctggcgtttatttcacaatcggcagccgtctccaacaccatcctcgactgggc

SEQ ID NO: 231577 - DNA, 75 bp, synthetic construct
  source 1..75: mol_type = other DNA
tcacgttatagtgttgccgttgcggtcaatcccgtaaccgggcgtgagaacccgagtaactcaacggcgacacag

SEQ ID NO: 231578 - DNA, 75 bp, synthetic construct
  source 1..75: mol_type = other DNA
gctgcatagtgcgttcaatgatgaaatcccggcgattgtcgatgttttttcgcttttttcgcgggtgcggcgcgc

SEQ ID NO: 231579 - DNA, 75 bp, synthetic construct
  source 1..75: mol_type = other DNA
aacttgaaagaggctacgttcccccagaaagttgggatcgcggcattgatgctttttatacctcctataatttaa

SEQ ID NO: 231580 - DNA, 75 bp, synthetic construct
  source 1..75: mol_type = other DNA
aagatttattaatgtctattgaagatcaatatactatactaaaaataatagctgacgacatggtcgagggtaact

SEQ ID NO: 231581 - DNA, 75 bp, synthetic construct
  source 1..75: mol_type = other DNA
caaaaacagataaaaaaaaatgtgatgcaagtgactatgcagcacgctttgaaattattctggcggccaaaagcc

SEQ ID NO: 231582 - DNA, 75 bp, synthetic construct
  source 1..75: mol_type = other DNA
ttttccacaactggtgccagagacgctatgactggaatatagataccacagagatcgtgctttcaccgggcatta

SEQ ID NO: 231583 - DNA, 75 bp, synthetic construct
  source 1..75: mol_type = other DNA
gtttacgatgatgagtactatcatattttccacaactggtgccagagacgctatgactggaatatagataccgcg

SEQ ID NO: 231584 - DNA, 75 bp, synthetic construct
  source 1..75: mol_type = other DNA
aaataactatattatatagattcaactcttttgcgaaaattcttgaacaaagcacaggcattaagattgttaatg

SEQ ID NO: 231585 - DNA, 75 bp, synthetic construct
  source 1..75: mol_type = other DNA
aatcagtgagataaatagaaatagcatatcaaaaaagtataagccgataccattagaagcaattgaggctaaggg

SEQ ID NO: 231586 - DNA, 75 bp, synthetic construct
  source 1..75: mol_type = other DNA
attggcgacaaataatagtacgcagctatagctggtggccattgccgctttttttaatgatggggggatggatat

SEQ ID NO: 231587 - DNA, 75 bp, synthetic construct
  source 1..75: mol_type = other DNA
cttgccaatgcatataatacaaacaagtgtcagaaaatctgtaccacatgcaactgatgcagaacaattaagata

SEQ ID NO: 231588 - DNA, 75 bp, synthetic construct
  source 1..75: mol_type = other DNA
tacccctatattggaaccatttttagccctaacaataggatttctgaaatcataaactccagcgcgaacaactta

SEQ ID NO: 231589 - DNA, 75 bp, synthetic construct
  source 1..75: mol_type = other DNA
tcaactcatggtccttatcaacacattaatgattatggtgaaggtgtttatacctatgagattaatgaggcagtc

SEQ ID NO: 231590 - DNA, 75 bp, synthetic construct
  source 1..75: mol_type = other DNA
ggttatgacggccacggcgaaatgaatatcagtaatcaggggcttgttgtcagcaacggaggaagttcactcggt

SEQ ID NO: 231591 - DNA, 75 bp, synthetic construct
  source 1..75: mol_type = other DNA
tggcgcaacggacggtcatgcaaaaaacttctccgtatttattcaggctggcggcagttatcgactcacgccatt

SEQ ID NO: 231592 - DNA, 75 bp, synthetic construct
  source 1..75: mol_type = other DNA
gatatgctcaggttcacccgggcggcgtgccggtattgtccggtaccggtgcccgtacaggtgatttaaaaggga

SEQ ID NO: 231593 - DNA, 75 bp, synthetic construct
  source 1..75: mol_type = other DNA
atatgcatatgggaccagcacactggatgtcatcctggcatatctgatggagaggattggaaaaatcacggccta

SEQ ID NO: 231594 - DNA, 75 bp, synthetic construct
  source 1..75: mol_type = other DNA
gcggcaagctgtttaaaggcgtttaccatctttataaagatgaaacctatctctatcagagcggtaaagggcaca

SEQ ID NO: 231595 - DNA, 75 bp, synthetic construct
  source 1..75: mol_type = other DNA
ttccggtttcaaatgttctgaaacaagacagggaatcattattctggatatgtgtaaaaggcattccaccggaaa

SEQ ID NO: 231596 - DNA, 75 bp, synthetic construct
  source 1..75: mol_type = other DNA
taacttgatcaccgccattctcgacataacggacagcgaaattaaaagaggatttattgcaaagcctgatggatt

SEQ ID NO: 231597 - DNA, 75 bp, synthetic construct
  source 1..75: mol_type = other DNA
gttcaggagcaccagatccgtcaccggataactggatcagcattatcctggggggattcggttactgttggcagt

SEQ ID NO: 231598 - DNA, 75 bp, synthetic construct
  source 1..75: mol_type = other DNA
acgactttgtaggtcatgttgctgatgttacagatgagaatgcaccatcttttgacccagaagtgcgcgttgtgg

SEQ ID NO: 231599 - DNA, 75 bp, synthetic construct
  source 1..75: mol_type = other DNA
acagccacatcatggaggggtttgacagcgtgctcaccagcgtggccgccgatacgggggggtggatggcacacc

SEQ ID NO: 231600 - DNA, 75 bp, synthetic construct
  source 1..75: mol_type = other DNA
aaaagtcggtgaagcgattgagcgtctgaaattgattttgaatcacggtattgatgttataactctttgcgggtg

SEQ ID NO: 231601 - DNA, 75 bp, synthetic construct
  source 1..75: mol_type = other DNA
atgagcgaggttatgtccagaggaatccttgtcagggagttaagcagtttaaagagacagcacgcgaacgttata

SEQ ID NO: 231602 - DNA, 75 bp, synthetic construct
  source 1..75: mol_type = other DNA
aatcctggctgaccgggggagtgaggaaagccgccgctggctggcatcgtgcggcctgaccgtggagcagatgca

SEQ ID NO: 231603 - DNA, 75 bp, synthetic construct
  source 1..75: mol_type = other DNA
gtacgacgctgcgaaccgatctgctgcaacgggcaatctacctgaaacaatggtcccaggcagatacgctataca

SEQ ID NO: 231604 - DNA, 75 bp, synthetic construct
  source 1..75: mol_type = other DNA
atccggtaaccggcgcgtactgcgacgaacgtaccgacttcaccctgggccagacactccccctctccttcaccc

SEQ ID NO: 231605 - DNA, 75 bp, synthetic construct
  source 1..75: mol_type = other DNA
tctataaaaactaatggtgttttaggaatggataatcgtaaatctgcatatgcgggtagggggggggagttccag

SEQ ID NO: 231606 - DNA, 75 bp, synthetic construct
  source 1..75: mol_type = other DNA
actggtgttggtatccgtatctttaaccaggctgacaactctcaggtcaaactttataacgactcagcttatacc

SEQ ID NO: 231607 - DNA, 75 bp, synthetic construct
  source 1..75: mol_type = other DNA
cattcacgctggcatctttaatgctggccggacatgcactcgcagaggatggtgttgttcactttgttggtgaaa

SEQ ID NO: 231608 - DNA, 75 bp, synthetic construct
  source 1..75: mol_type = other DNA
tttaccaacaaaaataccaacgctatcagcatctcattgccgcacttcagggctatcacgctcacatcaaggatc

SEQ ID NO: 231609 - DNA, 75 bp, synthetic construct
  source 1..75: mol_type = other DNA
tggcgcaggaaaatcaactctcttaaaaatcctcagcggcaactatgcgccaaccacgggttctgtagtgattaa

SEQ ID NO: 231610 - DNA, 75 bp, synthetic construct
  source 1..75: mol_type = other DNA
aaatgaagtttattgcacgctatgttgctaccaatacgaccgtaacggcgggtacagcaaacgcggattcacaat

SEQ ID NO: 231611 - DNA, 75 bp, synthetic construct
  source 1..75: mol_type = other DNA
taccgaagcacctggcggagacggtgatctgaaagtaggttcacctattacagcgagtgatccgggtgattatac

SEQ ID NO: 231612 - DNA, 75 bp, synthetic construct
  source 1..75: mol_type = other DNA
agttctctataaataagaaaaactctaaaaaagaaatagccctcaagatgcgtggccttctggggagtgccgcta

SEQ ID NO: 231613 - DNA, 75 bp, synthetic construct
  source 1..75: mol_type = other DNA
aagcctcagaaactgacactttacgtaccgcagaacgtattcgcagtcgggtagaaaaaaccaaactgaaagctg

SEQ ID NO: 231614 - DNA, 75 bp, synthetic construct
  source 1..75: mol_type = other DNA
aggatgagtggaccgggcttgtcgaacaagcggatcctctcattcgcgccaaagccgctgaaattgccgttacgc

SEQ ID NO: 231615 - DNA, 75 bp, synthetic construct
  source 1..75: mol_type = other DNA
gaactggacgagatcgaacaggcgaaagacgaagcgcggctggaaagctttatcaaacgcgttaaaaagatgttt

SEQ ID NO: 231616 - DNA, 75 bp, synthetic construct
  source 1..75: mol_type = other DNA
acttcagccctcaggggatgcacatcagcgacgacgtgaaaggaacctctccagatcgtatcactggcaccgatg

SEQ ID NO: 231617 - DNA, 75 bp, synthetic construct
  source 1..75: mol_type = other DNA
caggtattatcaattccgaaggtgtcgaggcggtaccagcaaaagttaagcgtgaactggtgaagcatatctgcg

SEQ ID NO: 231618 - DNA, 75 bp, synthetic construct
  source 1..75: mol_type = other DNA
gtgattacatcggtattttggatgatttttttcttgagtactctcgttctagatccttggttcactcatcttgtg

SEQ ID NO: 231619 - DNA, 75 bp, synthetic construct
  source 1..75: mol_type = other DNA
tgatttactgcctgctgatctgcggcgttatctggacagcggtgattatcaaaattctgcacgctacgggggtgt

SEQ ID NO: 231620 - DNA, 75 bp, synthetic construct
  source 1..75: mol_type = other DNA
tatatggacctttttaacagtcatattgagcaagaaataataaagtccccagtcagcagtacctttctcgaaaac

SEQ ID NO: 231621 - DNA, 75 bp, synthetic construct
  source 1..75: mol_type = other DNA
acacacaatgtcagtttgctgtccgcactctgcttgacgggagtcttgtcgaaaataccggtggttttgaacgtt

SEQ ID NO: 231622 - DNA, 75 bp, synthetic construct
  source 1..75: mol_type = other DNA
gcaaacctgtagcgggatttctgatctgcaggtgtcactgcgtgacttgtggaatccggcaacctgtccggtcag

SEQ ID NO: 231623 - DNA, 75 bp, synthetic construct
  source 1..75: mol_type = other DNA
gctctgttgttggctttggtcgcattcgtaagcgttcagtgctggggtgcggtatgagcagaaacggcattcgct

SEQ ID NO: 231624 - DNA, 75 bp, synthetic construct
  source 1..75: mol_type = other DNA
aggcagaaagtgccacagatatcgcccgggccgtcacccttcccctgccaccggaggacatcacgcagctccgga

SEQ ID NO: 231625 - DNA, 75 bp, synthetic construct
  source 1..75: mol_type = other DNA
taccatgttcaccacgcgtctgcatgagcgtctgggtaatacgtactataccgacatggtgacgggtgagcagaa

SEQ ID NO: 231626 - DNA, 75 bp, synthetic construct
  source 1..75: mol_type = other DNA
accaatattgttggcgggtactatggcgaagcgatacaaggcgatatctttacggttccagatggagtagtaaaa

SEQ ID NO: 231627 - DNA, 75 bp, synthetic construct
  source 1..75: mol_type = other DNA
atgaccctgaccaattaaggcaagaattagcttctgacagaggagcaacattatcattaagtcagatagctactt

SEQ ID NO: 231628 - DNA, 75 bp, synthetic construct
  source 1..75: mol_type = other DNA
gaaccggggctgaagttccagccggttcacagcctggaggaactgaacgccaaagcgcgcctgtggcggcagcac

SEQ ID NO: 231629 - DNA, 75 bp, synthetic construct
  source 1..75: mol_type = other DNA
tgccagttattgactccacgaatcagtaccttcttgatcgtatcggagagcttaaatcgggcgatgcctgtgttg

SEQ ID NO: 231630 - DNA, 75 bp, synthetic construct
  source 1..75: mol_type = other DNA
gaagtcacacagctcgctattgctctggccgaacgcttcggtgatgagcccattgtactggccagtcttgtcagg

SEQ ID NO: 231631 - DNA, 75 bp, synthetic construct
  source 1..75: mol_type = other DNA
gttatattggtgcaactgtgtctggcccacaagttatggaaggagattgtttaggcaagattaatatgaggacgt

SEQ ID NO: 231632 - DNA, 75 bp, synthetic construct
  source 1..75: mol_type = other DNA
tctctgcctgcagcccgcatgccgtatcgggccttgggttctaacctgttgcgtagatttatgcagcggactgcc

SEQ ID NO: 231633 - DNA, 75 bp, synthetic construct
  source 1..75: mol_type = other DNA
ttttctctgcctgcagtccgcatgccgtatcgggccttgggttctaacctgttgcgtagatttatgcagcggact

SEQ ID NO: 231634 - DNA, 75 bp, synthetic construct
  source 1..75: mol_type = other DNA
cagttgggcgcagtacagctggtttgataacacagtgaaaggggatgacttacaaagtgaatcctataaatcaaa

SEQ ID NO: 231635 - DNA, 75 bp, synthetic construct
  source 1..75: mol_type = other DNA
tagttgctgttgctcaggctgcacggcaggccgggcatggcgcacgcggcgcaatctacactgccgcctgcgcgg

SEQ ID NO: 231636 - DNA, 75 bp, synthetic construct
  source 1..75: mol_type = other DNA
gtggggtgacctccgctacggtagggatcactttcgccactatgttcccggaggcgacacctggcgtaatgttat

SEQ ID NO: 231637 - DNA, 75 bp, synthetic construct
  source 1..75: mol_type = other DNA
caactctggaagcaggctatctttgcgctgatatcgtttatcagtggcgtgttcttctccgtccccatggcgaaa

SEQ ID NO: 231638 - DNA, 75 bp, synthetic construct
  source 1..75: mol_type = other DNA
ctgaatttgaacgagaccttttacttgaacgcactcattccgggatagtaagagcccggggcgcagggaaacgtt

SEQ ID NO: 231639 - DNA, 75 bp, synthetic construct
  source 1..75: mol_type = other DNA
atgcactacgtgttgctggcattcgcatcaaaggagggtgagaaagtgaatcgaacaataatagtgacaactgta

SEQ ID NO: 231640 - DNA, 75 bp, synthetic construct
  source 1..75: mol_type = other DNA
gccggtcagcacacctgaaatgtcacccggcgaggtgacaccacgcccgcttcagctaccgggcatcggtgcact

SEQ ID NO: 231641 - DNA, 75 bp, synthetic construct
  source 1..75: mol_type = other DNA
tcggtatggctataacagccagcggcaggtgacgtctgtgacgtacccggacgggcttcgcagcagccgggagta

SEQ ID NO: 231642 - DNA, 75 bp, synthetic construct
  source 1..75: mol_type = other DNA
gctcatcagcgaagacggcaatacggcgtggcgcggggagtatgatgaatggggcaaccagcttaatgaagagaa

SEQ ID NO: 231643 - DNA, 75 bp, synthetic construct
  source 1..75: mol_type = other DNA
atcatgaggcggcaggggatagacaaggtcagccagctaaagaaagaatcatggatcttaaaaataacactgtcg

SEQ ID NO: 231644 - DNA, 75 bp, synthetic construct
  source 1..75: mol_type = other DNA
ctaccactacgacagccagcaccgtctggtgttctacacgcggatacagcacggtgagccgcaggtcgagagccg

SEQ ID NO: 231645 - DNA, 75 bp, synthetic construct
  source 1..75: mol_type = other DNA
ctaccactacgacagccagcaccgtctggtgttctacacgcggatacagcacggtgagccacgggtggagagccg

SEQ ID NO: 231646 - DNA, 75 bp, synthetic construct
  source 1..75: mol_type = other DNA
aaattctcaggctgaaatgtgttactggaccagtagttgtcctttagatagcccacatgagaatgataattcgtc

SEQ ID NO: 231647 - DNA, 75 bp, synthetic construct
  source 1..75: mol_type = other DNA
gggcgtgaaacccgttatgagtacagcgccgcaggagacctgacagcaacgatatcaccggacggtaaacgcagc

SEQ ID NO: 231648 - DNA, 75 bp, synthetic construct
  source 1..75: mol_type = other DNA
tgtacacggagggcgaaggcggcctgaagcgggtggtgaagaaggagcatgcggacgggagcatcacccgcagcg

SEQ ID NO: 231649 - DNA, 75 bp, synthetic construct
  source 1..75: mol_type = other DNA
ctaccactacgacagccagcaccgtctggtgttctacacgcggatacagcacggtgagccgccggtagagagccg

SEQ ID NO: 231650 - DNA, 75 bp, synthetic construct
  source 1..75: mol_type = other DNA
gcattgcagtagtctggaagattatcggcgaattatcagtgatggtcgtcgtgaattccttgcgtccgggaaagg

SEQ ID NO: 231651 - DNA, 75 bp, synthetic construct
  source 1..75: mol_type = other DNA
tgttgataccggacacaactacttccaccacaacctcgcagacgaccccctgccagaacgacctcctgtctctct

SEQ ID NO: 231652 - DNA, 75 bp, synthetic construct
  source 1..75: mol_type = other DNA
tatccgaagcagcagacattaacagtgttattgcgctggtttcttcattagagaggcgagaaacacgccaggggc

SEQ ID NO: 231653 - DNA, 75 bp, synthetic construct
  source 1..75: mol_type = other DNA
catctgagatggtatatccaggttgtggatgcggcagatttgctctatctgctgttgtggctgaatggtatggag

SEQ ID NO: 231654 - DNA, 75 bp, synthetic construct
  source 1..75: mol_type = other DNA
agaccatgttctgataaatttactaatacgttgtttccgcacaggcattgctacaaaacgtcatatcgcaacaga

SEQ ID NO: 231655 - DNA, 75 bp, synthetic construct
  source 1..75: mol_type = other DNA
atggcacgtcaaacctatttcacttctgcaactaaacgtcctcgttctttacgtcaaattttggccgaattgttt

SEQ ID NO: 231656 - DNA, 75 bp, synthetic construct
  source 1..75: mol_type = other DNA
gctaccgccatagcaaatctgggcgcgacagtaggcatggagaaggtgcgtgattccgtcgcctctcgtgtgttg

SEQ ID NO: 231657 - DNA, 75 bp, synthetic construct
  source 1..75: mol_type = other DNA
tatctaactggaatgaaatagaactggataggaacgatgcttacacggagcagcaatttggtcggaacgggttaa

SEQ ID NO: 231658 - DNA, 75 bp, synthetic construct
  source 1..75: mol_type = other DNA
atgtgccgatttttgtttatcagttcagcagctggataaaccggacgccgaacacagcctatcccaccattccga

SEQ ID NO: 231659 - DNA, 75 bp, synthetic construct
  source 1..75: mol_type = other DNA
atgaaatatgcaccgtggtgtctgatggccttcttattcatgaccggcatcgcctgtgctgaagaggaagccccg

SEQ ID NO: 231660 - DNA, 75 bp, synthetic construct
  source 1..75: mol_type = other DNA
tgatagtgtcttattaaagaaatattcttatattgatactacttttgaagtccaatttagaactattttatctga

SEQ ID NO: 231661 - DNA, 75 bp, synthetic construct
  source 1..75: mol_type = other DNA
caaaatcagaaagctcaataattaagaaatatgaaaaagagcctaataaatactcagaggatggtaaaaaaattc

SEQ ID NO: 231662 - DNA, 75 bp, synthetic construct
  source 1..75: mol_type = other DNA
atgaacttaatcgtattggattactttatcgtttttttttcgaggacaaaatcagaaagctcaataattaagaaa

SEQ ID NO: 231663 - DNA, 75 bp, synthetic construct
  source 1..75: mol_type = other DNA
gataaaaagtatgttcttgcaataacttatacccataaagctgctgacgaaattaaagagagaattgagctatta

SEQ ID NO: 231664 - DNA, 75 bp, synthetic construct
  source 1..75: mol_type = other DNA
ttggtaacggcggctattgctgtgtggtgcaagcgtaatgtcaaaatgatgattgtaaaacgcgtgaaaaaattg

SEQ ID NO: 231665 - DNA, 75 bp, synthetic construct
  source 1..75: mol_type = other DNA
caggtacacttcgtcggcaaagttggcaacgaccatttcggccagatggcgcatgatcatctctcttcatccgat

SEQ ID NO: 231666 - DNA, 75 bp, synthetic construct
  source 1..75: mol_type = other DNA
cgaagacaaatttaccggcttcgtatttaaaattcaggccaacatggacccgaaacaccgcgaccgcgtggcgtt

SEQ ID NO: 231667 - DNA, 75 bp, synthetic construct
  source 1..75: mol_type = other DNA
atctgatgaaagcgcaaaaaaactattatatgtcattggttcgagagccagaaaaaacctacatcttatttctga

SEQ ID NO: 231668 - DNA, 75 bp, synthetic construct
  source 1..75: mol_type = other DNA
tttacaggaacattatgattctttttttaaaagttcacaggataggattgaacgtttgaaaaaagataatgaaca

SEQ ID NO: 231669 - DNA, 75 bp, synthetic construct
  source 1..75: mol_type = other DNA
gccggacagacggtcagcgtgacggcaggcaacggcgcaacgactgccccgacggtgaccacaaagccggacggt

SEQ ID NO: 231670 - DNA, 75 bp, synthetic construct
  source 1..75: mol_type = other DNA
tattgctggggatagcataacggtgaccgttgttcttaaagatgcccaggataactttattactgatggcgttgt

SEQ ID NO: 231671 - DNA, 75 bp, synthetic construct
  source 1..75: mol_type = other DNA
ggacagacggtcagcgtgacggcaggcaacagcgcaacggtcactccgacggtcaccacgcagtcggacggtacg

SEQ ID NO: 231672 - DNA, 75 bp, synthetic construct
  source 1..75: mol_type = other DNA
aaatattggcatatttgaataaacatgagcgggctacggttaatcaactcgccatcttattctctgtcagtaaag

SEQ ID NO: 231673 - DNA, 75 bp, synthetic construct
  source 1..75: mol_type = other DNA
tctagttggcctcaaggaatgtatacagtgattattacagataagacacgtagtgttaaacagtttaatatgatt

SEQ ID NO: 231674 - DNA, 75 bp, synthetic construct
  source 1..75: mol_type = other DNA
gcggatatacctgttagtgttttattatctgatgaatttggtaatcctgtgaatgacggtctggatttgctgaca

SEQ ID NO: 231675 - DNA, 75 bp, synthetic construct
  source 1..75: mol_type = other DNA
taaccagtatatctctgctggcggtaatgccagtgagacagttgtcagttccggtggttttcagcgtgttaattc

SEQ ID NO: 231676 - DNA, 75 bp, synthetic construct
  source 1..75: mol_type = other DNA
agacgtatttatgaagagttggatgactttcagtctaggcgtcctattgatgttattagtgcaaaccgtccaatc

SEQ ID NO: 231677 - DNA, 75 bp, synthetic construct
  source 1..75: mol_type = other DNA
ttaaaggcctcaatgctgacgtcttcgcgcaattcaagagcaacccggaaagcttcattgccgaagccattcgct

SEQ ID NO: 231678 - DNA, 75 bp, synthetic construct
  source 1..75: mol_type = other DNA
atattagcgagtccttgtcagctcgtccgcgtgtggcggacaagacctacttcatgggcaaaatgctgaacacga

SEQ ID NO: 231679 - DNA, 75 bp, synthetic construct
  source 1..75: mol_type = other DNA
gatgtgcaccttgtttcaagcttaaacaggcgtaaagttattggccgaccaactatttatacagtagtggatcgt

SEQ ID NO: 231680 - DNA, 75 bp, synthetic construct
  source 1..75: mol_type = other DNA
ttcgtggtatttcagtaaaaggcttggcgggaacgacagcctatctatatttggaatccatcgagatctcgaaaa

SEQ ID NO: 231681 - DNA, 75 bp, synthetic construct
  source 1..75: mol_type = other DNA
aaatgccagtggctcgtatagagatcgaggttaaacaacaaaatggcatcaaacgcatacccaagagggtcacta

SEQ ID NO: 231682 - DNA, 75 bp, synthetic construct
  source 1..75: mol_type = other DNA
accttgggcattatgggtggctatgcaaacgcaaaaggtaaaacgataaaccacacgagtaagaaaggggccaga

SEQ ID NO: 231683 - DNA, 75 bp, synthetic construct
  source 1..75: mol_type = other DNA
ctactgttattaatgatggaggatcccagtttgtatatgacggaggacaaacaaccggaaccagcatcaaaaatg

SEQ ID NO: 231684 - DNA, 75 bp, synthetic construct
  source 1..75: mol_type = other DNA
attgtatcagaaaccattgtgaatgtttctggtactcagaatatatactccggaggaagtgctcttagtgcgaac

SEQ ID NO: 231685 - DNA, 75 bp, synthetic construct
  source 1..75: mol_type = other DNA
cacacaacaagatccaccgcctggatgcgctcgatgcctataaccagaagctggtgaagaagattgaggtgcgtg

SEQ ID NO: 231686 - DNA, 75 bp, synthetic construct
  source 1..75: mol_type = other DNA
attgtctcaggtactatagtaaatagttcaggtgctcagaatatatatttcggagggcgagccgttagtgcgaat

SEQ ID NO: 231687 - DNA, 75 bp, synthetic construct
  source 1..75: mol_type = other DNA
tctgggagaaataaaaacaggtattgaggggcagatttctcaaaatctgacagtaaatgcggggggggggttatc

SEQ ID NO: 231688 - DNA, 75 bp, synthetic construct
  source 1..75: mol_type = other DNA
gtaaacgttatcaggggaaaggtgtttcatggtttatctcgccggagaagagcgtaacggtggatgtcagtgcag

SEQ ID NO: 231689 - DNA, 75 bp, synthetic construct
  source 1..75: mol_type = other DNA
tgatgcttttacatctgtgccgctggtttttcgcgtggagccctcatccacgtttactgtccgtattgtaaaaaa

SEQ ID NO: 231690 - DNA, 75 bp, synthetic construct
  source 1..75: mol_type = other DNA
tttccgggaagccgcagtggggtaacggtggagtacaaagttaacaacgtactgtgggagcaagagtatggtgcg

SEQ ID NO: 231691 - DNA, 75 bp, synthetic construct
  source 1..75: mol_type = other DNA
tacttatattaatgatggcatcaactaccgctgtagctcaaggaacatttggtccaagagaaaataaacttattt

SEQ ID NO: 231692 - DNA, 75 bp, synthetic construct
  source 1..75: mol_type = other DNA
atatgcagtttcaatagcatcattttacttatttgagagtttttttcttcgttttaaagtaaaatcttgcagaga

SEQ ID NO: 231693 - DNA, 75 bp, synthetic construct
  source 1..75: mol_type = other DNA
gcttcaaggtgcccatgatttaccgccccgccgcgcttgccggtaagccccagcagcccgaatcgctgcagtggc

SEQ ID NO: 231694 - DNA, 75 bp, synthetic construct
  source 1..75: mol_type = other DNA
gttatcgctgttataccggcgaaaagatcgatgtctatttcaacactgcgatatgtcagcattctggcaattggg

SEQ ID NO: 231695 - DNA, 75 bp, synthetic construct
  source 1..75: mol_type = other DNA
ttccgattctgagctggccatagtgcaaagctccggcgcgcttccttcccctcccggggtaaaagttaacatcgt

SEQ ID NO: 231696 - DNA, 75 bp, synthetic construct
  source 1..75: mol_type = other DNA
agcgattccgccggtagcgtgacaattacccttaccttccagtccgggaccgatcctgatatcgcgcaagtgtag

SEQ ID NO: 231697 - DNA, 75 bp, synthetic construct
  source 1..75: mol_type = other DNA
aaatgtctttatatatcaatgtatttttattgtttgttttgttcctattatcgcaccattaaaatcaaagagtta

SEQ ID NO: 231698 - DNA, 75 bp, synthetic construct
  source 1..75: mol_type = other DNA
aaacttttttgccaattatcgggcgttagccagcggtgttcagcctggtgtggcgaaagcggatgcgatatttat

SEQ ID NO: 231699 - DNA, 75 bp, synthetic construct
  source 1..75: mol_type = other DNA
cacggcactcgtcccttttagcctgcggctggagggatgtcctccgggttcagtcgcgattttatttacgggaac

SEQ ID NO: 231700 - DNA, 75 bp, synthetic construct
  source 1..75: mol_type = other DNA
gcggcaaccgtcatgggccgtaatgcaccaccgcccgtgcaacgctatcttttacagcgccaccagcaggctggt

SEQ ID NO: 231701 - DNA, 75 bp, synthetic construct
  source 1..75: mol_type = other DNA
tacgttgagccagaactgatccgcgtgctggtgacgccgatgaaagccgctcagattctgggcgaaaccaaaaaa

SEQ ID NO: 231702 - DNA, 75 bp, synthetic construct
  source 1..75: mol_type = other DNA
ggaaacagaaaaaatccgctggtacctggggggcgattattcgccagccgctggcgtatgcacaaatgctggggg

SEQ ID NO: 231703 - DNA, 75 bp, synthetic construct
  source 1..75: mol_type = other DNA
tccgagaacttggtattggtcttaattttctgaaagtatcagggatgtcctataaagacatagccaaaaaagaga

SEQ ID NO: 231704 - DNA, 75 bp, synthetic construct
  source 1..75: mol_type = other DNA
catagcctgagccagaacgtcacctttgtaccgggtgacgcatcgcagctcacttcaaccgttgaaacaaataag

SEQ ID NO: 231705 - DNA, 75 bp, synthetic construct
  source 1..75: mol_type = other DNA
agaagactttactttcgaaaatgggagattacaaagaagtggtaatggtgtacctttaaacatagtcattaccga

SEQ ID NO: 231706 - DNA, 75 bp, synthetic construct
  source 1..75: mol_type = other DNA
atgacgaagcagaccgcctcacgcaccgcaccgtgaatggcgaaaccgcagagcagtggcagtatgacgaacgcg

SEQ ID NO: 231707 - DNA, 75 bp, synthetic construct
  source 1..75: mol_type = other DNA
agttggttttaaatggagagttttatggtgaatgctgttgttctgtattattagtacatgaaaacggttttttaa

SEQ ID NO: 231708 - DNA, 75 bp, synthetic construct
  source 1..75: mol_type = other DNA
tgaaaggagaaaaagtttccgaatatcatttcgataataaacaaccgcttccaggaaactacgaacttgattttt

SEQ ID NO: 231709 - DNA, 75 bp, synthetic construct
  source 1..75: mol_type = other DNA
cctgtggctggtttatggcaaaggccgaaacacgatcgttgctggaaaatgttcatttggtgaatgaaaagaaca

SEQ ID NO: 231710 - DNA, 75 bp, synthetic construct
  source 1..75: mol_type = other DNA
taagtataaaggaaggccaaaagaaagagtttacactccattctggtaataaagtttcctttatcaaagccaaga

SEQ ID NO: 231711 - DNA, 75 bp, synthetic construct
  source 1..75: mol_type = other DNA
acccgcgtcttcacccggaccttcaatctgccgccgggcgcctaccgtaaagagaaccacagtcgcgcccactga

SEQ ID NO: 231712 - DNA, 75 bp, synthetic construct
  source 1..75: mol_type = other DNA
tcagaaaactataattgagaatgacttcattgctcttgaaatatcagaaacatttccgtattttcatgaaaatag

SEQ ID NO: 231713 - DNA, 75 bp, synthetic construct
  source 1..75: mol_type = other DNA
aatacgaatctacgataacgcatcggcaaagtggggtgagccaaaaacaattcatgcccatgaactggtcgggca

SEQ ID NO: 231714 - DNA, 75 bp, synthetic construct
  source 1..75: mol_type = other DNA
ttatatgaaaatatttatcagcttttaattaaaccttacctactcgatctttctagccagtctggaaaaaaatag

SEQ ID NO: 231715 - DNA, 75 bp, synthetic construct
  source 1..75: mol_type = other DNA
tggcgtattgattgcaggtgcctggtatctggggcctgcagcgtccgtcgggaaagtgatcggtggtggagttat

SEQ ID NO: 231716 - DNA, 75 bp, synthetic construct
  source 1..75: mol_type = other DNA
aaccttatcaatcacaacttatcggtcaacacgttacccatgtggaaacgcgtggtaaggcgttgttaactcatt

SEQ ID NO: 231717 - DNA, 75 bp, synthetic construct
  source 1..75: mol_type = other DNA
gtgaccggtgcctcagagagttctacccgctggggtgtgggcaggccgctgtataaggatctcatcggtcgtaca

SEQ ID NO: 231718 - DNA, 75 bp, synthetic construct
  source 1..75: mol_type = other DNA
cctgaagatattccactggtttaccttgatataggttcgctggctatggctgtgcgaagtttatcgaaagcgatt

SEQ ID NO: 231719 - DNA, 75 bp, synthetic construct
  source 1..75: mol_type = other DNA
caggcgagcagagcgcggcatatcgtgcgatgtttgcagtacagaaaggatttaccatagcatccgcagcattga

SEQ ID NO: 231720 - DNA, 75 bp, synthetic construct
  source 1..75: mol_type = other DNA
acgaatacgccaacctcgcgaaacagtcagccgaggccgctgcgatggtcgaacgccatttaacactgaagctac

SEQ ID NO: 231721 - DNA, 75 bp, synthetic construct
  source 1..75: mol_type = other DNA
ttcgtggtgcaggtccagtcaggacaaagcgcactgatagcgttgtcacagcaaggcagtcagttattgagtgcc

SEQ ID NO: 231722 - DNA, 75 bp, synthetic construct
  source 1..75: mol_type = other DNA
gtggcatgatatccgccggaggtcacagcggacatgcggaaggaacgactcaggccgcagtggcagatggcacaa

SEQ ID NO: 231723 - DNA, 75 bp, synthetic construct
  source 1..75: mol_type = other DNA
acgccattgctcacgccattctgggcggtgcagcagcggcaatgcagggtcataatgttgctgccggtgcagcag

SEQ ID NO: 231724 - DNA, 75 bp, synthetic construct
  source 1..75: mol_type = other DNA
gtgggaaaagctggccgtggcggcgcaatctcgatgaaggcgacggcaactgcatgaccaacaattccctggaaa

SEQ ID NO: 231725 - DNA, 75 bp, synthetic construct
  source 1..75: mol_type = other DNA
ttgcagatatggtgggacagtgcgctggtggttctgctgacggtgttccctggatatgtggagacacaacttatt

SEQ ID NO: 231726 - DNA, 75 bp, synthetic construct
  source 1..75: mol_type = other DNA
gcctgataagcgaagcgcatcaggcagttttgcgtttgtcagcagtctcaagcggcgcagttacgccgcctttgt

SEQ ID NO: 231727 - DNA, 75 bp, synthetic construct
  source 1..75: mol_type = other DNA
gtgctgaaacattcccaggtttcaatcttgaagattacgatgatcttgagttcgtccctcgaccgtatctcgaac

SEQ ID NO: 231728 - DNA, 75 bp, synthetic construct
  source 1..75: mol_type = other DNA
tcattatgggtgggattccgattttatcaataaagaacaacgtaagttaaatattttccaaaataatcaaaatgt

SEQ ID NO: 231729 - DNA, 75 bp, synthetic construct
  source 1..75: mol_type = other DNA
aatgggacatcgtaaaccccgaaatctgggaggcgtcgcaactggaatttattgtccagcgtggtgacgcgtcgt

SEQ ID NO: 231730 - DNA, 75 bp, synthetic construct
  source 1..75: mol_type = other DNA
ccaatcgtacaacgcgaaataatgcgacgaaaatcagaaggcttcgatgtgaaaattgagtttttatcgacgtta

SEQ ID NO: 231731 - DNA, 75 bp, synthetic construct
  source 1..75: mol_type = other DNA
atgacgaccatcaggacgcaacacatcgacatccagtttctctttagcggtgtcgataccgatataatgaagttc

SEQ ID NO: 231732 - DNA, 75 bp, synthetic construct
  source 1..75: mol_type = other DNA
gaggatgtcgttatcgcagactcattgtttggcagttcggcgaagtttgaattttttcaagtgaaaaatactggg

SEQ ID NO: 231733 - DNA, 75 bp, synthetic construct
  source 1..75: mol_type = other DNA
caatccaagattcaatattatacaagatgacaatcatcttagaaactgagtttaacgacattaagattactgatt

SEQ ID NO: 231734 - DNA, 75 bp, synthetic construct
  source 1..75: mol_type = other DNA
gatacccgagcggcgccgggaactggtggcgggctgccagcgctgcgctgactgtcaggaagagtttgaagaacg

SEQ ID NO: 231735 - DNA, 75 bp, synthetic construct
  source 1..75: mol_type = other DNA
atttaaccactccacgtggttaacattcatgaaaaataggcttgaaacatcacttaaattattatcagatgatgg

SEQ ID NO: 231736 - DNA, 75 bp, synthetic construct
  source 1..75: mol_type = other DNA
ctttgaacataaacacagtgggatcaaatacgttacgccagccgagcgtcatcaagaaaatgacatgaaaatact

SEQ ID NO: 231737 - DNA, 75 bp, synthetic construct
  source 1..75: mol_type = other DNA
ttgagcagatcaagcgggagctaagggaacaaatcaaagagattagagaggatgcggctacggcggcgtatgcaa

SEQ ID NO: 231738 - DNA, 75 bp, synthetic construct
  source 1..75: mol_type = other DNA
ctgcgtccgaattttcatctaccgccgggcaagccattacttcacgaaaaatcactaaaacagtgagtattgagt

SEQ ID NO: 231739 - DNA, 75 bp, synthetic construct
  source 1..75: mol_type = other DNA
tcaataagctgggaagtgtattatccaatacaaagcacctgaacggtgttggtaataagttacagaatttaccta

SEQ ID NO: 231740 - DNA, 75 bp, synthetic construct
  source 1..75: mol_type = other DNA
attgaagtccagtatgaggaaaagaatggcacggcgattactaaacaggtattcggcacagcagagaaactcatt

SEQ ID NO: 231741 - DNA, 75 bp, synthetic construct
  source 1..75: mol_type = other DNA
gcgataatagccgctttgtggggcaattcaacattgatacaggcagcgcgctcagcgtcaacgagcagaaaaacc

SEQ ID NO: 231742 - DNA, 75 bp, synthetic construct
  source 1..75: mol_type = other DNA
gaagattttgaaacagatgattttgatatcaaaaaaacgagagtgagatttatgatgaaaatgacgaacagatga

SEQ ID NO: 231743 - DNA, 75 bp, synthetic construct
  source 1..75: mol_type = other DNA
tgtgatttaatttatccagaggagttaaaaatggctgatcattttgagtacgaggaagattttgaaacagatgat

SEQ ID NO: 231744 - DNA, 75 bp, synthetic construct
  source 1..75: mol_type = other DNA
tacaccgggttaaacaggtggtcactgcttcactgaagctgcgtgattatgatggtcaggtagcagaagctatgc

SEQ ID NO: 231745 - DNA, 75 bp, synthetic construct
  source 1..75: mol_type = other DNA
ttttgacgatccggagtcgctggggtttgccagtagtgggatccgtattgaaggaagcagcccgtcattatttgt

SEQ ID NO: 231746 - DNA, 75 bp, synthetic construct
  source 1..75: mol_type = other DNA
cgtgcgcagttcacctccggtgcacagcgtggcggcgaagttcagggggtttttgacgatccggagtcgctgggt

SEQ ID NO: 231747 - DNA, 75 bp, synthetic construct
  source 1..75: mol_type = other DNA
tgcatagtctgctggctgctacagcgctcggtttttgccgattggcaccaactttctatttgttaccatttttcg

SEQ ID NO: 231748 - DNA, 75 bp, synthetic construct
  source 1..75: mol_type = other DNA
tctgccagcgattatctgcgcgagcgggtcagcgacattcgcgatatcagcgaacagttgctgcatatcacctag

SEQ ID NO: 231749 - DNA, 75 bp, synthetic construct
  source 1..75: mol_type = other DNA
tgagggattatccgttacagcggatagcatcaatttcagattcattggtgattctctctggacaatccaaaccgt

SEQ ID NO: 231750 - DNA, 75 bp, synthetic construct
  source 1..75: mol_type = other DNA
acatcggtgagtattattggcaaacagaactgggtacatgtaaaaataataaattcacaccaagcggggcgagac

SEQ ID NO: 231751 - DNA, 75 bp, synthetic construct
  source 1..75: mol_type = other DNA
cgatcaccattaacactacgaatggcttcagtgaggaagactcaagacgtctggaggacaccataaagcgcgtgg

SEQ ID NO: 231752 - DNA, 75 bp, synthetic construct
  source 1..75: mol_type = other DNA
ttcggtggctgggggattgctcttggtgcggcacttacggttggtgtatcgctgtttaaagctctgtcaggtgaa

SEQ ID NO: 231753 - DNA, 75 bp, synthetic construct
  source 1..75: mol_type = other DNA
tcaggtgaaatcaccggtcaccacgaagccggttcagaagaaaaaatcagcggctgtccggaaggtgtcacaacc

SEQ ID NO: 231754 - DNA, 75 bp, synthetic construct
  source 1..75: mol_type = other DNA
tgattggatccgacagtttactcgacatgatgcaggcgatgcgggcgttaggcgttgaaacgtatgattacgccg

SEQ ID NO: 231755 - DNA, 75 bp, synthetic construct
  source 1..75: mol_type = other DNA
tgagtccaacaagcctgagctgtttcaatccggcgggcgacagtacatgattcctggtgagggcggcaggattat

SEQ ID NO: 231756 - DNA, 75 bp, synthetic construct
  source 1..75: mol_type = other DNA
ctggaggacaccataaagcgcgtggctatgggtgtggtaagagaacagagcacacgcccagggggaatgcttcaa

SEQ ID NO: 231757 - DNA, 75 bp, synthetic construct
  source 1..75: mol_type = other DNA
gtgagtattcaaagtttgcttgattatatttcagtgatccctgatatacgacaacaaggaaaggttaaacataaa

SEQ ID NO: 231758 - DNA, 75 bp, synthetic construct
  source 1..75: mol_type = other DNA
tttatactattccaaactcttatatggccgagaattcaattactgtattaaaagatctttttagtaaaaaaatct

SEQ ID NO: 231759 - DNA, 75 bp, synthetic construct
  source 1..75: mol_type = other DNA
cagaatggtacgcagaatacgatgaatggggtaaccagctgagtgaggataacccgcaccagctgcagcagctca

SEQ ID NO: 231760 - DNA, 75 bp, synthetic construct
  source 1..75: mol_type = other DNA
ctgtcagagactgttaggtgtattgccgatgggaaggttatttcaatacgccagccagaaccagcggaaaataca

SEQ ID NO: 231761 - DNA, 75 bp, synthetic construct
  source 1..75: mol_type = other DNA
agcaaccatttgaaactcaggtttcatgggaggcgcagtgtcatgccgcgtcactcctgcgtaaagcaatcctga

SEQ ID NO: 231762 - DNA, 75 bp, synthetic construct
  source 1..75: mol_type = other DNA
ccgcgagtttaatgccgctgatatcgtcacctgttttgcatcagtaatcatgaacgatcagccgatcttcgccac

SEQ ID NO: 231763 - DNA, 75 bp, synthetic construct
  source 1..75: mol_type = other DNA
gtatagctgccggcgcttatgactacacgctggggcgtggtcagggaagcaacagcggtaactggtatctgacca

SEQ ID NO: 231764 - DNA, 75 bp, synthetic construct
  source 1..75: mol_type = other DNA
tagagaattcacgctggacgggaagcgcatcaaatggtggtactgttaatttagacgagaacagtatctggaaga

SEQ ID NO: 231765 - DNA, 75 bp, synthetic construct
  source 1..75: mol_type = other DNA
gcatctctggaatccggttatacctggaaagcgggtgaatttaccggcaacaaagatagtctgaatgaatggtat

SEQ ID NO: 231766 - DNA, 75 bp, synthetic construct
  source 1..75: mol_type = other DNA
cagtgtataatggtagggaatggattgatgagcaacttaattcaattcgcgcccaggaagatgtgcaagtcgata

SEQ ID NO: 231767 - DNA, 75 bp, synthetic construct
  source 1..75: mol_type = other DNA
gagatggatacttatcatctttaaaattggcttttatagttagaaaattaagacgtcgtcctcgagatcaatttg

SEQ ID NO: 231768 - DNA, 75 bp, synthetic construct
  source 1..75: mol_type = other DNA
tgaccagccgaaaattgccgtcatcaattgcgaagcctttgaagtttgtgtgcagcgacgtaaaggatttgaaga

SEQ ID NO: 231769 - DNA, 75 bp, synthetic construct
  source 1..75: mol_type = other DNA
gccggtatctccccagaataacaccgatacccggttttacttctggtgcgatgcgggaactttgtgagtggtcgt

SEQ ID NO: 231770 - DNA, 75 bp, synthetic construct
  source 1..75: mol_type = other DNA
gtcgcctgcgtaaagcactggagcccggcgggcatgaccgcatggtgcagaccgtgcgcggtacaggatatcgtt

SEQ ID NO: 231771 - DNA, 75 bp, synthetic construct
  source 1..75: mol_type = other DNA
acaggctgacgacggtacagaccgacaccacgcgtatccagacggtataccagccggggagcttcgcgccgctca

SEQ ID NO: 231772 - DNA, 75 bp, synthetic construct
  source 1..75: mol_type = other DNA
actaagggagagcaatctgacgcaatccaaatcatcgaaagtaacggtggaacattaactggtgatagtgtttca

SEQ ID NO: 231773 - DNA, 75 bp, synthetic construct
  source 1..75: mol_type = other DNA
gctaatggatacaaaaatcactacatctggtaaaaatgcctatggattacgttcagatggagtgaattctacaat

SEQ ID NO: 231774 - DNA, 75 bp, synthetic construct
  source 1..75: mol_type = other DNA
aattaaagaaaatgatacttgttcattgcatattagaagaggtgattatgtttccagtaaaatagcaaatgaaac

SEQ ID NO: 231775 - DNA, 75 bp, synthetic construct
  source 1..75: mol_type = other DNA
cgttttaatccgtttttcgatctcggagcctggcatggtcatctgttgccagacggccctaacaccatgggcggc

SEQ ID NO: 231776 - DNA, 75 bp, synthetic construct
  source 1..75: mol_type = other DNA
gcgtgccatggaagagctgcaacaggccggtaaaattcgcgctattggcgtcagtaacttccatcctgacccgac

SEQ ID NO: 231777 - DNA, 75 bp, synthetic construct
  source 1..75: mol_type = other DNA
ctgccggtgatcactatcacgcgtaaggacggcgacagtcaccgctttaccttggcagatcgcggagcctatacg

SEQ ID NO: 231778 - DNA, 75 bp, synthetic construct
  source 1..75: mol_type = other DNA
ccgtgaaaagtcgtggcacaagaccacagtcggggaagtggtgaaggaaatagccgcgcggcacaaactgaagat

SEQ ID NO: 231779 - DNA, 75 bp, synthetic construct
  source 1..75: mol_type = other DNA
aagccgggcatcatttatgcaaatcatggtcaataccgggattcggaccgttaacgaggttcgaaggctcgataa

SEQ ID NO: 231780 - DNA, 75 bp, synthetic construct
  source 1..75: mol_type = other DNA
agtgggtttgagcaatccgctggcgcgactgctgcgctactcaccgaatcagtacatgaccgcccaggagttcag

SEQ ID NO: 231781 - DNA, 75 bp, synthetic construct
  source 1..75: mol_type = other DNA
cgaggtgccgcctgtggaggccgatctcaagctcattgccgcaattgacgcaggcaaatatcttgctgaggggtt

SEQ ID NO: 231782 - DNA, 75 bp, synthetic construct
  source 1..75: mol_type = other DNA
gatctggagctggacgacgcggacggcctgattgtgctgccgcgccgtggggcggtgatcaccgtggcgctgggc

SEQ ID NO: 231783 - DNA, 75 bp, synthetic construct
  source 1..75: mol_type = other DNA
tgatggctgctggccctggcgggaaagatatcttcctgttaagcccggatgtcggtgctaaacctggccaccagg

SEQ ID NO: 231784 - DNA, 75 bp, synthetic construct
  source 1..75: mol_type = other DNA
gaaaacttgctgagtgggttcgggagcaactcaacaagaagcattcgaatgtggttgcctgcgctctggcaaata

SEQ ID NO: 231785 - DNA, 75 bp, synthetic construct
  source 1..75: mol_type = other DNA
gatcgcggatcttacacgggcgtaattgccagctggttgcatacccgcgaacccgcgaagaaagaaagcaccacg

SEQ ID NO: 231786 - DNA, 75 bp, synthetic construct
  source 1..75: mol_type = other DNA
atggctttaccacgtaaattaaaacatctgaacctgtttaacgacgggaacaactggcaggggatcgtagagtcg

SEQ ID NO: 231787 - DNA, 75 bp, synthetic construct
  source 1..75: mol_type = other DNA
tgaacacagtggcgcgcctgaccgtctgaccattcgcgcccgcagtgctgacttccgggaaacgctgaataccag

SEQ ID NO: 231788 - DNA, 75 bp, synthetic construct
  source 1..75: mol_type = other DNA
ttgtactgatgaggaattaaacgatcgtgagtttattgcatcagttgttgaccgggctatttttcatttcgcgat

SEQ ID NO: 231789 - DNA, 75 bp, synthetic construct
  source 1..75: mol_type = other DNA
aacctcaaaggaagagattaaaatacttacagacacttctaaattaatttatgatttattcggggttaaatcggg

SEQ ID NO: 231790 - DNA, 75 bp, synthetic construct
  source 1..75: mol_type = other DNA
atataaatgacaacgatctcattaacgaagatattattaagttcatttatgacctattcgatattgtgttaaaaa

SEQ ID NO: 231791 - DNA, 75 bp, synthetic construct
  source 1..75: mol_type = other DNA
aaagcattgttgattggtaatggtctgaagctacgtttgctggatgaaaacgcctcgccttataccttcaataaa

SEQ ID NO: 231792 - DNA, 75 bp, synthetic construct
  source 1..75: mol_type = other DNA
tcatgtgcattagttcagcattaccactatgaattatcgaccttaaatgaaatcgatatcgctttgtttgctgcc

SEQ ID NO: 231793 - DNA, 75 bp, synthetic construct
  source 1..75: mol_type = other DNA
atgggggaggcgatactctatcagttgcatagtctgctggctgctacagcgctcggtttttgccgattggcacca

SEQ ID NO: 231794 - DNA, 75 bp, synthetic construct
  source 1..75: mol_type = other DNA
gtgataacccgcttcgttttttacgttactttctgatggcacgatatcatcacgggattttgcgtgaagatgata

SEQ ID NO: 231795 - DNA, 75 bp, synthetic construct
  source 1..75: mol_type = other DNA
tcgtgattatcttaaataccaattgcaagatagcttgaatggattaatctccttcgctcgcttttttttaacaaa

SEQ ID NO: 231796 - DNA, 75 bp, synthetic construct
  source 1..75: mol_type = other DNA
atgattaattttgataattatagtaaaaaatttgcaatgagcatcttggatgcaacaccgtcatcgatgatagta

SEQ ID NO: 231797 - DNA, 75 bp, synthetic construct
  source 1..75: mol_type = other DNA
attatctttaagttggcctttaatattatcgggtgtcgcttttatgttatacatgcgaattgaccaaataatgat

SEQ ID NO: 231798 - DNA, 75 bp, synthetic construct
  source 1..75: mol_type = other DNA
atgacgctcggccagttctctgaaatattctttatgctggcattaccgtttttcactaaacgctttggtatcaaa

SEQ ID NO: 231799 - DNA, 75 bp, synthetic construct
  source 1..75: mol_type = other DNA
cttcacgccgtaagttacgatttttactacgttaccgcttacatctatgtcgataaaaaagcccccgtgcatatg

SEQ ID NO: 231800 - DNA, 75 bp, synthetic construct
  source 1..75: mol_type = other DNA
gtctggaaaacattcgcgtgctggattgcagcgtcaatttttctatttcaccagaaacacaggtgattgattttg

SEQ ID NO: 231801 - DNA, 75 bp, synthetic construct
  source 1..75: mol_type = other DNA
atggtgagaagtgcgaacggtgtggctgcatcattgagaaaaccacgctatcttcgcgcccgttttactggtgcc

SEQ ID NO: 231802 - DNA, 75 bp, synthetic construct
  source 1..75: mol_type = other DNA
gattaaaactgatggaggtggttaacgctctgtcagagtcgcagggcagcactccgcaggagattatcgaaattc

SEQ ID NO: 231803 - DNA, 75 bp, synthetic construct
  source 1..75: mol_type = other DNA
acggctgaactttcgtccacgccaggcactcccatcgaggctgggccattcgacacggtggtgctttttaaaatt

SEQ ID NO: 231804 - DNA, 75 bp, synthetic construct
  source 1..75: mol_type = other DNA
gacaaccgtggccggttaacctcggtgaaagacgcacagggccgtgaaacgcagtatgagtacaacgccgcaggc

SEQ ID NO: 231805 - DNA, 75 bp, synthetic construct
  source 1..75: mol_type = other DNA
taacgatatctgaattgttatacatgtgtatatacgtggtaatgacaaaaataggacaagttaaaaatttacagg

SEQ ID NO: 231806 - DNA, 75 bp, synthetic construct
  source 1..75: mol_type = other DNA
agaaggccatcctgacagatggcctttttgcgttggtgaaaaaaatgccggatgcgacgctggcgcgtctgctcc

SEQ ID NO: 231807 - DNA, 75 bp, synthetic construct
  source 1..75: mol_type = other DNA
gaaacgttggttgaagaagataaagcaggtaatgactccaacttattgatagtgttttatgttcagataatgccc

SEQ ID NO: 231808 - DNA, 75 bp, synthetic construct
  source 1..75: mol_type = other DNA
catgctgatctacgaaaaaacctatacggctgaactttcgtctattcccggcactcccattgaggctggctcctt

SEQ ID NO: 231809 - DNA, 75 bp, synthetic construct
  source 1..75: mol_type = other DNA
ttgtggtgcaatttgatggcgaaggaagcattaatgaggacccaaccgcccaaaacctgaaatatcatattaccg

SEQ ID NO: 231810 - DNA, 75 bp, synthetic construct
  source 1..75: mol_type = other DNA
tcgccctacaccttcaacaaatacagcgagtatgccgatttcaccagcgacatgttgatctacgaaaaaaactat

SEQ ID NO: 231811 - DNA, 75 bp, synthetic construct
  source 1..75: mol_type = other DNA
ttgcagcgtgaatttttctattaccccagccaatcaggtgattgatttcggtaaatttaatgtgctggatatccg

SEQ ID NO: 231812 - DNA, 75 bp, synthetic construct
  source 1..75: mol_type = other DNA
tatcaaagtactctcagcgactacatcgtggtgcaatttgatggcgcgggcagtgttaacgaagatcccaccgcc

SEQ ID NO: 231813 - DNA, 75 bp, synthetic construct
  source 1..75: mol_type = other DNA
aatgcgcctcatcctttgagtagagaactaataactgaatcaatgattatggaaaaagataaatgtcattttgat

SEQ ID NO: 231814 - DNA, 75 bp, synthetic construct
  source 1..75: mol_type = other DNA
gaggatacaaaactatccggggattgctactgatccctttggctatgcagtggttccttatctcacgacttatca

SEQ ID NO: 231815 - DNA, 75 bp, synthetic construct
  source 1..75: mol_type = other DNA
gtattttgagtctgatcgcttcagcgtttgctatgttgttctgttttgctgcgctggctggtgcagagcattatg

SEQ ID NO: 231816 - DNA, 75 bp, synthetic construct
  source 1..75: mol_type = other DNA
agagtaggcgattatcacactcacggtttttactctgacgataaaggcaataaagtaacaaaagaaaatgatgtt

SEQ ID NO: 231817 - DNA, 75 bp, synthetic construct
  source 1..75: mol_type = other DNA
ggttaacagaaaggaggttcagagagcaattaatgaagcaaagcataattcttcctccagtgttcttatggccgg

SEQ ID NO: 231818 - DNA, 75 bp, synthetic construct
  source 1..75: mol_type = other DNA
gtgatgagcacgggaacatcctcgatatgggcgcagggttcgatgaaatgcacgagcgctcccatgcctatcatc

SEQ ID NO: 231819 - DNA, 75 bp, synthetic construct
  source 1..75: mol_type = other DNA
attttcgtgacatggctatggtagtgggaggctctctcctgaccacgagtattaaagtggcggaattttttggta

SEQ ID NO: 231820 - DNA, 75 bp, synthetic construct
  source 1..75: mol_type = other DNA
ggtaaatctggttttcaccagcaacataagaatcaaggttctgacttcagacgtatgtttgaaaatgttatgtct

SEQ ID NO: 231821 - DNA, 75 bp, synthetic construct
  source 1..75: mol_type = other DNA
ttgaagaaactgccaaatcagacagtcagtgcgggaaaagtgcgggcaacggcttatatattggtgaaaatgcaa

SEQ ID NO: 231822 - DNA, 75 bp, synthetic construct
  source 1..75: mol_type = other DNA
gtcttaggaataatcgaccggccaaaaattatttttttgttccaggtggtaggattcgcaaaaatgaatctatta

SEQ ID NO: 231823 - DNA, 75 bp, synthetic construct
  source 1..75: mol_type = other DNA
ctcacccagtcactctcttcgctcttttccctcgatctctccctagtcagccagcagtttctctcccttgaattt

SEQ ID NO: 231824 - DNA, 75 bp, synthetic construct
  source 1..75: mol_type = other DNA
acagggctgcgccagaacttccgtatcttccagaatgaggacatcgaaagcatcctcgctacgatattgcaggaa

SEQ ID NO: 231825 - DNA, 75 bp, synthetic construct
  source 1..75: mol_type = other DNA
gccccggctgggcaggacgttttgatcaggaaggccagcaccaggattaccagcgcacgcagtatgaggtgtatg

SEQ ID NO: 231826 - DNA, 75 bp, synthetic construct
  source 1..75: mol_type = other DNA
tgtttatgagttttcccgcatttccgctgaggcacagtcggagattgatgatgcaataaaacgtattctgaaaag

SEQ ID NO: 231827 - DNA, 75 bp, synthetic construct
  source 1..75: mol_type = other DNA
gtgctaattccacccagtatgctaacccgtggctgcaagaagttcagacgcaaaaactctggctgaatccgcaag

SEQ ID NO: 231828 - DNA, 75 bp, synthetic construct
  source 1..75: mol_type = other DNA
gatctgttcatgactccgagcgcgaaatatgccgatgtgttgctgccggaaaccagctttatggaacgctggaat

SEQ ID NO: 231829 - DNA, 75 bp, synthetic construct
  source 1..75: mol_type = other DNA
ccagcacaatccattcgtcaactggcacgcgattacgccactacaaaacccgcagcgttgattcagggatggggg

SEQ ID NO: 231830 - DNA, 75 bp, synthetic construct
  source 1..75: mol_type = other DNA
attaggtattactggaaacgatttacccctgggagagcagagaatcagcgtcccaagtgaatcgatagatggggt

SEQ ID NO: 231831 - DNA, 75 bp, synthetic construct
  source 1..75: mol_type = other DNA
aaaaatgaacagtggtccttcagtagtggttatatccctcctgccattctcaacttcgttgtcgcctatgatggt

SEQ ID NO: 231832 - DNA, 75 bp, synthetic construct
  source 1..75: mol_type = other DNA
tcataaaatgttcaatgggagaacggacgattcgcttttctgtccgcaaatttagcggcaatatactggatacag

SEQ ID NO: 231833 - DNA, 75 bp, synthetic construct
  source 1..75: mol_type = other DNA
cacgagagaaagatataattacactcgtcgagcatgtacgaggtgcattaggtcgctacatttgccataagtttt

SEQ ID NO: 231834 - DNA, 75 bp, synthetic construct
  source 1..75: mol_type = other DNA
cgcagcagttctattttcctaatgtgctgaagtatgaccctgatcagttacgacaggatttgtcttcacagggcg

SEQ ID NO: 231835 - DNA, 75 bp, synthetic construct
  source 1..75: mol_type = other DNA
gacataactcgcacgattaaacttcagcaattttttccggctattggtcgggaagtagatggacgaattgaagta

SEQ ID NO: 231836 - DNA, 75 bp, synthetic construct
  source 1..75: mol_type = other DNA
atgactctgtttattcgcagcctgatagatgattattttcaggcagacataacctgtcttaaccagaaaaagata

SEQ ID NO: 231837 - DNA, 75 bp, synthetic construct
  source 1..75: mol_type = other DNA
tccgcgtcagtaaccctgtccgtcaccaacccgctgaacaacaacatcggaaggctctatgacccaacggaatat

SEQ ID NO: 231838 - DNA, 75 bp, synthetic construct
  source 1..75: mol_type = other DNA
ttgaatctagttatcgagacctcgaagtactttcgtacggggaactaacggaaaatgttcccgttaatattctga

SEQ ID NO: 231839 - DNA, 75 bp, synthetic construct
  source 1..75: mol_type = other DNA
gaaataaaaaaactcagacaaataaaacaactggagcagatgagtagaatagatgcgctgattaaaagcattaac

SEQ ID NO: 231840 - DNA, 75 bp, synthetic construct
  source 1..75: mol_type = other DNA
acggtcagcgccatcgtctttctcgtcacgccggacatccgcgtggcaaccgcctacattcttaaccgcgttgaa

SEQ ID NO: 231841 - DNA, 75 bp, synthetic construct
  source 1..75: mol_type = other DNA
gcaggcctggggcagatcgacaaatcgctggatgaagcctcactcagcctgcgcgcgggttccttgcgaaccata

SEQ ID NO: 231842 - DNA, 75 bp, synthetic construct
  source 1..75: mol_type = other DNA
cattattcagtcagaattgacagttgttacgaatgtggcaattatgttgaaattgatgtttatcctacaatggaa

SEQ ID NO: 231843 - DNA, 75 bp, synthetic construct
  source 1..75: mol_type = other DNA
gtatctgagttcaattaccatgccacatgatgttctttatgaaccagcacattacacagtcagaattgatagctg

SEQ ID NO: 231844 - DNA, 75 bp, synthetic construct
  source 1..75: mol_type = other DNA
gaggaagaatcagaaaacagtcgtaagatactgcaaccttttggaaaacccaataatgttacattatattatgaa

SEQ ID NO: 231845 - DNA, 75 bp, synthetic construct
  source 1..75: mol_type = other DNA
atggagaacagaggctgtcatttctcagcaaaaaaaatcagagcttagcgataggtaaagtacctgaagatatat

SEQ ID NO: 231846 - DNA, 75 bp, synthetic construct
  source 1..75: mol_type = other DNA
aggaactgtcccgttatggaatagaaccggaacacctggtaacagatccttgcatgaatatttataccggtgcgt

SEQ ID NO: 231847 - DNA, 75 bp, synthetic construct
  source 1..75: mol_type = other DNA
atttagcacttatggaaatagccaattttgcactgcggtttcgccaatccgaagcattagtatcgatccaaggac

SEQ ID NO: 231848 - DNA, 75 bp, synthetic construct
  source 1..75: mol_type = other DNA
tcctgagcgatgaaggtgaggtcatcaaaaccaaaggtgaaccgattgacgtcccggcgaacagctggatcgatg

SEQ ID NO: 231849 - DNA, 75 bp, synthetic construct
  source 1..75: mol_type = other DNA
gtcatcacacgaggaagcggcatatcagcaagctactctgatgtaaaccttgtgctctttatgaagagcattgga

SEQ ID NO: 231850 - DNA, 75 bp, synthetic construct
  source 1..75: mol_type = other DNA
ctattaacggaaataccgcaaccggatccggtacaaactggactgcaccggccagccaggttcgcgctggccaga

SEQ ID NO: 231851 - DNA, 75 bp, synthetic construct
  source 1..75: mol_type = other DNA
cgactggaaggtataaccgattattccgccatttttggcagtgctgaatcctacatgaaagacttctgggaagat

SEQ ID NO: 231852 - DNA, 75 bp, synthetic construct
  source 1..75: mol_type = other DNA
taaaagacctgtggaatattatgatgtacgccatcccttatgcgcagatcgctgttggggtggggttctttgttg

SEQ ID NO: 231853 - DNA, 75 bp, synthetic construct
  source 1..75: mol_type = other DNA
ttgtcgatctgctggagcaacagccgcgcacgcctggtgagctggcgcaacagactggcgtttcaggcaggacca

SEQ ID NO: 231854 - DNA, 75 bp, synthetic construct
  source 1..75: mol_type = other DNA
tgacgagtatttaccagagactttgcttgctaaagggtatggggcacaggcgtatgatatagaaggaacgtgcat

SEQ ID NO: 231855 - DNA, 75 bp, synthetic construct
  source 1..75: mol_type = other DNA
gcctattgcgaagtaattcttaatcagaaaagtacatatttagaaatagaccatttcaagcataaagatgattat

SEQ ID NO: 231856 - DNA, 75 bp, synthetic construct
  source 1..75: mol_type = other DNA
tggcagaatatgaccgctgtcatcgagccgttttatcccaaggcgggcaatggccgacggccctatccgctggag

SEQ ID NO: 231857 - DNA, 75 bp, synthetic construct
  source 1..75: mol_type = other DNA
tggtattcatcgccgggccgatgaccgggtatcaggattataaccgggcagagttcgacgctgaggctagtgtcc

SEQ ID NO: 231858 - DNA, 75 bp, synthetic construct
  source 1..75: mol_type = other DNA
ccttaatatactagattatatttattacagaataacctatccatccaagcagagtttgaatagcaatgatctttt

SEQ ID NO: 231859 - DNA, 75 bp, synthetic construct
  source 1..75: mol_type = other DNA
caggaaatgatggttgtgctgatggataatctggaacgccgcttcggtggcaaacagccagcagaacaacagcca

SEQ ID NO: 231860 - DNA, 75 bp, synthetic construct
  source 1..75: mol_type = other DNA
gtccgaaaacgccggatctggagtcgtacttctccacgccgacccggaaaactgatacccggacaccggatattg

SEQ ID NO: 231861 - DNA, 75 bp, synthetic construct
  source 1..75: mol_type = other DNA
gatttgttgttggatttaaatgccagagacattggtgataaacagaaagattctgaattatcttgtatattacag

SEQ ID NO: 231862 - DNA, 75 bp, synthetic construct
  source 1..75: mol_type = other DNA
aatccagtgattgattatatctggaattcagtacggcgtaaattcggggggcgcttacatgcccgggaggatggg

SEQ ID NO: 231863 - DNA, 75 bp, synthetic construct
  source 1..75: mol_type = other DNA
aggaagttgcagcctcagtaagacaaaatgacaccactaccagtgacaaaatgtcatcagtaccagtgacaaaat

SEQ ID NO: 231864 - DNA, 75 bp, synthetic construct
  source 1..75: mol_type = other DNA
tgtcgatattgttgagggtcgttttgatgccgggatacgcctgggtgaaattgtggataaagatatggttgcagt

SEQ ID NO: 231865 - DNA, 75 bp, synthetic construct
  source 1..75: mol_type = other DNA
tgtcgatattgttgacggtcgttttgatgccgggatacgcctgggtgaaattgtcgataaagatatggttgcagt

SEQ ID NO: 231866 - DNA, 75 bp, synthetic construct
  source 1..75: mol_type = other DNA
tgtcgatattgttgatggtcgttttgatgccgggatacgcctgggtgaaattgttgataaagatatggttgcagt

SEQ ID NO: 231867 - DNA, 75 bp, synthetic construct
  source 1..75: mol_type = other DNA
tgaactgctaactacctttaaaaaaggggcaccgaaatttcctcatcctttgcattatgaagatgaggttcgttg

SEQ ID NO: 231868 - DNA, 75 bp, synthetic construct
  source 1..75: mol_type = other DNA
agattcttggtttggaagtgcaaatggggtttcgacgttggtccacttctgagcttgaagaaaagaaagcttatc

SEQ ID NO: 231869 - DNA, 75 bp, synthetic construct
  source 1..75: mol_type = other DNA
tatagtgatattcctgatgagcagttgcaatcaattataaaaaataaaattggcaaatatgatatggaatttaat

SEQ ID NO: 231870 - DNA, 75 bp, synthetic construct
  source 1..75: mol_type = other DNA
atcgcataatttttccttcaaaacacaacgttgatattaaagatataccgttacctgttgaagctatcaagaaaa

SEQ ID NO: 231871 - DNA, 75 bp, synthetic construct
  source 1..75: mol_type = other DNA
gggaaaactgttggccatctattgatgaggggccagaaatgcgatatagtaaattaataaagttggataaagata

SEQ ID NO: 231872 - DNA, 75 bp, synthetic construct
  source 1..75: mol_type = other DNA
ggcatttctatagccagcgaaatacagataactcggtaatatttgctgttaacggtcagatgcaacccagcaact

SEQ ID NO: 231873 - DNA, 75 bp, synthetic construct
  source 1..75: mol_type = other DNA
tgtcgatattgttgaaggtcgttttgatgccgggatacgcctgggtgaaattgtggataaggatatggttgcagt

SEQ ID NO: 231874 - DNA, 75 bp, synthetic construct
  source 1..75: mol_type = other DNA
tgtcgatattgttgaaggtcgttttgatgccgggatacgcctgggtgaaattgtcgataacgatatggttgcagt

SEQ ID NO: 231875 - DNA, 75 bp, synthetic construct
  source 1..75: mol_type = other DNA
tgtcgatattgttgaaggtcgttttgatgccgggatacgcctgggtgaaattgtagataaagatatggttgcagt

SEQ ID NO: 231876 - DNA, 75 bp, synthetic construct
  source 1..75: mol_type = other DNA
ctgaagaagataattgcggtgacgtactgaaatgtattaatcatccgttggccattacgaataaaaagtgccgaa

SEQ ID NO: 231877 - DNA, 75 bp, synthetic construct
  source 1..75: mol_type = other DNA
taccgacagatgaagatacagctatgctggtaagcatgtttgcggaggaggcgagggcgccggaaaagggggagg

SEQ ID NO: 231878 - DNA, 75 bp, synthetic construct
  source 1..75: mol_type = other DNA
gtagttatgcattgggtggtaaagttaaaacggaattatgtggctggagagttgccagagcagtgttggaaatca

SEQ ID NO: 231879 - DNA, 75 bp, synthetic construct
  source 1..75: mol_type = other DNA
attattgtagaagatgttttacttctacttgatagaagccaaattgaggtgatcacgggaaaagttgtctatcac

SEQ ID NO: 231880 - DNA, 75 bp, synthetic construct
  source 1..75: mol_type = other DNA
atttaatagatatgtccagagtctgagaactgattacagagacagaaatgaccatagttccatattacagaacaa

SEQ ID NO: 231881 - DNA, 75 bp, synthetic construct
  source 1..75: mol_type = other DNA
ccagtttatcccaattatctcccacggggatacaagccttacaagatgcagcgcgaagtcaaagagtaatacaaa

SEQ ID NO: 231882 - DNA, 75 bp, synthetic construct
  source 1..75: mol_type = other DNA
atatcagcagcgggccatggggaaatctgtcagtcgtatcaagacgctgagcaacaggaatactgtgaagcagaa

SEQ ID NO: 231883 - DNA, 75 bp, synthetic construct
  source 1..75: mol_type = other DNA
tgcggtaacgccctgcgactgggcgttaccggcacacccggcgcgggaaaagtacctttcttgaagcctttggca

SEQ ID NO: 231884 - DNA, 75 bp, synthetic construct
  source 1..75: mol_type = other DNA
atgttgttgattcgtgagggattaaaggtcgcggttattgcggtcgatcccagcagcccggtcatctgggcggtg

SEQ ID NO: 231885 - DNA, 75 bp, synthetic construct
  source 1..75: mol_type = other DNA
acgaccagtgtaccgacggttttaaagtcagctcttcgttttataccgatgaaacccttatcgacgaagataaat

SEQ ID NO: 231886 - DNA, 75 bp, synthetic construct
  source 1..75: mol_type = other DNA
gtggaactgatttacgtggtcgaagcccaggcgccgaagcagttgcagctcaaccgcttcctgccaccgacgccg

SEQ ID NO: 231887 - DNA, 75 bp, synthetic construct
  source 1..75: mol_type = other DNA
gttgggttactgacggataaaccgacgtttattgtctcgacgcgcggcggtatctattgcgatgaagcacatctg

SEQ ID NO: 231888 - DNA, 75 bp, synthetic construct
  source 1..75: mol_type = other DNA
ccctgcagatggcgctgtggctgcgtaagatagcccggaacgttatcgtttacacggaccgtggaggtcagtact

SEQ ID NO: 231889 - DNA, 75 bp, synthetic construct
  source 1..75: mol_type = other DNA
aatgaaatagagaaaaacttaataagaaaggaaaatgaaattgaattatataaaatgcgtatgttttttattggg

SEQ ID NO: 231890 - DNA, 75 bp, synthetic construct
  source 1..75: mol_type = other DNA
aaacattcgctaagtgttgatactgttaaattgagtattgacaagaaaaacatagagttagagaataccaggcaa

SEQ ID NO: 231891 - DNA, 75 bp, synthetic construct
  source 1..75: mol_type = other DNA
aaaaatgaacttagagatattggtagtaaaatgaaagatgccgttataaatttaaaggagcttgagagtgaaatt

SEQ ID NO: 231892 - DNA, 75 bp, synthetic construct
  source 1..75: mol_type = other DNA
agctttctgatcaaaaaggaaaatatggctgagcttgaggaagccaatatcaattttgacttagaaaaagcagct

SEQ ID NO: 231893 - DNA, 75 bp, synthetic construct
  source 1..75: mol_type = other DNA
gaaccagatctccattaacaaaaataaagttaactatctcaaagaaagactaaaaaacaacaataacatcttgca

SEQ ID NO: 231894 - DNA, 75 bp, synthetic construct
  source 1..75: mol_type = other DNA
aagttaattctctattaaaagagtatcaacataaacaaaaagaagcaaatatagagaataaacgattacaatatt

SEQ ID NO: 231895 - DNA, 75 bp, synthetic construct
  source 1..75: mol_type = other DNA
agtattttaaataaattagataatgccagtgatgaaattttatatttaagaaagcagtttttccttaataaggat

SEQ ID NO: 231896 - DNA, 75 bp, synthetic construct
  source 1..75: mol_type = other DNA
aagtattcactaaacgttaattctgcaaagctaaaaagtgacaagaaaaatatggagttaaaaaacacaaaacaa

SEQ ID NO: 231897 - DNA, 75 bp, synthetic construct
  source 1..75: mol_type = other DNA
cctcctgcgtagccgcggcaccgtgctggtcgactacaaaatattacgcaatttcgtccgtatctataagcgcct

SEQ ID NO: 231898 - DNA, 75 bp, synthetic construct
  source 1..75: mol_type = other DNA
tggaggtagatattttttgaataatgaaaagttatcattatcagatatttcacaagaaattacccttgaaagaaa

SEQ ID NO: 231899 - DNA, 75 bp, synthetic construct
  source 1..75: mol_type = other DNA
ctacgattcttcttggtaattcatctgctgttgcgtatgtttgtcctcttgatttgtactttagaaaaaccttcg

SEQ ID NO: 231900 - DNA, 75 bp, synthetic construct
  source 1..75: mol_type = other DNA
aaagcagtttttccttaataaggataaaataaactatctcaaagagcagttaaggaaaaataacgacaacattgt

SEQ ID NO: 231901 - DNA, 75 bp, synthetic construct
  source 1..75: mol_type = other DNA
aactctctctttctactgggcaatccgcatataataaatcaggttttaaatctcctgaatatagcaatgcaggca

SEQ ID NO: 231902 - DNA, 75 bp, synthetic construct
  source 1..75: mol_type = other DNA
tcaggtgttgtggcaggaagaccaggtcgatctggctgtggagttggcgctggacgtgctgatgctgagggaaga

SEQ ID NO: 231903 - DNA, 75 bp, synthetic construct
  source 1..75: mol_type = other DNA
tcgtaacccgcaagtcattcaaaataacccgcaacctctcccaaataacccgcaaacacatcaggaaagtggggc

SEQ ID NO: 231904 - DNA, 75 bp, synthetic construct
  source 1..75: mol_type = other DNA
tgacacgcatggcggaccgggccaacaaacagcattttttcctatcttctacacgggagatgccgcaccggggct

SEQ ID NO: 231905 - DNA, 75 bp, synthetic construct
  source 1..75: mol_type = other DNA
aatccttgcctggattcgaaatactgactgggcgaagattggatttaaaaatgatgccgatggtgacgctgattc

SEQ ID NO: 231906 - DNA, 75 bp, synthetic construct
  source 1..75: mol_type = other DNA
atcaaaatgtgggccgaatgaaaaaattgtagaggattctgaacattatagtgcttacatatcacgattgcctcc

SEQ ID NO: 231907 - DNA, 75 bp, synthetic construct
  source 1..75: mol_type = other DNA
ccttaactttagaatgcagctttctatttcatccaagttcaaaaaaatatgattggccgactgaaagtaatttag

SEQ ID NO: 231908 - DNA, 75 bp, synthetic construct
  source 1..75: mol_type = other DNA
taaaacttctaaaaagtgagttgcgactattagaatggagtttgaataaagaatatcatatccctcaaaatatgt

SEQ ID NO: 231909 - DNA, 75 bp, synthetic construct
  source 1..75: mol_type = other DNA
tgagagtgaaattgagacgtttaatcatataaataatcttagcaagccatatataaaagggagatttgtctgtca

SEQ ID NO: 231910 - DNA, 75 bp, synthetic construct
  source 1..75: mol_type = other DNA
gataatgactactctttattacctgagatttctatttttactgggcaatcagcatataataaatcaagttttaaa

SEQ ID NO: 231911 - DNA, 75 bp, synthetic construct
  source 1..75: mol_type = other DNA
tacaggatatcaacgccgttcgtcaggtaaaaacggcattgttatcatcccgggatttatctgtttattctatga

SEQ ID NO: 231912 - DNA, 75 bp, synthetic construct
  source 1..75: mol_type = other DNA
ggccgaataaatcaatagccgtgctggtaacgttttgcatgacaagttttgacagttttttatcttccggcctcc

SEQ ID NO: 231913 - DNA, 75 bp, synthetic construct
  source 1..75: mol_type = other DNA
gattcaaacttctttttaccgcacacggggagaaatgaggtatgtgcttggcaaccataacttcgaatatttttt

SEQ ID NO: 231914 - DNA, 75 bp, synthetic construct
  source 1..75: mol_type = other DNA
tattgttacgaattccgctgattatgataaatattgtgacatagtcaaaagggtcgtaatagatggtaagaatta

SEQ ID NO: 231915 - DNA, 75 bp, synthetic construct
  source 1..75: mol_type = other DNA
aatatcgcagcgaaaatatattgttatgaatcccgccgattatgataaatattccgatatggttaaaaagcatgt

SEQ ID NO: 231916 - DNA, 75 bp, synthetic construct
  source 1..75: mol_type = other DNA
taaacataaaatgagaatcgtccagtacaaaaaagcagtgttacgtaatctttccctgattaaatacgctaccgc

SEQ ID NO: 231917 - DNA, 75 bp, synthetic construct
  source 1..75: mol_type = other DNA
aaaacagcaaccgtggagcatgacggctcgtctgtaaccagtccgtacacgcagccggaaaaggaaacggctgaa

SEQ ID NO: 231918 - DNA, 75 bp, synthetic construct
  source 1..75: mol_type = other DNA
ccgtgggtgatgcagtcatcagaatctgatgctgccctcttgtcccgcattgcaggtatgtacggcgccaccagt

SEQ ID NO: 231919 - DNA, 75 bp, synthetic construct
  source 1..75: mol_type = other DNA
tcgaaggttaaacgtgtgcagaaagtcggacgccagatgacgataacgttgccctgcaggccggaactgctgaaa

SEQ ID NO: 231920 - DNA, 75 bp, synthetic construct
  source 1..75: mol_type = other DNA
ggaattgctaaagcgcgggagttggatgtcacagaccgacagtccatggccgatttcgtgcaagcagcgctggat

SEQ ID NO: 231921 - DNA, 75 bp, synthetic construct
  source 1..75: mol_type = other DNA
atacaattcaggtatccatattgtctatggtgtaagaaatgatcgtgcaacagatacttattttaaaagaacaac

SEQ ID NO: 231922 - DNA, 75 bp, synthetic construct
  source 1..75: mol_type = other DNA
ggcgctcgactcaccgcttgtcctcgatccgatgtaccgggacttctcgagcgacaggatagaaaaagcattgag

SEQ ID NO: 231923 - DNA, 75 bp, synthetic construct
  source 1..75: mol_type = other DNA
ttctgttgtgcccacaggcgcagtctattgcgcatcaaaatttgcagtacgggctatttctgatggcttacggca

SEQ ID NO: 231924 - DNA, 75 bp, synthetic construct
  source 1..75: mol_type = other DNA
gcgcgtcaagcggcattggggaagggattgcgcgagagcttggaaatacaggtgcgaaggtgctattaggggcac

SEQ ID NO: 231925 - DNA, 75 bp, synthetic construct
  source 1..75: mol_type = other DNA
atggataaggtcatattaattaccggcgcatcaagtggtattggggaaggtattgccagagagctgggaacgaca

SEQ ID NO: 231926 - DNA, 75 bp, synthetic construct
  source 1..75: mol_type = other DNA
tcatatgttgccatgaccgccgaatccggcgtggtgacatccggatttggtcagcgggaagatcgccgctggctc

SEQ ID NO: 231927 - DNA, 75 bp, synthetic construct
  source 1..75: mol_type = other DNA
gttcaggcctggatgagtgactttgccaatgatgcaaataagaaaacgccatttgtactcactccgccgttagtt

SEQ ID NO: 231928 - DNA, 75 bp, synthetic construct
  source 1..75: mol_type = other DNA
ggtgccagatctgttcgtagtactgcctgaatttcctctccagccgaacggcaagcttgacagaaagtctctgcc

SEQ ID NO: 231929 - DNA, 75 bp, synthetic construct
  source 1..75: mol_type = other DNA
atgacagtctcccgggtgatgcataatgcagaatctgtgcgtcctgcaacgcgtgaccgcgtattgcaggcaatc

SEQ ID NO: 231930 - DNA, 75 bp, synthetic construct
  source 1..75: mol_type = other DNA
ccgttaattcgttgaatgagtatatgagatcatctccttatgttatggagatgattaaaaagaataacattagcg

SEQ ID NO: 231931 - DNA, 75 bp, synthetic construct
  source 1..75: mol_type = other DNA
gaacaatgctgacttttcaatatcacgcaatgccaatgttgaaggaaatatatcagcaaataaatcagctatcac

SEQ ID NO: 231932 - DNA, 75 bp, synthetic construct
  source 1..75: mol_type = other DNA
tgaccgtaggactgttcgtgattactttttttaatccgggagccaatctctttgtggtagtacaaaccagcctgg

SEQ ID NO: 231933 - DNA, 75 bp, synthetic construct
  source 1..75: mol_type = other DNA
accgaaaggctgaacgccttgctataacgccggaacatacgtttgagtccgtagcacgcgaatgggctccagcaa

SEQ ID NO: 231934 - DNA, 75 bp, synthetic construct
  source 1..75: mol_type = other DNA
ggaactggggacctgaaagtggatgggggcaacctgatgctcagtggtactctgtcacaggatggtggtgtctcc

SEQ ID NO: 231935 - DNA, 75 bp, synthetic construct
  source 1..75: mol_type = other DNA
aatatgcgccggccttcagcattcaggccgaagggaaagatataacccgggtactgcaacaatgcctgagtgaac

SEQ ID NO: 231936 - DNA, 75 bp, synthetic construct
  source 1..75: mol_type = other DNA
aaacccaggaagtagtcgcgcaggagcagaaagatctgcgtatccgtcagattcaggaagcgttgcagtatgcga

SEQ ID NO: 231937 - DNA, 75 bp, synthetic construct
  source 1..75: mol_type = other DNA
ctgattctggctgtgctgctgggcggtatggttggcgcggggattgtgctggggcgtaatgctctgcgtaattac

SEQ ID NO: 231938 - DNA, 75 bp, synthetic construct
  source 1..75: mol_type = other DNA
cgacaccatgggtgccggagattcgttcattgccggattcctttgcggctggtctgcggggatgacattaccgca

SEQ ID NO: 231939 - DNA, 75 bp, synthetic construct
  source 1..75: mol_type = other DNA
tggtacgccagacgcgaacatagcttatcagaaatgaacgtacagaatggaaagcttcgcatccacatggaaacc

SEQ ID NO: 231940 - DNA, 75 bp, synthetic construct
  source 1..75: mol_type = other DNA
cgcggtgcaatggagcgagccaacaaagcacgcagaagatgcggcgaggttttccgttacgctattgtcaccgga

SEQ ID NO: 231941 - DNA, 75 bp, synthetic construct
  source 1..75: mol_type = other DNA
tttacaaccatgttcagtatctagataagtgcagagaaatgatgcagtggtgggcggactggcttgatggaaaag

SEQ ID NO: 231942 - DNA, 75 bp, synthetic construct
  source 1..75: mol_type = other DNA
ctgcgtccgttagcgccgttctttgatctgccgatgtcatcgttcagccgtggaccttacatccagccgccgctg

SEQ ID NO: 231943 - DNA, 75 bp, synthetic construct
  source 1..75: mol_type = other DNA
gcgtcttatcacgggctggagctgcaaccgttcggctggtttatgcaccgggccaaatcccgcaccgggtatgtc

SEQ ID NO: 231944 - DNA, 75 bp, synthetic construct
  source 1..75: mol_type = other DNA
attacgccacggaaactatcaaaatatcgtgattcatttcattgataatgctatgtggaatgtcataaaaaaata

SEQ ID NO: 231945 - DNA, 75 bp, synthetic construct
  source 1..75: mol_type = other DNA
agcgcgtagaggatattagccgtgttatcgattatgcagtaactctgccatatgttaatgctgaacgtattggcg

SEQ ID NO: 231946 - DNA, 75 bp, synthetic construct
  source 1..75: mol_type = other DNA
ttgaagcattttatctcgcaacacctgatggacgatttgaggcgcttaataataaaggagaatatatttttatca

SEQ ID NO: 231947 - DNA, 75 bp, synthetic construct
  source 1..75: mol_type = other DNA
attgctggagtccctgattatcactgccgaacaggcgctgtggaaacgggaatggggcgcgaaagacgccggaat

SEQ ID NO: 231948 - DNA, 75 bp, synthetic construct
  source 1..75: mol_type = other DNA
aggattatcaccatcgacgccagtgtgatgaagggacgcaaaattcatgtggttcctatgtcagaccaggtggtt

SEQ ID NO: 231949 - DNA, 75 bp, synthetic construct
  source 1..75: mol_type = other DNA
catcgacatatctctgtgaagagcgagccagaaaagacagatgtatggcgattcagtacacaatttgattttcca

SEQ ID NO: 231950 - DNA, 75 bp, synthetic construct
  source 1..75: mol_type = other DNA
gtgattattctcattacaggacatattcatttaaaaattacgacgcaatataatgttaaacttacacaaagcgga

SEQ ID NO: 231951 - DNA, 75 bp, synthetic construct
  source 1..75: mol_type = other DNA
tatagatgaaatatgtgaaataataaaaagtagtaataaatggcattataagacatcaagacactacgaagaaga

SEQ ID NO: 231952 - DNA, 75 bp, synthetic construct
  source 1..75: mol_type = other DNA
ttcatgccgggctggccggggcagcactggggtttgcgagagtggcgccagtgttctttattctcccttttctga

SEQ ID NO: 231953 - DNA, 75 bp, synthetic construct
  source 1..75: mol_type = other DNA
agttgggaaacgcattgtgagcgcctttaagcagctcggatatgaaaccagtctggatgaggttttttccgatga

SEQ ID NO: 231954 - DNA, 75 bp, synthetic construct
  source 1..75: mol_type = other DNA
gataataaacttgaatcaacaattattgatgttgcttcagaggctgaaattgcagatactataaaagttatgggg

SEQ ID NO: 231955 - DNA, 75 bp, synthetic construct
  source 1..75: mol_type = other DNA
cggggtgatgccactgtcaccgcttgaccaggtaaaggtcagcgagtggaatcagatgattgatgtgaatctccg

SEQ ID NO: 231956 - DNA, 75 bp, synthetic construct
  source 1..75: mol_type = other DNA
attaacgagcaaggtgggatcgctatggccatcgcaacagatgtcacccgcgaagacgatgttaaaaagctcgtt

SEQ ID NO: 231957 - DNA, 75 bp, synthetic construct
  source 1..75: mol_type = other DNA
caagtcgtcccgacagataaagctggtagtgtaataaaacccggaaaactggagacagcagttggcattgagatt

SEQ ID NO: 231958 - DNA, 75 bp, synthetic construct
  source 1..75: mol_type = other DNA
ggtggtgttaacggacaagtgtttagatatgaaagagacggtagcgttgataactcatatggtcaggttacactg

SEQ ID NO: 231959 - DNA, 75 bp, synthetic construct
  source 1..75: mol_type = other DNA
tgttgcgagaggaagacactacaagtgttccacatatcataacccttagaaaccctgaagctgtaacaaatttta

SEQ ID NO: 231960 - DNA, 75 bp, synthetic construct
  source 1..75: mol_type = other DNA
cctgttggaatggatctgtacagtttcacttttacggcaggcgagctatctacatcatatggaagcagtgtgttt

SEQ ID NO: 231961 - DNA, 75 bp, synthetic construct
  source 1..75: mol_type = other DNA
tagcacaatggattgcggcttttgaaggtggtttcacggtatcgtcgccaccctggataccggtcgccccggtcc

SEQ ID NO: 231962 - DNA, 75 bp, synthetic construct
  source 1..75: mol_type = other DNA
tgagctgctggcaatggtgcttaagaattcgtgctgtttccattcgattattgttgtgaagaacatgtacaacaa

SEQ ID NO: 231963 - DNA, 75 bp, synthetic construct
  source 1..75: mol_type = other DNA
gctatcgatatggcggagctgtatcaaaagcttcttactcgcttgttacccataccccaacgagccgctgagagt

SEQ ID NO: 231964 - DNA, 75 bp, synthetic construct
  source 1..75: mol_type = other DNA
ggatgcctggcccggtaaacatcttcctggtggtactgctggcggcgtatctgtcgttgtataccgggctgtttg

SEQ ID NO: 231965 - DNA, 75 bp, synthetic construct
  source 1..75: mol_type = other DNA
ccttcaaaaacgccgtggtgcaggtctacaccttcgcgcacgatccgctgctggcaatttacaagcgtctgagtg

SEQ ID NO: 231966 - DNA, 75 bp, synthetic construct
  source 1..75: mol_type = other DNA
aatcggacatgcagatttacccgatcgccgattcatccgtgacgccgctggcgttcctgaccgacctgccggcca

SEQ ID NO: 231967 - DNA, 75 bp, synthetic construct
  source 1..75: mol_type = other DNA
tacgcatggtatagccgaggtcactatgacgcccgaaagaaacggttcgtatatggtgaaagcatccctggcgaa

SEQ ID NO: 231968 - DNA, 75 bp, synthetic construct
  source 1..75: mol_type = other DNA
aggctgcttgatagacactacttgtccgatattgaaaggctacgtgccattgaagaaggcgggacgctctttagc

SEQ ID NO: 231969 - DNA, 75 bp, synthetic construct
  source 1..75: mol_type = other DNA
tgtgactaatgaattgcatgactgtgttgataaatggagtaaatatttaccaattgtttctattgaattggataa

SEQ ID NO: 231970 - DNA, 75 bp, synthetic construct
  source 1..75: mol_type = other DNA
cagcggtgttatctcagcacaacgtgcagccatggataatatgattagcgacatggacaacgctgccagtgagtt

SEQ ID NO: 231971 - DNA, 75 bp, synthetic construct
  source 1..75: mol_type = other DNA
gttagcgtactgattggatgtgcagccggtcccctgtgggcggccactcatctgggcacaagtcaggaccgggga

SEQ ID NO: 231972 - DNA, 75 bp, synthetic construct
  source 1..75: mol_type = other DNA
gcggccgtttttgcgcttcaggcttatctgcctgaccatgtaattaattttctgggcggacgtgacggcgttaat

SEQ ID NO: 231973 - DNA, 75 bp, synthetic construct
  source 1..75: mol_type = other DNA
cgtttaaaaacgcggtggttcaggtttacacctttgcacacgaccctcaactggcgatctacaaacgcctcattg

SEQ ID NO: 231974 - DNA, 75 bp, synthetic construct
  source 1..75: mol_type = other DNA
ttcaacggactggaaacggttacggcaacaaacggccagaacagcagggtggaaatgccaggtctgcggcggaaa

SEQ ID NO: 231975 - DNA, 75 bp, synthetic construct
  source 1..75: mol_type = other DNA
gaaaaccacctggctacgcgtggcgattgccgcccctgctctctggcaagtgaccgagtttctgcgcggttgggt

SEQ ID NO: 231976 - DNA, 75 bp, synthetic construct
  source 1..75: mol_type = other DNA
cggctctgccacattaacgtcattaacagcggtgaccgatcaaaacggaatcgcgacaacaagcgtgaaaggagc

SEQ ID NO: 231977 - DNA, 75 bp, synthetic construct
  source 1..75: mol_type = other DNA
gtttatttatcagcacaaacagcagcgcctgccacaactaacggtatctacaatacgctgacaaccaatgaactt

SEQ ID NO: 231978 - DNA, 75 bp, synthetic construct
  source 1..75: mol_type = other DNA
attgccacgctgggcgcttttatgggttattcccattcacatatcggttttgatcgcggaggtcatggcagtgtg

SEQ ID NO: 231979 - DNA, 75 bp, synthetic construct
  source 1..75: mol_type = other DNA
atgaacagaatcagtcgctattattttcaccgctcagtactttccttattgatatctgccatgatatatgcccct

SEQ ID NO: 231980 - DNA, 75 bp, synthetic construct
  source 1..75: mol_type = other DNA
attttcgccagtggcagtgcgggctatcagctggaaatcttcgagcgccgcagcttttttcagttgctgcaaagc

SEQ ID NO: 231981 - DNA, 75 bp, synthetic construct
  source 1..75: mol_type = other DNA
aagcagagccaggatgatgaagaccttatgctgaaggtctcaggtctggaagacaccatcaccggtctgcagcag

SEQ ID NO: 231982 - DNA, 75 bp, synthetic construct
  source 1..75: mol_type = other DNA
ctgcagcagcagttgggtgagctgaccgaaaagctgaccgcgctggaggctgctaatggcaaaaaacagccttct

SEQ ID NO: 231983 - DNA, 75 bp, synthetic construct
  source 1..75: mol_type = other DNA
tgttttattaaattctcgattgtttttgttattgtccgaaacgcactgggacttcagcaagtgccatcaaatatg

SEQ ID NO: 231984 - DNA, 75 bp, synthetic construct
  source 1..75: mol_type = other DNA
gtgacgaataacagcgacagcgtgcagctgacggcaacggtgaaagatccgtcgaatcatccggtggcgggaata

SEQ ID NO: 231985 - DNA, 75 bp, synthetic construct
  source 1..75: mol_type = other DNA
ttgggtgttcatacagccgaagccacactgcctaacggcaacaacgatacgaagatagtcaatattgcgcccgat

SEQ ID NO: 231986 - DNA, 75 bp, synthetic construct
  source 1..75: mol_type = other DNA
caacgataatggcaaagcgacagatatcgtccagaacagcggtgccgctctccagacgagcacggctaacggtat

SEQ ID NO: 231987 - DNA, 75 bp, synthetic construct
  source 1..75: mol_type = other DNA
atgatttgtcgggcagacgtggaatataccaggcaggtattaaagcctcattcagcagttcgttaagcgggcatc

SEQ ID NO: 231988 - DNA, 75 bp, synthetic construct
  source 1..75: mol_type = other DNA
aacagcagtatcaattagatgttgaactggtaaaaataaagccaactaaccgaacagaggcaaaagctcatttgg

SEQ ID NO: 231989 - DNA, 75 bp, synthetic construct
  source 1..75: mol_type = other DNA
tgatgtatctcgataaagagccgctgtttattgatagttcctggatcccactgtcgcgttatcctgactttgatg

SEQ ID NO: 231990 - DNA, 75 bp, synthetic construct
  source 1..75: mol_type = other DNA
cccgatccaagtaaattgccggacatagcgaaacaattaagactgccatatcctattgaccaggccagtagtgcg

SEQ ID NO: 231991 - DNA, 75 bp, synthetic construct
  source 1..75: mol_type = other DNA
ggggatggaatttttatcagtatccgctgaatccggttcagtatatagattcaatgggactggcatcaaaatatg

SEQ ID NO: 231992 - DNA, 75 bp, synthetic construct
  source 1..75: mol_type = other DNA
tgatgaagggggattctgaccacgagggtgatttaaacctcacaggaaatattacccagaaagatggtaagacga

SEQ ID NO: 231993 - DNA, 75 bp, synthetic construct
  source 1..75: mol_type = other DNA
aagcaactcccagagttcattgaagtccccccggtaattttgcaaggcggtgatagttatatcgccgaaccaatt

SEQ ID NO: 231994 - DNA, 75 bp, synthetic construct
  source 1..75: mol_type = other DNA
cgtcacgcagcgaccagcaaatatcatttggattaaatgtgccgtttggtgatattacgacttcgctggatttgc

SEQ ID NO: 231995 - DNA, 75 bp, synthetic construct
  source 1..75: mol_type = other DNA
caatatccgtttcggagtggaggcggaaaaatctatattaggaaactataatatagatcattctatcaatgcaaa

SEQ ID NO: 231996 - DNA, 75 bp, synthetic construct
  source 1..75: mol_type = other DNA
tcagctttggcaatggtcaaaataaatataatattgtagacagaaacaatcacagtggactcgattttcatgcgc

SEQ ID NO: 231997 - DNA, 75 bp, synthetic construct
  source 1..75: mol_type = other DNA
attagtcggaacccttgataaagcgccaatgattgactttagcagtactgatttacttggtatctcaacacttat

SEQ ID NO: 231998 - DNA, 75 bp, synthetic construct
  source 1..75: mol_type = other DNA
aataaactcgatgggccagcaacagcagggatagatgatttgggtgaaattttagctaagatgaaacagagaaca

SEQ ID NO: 231999 - DNA, 75 bp, synthetic construct
  source 1..75: mol_type = other DNA
aaacagcacaaaggccacccgcttgcgcggctctggcgggcgttgccggaagcggtccgtctgagtccacacatc

SEQ ID NO: 232000 - DNA, 75 bp, synthetic construct
  source 1..75: mol_type = other DNA
gaaccttaatattccattaataattgctcctaaaaataccgatagcaatttatttaacatttgtcctctgtcttc

SEQ ID NO: 232001 - DNA, 75 bp, synthetic construct
  source 1..75: mol_type = other DNA
atttactgactcagatattttagtaaaaaaattggaatcgctcgagaaaatattgaaggtgctgagagataaaaa

SEQ ID NO: 232002 - DNA, 75 bp, synthetic construct
  source 1..75: mol_type = other DNA
tatgagtttagagtgatatgcaaacattgcggattcgttacaagttatttggcatggcttgttttctactggcta

SEQ ID NO: 232003 - DNA, 75 bp, synthetic construct
  source 1..75: mol_type = other DNA
tttttaaccaccgtgaatatggaaggacagaaacccagcgcgtgcactttgttttcatgccaaggatgcgtaaag

SEQ ID NO: 232004 - DNA, 75 bp, synthetic construct
  source 1..75: mol_type = other DNA
cacataatttctttattactgtgaatattaatcctgaagatattatcacctgtgatcttgaaagggaatgtttgc

SEQ ID NO: 232005 - DNA, 75 bp, synthetic construct
  source 1..75: mol_type = other DNA
atctggaacaggaaccacctcagaccaactaaatcctctgataaaaatgaaaaatatcggtgattacactatggt

SEQ ID NO: 232006 - DNA, 75 bp, synthetic construct
  source 1..75: mol_type = other DNA
tacacagaatcctcaatcagccctgttagagttcatagggccagggttaactcgattttcaaataaagtagcaac

SEQ ID NO: 232007 - DNA, 75 bp, synthetic construct
  source 1..75: mol_type = other DNA
atatgctgccaatacaaatgatccacaaagtgcaattataaagttaatgtcaccggactttacgaaactgacata

SEQ ID NO: 232008 - DNA, 75 bp, synthetic construct
  source 1..75: mol_type = other DNA
tatattttatgccatccttgcagggcgtaaaacgctggagaaattatctcattatatatgtacacctcagtatgg

SEQ ID NO: 232009 - DNA, 75 bp, synthetic construct
  source 1..75: mol_type = other DNA
atgatattagtagtgatttagtccgccgaaaaatgaatgaccttcctgaaagcccaacaggaaataacctcgaag

SEQ ID NO: 232010 - DNA, 75 bp, synthetic construct
  source 1..75: mol_type = other DNA
tattgaaggtgctgagagataaaaaagaacattattttaatcttagacaagcattaatatatgagcttctaggag

SEQ ID NO: 232011 - DNA, 75 bp, synthetic construct
  source 1..75: mol_type = other DNA
cagaaataataatgtttatttatcgcttaatgatttcggtatgggatatgctgagctttcacacttgcaaaacat

SEQ ID NO: 232012 - DNA, 75 bp, synthetic construct
  source 1..75: mol_type = other DNA
atggagaaagttgccgccctgctcggccgctcgcgcattctcacctacggcgtgctgccggtgctcggctggttc

SEQ ID NO: 232013 - DNA, 75 bp, synthetic construct
  source 1..75: mol_type = other DNA
gtatgcattatttatgggaaaccttgttgaaagataattatatgcgtacagtgaaaaatatcgttgagaagggga

SEQ ID NO: 232014 - DNA, 75 bp, synthetic construct
  source 1..75: mol_type = other DNA
aagataaaacacagtcatgtcatgccagagtattattacctgaagatgttaatacgacgggaatatataatttaa

SEQ ID NO: 232015 - DNA, 75 bp, synthetic construct
  source 1..75: mol_type = other DNA
acaggctgagcatgctatttacgatatgtttgacaggctggagcaaaaaggaattctttttatcgatacaacaga

SEQ ID NO: 232016 - DNA, 75 bp, synthetic construct
  source 1..75: mol_type = other DNA
ggtcgatggtctgaccgtctggctgccgaaattcgagctggcacgaaaaatgttcttccacgcagccttcatcgt

SEQ ID NO: 232017 - DNA, 75 bp, synthetic construct
  source 1..75: mol_type = other DNA
gtccgtggcctgctaaatgggcagtgcctattcaggcttatatttatcgtatggatactcggctgaacaaaacgg

SEQ ID NO: 232018 - DNA, 75 bp, synthetic construct
  source 1..75: mol_type = other DNA
atgccagcaacaccaagtaagccatttaccgccgtttgtcacgaactggcagacattgagagaatcaacggcaag

SEQ ID NO: 232019 - DNA, 75 bp, synthetic construct
  source 1..75: mol_type = other DNA
atgtggacagctgggcccagtacagctggtttaagaacaccgttaacggcgaaggtctgagcggtgagaagtatg

SEQ ID NO: 232020 - DNA, 75 bp, synthetic construct
  source 1..75: mol_type = other DNA
ttcatcctcaagggcaacgttacttctaccggttcgactctcaacctcacggatggcaaagtcggcgacgttctc

SEQ ID NO: 232021 - DNA, 75 bp, synthetic construct
  source 1..75: mol_type = other DNA
gattatgctgaaggatggaacgattgccgcgaagccatgcttcagtccggaaactttcgcgaaaatacgaattca

SEQ ID NO: 232022 - DNA, 75 bp, synthetic construct
  source 1..75: mol_type = other DNA
ggtgagtattttgttagcgttgcggtaaataataaccaaatcagtaacgggcaaaagattaactggcacaaaaat

SEQ ID NO: 232023 - DNA, 75 bp, synthetic construct
  source 1..75: mol_type = other DNA
tcccacaggcctggctggcgtggcactcagataactggactccaccctccacatggaaagaaggtgtccccggtg

SEQ ID NO: 232024 - DNA, 75 bp, synthetic construct
  source 1..75: mol_type = other DNA
tcaccccgacagtatcgggctgacggataataacttactcgatccctttactacgcaggtaatcttcgtaattac

SEQ ID NO: 232025 - DNA, 75 bp, synthetic construct
  source 1..75: mol_type = other DNA
gtagagttcctgctcatttctccggacatgagacctttcccctacgtcaaatgtggttaaaaaaggttgtagatc

SEQ ID NO: 232026 - DNA, 75 bp, synthetic construct
  source 1..75: mol_type = other DNA
gaaaaaaaggacacttttcatttcgtcgaggtccaaagattactttgtctgatggtgtatttgcttatgctctga

SEQ ID NO: 232027 - DNA, 75 bp, synthetic construct
  source 1..75: mol_type = other DNA
gaatttacttcgggatatggtggctatggggctgatcaacaagaccgggcagatcggcggcaagacttgccatta

SEQ ID NO: 232028 - DNA, 75 bp, synthetic construct
  source 1..75: mol_type = other DNA
aaggtgaaagtgactttgcaggcaatatcagcgccccggatgccatcatcaatggcaaatcgacggataaacaca

SEQ ID NO: 232029 - DNA, 75 bp, synthetic construct
  source 1..75: mol_type = other DNA
tgaaccgcctgctgatgccgctgatgcgtcgtgtgcgcctgatgcttgcgcgcgctgttgttaacgtgattaacg

SEQ ID NO: 232030 - DNA, 75 bp, synthetic construct
  source 1..75: mol_type = other DNA
ccgtaccgggtgcttaccgggctggcagaccgtttcgggcggacgctgacgtaccggcgtgaggccgcaggcgac

SEQ ID NO: 232031 - DNA, 75 bp, synthetic construct
  source 1..75: mol_type = other DNA
catatcctaacgatatcctggcatgaagtcgtcaaatggctgaacgaatgtttattgcatgttcgggcaggtgcg

SEQ ID NO: 232032 - DNA, 75 bp, synthetic construct
  source 1..75: mol_type = other DNA
gacttcattgatacatcttcaatcggcctcagcgccggacttagcccgaaagagacctatcagcaactactggat

SEQ ID NO: 232033 - DNA, 75 bp, synthetic construct
  source 1..75: mol_type = other DNA
atattgagtggcccgctgttccagacggacaaagcggcaaagagagcagtgcagaggatgtgaaaacgtcgctat

SEQ ID NO: 232034 - DNA, 75 bp, synthetic construct
  source 1..75: mol_type = other DNA
tgtgatcggttctgcaatggcggttgaggagtctgccgcgaagatttttgaacaggggcttcagagttcaggttt

SEQ ID NO: 232035 - DNA, 75 bp, synthetic construct
  source 1..75: mol_type = other DNA
aagggggcgatatttacaccgttcagctcaacctgacgcaactgaaaaatctcgaaagcagcaaccctgctgttc

SEQ ID NO: 232036 - DNA, 75 bp, synthetic construct
  source 1..75: mol_type = other DNA
gttctccgttgaagggcttctgcgcgccgatagtgcgggtcgtgctgcttactataccagcgccctgcagaatgg

SEQ ID NO: 232037 - DNA, 75 bp, synthetic construct
  source 1..75: mol_type = other DNA
gctacatggctgcatttaccggctctaaaaatgccggaaagattatggtacttgaaggcgggttaaagtatcagg

SEQ ID NO: 232038 - DNA, 75 bp, synthetic construct
  source 1..75: mol_type = other DNA
tggtgccattgatgccccagaacatggtagtaaagcggctggataccgggaggctggaatacacctacaccgagg

SEQ ID NO: 232039 - DNA, 75 bp, synthetic construct
  source 1..75: mol_type = other DNA
atgaaaaaaaacaaacagccaggcagggtgaaaagcgctctgcttaactggcttggtgtgcctatcagcctgact

SEQ ID NO: 232040 - DNA, 75 bp, synthetic construct
  source 1..75: mol_type = other DNA
cgcatcaacgccgaactggaagcgatggcgaaaacgctgtatgactactggtttgtacagtttgatttcccggat

SEQ ID NO: 232041 - DNA, 75 bp, synthetic construct
  source 1..75: mol_type = other DNA
aaaccaagaatgtatctctagggctacaagacgaatataaaccaatgcgcgattggtgcgggtggcattggccga

SEQ ID NO: 232042 - DNA, 75 bp, synthetic construct
  source 1..75: mol_type = other DNA
taatattcaaagaattgttagtgactcaagaaatggatttgataataaactgaatattaatgaggatgcaatcgc

SEQ ID NO: 232043 - DNA, 75 bp, synthetic construct
  source 1..75: mol_type = other DNA
aaattaatacccggattacatctctcttggttaatgagtatcggtatgataacaattcctaccggtattattgta

SEQ ID NO: 232044 - DNA, 75 bp, synthetic construct
  source 1..75: mol_type = other DNA
atgactcggtcgccacgctgaatgaatcgcgcgatatcatggcgttcctcaatacgaccgtggtcgccagcgccg

SEQ ID NO: 232045 - DNA, 75 bp, synthetic construct
  source 1..75: mol_type = other DNA
tggcgaaaacgctgtatgactactggtttgtacagtttgatttcccggatgccaacggaaaaccgtataaaactt

SEQ ID NO: 232046 - DNA, 75 bp, synthetic construct
  source 1..75: mol_type = other DNA
gtgccgcttcgatgcttaccgcgctgtttgaagcacttgcaccacctgtttattttcttttgttcctgatgttct

SEQ ID NO: 232047 - DNA, 75 bp, synthetic construct
  source 1..75: mol_type = other DNA
tggatgacaggcatcgggaactggatagtcagcgtattaataggatgtaccgccgggccgctgtgggctgcaaca

SEQ ID NO: 232048 - DNA, 75 bp, synthetic construct
  source 1..75: mol_type = other DNA
atgacttcaaagtacgatacaacctatggattttacactataaacatctctgttaatttaacagataaaggaaat

SEQ ID NO: 232049 - DNA, 75 bp, synthetic construct
  source 1..75: mol_type = other DNA
aagctgataaatcaaatttagataaaagtgagtctgaaccaccaaaagcgaactctatggcagatgccatggcca

SEQ ID NO: 232050 - DNA, 75 bp, synthetic construct
  source 1..75: mol_type = other DNA
ccctttccttattgagcaagaaaataacgaacaacccattatatgcatggtctgctctgaaccttattcaagcaa

SEQ ID NO: 232051 - DNA, 75 bp, synthetic construct
  source 1..75: mol_type = other DNA
gatgatctggtcaataaaagtatccgtgaatatttcgatggcagcgacgagtttaatcgccgcttagacgactat

SEQ ID NO: 232052 - DNA, 75 bp, synthetic construct
  source 1..75: mol_type = other DNA
ggaaaggctgtcgccttgatgaactggttggattagcaatatttagacatgtttttattttcggctcgttcctta

SEQ ID NO: 232053 - DNA, 75 bp, synthetic construct
  source 1..75: mol_type = other DNA
cgttctgttgatgcagcagatggatgagtcagggatagtgagcagtactgactttgcccaacggctggaaaaaca

SEQ ID NO: 232054 - DNA, 75 bp, synthetic construct
  source 1..75: mol_type = other DNA
ttgaccgcagatcagatcgatagctttgcggcaaaagcgaaagggtgtgaagtacgtggcgactgcaaacagatt

SEQ ID NO: 232055 - DNA, 75 bp, synthetic construct
  source 1..75: mol_type = other DNA
agatactggtgataacaagccggaaggcagcaccggcgatcaggggcagaacaacgcagaacagaacaacaagga

SEQ ID NO: 232056 - DNA, 75 bp, synthetic construct
  source 1..75: mol_type = other DNA
aaggaaaataaatgatgacaccaaagaaattgcatatactttgtcacttctcttggcgggtaaaagtttaactcc

SEQ ID NO: 232057 - DNA, 75 bp, synthetic construct
  source 1..75: mol_type = other DNA
tgccagatcagttttcaagaacagttatgttcgaaattgatcttgcgagtggtacagacgaagaaatcgctgagt

SEQ ID NO: 232058 - DNA, 75 bp, synthetic construct
  source 1..75: mol_type = other DNA
attaatgagcggggagataaatatactcttagcgagtattttgttgggggtaacttggaccgcgtgggaacaaat

SEQ ID NO: 232059 - DNA, 75 bp, synthetic construct
  source 1..75: mol_type = other DNA
aggtgagttaatcccggcatcgacagtgacccgagaattttcatcaatggcaaaagccgtcgttcaggtgctgga

SEQ ID NO: 232060 - DNA, 75 bp, synthetic construct
  source 1..75: mol_type = other DNA
agctgcgcgccatcaaccccgatctttcaccgattaatactcatcgcggcatgggatatagcctgaggggcctgt

SEQ ID NO: 232061 - DNA, 75 bp, synthetic construct
  source 1..75: mol_type = other DNA
acaggcagaaaagatagctgagtggtatagctccatcgtatgggggccatttaacaaactgcacaacaaattaaa

SEQ ID NO: 232062 - DNA, 75 bp, synthetic construct
  source 1..75: mol_type = other DNA
gagagagtggtaattataacgccagccggatatggcgggaaatggtggcccggggatttacaggcagtgaaacca

SEQ ID NO: 232063 - DNA, 75 bp, synthetic construct
  source 1..75: mol_type = other DNA
attttcactgaaaaaggcatcaagccgacattaattatcgatgcggcttgtcatccttctatcctgaaagaggcc

SEQ ID NO: 232064 - DNA, 75 bp, synthetic construct
  source 1..75: mol_type = other DNA
caggctgttgagatcaccattagaaataccatcaataatgcagcagttagcaaatttggtccatactggcatgaa

SEQ ID NO: 232065 - DNA, 75 bp, synthetic construct
  source 1..75: mol_type = other DNA
ctttgtgattgttaaaatatcgccgctctgggcggtgctgattggagtctgtacgttttttgcagcactgttatg

SEQ ID NO: 232066 - DNA, 75 bp, synthetic construct
  source 1..75: mol_type = other DNA
ctgagtatcgaggcgataagctcaaactagcaagaatggctgttgggctttcatgtgaagagttggccgaaaaaa

SEQ ID NO: 232067 - DNA, 75 bp, synthetic construct
  source 1..75: mol_type = other DNA
tgatgttttatcgttcttttgaggttggtcggcgcatcatgcccgcatcagcacttattagttcggtgaaaaata

SEQ ID NO: 232068 - DNA, 75 bp, synthetic construct
  source 1..75: mol_type = other DNA
gcggtagatcagaaagcaggcggtgctattaaaacaaccacgcgggtcatggaggtattcggaacaaaccgtctc

SEQ ID NO: 232069 - DNA, 75 bp, synthetic construct
  source 1..75: mol_type = other DNA
ttgaaagaggaaaaactaacgcttttgcattcttgaagtccaaacatgcaaaagtgcctttgtttattctcttgg

SEQ ID NO: 232070 - DNA, 75 bp, synthetic construct
  source 1..75: mol_type = other DNA
ccggaaatatggcctcagtaggcgctgccggtgtggggattgctgctgcgggaacgatggcggagttaagttgct

SEQ ID NO: 232071 - DNA, 75 bp, synthetic construct
  source 1..75: mol_type = other DNA
ctggttcgccagttcccggaagctggctcggcctatacctacgcgcaaaagtcgattaacccgcacgtcggcttt

SEQ ID NO: 232072 - DNA, 75 bp, synthetic construct
  source 1..75: mol_type = other DNA
gcactgcctgaaattgcgctgtacgtcggcggcaagctgttccagtcgattttcctctgcaccacgtttgtgaac

SEQ ID NO: 232073 - DNA, 75 bp, synthetic construct
  source 1..75: mol_type = other DNA
aggcccggcaggcccaggggccaaaaggggatacgggagccaggcggcagggcctcaggggccgaagggagatac

SEQ ID NO: 232074 - DNA, 75 bp, synthetic construct
  source 1..75: mol_type = other DNA
cgcatcaagcaacgaggttccgatcacgtcgcgctgctgacgcgaaacgtgcttaaacgcatgctggccgatgcg

SEQ ID NO: 232075 - DNA, 75 bp, synthetic construct
  source 1..75: mol_type = other DNA
atgtaaagataggctgtaatactcgtttggatgaatcattttttttagaactatttgatgtaaataaagaccgcc

SEQ ID NO: 232076 - DNA, 75 bp, synthetic construct
  source 1..75: mol_type = other DNA
tcactctgtcagggacatggcgctgccttggatatgcagggatgtcgacagggaagtcactgtttattcgtataa

SEQ ID NO: 232077 - DNA, 75 bp, synthetic construct
  source 1..75: mol_type = other DNA
ttgctaacaatatgctgttggaaaacggcggaagtttgcgagttgaagaaaatgacttcgcttataataccactg

SEQ ID NO: 232078 - DNA, 75 bp, synthetic construct
  source 1..75: mol_type = other DNA
gttgcagaaagccgtgttcccctctcaaccatcactacgctatcccgttttattaaacgctctgctaatcaacgc

SEQ ID NO: 232079 - DNA, 75 bp, synthetic construct
  source 1..75: mol_type = other DNA
atccggcaacagcatgtgagggaatggaaacgagaggttctgaaaaaacaaaatcgctccacgcacacatggaat

SEQ ID NO: 232080 - DNA, 75 bp, synthetic construct
  source 1..75: mol_type = other DNA
tctataaaaaggttgctgctgattgtgaatcgtttatatctcgcgccagagttttatttgagatcgcaaacaggg

SEQ ID NO: 232081 - DNA, 75 bp, synthetic construct
  source 1..75: mol_type = other DNA
tttgataaagcgattggttccggcgcagcgtcggcaggcgccctggtccagccgcagcagctgccgggtattctt

SEQ ID NO: 232082 - DNA, 75 bp, synthetic construct
  source 1..75: mol_type = other DNA
cgtggaagttagccgtgaagaccgcgataacttcgtgaaaaacatgctgaccatcctgtgcgaagagcgtctggc

SEQ ID NO: 232083 - DNA, 75 bp, synthetic construct
  source 1..75: mol_type = other DNA
cccacgcttttctcggtatcggtctgatattgctcgttatttctgcaatcatcttttattaccattttactttta

SEQ ID NO: 232084 - DNA, 75 bp, synthetic construct
  source 1..75: mol_type = other DNA
agtcggggctgtattataaccgtcaccggtactacgatccgttgcaggggcggtatatcatccaggacccgatag

SEQ ID NO: 232085 - DNA, 75 bp, synthetic construct
  source 1..75: mol_type = other DNA
gcgctggaaacggctaagatgttatttattattatgattgctcttgctgttctttgcgtatttttcaatctcatc

SEQ ID NO: 232086 - DNA, 75 bp, synthetic construct
  source 1..75: mol_type = other DNA
ttgcaatcgctcgtattattgctcgattgtggagtaactattattctctctcgacataccgcgcttaatgtttgc

SEQ ID NO: 232087 - DNA, 75 bp, synthetic construct
  source 1..75: mol_type = other DNA
gagtttatttctcgatgcaggaatgtaataaatacttgcagtaatggcgctttttctcaggaggcaattgctctt

SEQ ID NO: 232088 - DNA, 75 bp, synthetic construct
  source 1..75: mol_type = other DNA
cattgatgctatggcagtagaaattgagcgggtagggcaactatgcatagcagccattcaaggggctagcgttga

SEQ ID NO: 232089 - DNA, 75 bp, synthetic construct
  source 1..75: mol_type = other DNA
ataaggcaatagaccttaataaaaaactaaaaactattaacctcgggcctcttcctgttgcaaataattgtttta

SEQ ID NO: 232090 - DNA, 75 bp, synthetic construct
  source 1..75: mol_type = other DNA
tccgacctacagttcagttcaccccgtaggcctgataagtcgcgtcagcggcgcatcaggcatcggttgtcggat

SEQ ID NO: 232091 - DNA, 75 bp, synthetic construct
  source 1..75: mol_type = other DNA
cacgaatgattaatgacatctatccgtcgaatagaaccatttggtctacttttggtgggttttatcattcatcca

SEQ ID NO: 232092 - DNA, 75 bp, synthetic construct
  source 1..75: mol_type = other DNA
ggcgccttgttcctgttctcaaacacacagaaagccagagaaaataagaagcgcaaaaggaattaaagatgagct

SEQ ID NO: 232093 - DNA, 75 bp, synthetic construct
  source 1..75: mol_type = other DNA
aaacgccttatccgacctacaaaaaccacgctacatcaggctattgcgctgtctgacgtaggcctgataagacac

SEQ ID NO: 232094 - DNA, 75 bp, synthetic construct
  source 1..75: mol_type = other DNA
ggttgtcggatgcgacgccatccgtcttatccgacctacagttcagtgcacctcgtaggcctgataagtcgcgtc

SEQ ID NO: 232095 - DNA, 75 bp, synthetic construct
  source 1..75: mol_type = other DNA
gtcttatccgacctacagttcagtgcacctcgtaggcctgataagtcgcgtcagcgacgcatcaggcatcggctg

SEQ ID NO: 232096 - DNA, 75 bp, synthetic construct
  source 1..75: mol_type = other DNA
gggaatacttcgcgagtcacatgttgtttatgtatctcggctcagtctcttttgcatggattgatatctggtttt

SEQ ID NO: 232097 - DNA, 75 bp, synthetic construct
  source 1..75: mol_type = other DNA
cgtgatggccggcccgctacgaaaatggcgtttcacctgggaagagaaccacgcgtggattaactcaccagacta

SEQ ID NO: 232098 - DNA, 75 bp, synthetic construct
  source 1..75: mol_type = other DNA
gctgatggaaaaagtgatgaaggaaaaacagtcgctgggcgattttgtcgtcgccagcgccgggccgcacctcga

SEQ ID NO: 232099 - DNA, 75 bp, synthetic construct
  source 1..75: mol_type = other DNA
actagccttgtggggcaatgtgaagcatcatttaatgatattttaaggatttttgattttaaaatagatgattag

SEQ ID NO: 232100 - DNA, 75 bp, synthetic construct
  source 1..75: mol_type = other DNA
gtttctatcatggtagctatatgcaaggttttaaacgtaatcttgccttaatatattcagttctttacacaaaaa

SEQ ID NO: 232101 - DNA, 75 bp, synthetic construct
  source 1..75: mol_type = other DNA
cgttgacaccagtgacccaaatcctggcgtcgactgtagggggaccgataagtaccacgctgacgtttggtgttg

SEQ ID NO: 232102 - DNA, 75 bp, synthetic construct
  source 1..75: mol_type = other DNA
gcggagaagccaatcaggctcccaggaaaccatcttcacccgcgccagtttcggctgcttccactgatggacgtt

SEQ ID NO: 232103 - DNA, 75 bp, synthetic construct
  source 1..75: mol_type = other DNA
ctattttcaccatgttatgaggcttttgacgctgcaattaagagagcgaagatcgagcttcctgatgggcaatta

SEQ ID NO: 232104 - DNA, 75 bp, synthetic construct
  source 1..75: mol_type = other DNA
tttgaagttcactctgacggaatagatgtggataacgaactgtttcactatcctattaaaaatagcatatacccc

SEQ ID NO: 232105 - DNA, 75 bp, synthetic construct
  source 1..75: mol_type = other DNA
tgggtaaattttggtattgctaaccagttagtcaaatatcaggacaaaatacctgaactcaacaaagagttttta

SEQ ID NO: 232106 - DNA, 75 bp, synthetic construct
  source 1..75: mol_type = other DNA
attagatcatggaaagagaatggagttattgaaggtgaagaaaacgaagataatgagaaatttggaaaaaaaaag

SEQ ID NO: 232107 - DNA, 75 bp, synthetic construct
  source 1..75: mol_type = other DNA
attagggggtttaacaggtagtgtactaacaaatcaagctatttctaaagccttaggaacgattcgtgatgagtt

SEQ ID NO: 232108 - DNA, 75 bp, synthetic construct
  source 1..75: mol_type = other DNA
gatataccggactttcggcagagcaaatgcaggcattagatcagcccttgcctgaaagcaagcgcgaaccatgga

SEQ ID NO: 232109 - DNA, 75 bp, synthetic construct
  source 1..75: mol_type = other DNA
ctggcgtggacatctgcggacccgctgatcgacctgaaatttgcattacgtaaaaaataccgcaagaacgcggta

SEQ ID NO: 232110 - DNA, 75 bp, synthetic construct
  source 1..75: mol_type = other DNA
ggtcagctatcaaatggatcggtggggaagataaatatctccccggaaccggagttggtgctgaacaggcagatc

SEQ ID NO: 232111 - DNA, 75 bp, synthetic construct
  source 1..75: mol_type = other DNA
tattcgccatatttttctggcacagaagagctggttcagcatctggctaacgcacagaaaaacccgaacgatcca

SEQ ID NO: 232112 - DNA, 75 bp, synthetic construct
  source 1..75: mol_type = other DNA
ggataaatcctaaaaaaggggcagcagaaaatcttcctgtattgttagaaagagttgctgctcttgcaaaggagt

SEQ ID NO: 232113 - DNA, 75 bp, synthetic construct
  source 1..75: mol_type = other DNA
agagttaaaggcggcagaaagcacttattcgccttatttttccggtgttggtaatttgctcaatacactggcagc

SEQ ID NO: 232114 - DNA, 75 bp, synthetic construct
  source 1..75: mol_type = other DNA
gaaaccatcttcacctgctccagttccgactgcgtccactgatggacgtttaagggatgaaaaagggcgctttgt

SEQ ID NO: 232115 - DNA, 75 bp, synthetic construct
  source 1..75: mol_type = other DNA
tcccggggcggttcagtcagacgggagtttgccatctgggcaaaagcggtcgtgcaggtgctggagacattaccg

SEQ ID NO: 232116 - DNA, 75 bp, synthetic construct
  source 1..75: mol_type = other DNA
gtagctccttcgttagatgtgctcaataagtactcagagcattttgagatcccagttaaatcattactttttttc

SEQ ID NO: 232117 - DNA, 75 bp, synthetic construct
  source 1..75: mol_type = other DNA
aacccggaaagcctgggcgcccgtgctgagaattggatctatattcctgagttcaatcgtgcaatgcgtgacgcc

SEQ ID NO: 232118 - DNA, 75 bp, synthetic construct
  source 1..75: mol_type = other DNA
gaaaagatgaatggcttttcctaaaaaatgatacaaatcaattaattcgacaaattacaggggaggtcacagtta

SEQ ID NO: 232119 - DNA, 75 bp, synthetic construct
  source 1..75: mol_type = other DNA
atggatgggctttttaaagcctgtaaaacaagacaatggctgcgctcaaaagcagaactggcatacttcttctac

SEQ ID NO: 232120 - DNA, 75 bp, synthetic construct
  source 1..75: mol_type = other DNA
acaaaagtcggatacgcaaaacatgagcggcttcgacaataccccgccgcccgcaccgccggtggtaatgagccg

SEQ ID NO: 232121 - DNA, 75 bp, synthetic construct
  source 1..75: mol_type = other DNA
gctcagatccagcaactgatgcagcttattagcctgtgccgccagcggcggctgcgggaggtgcgccatgacacc

SEQ ID NO: 232122 - DNA, 75 bp, synthetic construct
  source 1..75: mol_type = other DNA
tgctgtcactacgcagcgcagcagaacaggtctgggtaaagctgatgccgctggaacgccagcccgaatttgccg

SEQ ID NO: 232123 - DNA, 75 bp, synthetic construct
  source 1..75: mol_type = other DNA
cgtgttacgcgcatcattaacggcggcctgaatggcattgatgaccgcaaaatccgctacaacaaagcgcgggcg

SEQ ID NO: 232124 - DNA, 75 bp, synthetic construct
  source 1..75: mol_type = other DNA
aaatgttgagttatttggaaaaaatccaatattcaaaggattcgatggaaataacgaaactgagtatcttgcagc

SEQ ID NO: 232125 - DNA, 75 bp, synthetic construct
  source 1..75: mol_type = other DNA
attccatttaaaaataccgaaactccacgtgttgtaaaaaaagttctagacatcctagatatgtggagagttatt

SEQ ID NO: 232126 - DNA, 75 bp, synthetic construct
  source 1..75: mol_type = other DNA
ggatgatgacggtgtttactcttatcgcctgaccggtcttgcgcgttctgccaatgcccagcagaaagggtcaga

SEQ ID NO: 232127 - DNA, 75 bp, synthetic construct
  source 1..75: mol_type = other DNA
ggtcacatccaaagtgaaggaagtgtaccagtccaacgtcaacgtctacgcctccttattacaggcgcagccagt

SEQ ID NO: 232128 - DNA, 75 bp, synthetic construct
  source 1..75: mol_type = other DNA
ttctgataacccactggtcatattgctgctgattaatatcgtcttattaattgtcggcatctttatggacatgac

SEQ ID NO: 232129 - DNA, 75 bp, synthetic construct
  source 1..75: mol_type = other DNA
ggtgaaattattaatgggtcatacgtaggtgggcaaacggttcaaaaaggtcaggttattgctaaggtaggaagg

SEQ ID NO: 232130 - DNA, 75 bp, synthetic construct
  source 1..75: mol_type = other DNA
atgtgcttttcactcgatcaaaaaaacggatgcatgtgtttagttcaatgcgttctgaagatgtattgacgagtg

SEQ ID NO: 232131 - DNA, 75 bp, synthetic construct
  source 1..75: mol_type = other DNA
gtatcgcgtgagttaattgcggcaattaaacaggggtatctaacagtaaaagccgccggggtatgggcggggggc

SEQ ID NO: 232132 - DNA, 75 bp, synthetic construct
  source 1..75: mol_type = other DNA
cgccaggccgtatgttgcaaaatggcgataccttaatcgtcagcactgaccgctatgccggcaccattcaggttc

SEQ ID NO: 232133 - DNA, 75 bp, synthetic construct
  source 1..75: mol_type = other DNA
tttcccgtaagtcaggatctaaacggaactggaaaggaggattaccacgcctttcatttttgtgtgttgacacgt

SEQ ID NO: 232134 - DNA, 75 bp, synthetic construct
  source 1..75: mol_type = other DNA
gccgctttcatggcatcaacgaggctattaaattcagggcagagattgaagagccacgccgccaggagctgaggg

SEQ ID NO: 232135 - DNA, 75 bp, synthetic construct
  source 1..75: mol_type = other DNA
gcagcttccacggcatcaacgaagcgatgaccttccgtgctgagattgaagaaccaagacgccaggaactacgcg

SEQ ID NO: 232136 - DNA, 75 bp, synthetic construct
  source 1..75: mol_type = other DNA
ttcggcctcgacgatgacgcgctggcgatggagatttccctcggcggcttccctgatgatgcgatctggtcgcta

SEQ ID NO: 232137 - DNA, 75 bp, synthetic construct
  source 1..75: mol_type = other DNA
gcttagctctctgctttctgtagtggtattaatcattgttgctatctttctattagatggcatgatgaatagaaa

SEQ ID NO: 232138 - DNA, 75 bp, synthetic construct
  source 1..75: mol_type = other DNA
atgtacaagagatgggttgtgtgggggtctgtttgcatagttgttattgcgctcttgggaactgttcagttacca

SEQ ID NO: 232139 - DNA, 75 bp, synthetic construct
  source 1..75: mol_type = other DNA
gtttctgaacgcaccgcttaccgctggacaaccggcgacaacccttgtgtaccaattgaaccccgcaccatacgt

SEQ ID NO: 232140 - DNA, 75 bp, synthetic construct
  source 1..75: mol_type = other DNA
tgatatgattttgtctgagctgattagccacggtgaagttgatgaccagatgctattaaatgccaccgccctgat

SEQ ID NO: 232141 - DNA, 75 bp, synthetic construct
  source 1..75: mol_type = other DNA
cgatgatctaataggtgcgttatttttagcattgccagataacttacagtttaattttgttaaaaagatggagaa

SEQ ID NO: 232142 - DNA, 75 bp, synthetic construct
  source 1..75: mol_type = other DNA
caaagatactgtctgctatttccttgatgacgcatttgaaaataatattgctaaaactaatctttgcgccattct

SEQ ID NO: 232143 - DNA, 75 bp, synthetic construct
  source 1..75: mol_type = other DNA
aagctcacgttaacgaccagtttggcaacccggttgcgcatcaacccgtgacattcagtgcagagccatcctcgc

SEQ ID NO: 232144 - DNA, 75 bp, synthetic construct
  source 1..75: mol_type = other DNA
aaacaactggaggctattgatgaaaaactgacactcacggcgtccagcccgcttatcggtgtcaattccccaaca

SEQ ID NO: 232145 - DNA, 75 bp, synthetic construct
  source 1..75: mol_type = other DNA
attgacacgtttcaacgatcctgcggggtggagtaatctggcgaaaaatcagtatctgagtacggcgatgaaaca

SEQ ID NO: 232146 - DNA, 75 bp, synthetic construct
  source 1..75: mol_type = other DNA
ccggtatgaccgtcacggcaggctgacaaagaaaaccgacctcatcccggaaggggttatccgcacggatgatga

SEQ ID NO: 232147 - DNA, 75 bp, synthetic construct
  source 1..75: mol_type = other DNA
tgctggtgcagatgctcgaccggctggaaagtgaaatcctggctgaccgggtgagtgaggaaagccgccgctggc

SEQ ID NO: 232148 - DNA, 75 bp, synthetic construct
  source 1..75: mol_type = other DNA
cgcatcaggcatcggctgtcgaatacaatcaacgggcgtttttatttcacctggctacgggcaaacaggttgtcg

SEQ ID NO: 232149 - DNA, 75 bp, synthetic construct
  source 1..75: mol_type = other DNA
atccagagtggaaaggtgatgtcggttttcgtgtgtttaaactcgatacatctaatatccgtccgtgggaagcct

SEQ ID NO: 232150 - DNA, 75 bp, synthetic construct
  source 1..75: mol_type = other DNA
atacgtggccagtttaccattcagaagcagaaattagtgataacaaattaacaaagccattagttatcgaaagtg

SEQ ID NO: 232151 - DNA, 75 bp, synthetic construct
  source 1..75: mol_type = other DNA
agatactgtctgctatttccttgatgacgcatttgaaaataacgttgctaaaacaaatctttgcgccattctgga

SEQ ID NO: 232152 - DNA, 75 bp, synthetic construct
  source 1..75: mol_type = other DNA
atatccgcttacagctacgtgatgacggactgatactcaacgacaacggcgggcggagcattcactttgagccgc

SEQ ID NO: 232153 - DNA, 75 bp, synthetic construct
  source 1..75: mol_type = other DNA
ttgcactggcagtcatgggggcgctgattgcgctgggtaaattgctcaacagtgatgaaccgatcacccttcgtc

SEQ ID NO: 232154 - DNA, 75 bp, synthetic construct
  source 1..75: mol_type = other DNA
atggggataacatcgggatgggtaggttcttcggctaagagcgaaacaggtgagcaatggatgggggctgctggc

SEQ ID NO: 232155 - DNA, 75 bp, synthetic construct
  source 1..75: mol_type = other DNA
gcatacgaacgatcgtggtctgataacggttgatttattttgttgcacaggggcgatcgccaggcaggtaccgga

SEQ ID NO: 232156 - DNA, 75 bp, synthetic construct
  source 1..75: mol_type = other DNA
gaaaacggcgaatcacctgtcagaaattgcagcagaagggggatatgctcagcaggaatcccgaaacaatctggg

SEQ ID NO: 232157 - DNA, 75 bp, synthetic construct
  source 1..75: mol_type = other DNA
acatacttcgctttatcaggaggcccggatgtcacgttttatgatcgggggctggtttctttgtttgtgagggct

SEQ ID NO: 232158 - DNA, 75 bp, synthetic construct
  source 1..75: mol_type = other DNA
cctgatagcggtagcagtgatgttacattacttcgtacacaagttgtgcagggttcaagacttcggcaggtggtc

SEQ ID NO: 232159 - DNA, 75 bp, synthetic construct
  source 1..75: mol_type = other DNA
gaaacatatattgggcctaattgcttgattggacccaatgttgttatcaaaaagttcgcaataattggccccaat

SEQ ID NO: 232160 - DNA, 75 bp, synthetic construct
  source 1..75: mol_type = other DNA
cctgcaccagccataccgtctgccggggcagcagcatgatgaggaatcagggctgtactataaccgtcaccggta

SEQ ID NO: 232161 - DNA, 75 bp, synthetic construct
  source 1..75: mol_type = other DNA
ccgccggtgacctggccggggaaatcaccggcgtgacggacggtgccgggcgggagttccgtctggtgctgacca

SEQ ID NO: 232162 - DNA, 75 bp, synthetic construct
  source 1..75: mol_type = other DNA
ctgcaaattctggattagttacggctcaaactaaccttgctttactatatgatgagactaataaaaaagatctgg

SEQ ID NO: 232163 - DNA, 75 bp, synthetic construct
  source 1..75: mol_type = other DNA
gattccatgccggagctgcttaaaaaggcggggatctataccataagcgctaacttaagggttgtggtattacgc

SEQ ID NO: 232164 - DNA, 75 bp, synthetic construct
  source 1..75: mol_type = other DNA
ccacgctggaaaaagctgaactacaaatacctgcacgaaaagcatttgcgtctgcaatggctggaggatcaccgg

SEQ ID NO: 232165 - DNA, 75 bp, synthetic construct
  source 1..75: mol_type = other DNA
attgatccattagggttaagtcccgcagatgtagcgctaataagaagaaaagatcaactaaaccatcaaagagca

SEQ ID NO: 232166 - DNA, 75 bp, synthetic construct
  source 1..75: mol_type = other DNA
ccgaagatatagtcgctcgttatggtggtgaagagtttgccattattctttttaatgcctgcttgcaggaagccg

SEQ ID NO: 232167 - DNA, 75 bp, synthetic construct
  source 1..75: mol_type = other DNA
caaaacagatacaacaacctgctaattaatcgcctcgacgcattggctcatcgcgatcccttaacgggagtggca

SEQ ID NO: 232168 - DNA, 75 bp, synthetic construct
  source 1..75: mol_type = other DNA
aagggacaggttagaggttatgacggtgtacttaaagccgagggggtggccccctatgtgatcttacccagcaat

SEQ ID NO: 232169 - DNA, 75 bp, synthetic construct
  source 1..75: mol_type = other DNA
ctgattcgtcgattacgcagccaaatctggtgattaaaccgcatcagggcgcggaaaaggaggcgtcacatcatg

SEQ ID NO: 232170 - DNA, 75 bp, synthetic construct
  source 1..75: mol_type = other DNA
cgcctggtcctgtccttacggcgcaccacaaatgaatgagcagaccgggcagatgtcgaaatgcgatttctgtat

SEQ ID NO: 232171 - DNA, 75 bp, synthetic construct
  source 1..75: mol_type = other DNA
caaagcacgagtaaactcttatggttatgctgtgattgatccaaagaataagatcgtaaatggtctgaaggcaga

SEQ ID NO: 232172 - DNA, 75 bp, synthetic construct
  source 1..75: mol_type = other DNA
gtggatgtggcctttaagagaaggagcagaaaagcaataagaacatttgccaccgccctgacaaacattgaaaaa

SEQ ID NO: 232173 - DNA, 75 bp, synthetic construct
  source 1..75: mol_type = other DNA
tgagcgttggggaagtccattccttgggcgcgcggatttgaatactgtggggttcatcagtgaagcacctaagtt

SEQ ID NO: 232174 - DNA, 75 bp, synthetic construct
  source 1..75: mol_type = other DNA
ggtggcgtgaacaaacactatcctgtgatatgcgcaaaaagcccgagcgccccaccctacgtacagattttttat

SEQ ID NO: 232175 - DNA, 75 bp, synthetic construct
  source 1..75: mol_type = other DNA
aaggcagataattatgataatttcctgattaataattttgcagatattggtaaacaaaaattcacattctcctta

SEQ ID NO: 232176 - DNA, 75 bp, synthetic construct
  source 1..75: mol_type = other DNA
tatggctatcgtgtcaaagaccagacgctagagttaactttgttgcgttcgcagcacaaacctggggaagttgtt

SEQ ID NO: 232177 - DNA, 75 bp, synthetic construct
  source 1..75: mol_type = other DNA
atctgtatggtgcaactaagttggcatccgataaactttttgttgcgggtaattcttattctggggcgacaaaaa

SEQ ID NO: 232178 - DNA, 75 bp, synthetic construct
  source 1..75: mol_type = other DNA
gaatgatttaatcgttacaggaagagattatggacgtaataccagtgcaggatacacggatcactctcatcgtac

SEQ ID NO: 232179 - DNA, 75 bp, synthetic construct
  source 1..75: mol_type = other DNA
ggagaaaggtggcctgcagggtcgtgtggatgcactggatggtatccaggtaccggaagtgaacgatcaggacgg

SEQ ID NO: 232180 - DNA, 75 bp, synthetic construct
  source 1..75: mol_type = other DNA
gtgcagggctggcggctattgcactggctgccggaggcggtggtggaagcagtcgttataagcgtgcaactgaag

SEQ ID NO: 232181 - DNA, 75 bp, synthetic construct
  source 1..75: mol_type = other DNA
agtaaacagcaaaatcagcagacttcctctgaacgtgagctggagacagggcaagattacgaaagcccgctccac

SEQ ID NO: 232182 - DNA, 75 bp, synthetic construct
  source 1..75: mol_type = other DNA
gggcaattttattgggggaatattgatgcatggataaaagaaaaaccggtatttaagtcacaggctataccatta

SEQ ID NO: 232183 - DNA, 75 bp, synthetic construct
  source 1..75: mol_type = other DNA
gatgcagaaattgcggctgtagcgagaaaatatggcgctgaagttccgtttacgcgcccagaagaactttcaaat

SEQ ID NO: 232184 - DNA, 75 bp, synthetic construct
  source 1..75: mol_type = other DNA
aacacttggaccaatctgatgaatgggcatcacgcgcagcaaaacatgtactcgcggaacggcagagagaaacat

SEQ ID NO: 232185 - DNA, 75 bp, synthetic construct
  source 1..75: mol_type = other DNA
ataacagcccaatggaacgcttcttcaggagtctgaagaacgaatggatgccggtagtgggttacgtaagcttca

SEQ ID NO: 232186 - DNA, 75 bp, synthetic construct
  source 1..75: mol_type = other DNA
cagaccggcaccacgcgtatccagacggtataccagccggggagcttcacgccgctcatcagaatcgaaacagag

SEQ ID NO: 232187 - DNA, 75 bp, synthetic construct
  source 1..75: mol_type = other DNA
ggaagagattatggacgtaataccagtgcaggatacacggatcactctcatcgtactgatatggggaatggagat

SEQ ID NO: 232188 - DNA, 75 bp, synthetic construct
  source 1..75: mol_type = other DNA
tgatatatggatcgctaacaaattagagatgcaaatatctatgatgctaaagaataatatttcttttatgtatgg

SEQ ID NO: 232189 - DNA, 75 bp, synthetic construct
  source 1..75: mol_type = other DNA
ctgtaaaaaccagttatgaagatcttttgaaaacatgtagtataggttgtttgaccgtaatgcttcataagaaat

SEQ ID NO: 232190 - DNA, 75 bp, synthetic construct
  source 1..75: mol_type = other DNA
tggagcaactgaacccggcagggttaagctaccgctatctttatgagcaggaccgcatcaccgtcaccgacagcc

SEQ ID NO: 232191 - DNA, 75 bp, synthetic construct
  source 1..75: mol_type = other DNA
atacgaccgcttcggccagatgacggcggttcaccgcgaggaaggtatcagcctttaccgccactatgacaaccg

SEQ ID NO: 232192 - DNA, 75 bp, synthetic construct
  source 1..75: mol_type = other DNA
gacgcgcacagtgagttaccggcgacgacaacggatgcgacgggcagcacccggcagatgacgtggagccgctac

SEQ ID NO: 232193 - DNA, 75 bp, synthetic construct
  source 1..75: mol_type = other DNA
cagaatacgatgaggggggcaacctgctgaatgaagagaacccgcatcagctgcagcagcttatccgcctgccgg

SEQ ID NO: 232194 - DNA, 75 bp, synthetic construct
  source 1..75: mol_type = other DNA
ccgcatcacctgcaccagccgtaccggctgccggggcagcagtatgataaggagtcggggctgtactacaaccgg

SEQ ID NO: 232195 - DNA, 75 bp, synthetic construct
  source 1..75: mol_type = other DNA
gcaggctggtatcggagacatcgcgcagcggggagacagtacgctaccgctacgatgacgcgcacagtgagttac

SEQ ID NO: 232196 - DNA, 75 bp, synthetic construct
  source 1..75: mol_type = other DNA
cagatggtccttggtcaatttgtgtaaggctctgtgtgctcctatttacaacagttctcctcttcgtgagacaat

SEQ ID NO: 232197 - DNA, 75 bp, synthetic construct
  source 1..75: mol_type = other DNA
tttgatttcatgcgacgtgaacttgattgtgcagtaatacgttatgcctgtaatattgccaaggaggcaggaacg

SEQ ID NO: 232198 - DNA, 75 bp, synthetic construct
  source 1..75: mol_type = other DNA
attgcctcgatctcttggatcagaaatatattgacttcctcaaggttgcttacgatgacatgatttcttctttaa

SEQ ID NO: 232199 - DNA, 75 bp, synthetic construct
  source 1..75: mol_type = other DNA
aggcgcgtgtgcacaatggctaccattatccaagaagtattttgacggctttacgttcacgtatctctttcccgc

SEQ ID NO: 232200 - DNA, 75 bp, synthetic construct
  source 1..75: mol_type = other DNA
gccggtctggcggagcgcgtcggcttactgccagcgttgatggttaaaatggcatcgcatgtgaatgcccgctac

SEQ ID NO: 232201 - DNA, 75 bp, synthetic construct
  source 1..75: mol_type = other DNA
aacagattagagagatttgcgagttttgtaagactaaggttgatcacttcaatgtaacctataaaaagaccagtg

SEQ ID NO: 232202 - DNA, 75 bp, synthetic construct
  source 1..75: mol_type = other DNA
atggacccggtgtacacgccggcgcgaaaaattcacctgtaccactgcgaccatcgcggcctgccgctggccctt

SEQ ID NO: 232203 - DNA, 75 bp, synthetic construct
  source 1..75: mol_type = other DNA
accccctgtgcagtactggtggaactggaggcattcgccagcccgctaaccctgagccagatcaatctggcggga

SEQ ID NO: 232204 - DNA, 75 bp, synthetic construct
  source 1..75: mol_type = other DNA
gtaccgtgatcaccaaagatggcccgaaggtaaaaaaactgcaccaaacagagcggatgtgggtcgttggcaaaa

SEQ ID NO: 232205 - DNA, 75 bp, synthetic construct
  source 1..75: mol_type = other DNA
ttactggcctgctgccgcagatattcccgtggcgagcgataacccagtgcactatgcggatgccattcgttataa

SEQ ID NO: 232206 - DNA, 75 bp, synthetic construct
  source 1..75: mol_type = other DNA
ggcataaccatcaatggcgtttctttcgatagcgatatgacgaccaagatttaccttaatacatcggaagagcgc

SEQ ID NO: 232207 - DNA, 75 bp, synthetic construct
  source 1..75: mol_type = other DNA
taacgctgctggttatccggtatataacggacagattgcaaagttcgttaccgtacagggacattcaatggctgt

SEQ ID NO: 232208 - DNA, 75 bp, synthetic construct
  source 1..75: mol_type = other DNA
ttcttatgcttttagttgtaaaatcttttgcagatactacctcaccgttaatgattcagcctaaaaatggggaaa

SEQ ID NO: 232209 - DNA, 75 bp, synthetic construct
  source 1..75: mol_type = other DNA
atacatatataagctatcgcagaagtataaagcatatacgaaacttagtgcggtactattacacaaatcacaata

SEQ ID NO: 232210 - DNA, 75 bp, synthetic construct
  source 1..75: mol_type = other DNA
gtatgacttatcttatttacggttagttcgagccgtttatgggctattaataaatttctccctgaatattttact

SEQ ID NO: 232211 - DNA, 75 bp, synthetic construct
  source 1..75: mol_type = other DNA
tcgatgaatctgttacggcaggcatgaatacttttttcgctgagttcgcttcatgtttgacggaattacagacgc

SEQ ID NO: 232212 - DNA, 75 bp, synthetic construct
  source 1..75: mol_type = other DNA
tgctaacggctttaaaagataaatatggtgtatcacaaggcatggcggtatttaatcagttgaaccgccccggaa

SEQ ID NO: 232213 - DNA, 75 bp, synthetic construct
  source 1..75: mol_type = other DNA
tatcgaccttcgtccggaagccctgaagaaattcgaagagctggcacaacaggcacagcaagacgcagaaaaagc

SEQ ID NO: 232214 - DNA, 75 bp, synthetic construct
  source 1..75: mol_type = other DNA
ttgttggccaggataacacgggcaatgtatccggtactgccggacagatgaaaacatttgagccaccacaactga

SEQ ID NO: 232215 - DNA, 75 bp, synthetic construct
  source 1..75: mol_type = other DNA
aggaaagtgattgttaccgcagcaggagataaggttgagttgatcgatggaggttactgcgcaaacaaccccacc

SEQ ID NO: 232216 - DNA, 75 bp, synthetic construct
  source 1..75: mol_type = other DNA
ttggggcttttaacgtcactgcagctatgggcggttacagtgacaaacaggctgtggccgtaggggccggctacc

SEQ ID NO: 232217 - DNA, 75 bp, synthetic construct
  source 1..75: mol_type = other DNA
ccaagtaattggaccagctgaaggtatgaatatggacttcaccaatttcaacaaatatgttttctcactcaaacc

SEQ ID NO: 232218 - DNA, 75 bp, synthetic construct
  source 1..75: mol_type = other DNA
gatgaacacattctcaggcttattcaacgctccctctccaacccacaacttcatacttttatttgctgttatagc

SEQ ID NO: 232219 - DNA, 75 bp, synthetic construct
  source 1..75: mol_type = other DNA
gtatggaggatattgtttacttaagattaaataaaatgtttgaggatacaatttcaactacaaaatcctccgatc

SEQ ID NO: 232220 - DNA, 75 bp, synthetic construct
  source 1..75: mol_type = other DNA
taaagctctgcaggataatatctctaattgccaagaaataattgcaagaataaatccagctctatgtgaagcaaa

SEQ ID NO: 232221 - DNA, 75 bp, synthetic construct
  source 1..75: mol_type = other DNA
tggaggcgctgtcccgtcgtgatgcccgtgaggatccgttcgcgtcttccgggaaaacgtcgtcaggcacacgcc

SEQ ID NO: 232222 - DNA, 75 bp, synthetic construct
  source 1..75: mol_type = other DNA
caaaatagatgatctttctaacaaattattcaacactattaatgaaacaattaagcataattttgatgatacttt

SEQ ID NO: 232223 - DNA, 75 bp, synthetic construct
  source 1..75: mol_type = other DNA
accaaaccattaaggataactttgatgatatttttcggcaacagtcagagaatatgagcaattattatgagttcg

SEQ ID NO: 232224 - DNA, 75 bp, synthetic construct
  source 1..75: mol_type = other DNA
catcctgcatggcggaaaatggcctgtcaggtactactctaggcgtaatttttgacggtacaggatatggcaccg

SEQ ID NO: 232225 - DNA, 75 bp, synthetic construct
  source 1..75: mol_type = other DNA
aataactgcatcatatccaatatatattctcattgaaaagccaatgataaatataggtaaacgtttaattgacaa

SEQ ID NO: 232226 - DNA, 75 bp, synthetic construct
  source 1..75: mol_type = other DNA
acctattttgagcttaatcctgataccaggaaaattaaaattgtcgctccgggtggtcttgatgtggttgcccct

SEQ ID NO: 232227 - DNA, 75 bp, synthetic construct
  source 1..75: mol_type = other DNA
tcgataattttattttctataatcagcatttaaagagcatattcaatcaagcaatgaatcttgaaggaaaaataa

SEQ ID NO: 232228 - DNA, 75 bp, synthetic construct
  source 1..75: mol_type = other DNA
ggttcattaattgccgtgcttattttgcgacagaccaacaactataacagcgatgatttccagtttgtgtggaat

SEQ ID NO: 232229 - DNA, 75 bp, synthetic construct
  source 1..75: mol_type = other DNA
caaaatccaggaagccggattgaaagtacatcagcaccatcaggccaatgtgccggactggaaaaattatttctg

SEQ ID NO: 232230 - DNA, 75 bp, synthetic construct
  source 1..75: mol_type = other DNA
attgccagacgatgagttaacactgactcgaatgacgtatttcagtgagcaggatctggcaattatcaaatatat

SEQ ID NO: 232231 - DNA, 75 bp, synthetic construct
  source 1..75: mol_type = other DNA
actttacaacttcacgatggtacggtgaataacagcggtattgcgtcggcgcgcgttaacgctcagggcgatgcg

SEQ ID NO: 232232 - DNA, 75 bp, synthetic construct
  source 1..75: mol_type = other DNA
actggccgtaatcgtgccgccggaagccgtttacctccatcaggtggtgtggctgcgcacgggtgaacagtggcg

SEQ ID NO: 232233 - DNA, 75 bp, synthetic construct
  source 1..75: mol_type = other DNA
attaccgctgagccagtacaacaccggcccgctgcgcctgaaggccgccctgcaactactggtgggcccggcgtg

SEQ ID NO: 232234 - DNA, 75 bp, synthetic construct
  source 1..75: mol_type = other DNA
gaacaaagtggctgagtctggattgaaggtccatcagcaccatcaggctaacgtgccggactttaacgactactt

SEQ ID NO: 232235 - DNA, 75 bp, synthetic construct
  source 1..75: mol_type = other DNA
ctgcataaagcttcaaccgcgatcagcaaaaaccacgctatgatcgtaatagctgatattgaaaaaaaatcattc

SEQ ID NO: 232236 - DNA, 75 bp, synthetic construct
  source 1..75: mol_type = other DNA
cagagtccgacaatgaggccttcttcggtggagacctcgaccatgagcagctaccagcgccgacctatgatgaac

SEQ ID NO: 232237 - DNA, 75 bp, synthetic construct
  source 1..75: mol_type = other DNA
acctctccggcacaaccgtagatgcgggcaactcgattttcaccaataccgcgtcgttttcaccagcgcagggcg

SEQ ID NO: 232238 - DNA, 75 bp, synthetic construct
  source 1..75: mol_type = other DNA
acaagttgtttatcatcaacaaccaagctaccacaacgaaccacgcgcacaaaagaactgattaaagcattctta

SEQ ID NO: 232239 - DNA, 75 bp, synthetic construct
  source 1..75: mol_type = other DNA
tggagcgggagctgaaaccgaagccggagccgcagccaaaagcggccacccgcgccccgcgtaagacccggagcg

SEQ ID NO: 232240 - DNA, 75 bp, synthetic construct
  source 1..75: mol_type = other DNA
aaaccgcgcacgcgcaaacctgccgctaaaccggcggcacggcgcgggcgtcccccgaaagcggcaaaagccgca

SEQ ID NO: 232241 - DNA, 75 bp, synthetic construct
  source 1..75: mol_type = other DNA
gaaccaatgtcacaaggataacagacgcactggaaaaaaaggatatatacaacgcatcaacagcaacaatgaccg

SEQ ID NO: 232242 - DNA, 75 bp, synthetic construct
  source 1..75: mol_type = other DNA
attcagagctttatacaacaaagcaccaaagatatcagtagttacgaaaaaacgattgaaagcctattcaaagtg

SEQ ID NO: 232243 - DNA, 75 bp, synthetic construct
  source 1..75: mol_type = other DNA
cggcggctcgtgccacgcaaaaggccgcgcgtcactcgttcccgcctcgccagcttccgctgcccgccccggtcc

SEQ ID NO: 232244 - DNA, 75 bp, synthetic construct
  source 1..75: mol_type = other DNA
tggtttatcaaatgcctcagctatttccaacagccgattctgataacttggttatttatattaacggtagtggca

SEQ ID NO: 232245 - DNA, 75 bp, synthetic construct
  source 1..75: mol_type = other DNA
aaactgttactgaggagtttatttcaacacgcaaagtgcctctcgaacatagagaaatagttaaattcgcgagga

SEQ ID NO: 232246 - DNA, 75 bp, synthetic construct
  source 1..75: mol_type = other DNA
atgcgtgaaatgaatcagttagtaaatactgaagattcagcctggccaataatccagaactggttaaaagacgcc

SEQ ID NO: 232247 - DNA, 75 bp, synthetic construct
  source 1..75: mol_type = other DNA
gcgtcagctttcaggatcccaatattgtcgccagcctgccgtttctcggcgctgactggctggttcacgtgctga

SEQ ID NO: 232248 - DNA, 75 bp, synthetic construct
  source 1..75: mol_type = other DNA
agtacttccgtcaaacataaaatcaagcgtgttggccgattgttgggtacccgagccctgatgagttccgcacct

SEQ ID NO: 232249 - DNA, 75 bp, synthetic construct
  source 1..75: mol_type = other DNA
gccgcccggtcatcgatcaatcgctgggtgaactggtacaccttgttcggtctggaggggcttgaaagcgagcct

SEQ ID NO: 232250 - DNA, 75 bp, synthetic construct
  source 1..75: mol_type = other DNA
ggacgaaccgctggcggatgttattccgtttcagccgtcaagggtgtcggcagcacatctgccgcaccggctggc

SEQ ID NO: 232251 - DNA, 75 bp, synthetic construct
  source 1..75: mol_type = other DNA
atggtagtgtccgctattgccagtacacctcactcttatctgagtccgggaaatcccccggcagataaagagcag

SEQ ID NO: 232252 - DNA, 75 bp, synthetic construct
  source 1..75: mol_type = other DNA
atgtgattcgcactttaaatttgaacgcaatgatgactatataccgcccccatctgtagaagagatagggagagc

SEQ ID NO: 232253 - DNA, 75 bp, synthetic construct
  source 1..75: mol_type = other DNA
tcccctgcggaagagaagaaggccgaacccgctccgccgaaaaccagaaccacccgcaaagtgaaagggtgttac

SEQ ID NO: 232254 - DNA, 75 bp, synthetic construct
  source 1..75: mol_type = other DNA
cgggaatatctgatttagatactggtattgatttgtctggtatatcttttattcagagtgaaattaataaaactt

SEQ ID NO: 232255 - DNA, 75 bp, synthetic construct
  source 1..75: mol_type = other DNA
gaggctcttgttgatacggcattcaatgatctcagggaagatgtaaagacattattcggcgttaatctacaatct

SEQ ID NO: 232256 - DNA, 75 bp, synthetic construct
  source 1..75: mol_type = other DNA
tatggttatttaataaacactggcaatcattatgatgtttacctccctcctgaactttttgctcaggcttataag

SEQ ID NO: 232257 - DNA, 75 bp, synthetic construct
  source 1..75: mol_type = other DNA
tctggtggcacgctcaggcacgcaacaaattgtcctgagcggcggcgtgttctgcaatgaattcatcctcgttaa

SEQ ID NO: 232258 - DNA, 75 bp, synthetic construct
  source 1..75: mol_type = other DNA
gcggagctaaaaaacacgatcagcatcggcaaaggaaaacaggtttttctgagccagcatattggcgatcttaag

SEQ ID NO: 232259 - DNA, 75 bp, synthetic construct
  source 1..75: mol_type = other DNA
ggcctctccagcctttacaactgcaggtattggtattcagtctggcgctgcaactgatgctgttgtggaacttaa

SEQ ID NO: 232260 - DNA, 75 bp, synthetic construct
  source 1..75: mol_type = other DNA
atgagtagtaatatacatggaattagttgcactgcaaataattatttgaaacaagcctggaacaatataaaaaat

SEQ ID NO: 232261 - DNA, 75 bp, synthetic construct
  source 1..75: mol_type = other DNA
ccggatacttggaaaactgtctgccaaccagattgaaggcgatattgttaaaaccgtggggaaggctttcccgcg

SEQ ID NO: 232262 - DNA, 75 bp, synthetic construct
  source 1..75: mol_type = other DNA
aacccgctccgccgaaaaccagaaccacccgcaaagtgaaagggtgttacagctcgccattcagtcataatcagg

SEQ ID NO: 232263 - DNA, 75 bp, synthetic construct
  source 1..75: mol_type = other DNA
atgttgaagatgttgatattgttagagtatccttgccgggtagaggttcagagtctatcacagattttaaaggtt

SEQ ID NO: 232264 - DNA, 75 bp, synthetic construct
  source 1..75: mol_type = other DNA
ttttcttgctgttctttcagatagcatttgctcattatttattgttaatagtaatgtggcatcaatctccttggg

SEQ ID NO: 232265 - DNA, 75 bp, synthetic construct
  source 1..75: mol_type = other DNA
tctgacaacaaaattcagggggagggtagtcttatgtcatggaactttctgttttttttaaaaaataatttattg

SEQ ID NO: 232266 - DNA, 75 bp, synthetic construct
  source 1..75: mol_type = other DNA
atgggactgagtatggaaaaaatcaccacgtttatcgcctactggctggccgttgggctggcgtatttcggggca

SEQ ID NO: 232267 - DNA, 75 bp, synthetic construct
  source 1..75: mol_type = other DNA
atgggactgagtgtggaaaaaatcacgacgtttatcgcttactggctggccgtggggctggcgtatttcggggcg

SEQ ID NO: 232268 - DNA, 75 bp, synthetic construct
  source 1..75: mol_type = other DNA
atggcgtcctgggcaacccgtacgcctgctatccgcgatattctctctgtctcgatcgctgaaatgggcggtgtt

SEQ ID NO: 232269 - DNA, 75 bp, synthetic construct
  source 1..75: mol_type = other DNA
agcgcaagatcgagaaggccaaggcgcaagtgcgagcgaaggtagagcccccgtttcgcgtgatcaagcggcagt

SEQ ID NO: 232270 - DNA, 75 bp, synthetic construct
  source 1..75: mol_type = other DNA
gggccagctattacaagcttaaaaacggtacattacacgcccagcatgttgcaggtcacgatatcgaaattatcg

SEQ ID NO: 232271 - DNA, 75 bp, synthetic construct
  source 1..75: mol_type = other DNA
cgcggttttgacggccggacgcaacgttaccactatgacctgaccagaaaactcacacagagtgaagacgagggg

SEQ ID NO: 232272 - DNA, 75 bp, synthetic construct
  source 1..75: mol_type = other DNA
aagaaatccgtctttatattgtttgcgatgtccctgatgaacttattgatttaacgtttgaatggaaagggctga

SEQ ID NO: 232273 - DNA, 75 bp, synthetic construct
  source 1..75: mol_type = other DNA
acgcgctgatggcgtcgcgttcagcatcgagcagggtgcggcgaacaatatcctgctgacaaatggcggcgtgtt

SEQ ID NO: 232274 - DNA, 75 bp, synthetic construct
  source 1..75: mol_type = other DNA
ctatagattttattggtaaaatatttagctctaatccagttaatgaaagggatatatttacatcttctatttttg

SEQ ID NO: 232275 - DNA, 75 bp, synthetic construct
  source 1..75: mol_type = other DNA
tacggataatttgctgcctgttagtgatagcaattcatgttaccccggactatgcgacgatggttaaaaccggac

SEQ ID NO: 232276 - DNA, 75 bp, synthetic construct
  source 1..75: mol_type = other DNA
ctgatgaacaaacgcaaaactgcctgatgcgctacgcttatcaggccttgtattatccctccagtgcagagaaaa

SEQ ID NO: 232277 - DNA, 75 bp, synthetic construct
  source 1..75: mol_type = other DNA
actggaagcaaaaccaatagcgtgggaatgcggcgaaaacataatcctgtttaatcctgacacagttgaagcata

SEQ ID NO: 232278 - DNA, 75 bp, synthetic construct
  source 1..75: mol_type = other DNA
aattctcgattatatgctggataaaatggggaacaaatatgacgcgattgtttttatcgatgacgggcaagcaaa

SEQ ID NO: 232279 - DNA, 75 bp, synthetic construct
  source 1..75: mol_type = other DNA
gtaaagccggtgatagcggtacgctggcgcactctctggatgccatcgccgaccagacgcagccggtggtggtcg

SEQ ID NO: 232280 - DNA, 75 bp, synthetic construct
  source 1..75: mol_type = other DNA
gccatatttacggctgcgaaatattaaatcactgataataattcataatgctcgctacgcgcatgtcattgatag

SEQ ID NO: 232281 - DNA, 75 bp, synthetic construct
  source 1..75: mol_type = other DNA
taattcctgtgcaggtaccagcaactgcgaatatagagtaaacagtttgctactcaacgacggtgatgtttattt

SEQ ID NO: 232282 - DNA, 75 bp, synthetic construct
  source 1..75: mol_type = other DNA
ctttcaaagaacttgggattaaagaaggtaaggatttagtcttgattgatgctaggcctaataaggtttctgcat

SEQ ID NO: 232283 - DNA, 75 bp, synthetic construct
  source 1..75: mol_type = other DNA
actgatgaaaatcatcagacggttaaagttaaaatcgtcaagggaaaaacaacccaacaagaagatgatatgacc

SEQ ID NO: 232284 - DNA, 75 bp, synthetic construct
  source 1..75: mol_type = other DNA
cgttcggcgcgcagaccaaagaagaggcggtgctgtatcgcgatcagctcggcgcacgggaggcgatgattatct

SEQ ID NO: 232285 - DNA, 75 bp, synthetic construct
  source 1..75: mol_type = other DNA
gctacgaatacggaagttattgacgtattacgccagcgagacattgatagcctgtatatggcaaaaaacatattg

SEQ ID NO: 232286 - DNA, 75 bp, synthetic construct
  source 1..75: mol_type = other DNA
cctgccacaactaacggtatctacaatacgctgacaaccaatgaactttccggtagcggtaatttctacctgcat

SEQ ID NO: 232287 - DNA, 75 bp, synthetic construct
  source 1..75: mol_type = other DNA
cagtggggatcgacagccgtaatgatattcctgaaggaattaccacgctaggcgcttttatgggctattcccatt

SEQ ID NO: 232288 - DNA, 75 bp, synthetic construct
  source 1..75: mol_type = other DNA
ttatttatcagcacaaacagcagcgcctgccacaactaacggtatctacaatacgctgacaaccaatgaactttc

SEQ ID NO: 232289 - DNA, 75 bp, synthetic construct
  source 1..75: mol_type = other DNA
agtgccacttctgataaagcaaatatcaaaggtggcaagcaaacggtatatggtttagccactgaagcaaatatc

SEQ ID NO: 232290 - DNA, 75 bp, synthetic construct
  source 1..75: mol_type = other DNA
gcaaaacctgggtcaggactccgccacaaaggttaactctggcgggcaatatacccttgggcggtcaaaagatga

SEQ ID NO: 232291 - DNA, 75 bp, synthetic construct
  source 1..75: mol_type = other DNA
gggtgacgccggtactgcgtaaaatcatcggtgattcgaaacagaaaagctcgaaagaaaccattctttacaagg

SEQ ID NO: 232292 - DNA, 75 bp, synthetic construct
  source 1..75: mol_type = other DNA
gacagcactgctggaaaacctttttggctattttgcccacctcgatccttgtccgatactgctgctgcagccgaa

SEQ ID NO: 232293 - DNA, 75 bp, synthetic construct
  source 1..75: mol_type = other DNA
ttataggggcaattaaagccggtcaggcatatctggggtgggatgaggtaacctaccgtagtgttctgtctcgct

SEQ ID NO: 232294 - DNA, 75 bp, synthetic construct
  source 1..75: mol_type = other DNA
gaagatgaaagccggattgctgacagttacgaagattcagatcagcggcgggcctctgtagtttgcccccattgc

SEQ ID NO: 232295 - DNA, 75 bp, synthetic construct
  source 1..75: mol_type = other DNA
tgctggcagatgaggtggataaatacccgattacccgcgagggcgatcccattgctctggcggaagagcgaaccg

SEQ ID NO: 232296 - DNA, 75 bp, synthetic construct
  source 1..75: mol_type = other DNA
actccggcggccaccatacgcagaaggtatacgaattcgccaaagagcgtcttggccgtcgtgtctgggcaatta

SEQ ID NO: 232297 - DNA, 75 bp, synthetic construct
  source 1..75: mol_type = other DNA
aatggtaaagcgatgctggcgcatgcgtcatcttcattgagtaatgtaaaggaagtgttctgttactatttacta

SEQ ID NO: 232298 - DNA, 75 bp, synthetic construct
  source 1..75: mol_type = other DNA
tttcgccaacaaacgggaattgcaccgtttattgtgattttacccgacattaataatgaagccagtctcagacaa

SEQ ID NO: 232299 - DNA, 75 bp, synthetic construct
  source 1..75: mol_type = other DNA
gacctggtctggcaggagaaatcccacatgtcacccaatacggttatttcaccgataacagagacgctcttttat

SEQ ID NO: 232300 - DNA, 75 bp, synthetic construct
  source 1..75: mol_type = other DNA
tgcagcggggatcgccgaattttgccgcacagttggcgaaccaatccacgtaccactaatgctcacacataagct

SEQ ID NO: 232301 - DNA, 75 bp, synthetic construct
  source 1..75: mol_type = other DNA
ggctcctctgagatggaagacttcttcctgattgctcggtggggtggcgtctgtgttaacgccgaaaaagaccgc

SEQ ID NO: 232302 - DNA, 75 bp, synthetic construct
  source 1..75: mol_type = other DNA
tttctgatgaagaaaagaatcatatgctagatagtgagttgttaccgattactagacttattcatgagaataatg

SEQ ID NO: 232303 - DNA, 75 bp, synthetic construct
  source 1..75: mol_type = other DNA
tcaaacatgttcaatggccaaaagaaggtgataagcacctgaccaaagcggccatgatccattgtgaatgttgtg

SEQ ID NO: 232304 - DNA, 75 bp, synthetic construct
  source 1..75: mol_type = other DNA
gcactgaaagccgccaatcgcaatgacgttattgttgtcggcattgatggcagtaacgatgagcgcgatgccgtg

SEQ ID NO: 232305 - DNA, 75 bp, synthetic construct
  source 1..75: mol_type = other DNA
cagccaaacagcgggtgatgttccgcggcattctgataaccaaagataacgcagataaagtccaggatttcaata

SEQ ID NO: 232306 - DNA, 75 bp, synthetic construct
  source 1..75: mol_type = other DNA
cgtgccgtgcgtgatgagtatgacagacagcgggtttaccgttggcaccataaatgaatggtttggtgaggttta

SEQ ID NO: 232307 - DNA, 75 bp, synthetic construct
  source 1..75: mol_type = other DNA
caggtatttggggccgtgaagtgaattggcctgaagatatgaataagaaatcaatgttgtcttcaatggacgaat

SEQ ID NO: 232308 - DNA, 75 bp, synthetic construct
  source 1..75: mol_type = other DNA
acagcgttcaacatgctgttggatcgtatcgtcaacaaacgtgaagaaccgcagtctattgaagtgcatccgcgc

SEQ ID NO: 232309 - DNA, 75 bp, synthetic construct
  source 1..75: mol_type = other DNA
gtatcagttattcactctcattttcgtggaatgaatctgtagggatccccgataacgaacgtattgtcggactta

SEQ ID NO: 232310 - DNA, 75 bp, synthetic construct
  source 1..75: mol_type = other DNA
ccgaattttaaatggaaggcaagtgttacaattcaggcaaaacaagaggttattgaggctagtgatcaagaatta

SEQ ID NO: 232311 - DNA, 75 bp, synthetic construct
  source 1..75: mol_type = other DNA
gttttgacttatatctagaaggtacaataaaaactaccgtatcatgtgagtctgatgccgacaataaattgagct

SEQ ID NO: 232312 - DNA, 75 bp, synthetic construct
  source 1..75: mol_type = other DNA
atgcttggcaatgcggatgggctggaagggcggcgctattacgcctatcaggatgtggtcggcgtctggactgtt

SEQ ID NO: 232313 - DNA, 75 bp, synthetic construct
  source 1..75: mol_type = other DNA
gtggttattcctggcgacggggggcttgcacttctgctgattgccccagtgctgctatggtttccgcaaggaccg

SEQ ID NO: 232314 - DNA, 75 bp, synthetic construct
  source 1..75: mol_type = other DNA
gggagacaagggggatacaggagctgcaggcccggcaggaccgcagggaccgaaaggggatacaggagccgcagg

SEQ ID NO: 232315 - DNA, 75 bp, synthetic construct
  source 1..75: mol_type = other DNA
gatacaggagacaagggcgataagggggataccggcccgaaaggtgaacagggcgacccgggaggtccacaggga

SEQ ID NO: 232316 - DNA, 75 bp, synthetic construct
  source 1..75: mol_type = other DNA
tcgatcacgttgcgctcgtgccgttgggcgtatgggataagggcgggaaaccatcaggtgtggaagtaacaacgc

SEQ ID NO: 232317 - DNA, 75 bp, synthetic construct
  source 1..75: mol_type = other DNA
gggcacgatcatgctggcgcatggacatccagcctgccggtttcagatctgaaaggattctttggtgctcttggt

SEQ ID NO: 232318 - DNA, 75 bp, synthetic construct
  source 1..75: mol_type = other DNA
gtagtgcagatactcttcttcgcagggttatcaataccccagagacgaaactgtcaggctcatcccatgtcggta

SEQ ID NO: 232319 - DNA, 75 bp, synthetic construct
  source 1..75: mol_type = other DNA
agcggcatcaaagtgctgggactggcagcgctcgatagcaccgcaacaccttgctatgaccgcgatacggcccag

SEQ ID NO: 232320 - DNA, 75 bp, synthetic construct
  source 1..75: mol_type = other DNA
aaagcctcgaaacgctgacccgaaccatcaccgaaaccagcgagcaacaggtcagttgggaaaccattccgctga

SEQ ID NO: 232321 - DNA, 75 bp, synthetic construct
  source 1..75: mol_type = other DNA
tacctcacttcatcatggtgtggggggaacagcccgccagatggtgccggggctgatgatacaggaggcgtcatg

SEQ ID NO: 232322 - DNA, 75 bp, synthetic construct
  source 1..75: mol_type = other DNA
ctattgctcacggcgattcgtatacttcgagctttaatttctcggcggatcatttggataaccaagacgatattg

SEQ ID NO: 232323 - DNA, 75 bp, synthetic construct
  source 1..75: mol_type = other DNA
ggaacgactcctggtctaaaagtagtgaaagacatttgcagggtagaaaatgtatctttggaatggctcatattg

SEQ ID NO: 232324 - DNA, 75 bp, synthetic construct
  source 1..75: mol_type = other DNA
gggaccacacctggcctaaaagtagttagcaatatttgcaaggtagaaaacgtatcgttggaatggctcatattg

SEQ ID NO: 232325 - DNA, 75 bp, synthetic construct
  source 1..75: mol_type = other DNA
gaaagtgacctccctaaggaacaccgtaagagattaatgttagcttttggggtcagtggcttgtccatgtggcct

SEQ ID NO: 232326 - DNA, 75 bp, synthetic construct
  source 1..75: mol_type = other DNA
gggattcttcggtcttggcggtgggatcaacagtgaaaacgacgacaccattctcgtggtgctgatcacgcccaa

SEQ ID NO: 232327 - DNA, 75 bp, synthetic construct
  source 1..75: mol_type = other DNA
ccgtgtgcaaacacaaaatccggctggttcaataaatggttcgttgttaggttgttcaattacgcatctttctca

SEQ ID NO: 232328 - DNA, 75 bp, synthetic construct
  source 1..75: mol_type = other DNA
tccggtgttcaatgttgaaactgctggttctattactcttgaagatgttcagggtgcagtagcgaagctggcaca

SEQ ID NO: 232329 - DNA, 75 bp, synthetic construct
  source 1..75: mol_type = other DNA
gttaaatatcaattccttcatggactttacgcgatgggagccgccggggaactgcatgactcacaggtactgtgg

SEQ ID NO: 232330 - DNA, 75 bp, synthetic construct
  source 1..75: mol_type = other DNA
attttgcgctatcacatttcgggtccgctggacgatccgcaaatcaacgaagtgttgcgccaaccgcgtaaagaa

SEQ ID NO: 232331 - DNA, 75 bp, synthetic construct
  source 1..75: mol_type = other DNA
aaaagcggtactgaattgtcagtgacgccagcggctaaccctgcaatccctgcgggaacaaaatttagtattctg

SEQ ID NO: 232332 - DNA, 75 bp, synthetic construct
  source 1..75: mol_type = other DNA
gccttcagatggcggtgaatgatccggatgtgcgcggcattttgctggatatcgacagcccgggcggtcaggctg

SEQ ID NO: 232333 - DNA, 75 bp, synthetic construct
  source 1..75: mol_type = other DNA
tacgacgatgaagggtatttaaacgtcgaattcttacagatgtttaatagtgagtttgcaaatttaacggtactg

SEQ ID NO: 232334 - DNA, 75 bp, synthetic construct
  source 1..75: mol_type = other DNA
atggaatgtcggtccctgagcatccggctaaccggattttttatgtcagaaatgaacaaaaaataaactctacaa

SEQ ID NO: 232335 - DNA, 75 bp, synthetic construct
  source 1..75: mol_type = other DNA
cggaagccattggtaaaggaattaccgtctccgaatttaaacgtcatttaaatgataacaaaaatcctgttcatg

SEQ ID NO: 232336 - DNA, 75 bp, synthetic construct
  source 1..75: mol_type = other DNA
aatttgaaatctatgagatcagtttagttactgtacccgctgatactaatgcgggaattggtcgttctctcgaaa

SEQ ID NO: 232337 - DNA, 75 bp, synthetic construct
  source 1..75: mol_type = other DNA
tcagaaaatgcagacctacgccgcctgaataaaaatggtgcagtactttataaccataatcgtgatgatcttatt

SEQ ID NO: 232338 - DNA, 75 bp, synthetic construct
  source 1..75: mol_type = other DNA
actatcgtgactgcggcaatgccctgaaggttgatctggtgcaacagcctgagctattagccgaacccatttatg

SEQ ID NO: 232339 - DNA, 75 bp, synthetic construct
  source 1..75: mol_type = other DNA
cggctgggctaagcgccgagttagctgcgctctggtttcagccagtaagtgatgcgatgaaagagttcggcatca

SEQ ID NO: 232340 - DNA, 75 bp, synthetic construct
  source 1..75: mol_type = other DNA
aggctggagcttccacatcaaatgtggagagaaaacatgtgatttcactgcgattgactgatgaggaatatcagt

SEQ ID NO: 232341 - DNA, 75 bp, synthetic construct
  source 1..75: mol_type = other DNA
atcagaattgtgaaatttggttttgtgcaccatctgttttctctgctggcgcagcaggtgtcaggtgttcaggct

SEQ ID NO: 232342 - DNA, 75 bp, synthetic construct
  source 1..75: mol_type = other DNA
tacctggttatgagggtaaatactctgtaaccaaagacggtcgtgtttattcacatttaagaggcaggtttttga

SEQ ID NO: 232343 - DNA, 75 bp, synthetic construct
  source 1..75: mol_type = other DNA
ttgcaaccggcgatggggttaccaagcggatattcagcgggctacagctacgaatattttggcggcaatgccact

SEQ ID NO: 232344 - DNA, 75 bp, synthetic construct
  source 1..75: mol_type = other DNA
tcggcgtaacggtcgttacgcattgtgcaccatgtgcatcggtgtcggtcagggcatcgccatgattctggagcg

SEQ ID NO: 232345 - DNA, 75 bp, synthetic construct
  source 1..75: mol_type = other DNA
gtagaagaactatagaaaataaatttttaaacatgattaatgattttgaatatattcattatgggtgggattccg

SEQ ID NO: 232346 - DNA, 75 bp, synthetic construct
  source 1..75: mol_type = other DNA
cgttagcgtttcgtttgctggaagatgaattgctgattgcgctgccgggtgaggaatttacggtagccgctgtca

SEQ ID NO: 232347 - DNA, 75 bp, synthetic construct
  source 1..75: mol_type = other DNA
ggggatgtcagaagctgattcgcatgcctttattgaagatgtggaggcggcgtggatggaatactgcgatccggt

SEQ ID NO: 232348 - DNA, 75 bp, synthetic construct
  source 1..75: mol_type = other DNA
tgcgtgccggggtggaaataaaccgacacggaaaagcgctggcctaccatgttcaggatgatgactggcccggct

SEQ ID NO: 232349 - DNA, 75 bp, synthetic construct
  source 1..75: mol_type = other DNA
accggggccgccttcagtctggtaatgcccttcttacccctctacgttgagcagcttggcgttaccggccactcc

SEQ ID NO: 232350 - DNA, 75 bp, synthetic construct
  source 1..75: mol_type = other DNA
gaagtgggtaaaaatctcactggcaaatataaaaaagccagcgttttgtattgcaaccggcgatggggttaccaa

SEQ ID NO: 232351 - DNA, 75 bp, synthetic construct
  source 1..75: mol_type = other DNA
cgatcgacacgggtactttgaggctgaacttccggcgcttacgcgtgctatagatactatcgatttcgaacgatt

SEQ ID NO: 232352 - DNA, 75 bp, synthetic construct
  source 1..75: mol_type = other DNA
cgcgttattacgccaccaatacggtaaagctgggcggggtccgtattccgcatctttatccgggggattcactga

SEQ ID NO: 232353 - DNA, 75 bp, synthetic construct
  source 1..75: mol_type = other DNA
actgagcgtcagacccctaaggcaaaagaaacgctcgatatcatgcaaggtctttacgaaactcataagcttttg

SEQ ID NO: 232354 - DNA, 75 bp, synthetic construct
  source 1..75: mol_type = other DNA
agcgaaagaactgaatgatgattcaaccgtcaatttcctgcgcgatctggaaaaagaacagcagcatgatggcct

SEQ ID NO: 232355 - DNA, 75 bp, synthetic construct
  source 1..75: mol_type = other DNA
aactctttgaagagttgtaatcaatacaactcgctaatggagaggcttgtctcacacgtgagacaagcttcctgt

SEQ ID NO: 232356 - DNA, 75 bp, synthetic construct
  source 1..75: mol_type = other DNA
tgaacaatctacaagcgacacatttcgaacaatttaattctgaatggtatggccaagcttatgctggatatttag

SEQ ID NO: 232357 - DNA, 75 bp, synthetic construct
  source 1..75: mol_type = other DNA
atgacatccaggcactacacagcttgcatggtcaacgtagagcattggcattaagcttaaatgagttaactgatg

SEQ ID NO: 232358 - DNA, 75 bp, synthetic construct
  source 1..75: mol_type = other DNA
caaaagaagtgaatttactctttcgcaaagttaaaaccacttacagtaaaggagtcgccaagaacggcagcggct

SEQ ID NO: 232359 - DNA, 75 bp, synthetic construct
  source 1..75: mol_type = other DNA
gtaaattactgccgtggtataaccccttgcaaaatctggctgactggctgcgtctggcactcggcagcgccattg

SEQ ID NO: 232360 - DNA, 75 bp, synthetic construct
  source 1..75: mol_type = other DNA
tgatttttgataagtacttacctataaaatgtgatcgttgtggaaaggacttaatagaaaaccatcatgaagaaa

SEQ ID NO: 232361 - DNA, 75 bp, synthetic construct
  source 1..75: mol_type = other DNA
aaaaataaaggactttcgattctttgatggtaaattaattgaaaatcacttagtcagaattggttactcaaaact

SEQ ID NO: 232362 - DNA, 75 bp, synthetic construct
  source 1..75: mol_type = other DNA
ctccaacagaaagggcttaacatctcttctaacgcgataccctgccctgcgtgtggtaatggagtgctacgcagg

SEQ ID NO: 232363 - DNA, 75 bp, synthetic construct
  source 1..75: mol_type = other DNA
tcaaaactttagtggcgaccaaagttacaaagacaaatcgatggactttaaattccgactatgggaagagtccga

SEQ ID NO: 232364 - DNA, 75 bp, synthetic construct
  source 1..75: mol_type = other DNA
gagcgtatggctgaggacaatgccagggttgcttttttcgggtacctgtacggtttgtcgcctgaattctcagcc

SEQ ID NO: 232365 - DNA, 75 bp, synthetic construct
  source 1..75: mol_type = other DNA
gcatccgtcgctggaccgtcgaatttaaaggccgctgcgactcgaaacatagcccgtattggcgcaagcgcgacc

SEQ ID NO: 232366 - DNA, 75 bp, synthetic construct
  source 1..75: mol_type = other DNA
taatattaataattcctcagttacttatattaatattgattccaatgatacagactatattactattggtatcga

SEQ ID NO: 232367 - DNA, 75 bp, synthetic construct
  source 1..75: mol_type = other DNA
gtattgatggtgataatctcacccaatattgtagtaaaaatgccaggagtgcttctgcgtggtttgaacacagta

SEQ ID NO: 232368 - DNA, 75 bp, synthetic construct
  source 1..75: mol_type = other DNA
taatattaataattcctcagttacttatattaatattgactccaatgatacagacgatattacttttgatattga

SEQ ID NO: 232369 - DNA, 75 bp, synthetic construct
  source 1..75: mol_type = other DNA
gcgaactataaagacaaagaactcgtccgtactatcattaatgacaacatagttgagaagattcatgatgatata

SEQ ID NO: 232370 - DNA, 75 bp, synthetic construct
  source 1..75: mol_type = other DNA
atggttacgttttggggaaattatgaggggatctctcagagcgcagcttacccagaatccatcaatgaaaataac

SEQ ID NO: 232371 - DNA, 75 bp, synthetic construct
  source 1..75: mol_type = other DNA
cgaagataaagttgaaaaaaggcttcaaaatcgccaggcgaaatatcaaaatgaaattaatcaactatctgcgcc

SEQ ID NO: 232372 - DNA, 75 bp, synthetic construct
  source 1..75: mol_type = other DNA
gatctgcggctgaccgggcagcagcgtgaggagaacgcacagcagtcctggatgatgtgcaacaacgagggcgca

SEQ ID NO: 232373 - DNA, 75 bp, synthetic construct
  source 1..75: mol_type = other DNA
gccagcgttatcagtaagcgccttgacgtgtcgatgagccgggcaaagtcgattgcccagaccgaacaggtcggc

SEQ ID NO: 232374 - DNA, 75 bp, synthetic construct
  source 1..75: mol_type = other DNA
gagacttctacgctgagaacggcaaccggtacaactgctactgcagccagatcccggtgctgcttaacgacgacg

SEQ ID NO: 232375 - DNA, 75 bp, synthetic construct
  source 1..75: mol_type = other DNA
ctgcagcaaccgaacagaaaattcccggtaactgttaccctgtcgataaagttattcaccatgataataacgaaa

SEQ ID NO: 232376 - DNA, 75 bp, synthetic construct
  source 1..75: mol_type = other DNA
ctttttggttcatcgtgctgtttgaaatgatgtcgctgtcttcctggtttctggtcattgccaggcaggataaaa

SEQ ID NO: 232377 - DNA, 75 bp, synthetic construct
  source 1..75: mol_type = other DNA
attacgcaattacatgctggtgtaactttagtcgcccgttttgccaccccttttgactttgccgatttaaccctg

SEQ ID NO: 232378 - DNA, 75 bp, synthetic construct
  source 1..75: mol_type = other DNA
taccagcgagcttcggttaaaaatctgaagggagtgatgaattacatcagacatctgcaggagcgtcattcccgg

SEQ ID NO: 232379 - DNA, 75 bp, synthetic construct
  source 1..75: mol_type = other DNA
cctttttttatttggtcctgaatttctttatttttttgataatacagcactacttatatgtttcttcacgcttac

SEQ ID NO: 232380 - DNA, 75 bp, synthetic construct
  source 1..75: mol_type = other DNA
tgttcctgctactgctactgctcttctttttcctgccgctctgattctgactactgcagtgttgtcctgtctgcc

SEQ ID NO: 232381 - DNA, 75 bp, synthetic construct
  source 1..75: mol_type = other DNA
cttaaatatatttttgaaaatgaattattttattcactattaaatactgataatttcaaaaaaccatttaactac

SEQ ID NO: 232382 - DNA, 75 bp, synthetic construct
  source 1..75: mol_type = other DNA
tcctgccgacccaggttgcggcattgctgggaacaaaagtgggctttacagcgtcggtggtcaccgccattccgt

SEQ ID NO: 232383 - DNA, 75 bp, synthetic construct
  source 1..75: mol_type = other DNA
gacagcctgaacgtagcagggatccacgttcttcagggcgtggaggatgtcaagttggcgctgtatgtgctggcg

SEQ ID NO: 232384 - DNA, 75 bp, synthetic construct
  source 1..75: mol_type = other DNA
aaagtgacttctcggctgagcgatgcgctgcgtaatggccgagtctggcaactagcgattatctacctgccattc

SEQ ID NO: 232385 - DNA, 75 bp, synthetic construct
  source 1..75: mol_type = other DNA
ctgcaataggatttaccaaaagccctcttggtatcattgcactctttattgttctcgtttatggatttgcctctt

SEQ ID NO: 232386 - DNA, 75 bp, synthetic construct
  source 1..75: mol_type = other DNA
tgttcctgcaacctactcgtatactcaatttaagcaagatgtgcttgaggctcttacagagcgcttcgggtctga

SEQ ID NO: 232387 - DNA, 75 bp, synthetic construct
  source 1..75: mol_type = other DNA
atatctgcaggagcgtcattcccggctattggtgcttcgtgctgagagatcccctcataatttccccaaagcgta

SEQ ID NO: 232388 - DNA, 75 bp, synthetic construct
  source 1..75: mol_type = other DNA
gtgaacgcactcctggccacactggagcgtcttctgagcctgctgtcggcctttgaggtcgtggtatggatgacg

SEQ ID NO: 232389 - DNA, 75 bp, synthetic construct
  source 1..75: mol_type = other DNA
ctgtataccggacagcctgcccgccgtggaatggctgacctacggcagcggttacctggcaggcatgaaactcgg

SEQ ID NO: 232390 - DNA, 75 bp, synthetic construct
  source 1..75: mol_type = other DNA
gatgaaataaacaatacttactgtaataacgattattacaatcaggtgacctgctccccgttgattagtacaccc

SEQ ID NO: 232391 - DNA, 75 bp, synthetic construct
  source 1..75: mol_type = other DNA
ccaggttcgccgccgtggtgtggacgcccgtcagccttcccgtgtcgctgtaacggtactcccggctctcctgcg

SEQ ID NO: 232392 - DNA, 75 bp, synthetic construct
  source 1..75: mol_type = other DNA
actgcggcagggcagcgtgagtgaagaaagccagcagtggcttgcgcagtgcgggctgacggcggaacagatggc

SEQ ID NO: 232393 - DNA, 75 bp, synthetic construct
  source 1..75: mol_type = other DNA
atcccttcgagggaattaagcctcttaaaagagccagggcagagccagatccgctaactcgtgacgaatttattc

SEQ ID NO: 232394 - DNA, 75 bp, synthetic construct
  source 1..75: mol_type = other DNA
tgcgaatggtcaggaaaaagcctatgtcgatatatcttgggctgactcctgatgcattaattactcactcacggc

SEQ ID NO: 232395 - DNA, 75 bp, synthetic construct
  source 1..75: mol_type = other DNA
ctggtttttgtctgccggatacagacagaatgtgttagggcaggaatgttttctgtttgcccctgcggggtatgc

SEQ ID NO: 232396 - DNA, 75 bp, synthetic construct
  source 1..75: mol_type = other DNA
atcgcgttcgttatgaaggctcaaaatcctcaaacccgttagcattccgtcactacaatcccgacgaactggtgt

SEQ ID NO: 232397 - DNA, 75 bp, synthetic construct
  source 1..75: mol_type = other DNA
agttgctgaaagtgtaccgggcgctactgactgaaggcgtttccctgcgcgatatcgtcaccatcgccaccgtgc

SEQ ID NO: 232398 - DNA, 75 bp, synthetic construct
  source 1..75: mol_type = other DNA
aattatgtttgtgctggcggtggtgccggggatgccgcacctgccgtttttgctgttcagcgccctgcttggctt

SEQ ID NO: 232399 - DNA, 75 bp, synthetic construct
  source 1..75: mol_type = other DNA
atcgaaacagagaatggtgaacaggcgaaggcgcggcaccgtagcctggcggaggtgttgcaggaggacacgggt

SEQ ID NO: 232400 - DNA, 75 bp, synthetic construct
  source 1..75: mol_type = other DNA
tgttcaactgaattaaactcgaaatcacaatcgcctgcattaggtttgggacatgagtttgctcatgcgcagtat

SEQ ID NO: 232401 - DNA, 75 bp, synthetic construct
  source 1..75: mol_type = other DNA
tcgacaacctgacccgcaacacaaaaacgaaggtggtcggtctttccggtacgcctttcgccaagttcctgggca

SEQ ID NO: 232402 - DNA, 75 bp, synthetic construct
  source 1..75: mol_type = other DNA
cacggtcaataagctgggttatcccgacgacattgaatatgactatctcccttcgtcgtctgacggcatggaaga

SEQ ID NO: 232403 - DNA, 75 bp, synthetic construct
  source 1..75: mol_type = other DNA
acgcagagaacggtaaccggtataactgctactgcagccagattccggtgctgctcaacgacgacggcagtattt

SEQ ID NO: 232404 - DNA, 75 bp, synthetic construct
  source 1..75: mol_type = other DNA
ggattacgtcgtcgcagaagcgcagcgaggcacgctggaggcttttaacaacctatcgcagcagtctcaggtgta

SEQ ID NO: 232405 - DNA, 75 bp, synthetic construct
  source 1..75: mol_type = other DNA
accttgtgatcactcccgaactgatttcccgagcgatagaaaatcaagagttcaccccatactttcagcccatat

SEQ ID NO: 232406 - DNA, 75 bp, synthetic construct
  source 1..75: mol_type = other DNA
gccagcgtcatcagcaagcgcctcgatgtgtcgatgtcgaaggccaagaccatcgctcagactgagcaggttggc

SEQ ID NO: 232407 - DNA, 75 bp, synthetic construct
  source 1..75: mol_type = other DNA
gatcccagtgctgctcaacgacgacggcagcatcttcaatgaggggctggctgagaaactggcgaaagagaggaa

SEQ ID NO: 232408 - DNA, 75 bp, synthetic construct
  source 1..75: mol_type = other DNA
ctttctgcgctaaagcctaccaccaggacaacgcacgcattctggcatggaaaggtcagaaccgtgcaagaggtg

SEQ ID NO: 232409 - DNA, 75 bp, synthetic construct
  source 1..75: mol_type = other DNA
taaaaaagtcatctacggtgacgcccggctcgcaactgatatggacctgagtaaatcaggttttttcccggataa

SEQ ID NO: 232410 - DNA, 75 bp, synthetic construct
  source 1..75: mol_type = other DNA
acggtgaccaaagaggaattgctgtatatcaggaaagatttgctgaccggacaccaaaatccaacaaaaggtaag

SEQ ID NO: 232411 - DNA, 75 bp, synthetic construct
  source 1..75: mol_type = other DNA
ctgtaaattattacatgacgacaatcgctggaatgtttcagtttgctgcagatcacggttacttagaagcaaatc

SEQ ID NO: 232412 - DNA, 75 bp, synthetic construct
  source 1..75: mol_type = other DNA
acggtttgacgagtggcctaacgggttaagcgatttcccgatggagatcacgccaaccgtctctaatttcatccg

SEQ ID NO: 232413 - DNA, 75 bp, synthetic construct
  source 1..75: mol_type = other DNA
ggaacacaacccggacctgaaataccagtgtcttattctcctggatgaatttacatcaatgggtaaatcggaggt

SEQ ID NO: 232414 - DNA, 75 bp, synthetic construct
  source 1..75: mol_type = other DNA
gcaaaaagaattagggcaagaatgctttctctttgcgcccgccggatacgcggaaactatcgaccaggccattaa

SEQ ID NO: 232415 - DNA, 75 bp, synthetic construct
  source 1..75: mol_type = other DNA
tgcgccctttgctggcgcgctacgcaaggttgtttgcaccggggctgcatgtgctgtcgtataacgaagtgccgg

SEQ ID NO: 232416 - DNA, 75 bp, synthetic construct
  source 1..75: mol_type = other DNA
actcaagccgggcgatgagattatggttctgccgaaatatgaatcgaaaaatattgaagttacccgtggtatttc

SEQ ID NO: 232417 - DNA, 75 bp, synthetic construct
  source 1..75: mol_type = other DNA
tctttacgacccgctgggccgcagggtggcaaaacgggtgtggcgacgtgaacgggacctgacgggctggatgtc

SEQ ID NO: 232418 - DNA, 75 bp, synthetic construct
  source 1..75: mol_type = other DNA
ttaaagagttaaccataaagcgtgataaatcagtagatgataaaaggactttatttgataacaaaagggacaagt

SEQ ID NO: 232419 - DNA, 75 bp, synthetic construct
  source 1..75: mol_type = other DNA
tctatttcccgatagcgtttccgtcagcggcgctgaatgtcattgtatcaccggtaggttcaccgggaaatttca

SEQ ID NO: 232420 - DNA, 75 bp, synthetic construct
  source 1..75: mol_type = other DNA
atgggtgaatcattactaggggtaatactttttataaagatctacaatattaataaaagggtgaaattaagtgat

SEQ ID NO: 232421 - DNA, 75 bp, synthetic construct
  source 1..75: mol_type = other DNA
aggggcgggtgaaaacgggcttccggaatactgtgtcagagttctggttacttattcctctggtattaagtgggt

SEQ ID NO: 232422 - DNA, 75 bp, synthetic construct
  source 1..75: mol_type = other DNA
ggcaatatttatttaacattcagtcgacaggaatactggcagaccgatgaggtcgaacgtttattacagttcggc

SEQ ID NO: 232423 - DNA, 75 bp, synthetic construct
  source 1..75: mol_type = other DNA
gattggcccgctggcgacgccagacgtgctgcactggaccgactccctgcctaaaacccgctccggcaaaattat

SEQ ID NO: 232424 - DNA, 75 bp, synthetic construct
  source 1..75: mol_type = other DNA
catggaatttaatgcaatcctataacagtcatgatgatgaggttggcggtaatatgtccctgacctatgatggct

SEQ ID NO: 232425 - DNA, 75 bp, synthetic construct
  source 1..75: mol_type = other DNA
tgacgggctggatgtcgctgtcacggaaaccggaagtgacctggtacggctgggacggcgaccggctgaccacaa

SEQ ID NO: 232426 - DNA, 75 bp, synthetic construct
  source 1..75: mol_type = other DNA
gatggtggcgcaccgtcacacgggccggccggaaatccgttaccgttacgacagcgacgggcgggtgacagaaca

SEQ ID NO: 232427 - DNA, 75 bp, synthetic construct
  source 1..75: mol_type = other DNA
ggaaatgcgccgcaaatatgatgagtacggacgtctgattcaggaaaccgcccctgacggcgatatcacccgcta

SEQ ID NO: 232428 - DNA, 75 bp, synthetic construct
  source 1..75: mol_type = other DNA
tcgtgcggcctgacggtggcgcagatgcaaagccagatggacccggtatacacgccggcgcgaaaaattcacctg

SEQ ID NO: 232429 - DNA, 75 bp, synthetic construct
  source 1..75: mol_type = other DNA
aagaaagtttattttatctaaatgttctggatatccctccaaacaacccacaaaatgcaggaaaaaacaaaatta

SEQ ID NO: 232430 - DNA, 75 bp, synthetic construct
  source 1..75: mol_type = other DNA
atgaatattcgccgtaaaaaccgcttgtggattgcctgtgctgtgttggcaggtttggcgctgaccatcggtctg

SEQ ID NO: 232431 - DNA, 75 bp, synthetic construct
  source 1..75: mol_type = other DNA
gtgctatatgcgctgcgctcgaatatcgatctcttttatacgccgggggagattctctacggcaagcgtgaaact

SEQ ID NO: 232432 - DNA, 75 bp, synthetic construct
  source 1..75: mol_type = other DNA
gcgccggtagataaaaaaagcctgtctcaattaaatatcaaaaagaaagataatgccatctcaataaacaatgaa

SEQ ID NO: 232433 - DNA, 75 bp, synthetic construct
  source 1..75: mol_type = other DNA
atatcattttctcgcccccaaaataatgaaatttcagaacagggtgcaatctgtttatttttaccgtttgtaaaa

SEQ ID NO: 232434 - DNA, 75 bp, synthetic construct
  source 1..75: mol_type = other DNA
attacgtttgaaaaacccgatgacgatactattgcaaatcatggcgcaatatgcatatttttaccatttgagaaa

SEQ ID NO: 232435 - DNA, 75 bp, synthetic construct
  source 1..75: mol_type = other DNA
acaacacacgcaccttcattactcaatagagtagaaccagaaaatataaggtattttcgtctacatgataataaa

SEQ ID NO: 232436 - DNA, 75 bp, synthetic construct
  source 1..75: mol_type = other DNA
gatgtacagcctgatcgttagctgcaaacttaacggaatcgagccggaaacgtggctacgccacgtgatcagagt

SEQ ID NO: 232437 - DNA, 75 bp, synthetic construct
  source 1..75: mol_type = other DNA
ttagcgatttcaatagatgcgcttgaaccacctgatttaacattaatacttattgaagaacccgaaaaccatctt

SEQ ID NO: 232438 - DNA, 75 bp, synthetic construct
  source 1..75: mol_type = other DNA
aggcaatcatatcctcgcgaaagaagtgctggcgaaacacgatgaaaactacacgccgccagaagtcgagaaagc

SEQ ID NO: 232439 - DNA, 75 bp, synthetic construct
  source 1..75: mol_type = other DNA
aactctgcgggcaagtgttaatgttaatcctcaagctcaagtattgataccaggcgaatatacaatgacactcca

SEQ ID NO: 232440 - DNA, 75 bp, synthetic construct
  source 1..75: mol_type = other DNA
ggtgggcgatatgttaatcatttttggaagcttttaaatgagctttcaattcctcatgtaactcttcttgattac

SEQ ID NO: 232441 - DNA, 75 bp, synthetic construct
  source 1..75: mol_type = other DNA
tgacgccacagagcgacattcgcgaccggactgaaggccgtctggcgacacctggcgcatttggttttgggcata

SEQ ID NO: 232442 - DNA, 75 bp, synthetic construct
  source 1..75: mol_type = other DNA
gcaaaaatcagccctacaccccgcatttctgcgccggcagctgaagcgccccgttcggttgctgcgctcaccccc

SEQ ID NO: 232443 - DNA, 75 bp, synthetic construct
  source 1..75: mol_type = other DNA
catgggcggcatttgatccgtacatcagtctgaacaccgcggcgaccatcctgagtgaatgccgtcgtcgtcatc

SEQ ID NO: 232444 - DNA, 75 bp, synthetic construct
  source 1..75: mol_type = other DNA
tattttcctatgacgacaggacagagtttgaaacagaggctgattttctactgtgggtaaaaagggcaaaccccg

SEQ ID NO: 232445 - DNA, 75 bp, synthetic construct
  source 1..75: mol_type = other DNA
cgccagatgatgcagcaggcactgaaatagctaatgcggcgtttgtccgcaaactgctcgctgcactggtggatt

SEQ ID NO: 232446 - DNA, 75 bp, synthetic construct
  source 1..75: mol_type = other DNA
ggaagccgccgctggcagcgaacaacaggcaggacaacacgccactgatgcacagcagattaaggccgactgtca

SEQ ID NO: 232447 - DNA, 75 bp, synthetic construct
  source 1..75: mol_type = other DNA
ggattttaaggggtgcttcttttctggacagaacttcagtaactatgatattaaatatgtgaactggggaacgtc

SEQ ID NO: 232448 - DNA, 75 bp, synthetic construct
  source 1..75: mol_type = other DNA
ggaccatatctgagtttattatgacttttatgcaatgtgtttttattaaatacaaaggcatacggataattgact

SEQ ID NO: 232449 - DNA, 75 bp, synthetic construct
  source 1..75: mol_type = other DNA
ccattgttgtttgccgctaccagcgacagccagttaagcaaaacggaaatcagtagcatcaagataaatagttaa

SEQ ID NO: 232450 - DNA, 75 bp, synthetic construct
  source 1..75: mol_type = other DNA
tcgatcttctggttttctttgctcaacacagtggcgaagtagactggccccctgaatctccagacaaccagtatc

SEQ ID NO: 232451 - DNA, 75 bp, synthetic construct
  source 1..75: mol_type = other DNA
gcgtgattatattgtgattgtggcggccagaacagccgtaacaaactgttatgcaaaaaaaatggcaataattaa

SEQ ID NO: 232452 - DNA, 75 bp, synthetic construct
  source 1..75: mol_type = other DNA
aaaaacggtgtgggaagaccttctcgttaaactaaagctggagaacaaagaaaatgcggtttctgaagttcataa

SEQ ID NO: 232453 - DNA, 75 bp, synthetic construct
  source 1..75: mol_type = other DNA
atgtctgtattaatttctggtgtgctgactgatggcgcaggactccccatgtccggataccatattattctgaaa

SEQ ID NO: 232454 - DNA, 75 bp, synthetic construct
  source 1..75: mol_type = other DNA
gcctgaggtggaacgccgtgaagcgaccagcaccgcacttgccattcccgttgaaacgctaaacgccctttgcgg

SEQ ID NO: 232455 - DNA, 75 bp, synthetic construct
  source 1..75: mol_type = other DNA
tattgcagcaggatcaggtattacgccaatgctggcgattatcgccaccactttacaaaccgagcttacaaaccg

SEQ ID NO: 232456 - DNA, 75 bp, synthetic construct
  source 1..75: mol_type = other DNA
ccaatgctggcgattatcgccaccactttacaaaccgagcctgaaagtcagttcaccctgatctacggtatgggc

SEQ ID NO: 232457 - DNA, 75 bp, synthetic construct
  source 1..75: mol_type = other DNA
tcacattgtatgggggaatgcaggctgctgagaattacggctctgctgcgctgggagtcggtaaagatcttggcg

SEQ ID NO: 232458 - DNA, 75 bp, synthetic construct
  source 1..75: mol_type = other DNA
gcacgctgcggcgtgattttcgtgagcggctgatgtatctggacctggagtatcagtccggatattgccgcttac

SEQ ID NO: 232459 - DNA, 75 bp, synthetic construct
  source 1..75: mol_type = other DNA
cgactgatgtatctgggcctggagtatcagtccggatattgccgcttacgcactgctggcagtgagatgcagatg

SEQ ID NO: 232460 - DNA, 75 bp, synthetic construct
  source 1..75: mol_type = other DNA
ctcaaacgtagagattatttatcggccgggaagaaatgttgattttccggtaatgaataacattatcacgtgcta

SEQ ID NO: 232461 - DNA, 75 bp, synthetic construct
  source 1..75: mol_type = other DNA
tggtagtattactggttacagagtgtgctaatgacaaccagataactgcgctgttaaattacattttactgactg

SEQ ID NO: 232462 - DNA, 75 bp, synthetic construct
  source 1..75: mol_type = other DNA
ggtgcgctctttacctccaaaagcaccaacgccagcaaacgaacgctgtacatgctcattcgtgcccgtgtcgtt

SEQ ID NO: 232463 - DNA, 75 bp, synthetic construct
  source 1..75: mol_type = other DNA
agagcgccatcaggaaattctttctgagcaattgaaatctgatgtcagtaatagccgtttgatgattgccaaccc

SEQ ID NO: 232464 - DNA, 75 bp, synthetic construct
  source 1..75: mol_type = other DNA
ctgcaagaagattaacggagaacgaatatctacccgttctccgccaaaaatcattacgctggcatcgcctcacgc

SEQ ID NO: 232465 - DNA, 75 bp, synthetic construct
  source 1..75: mol_type = other DNA
taactcaagataaaaaatccgttccagcaggatttaaagtcacagaaatcggagttattcctgaggactggactt

SEQ ID NO: 232466 - DNA, 75 bp, synthetic construct
  source 1..75: mol_type = other DNA
ttgcacatcagtttatgtgcggtattgatggctgaagcctgtaatatcggactggagccgctgctaaagcacaat

SEQ ID NO: 232467 - DNA, 75 bp, synthetic construct
  source 1..75: mol_type = other DNA
tcaactcaggatctaacagaaaatattttggttctggacgaggcatcacctggtataacttcgtatctgatcagt

SEQ ID NO: 232468 - DNA, 75 bp, synthetic construct
  source 1..75: mol_type = other DNA
tccgggcagaaacgctggtcagcgccaatgcccgcctggttgattttcagtccacactggagcttgctggccgct

SEQ ID NO: 232469 - DNA, 75 bp, synthetic construct
  source 1..75: mol_type = other DNA
gcttacggcgcaggagcttaccgcaatgaacctgcccgatatgctgtcgctggccgctaaggtgattggtttttt

SEQ ID NO: 232470 - DNA, 75 bp, synthetic construct
  source 1..75: mol_type = other DNA
atcaacggcgcgcgctctgttttggtaacgccgtgcgtcgcggcaacatcggtattgttggcgcatccggcaccg

SEQ ID NO: 232471 - DNA, 75 bp, synthetic construct
  source 1..75: mol_type = other DNA
ttgaagaactgttcaacaccaaagcgcaaagcggctcgcacgaggcgcgttacgccactattgccagcgccaaaa

SEQ ID NO: 232472 - DNA, 75 bp, synthetic construct
  source 1..75: mol_type = other DNA
ttcaagattcataatgacattaacatacaaaatcatgcaataaactcttcaacagacgcacatacacacaatgcc

SEQ ID NO: 232473 - DNA, 75 bp, synthetic construct
  source 1..75: mol_type = other DNA
aacacaacaggaaatgtaagctggacaatcatcagtgattacggtgcagcaggcgacgtacacaacgcttctttg

SEQ ID NO: 232474 - DNA, 75 bp, synthetic construct
  source 1..75: mol_type = other DNA
tttcccgcctgcaacagcaaataaaacagtgggacgatgactactggaaggaaaaagtgaggtggaagacggtgt

SEQ ID NO: 232475 - DNA, 75 bp, synthetic construct
  source 1..75: mol_type = other DNA
aagcaaaagcagtaacaatgggacatataaaacgagagcatttgtcccaagcaaaatgcctaatgccttcatctg

SEQ ID NO: 232476 - DNA, 75 bp, synthetic construct
  source 1..75: mol_type = other DNA
tccattatcagacgcggatttcgcgctgttggtgatactacccactcgcttattgcaaccgtgccgagaagagga

SEQ ID NO: 232477 - DNA, 75 bp, synthetic construct
  source 1..75: mol_type = other DNA
ttaatgtaacagaagatacaattgatgggttgaaagagttcgataaatataaaacacggatactggattcgggga

SEQ ID NO: 232478 - DNA, 75 bp, synthetic construct
  source 1..75: mol_type = other DNA
attaaatctaatggcaaccatatgcagatcatgtttgactgggttagcagaataacctcgtcggattactctggt

SEQ ID NO: 232479 - DNA, 75 bp, synthetic construct
  source 1..75: mol_type = other DNA
aggcttcaaaatcgccaggctgaatatcaaaatgaaattaatcaactatatgcgctaggtgttaattttgatgat

SEQ ID NO: 232480 - DNA, 75 bp, synthetic construct
  source 1..75: mol_type = other DNA
caaaaaactcggccaaaccctcatcaatgaaaatgtagtagagaatactcatgatatcaataacaagaaaatgat

SEQ ID NO: 232481 - DNA, 75 bp, synthetic construct
  source 1..75: mol_type = other DNA
gtattgatgatcgtagtgatattggcattgactccaatgatacagacgatattacttttgatattgatattgata

SEQ ID NO: 232482 - DNA, 75 bp, synthetic construct
  source 1..75: mol_type = other DNA
agtccccgggctgatatcgaaccggcaaccggtacggctccccgctgtgctgccgttaatgtgacgcgcagagag

SEQ ID NO: 232483 - DNA, 75 bp, synthetic construct
  source 1..75: mol_type = other DNA
atcgttcctgcgatggggcaggcaccgtggtgccgtaaggtaacgctgaataaggtggagacaactgatgaatga

SEQ ID NO: 232484 - DNA, 75 bp, synthetic construct
  source 1..75: mol_type = other DNA
gcagatcaatgatgctgtccgtgctgtactgcttgccagtgccggtgggaacgacctggatcaggttggcgcgaa

SEQ ID NO: 232485 - DNA, 75 bp, synthetic construct
  source 1..75: mol_type = other DNA
gagctgcaatttccttattgattagttggatagttctttttttatttacatgcgtcattatattttatgttagaa

SEQ ID NO: 232486 - DNA, 75 bp, synthetic construct
  source 1..75: mol_type = other DNA
gcgcatattaatggacaaaaatacaaccgaacaaacagcaaaggccaggttgtttacgacctgatgatacctcat

SEQ ID NO: 232487 - DNA, 75 bp, synthetic construct
  source 1..75: mol_type = other DNA
tagcagaaatttggccgcgtgattattctatgctagcccgccgagtacagttcctgcgttttaatgattatcgtg

SEQ ID NO: 232488 - DNA, 75 bp, synthetic construct
  source 1..75: mol_type = other DNA
ggtttgaaagcagtaaagctatcatggcagaatcatttgcaactggttccgatcatcagtggtcgagcaataaga

SEQ ID NO: 232489 - DNA, 75 bp, synthetic construct
  source 1..75: mol_type = other DNA
agagttgccgctctggagctggcgttaaacaaaaaccaaaaccccataagagcacataatgactacataaataaa

SEQ ID NO: 232490 - DNA, 75 bp, synthetic construct
  source 1..75: mol_type = other DNA
cagcgcggttttgacggccggacgcaacgttaccactatgacctgaccagaaaactcacacagagtgaagacgag

SEQ ID NO: 232491 - DNA, 75 bp, synthetic construct
  source 1..75: mol_type = other DNA
atgtggataagagaccggctcagttgctgcccgccttatttgtctgagggacctttcccggatggtcgtcgactg

SEQ ID NO: 232492 - DNA, 75 bp, synthetic construct
  source 1..75: mol_type = other DNA
atgtctgagagacatttccgggatgtctgtcgactggtttacttaactgcgatggttaaagctggcagtaatgcc

SEQ ID NO: 232493 - DNA, 75 bp, synthetic construct
  source 1..75: mol_type = other DNA
attcgaactgcttcaggcacggcaggttattgagagtaatataacaggttttgccgcaacgcaaatcaggcttaa

SEQ ID NO: 232494 - DNA, 75 bp, synthetic construct
  source 1..75: mol_type = other DNA
gtgaccactctcgtatttgaaatggcagatatcaataaactgatcgaagaaattcgcaccgcaaaaacgttttcg

SEQ ID NO: 232495 - DNA, 75 bp, synthetic construct
  source 1..75: mol_type = other DNA
tgaaaaaaacatttgccgatccagcgcactacacaatttggcttaagcgtaattgtgctattcatgaacattttc

SEQ ID NO: 232496 - DNA, 75 bp, synthetic construct
  source 1..75: mol_type = other DNA
catgaagagtatccgcagcggcacaaaaagtatcgtggggaagcacttcagtgtgtctatggaacatcattcttt

SEQ ID NO: 232497 - DNA, 75 bp, synthetic construct
  source 1..75: mol_type = other DNA
gttctggatgccgctaccagaaccgccgcaggaggcgaaatgatggatgtaaaagagaaggttttgcaggtgatg

SEQ ID NO: 232498 - DNA, 75 bp, synthetic construct
  source 1..75: mol_type = other DNA
cgctaatgatgggtgggtaatacctggtgcgtcgtggataccatcacactggatgccgctaccagaaccgccgca

SEQ ID NO: 232499 - DNA, 75 bp, synthetic construct
  source 1..75: mol_type = other DNA
agccggcgtatcggcatcttgacactcgtttgctggtagccgcccgttctttagggttatccgattggcgtgtgc

SEQ ID NO: 232500 - DNA, 75 bp, synthetic construct
  source 1..75: mol_type = other DNA
gttcctcatcgttcagttctggaatggctatctgaccggatgggttcagagggatttaaatgaggggcgggtgaa

SEQ ID NO: 232501 - DNA, 75 bp, synthetic construct
  source 1..75: mol_type = other DNA
tcagtgctcagcaattatgatggtgcaggcatggcgctggtctccttatgcactggcaggcacgttccttcttgt

SEQ ID NO: 232502 - DNA, 75 bp, synthetic construct
  source 1..75: mol_type = other DNA
gcaagagcttatcgttaccattaacaaatatgccagtcagttggcagcagaaccgatagcgactaatgacgttcg

SEQ ID NO: 232503 - DNA, 75 bp, synthetic construct
  source 1..75: mol_type = other DNA
caacgttgaatgttggttccggtacgatgatgagtggtgatattactgccggctcaaatgcgaccattaatattg

SEQ ID NO: 232504 - DNA, 75 bp, synthetic construct
  source 1..75: mol_type = other DNA
aaggttaaacgtgagcgtttgctgctcgagcattttgttgtgatcagggaggcggctttcactcattcggaatgg

SEQ ID NO: 232505 - DNA, 75 bp, synthetic construct
  source 1..75: mol_type = other DNA
ttggggctgtcgattatggcggtgggcggttatgcccgctacatggagcgcataggggccagtcgcgcgatggtg

SEQ ID NO: 232506 - DNA, 75 bp, synthetic construct
  source 1..75: mol_type = other DNA
aagaacttaatctagagcagattgaagagctattatcagatttttattcatattttattcatgacagaaagcaga

SEQ ID NO: 232507 - DNA, 75 bp, synthetic construct
  source 1..75: mol_type = other DNA
gtccagaaatacttataaaattcgggcaaatcaactggagacaataaaagaaaaattgggagagattttactgac

SEQ ID NO: 232508 - DNA, 75 bp, synthetic construct
  source 1..75: mol_type = other DNA
gcaaatcattatatatacaaaaactactctcccgctgccttaattgaaaaacttaaagggttcgactcatttact

SEQ ID NO: 232509 - DNA, 75 bp, synthetic construct
  source 1..75: mol_type = other DNA
tcgcacagagactgctggggcataaaaatttaacaatgaccaaaaaatacctggacgcacgcggtgcagaatatg

SEQ ID NO: 232510 - DNA, 75 bp, synthetic construct
  source 1..75: mol_type = other DNA
gtacgtcatcaggcattttgtatacaggcgatatctacgcaccagaagctaatgtcagcattgataacacttcat

SEQ ID NO: 232511 - DNA, 75 bp, synthetic construct
  source 1..75: mol_type = other DNA
agcaacggcctggaatctcaaggggaccggatcctcgctgaatattggttctggcaccaacgtcaatggcgacat

SEQ ID NO: 232512 - DNA, 75 bp, synthetic construct
  source 1..75: mol_type = other DNA
ccaataattccactgttactttgggtagtgaagatctttatatagataccaatgatggtaatggcgtaaaaacga

SEQ ID NO: 232513 - DNA, 75 bp, synthetic construct
  source 1..75: mol_type = other DNA
attaaaatataaactcattcgttctgtttattttatgttattagtaaccatacctgtttcatttattgcgtattt

SEQ ID NO: 232514 - DNA, 75 bp, synthetic construct
  source 1..75: mol_type = other DNA
cttgccggtgctgcaggtgcagccaccggcgaggtggtgggaatgatagccacacagatgtacggtaagccggtg

SEQ ID NO: 232515 - DNA, 75 bp, synthetic construct
  source 1..75: mol_type = other DNA
gtgagtttattaacggattcacgaaagaagcattaaataacccatctgaagaaaaatcaggggcaaaaaatgatt

SEQ ID NO: 232516 - DNA, 75 bp, synthetic construct
  source 1..75: mol_type = other DNA
caacagcgtttgagaaagccatgcagcaagcgcaaaaagcgattaatgcactgacgcagggtgcgaagtctgatt

SEQ ID NO: 232517 - DNA, 75 bp, synthetic construct
  source 1..75: mol_type = other DNA
gcacgcgagcaaacgtatttcgtcgacaagacggccgatcatagagaaaaccgtctgtggatgatggccaacatg

SEQ ID NO: 232518 - DNA, 75 bp, synthetic construct
  source 1..75: mol_type = other DNA
gcacgcgagcaaacgtatttcgtcgacaacacggctgatcatagagaaaaccgactgtggatgatggccaacatg

SEQ ID NO: 232519 - DNA, 75 bp, synthetic construct
  source 1..75: mol_type = other DNA
gcacgcgagcaaacgtatttcgtcgacaatacggccgatcatagagaaaaccggctgtggatgatggccaacatg

SEQ ID NO: 232520 - DNA, 75 bp, synthetic construct
  source 1..75: mol_type = other DNA
tgagtatcctcgtagagactcctcattagagaaactttctgtgttacgtccagcatttgaaaaaaatggtaccgt

SEQ ID NO: 232521 - DNA, 75 bp, synthetic construct
  source 1..75: mol_type = other DNA
gaaaactattatcgatgctgcaatgaaaattcgtagtggagatatggatgttgttgttacggcaggcatagagaa

SEQ ID NO: 232522 - DNA, 75 bp, synthetic construct
  source 1..75: mol_type = other DNA
cagttccaaggggttccagtaccttcacacccgcgacttcgttactgcgctgcgccggcgcggcatccatttttc

SEQ ID NO: 232523 - DNA, 75 bp, synthetic construct
  source 1..75: mol_type = other DNA
cgggaagccattcctggcgtgcgcttatgtattcattgtcagcaggagaaagatttacaaaaaccagcttataca

SEQ ID NO: 232524 - DNA, 75 bp, synthetic construct
  source 1..75: mol_type = other DNA
ccatccgccgccgtctgatgggaacgcgtggactggtgattgtggatgaggcggatcatcttggtattgacggtc

SEQ ID NO: 232525 - DNA, 75 bp, synthetic construct
  source 1..75: mol_type = other DNA
gatgggctgtattaacgttattgtgggcgtaccgggtgtgggtaaaacggccactgcccgtaattactgccagga

SEQ ID NO: 232526 - DNA, 75 bp, synthetic construct
  source 1..75: mol_type = other DNA
gcacgcgagcaaacgtatttcgtcgacaaaacggctgatcatagagaaaaccgcctgtggatgatggccaacatg

SEQ ID NO: 232527 - DNA, 75 bp, synthetic construct
  source 1..75: mol_type = other DNA
atgcttcgacagtcagacatcgccgcggctttccgcgagtccattttgcgcagttccaaggggttccagtacctc

SEQ ID NO: 232528 - DNA, 75 bp, synthetic construct
  source 1..75: mol_type = other DNA
ttaattttgatgaggctagcgtccagggaatgggcatttccatactccgtggagaggaaaatatccccattgata

SEQ ID NO: 232529 - DNA, 75 bp, synthetic construct
  source 1..75: mol_type = other DNA
aacagacccaaaaacagaactcttagctgcatggaaaataaccaaagacacccaaaaacggatcacggaacccaa

SEQ ID NO: 232530 - DNA, 75 bp, synthetic construct
  source 1..75: mol_type = other DNA
ggtcaccacgcagccggacggcacggtggagatcattgtcaccagtcagacggcaggcaccagtacagtcaccgc

SEQ ID NO: 232531 - DNA, 75 bp, synthetic construct
  source 1..75: mol_type = other DNA
ttaatgagaatgttctcaataaggtaaagataaatatacctacgtttaataatgttcctgcatataattatatgg

SEQ ID NO: 232532 - DNA, 75 bp, synthetic construct
  source 1..75: mol_type = other DNA
ttcggtagtgcactagagttagctgagtattacaagttgaaaaaaggcaagatagggcctcttagaagctggatg

SEQ ID NO: 232533 - DNA, 75 bp, synthetic construct
  source 1..75: mol_type = other DNA
agcgtgttggcgggcaacagcgcaacggttgctccgacggtcaccacgcagccggatggcacggtggagatcagt

SEQ ID NO: 232534 - DNA, 75 bp, synthetic construct
  source 1..75: mol_type = other DNA
gccggtgtttatactgctacatggtcggcgcaaatggcgggagactctcaccacgcgacgctgaagttgtctgaa

SEQ ID NO: 232535 - DNA, 75 bp, synthetic construct
  source 1..75: mol_type = other DNA
attctatgcagtgggtcgagcagaataatggtgaatataccattgtctggacagcatgggttgccgaggaaaatc

SEQ ID NO: 232536 - DNA, 75 bp, synthetic construct
  source 1..75: mol_type = other DNA
ccgccctggccatatctctactattcgcttcacctgtttttgctgcagatgaaggatctggtgaaatccacttta

SEQ ID NO: 232537 - DNA, 75 bp, synthetic construct
  source 1..75: mol_type = other DNA
aaatctgggaatctgccaaccagatgcggtctaaaattgaagctaacgaatacaaagattacatactcggtttta

SEQ ID NO: 232538 - DNA, 75 bp, synthetic construct
  source 1..75: mol_type = other DNA
gctgcatggaaaataaccaaagacacccaaattttccatcaaagacacccaaaaacggatcacggaacccaaaga

SEQ ID NO: 232539 - DNA, 75 bp, synthetic construct
  source 1..75: mol_type = other DNA
ttcgatagcacggctaagacaactggtgctacgcctttgttgagcaacaccagtgcaggcgaagcaactggggtc

SEQ ID NO: 232540 - DNA, 75 bp, synthetic construct
  source 1..75: mol_type = other DNA
ccgcactggccgtatctctgctgttcactgcacctatttatgctgctgatgaaggttctggcgaaattcacttta

SEQ ID NO: 232541 - DNA, 75 bp, synthetic construct
  source 1..75: mol_type = other DNA
tctttgcctggatggaacagatggataacgcagtttcggttaccgcgggggccgttactgctaacgcaacttacg

SEQ ID NO: 232542 - DNA, 75 bp, synthetic construct
  source 1..75: mol_type = other DNA
cactactgtggaagctaacggtagctggacggtgaatgtgccgccagccgatctcgctgccctgccggacggcgc

SEQ ID NO: 232543 - DNA, 75 bp, synthetic construct
  source 1..75: mol_type = other DNA
ggtgcgggtgctggatctggcggggaataccggcccggtggtgtcgaaaacggtggtggtcgatacgattaaccc

SEQ ID NO: 232544 - DNA, 75 bp, synthetic construct
  source 1..75: mol_type = other DNA
ggcggacggtagctggagcgtcagcgttcccacttcagccctgggcgcgctgagtgcaagcaattacaccgtcag

SEQ ID NO: 232545 - DNA, 75 bp, synthetic construct
  source 1..75: mol_type = other DNA
accgtcacgcttaatggcactaactaccagaccacggtgcaggcagacggcagctggagcttaacgctgcccgcc

SEQ ID NO: 232546 - DNA, 75 bp, synthetic construct
  source 1..75: mol_type = other DNA
acgcccaggcgcagattatcagcggctccgccacgggtgcggcaaccggcagcaccgtgacggtgactatcggca

SEQ ID NO: 232547 - DNA, 75 bp, synthetic construct
  source 1..75: mol_type = other DNA
ggcaatacgggcagcggcacgcgggatatcaccattgatgccaacctgccggggctgcgggtggatacggtagcg

SEQ ID NO: 232548 - DNA, 75 bp, synthetic construct
  source 1..75: mol_type = other DNA
ggcacctggagcgtgaccgttcccgccgccaacgttgacgcactggctgacggcaacgccacggtcaccgccagc

SEQ ID NO: 232549 - DNA, 75 bp, synthetic construct
  source 1..75: mol_type = other DNA
ccagccataatgtgcaggccaacagcgccttgcctggcgttaccattaacgcggtggcgaccgacgatattatca

SEQ ID NO: 232550 - DNA, 75 bp, synthetic construct
  source 1..75: mol_type = other DNA
cgcaggttagcgcctggcctgcggggacggtgtctattgctgtatccggggaaagtagcgccggaaatccgataa

SEQ ID NO: 232551 - DNA, 75 bp, synthetic construct
  source 1..75: mol_type = other DNA
gagcaacgccattggcaacactggcagcaacaatcacaccattaccgttgatctcagcgctccggcgatggccat

SEQ ID NO: 232552 - DNA, 75 bp, synthetic construct
  source 1..75: mol_type = other DNA
ggtcagtaccatcagcggcgataacctcattaacgccgccgaagcaggcagtgcgctgaccctgagtggcaccgg

SEQ ID NO: 232553 - DNA, 75 bp, synthetic construct
  source 1..75: mol_type = other DNA
aacggcaacagcgccaccacgacccacgcttacagcgtcgatgccagcgcgccaacggtgaccatcaacactatt

SEQ ID NO: 232554 - DNA, 75 bp, synthetic construct
  source 1..75: mol_type = other DNA
tgaaaggcgcgtctaacgagttcgacaaagaactgttccttgcgggcgaaatcactccggtattcttcggtactg

SEQ ID NO: 232555 - DNA, 75 bp, synthetic construct
  source 1..75: mol_type = other DNA
gcctgaatgtccagacctattacatggcgactgaatttgtaaaacgaggaatgggatgcagtattaccgatattt

SEQ ID NO: 232556 - DNA, 75 bp, synthetic construct
  source 1..75: mol_type = other DNA
tatcgaccgggactatcgacagggcgcggtagaaatagacaagattgaccaacaacgctggatttctcccggccc

SEQ ID NO: 232557 - DNA, 75 bp, synthetic construct
  source 1..75: mol_type = other DNA
atgaaactgcgccacctggaaatcttctatgccgtgatgacatgcgggacactttcccgggctgcggaatcgctg

SEQ ID NO: 232558 - DNA, 75 bp, synthetic construct
  source 1..75: mol_type = other DNA
gacttaccttcgggagctatccacgcagtcggaaatagctggactaggtacacatcttttccccattgctattga

SEQ ID NO: 232559 - DNA, 75 bp, synthetic construct
  source 1..75: mol_type = other DNA
gttatttttcgttctgagcctctacctaaaacggggaagccgctgccgatcaatttttcagaatcagagaccacc

SEQ ID NO: 232560 - DNA, 75 bp, synthetic construct
  source 1..75: mol_type = other DNA
atgggatgcagtattaccgatattttctctgcccgtcataaccttccggcagagacaattcaccccatcgaacca

SEQ ID NO: 232561 - DNA, 75 bp, synthetic construct
  source 1..75: mol_type = other DNA
aacaaacttgaccgtgatatccgcgacccgatggaattgctcgatgaagttgaaaacgagctgaaaatcggttgt

SEQ ID NO: 232562 - DNA, 75 bp, synthetic construct
  source 1..75: mol_type = other DNA
ggaggttatgagttacgtcttgcttaccgcaatcaggtctatagcagcagttttcgcgtggcaaactacatcaag

SEQ ID NO: 232563 - DNA, 75 bp, synthetic construct
  source 1..75: mol_type = other DNA
ggcggcctggcggccccccgtcacgggttgccggaaacggacttagtggaaagcggaatgacaggttcgtggcgg

SEQ ID NO: 232564 - DNA, 75 bp, synthetic construct
  source 1..75: mol_type = other DNA
ttcaacaaatgcccccggttttagcatcagaagcagcacccatggacaagggtattatttagtggttgagtttag

SEQ ID NO: 232565 - DNA, 75 bp, synthetic construct
  source 1..75: mol_type = other DNA
tggcttgatcctcgcgcagctgaaagagttgggctggacagataattccaccactgccacattctcagcaatcac

SEQ ID NO: 232566 - DNA, 75 bp, synthetic construct
  source 1..75: mol_type = other DNA
tcgccaaaaaagagttcaaaactggcgaagcggtcagcggtcagcggcaaactgcaactgctctacccggatggc

SEQ ID NO: 232567 - DNA, 75 bp, synthetic construct
  source 1..75: mol_type = other DNA
gttgctggcactggagcagatggcagaacaggggaaagcatggcccctgattgaaggtagcggcacgatttacgg

SEQ ID NO: 232568 - DNA, 75 bp, synthetic construct
  source 1..75: mol_type = other DNA
ttgaataaacttgaagccgttttactggaagatatcgaatcttacttcgataaaagcagtgaaatgaaggtcgac

SEQ ID NO: 232569 - DNA, 75 bp, synthetic construct
  source 1..75: mol_type = other DNA
aaatatcgccattacacgtgaaacggctgcgattgccattcgaaactggcgcacagcacgatctatggtcaacgg

SEQ ID NO: 232570 - DNA, 75 bp, synthetic construct
  source 1..75: mol_type = other DNA
gctggtctcatgagctgggagaaactgatttccataacacatacaacatggaccgtcggccacgcatgctaacgc

SEQ ID NO: 232571 - DNA, 75 bp, synthetic construct
  source 1..75: mol_type = other DNA
agacagacctgaatgatgtggataaaacaccatctctgatccacaaaactttgttaacagcttcgactatttatg

SEQ ID NO: 232572 - DNA, 75 bp, synthetic construct
  source 1..75: mol_type = other DNA
atccacattttgacgaagcctgtcgtgcattcgcactgcgccacaacctggtgcgactggcagaacgtgcaggca

SEQ ID NO: 232573 - DNA, 75 bp, synthetic construct
  source 1..75: mol_type = other DNA
tggtgcccgccgtacagggtctgatcaatgcccattctccagagtctaaggctaacgcagcgaaagcagcagcgc

SEQ ID NO: 232574 - DNA, 75 bp, synthetic construct
  source 1..75: mol_type = other DNA
agcagggcaaccgcacatactccggcggcggtgaactgtcagacgtcatcaaccttgtggagtccaagcaaaagg

SEQ ID NO: 232575 - DNA, 75 bp, synthetic construct
  source 1..75: mol_type = other DNA
tctcacagacgcgcagcgtgagcaggtgggcaacctccagagcagtatgatgttattgggccaggcgtccagcgg

SEQ ID NO: 232576 - DNA, 75 bp, synthetic construct
  source 1..75: mol_type = other DNA
aggcaaatatcgccattacacgtgaaacggctgcgattgccattcgaaactggcgcacagcacgatctatggtca

SEQ ID NO: 232577 - DNA, 75 bp, synthetic construct
  source 1..75: mol_type = other DNA
cagacgtgatcaacctcgtggagaagcgccaggcgggcgcgggtacagagattctaaagcgtttgcagtcggtag

SEQ ID NO: 232578 - DNA, 75 bp, synthetic construct
  source 1..75: mol_type = other DNA
cgccgccgatgctctaaacagtgttaaaaactcctctttgtatctgaatgatgcccagcgcgaacagatcaaaca

SEQ ID NO: 232579 - DNA, 75 bp, synthetic construct
  source 1..75: mol_type = other DNA
atacggtgccgataacggtatccggctggaggcggtgtggctgacacacgacccggcatacccggatgaacagcc

SEQ ID NO: 232580 - DNA, 75 bp, synthetic construct
  source 1..75: mol_type = other DNA
ttaacaagttcaattgtgagattggctatttaaggctgagaaatgagggactattaaaggataaggttagagaaa

SEQ ID NO: 232581 - DNA, 75 bp, synthetic construct
  source 1..75: mol_type = other DNA
tctttatttatggaaaacggatatgatcttcagacaggagcatggttctgtcttatttcagccaatctatatagc

SEQ ID NO: 232582 - DNA, 75 bp, synthetic construct
  source 1..75: mol_type = other DNA
ctatccttaataaacactaacataacaagagctaacgagcctggtatagatcttgctgatatggcaaaaaaaaca

SEQ ID NO: 232583 - DNA, 75 bp, synthetic construct
  source 1..75: mol_type = other DNA
gatgactttataaacagccactgtgccgattccgatgcgttaattatcagcctggatatgtatctctacggtgga

SEQ ID NO: 232584 - DNA, 75 bp, synthetic construct
  source 1..75: mol_type = other DNA
atattcactatagctttaacggccgcagtcctacgatcacttccatttccgcccctttccggcggatgagtggtt

SEQ ID NO: 232585 - DNA, 75 bp, synthetic construct
  source 1..75: mol_type = other DNA
atacagtataatattaataagtttaattgtgagattagtaacttaaaaatgaaaaatgagttgttaaatgacaaa

SEQ ID NO: 232586 - DNA, 75 bp, synthetic construct
  source 1..75: mol_type = other DNA
ggtgctctgacgggtttgagttccgctgtgataacggagaaaaactgcgggtcacgtgcgcgctggccagttgcg

SEQ ID NO: 232587 - DNA, 75 bp, synthetic construct
  source 1..75: mol_type = other DNA
gagtcgatgactggaaggacggccgccgcagccgtcacacggatgatacggatgtgcttcgccgtatacaccatg

SEQ ID NO: 232588 - DNA, 75 bp, synthetic construct
  source 1..75: mol_type = other DNA
ggtcgaaggactggcaggatcgtcggtgcaagcgcaagcctgatgatactgacgcgctggcccgtatccataccg

SEQ ID NO: 232589 - DNA, 75 bp, synthetic construct
  source 1..75: mol_type = other DNA
cgaactatgcgaaaaacctgacgattgaaaataatcagttattagacgcatcgaaagtgaataatttattagcaa

SEQ ID NO: 232590 - DNA, 75 bp, synthetic construct
  source 1..75: mol_type = other DNA
ccgataatcacgcaacaagatggggtaattacgttctgcgagttcagggactttggtcttgacggaaatggctac

SEQ ID NO: 232591 - DNA, 75 bp, synthetic construct
  source 1..75: mol_type = other DNA
ctgtgcaaggccattctatggctgtttatgatgcatacggtgcgcagcagttctattttccgaatgtgctaaagt

SEQ ID NO: 232592 - DNA, 75 bp, synthetic construct
  source 1..75: mol_type = other DNA
cccctgatggttacgacatcaatctggcacttccatttgctccgggaaagctcatttttcgtgaaagtactaatc

SEQ ID NO: 232593 - DNA, 75 bp, synthetic construct
  source 1..75: mol_type = other DNA
aagcgcatcaaggagcgcaaagagaaagagcgcgcggaacgccgggatctgaaagcgagaaaggtggcgctaaaa

SEQ ID NO: 232594 - DNA, 75 bp, synthetic construct
  source 1..75: mol_type = other DNA
atgacaacgttaattcctttcaaaccggacgggcgaggtccgtttcagttcacggccagaatcggagaatatgaa

SEQ ID NO: 232595 - DNA, 75 bp, synthetic construct
  source 1..75: mol_type = other DNA
tgatcgtgcctaccagcgtgtacaaactgagaaggccaaagttctcgattttcagaatagccatcatttaattag

SEQ ID NO: 232596 - DNA, 75 bp, synthetic construct
  source 1..75: mol_type = other DNA
aagagtatcctctgaaaaatataatggaagatataactggtttaaatggaagtgtgataaatgatgcccaggcag

SEQ ID NO: 232597 - DNA, 75 bp, synthetic construct
  source 1..75: mol_type = other DNA
ttgcagccgctcaggcagcagtcagtgcctgtggtgcgaatactgtgctgtgtgcaaatgaagtcagtatctggg

SEQ ID NO: 232598 - DNA, 75 bp, synthetic construct
  source 1..75: mol_type = other DNA
tcgatatcccataccttcagcgcatcaaatccattttcacacgcaaagcccgcgcgctggaaaaacgccgggcac

SEQ ID NO: 232599 - DNA, 75 bp, synthetic construct
  source 1..75: mol_type = other DNA
cgttcgcgcggcgctgcatcacacctcaaattcaacgtttttaacgtccactccgcttgcacccgatgcaaccgg

SEQ ID NO: 232600 - DNA, 75 bp, synthetic construct
  source 1..75: mol_type = other DNA
aagcggtggggtagtaccgcgaaaagtaggtacgttgtggggcgaatatggtaatttaaaaacttatgggaacgc

SEQ ID NO: 232601 - DNA, 75 bp, synthetic construct
  source 1..75: mol_type = other DNA
ggtgcttaccctgaactgcgctttgaagagcgcaatgcccataagcagtgcaaatcctgtaatgccggagcgggc

SEQ ID NO: 232602 - DNA, 75 bp, synthetic construct
  source 1..75: mol_type = other DNA
aaaggagaaggtgaaagccgctgctaagcgcattaaggagcagaaggaggcagagaaggccgggcgcaaacgccg

SEQ ID NO: 232603 - DNA, 75 bp, synthetic construct
  source 1..75: mol_type = other DNA
ggtcgctcgttacgggcaggagtacgtggactggctcaacggcccccacgaaatgaccaactaccgccgtgaaga

SEQ ID NO: 232604 - DNA, 75 bp, synthetic construct
  source 1..75: mol_type = other DNA
gccagactgaccggtgcggataaaaatgcgatgaacgaagttaccgccagctatatggatgtacaaactcaagcc

SEQ ID NO: 232605 - DNA, 75 bp, synthetic construct
  source 1..75: mol_type = other DNA
cagggcaaagtattgttcgattcggcaaataaagccgttggacaggattattcgcgctggaatgacgtctggcta

SEQ ID NO: 232606 - DNA, 75 bp, synthetic construct
  source 1..75: mol_type = other DNA
ggtatcggtgcacagaatacgctgggcggccattcacttgcgctggggaggggcgacacaggcctgaaacaaaac

SEQ ID NO: 232607 - DNA, 75 bp, synthetic construct
  source 1..75: mol_type = other DNA
aaggctgagaggcgtcgcctcgattatgctcgtaaacgctatctgactatccgatctgaagcattcaagatccat

SEQ ID NO: 232608 - DNA, 75 bp, synthetic construct
  source 1..75: mol_type = other DNA
ttgtttggtgagccggagccgcttccccagcatgttctggatgcagacaaaacccataatgagccttcaccacca

SEQ ID NO: 232609 - DNA, 75 bp, synthetic construct
  source 1..75: mol_type = other DNA
atgaaatggcgttactcactgcgctggacattgccccggacaccgtgtcccggaccgcaggaactggtgtctgaa

SEQ ID NO: 232610 - DNA, 75 bp, synthetic construct
  source 1..75: mol_type = other DNA
cggtaagagtgagcagttggtggtgaactttattgcggatacgctcagtgcgcaggttaatcttaacgttaccga

SEQ ID NO: 232611 - DNA, 75 bp, synthetic construct
  source 1..75: mol_type = other DNA
tggccaagttggacaaagaacttgcacttaaagcacatttccagagtgatagtgcagattatttctcgcggttgc

SEQ ID NO: 232612 - DNA, 75 bp, synthetic construct
  source 1..75: mol_type = other DNA
ttatgggtagtagtgtgttttgctattgctgcgctttatttttgcgtcattgtgtccgatcgctatgtcagtcgg

SEQ ID NO: 232613 - DNA, 75 bp, synthetic construct
  source 1..75: mol_type = other DNA
ataatgctgatgaagaagaggctttttgggagatattagagagcaatgctcattgttctgtaattaatgatattt

SEQ ID NO: 232614 - DNA, 75 bp, synthetic construct
  source 1..75: mol_type = other DNA
agtgcttccggtaataatgcaaaagttagaaattacagatttcaaactagatgaaacagatttatgcctgggtaa

SEQ ID NO: 232615 - DNA, 75 bp, synthetic construct
  source 1..75: mol_type = other DNA
cttgtgacaagcaccgaagtcggactgaaaacagtttcagcctctctggcagataaacctactgaagtcatatcg

SEQ ID NO: 232616 - DNA, 75 bp, synthetic construct
  source 1..75: mol_type = other DNA
acaggcagacgggagctggagcgtcggcattccggcggcaagcgtcagtgcatggcctgcggggccgttaaccgt

SEQ ID NO: 232617 - DNA, 75 bp, synthetic construct
  source 1..75: mol_type = other DNA
gtccggtggcggtgggggcaacggcaaccacctacgccagccagtttagcgtggcggtggactggaaccatgacg

SEQ ID NO: 232618 - DNA, 75 bp, synthetic construct
  source 1..75: mol_type = other DNA
cggcggtgcataactacagcgtcgatagcagtgccccgaccatcattatcaataccgttgccagcgacaatatcg

SEQ ID NO: 232619 - DNA, 75 bp, synthetic construct
  source 1..75: mol_type = other DNA
acccggcggtaacccgcacgctggatcgcggagccaatacgattttcgtcaccgtgacagatgctgcaggaaata

SEQ ID NO: 232620 - DNA, 75 bp, synthetic construct
  source 1..75: mol_type = other DNA
acgccgtcgaaaaaggcgaaacgctggtcgtaagcggcagcaccagcggtgtcgaagccgggcagacggtgaccg

SEQ ID NO: 232621 - DNA, 75 bp, synthetic construct
  source 1..75: mol_type = other DNA
taatgcctcggtcaccaatggcgttggcaataccggcagcggttcgcgcgatatcacgatcgacgccaatctgcc

SEQ ID NO: 232622 - DNA, 75 bp, synthetic construct
  source 1..75: mol_type = other DNA
tcaacgggcaaaattacaccaccactgccgatgcttccgggaactggagcgtgaccgttccggcgtcacgggtga

SEQ ID NO: 232623 - DNA, 75 bp, synthetic construct
  source 1..75: mol_type = other DNA
tgacggtggatacttccgttccggtcgtcaccatcaacacggtggcaggcgatgatgtgatcaacgcgacggaac

SEQ ID NO: 232624 - DNA, 75 bp, synthetic construct
  source 1..75: mol_type = other DNA
ttggcacgaccacctacaccaccgtgctggacgccaacggcaactggagcatcggcgtgcctgccagcgtgattt

SEQ ID NO: 232625 - DNA, 75 bp, synthetic construct
  source 1..75: mol_type = other DNA
aggttagcacctggcctgcggggacggttaatattgctgtatccggggaaagtagcgccggaaactcggtgagca

SEQ ID NO: 232626 - DNA, 75 bp, synthetic construct
  source 1..75: mol_type = other DNA
ccacgcaaatcatcaacccgcagtcggggatgggggttaacgacacctcggcgctggtcaacttctacgggctga

SEQ ID NO: 232627 - DNA, 75 bp, synthetic construct
  source 1..75: mol_type = other DNA
cgcgtggataccgtggcgggcgatgatatcgtcaacagcatcgaacacgggcaggcgctggtgatcaccggcggc

SEQ ID NO: 232628 - DNA, 75 bp, synthetic construct
  source 1..75: mol_type = other DNA
ctgtttatcacccgtgatgactacggtacaggctatatcaacggctttaccaataacggcgatggcaccttttcc

SEQ ID NO: 232629 - DNA, 75 bp, synthetic construct
  source 1..75: mol_type = other DNA
gagcggcaacaccaccgccggaaacccggtgagcgttacgcatccggtgactgtcgatctcacggcggtggcggt

SEQ ID NO: 232630 - DNA, 75 bp, synthetic construct
  source 1..75: mol_type = other DNA
gagcaccacggttccggcggcagatatggcagccctgcgtgatggcgatgccagcgcacaggccagcgtcagcaa

SEQ ID NO: 232631 - DNA, 75 bp, synthetic construct
  source 1..75: mol_type = other DNA
ccagcgtctcacgggtggcgctggtcgatgccacgccgccggtggtgaccattaatccggtggcaaccgataacg

SEQ ID NO: 232632 - DNA, 75 bp, synthetic construct
  source 1..75: mol_type = other DNA
cattaccgccacggttaccgactccgcaggcaacagcggcacggcctcgcacactgtcagcgtggcgctcggtgc

SEQ ID NO: 232633 - DNA, 75 bp, synthetic construct
  source 1..75: mol_type = other DNA
accgccgatgatgtgattaacgccgctgaaaaaggcgcggcattaacgctctccggcagcacctctggcgtggag

SEQ ID NO: 232634 - DNA, 75 bp, synthetic construct
  source 1..75: mol_type = other DNA
gtgactgttccggcgtctgcggttggtacgctcggtgaagcgacttatacggtgactgccgccgcaaccgatgtt

SEQ ID NO: 232635 - DNA, 75 bp, synthetic construct
  source 1..75: mol_type = other DNA
gtaacacttacaccgctacggtacagggcaacttaagttggagcgtcaccgttccggcagccgatctccaggcgt

SEQ ID NO: 232636 - DNA, 75 bp, synthetic construct
  source 1..75: mol_type = other DNA
accgacagccgcacgctgaccgacggcagctacgtttatcaggtgcgggtgctggatctggcggggaacaccggc

SEQ ID NO: 232637 - DNA, 75 bp, synthetic construct
  source 1..75: mol_type = other DNA
cacactgaccgacggcacctggaactacacggtgcgggtggtggatctggcggggaacgtcgggcagaccgcgac

SEQ ID NO: 232638 - DNA, 75 bp, synthetic construct
  source 1..75: mol_type = other DNA
agcagccgttaacccttaacggctcgaccagcgcggaagtggggcagacggtcaccgtgacctttggcggcaaaa

SEQ ID NO: 232639 - DNA, 75 bp, synthetic construct
  source 1..75: mol_type = other DNA
tggaagggcgcggcggtaacgacacgctcaacatcggcaacggcggccacgacaccttgctctataaactgctca

SEQ ID NO: 232640 - DNA, 75 bp, synthetic construct
  source 1..75: mol_type = other DNA
ggcgtggaagcggggcaaaccgtcaccgtcacctttggcggcaaaacctatatcgctaccgtagcgggcgatggt

SEQ ID NO: 232641 - DNA, 75 bp, synthetic construct
  source 1..75: mol_type = other DNA
aagtcgtttacctctaccgcaacggcctgctgttaggtgcggtgacgatggtcggcgcactgaactggacctaca

SEQ ID NO: 232642 - DNA, 75 bp, synthetic construct
  source 1..75: mol_type = other DNA
ggacgcaatcgcccacgccaataaaatgacctcattacaggctcgccagttatctcagcaggagcaggcagcacg

SEQ ID NO: 232643 - DNA, 75 bp, synthetic construct
  source 1..75: mol_type = other DNA
caggcatggcgtataacgatccagcactagcgttgaatgttcctggcctgaactatctgacaccccagcaaccaa

SEQ ID NO: 232644 - DNA, 75 bp, synthetic construct
  source 1..75: mol_type = other DNA
caaaagtgcaggccgcagccagatcacgagcgatgacctacaaccctaacatgggcggtcaacattacgatcctg

SEQ ID NO: 232645 - DNA, 75 bp, synthetic construct
  source 1..75: mol_type = other DNA
accaaaaaggcgatggccttggaggagaagcgtcagcgtgagaaagaggcaggccttaagcgcgaggtgacttat

SEQ ID NO: 232646 - DNA, 75 bp, synthetic construct
  source 1..75: mol_type = other DNA
cggaccgtccagagtgaaggcaaagcagcactagccgcagcgaaagcccagacagcgaagctacgccaggctgaa

SEQ ID NO: 232647 - DNA, 75 bp, synthetic construct
  source 1..75: mol_type = other DNA
gagattaaactctcaccgcttgatattaacgtgaatgacggcgctattaacggtttgattgatacaaaactgagg

SEQ ID NO: 232648 - DNA, 75 bp, synthetic construct
  source 1..75: mol_type = other DNA
tcagtgggtagcaaagcagaaagctgaaggtatagacaatgccagggaagtgatgcaaaaagttgccaatcttct

SEQ ID NO: 232649 - DNA, 75 bp, synthetic construct
  source 1..75: mol_type = other DNA
tcagggaaccacctggcgaacagccagtttctggcatcgggcttatttaactcatacgggggcaaaaaccgtaac

SEQ ID NO: 232650 - DNA, 75 bp, synthetic construct
  source 1..75: mol_type = other DNA
tatgttcagagcctggggcaaagtcaggagagcatacttaaccacgggagaatttccccaggaaacatgttacgc

SEQ ID NO: 232651 - DNA, 75 bp, synthetic construct
  source 1..75: mol_type = other DNA
acatcaaagtgcagcataccaaacggacggaacaaaatttcccattcctggattggctggaagagcgggacggat

SEQ ID NO: 232652 - DNA, 75 bp, synthetic construct
  source 1..75: mol_type = other DNA
aaaattgagttttccaagtataatgaggatgacacatttacagtgaaggttgacgggaaagaatactggaccagt

SEQ ID NO: 232653 - DNA, 75 bp, synthetic construct
  source 1..75: mol_type = other DNA
gtttatggtgaaatggcaaaagaaaaatggaatatgctgaagcaggcaggtttgaccggttatgttggtcattgg

SEQ ID NO: 232654 - DNA, 75 bp, synthetic construct
  source 1..75: mol_type = other DNA
gtaaaaccgtaaatcaggtggagtggctggttgatgagtcaagtttcaaacgggcgctcaaaaggatcaagtctc

SEQ ID NO: 232655 - DNA, 75 bp, synthetic construct
  source 1..75: mol_type = other DNA
cctctacgacccgctgggacggcgaatggcgaaacgggtatggcggcgggagcgtgacctgacggggtggatgtc

SEQ ID NO: 232656 - DNA, 75 bp, synthetic construct
  source 1..75: mol_type = other DNA
gatatggtaattagaatgataaaatttgtttattataaccaagataaaatcgttaatggtgtaaaatcatcagga

SEQ ID NO: 232657 - DNA, 75 bp, synthetic construct
  source 1..75: mol_type = other DNA
cttccgccatattggacagacgacaaaatattgagaaactataaatttgtaaatactaaaagaacatgggacaaa

SEQ ID NO: 232658 - DNA, 75 bp, synthetic construct
  source 1..75: mol_type = other DNA
cgcgcagatcatctccggacaagtcagcggtgcttctcctggcgatacggtaacggtgaaattgggcactcatgt

SEQ ID NO: 232659 - DNA, 75 bp, synthetic construct
  source 1..75: mol_type = other DNA
aggccagcgttagcagcgcgagcggcaacagcgcctcggcgacccatgcgtacagcgttgacgccagcgcgccga

SEQ ID NO: 232660 - DNA, 75 bp, synthetic construct
  source 1..75: mol_type = other DNA
gcgaccatcgcggcctgccgctggcccttatcagcacggaagggacaacagcgtggtacgcagaatacgatgaat

SEQ ID NO: 232661 - DNA, 75 bp, synthetic construct
  source 1..75: mol_type = other DNA
gatcattactcgacaaggttgctgagcaggaatacctgttaccggccatccagcgagagtttgtatggcgaccag

SEQ ID NO: 232662 - DNA, 75 bp, synthetic construct
  source 1..75: mol_type = other DNA
tataaaggggctaaattcgaagtacttgatgcgagtaaccaaagcataaggtatcgggtaataagtaactttaga

SEQ ID NO: 232663 - DNA, 75 bp, synthetic construct
  source 1..75: mol_type = other DNA
ttgtcggcatggctcttttactcgggggatgtacctctccgaagtacaattatttaccaaaaacagaaaattata

SEQ ID NO: 232664 - DNA, 75 bp, synthetic construct
  source 1..75: mol_type = other DNA
aagagtgttttctgtatcgatgtgaaataaaaaattttaacatagatacatcaaaaatatactctgtccaatgtg

SEQ ID NO: 232665 - DNA, 75 bp, synthetic construct
  source 1..75: mol_type = other DNA
atcggaccatccatgacaaagacaagatttcgttttacgaagaaagtgatcagagccttgaacgtgttctgaata

SEQ ID NO: 232666 - DNA, 75 bp, synthetic construct
  source 1..75: mol_type = other DNA
gatgacgccttcccagtgcgcaggcttcacttgaatctgttaagcaagcccgacttggaaactgggtcgatgtat

SEQ ID NO: 232667 - DNA, 75 bp, synthetic construct
  source 1..75: mol_type = other DNA
aactggagcgccacggtgccagcgtcagcggttagcgcgctgggtgaagctaactacacggtaaccgcgaacgtc

SEQ ID NO: 232668 - DNA, 75 bp, synthetic construct
  source 1..75: mol_type = other DNA
ggatctgcaaattaccggcaccagtaatcagcctgcgggcaccaccattacggtgacgctgaacgggcaaaatta

SEQ ID NO: 232669 - DNA, 75 bp, synthetic construct
  source 1..75: mol_type = other DNA
gaacggtagctggagcgttggcgttcctgcgacggatgtcagtaactggcctgcgggaacgctgaatattaccgt

SEQ ID NO: 232670 - DNA, 75 bp, synthetic construct
  source 1..75: mol_type = other DNA
gtcaccgtgcccgcttcggcggtgggcgcattgggcgaggcggtttattcgattagcgccagtgccaccgacagc

SEQ ID NO: 232671 - DNA, 75 bp, synthetic construct
  source 1..75: mol_type = other DNA
gtggcgggcgatgatgttattaacagcattgagcacaatcaggcgctggtgataacaggtagcagcaccgggctg

SEQ ID NO: 232672 - DNA, 75 bp, synthetic construct
  source 1..75: mol_type = other DNA
ctggagctacaccctcggcagcgccgatgtcaccgcgctggcggacggcaatgcctacgtgattaacgcctcggt

SEQ ID NO: 232673 - DNA, 75 bp, synthetic construct
  source 1..75: mol_type = other DNA
gcggcagccagagcggcactaccagcggcgtggcggcaatggactacgactgggacggcgcggtggatgtgctgg

SEQ ID NO: 232674 - DNA, 75 bp, synthetic construct
  source 1..75: mol_type = other DNA
accacgccgattatcagcggcgtaatcacggcggcacttgccagtgggcagtatgttgaagtggtgatcaacggc

SEQ ID NO: 232675 - DNA, 75 bp, synthetic construct
  source 1..75: mol_type = other DNA
cgggtgatcgacaccgccggaaatatcggcgcgaccgccagccagatagtcaccgtggataccaccgcgccgctg

SEQ ID NO: 232676 - DNA, 75 bp, synthetic construct
  source 1..75: mol_type = other DNA
ggataccgtcgcgggtgatgatgtggtcaatatcattgaacacgctcaggcgcaggtgatcaccggcagcagctc

SEQ ID NO: 232677 - DNA, 75 bp, synthetic construct
  source 1..75: mol_type = other DNA
accatcaacaccattgcgggcgatgacattattaacgccaccgaacacgggcaggcgctggtgatttccggttcc

SEQ ID NO: 232678 - DNA, 75 bp, synthetic construct
  source 1..75: mol_type = other DNA
gtcaccgtcacccttaacggcgcaacctacagcggtaatgtgcaggcagacggtagctggagcatcagcgttccc

SEQ ID NO: 232679 - DNA, 75 bp, synthetic construct
  source 1..75: mol_type = other DNA
gacagcaacggcaactggcagataggcgtgcctgcggcagatttacaggcgctgacgccgggtacgatagtggtt

SEQ ID NO: 232680 - DNA, 75 bp, synthetic construct
  source 1..75: mol_type = other DNA
attaacgccaccgaaaaaggcgcggatctgcaaatttccggcaccagcaatcagccagcgggcaccactattacg

SEQ ID NO: 232681 - DNA, 75 bp, synthetic construct
  source 1..75: mol_type = other DNA
cgtcacgctaaacagtaaaacctacaccacgacgctggatgcctccggcaactggagcgtcggcgttccggcggc

SEQ ID NO: 232682 - DNA, 75 bp, synthetic construct
  source 1..75: mol_type = other DNA
ttatcaccagcgatacctcgctcacgctgaccggttcgctgggggcggggcttgccagcggcgaagtggcgcaga

SEQ ID NO: 232683 - DNA, 75 bp, synthetic construct
  source 1..75: mol_type = other DNA
gtaccagcgggattgagagcgggcaaaccgtcaccgtcacttttggcggtaaaacctacactgcaagcgtcgccg

SEQ ID NO: 232684 - DNA, 75 bp, synthetic construct
  source 1..75: mol_type = other DNA
gtgcaggttaataccgcgctgccgggcgtcaccattaacgtggtggcaacggacgatattattaacgccgccgaa

SEQ ID NO: 232685 - DNA, 75 bp, synthetic construct
  source 1..75: mol_type = other DNA
gtgtcgtataccgatgatgtcgggcagcggcaggggacattaagcagttcgcaggccaccgacgacaccacgccg

SEQ ID NO: 232686 - DNA, 75 bp, synthetic construct
  source 1..75: mol_type = other DNA
agcgacaaagcgggtaacccggcaagcgccgaccacgcgctggcggtggacgttaccgcgccggatctcaccatt

SEQ ID NO: 232687 - DNA, 75 bp, synthetic construct
  source 1..75: mol_type = other DNA
tcggtcaccaatcaaaacggcaacaccggcagcggcacgcgggatatcaccatcgacgccaatctgcccggcctg

SEQ ID NO: 232688 - DNA, 75 bp, synthetic construct
  source 1..75: mol_type = other DNA
aaggctacagcgccaccattcagagcaacgggagctggagcgtgaacgtgccggcggcagacgttgcggcactgg

SEQ ID NO: 232689 - DNA, 75 bp, synthetic construct
  source 1..75: mol_type = other DNA
gcaaccggtagcaccgtgacggtgactatcggcacaaataccttcaccaccgtgctggatgccagcggtaactgg

SEQ ID NO: 232690 - DNA, 75 bp, synthetic construct
  source 1..75: mol_type = other DNA
agccaggccccggccttaagcatcgatccactgaccgccgataacatcatcaacgccgccgaaagcgggcaggat

SEQ ID NO: 232691 - DNA, 75 bp, synthetic construct
  source 1..75: mol_type = other DNA
ggcgaacatacctggtcagtggtgcaaattgtcggcagtaccatcactgacgccggttcgataacgttaaccatc

SEQ ID NO: 232692 - DNA, 75 bp, synthetic construct
  source 1..75: mol_type = other DNA
cagcattaacaccgtttcgacggacgaccgactcaacgccgccgaacagcagcagccgttaacccttaacggctc

SEQ ID NO: 232693 - DNA, 75 bp, synthetic construct
  source 1..75: mol_type = other DNA
acagccagaacgtggtgatcgacactaccgcgccagatccggcagtgaaaaccatcgccatcagcgcgatcacca

SEQ ID NO: 232694 - DNA, 75 bp, synthetic construct
  source 1..75: mol_type = other DNA
ggtgctgtgctgacggttaccatcaacagtgtggcgtattccgccacggtacaggcggacgggagctggagcgtc

SEQ ID NO: 232695 - DNA, 75 bp, synthetic construct
  source 1..75: mol_type = other DNA
acatcatcaacgccgccgaaagcgggcaggatttgctcatcactggcactaccgacgcccagccagggcagacgg

SEQ ID NO: 232696 - DNA, 75 bp, synthetic construct
  source 1..75: mol_type = other DNA
acgtcagcaactggcctgcgggtacggtggatatcacggtaagcggcaccaacagcgccggaacaacctccacca

SEQ ID NO: 232697 - DNA, 75 bp, synthetic construct
  source 1..75: mol_type = other DNA
tgaccgacggcagctacgtttatcaggtgcgggtgctggatctggcgggtaacaccggcccggtggtatcaaaaa

SEQ ID NO: 232698 - DNA, 75 bp, synthetic construct
  source 1..75: mol_type = other DNA
cagatattcaggcgctgggcaatggcgatttaacggttaatgcctcggtcaccaatcaaaacggcaataccggca

SEQ ID NO: 232699 - DNA, 75 bp, synthetic construct
  source 1..75: mol_type = other DNA
cggtcaccgccagcgtgaacgatgtcgccggtaacccgaccagcgtctcacgcgtggcgctggtcgatgccacgc

SEQ ID NO: 232700 - DNA, 75 bp, synthetic construct
  source 1..75: mol_type = other DNA
actgaccgctgataacatcattaacgccgccgaaagcgggcaggatctgcccatcaccggcaccaccgacgccca

SEQ ID NO: 232701 - DNA, 75 bp, synthetic construct
  source 1..75: mol_type = other DNA
gggcagacggtgaccgtcaccctcaatggcacaaactataccggcaccgtacagacggacggcagctggagcgtc

SEQ ID NO: 232702 - DNA, 75 bp, synthetic construct
  source 1..75: mol_type = other DNA
cgttccggcggcggatattcaggcgctgggtaacggcgacctgacggttaatgcctcggtcaccaatggcgtggg

SEQ ID NO: 232703 - DNA, 75 bp, synthetic construct
  source 1..75: mol_type = other DNA
tggacgcttccggcaactggagcgtcggcgttccggcggcagacgttactgcccttggcagcggtccgcaaacca

SEQ ID NO: 232704 - DNA, 75 bp, synthetic construct
  source 1..75: mol_type = other DNA
ttattaacgccgccgaatcgggcgtagcgcagaccatcagcgggcaagtgacgggcgcggcggcgggcgataccg

SEQ ID NO: 232705 - DNA, 75 bp, synthetic construct
  source 1..75: mol_type = other DNA
ggcgcgcaggtcaccgtcacgctcaacggtcataactacagcgccaccaccgacgcggcgggcaactggacctta

SEQ ID NO: 232706 - DNA, 75 bp, synthetic construct
  source 1..75: mol_type = other DNA
atggcacctggagcgtcggcgttccggcggtggatgtcagcgcctggcctgcgggggcggtgacgattacggcga

SEQ ID NO: 232707 - DNA, 75 bp, synthetic construct
  source 1..75: mol_type = other DNA
aacaccggcccggtggtgtcgaaaacggtggtggtcgatgccactaacccgctcgccacgccaaatattgtctct

SEQ ID NO: 232708 - DNA, 75 bp, synthetic construct
  source 1..75: mol_type = other DNA
ggcattccggcggcggatgtcacggcgctggcaaccggtagccagacgatcaccgccagcctgagcgatcgcgcg

SEQ ID NO: 232709 - DNA, 75 bp, synthetic construct
  source 1..75: mol_type = other DNA
ataacaacacgtaccagaccaccgttcaggcggatggcacctggagcgtgaatgttccggcagcggatttaagcg

SEQ ID NO: 232710 - DNA, 75 bp, synthetic construct
  source 1..75: mol_type = other DNA
acggcgatgtgcctactgtcaccatcaacacctttgcgggtgatgatgtggtgaatgcggcggaacacggctcgt

SEQ ID NO: 232711 - DNA, 75 bp, synthetic construct
  source 1..75: mol_type = other DNA
gaccataaatccggtggcgacggacgacattatcaatgccgccgaagcaggcagcgcgcaaaccatcagcggtca

SEQ ID NO: 232712 - DNA, 75 bp, synthetic construct
  source 1..75: mol_type = other DNA
acagcattgagcacactcaggcgctggtggtcaccggtagcagtaccggactggcggcgggaacggcgttgacgg

SEQ ID NO: 232713 - DNA, 75 bp, synthetic construct
  source 1..75: mol_type = other DNA
gccgggcgtcaccattaacgttgtggcgacggacgatattattaacgctgccgaagccggggcagctcaaactat

SEQ ID NO: 232714 - DNA, 75 bp, synthetic construct
  source 1..75: mol_type = other DNA
gacacggcaggcaacagtaattccgccagccataatgtgctggtcaacagcgccttgcctgccgttaccattaac

SEQ ID NO: 232715 - DNA, 75 bp, synthetic construct
  source 1..75: mol_type = other DNA
attaacagcattgcgggcgatgatgtgattaacgccagcgaaaaaggggccgatgtccagattaccggcaccagc

SEQ ID NO: 232716 - DNA, 75 bp, synthetic construct
  source 1..75: mol_type = other DNA
actttatcaccagcgtcagcccggtggtggtcaacggctcgctcaccgccgcgcttgccagtaacgagacggcgc

SEQ ID NO: 232717 - DNA, 75 bp, synthetic construct
  source 1..75: mol_type = other DNA
ttattctcgttcttgttgttttgtgtctgactgcttgtcaaaataactatgtaagggatgttcagggaggaacga

SEQ ID NO: 232718 - DNA, 75 bp, synthetic construct
  source 1..75: mol_type = other DNA
tatgattgataccgagcgttttgagcgtcggatcaacggcgtgaatgttctcgccggcctgtcggcaaaagtgcg

SEQ ID NO: 232719 - DNA, 75 bp, synthetic construct
  source 1..75: mol_type = other DNA
ccaccgatttacgcaccggggcacaggatgcgcccacgccggttgacgacggcatggaggcgctgacctgccaga

SEQ ID NO: 232720 - DNA, 75 bp, synthetic construct
  source 1..75: mol_type = other DNA
cgacaatgctcaacatcatccgggatgatgtgcagcacctgtcgccgcacttcttcgatttcatcatcgttgatg

SEQ ID NO: 232721 - DNA, 75 bp, synthetic construct
  source 1..75: mol_type = other DNA
tgaagataaacagtctttggatgttatatttaaaataaaggaaggttctactgattcagagactgactggtcagg

SEQ ID NO: 232722 - DNA, 75 bp, synthetic construct
  source 1..75: mol_type = other DNA
accggtaccgcgaaaaaggtcgggccggacggtcgctacatcaataaatatattgcttataccgcaggcgttgcg

SEQ ID NO: 232723 - DNA, 75 bp, synthetic construct
  source 1..75: mol_type = other DNA
atgtatttttattctataaacaatatcttggggaatgaattctatatggggaatggtaacttttggcagttgttc

SEQ ID NO: 232724 - DNA, 75 bp, synthetic construct
  source 1..75: mol_type = other DNA
atggcgaaaaactggcggaccactgacggcgatatgctggatgatatctgtcagagacactatggcagcgccgga

SEQ ID NO: 232725 - DNA, 75 bp, synthetic construct
  source 1..75: mol_type = other DNA
acggcgatatgctggacgacatctgccgcagatactatggcagcgccgggcttaaccagtcactggcagcggtac

SEQ ID NO: 232726 - DNA, 75 bp, synthetic construct
  source 1..75: mol_type = other DNA
cctgtcagaaaatgcagtgactgtggaaatcgcggtgaattattaccgtcagacactggaggggatcgagctcat

SEQ ID NO: 232727 - DNA, 75 bp, synthetic construct
  source 1..75: mol_type = other DNA
cggaatgactacaacccggatgaacctttggtctatgaacgagataaggctactattgtctcggtcgatcacatc

SEQ ID NO: 232728 - DNA, 75 bp, synthetic construct
  source 1..75: mol_type = other DNA
ttgaggccaccagcgaacaggaagcacgccagcaatccccggctggctgcgtgatggtattcgccgcccgtattc

SEQ ID NO: 232729 - DNA, 75 bp, synthetic construct
  source 1..75: mol_type = other DNA
gaatacttcaagctcaacccaaaaggcaaagaactcaaaccgcaattgccattgccagtgcgtctggtcggtctg

SEQ ID NO: 232730 - DNA, 75 bp, synthetic construct
  source 1..75: mol_type = other DNA
acggtcagtccggaaatatcggcgtcagcggtgaaggcggaacatcgcactggggcggcggtggacgcgcaggcg

SEQ ID NO: 232731 - DNA, 75 bp, synthetic construct
  source 1..75: mol_type = other DNA
cctgggtacgtgccacaggaaataccggcacacaattcgtgaagcagaccgcgacgttttttggacccgatcgtc

SEQ ID NO: 232732 - DNA, 75 bp, synthetic construct
  source 1..75: mol_type = other DNA
atgtataaaacccagtccgatatttcagcagagacagcattaacccgcgatgagcaggaaactgcgcgtaagcgc

SEQ ID NO: 232733 - DNA, 75 bp, synthetic construct
  source 1..75: mol_type = other DNA
gaaatatctactacaccgatacgaataaaccagtttgggatcatccgtggaccattatcgaaaaagatggtttaa

SEQ ID NO: 232734 - DNA, 75 bp, synthetic construct
  source 1..75: mol_type = other DNA
tcttcagcctgaaaaccctgccctatcaggatatgcagcacgccgtagcgtggcggcatcctgccagttcccgcg

SEQ ID NO: 232735 - DNA, 75 bp, synthetic construct
  source 1..75: mol_type = other DNA
cggatcggtaatagcccctggtggtgaaggtggcgggaaagtgggagttacaaacacaaacggcggtaacggcgg

SEQ ID NO: 232736 - DNA, 75 bp, synthetic construct
  source 1..75: mol_type = other DNA
aatcactgaacaatatgacaccggaggaataccgacttcaccattatttgccgggttctcaaaaaatgcatggaa

SEQ ID NO: 232737 - DNA, 75 bp, synthetic construct
  source 1..75: mol_type = other DNA
ggtgcttccgtacgtttaacgtggtggatgactataaccgtgaagcactggtcattgaaattaacctgaatttac

SEQ ID NO: 232738 - DNA, 75 bp, synthetic construct
  source 1..75: mol_type = other DNA
gatgcggttagtagtcaggaggccaatgaactggctgagctgctgcatgaagagcatccgcacattactgaagac

SEQ ID NO: 232739 - DNA, 75 bp, synthetic construct
  source 1..75: mol_type = other DNA
cgacgttctttggacccgatcgtcatttcgaggaatcctggcaacagccagcagcccccggaggtgggcggggca

SEQ ID NO: 232740 - DNA, 75 bp, synthetic construct
  source 1..75: mol_type = other DNA
cacttcttagacttaactcgattattattggcccatatttcattaatgagaaaattaactcagataattttcttt

SEQ ID NO: 232741 - DNA, 75 bp, synthetic construct
  source 1..75: mol_type = other DNA
ggaaaaaacatcatctgcccctaaggattttcaacttgactagatatgtacttgtaattatgttgatttgtagta

SEQ ID NO: 232742 - DNA, 75 bp, synthetic construct
  source 1..75: mol_type = other DNA
ataaagctcaaccccaagttaaatatgactttttatttgaagcagcaggaccagggtgtacttatgttatccatc

SEQ ID NO: 232743 - DNA, 75 bp, synthetic construct
  source 1..75: mol_type = other DNA
ctcaatggagttagtcaagctgaccatctttgctgctacgggagaggccgactgcgataacactgctttggcgct

SEQ ID NO: 232744 - DNA, 75 bp, synthetic construct
  source 1..75: mol_type = other DNA
attgtgataatactgcactggcactaaaactcttgtcagattataagaatgagctgctggcagacacgattactg

SEQ ID NO: 232745 - DNA, 75 bp, synthetic construct
  source 1..75: mol_type = other DNA
cactgatgatgttaatacttattttggcggaaaagctgttaatactggtgataaaacaaatgtattaggcacaga

SEQ ID NO: 232746 - DNA, 75 bp, synthetic construct
  source 1..75: mol_type = other DNA
taagcaggttctggacgctgatggtaagcctaaagcaggtgcttttgcagctcaaaccgctgatggtaagtcttt

SEQ ID NO: 232747 - DNA, 75 bp, synthetic construct
  source 1..75: mol_type = other DNA
aattcgatcctgttaccacaaacctaaagaaaaaggctatcaggtatcgttcgttagtgaatggttcaaccggag

SEQ ID NO: 232748 - DNA, 75 bp, synthetic construct
  source 1..75: mol_type = other DNA
cgccgatgcaatgagacattgttacttgatgtgtcgaatgactaagacatttggatcaacaatagctgacgtgat

SEQ ID NO: 232749 - DNA, 75 bp, synthetic construct
  source 1..75: mol_type = other DNA
tgacgggcgaacggcagacggtggagaacccggagacgggggaactgctgtggcagcatgagacgaaacacgcct

SEQ ID NO: 232750 - DNA, 75 bp, synthetic construct
  source 1..75: mol_type = other DNA
gtatggcggcgggagcgtgacctgacggggtggatgtcgctgtcgcgtaaaccggaggagacatggtacggctgg

SEQ ID NO: 232751 - DNA, 75 bp, synthetic construct
  source 1..75: mol_type = other DNA
tcagtgaagacggcaatacggcgtggagcgcggaatatgatgaatggggcaaccagcttaatgaggagaacccgc

SEQ ID NO: 232752 - DNA, 75 bp, synthetic construct
  source 1..75: mol_type = other DNA
ggaaatcactttaaaggcaggtattatctctggtgtttcgcaattgatgcgtcagtataacacccctgtggctag

SEQ ID NO: 232753 - DNA, 75 bp, synthetic construct
  source 1..75: mol_type = other DNA
aagtttgacggaggacaaacaaatgctgttgtatggtgcagtggtggacgaattgatgttgaagttggtaattat

SEQ ID NO: 232754 - DNA, 75 bp, synthetic construct
  source 1..75: mol_type = other DNA
tctcgtgcacagatcctgcagcaggcgggtacttctgttctggcacaggctaaccagaccacgcagaacgtactg

SEQ ID NO: 232755 - DNA, 75 bp, synthetic construct
  source 1..75: mol_type = other DNA
atttcctataagcgtgacggtgttttgccagatatatttggtcgcgatgcactctacgacggtgatgctgccaac

SEQ ID NO: 232756 - DNA, 75 bp, synthetic construct
  source 1..75: mol_type = other DNA
atgacttgcttaataaaatttttcctggcttaaccccagtgcaagcacagtgtgtattaatgtattcctttggga

SEQ ID NO: 232757 - DNA, 75 bp, synthetic construct
  source 1..75: mol_type = other DNA
agccagaaatccttgagtgcacctacctgccggtggctatgtttaccgatctcagtatcgaagtgatgcaaacat

SEQ ID NO: 232758 - DNA, 75 bp, synthetic construct
  source 1..75: mol_type = other DNA
gacctggacatccgcatcccgtatgccaccgacccggcgggaaaccgcctgccggacccggagctgcacccggac

SEQ ID NO: 232759 - DNA, 75 bp, synthetic construct
  source 1..75: mol_type = other DNA
aaactcccgaagaagaaaaaggttactggtttcacgcttatcaacccgaagatctttgtactatccataatccaa

SEQ ID NO: 232760 - DNA, 75 bp, synthetic construct
  source 1..75: mol_type = other DNA
gccgcagcctgctgactgaagccgccatggccatccgcgcactgacaggacggcgcagggcatcggtctgtctga

SEQ ID NO: 232761 - DNA, 75 bp, synthetic construct
  source 1..75: mol_type = other DNA
gtcgcctgcccgcccggccagtcgaccggcagcccggtcaccaccgtcgataccgccaaatccggcaatctggtt

SEQ ID NO: 232762 - DNA, 75 bp, synthetic construct
  source 1..75: mol_type = other DNA
gggatccctaccgtcggccttccgggctattcggcgccttcgccgaaatatgccgcgctcaactccgccggtaag

SEQ ID NO: 232763 - DNA, 75 bp, synthetic construct
  source 1..75: mol_type = other DNA
gggttatggcaatgggggtacgtaatgcaaccacacggctgctgctctccagtaccagtccaagcacgatgatga

SEQ ID NO: 232764 - DNA, 75 bp, synthetic construct
  source 1..75: mol_type = other DNA
aacgccaagctcaaaggtgatcgcatttgaaacgtcaccttgcagccacaccattgccagtaaattaaacgtgga

SEQ ID NO: 232765 - DNA, 75 bp, synthetic construct
  source 1..75: mol_type = other DNA
acgctatacccaaaagaaagcggcttatcggtcagtttcacctgatgtacgtaataaaccgttccggcgggtttc

SEQ ID NO: 232766 - DNA, 75 bp, synthetic construct
  source 1..75: mol_type = other DNA
ggctgctcggctgggtgagcgggtgccggaagcggatgaggtgctgcctgcgccgctgccgccgtaccgggtact

SEQ ID NO: 232767 - DNA, 75 bp, synthetic construct
  source 1..75: mol_type = other DNA
tagagaatgcagaacttaatcgcatgattgaaaataatgaatattcaattttatttgctatgggaacttctgctt

SEQ ID NO: 232768 - DNA, 75 bp, synthetic construct
  source 1..75: mol_type = other DNA
tcacataaagtatcatcggaaaaatgtggcaaaccagaggttaatgctgtcatatggatgcatgaaggctctttt

SEQ ID NO: 232769 - DNA, 75 bp, synthetic construct
  source 1..75: mol_type = other DNA
caatactatggcatattgagtccaatattgaaaacacacccttggatataactgatttagtaaaatattctggtt

SEQ ID NO: 232770 - DNA, 75 bp, synthetic construct
  source 1..75: mol_type = other DNA
tgcactctctgacagtctgacggcatatcagcgcgatcaccgggccgtcattattgtggcaccggctgttgtggg

SEQ ID NO: 232771 - DNA, 75 bp, synthetic construct
  source 1..75: mol_type = other DNA
aacatgaaacagaccgtggatgcgttttttgacagcgccagtcagaaacaactgtcagaagcgcagtcaaaagcc

SEQ ID NO: 232772 - DNA, 75 bp, synthetic construct
  source 1..75: mol_type = other DNA
gtcctggaagcatctggaaaatagcaaaaacgaactgatcaaaatcttcaaacaagacacctcaatcagcgattt

SEQ ID NO: 232773 - DNA, 75 bp, synthetic construct
  source 1..75: mol_type = other DNA
agtcgagtcgctgagtgttaatggtgtaaaattcagggcgacagatggttttccagaaacagggtttgatggtgc

SEQ ID NO: 232774 - DNA, 75 bp, synthetic construct
  source 1..75: mol_type = other DNA
acggcgcaatggcgaatacgctgcgggcgagggtgaccgatgcgttcgggaatgcacttgccgggcagacggtca

SEQ ID NO: 232775 - DNA, 75 bp, synthetic construct
  source 1..75: mol_type = other DNA
cggtgccacgactgcttcgacggtcaccacgcagccggacggcacggtggagatctcagtcaccagccagaccgc

SEQ ID NO: 232776 - DNA, 60 bp, synthetic construct
  source 1..60: mol_type = other DNA
atgaaacatactgaactccgtgcagccgtactggatgcactggagaagcatgacaccggg

SEQ ID NO: 232777 - DNA, 75 bp, synthetic construct
  source 1..75: mol_type = other DNA
cgggccggactccaacaccttcctgtggaacaacgcaggcacgctggtaggcaactccaccacgtcgaacagcgg

SEQ ID NO: 232778 - DNA, 75 bp, synthetic construct
  source 1..75: mol_type = other DNA
cgctgtatcagagcggcaacaactacgccaccagctccattgccgattacgaccgtaacggcacgggcgatctgt

SEQ ID NO: 232779 - DNA, 75 bp, synthetic construct
  source 1..75: mol_type = other DNA
gttgtgggtggcgcagaagatattacggcagagattcagcagtcagtggctgcacgtatggcggaagggaagtga

SEQ ID NO: 232780 - DNA, 75 bp, synthetic construct
  source 1..75: mol_type = other DNA
gctggttatcgttggtggcaatgtacttatggtacaagttgtaagggaccatttattgtaggttctgttactggt

SEQ ID NO: 232781 - DNA, 75 bp, synthetic construct
  source 1..75: mol_type = other DNA
aatgggaggttaattttggtgataaaactttcactgtagattttgaacctacacctgataatccatttgttatta

SEQ ID NO: 232782 - DNA, 75 bp, synthetic construct
  source 1..75: mol_type = other DNA
tacgtccatcaggtctttctgctacatgtcctgttgctaaatttaatgtgtttgatagagattacgttattgata

SEQ ID NO: 232783 - DNA, 75 bp, synthetic construct
  source 1..75: mol_type = other DNA
gattaggtgctgcttatcgtggcgttcgtggtgctatcgcgccagaagcgcagcaggctatcagatttgcagagc

SEQ ID NO: 232784 - DNA, 75 bp, synthetic construct
  source 1..75: mol_type = other DNA
ttcagcagattgatactgagatatctaacctgcagaagcttggtaaggtcgctgataacgagacgatttcaaaac

SEQ ID NO: 232785 - DNA, 75 bp, synthetic construct
  source 1..75: mol_type = other DNA
tcgagcaccagataaatcttgtagctataagcttaatattttgtctgtaaatgaagggcaagagggtagctcttc

SEQ ID NO: 232786 - DNA, 75 bp, synthetic construct
  source 1..75: mol_type = other DNA
catgaatatcaccagggtaattattgcacacagagaaacaacgttgagaactgttgatagagttatttctattta

SEQ ID NO: 232787 - DNA, 75 bp, synthetic construct
  source 1..75: mol_type = other DNA
cgtttattttatgggatacacccttctgttttagaaaatgacaaattgacacttgaaagatataatgcaaatttg

SEQ ID NO: 232788 - DNA, 75 bp, synthetic construct
  source 1..75: mol_type = other DNA
tcattatcgtggccccggcggtggtgggggggggcgaagacatcaccccggttgtgcagcaggcgattgcagaaa

SEQ ID NO: 232789 - DNA, 75 bp, synthetic construct
  source 1..75: mol_type = other DNA
ttatcgctttaacatctctttttatattttttttctctttattaattccagtgcagaaagtttactctaatcctt

SEQ ID NO: 232790 - DNA, 75 bp, synthetic construct
  source 1..75: mol_type = other DNA
accgaggttaaagagaatatacgaactgtatgcgagtggttttcccttaaaaaatccgtagatttcgaaagtatc

SEQ ID NO: 232791 - DNA, 75 bp, synthetic construct
  source 1..75: mol_type = other DNA
tcttgatgatattataacaaaaattaatatttttgctaaatcatacatccattcgaataggaaaccaaatgggct

SEQ ID NO: 232792 - DNA, 75 bp, synthetic construct
  source 1..75: mol_type = other DNA
ggacggctcagtggctgacggcgcgacggcgaatacgctgcaggtgaaggtcactgatgctaacggtaatgcgct

SEQ ID NO: 232793 - DNA, 75 bp, synthetic construct
  source 1..75: mol_type = other DNA
atccgggataacgcggtggcagacggttcgacggcgaatacgctgcaggtgaaggtcaccgatgctaacggtaat

SEQ ID NO: 232794 - DNA, 75 bp, synthetic construct
  source 1..75: mol_type = other DNA
tcagtgttaccagtcagacggcgggagttagcgcagtcaccgtcagcatcaacagcagcagtcagagccgggacg

SEQ ID NO: 232795 - DNA, 75 bp, synthetic construct
  source 1..75: mol_type = other DNA
cagggcgacagatggttttccagaaacagggtttgatggtgcaaaattcacgctgttactaacccataatatgaa

SEQ ID NO: 232796 - DNA, 75 bp, synthetic construct
  source 1..75: mol_type = other DNA
cggacagacggtcagcgtttcagcgggcaacggggcagcggttgccgcgacggttatcaccgggccggacggcgc

SEQ ID NO: 232797 - DNA, 75 bp, synthetic construct
  source 1..75: mol_type = other DNA
cttataggggttcacgagaaattcaatcctgaaactggtatatcaacaccaggatcaggaaagtcttctggtttg

SEQ ID NO: 232798 - DNA, 75 bp, synthetic construct
  source 1..75: mol_type = other DNA
atacttcatgtagctatggtcaaatgccgtcatctttagaattagcgcagcggccaagcggtggggtagtaccgc

SEQ ID NO: 232799 - DNA, 75 bp, synthetic construct
  source 1..75: mol_type = other DNA
agaacgtcacctttgtacctggtgatgcatcgcaactcacttcaatcgttgaaacaaataagtcgaactatacgg

SEQ ID NO: 232800 - DNA, 75 bp, synthetic construct
  source 1..75: mol_type = other DNA
agatccaaacgttaacttcatggatcgctactattttgatgatgaagaaattgggttacatgttaaaacgtcaca

SEQ ID NO: 232801 - DNA, 75 bp, synthetic construct
  source 1..75: mol_type = other DNA
aactcaatcaacgattgtcgcggacaaaacgatatatatcgctggggatagcataacggtgaccgttgttcttaa

SEQ ID NO: 232802 - DNA, 75 bp, synthetic construct
  source 1..75: mol_type = other DNA
agcagtcagagccgggacgtgacatttatcgccgatgtcaggacggcgaagatcgctgaactggaggtcatccgg

SEQ ID NO: 232803 - DNA, 75 bp, synthetic construct
  source 1..75: mol_type = other DNA
aacgggcagattgccaaattcgtaactgagcaaggccattctatggctgtttatgatgcgtatggtgcacagcag

SEQ ID NO: 232804 - DNA, 75 bp, synthetic construct
  source 1..75: mol_type = other DNA
cggattattggacaagcactcagctcatgggagtacacgagaaatttaatcctgaaactggtatatcagagcttg

SEQ ID NO: 232805 - DNA, 75 bp, synthetic construct
  source 1..75: mol_type = other DNA
gacaacggacagctaatccgcatcagcggcccgcaggagagccgggagtaccgttacagcgacacgggaaggctg

SEQ ID NO: 232806 - DNA, 75 bp, synthetic construct
  source 1..75: mol_type = other DNA
cgctggctacggatattcaggggcttcgtgaccagttgctgaatctggcgaacaccactgacggtaatgggcgct

SEQ ID NO: 232807 - DNA, 75 bp, synthetic construct
  source 1..75: mol_type = other DNA
agagaaaaatcaaataatgtctttcctttcatctagaattgagttactaggagacattctttatgatcaaatcaa

SEQ ID NO: 232808 - DNA, 75 bp, synthetic construct
  source 1..75: mol_type = other DNA
gcacggtggagatcagtgtcaccagccagacggcgggcaccagtactgtcactgccagcatcaacagcagcagcc

SEQ ID NO: 232809 - DNA, 75 bp, synthetic construct
  source 1..75: mol_type = other DNA
tggagcgcgacggcaaagatccgcaaatgcaggtcgcggaagtggcgcagcaaagcggaacacttttagcgcgcg

SEQ ID NO: 232810 - DNA, 75 bp, synthetic construct
  source 1..75: mol_type = other DNA
gaacccgcatcacctgcaccagccgtaccggctgccggggcagcagtatgataaggagtcggggctgtactacaa

SEQ ID NO: 232811 - DNA, 75 bp, synthetic construct
  source 1..75: mol_type = other DNA
cacagggccggacggcacggtggaaatcagtgtcaccagccagacggcgggagtcagtgcagtcactgcaaccat

SEQ ID NO: 232812 - DNA, 75 bp, synthetic construct
  source 1..75: mol_type = other DNA
ctcctggagacacctggaaaacagcaaaaatgaattgatcaaaatcttcaaacaagacgcatccatcagcgattt

SEQ ID NO: 232813 - DNA, 75 bp, synthetic construct
  source 1..75: mol_type = other DNA
accagcgaaacacacaatgcttgcatattcgtaagcatcgtttggctggtttttttgtccgactcgttgtcgcct

SEQ ID NO: 232814 - DNA, 75 bp, synthetic construct
  source 1..75: mol_type = other DNA
ggattcattccggaaatttctggcgtttttattgttgtgatcgcaaccgtccaaacgatttatggattcggataa

SEQ ID NO: 232815 - DNA, 75 bp, synthetic construct
  source 1..75: mol_type = other DNA
tgattcggaattgaaaattcagttaaaaactctgaaaaaacagatgatcatatttggtcattacttaaagatatt

SEQ ID NO: 232816 - DNA, 75 bp, synthetic construct
  source 1..75: mol_type = other DNA
agatcgcggaactggtggtcattaaggacgactcagtggcagacggtgcaatggcgaatatgctgcgggcgagag

SEQ ID NO: 232817 - DNA, 75 bp, synthetic construct
  source 1..75: mol_type = other DNA
aacaggatctatttgaggcgctaaatgaaaccttaacgctatggaactcgccgcccgactgggctggcgatgagc

SEQ ID NO: 232818 - DNA, 75 bp, synthetic construct
  source 1..75: mol_type = other DNA
atgataaaaaatttgcgctgtgaagatattatgcctggccgatggaccactcaacttgtcaataagcacttaggt

SEQ ID NO: 232819 - DNA, 75 bp, synthetic construct
  source 1..75: mol_type = other DNA
ggtccgttaaatcatttttttaataattgtagcgagattgaaccatgggttttaatcggtggtggacttattatt

SEQ ID NO: 232820 - DNA, 75 bp, synthetic construct
  source 1..75: mol_type = other DNA
taaaaacagagattttctccgagtgtttaggcataatcccttatcttccgcgagaacaggcccatttattaagtg

SEQ ID NO: 232821 - DNA, 75 bp, synthetic construct
  source 1..75: mol_type = other DNA
gctgcgagcccctatgtaattcgccgactccccccttattttcacggcggacttcaagcccaaaatactgttcag

SEQ ID NO: 232822 - DNA, 75 bp, synthetic construct
  source 1..75: mol_type = other DNA
tcatccagaagaatgaatggtattgattctatttctattggttctggttctgctattggctatggtgacaatagc

SEQ ID NO: 232823 - DNA, 75 bp, synthetic construct
  source 1..75: mol_type = other DNA
gaaaactataatcctgaatacaaagcctggaaggttgaaacgcttcctttacgtctttatcccgtgaagtatcag

SEQ ID NO: 232824 - DNA, 75 bp, synthetic construct
  source 1..75: mol_type = other DNA
gagcagtttacccgtgactttgatggcaagccattctctcatgtggtaaataacggggatgatatacatatggga

SEQ ID NO: 232825 - DNA, 75 bp, synthetic construct
  source 1..75: mol_type = other DNA
attatcaccatcagcattacatctattaatacaaatggggatgcatgaaaacattgttctttttttgataaattt

SEQ ID NO: 232826 - DNA, 75 bp, synthetic construct
  source 1..75: mol_type = other DNA
ctaaaggacctggaggaacatatgggttatgtatgttactgcaatacgataatcttaataagattaatgaatata

SEQ ID NO: 232827 - DNA, 75 bp, synthetic construct
  source 1..75: mol_type = other DNA
tcaaaggttcttgagattcttgctgctaaaggaccagggggaacatatgggttatgtatgtcactgcaacacgat

SEQ ID NO: 232828 - DNA, 75 bp, synthetic construct
  source 1..75: mol_type = other DNA
ataaagcaaaaaactgtgattcttttgggtcattacaatcatttataaatattgagttggcgaatataaaatggg

SEQ ID NO: 232829 - DNA, 75 bp, synthetic construct
  source 1..75: mol_type = other DNA
tgtagctttatcaaaaaataaaaataaaaatgaaagtgtcaaggcattgttgtcagcgatagatgactttgagaa

SEQ ID NO: 232830 - DNA, 75 bp, synthetic construct
  source 1..75: mol_type = other DNA
gatgctctataacatcttcaatgagtttctggacgacctcaacgaggatgtcctgcctaatgaccgcacgggcta

SEQ ID NO: 232831 - DNA, 75 bp, synthetic construct
  source 1..75: mol_type = other DNA
ggaggttttatttaattttccctctattatcgattgccatcgcaagcaagagatatggtatgtttgccatttccg

SEQ ID NO: 232832 - DNA, 75 bp, synthetic construct
  source 1..75: mol_type = other DNA
taattaattatggagactattatgatgttgattattatgataacaatttgaaaaatgaagtttttgactggattg

SEQ ID NO: 232833 - DNA, 75 bp, synthetic construct
  source 1..75: mol_type = other DNA
cactggtacgtcgcctggcaaaactgccaaaaccggtgatctgtgcagtcaatggcgtggcggcaggggctggcg

SEQ ID NO: 232834 - DNA, 72 bp, synthetic construct
  source 1..72: mol_type = other DNA
atgatgactgccgagaacgtgcattttgtatgcccatcccagcacgactgccggatgcggcgtgaacgcctt

SEQ ID NO: 232835 - DNA, 75 bp, synthetic construct
  source 1..75: mol_type = other DNA
atcagaagccagtacagaatacgccagggcaacaatctactactggcagtaacttttcttcactatggggtgatt

SEQ ID NO: 232836 - DNA, 75 bp, synthetic construct
  source 1..75: mol_type = other DNA
ctctttcccgagaaatacaaagagcagaattacaagaaaaggctctggacagacagatagccagagaaagcaatc

SEQ ID NO: 232837 - DNA, 75 bp, synthetic construct
  source 1..75: mol_type = other DNA
aggatgcagatacactggaaaaaatactgcttgtcaaactgtatctgaagacggttcttattctgacagtggtaa

SEQ ID NO: 232838 - DNA, 75 bp, synthetic construct
  source 1..75: mol_type = other DNA
cgggacaacggcatccgtctgtctgccgtgtggctgacgcacgacccggaatacccggagaatttacctgccgcg

SEQ ID NO: 232839 - DNA, 75 bp, synthetic construct
  source 1..75: mol_type = other DNA
atacgcactctttttgagtatgcaagcaatcaaccttgcgttctatttctggacgaacttgatgctttggcaaaa

SEQ ID NO: 232840 - DNA, 75 bp, synthetic construct
  source 1..75: mol_type = other DNA
acccgattgcggtggaacctggttactgccacgcgttgccggacgagcgcgcgccatggggctggcactgctggg

SEQ ID NO: 232841 - DNA, 75 bp, synthetic construct
  source 1..75: mol_type = other DNA
ccggtgatctgtgcagtcaatggcgtggcggcaggggcaggcgcaacactggcactggggtgcgacatcgttatt

SEQ ID NO: 232842 - DNA, 75 bp, synthetic construct
  source 1..75: mol_type = other DNA
acgtcgcctggcaaaactgccaaaaccggtgatctgtgcagtcaatggcgtggcggcaggggcaggcgcaacact

SEQ ID NO: 232843 - DNA, 75 bp, synthetic construct
  source 1..75: mol_type = other DNA
atttcagtgaccatccgcttatgcctccgccctctgcacaactatttgcagaacaccttcccaccgagtggatac

SEQ ID NO: 232844 - DNA, 75 bp, synthetic construct
  source 1..75: mol_type = other DNA
agttttctacgcaagaaattcgcgcctatttgccgctgacgctcggcaaccactcggtgacgccgtatacgcgca

SEQ ID NO: 232845 - DNA, 75 bp, synthetic construct
  source 1..75: mol_type = other DNA
aatgacataaaaattccagttaacgccaaagaattcgcaacatataaaatgtcaaaatttactggttcattatgg

SEQ ID NO: 232846 - DNA, 75 bp, synthetic construct
  source 1..75: mol_type = other DNA
tcctctatcaaggatctggaaacgcaatcccaggcattcaaccgcctgaatgagcgcgttaaaaagacagcccag

SEQ ID NO: 232847 - DNA, 75 bp, synthetic construct
  source 1..75: mol_type = other DNA
aactgaccgctctattcgatcacggccaacccgtgatcgattcagatgccattttgtacgttgtgcaacttctgt

SEQ ID NO: 232848 - DNA, 75 bp, synthetic construct
  source 1..75: mol_type = other DNA
aatgatgttacatccctgtcactggaattaaattcaggttttaattatttctttacagacatactggatggatgt

SEQ ID NO: 232849 - DNA, 75 bp, synthetic construct
  source 1..75: mol_type = other DNA
ggtgcacacgcgcatactgtcggtattggtgctcatacgcactccgttgcgattggttcacatggacacaccatc

SEQ ID NO: 232850 - DNA, 75 bp, synthetic construct
  source 1..75: mol_type = other DNA
tcaggaacgcatttacgaaaagatatccctgcttggggtacaggaccgggtgtttgttcatcctggcaccgatga

SEQ ID NO: 232851 - DNA, 75 bp, synthetic construct
  source 1..75: mol_type = other DNA
agtatatatattgaatttcttcataataatagtcactacatcaagaacagtgcttgttttatatattctcttaac

SEQ ID NO: 232852 - DNA, 75 bp, synthetic construct
  source 1..75: mol_type = other DNA
gggaagtatattcaggaaaaaaatattcttgtcagcatcaatgacgtttatactatcatttacacttctgtcatt

SEQ ID NO: 232853 - DNA, 75 bp, synthetic construct
  source 1..75: mol_type = other DNA
gttcattttttgatgaaaatccatatttcgctgaaagccctcattcatttttctttgaaatgtttttaacttatg

SEQ ID NO: 232854 - DNA, 75 bp, synthetic construct
  source 1..75: mol_type = other DNA
gccagtggcggctaatctggggattagccttgaacaggcctcagcgatggcgggtatgcttgccaataacggtct

SEQ ID NO: 232855 - DNA, 75 bp, synthetic construct
  source 1..75: mol_type = other DNA
gccagcgttgcaacacgtctcgatatcactacccacagcctttatgcctggataaagaagtacggtccggattac

SEQ ID NO: 232856 - DNA, 75 bp, synthetic construct
  source 1..75: mol_type = other DNA
gataaagaagtacggtccggattactctaccttttcatcaatccaatccgcccaccactgcatcatttctctgcg

SEQ ID NO: 232857 - DNA, 75 bp, synthetic construct
  source 1..75: mol_type = other DNA
cttggaaaacgaggttgattatcttaatgagttaaaaagaatttcgaaaataaattctttagatgataagactct

SEQ ID NO: 232858 - DNA, 75 bp, synthetic construct
  source 1..75: mol_type = other DNA
gcacttacgtaatattgggtatcttgctgttaacctgtacttctgtttactgcaaaggattacagcgagtgggtt

SEQ ID NO: 232859 - DNA, 75 bp, synthetic construct
  source 1..75: mol_type = other DNA
agcaggcgaaagattacgcacccagccatttcctgctctacgtacgttattccgccgccggatggcagggtgaca

SEQ ID NO: 232860 - DNA, 75 bp, synthetic construct
  source 1..75: mol_type = other DNA
agtttaaatttgaagctgtcaaacaggttgttgaacgtggcgattcagttaccagatacaaaggccgtctggata

SEQ ID NO: 232861 - DNA, 75 bp, synthetic construct
  source 1..75: mol_type = other DNA
atgagcactatcactaaagaacgtatcgaatttttcattaaatccccgcttgataacggacttactcgtggcgaa

SEQ ID NO: 232862 - DNA, 75 bp, synthetic construct
  source 1..75: mol_type = other DNA
gggccgctggcaaaactgcgtcttgggtttgccctgctgaccggcacatccggcctcggtcgtgcgctgccgtta

SEQ ID NO: 232863 - DNA, 75 bp, synthetic construct
  source 1..75: mol_type = other DNA
gcccgcgacattgcacggatggtggctgatgcagttggggcggaactaaacaaacgttcccgctctggtagcagt

SEQ ID NO: 232864 - DNA, 75 bp, synthetic construct
  source 1..75: mol_type = other DNA
attactccagtgttctttggtactgcgctgggtaacttcggcgttgatcatatgctggatggcctggtggagtgg

SEQ ID NO: 232865 - DNA, 75 bp, synthetic construct
  source 1..75: mol_type = other DNA
actctcaatggtattgcattgattatggctttgttcgtgatgaaacccattattgaagctggttatgaaaattat

SEQ ID NO: 232866 - DNA, 75 bp, synthetic construct
  source 1..75: mol_type = other DNA
aaaaagcggcggatgttgccggaaaattggctctgctcataaatcaggatctggatgcgcctgttgctgctgtgg

SEQ ID NO: 232867 - DNA, 75 bp, synthetic construct
  source 1..75: mol_type = other DNA
ccttattcttagcaacttgccttatagggaaaacgttgatagcattcgcagagtttctctacgagcaaaaaaaac

SEQ ID NO: 232868 - DNA, 75 bp, synthetic construct
  source 1..75: mol_type = other DNA
aaaatattccatttaaaggacaaataggtaatatagtaaagatcgtattcggaccagattatcaatatacaacct

SEQ ID NO: 232869 - DNA, 75 bp, synthetic construct
  source 1..75: mol_type = other DNA
aacggcaagaaccattggtggcgtttcatttgatggctccgccaatatcaacctgccgggcgtgaatattgctgg

SEQ ID NO: 232870 - DNA, 75 bp, synthetic construct
  source 1..75: mol_type = other DNA
gggagcagaccctgcgcctcctgtagaagaagtaaaatggttggaagagtacaaaaaatttattgaattggatca

SEQ ID NO: 232871 - DNA, 75 bp, synthetic construct
  source 1..75: mol_type = other DNA
tcaaaagcgttcattagcaaaacactttgcccgaaactggcgaacatccagctccgactgcgactgctgctccag

SEQ ID NO: 232872 - DNA, 75 bp, synthetic construct
  source 1..75: mol_type = other DNA
aagcaacattaactcaactatctgcgattgataatattgattcaacagttataaaaggtttagagctttcgctta

SEQ ID NO: 232873 - DNA, 75 bp, synthetic construct
  source 1..75: mol_type = other DNA
aaatcactcggcagtgcatgggaagggctgcgtatccgcattgccgatctgattgacggtccgctgcgttctgtc

SEQ ID NO: 232874 - DNA, 75 bp, synthetic construct
  source 1..75: mol_type = other DNA
gccaccctgcgtcttggttttgacattcttacccggtcaatgaatgtcgtcagggtgttgcctgcgctgtgggga

SEQ ID NO: 232875 - DNA, 75 bp, synthetic construct
  source 1..75: mol_type = other DNA
gttctttaaggacattgccggagaagaggctttcacatcatttatggccctcgttgatgcggcaggtgacggctc

SEQ ID NO: 232876 - DNA, 75 bp, synthetic construct
  source 1..75: mol_type = other DNA
gatgctatagagggagggatcttaaaaataactggtacatctaatacaagagttaatttagatggtaatgactgg

SEQ ID NO: 232877 - DNA, 75 bp, synthetic construct
  source 1..75: mol_type = other DNA
cagtttggtgactccatccagcgaacgcagggggcgatcaaaaatctcgagcgtcaggcgcgttcatttgagcgc

SEQ ID NO: 232878 - DNA, 75 bp, synthetic construct
  source 1..75: mol_type = other DNA
gtttttctctcctgaccggatcaatgaatgctgtcagggttctgcctgcattatggggaatggtgacaggctcca

SEQ ID NO: 232879 - DNA, 75 bp, synthetic construct
  source 1..75: mol_type = other DNA
gtttgatagaaatgattttggcgaatttttaaattggctcatgtttttatcgaataaatccgctcatgagaatcc

SEQ ID NO: 232880 - DNA, 75 bp, synthetic construct
  source 1..75: mol_type = other DNA
tcacggatgttcgctgttatgcctcgctggtttgtgtcatctcggaagccaaggccaccctgactgacgaagtta

SEQ ID NO: 232881 - DNA, 75 bp, synthetic construct
  source 1..75: mol_type = other DNA
gcaaccatatcgctgtattcgaacgatacggaataaccccaaacgatagcattactacaattcatgcgcttcgaa

SEQ ID NO: 232882 - DNA, 75 bp, synthetic construct
  source 1..75: mol_type = other DNA
tcagggatggcacgggtagagggcgagttattcaaaattgcactggcatcgctggaagcagaaccaataggtgct

SEQ ID NO: 232883 - DNA, 75 bp, synthetic construct
  source 1..75: mol_type = other DNA
ataccacacttatcagtgaatttggttccacggcctgcaaagcattgtatcgctgcgatagctgtcgcgaacctt

SEQ ID NO: 232884 - DNA, 75 bp, synthetic construct
  source 1..75: mol_type = other DNA
atgcaacgtctggccaccattgcaccgccacaggttcatgagatatgggcgctactcagccagatcccggacccg

SEQ ID NO: 232885 - DNA, 75 bp, synthetic construct
  source 1..75: mol_type = other DNA
cacttcgtgaagcatgaagccactaaactgcttggtgccacgccaatgatgtctaacaattcattcaagccgacg

SEQ ID NO: 232886 - DNA, 75 bp, synthetic construct
  source 1..75: mol_type = other DNA
ctgcaatctgctgaaaatatcaaggataatgcatatctccggttcgtatcaaaaataaacaatgatcatgatgct

SEQ ID NO: 232887 - DNA, 75 bp, synthetic construct
  source 1..75: mol_type = other DNA
tgaatttgttcatttgttaggtattaaatttaactcctcaagattacaacaaatctctttgcttcttaataaatt

SEQ ID NO: 232888 - DNA, 75 bp, synthetic construct
  source 1..75: mol_type = other DNA
agcattccggcccaggcttttaccattatcctgcacgatggcacattttgtctgcgcccgcagacggtacaactg

SEQ ID NO: 232889 - DNA, 75 bp, synthetic construct
  source 1..75: mol_type = other DNA
aggatgctcagcaagtggttatatttctaatagtgtattctccgacaatgtttatgaaatcaaactcgctgtttc

SEQ ID NO: 232890 - DNA, 75 bp, synthetic construct
  source 1..75: mol_type = other DNA
gtgcggctcgtggctttggtcgtgtctggactgaagctgcgttaaaaagaggggatagcgttattgctactgcac

SEQ ID NO: 232891 - DNA, 75 bp, synthetic construct
  source 1..75: mol_type = other DNA
gctatctatgaataaagtttatcctactaaattgtcaactttgttaattgatgatcctgtacaaacaatggatga

SEQ ID NO: 232892 - DNA, 75 bp, synthetic construct
  source 1..75: mol_type = other DNA
tggatggttttctgaaaggtaaatgcatcccaaatgatttaaaggttaacgaaacaaacgctgaatatctggtgc

SEQ ID NO: 232893 - DNA, 75 bp, synthetic construct
  source 1..75: mol_type = other DNA
tcctccgcctgtgcgcgtcagagtttagcgaatttttcgagggtgcgaataagctgtgtgacgaagccatattcg

SEQ ID NO: 232894 - DNA, 75 bp, synthetic construct
  source 1..75: mol_type = other DNA
gctttcagccaccatgtcttccgccagctccgatgccatcgcggcggtggcgattatgatgcgcgacgtctacac

SEQ ID NO: 232895 - DNA, 75 bp, synthetic construct
  source 1..75: mol_type = other DNA
gatatcatatctttattatcagattggggagagatgctattccttctcatactgtattgtctcggcagtatgata

SEQ ID NO: 232896 - DNA, 75 bp, synthetic construct
  source 1..75: mol_type = other DNA
ttgacagataacatcagccagtcctttttcctgcgccatcccggtaatgttactgagctccggattgaagaatga

SEQ ID NO: 232897 - DNA, 75 bp, synthetic construct
  source 1..75: mol_type = other DNA
tcaccggtttatccccgctggcgcggggaactctgccgttcgccgcgtgcagggggaaacggattcggtttatcc

SEQ ID NO: 232898 - DNA, 75 bp, synthetic construct
  source 1..75: mol_type = other DNA
taatgaatttgagtctgaaaaccggagcggacgcatttcacgacgtaagacggtcctggtccggcaggcatccgg

SEQ ID NO: 232899 - DNA, 75 bp, synthetic construct
  source 1..75: mol_type = other DNA
gacagtaactgcaccttctgccttttcgcgtatgcatgttacacctgcaattgccgcctttctccggcgatatcc

SEQ ID NO: 232900 - DNA, 75 bp, synthetic construct
  source 1..75: mol_type = other DNA
tattagcaatgaaaaccatgaacatttagagtttttaaccacttatataatgcccttagttttcactgatgtcga

SEQ ID NO: 232901 - DNA, 75 bp, synthetic construct
  source 1..75: mol_type = other DNA
cgattatgatgcgcgacgtctacaccatgattaccggcagaatgccgccggaggacaaggccattacttactcac

SEQ ID NO: 232902 - DNA, 75 bp, synthetic construct
  source 1..75: mol_type = other DNA
tcgccttagcttttgcgatttacgttattatcggcggttattcggcggtagtgtggacagacaccattcaggcct

SEQ ID NO: 232903 - DNA, 75 bp, synthetic construct
  source 1..75: mol_type = other DNA
tggtggacgacgcggcgaacgccatcagttgcgtgatgtgcggggacgttttgctccagcttcacgcagcaggaa

SEQ ID NO: 232904 - DNA, 75 bp, synthetic construct
  source 1..75: mol_type = other DNA
gccgtttataatagcatccgggacatgttttattaaattctcgattgtttttgttattgtccgaaacgcgctggg

SEQ ID NO: 232905 - DNA, 75 bp, synthetic construct
  source 1..75: mol_type = other DNA
aggcgggacgtgaagtgctccggcacagtaaccggggttttgcctgtgaacagggctggaatgcagccggtcagc

SEQ ID NO: 232906 - DNA, 75 bp, synthetic construct
  source 1..75: mol_type = other DNA
aaagtaataaggaaagcagataaatatttgccaccaaatgctagggcagcttttgattatggccttcgcaatatt

SEQ ID NO: 232907 - DNA, 75 bp, synthetic construct
  source 1..75: mol_type = other DNA
gatttatggctcagcattggcttacaacttatgccggcgattggcgagctggcgcaaagccttgcgccggttatt

SEQ ID NO: 232908 - DNA, 75 bp, synthetic construct
  source 1..75: mol_type = other DNA
tggcggagagctgaaacgccacggcatttccctgacaggcagcgataacacaatccagcaggccatcagacgcac

SEQ ID NO: 232909 - DNA, 75 bp, synthetic construct
  source 1..75: mol_type = other DNA
tggggaatggagatgatacgatattagccttaggatggagtgatggtggtaatgctgtgcagaactcaattatag

SEQ ID NO: 232910 - DNA, 75 bp, synthetic construct
  source 1..75: mol_type = other DNA
gtctggcgttaccgctatgacgccgatggcctgtgtaccgccagggtcaacggcctggaggaaaccatcctctac

SEQ ID NO: 232911 - DNA, 75 bp, synthetic construct
  source 1..75: mol_type = other DNA
gtttcatttggtgtttgctcatatttttatcaattcagatttggtcatggccctttaaacttcggattgtgggca

SEQ ID NO: 232912 - DNA, 75 bp, synthetic construct
  source 1..75: mol_type = other DNA
tgagacaggcatgagtggttataaatcatatttgataaaatattctgacctgagttggttagcttttttgaaaag

SEQ ID NO: 232913 - DNA, 75 bp, synthetic construct
  source 1..75: mol_type = other DNA
aaaagtgcatttattataggtttttatatctatttaccctttgtcgtagtggatctggttatatccagcgttctg

SEQ ID NO: 232914 - DNA, 75 bp, synthetic construct
  source 1..75: mol_type = other DNA
agcactgcgctgcaatcgatggtgacgcagtttaatctgggcgaaatgttcggcgatgcgcaaacggtggaattc

SEQ ID NO: 232915 - DNA, 75 bp, synthetic construct
  source 1..75: mol_type = other DNA
tctccaggttcttttctaccatctggcaacgtatcaccacggcctttgacggcggcattgcagaaatttgtcggt

SEQ ID NO: 232916 - DNA, 75 bp, synthetic construct
  source 1..75: mol_type = other DNA
tgatgaatcccattggtctggtcatcactgcgattgcgggcgctgcttatctgatttatcgcaactgggagccta

SEQ ID NO: 232917 - DNA, 75 bp, synthetic construct
  source 1..75: mol_type = other DNA
acccggcgggaaaccgcctgccggacccggagctacacccggacagcacgctcacggcgtggccggataaccgca

SEQ ID NO: 232918 - DNA, 75 bp, synthetic construct
  source 1..75: mol_type = other DNA
gggttaatcagcgacgaagataaagaaaagctgaaagcctgtcgtatttacgcgaaatcgctgcaggcgatggat

SEQ ID NO: 232919 - DNA, 75 bp, synthetic construct
  source 1..75: mol_type = other DNA
caaagaagaagatgctaaaatatctttttcttttgagtttgatgattttaaagttgcatgggatttcaaatatcc

SEQ ID NO: 232920 - DNA, 75 bp, synthetic construct
  source 1..75: mol_type = other DNA
cacctgtaactaaaaactctcagcaagttaaaggccactatggagataaatttaaagaaatgcagatgttcctta

SEQ ID NO: 232921 - DNA, 75 bp, synthetic construct
  source 1..75: mol_type = other DNA
caatgtagctaatagtggatggaacacaaataatgagtctgaaggtatttgtagaatttacgcttttaataaaga

SEQ ID NO: 232922 - DNA, 75 bp, synthetic construct
  source 1..75: mol_type = other DNA
aatttgctgtatcaactcaggcttatgtgcgtaagtgctttacacttgattggagaggaactggaggatgaaagt

SEQ ID NO: 232923 - DNA, 75 bp, synthetic construct
  source 1..75: mol_type = other DNA
gtggtgtgggtcggtaaggatgtgacaggcatcgagccacgcaatgccagcgttatcgaagttccggatattacc

SEQ ID NO: 232924 - DNA, 75 bp, synthetic construct
  source 1..75: mol_type = other DNA
tataaaaacgaactcagcgatctgttcatctgcaacgaagcgctggtggtcagcgatggctacaacgcccgtatt

SEQ ID NO: 232925 - DNA, 75 bp, synthetic construct
  source 1..75: mol_type = other DNA
cagtcagaaaaaaattcgctgctgagtaaaattcttgataatgcggtcgtcgcgaccggcgttgaagatgtgttt

SEQ ID NO: 232926 - DNA, 75 bp, synthetic construct
  source 1..75: mol_type = other DNA
agcaatgcctgaaatggtttgctgaacaggactgggaagtgctgcacgggcccgatatcgcgccggatggcgaca

SEQ ID NO: 232927 - DNA, 75 bp, synthetic construct
  source 1..75: mol_type = other DNA
tatgaaaaccacacagataaggtttcaactgtaactaaaaattctcagcaagttaaggaaggtgcgaacaagttc

SEQ ID NO: 232928 - DNA, 75 bp, synthetic construct
  source 1..75: mol_type = other DNA
tttttcaattgatgttgaatgaaaaattatatacacaacaacaaataaaatcatattccctggacagtctttatt

SEQ ID NO: 232929 - DNA, 75 bp, synthetic construct
  source 1..75: mol_type = other DNA
acgctgaaccgggagactggcgcttataaatacggttacgccaaacatatgcgcgatgcgttacccaatgcgtcg

SEQ ID NO: 232930 - DNA, 75 bp, synthetic construct
  source 1..75: mol_type = other DNA
tagttgataaccatatctatgatattaaaaatgatatggtgagtggttactgttttcctaacagcttgtttccag

SEQ ID NO: 232931 - DNA, 75 bp, synthetic construct
  source 1..75: mol_type = other DNA
ggaaacgaagaaatccggtctgatgggtaccggcggtattggcttcaccattggcagcagtaagacaacgcacga

SEQ ID NO: 232932 - DNA, 75 bp, synthetic construct
  source 1..75: mol_type = other DNA
aaacttcatagggcacaatgctggaattaatgataacgatgcagcgaaagccattgctcatgccattctcggcgg

SEQ ID NO: 232933 - DNA, 75 bp, synthetic construct
  source 1..75: mol_type = other DNA
cggaatgtttgccggtgacggcggcttcgacatcacagtgggtaaacatacccaactggatggtgcggtgattgc

SEQ ID NO: 232934 - DNA, 75 bp, synthetic construct
  source 1..75: mol_type = other DNA
tgaagctatcgaacaggtggttaaataccagcgtgatgtcagagaagtcgcgctggcactcgagctcaaccctga

SEQ ID NO: 232935 - DNA, 75 bp, synthetic construct
  source 1..75: mol_type = other DNA
cgtaaagccaatcagattaaaagtgtaagacctaaagaaaaacattctgaagtgtttgagtggaaaagaccagaa

SEQ ID NO: 232936 - DNA, 75 bp, synthetic construct
  source 1..75: mol_type = other DNA
aagcaactcttagtcctaatgtaaaggatagaaatggctatcaacaatgtaaagcaggtaagtgtggccttgatg

SEQ ID NO: 232937 - DNA, 75 bp, synthetic construct
  source 1..75: mol_type = other DNA
tggtatgttgttgaaaagataacaaagaaaattaaaaaagagtccaataaactgatagagcatttgaaaaaatta

SEQ ID NO: 232938 - DNA, 75 bp, synthetic construct
  source 1..75: mol_type = other DNA
ttatttagtatatcaaccgattgttgatatggataataatagggttgtaggcgctgaggcgttatgccgctggtt

SEQ ID NO: 232939 - DNA, 75 bp, synthetic construct
  source 1..75: mol_type = other DNA
gaaaaatcaaaggtgaatccagcaaactgatagaccatctgaaaaaattagctaattcagtatatcgaaacgaca

SEQ ID NO: 232940 - DNA, 75 bp, synthetic construct
  source 1..75: mol_type = other DNA
gcaggtgaaaatggtctgatatttacgggtgcacatgacccgcgtaaaccaatcagtgaaaacaccgtaaataaa

SEQ ID NO: 232941 - DNA, 75 bp, synthetic construct
  source 1..75: mol_type = other DNA
ctgaaggtcgacggggaggatttgtacccggattatgttctggatgagaaaatgcggcctctcaaggttgtcagg

SEQ ID NO: 232942 - DNA, 75 bp, synthetic construct
  source 1..75: mol_type = other DNA
tttgaaaaaactttataaagtaaggcctgatagcattaaaattgattcggagtttacctcaggaattttcgatga

SEQ ID NO: 232943 - DNA, 75 bp, synthetic construct
  source 1..75: mol_type = other DNA
agcctatggcgcaacggccgatatgtcggcaaaaatcggtggtgaaggggatctggcaatcaatacggtgcgaca

SEQ ID NO: 232944 - DNA, 75 bp, synthetic construct
  source 1..75: mol_type = other DNA
atcaacgaacagcgcaggagattacacgctgaccaatgcgctcaaaggcgatggcttgatgcgagtgcagctgtc

SEQ ID NO: 232945 - DNA, 75 bp, synthetic construct
  source 1..75: mol_type = other DNA
ctggagtaccgtcggcttacatatattgaagatgtcaggaaatcagaggatatactgaaccgactggagtttatt

SEQ ID NO: 232946 - DNA, 75 bp, synthetic construct
  source 1..75: mol_type = other DNA
ctattacagggaattatgataatattaagcccctgtcatacgttaataccaactttgattatttgtgttttacag

SEQ ID NO: 232947 - DNA, 75 bp, synthetic construct
  source 1..75: mol_type = other DNA
cagaggaaatattgctagtgacggtctgttaacgctaaaaaacgtgaccggcgaacttaacgaatgttggtgcgc

SEQ ID NO: 232948 - DNA, 75 bp, synthetic construct
  source 1..75: mol_type = other DNA
atgggttcgactgttttgttcaaagaaggttcgctgacggtgaataaaggtgggatcagtcagggcgaactgaca

SEQ ID NO: 232949 - DNA, 75 bp, synthetic construct
  source 1..75: mol_type = other DNA
atgacaaagctatgtttgatgctctcaatcaaacaaaggtgactcatgaagacatgaaaagcctttttttcaaaa

SEQ ID NO: 232950 - DNA, 75 bp, synthetic construct
  source 1..75: mol_type = other DNA
aaggtgagcgatacaaagtcaagaaaattattgtgaaacctggtgaggggctttctttaaggatgcatcaccatc

SEQ ID NO: 232951 - DNA, 75 bp, synthetic construct
  source 1..75: mol_type = other DNA
gaagttagttcaggcgattatttgggtgaggatgatattgtacggcaaaaagaacgctacagaatagatgactaa

SEQ ID NO: 232952 - DNA, 75 bp, synthetic construct
  source 1..75: mol_type = other DNA
caggaaaacggggtgaccgaatggagtccgctgttcagcgagccgcatccttcccgtgagttttgtgtccagtac

SEQ ID NO: 232953 - DNA, 75 bp, synthetic construct
  source 1..75: mol_type = other DNA
ttcggcaatcctcatctcgcgaggctaaaatacaagtagagttgaatgatgagggagagtatattacgcgcttcc

SEQ ID NO: 232954 - DNA, 75 bp, synthetic construct
  source 1..75: mol_type = other DNA
ttttcgaagaacttccacggctattatgactttgaatatttatcagaaattcttggatctgtagggagaagagag

SEQ ID NO: 232955 - DNA, 75 bp, synthetic construct
  source 1..75: mol_type = other DNA
gggtttggtttttgatgccttaaaaaaagggggggcctcatcataccagcattggggccgaaataatattaatga

SEQ ID NO: 232956 - DNA, 75 bp, synthetic construct
  source 1..75: mol_type = other DNA
tgtggcaacaacactgtctggtgctagagcagctgttgttgccgggttaggcgttatggctcgttcaattgaact

SEQ ID NO: 232957 - DNA, 75 bp, synthetic construct
  source 1..75: mol_type = other DNA
agcccggctttggtgctattcagtctttagacggaatgactcactgggctgtaatgcccttgcgattgaccgcga

SEQ ID NO: 232958 - DNA, 75 bp, synthetic construct
  source 1..75: mol_type = other DNA
agtcccgcaacgtcgcgtcagggtaaggtcgaaagttgccataaagctccccattccctacgaggttatccggaa

SEQ ID NO: 232959 - DNA, 75 bp, synthetic construct
  source 1..75: mol_type = other DNA
ttaacggccatcggattcaggcctgatgcggcctcgcgggatgataatcgccagaaattcaccccggcacagaac

SEQ ID NO: 232960 - DNA, 75 bp, synthetic construct
  source 1..75: mol_type = other DNA
accgactgcatgattttatgcagcagaacggtgcagaactggccgctgcactagcaccggagctgatggggatta

SEQ ID NO: 232961 - DNA, 75 bp, synthetic construct
  source 1..75: mol_type = other DNA
ttataaaatggaattatataaatgatttaggtgagataggtccaatggtagagagtaaacttgatagcaatgagt

SEQ ID NO: 232962 - DNA, 75 bp, synthetic construct
  source 1..75: mol_type = other DNA
actacgaaagcgcaaagaaaattattttttaatctgcgtaaaactaagcaacgcctgggctggtttaaccaggat

SEQ ID NO: 232963 - DNA, 75 bp, synthetic construct
  source 1..75: mol_type = other DNA
tgatgaaggctgtacggcgtttcaatcctgacgtcggtgtccggttggtttcatttgcggtccactgggttaaat

SEQ ID NO: 232964 - DNA, 75 bp, synthetic construct
  source 1..75: mol_type = other DNA
tgaaacaaatgaaacaatatggtaatgaaggtttcatctcaaacgaactgtatgaaacaaatgttttgattagag

SEQ ID NO: 232965 - DNA, 75 bp, synthetic construct
  source 1..75: mol_type = other DNA
gttttcgcaaagcggaagcctcattaaggctcgaagggctggatcccagcggaacgcctcactatgagttagtta

SEQ ID NO: 232966 - DNA, 75 bp, synthetic construct
  source 1..75: mol_type = other DNA
gtcatctgcttataacatattaaatttaatgttaatgaactttagttatagcattaatgagctggtagagcttca

SEQ ID NO: 232967 - DNA, 75 bp, synthetic construct
  source 1..75: mol_type = other DNA
gatgtggcttatctgaagccacttactacaactgcaagtccagatacggcggtatggaatcttctgatattaaaa

SEQ ID NO: 232968 - DNA, 75 bp, synthetic construct
  source 1..75: mol_type = other DNA
aaattaaaatagataatgtaagttattttaaaaacccaatcataatcaatcacaaccaatcatatgataaagaat

SEQ ID NO: 232969 - DNA, 75 bp, synthetic construct
  source 1..75: mol_type = other DNA
tgaacaccgaggtgctgaataaccgcaccactgatgtgataaacaaccatgctgaaaccattggcaacaatcaga

SEQ ID NO: 232970 - DNA, 75 bp, synthetic construct
  source 1..75: mol_type = other DNA
ttaaaggaaaaatcatcacaactgatgcgatgggttgccagaaagatattgcagagaagatacaaaaacagggag

SEQ ID NO: 232971 - DNA, 75 bp, synthetic construct
  source 1..75: mol_type = other DNA
gcagacgatggcctacgcgcatcttgcgccggactacctacagaatgccgtcgcgctgaatcctctaaaaggcgg

SEQ ID NO: 232972 - DNA, 75 bp, synthetic construct
  source 1..75: mol_type = other DNA
tcatgtatacttcgataaatggggtactaatgggcaatcatatattgcaagtttaacagcagagcagctatgcaa

SEQ ID NO: 232973 - DNA, 75 bp, synthetic construct
  source 1..75: mol_type = other DNA
aaagagaaaaactaataaattaataagaaatccaaaattattttttgtagatttgataaaaaatattaaagataa

SEQ ID NO: 232974 - DNA, 75 bp, synthetic construct
  source 1..75: mol_type = other DNA
cgtaacgtctatatcaaagaagccttcgatacgggcgtgcgttacgactttaaaggcaactttgaccttgaggga

SEQ ID NO: 232975 - DNA, 75 bp, synthetic construct
  source 1..75: mol_type = other DNA
cctcagattgccgtctgcctgcatattctgaagcaggagcgcaaaaaggcgaagcaggcgcgagcgtttaaaacc

SEQ ID NO: 232976 - DNA, 75 bp, synthetic construct
  source 1..75: mol_type = other DNA
tcctatggctatgacagttgtggctacctgaaggcgcagtctgcgggcaggcaccggataagtgaagagactgag

SEQ ID NO: 232977 - DNA, 75 bp, synthetic construct
  source 1..75: mol_type = other DNA
atgcaggatagacaacccactagacattgcatgcaatgttctgtggattgtccgcctgccgctggctctttaaat

SEQ ID NO: 232978 - DNA, 75 bp, synthetic construct
  source 1..75: mol_type = other DNA
tacatattggcccttaaaacgcactcagaagctcccagacgcacgaaacggggtttaaatgcccgccagggcatg

SEQ ID NO: 232979 - DNA, 75 bp, synthetic construct
  source 1..75: mol_type = other DNA
cggctcagaaatcgggacaggatgtgggaatgtcggaccgcgcacgcgcactcacacattccccacctggtcagg

SEQ ID NO: 232980 - DNA, 75 bp, synthetic construct
  source 1..75: mol_type = other DNA
tattaattactggcggaggtcgtcgcatcggcctcgccctcgcatggcatttcattaatcaaaagcaaccggtga

SEQ ID NO: 232981 - DNA, 75 bp, synthetic construct
  source 1..75: mol_type = other DNA
cgatcaataacgacccgaatttcagcacaactatcaacaatgctctggcccttaaagcgcctttagcaagtcctg

SEQ ID NO: 232982 - DNA, 75 bp, synthetic construct
  source 1..75: mol_type = other DNA
agttttctttactggagggagaggcgttcaggctgtggtgcattgaacagcgacaagatccggagatggcaaacg

SEQ ID NO: 232983 - DNA, 75 bp, synthetic construct
  source 1..75: mol_type = other DNA
tgacgcagcgtgtgctgcgtgagcaaggtgctattcagatgccacacgcagcccggcttcttattgaatccgtct

SEQ ID NO: 232984 - DNA, 75 bp, synthetic construct
  source 1..75: mol_type = other DNA
ctgacgccgggcgtcaggagctggttaatgccaacaagactggaacaaataaagttgagatcgtttctgttggtt

SEQ ID NO: 232985 - DNA, 75 bp, synthetic construct
  source 1..75: mol_type = other DNA
atttaacgtcagtcggtcgcgatattctggctaaaacaagcacactggccgttatccaataccttggtttaagag

SEQ ID NO: 232986 - DNA, 75 bp, synthetic construct
  source 1..75: mol_type = other DNA
ccaagcacttccaccggaggcggcatcactaacgctcaattcacttatattaatcatggtgatgcttatgctcct

SEQ ID NO: 232987 - DNA, 75 bp, synthetic construct
  source 1..75: mol_type = other DNA
taaatcgcgttgcattggctgcgattattgtgtggccgcgtgccctttccatgtgcgctatctgaatccgaaaac

SEQ ID NO: 232988 - DNA, 75 bp, synthetic construct
  source 1..75: mol_type = other DNA
tccggcgcatctgagcattatcagtttgtccgcgtctcctgtcagcactgtgaaaatgcgccgtgtgtcagtgtt

SEQ ID NO: 232989 - DNA, 75 bp, synthetic construct
  source 1..75: mol_type = other DNA
tcatgttacatgacgagaaacgctgtatcggctgccaggcctgcaccgttgcctgtaaggttcttaacgaagtgc

SEQ ID NO: 232990 - DNA, 75 bp, synthetic construct
  source 1..75: mol_type = other DNA
attgtcattaaatttacccgccagatcgaatttatcgccacaggcgcaggcagtgaaagagcttctgttgtcagt

SEQ ID NO: 232991 - DNA, 75 bp, synthetic construct
  source 1..75: mol_type = other DNA
gcggggcaggcacgttctgacgcgatggaagccatacgttgtgccgggcaaaaagactggcagggcgcaacttag

SEQ ID NO: 232992 - DNA, 75 bp, synthetic construct
  source 1..75: mol_type = other DNA
tggagtaaaaatatactttatgcattataactcaagggcagaagccatggataaatggaatagaagaataaaaag

SEQ ID NO: 232993 - DNA, 75 bp, synthetic construct
  source 1..75: mol_type = other DNA
cacactcatcctacatccgcaggtataaaatggcagacatggcggcagagtgtagaacagttattaaataaactt

SEQ ID NO: 232994 - DNA, 75 bp, synthetic construct
  source 1..75: mol_type = other DNA
ttgcgtatcctttcctgcgcgctgttcgttaacccttggattatttcattagtgaagctgttacatgccattgag

SEQ ID NO: 232995 - DNA, 75 bp, synthetic construct
  source 1..75: mol_type = other DNA
tgcggcatcgcgggcctgtcggtggcgacggactccctgtctgccatcaaatatgcccgcgtgaaaccaatccgt

SEQ ID NO: 232996 - DNA, 75 bp, synthetic construct
  source 1..75: mol_type = other DNA
gcgggcagacgcgatcttcgccatttcgcagtcggcagctcaggaagtgatcgaatataccgacatcgccagcga

SEQ ID NO: 232997 - DNA, 75 bp, synthetic construct
  source 1..75: mol_type = other DNA
gatattcaggcctttaaacgcattcaactaaaaggcattaaatcgataatacagcatatgccagaaagctcgcgg

SEQ ID NO: 232998 - DNA, 75 bp, synthetic construct
  source 1..75: mol_type = other DNA
gctgctggcggcgaatatgtcgtacttttcagaacaatcgagcatttgattggtagtatcaataaagcggatgaa

SEQ ID NO: 232999 - DNA, 75 bp, synthetic construct
  source 1..75: mol_type = other DNA
ggttaaaccccagacatactctgtaacggtttccttccggggctctggcttagatgtcgatattgtccctgtatt

SEQ ID NO: 233000 - DNA, 75 bp, synthetic construct
  source 1..75: mol_type = other DNA
gcgatcaaaaaaaataacccagatgcaattattttagcaggtggttttaacccattaaataattcacagacgcca

SEQ ID NO: 233001 - DNA, 75 bp, synthetic construct
  source 1..75: mol_type = other DNA
cattattcctatgataattattaattatgggaatgagttgtatggaggtggtttaccacttgatgaaaccagcgt

SEQ ID NO: 233002 - DNA, 75 bp, synthetic construct
  source 1..75: mol_type = other DNA
atgataagtgtgttgggttagatgcctggggtaataaattcgacatatcatttggcgcaaccccaacagaagttg

SEQ ID NO: 233003 - DNA, 75 bp, synthetic construct
  source 1..75: mol_type = other DNA
aatgaattggtcattcataccgcgcctgaagtaactggaaaatgggaaaaaataacgccattacttgaagtctgt

SEQ ID NO: 233004 - DNA, 75 bp, synthetic construct
  source 1..75: mol_type = other DNA
ggatttttcgaattatccggaagctttacagacattttttacctatctggtgagcactgaattacgtgaacgtat

SEQ ID NO: 233005 - DNA, 75 bp, synthetic construct
  source 1..75: mol_type = other DNA
attgccctgtacaacctgtgcaaactgtttgtgttcccgtcgctgcatgaaggtttcggcctgccgccgctggaa

SEQ ID NO: 233006 - DNA, 75 bp, synthetic construct
  source 1..75: mol_type = other DNA
ggatatggagcgagacccaacaaaccgcctacgcccgatccaagtaaatttccagacatagcgaaacaattaaga

SEQ ID NO: 233007 - DNA, 75 bp, synthetic construct
  source 1..75: mol_type = other DNA
actaggattaatactccttcttttggccaagtgaaattccttgaacgtgatgcaagtgatatcagcacttatgtg

SEQ ID NO: 233008 - DNA, 75 bp, synthetic construct
  source 1..75: mol_type = other DNA
caggtgttccgctgccgtggccatcagatacgccacctgcaggttatgcaatcatgcaggggcagacgtttgata

SEQ ID NO: 233009 - DNA, 75 bp, synthetic construct
  source 1..75: mol_type = other DNA
tgcagccccctgaaaacaattctgacgcatttttctgttttaccctggtgtttccttgtctttttgtattttttg

SEQ ID NO: 233010 - DNA, 75 bp, synthetic construct
  source 1..75: mol_type = other DNA
atgaaagaaacaggcacaggcaacattactgttaaggataagaactccgttatcactaatctcggaactgaatat

SEQ ID NO: 233011 - DNA, 75 bp, synthetic construct
  source 1..75: mol_type = other DNA
aacagggactgaattcgccggtgttgcccaactgaaagacagtaccttcactctggaacgcgacaacaccgctgc

SEQ ID NO: 233012 - DNA, 75 bp, synthetic construct
  source 1..75: mol_type = other DNA
caagtttactcacagagaccttctggtaagccatatcattattatgttaccgccttggctgctatcactggggcg

SEQ ID NO: 233013 - DNA, 75 bp, synthetic construct
  source 1..75: mol_type = other DNA
ggcgctggagcaacttattgatcgcaatatggcgcagagcggccccctgaaagaatttgtcattccggggaaaaa

SEQ ID NO: 233014 - DNA, 75 bp, synthetic construct
  source 1..75: mol_type = other DNA
tcgcaatcggcggcccaggaagtgatcgaatataccgacatccccagcgatcgagtgctgaacatctcctcggcg

SEQ ID NO: 233015 - DNA, 75 bp, synthetic construct
  source 1..75: mol_type = other DNA
gcgctcatacgcactctgttaagattggttcacatggacacaccatcaccgttaacgctgctggtaacgcggaaa

SEQ ID NO: 233016 - DNA, 75 bp, synthetic construct
  source 1..75: mol_type = other DNA
tgatttccttcgcgatgcaggtattggccatattcaatgcgagcctggaggcgtttcgatacgccgtacagtgac

SEQ ID NO: 233017 - DNA, 75 bp, synthetic construct
  source 1..75: mol_type = other DNA
actttatgaggttggttgagacccgtagaggcgctgatggtgatgacgctatggtgttcgatggtcttcgcctca

SEQ ID NO: 233018 - DNA, 75 bp, synthetic construct
  source 1..75: mol_type = other DNA
tagtgataaaacgcaggacggagatgtctgtaaaggtgatattctaacttataacactaaaaacaattatatata

SEQ ID NO: 233019 - DNA, 75 bp, synthetic construct
  source 1..75: mol_type = other DNA
cggggctcgttttcgcgtacccaaatcaacctgatgctggcgatgattatttccggcatctggcatggggcaggg

SEQ ID NO: 233020 - DNA, 75 bp, synthetic construct
  source 1..75: mol_type = other DNA
ctgagtgattttttagcttctattactacaaatgtaagtaaagaggctgttcaagagtttatagcaagaaaggct

SEQ ID NO: 233021 - DNA, 75 bp, synthetic construct
  source 1..75: mol_type = other DNA
tagagaatatattgtttccaatttttcaattaaaacgatagtgagtgagtgggagcgcttatattttaaatattc

SEQ ID NO: 233022 - DNA, 75 bp, synthetic construct
  source 1..75: mol_type = other DNA
gtggcggcatttacgccggacatgacaaccattttttatggacatcgtaaaatcctcaagccggaacatttagac

SEQ ID NO: 233023 - DNA, 75 bp, synthetic construct
  source 1..75: mol_type = other DNA
agaggaaataagtgaacataacgttttatttgatcatgacattgaacgattaaaaaaaatttccaaaactcagct

SEQ ID NO: 233024 - DNA, 75 bp, synthetic construct
  source 1..75: mol_type = other DNA
ctaaagttcagagaaccgaaacagcgtcccttccctctggaatcagacaaaaaacaacctgatcccacaggcccg

SEQ ID NO: 233025 - DNA, 75 bp, synthetic construct
  source 1..75: mol_type = other DNA
cgataagacattagccactgctaatgagctgattaagctggaaaatgcagataaacgtagtgatgctctggtatc

SEQ ID NO: 233026 - DNA, 75 bp, synthetic construct
  source 1..75: mol_type = other DNA
cacacagatgtacggtaagccggtgagtgaactgagtgagacagagaagcagacggtctcgacactggcaacggt

SEQ ID NO: 233027 - DNA, 75 bp, synthetic construct
  source 1..75: mol_type = other DNA
ttcattatctcgtgccacgcatagatgagaactctgcgtggatggtagatgaaactgcggatgacttttttaccc

SEQ ID NO: 233028 - DNA, 75 bp, synthetic construct
  source 1..75: mol_type = other DNA
tatttcaaccttatcgatgacgctcagcggaaaagtcagcagctacacaaacacgcttattggcaacgatcaatc

SEQ ID NO: 233029 - DNA, 75 bp, synthetic construct
  source 1..75: mol_type = other DNA
gcaaagatttggcagacgctgtctgccaaattgagaggctgtttgatatttccacagcttttgtattgcatctcc

SEQ ID NO: 233030 - DNA, 75 bp, synthetic construct
  source 1..75: mol_type = other DNA
ctacctcagctacgacgaggcgcatgcttttgacagagaaatgacggcctgtcgtaaagcgggtggagactgtgg

SEQ ID NO: 233031 - DNA, 75 bp, synthetic construct
  source 1..75: mol_type = other DNA
aaagaatataagaatacaactgcatatcttaaagtatgtgaatacatatcacgtacgggaagtgactttttcaca

SEQ ID NO: 233032 - DNA, 75 bp, synthetic construct
  source 1..75: mol_type = other DNA
gcgattgatatcgcagagattttgttcgatcgtgtgtgtggtgatgatgctcgtagattacagtattgggttaac

SEQ ID NO: 233033 - DNA, 75 bp, synthetic construct
  source 1..75: mol_type = other DNA
cgtagtgggaggacggtgttttatggactagcacaaaacggacgtagcctcgatgaactacgacgagtgctgacg

SEQ ID NO: 233034 - DNA, 75 bp, synthetic construct
  source 1..75: mol_type = other DNA
gggcggtatcagaacagcgaagggtaaccctcctggctgacgggtgccgttgcgacagccttgctccctaccggc

SEQ ID NO: 233035 - DNA, 75 bp, synthetic construct
  source 1..75: mol_type = other DNA
acatcccggggcatcctaacgctaatgatgggtggataattcctggtgcgtcgtggaaaccgtcacactggatgc

SEQ ID NO: 233036 - DNA, 75 bp, synthetic construct
  source 1..75: mol_type = other DNA
catcacgacatccccctgattttcagaaacattatttccatgctgacgagcaagctgtcactgtgtgtcatcgag

SEQ ID NO: 233037 - DNA, 75 bp, synthetic construct
  source 1..75: mol_type = other DNA
ttctgacgatggcggggagcagttgctgctggagaaatccccggacggaattctggccttcgatttcctaccggt

SEQ ID NO: 233038 - DNA, 75 bp, synthetic construct
  source 1..75: mol_type = other DNA
actattccgaagggaagtgatatactaattgtctttgatagtgatgaagtggagcaatctgcaagattcattgaa

SEQ ID NO: 233039 - DNA, 75 bp, synthetic construct
  source 1..75: mol_type = other DNA
ggtgatggcgcacatcaactgaactatatcgccagctacgtgcctattcgcgccgatgcaactattggtcgcgca

SEQ ID NO: 233040 - DNA, 75 bp, synthetic construct
  source 1..75: mol_type = other DNA
aaatggtgtgattgaacgggcacgcgccggtatcgatgaggccatcagccgtgagcagcttatccccctcgatcg

SEQ ID NO: 233041 - DNA, 75 bp, synthetic construct
  source 1..75: mol_type = other DNA
tggctggtaccgttttatctgtggcgtcgggcaaaggccctcagtcagaaaccggcttacttctgggtctggctg

SEQ ID NO: 233042 - DNA, 75 bp, synthetic construct
  source 1..75: mol_type = other DNA
tcgttttcgttgaaggtgaaacagaattatctctgttcaaaaaaatgaagagagataagattattgctgtgaagg

SEQ ID NO: 233043 - DNA, 75 bp, synthetic construct
  source 1..75: mol_type = other DNA
ttcaaaagggagttacatcattcattgttaagtttatcaaagtataaatcagatttttcaacatattttaatgcg

SEQ ID NO: 233044 - DNA, 75 bp, synthetic construct
  source 1..75: mol_type = other DNA
ggtgttatcaccgaatactcctcccgcgaaatcgacggttccctgatcgccaccggcgacaagaagctggcggcc

SEQ ID NO: 233045 - DNA, 75 bp, synthetic construct
  source 1..75: mol_type = other DNA
cagcgctactggtgcagaaaaatctactatcccggtctgaaaataagctgaatgaactaaataccatcctgaata

SEQ ID NO: 233046 - DNA, 75 bp, synthetic construct
  source 1..75: mol_type = other DNA
agattatggatcaagtcgatgatgatagacttgctgaacttattcctgatttttatgtctttccagaaaaaagtg

SEQ ID NO: 233047 - DNA, 75 bp, synthetic construct
  source 1..75: mol_type = other DNA
gatggcgtgcaggcgcagcagctggtggccggactgggttatgccgttgatcaccgagaactgcgcgcctgcgac

SEQ ID NO: 233048 - DNA, 75 bp, synthetic construct
  source 1..75: mol_type = other DNA
gggaaatacgactgcttccgcggtcaggcgctggcagagccgctgcagaccatcaccaaaacgcatggctatgcg

SEQ ID NO: 233049 - DNA, 75 bp, synthetic construct
  source 1..75: mol_type = other DNA
agaaagtctatggatccagtcgcgtattcatctacgggctctacgttattatagtaactggcggcaatactttgc

SEQ ID NO: 233050 - DNA, 75 bp, synthetic construct
  source 1..75: mol_type = other DNA
gatgacatggtacggctgggacggagaccgcctgacgacggtacagacagacaccacgcgaatccagacggtcta

SEQ ID NO: 233051 - DNA, 75 bp, synthetic construct
  source 1..75: mol_type = other DNA
gagttcacgcgcgaccgcctgcaccgtgagacggtgcgcagcttcggcagcagggcaggcagtaatgccgcatat

SEQ ID NO: 233052 - DNA, 75 bp, synthetic construct
  source 1..75: mol_type = other DNA
attgccggatgcggtgtgaacgccttatccggcccaccgatccggcacaagtttgtaggcatgataagacgcgcc

SEQ ID NO: 233053 - DNA, 75 bp, synthetic construct
  source 1..75: mol_type = other DNA
tgttatgggattttcccaaaacggattatttttgaagcattttgtgcgttgatgaaagcttgcaatatctctgag

SEQ ID NO: 233054 - DNA, 75 bp, synthetic construct
  source 1..75: mol_type = other DNA
tggaaaaactttggagatgccattaataatccgccacctcctggtaattgttctaatgattattatgaacatctg

SEQ ID NO: 233055 - DNA, 75 bp, synthetic construct
  source 1..75: mol_type = other DNA
gaccgcctgacgacggtacagacagacaccacgcgaatccagacggtctacctgccggggagcttcacgccgctc

SEQ ID NO: 233056 - DNA, 75 bp, synthetic construct
  source 1..75: mol_type = other DNA
cacggtcaccaccacggatcaccatggtctggtcacatcgcacctggtgttgctgcgcggtacctgccgggatgg

SEQ ID NO: 233057 - DNA, 75 bp, synthetic construct
  source 1..75: mol_type = other DNA
agaaagctttttccagttgttgaaacgcgaacggataaagaaaaagttctacggaacgcgggaagaagcccgcag

SEQ ID NO: 233058 - DNA, 75 bp, synthetic construct
  source 1..75: mol_type = other DNA
caatcattcgaggggttcagaccttcacacattgcgagcgtgaattcagggtttgctactacggttcagtactgg

SEQ ID NO: 233059 - DNA, 75 bp, synthetic construct
  source 1..75: mol_type = other DNA
tggcacggtcaccgctggcggtaataaatttgcggttgccgctgcacatctcattaaacattacggcgggaatta

SEQ ID NO: 233060 - DNA, 75 bp, synthetic construct
  source 1..75: mol_type = other DNA
aaaaaaagtcagacattatactcgcgaacagaattacagatgaattaacggatgtcagagataaagtatatactc

SEQ ID NO: 233061 - DNA, 75 bp, synthetic construct
  source 1..75: mol_type = other DNA
gtgagttccatccttgagatttttttcccgctttgcgcctccgacaccgtccgctggcagcgccgtacacccgat

SEQ ID NO: 233062 - DNA, 75 bp, synthetic construct
  source 1..75: mol_type = other DNA
cttgaaaagatggaaaaacgagtggagtatgatcttgaatatatacgcgaatggagtatttggcttgatataaga

SEQ ID NO: 233063 - DNA, 75 bp, synthetic construct
  source 1..75: mol_type = other DNA
aaagcggcaagctggcgccatggcgtaccgcggcggagtgcattgactggaatatcccggcccggtccatcttcg

SEQ ID NO: 233064 - DNA, 75 bp, synthetic construct
  source 1..75: mol_type = other DNA
cggatcctgagcgtgctggtgaaacatttgaggcatttgtcggcatgctgtcgactggtatcgcggcgaatcacc

SEQ ID NO: 233065 - DNA, 75 bp, synthetic construct
  source 1..75: mol_type = other DNA
agagatacgcggtctggcctggatcgttctgcgttgggcactggcgaagcgaccgcgcgtgatgatgctggagaa

SEQ ID NO: 233066 - DNA, 75 bp, synthetic construct
  source 1..75: mol_type = other DNA
aacgcagttccgccgccattcgccgaggcactggtgagggctaatttaccggagctttgtcagcagaaagagatc

SEQ ID NO: 233067 - DNA, 75 bp, synthetic construct
  source 1..75: mol_type = other DNA
tcggccaccgggcagacgaaccgagcgcaaccatcaccgctggcggtggcggtaaatctcaacttgtaacgccta

SEQ ID NO: 233068 - DNA, 75 bp, synthetic construct
  source 1..75: mol_type = other DNA
cgcaggtgtgggacatgaatttcgacagcgacactaacgccattgatgtagcggtgaagcggctgcgcggcaaaa

SEQ ID NO: 233069 - DNA, 75 bp, synthetic construct
  source 1..75: mol_type = other DNA
gttgagtttcgcaacgtcattatcgacaacattaacggcgataatttccgtcaggatgtgccttacaccatcaca

SEQ ID NO: 233070 - DNA, 75 bp, synthetic construct
  source 1..75: mol_type = other DNA
tgcagtaagcagcaatatcactggtttaggcattcagctcaaacaggcagggcagagttttacgatcaatacgcc

SEQ ID NO: 233071 - DNA, 75 bp, synthetic construct
  source 1..75: mol_type = other DNA
tggaagccgtgccagtgaagtcagccgatgcggtgctgagtgataccacgttttcagcctatgcaacattgcggg

SEQ ID NO: 233072 - DNA, 75 bp, synthetic construct
  source 1..75: mol_type = other DNA
ggtacggctgcccgcctgacgagctgaacaaaggcctgaacatgtcatccaccaacgtcgcgaaaggcgtggcgt

SEQ ID NO: 233073 - DNA, 75 bp, synthetic construct
  source 1..75: mol_type = other DNA
atgaaaaaattcctgctccttttactgtgcgctggttgcggggctgtgctggcggcggaagatgacatcacattc

SEQ ID NO: 233074 - DNA, 75 bp, synthetic construct
  source 1..75: mol_type = other DNA
gagttatttattaaacgcactacggaaaatgattgtcgtgctttagtgttaagaggaacattggaatacttattt

SEQ ID NO: 233075 - DNA, 75 bp, synthetic construct
  source 1..75: mol_type = other DNA
gccaagtcgaaggggggctctttaggctataatagcctcactagtaaaatgatggaaattgaccatacagcttta

SEQ ID NO: 233076 - DNA, 75 bp, synthetic construct
  source 1..75: mol_type = other DNA
ttttatttgctgatgaccagtttgacctagggattactcgtttaattctgaatggcgataagattgcagatgaag

SEQ ID NO: 233077 - DNA, 75 bp, synthetic construct
  source 1..75: mol_type = other DNA
cttaaatagaacttcatttgaatctgagggtggaaagtatagtggggcctatggttctggtgtcctggcaaatga

SEQ ID NO: 233078 - DNA, 75 bp, synthetic construct
  source 1..75: mol_type = other DNA
tggtcaatattttcttaatttaaatgcacaatatgcccgcacaagtggcaatcctgttacaaaaggctctgtaga

SEQ ID NO: 233079 - DNA, 75 bp, synthetic construct
  source 1..75: mol_type = other DNA
attatcgacaatattgacggggttaattaccgcaaagatgttccgtaccagataaagtgtgaccctgatattacc

SEQ ID NO: 233080 - DNA, 75 bp, synthetic construct
  source 1..75: mol_type = other DNA
ataaaaccagacctccaagagtacagataacgtatgatgttgaaactggagatgccgaaacagcgaaagaattac

SEQ ID NO: 233081 - DNA, 75 bp, synthetic construct
  source 1..75: mol_type = other DNA
tacccagcaggaagaccacgactgggatgctacccgttaccgcgtgctgcactcacctcgccgttcaggggcgat

SEQ ID NO: 233082 - DNA, 75 bp, synthetic construct
  source 1..75: mol_type = other DNA
tggagaaaaaacgattagcacagaaagaagttgatcgtctggcgctggaaaacaaggaattagcgccaaaagcgg

SEQ ID NO: 233083 - DNA, 75 bp, synthetic construct
  source 1..75: mol_type = other DNA
cttccaggattgggtgtgtgaggaggttctccctgctttgcgtgaaaatggacattacggttttaaaccagcttt

SEQ ID NO: 233084 - DNA, 75 bp, synthetic construct
  source 1..75: mol_type = other DNA
tctgatcgtatcaagtcttgatcccgaagctacccttaagaaaattaccgctgacttcatcgccagtcagtcaat

SEQ ID NO: 233085 - DNA, 75 bp, synthetic construct
  source 1..75: mol_type = other DNA
gaggtagctaaaccgctgggaatgtcagccgtaaaattaaacagaaaactttcggcggttggtgtttatgatctt

SEQ ID NO: 233086 - DNA, 75 bp, synthetic construct
  source 1..75: mol_type = other DNA
ttttatcctgcaaaaatgcaggattatgaatttatagggtttttgtttaagtacaagcactacaacggtcgcaac

SEQ ID NO: 233087 - DNA, 75 bp, synthetic construct
  source 1..75: mol_type = other DNA
ttgatgacaataaaatcactgctgtaatttatgatggtaaacctgcttttgttgcaatggatgtggcgcgtgcgc

SEQ ID NO: 233088 - DNA, 75 bp, synthetic construct
  source 1..75: mol_type = other DNA
atggaacacgttatcgcgtactgcattcaccacaaaaaatcaccggcatgttggtgcgatcgcgctgacggagga

SEQ ID NO: 233089 - DNA, 75 bp, synthetic construct
  source 1..75: mol_type = other DNA
gatggaagcgcagggcgttacctggttgccagctgataaaaagcctggctcccgcatcaacggcgcatctctttt

SEQ ID NO: 233090 - DNA, 75 bp, synthetic construct
  source 1..75: mol_type = other DNA
tatggctctttctggcgcggagtcatcttcgataccgaatataagaaccttgccgatatcatcactcagtcgaag

SEQ ID NO: 233091 - DNA, 75 bp, synthetic construct
  source 1..75: mol_type = other DNA
gcgagtgatattctgtacttactggagcaaaactggtcgcgttttgtcagttcttttattctgacagagagatta

SEQ ID NO: 233092 - DNA, 75 bp, synthetic construct
  source 1..75: mol_type = other DNA
aacccattcggtatcggccatacctgggtgaagaagcgtttcatcgaacctgcgccgcgcggcaccatcattcgc

SEQ ID NO: 233093 - DNA, 75 bp, synthetic construct
  source 1..75: mol_type = other DNA
atgtcaccagcggtgggcgctttgaccacctgtggaatgcatcgctgcacgtcattaagccgttccgcatcccgg

SEQ ID NO: 233094 - DNA, 75 bp, synthetic construct
  source 1..75: mol_type = other DNA
ttgtggcgcaggggaatcagctgttcatgaacgacgtgttcctgaagcggctgtttgcggtgagtatcacgtcat

SEQ ID NO: 233095 - DNA, 75 bp, synthetic construct
  source 1..75: mol_type = other DNA
gaagctgacagccaggaacgcggatatcagcggagcaattaccgcgaataccggcacgctcaataatgtcaccat

SEQ ID NO: 233096 - DNA, 75 bp, synthetic construct
  source 1..75: mol_type = other DNA
gcgaattccgggacgctcaacaacgtcacgattaacgagaactgtcgggttctgggaaaactgtccgcgaaccag

SEQ ID NO: 233097 - DNA, 75 bp, synthetic construct
  source 1..75: mol_type = other DNA
cttttacaattccatgacgatcaaaatttactcggtaaagaacattattactcacgtaaggtttatgaattctta

SEQ ID NO: 233098 - DNA, 75 bp, synthetic construct
  source 1..75: mol_type = other DNA
atgcgctcggatgctatcaataactttggcatgtcttataccaaaagaaaaaaactctgggtttttggtggatgg

SEQ ID NO: 233099 - DNA, 75 bp, synthetic construct
  source 1..75: mol_type = other DNA
agtgacccgcaatggtcaggagatttttaatcagtccacgacggatgctcagggcgtattttcctcagttataga

SEQ ID NO: 233100 - DNA, 75 bp, synthetic construct
  source 1..75: mol_type = other DNA
ccagacgatttatcagccggggagcttcacaccactcatcagagttgaaactgccaccggtgaactggccagaac

SEQ ID NO: 233101 - DNA, 75 bp, synthetic construct
  source 1..75: mol_type = other DNA
ctgccatgctttgatatattaaaaatacagaataaattctatgtaaaaattaaatataaagaagatgttttcttc

SEQ ID NO: 233102 - DNA, 75 bp, synthetic construct
  source 1..75: mol_type = other DNA
acgttcgaagctgaacccgtttcctaccgcaaggagaaccgggcaaggcatgaagcaaacacaaggcttcgcctg

SEQ ID NO: 233103 - DNA, 75 bp, synthetic construct
  source 1..75: mol_type = other DNA
cgagtgcatgacaactgattgtgctgatcgtgcggatgattactaccatgaccgtctggcgctgactgttgataa

SEQ ID NO: 233104 - DNA, 75 bp, synthetic construct
  source 1..75: mol_type = other DNA
ctattcattgctggcatagtatatcgcattgttttcaatagattgtcaggtgcctgcggtattcttttttgtgta

SEQ ID NO: 233105 - DNA, 75 bp, synthetic construct
  source 1..75: mol_type = other DNA
cctgtattacaaccgccaccgctattatgacccgctgcaggggcgatatatcactcaggatccgattggactgaa

SEQ ID NO: 233106 - DNA, 75 bp, synthetic construct
  source 1..75: mol_type = other DNA
tcaaagtgtatctcctggaatacaaaacgtatacaaatgtggcacggtatacctcttaaaaaaataggatttgat

SEQ ID NO: 233107 - DNA, 75 bp, synthetic construct
  source 1..75: mol_type = other DNA
gcattatttcatattgataggcattatgatactctcaacctatacgaaccctatataagtaaatttccgggggtg

SEQ ID NO: 233108 - DNA, 75 bp, synthetic construct
  source 1..75: mol_type = other DNA
actaccatcaccgacgacacaaccagacccaagaagcgcactgcctgcttttgtggatgatttgctttatctgta

SEQ ID NO: 233109 - DNA, 75 bp, synthetic construct
  source 1..75: mol_type = other DNA
tgaccaaatccatgcctttttatgattttgtaaaatatggaaagtcatcggctcgtttttctcttggaaagccaa

SEQ ID NO: 233110 - DNA, 75 bp, synthetic construct
  source 1..75: mol_type = other DNA
caggtacacgccgccggacggacgatggaagatattgtggcacaggtgaaaaacgtcacccagttgatcgcccag

SEQ ID NO: 233111 - DNA, 75 bp, synthetic construct
  source 1..75: mol_type = other DNA
agggcaaaggttttgcagtggtggcaggggaagtgcgtcatttagccagccgcagcgctaatgctgccaacgata

SEQ ID NO: 233112 - DNA, 75 bp, synthetic construct
  source 1..75: mol_type = other DNA
cattatcttaaatttattgatgacgcgttcattaaggagttatttaaaacagtaagggcgggcattgataagaat

SEQ ID NO: 233113 - DNA, 75 bp, synthetic construct
  source 1..75: mol_type = other DNA
atctggcagcctgagttcacagataaaacactctccaggaaacccggggcggttcagtgggtgagtttcaaggca

SEQ ID NO: 233114 - DNA, 75 bp, synthetic construct
  source 1..75: mol_type = other DNA
tccgaaaaaaactccggcaaaaataaactttcttatgtatgaaaatcatcatacatcacagatctgcatgaatgg

SEQ ID NO: 233115 - DNA, 75 bp, synthetic construct
  source 1..75: mol_type = other DNA
actctgaccgtaccaattctcaagtagctcttggcgggtatcactacaatgaatacagcaaatttgctggtggtg

SEQ ID NO: 233116 - DNA, 75 bp, synthetic construct
  source 1..75: mol_type = other DNA
catctggaactacgcgggaaataccctcgttaatcagcattctgacatcaacaaaacgcatgaaattctgggtaa

SEQ ID NO: 233117 - DNA, 75 bp, synthetic construct
  source 1..75: mol_type = other DNA
gaaaaactatctgttattgccaatgtggcagcgcagaaagcagcagcaaacagactgatacaagcttttaccaaa

SEQ ID NO: 233118 - DNA, 75 bp, synthetic construct
  source 1..75: mol_type = other DNA
gtacgtggcgcactgtttcccggattattaagaggcggtattgctgccattatgtggtttggcctgcaatgttac

SEQ ID NO: 233119 - DNA, 75 bp, synthetic construct
  source 1..75: mol_type = other DNA
tcgctggcgtgaactggaagaacagatccgtaagccaatgagcgaaatcgaaatggttgccgcgatggctcttga

SEQ ID NO: 233120 - DNA, 75 bp, synthetic construct
  source 1..75: mol_type = other DNA
cgcagtgggtgacgcggacgaatcatgcggtgagcgacctgacgggccgcccgctgatgctctttaacagtgaag

SEQ ID NO: 233121 - DNA, 75 bp, synthetic construct
  source 1..75: mol_type = other DNA
gttatcagattgccgctattgcaccgacaaaactgacctataaaaacggcgtactgattgccagtattatcagcc

SEQ ID NO: 233122 - DNA, 75 bp, synthetic construct
  source 1..75: mol_type = other DNA
ggcttttttattctcggcttgtctacctttagtattatgctggcaattatccttagcgccttttttattgctgcg

SEQ ID NO: 233123 - DNA, 75 bp, synthetic construct
  source 1..75: mol_type = other DNA
tttagttgtggcctatattctgtttgcggtcgctggggtatgtattattgccggagccagtattcactacggcgc

SEQ ID NO: 233124 - DNA, 75 bp, synthetic construct
  source 1..75: mol_type = other DNA
atgagcgtataatcggtgtgctggtagatggaaattttacttatgaacaaaaaaaggaatttctcagtcttgaaa

SEQ ID NO: 233125 - DNA, 75 bp, synthetic construct
  source 1..75: mol_type = other DNA
ctttctttgtcggactgggagcgggttggtcgattcgtgtcgtgttttcatctagaaagcaaattggtgattcca

SEQ ID NO: 233126 - DNA, 75 bp, synthetic construct
  source 1..75: mol_type = other DNA
gccagtaagcgccgaaagtattaaggcgctgaaagccgcctttaaacgtctgtcacgcaaagagaaagcggcaaa

SEQ ID NO: 233127 - DNA, 75 bp, synthetic construct
  source 1..75: mol_type = other DNA
tcgcttctctcgctaataaaatcatattcgttagtgatttcacaaaaaatgaatttttatcaatatacaacaagt

SEQ ID NO: 233128 - DNA, 75 bp, synthetic construct
  source 1..75: mol_type = other DNA
gacctgctcaatcatcaccgccgccagcagcggccaaccgaatttatccgtatccgctgggcgctggaatattac

SEQ ID NO: 233129 - DNA, 75 bp, synthetic construct
  source 1..75: mol_type = other DNA
tgtcggcagtaaaaacaccggatgaattactgcgccagttacggcgcgcagtcagattattaaacggttccgtca

SEQ ID NO: 233130 - DNA, 75 bp, synthetic construct
  source 1..75: mol_type = other DNA
aactctaactgttctctttaattcatatctaattgcaggatatgcatattttatagcaattgctgtagcaactaa

SEQ ID NO: 233131 - DNA, 75 bp, synthetic construct
  source 1..75: mol_type = other DNA
cgcgatggcaaaagctgaaaagctggccgagaccgacaagcgcgatgccaagcagaacgaggagctcagcacctt

SEQ ID NO: 233132 - DNA, 75 bp, synthetic construct
  source 1..75: mol_type = other DNA
ttgcctcaatggaagaaattacggtaatagaattcaattatcccatttacaatccactgctacgttatttaatca

SEQ ID NO: 233133 - DNA, 75 bp, synthetic construct
  source 1..75: mol_type = other DNA
caaccaccgtcgcaccgtagaaagcctgccgtgggccaatattgacgggaaagagttccagaccgagccgctggt

SEQ ID NO: 233134 - DNA, 75 bp, synthetic construct
  source 1..75: mol_type = other DNA
actacttctatgacaccacggggcgcatcacggcgtgtcgctcggaggatgaggggtatctggcgagctgggagt

SEQ ID NO: 233135 - DNA, 75 bp, synthetic construct
  source 1..75: mol_type = other DNA
atgaatgagcaaacaccgaatcccaatgcgacgaacgaaggaataaacgaacaggccgcggtaagcagccttcct

SEQ ID NO: 233136 - DNA, 75 bp, synthetic construct
  source 1..75: mol_type = other DNA
ctggccagtgaaatcgtgatcacggtcaccaacatccctctggcgtcctatcccgcagccgtgaaggcagtcgtg

SEQ ID NO: 233137 - DNA, 75 bp, synthetic construct
  source 1..75: mol_type = other DNA
cgcggtgcgaaagtcgaagaagatcgtattcatccgttccgcaaatattttgaggagctacaaccaggcgacagc

SEQ ID NO: 233138 - DNA, 75 bp, synthetic construct
  source 1..75: mol_type = other DNA
tgccgctatcagtaaacagtgggtgcgcggtgcgaaagtcgaagaagatcgtattcatccgttccgcaaatattt

SEQ ID NO: 233139 - DNA, 75 bp, synthetic construct
  source 1..75: mol_type = other DNA
gcattgtggagaacaaaacggagaagggcgggatcacgcacgtgtactacgtcgcctgtggcggctcgtatgcag

SEQ ID NO: 233140 - DNA, 75 bp, synthetic construct
  source 1..75: mol_type = other DNA
aacaccatcactcgaccgtatatcgaccagttgcgcggagcgttgccttaccacaaggccattcgcggtacgctc

SEQ ID NO: 233141 - DNA, 75 bp, synthetic construct
  source 1..75: mol_type = other DNA
ggggctacctcccgcgacctgcttattcgtcatcgccaggatgtgtttctcaatggtcagcgcattgcagacgtt

SEQ ID NO: 233142 - DNA, 75 bp, synthetic construct
  source 1..75: mol_type = other DNA
cagcgccagttacgcccaggggaaacgttttctgaactgcaactggctcgggccgcgggtgtcagcccggttgta

SEQ ID NO: 233143 - DNA, 75 bp, synthetic construct
  source 1..75: mol_type = other DNA
gtcagggcaagaccgttacacaaccgaggttcatgtcggaattaatggcgtgatgcaaatgcttggcggaattgg

SEQ ID NO: 233144 - DNA, 75 bp, synthetic construct
  source 1..75: mol_type = other DNA
ccccaaaattcagcggtggcggtgctcctgcgccagctaaacagaccaatgaacccccacttgatttttctgatg

SEQ ID NO: 233145 - DNA, 75 bp, synthetic construct
  source 1..75: mol_type = other DNA
tttgtctgatgaacagcgaggtatatttataaaaaagatgctaaatgctttgctctaccaagttgaaggtgttga

SEQ ID NO: 233146 - DNA, 75 bp, synthetic construct
  source 1..75: mol_type = other DNA
tccctgcctgaatataatgccattgcgcgaaactatgcagaaagtacattcgaaaaagagaatgtattaagccaa

SEQ ID NO: 233147 - DNA, 75 bp, synthetic construct
  source 1..75: mol_type = other DNA
atcgctatcgttagtccagtaacctacgctaaattgcgtcagacgcctttcctctcaaatagtagccggaattgc

SEQ ID NO: 233148 - DNA, 75 bp, synthetic construct
  source 1..75: mol_type = other DNA
aagcagcatttgtaaaactactaactgctaacgttaaatcccgtgattgtatcgctatcgttagtccagtaacct

SEQ ID NO: 233149 - DNA, 75 bp, synthetic construct
  source 1..75: mol_type = other DNA
tctattgatagattaaacgcaacttatacgcgttatgcagatgatattatcatttcaactaataaaaaaggagca

SEQ ID NO: 233150 - DNA, 75 bp, synthetic construct
  source 1..75: mol_type = other DNA
tttttataccaaactaaatagacgattcttcaaagaaattaaattccttgagaattaccataacaaaaaaaatta

SEQ ID NO: 233151 - DNA, 75 bp, synthetic construct
  source 1..75: mol_type = other DNA
gaagtatagtagttaccggattgaaagtttgccacgattttcatattacattacatagatcaatgaaagataaaa

SEQ ID NO: 233152 - DNA, 75 bp, synthetic construct
  source 1..75: mol_type = other DNA
acgcgaagttagcgaacttaaagaactgcacaacaatacctttaaaacgaagtttatcgcgcgaccggacaaaca

SEQ ID NO: 233153 - DNA, 75 bp, synthetic construct
  source 1..75: mol_type = other DNA
tcaacaaaaactggcaactggcgtgtgagtgtatgcgccaggcgttgcacaacgccggcatagccccggagtata

SEQ ID NO: 233154 - DNA, 75 bp, synthetic construct
  source 1..75: mol_type = other DNA
gtggtaagttcacaagcggcggaactctgcggtctgaaggcggcactccggtggtcgttggaggaggtgacgtgc

SEQ ID NO: 233155 - DNA, 75 bp, synthetic construct
  source 1..75: mol_type = other DNA
agtatgtatggtctcggtgttgggatgttttatatttcctatattattttcgaaattcccagcaacgttattatg

SEQ ID NO: 233156 - DNA, 75 bp, synthetic construct
  source 1..75: mol_type = other DNA
aggaaccggtaaacggactgactttcaactggtccgggatgtggactttcggcgcggtgatgattgccattatcg

SEQ ID NO: 233157 - DNA, 75 bp, synthetic construct
  source 1..75: mol_type = other DNA
tagcgcatatgtgcgagaagtacgatttcacctatgacgacgataagatgttggaattggccaaagagatgaagg

SEQ ID NO: 233158 - DNA, 75 bp, synthetic construct
  source 1..75: mol_type = other DNA
cctttggctaaaaaatagtcttaacgtggtttattttccgaattccaaactgacccctttaatgcttctttcgtg

SEQ ID NO: 233159 - DNA, 75 bp, synthetic construct
  source 1..75: mol_type = other DNA
caacttgctgtggtgatggcggcattttttaacttttttggcgtgttattgggcggacttagcgctgagagatcc

SEQ ID NO: 233160 - DNA, 75 bp, synthetic construct
  source 1..75: mol_type = other DNA
aagatcggttaaaagccctcgcggaagattttgccaaacattatgaaaaacgcgtagccgaaggttccaccgtaa

SEQ ID NO: 233161 - DNA, 75 bp, synthetic construct
  source 1..75: mol_type = other DNA
acaaaagaatatcgcaaagagctggataagcagttcaaaaacgctaaatcgaatttcaaaattgccattgttgtt

SEQ ID NO: 233162 - DNA, 75 bp, synthetic construct
  source 1..75: mol_type = other DNA
cagcagtttcttcccgctgatggcccaacgccgctggaagccggatcgcattatcggcgtagtgccgacgctgtt

SEQ ID NO: 233163 - DNA, 75 bp, synthetic construct
  source 1..75: mol_type = other DNA
tcagggcggcggaaaagcgcgtctggagaagatggacagtgaacgcggcctgactaacgtgaaattcttcccgct

SEQ ID NO: 233164 - DNA, 75 bp, synthetic construct
  source 1..75: mol_type = other DNA
atccgtggatgtttgtgattgtcggtcagggcggcggaaaagcgcgtctggagaagatggacagtgaacgcggcc

SEQ ID NO: 233165 - DNA, 75 bp, synthetic construct
  source 1..75: mol_type = other DNA
tcaacatcttcaaggcgctataaaaaggatattgaaacattacaagatcgatatgctgatgaacttttgtcatta

SEQ ID NO: 233166 - DNA, 75 bp, synthetic construct
  source 1..75: mol_type = other DNA
gcagggtggcaatcagttcagcggcggcgtgcagtctcgcccgcagcagtccgctccggcagcgccgtctaacga

SEQ ID NO: 233167 - DNA, 75 bp, synthetic construct
  source 1..75: mol_type = other DNA
aacgtatcgaccatctcgcgctcaatgatgaacaaagcctgcgagaagggcgttgcgccggagaaggtgattttc

SEQ ID NO: 233168 - DNA, 75 bp, synthetic construct
  source 1..75: mol_type = other DNA
ccgatgccagcaacgcgcaggttacgctgaacatccctgctcaacaggtggtgacgaataacagcgacagcgtgc

SEQ ID NO: 233169 - DNA, 75 bp, synthetic construct
  source 1..75: mol_type = other DNA
atcattgggaatggcgtggatgagacgactctgacggcaacagtgaaagatccttttgataacgcagtaaaagat

SEQ ID NO: 233170 - DNA, 75 bp, synthetic construct
  source 1..75: mol_type = other DNA
acatcttgttttgcacgatatatcaggcaatccgatcaaagtttctgaagggatggaatttgtgcaatcaggtac

SEQ ID NO: 233171 - DNA, 75 bp, synthetic construct
  source 1..75: mol_type = other DNA
gttgcctttggtgagcagacggtcactgtatcacttgctaataatggtgccagcgaccacaaaactgtgcacttt

SEQ ID NO: 233172 - DNA, 75 bp, synthetic construct
  source 1..75: mol_type = other DNA
cttcaccatgccacaggacgtggcggcaaactttaccctcgaaaataacggcattgccatcacccaggccaatgg

SEQ ID NO: 233173 - DNA, 75 bp, synthetic construct
  source 1..75: mol_type = other DNA
catcaccgccacagtcgttgataataatggctttccggtgaaaggtgtgactgtgaacttcaccagcaacgcagc

SEQ ID NO: 233174 - DNA, 75 bp, synthetic construct
  source 1..75: mol_type = other DNA
gaaggataattacggcaacggtgtaccccagcaggaggtaaccctcagagtatcaccaagtgaaggcgtgacccc

SEQ ID NO: 233175 - DNA, 75 bp, synthetic construct
  source 1..75: mol_type = other DNA
cctcttatgagaaggatctggtggtaatcgatctaagactaacactcacggcatcaagtcaacttatcggcgtca

SEQ ID NO: 233176 - DNA, 75 bp, synthetic construct
  source 1..75: mol_type = other DNA
gtggaggccgacaatacattgtttccctggaaaacggggcgcatggctctgttcaaacatctgaatattttcatg

SEQ ID NO: 233177 - DNA, 75 bp, synthetic construct
  source 1..75: mol_type = other DNA
aaacagctaatataacgctggtggcaggcccggcagacgcctcgcagtccgtccttaagaacaatcggtcatcac

SEQ ID NO: 233178 - DNA, 75 bp, synthetic construct
  source 1..75: mol_type = other DNA
gtgaatcttttaagcagtggagaaaaccgacgcgaaatagggtcactgttcggtgagtggggagatatggggcat

SEQ ID NO: 233179 - DNA, 75 bp, synthetic construct
  source 1..75: mol_type = other DNA
tgcagcttcattcccttcgcagggatttaccggggcgtattatcagttgaataatgacaactttgcaccaggaaa

SEQ ID NO: 233180 - DNA, 75 bp, synthetic construct
  source 1..75: mol_type = other DNA
cgccgcatttgccacctttggcgtcggattccttttccgtccgctcggcggtgtcattttcggtcactttggcga

SEQ ID NO: 233181 - DNA, 75 bp, synthetic construct
  source 1..75: mol_type = other DNA
caagtcacctaaaagtaacctagatttcaaggtgacttgcaccaaaaaacaacgccccacagtgctggaacacat

SEQ ID NO: 233182 - DNA, 75 bp, synthetic construct
  source 1..75: mol_type = other DNA
gtggctgacagtatacacacaagaaaacggaaaaacactattgacgtggctgacacccgttactaatatagtggc

SEQ ID NO: 233183 - DNA, 75 bp, synthetic construct
  source 1..75: mol_type = other DNA
acggtaggtggcattatgaacacttcggtggctctgatgcagtcctcgcagatcggtttgcataaatcgttgagg

SEQ ID NO: 233184 - DNA, 75 bp, synthetic construct
  source 1..75: mol_type = other DNA
ccccccagactgactatccgcaggacattttctgcgatgttgttatcgacttcggccctaccatcctctgcatag

SEQ ID NO: 233185 - DNA, 75 bp, synthetic construct
  source 1..75: mol_type = other DNA
gtttaaccagaccgtgctgaaagagtcagagcgctttatcaatgagatgtcacatcgcatcgcgcgtgaccagct

SEQ ID NO: 233186 - DNA, 75 bp, synthetic construct
  source 1..75: mol_type = other DNA
gctggcggcgtttgatctcgccttgcattgacgcaatgatgaattgtgatgtgctttcgcctgattctttcacta

SEQ ID NO: 233187 - DNA, 75 bp, synthetic construct
  source 1..75: mol_type = other DNA
aaggtcaggttatggtcgcaacccccctggcggttaaagcgcacgtcgacgaccagtttggcaatccagtttctg

SEQ ID NO: 233188 - DNA, 75 bp, synthetic construct
  source 1..75: mol_type = other DNA
tcaatgtaaacttcgtcttaaaaagcggctctgccacattgacgtcattaacagcggtgaccgatcaaaacggac

SEQ ID NO: 233189 - DNA, 75 bp, synthetic construct
  source 1..75: mol_type = other DNA
ccgcttatcggtgtctatgcccctacaggcactactctgacggcaacgctaacctctgcaaatggcactccagtg

SEQ ID NO: 233190 - DNA, 75 bp, synthetic construct
  source 1..75: mol_type = other DNA
agaacatgaacaccgaggtgctgaataaccgcaccactgatgtgataaacaaccatgccgaaaaaataggtaaca

SEQ ID NO: 233191 - DNA, 75 bp, synthetic construct
  source 1..75: mol_type = other DNA
cttagtcagagcacgagcaatactaacgacagtggtgttgctgaagttacccttaagggcacggttttgggtgtt

SEQ ID NO: 233192 - DNA, 75 bp, synthetic construct
  source 1..75: mol_type = other DNA
agataccaacgtgccctatgtgcaagttagcgcaattgactacagtaataatttctccggcgagtacaaagccac

SEQ ID NO: 233193 - DNA, 75 bp, synthetic construct
  source 1..75: mol_type = other DNA
tgaaaaatgccgccagtgttgcagacctgaaaacggcaattgatggtgtgtccaccagtatgcagggtgcaggtt

SEQ ID NO: 233194 - DNA, 75 bp, synthetic construct
  source 1..75: mol_type = other DNA
tacggtcagttgctgaccttcactgactgttccggctaccagacccgttatgaccatgaccgcttcgggcagatg

SEQ ID NO: 233195 - DNA, 75 bp, synthetic construct
  source 1..75: mol_type = other DNA
agagatatggagctgggagcgccaacggaactggctggcctccaatggggatgagttcgtgaagattgatgaggt

SEQ ID NO: 233196 - DNA, 75 bp, synthetic construct
  source 1..75: mol_type = other DNA
aaagttaacggggctgatggtaaggaggctgtgagtctgaatggtcaggatggcacgattaaactgacatcctcg

SEQ ID NO: 233197 - DNA, 75 bp, synthetic construct
  source 1..75: mol_type = other DNA
tgcctgtaaatggtggtaacgggaagattacagtaaacaaaggtgatgacgataagcttgttactgcgaaaaaca

SEQ ID NO: 233198 - DNA, 75 bp, synthetic construct
  source 1..75: mol_type = other DNA
atggcgggcttctggtgaggatgaccagaaacctccgtgatttggccagcgcggtttttggtacagaaaacggcc

SEQ ID NO: 233199 - DNA, 75 bp, synthetic construct
  source 1..75: mol_type = other DNA
cattgaagcttatgcagctgaagaaacctttgatacccattttatgataggtggaatgaaagaccagcaggttgt

SEQ ID NO: 233200 - DNA, 75 bp, synthetic construct
  source 1..75: mol_type = other DNA
cattgaagcttatgcagctgaagaaacctttgatacccattttatgataggtggaatgggtgatgctgccaactt

SEQ ID NO: 233201 - DNA, 75 bp, synthetic construct
  source 1..75: mol_type = other DNA
aggtcggcatcaccactattaccgaagtggtgcaggtcaaaagaatgcagaacactatcactcgcccgtatatcg

SEQ ID NO: 233202 - DNA, 75 bp, synthetic construct
  source 1..75: mol_type = other DNA
catcagggttgaaaccgccaccggtgagcaggcgaaaacgcagcgccgcagcctggcggatacccttcagcagtc

SEQ ID NO: 233203 - DNA, 75 bp, synthetic construct
  source 1..75: mol_type = other DNA
gacggcgatcgcttactggaactgttaatcgaaaataacgtcggcattcgccgcagcaatgcagtggaattgctg

SEQ ID NO: 233204 - DNA, 75 bp, synthetic construct
  source 1..75: mol_type = other DNA
ctatgccgaggccttcgtcgccggcggtttgagccatccgcagcaaggagaggcttttcgtgcctggttacgcga

SEQ ID NO: 233205 - DNA, 75 bp, synthetic construct
  source 1..75: mol_type = other DNA
accaaactttgagcgtcataacggaaaaagctcgaaaaaaacgggcggttacaaacgagagagttacaaaaatac

SEQ ID NO: 233206 - DNA, 75 bp, synthetic construct
  source 1..75: mol_type = other DNA
atgaacgcatacctcacttacgaccgaatcgaagatcggcgctgggttgagcagcagctcgacgacgagaaagag

SEQ ID NO: 233207 - DNA, 75 bp, synthetic construct
  source 1..75: mol_type = other DNA
cgaggcatataacgatctcatctcggcagtagcttacgcccaggcggaatatgactgggaccaccgcaccggctg

SEQ ID NO: 233208 - DNA, 75 bp, synthetic construct
  source 1..75: mol_type = other DNA
cagcaggatcatgaaactggtgatttcgctggtaaaaaatcactcatgcaaagcgtcgaagcaagcagcaaagac

SEQ ID NO: 233209 - DNA, 75 bp, synthetic construct
  source 1..75: mol_type = other DNA
gggttgcaatcgcctccctgaccggcacgttagcgggcacgcatatgatcacggctcgtctggctaacagcaatg

SEQ ID NO: 233210 - DNA, 75 bp, synthetic construct
  source 1..75: mol_type = other DNA
ggcggttccgccattacagacatcaacggcaaggctgaagttacactgagcggtacaaaatccggcacctatccc

SEQ ID NO: 233211 - DNA, 75 bp, synthetic construct
  source 1..75: mol_type = other DNA
acgctccgtgttcaatatcggtactctggctaaccctggccatgctgataacgtcgcatctatcaccctcaaaaa

SEQ ID NO: 233212 - DNA, 75 bp, synthetic construct
  source 1..75: mol_type = other DNA
gccgttatgccgagcgctggaagccctggcgttcttatgcgctgttgcatatctggtatacggaaggctggcaac

SEQ ID NO: 233213 - DNA, 75 bp, synthetic construct
  source 1..75: mol_type = other DNA
aggcgatgaaaacgctgcaaacttttccgggtatcgggcgctggacggcgaattatttcgctttgcgtggctggc

SEQ ID NO: 233214 - DNA, 75 bp, synthetic construct
  source 1..75: mol_type = other DNA
atgctcgatggcgatcaggatggtgagttttgctactggttgctgcaaaaaaccgtggtgcagtttcctgagatt

SEQ ID NO: 233215 - DNA, 75 bp, synthetic construct
  source 1..75: mol_type = other DNA
gttgctgaaagtggaaacacgcggggccagcgacgtcattaatcaatatgtttttgaccgtgcacaacaagcgat

SEQ ID NO: 233216 - DNA, 75 bp, synthetic construct
  source 1..75: mol_type = other DNA
tattagcattacatgtggagagtccatagtcatcgataggccagaattgaacaacactggtgatagcgattcaac

SEQ ID NO: 233217 - DNA, 75 bp, synthetic construct
  source 1..75: mol_type = other DNA
atgtgtctctttgctcatctcttccagctgaaagcatatcaaaatatgcaatcgtaacaaacaatgcaaaagggt

SEQ ID NO: 233218 - DNA, 75 bp, synthetic construct
  source 1..75: mol_type = other DNA
ttgatacttcatcagaagtcaacccacttcttcacacatggtcgttatcggttgaacaacaattttatttaatat

SEQ ID NO: 233219 - DNA, 75 bp, synthetic construct
  source 1..75: mol_type = other DNA
tggttttgcatgattgtattaatgctattttatatttcaacggtcaagttcattgaaatttgttgtaattataaa

SEQ ID NO: 233220 - DNA, 75 bp, synthetic construct
  source 1..75: mol_type = other DNA
tggatcaattccaatagttatttccaagcccatgcgtggtcgatttttggtgatttatcgctaatcttagggcca

SEQ ID NO: 233221 - DNA, 75 bp, synthetic construct
  source 1..75: mol_type = other DNA
gcgcgtgctgcgtacctgaaagctaaagccagataccatccctcaacgccagccgatttgttgcaggctgcctaa

SEQ ID NO: 233222 - DNA, 75 bp, synthetic construct
  source 1..75: mol_type = other DNA
aagaaataatcttgattattatcaaaaaattgcaatcgtgagaaagactgtcttaatctcattgttacttgtcat

SEQ ID NO: 233223 - DNA, 75 bp, synthetic construct
  source 1..75: mol_type = other DNA
atggacctgataaacccgttcatagtgcaggatgcggtgcagcaagcgtataacaacgatatgacagcctcaggt

SEQ ID NO: 233224 - DNA, 75 bp, synthetic construct
  source 1..75: mol_type = other DNA
tggatcaattccaatagttatttccaagcccatgcgtggtcaatttttggtgatttatcactaatcttgggacca

SEQ ID NO: 233225 - DNA, 75 bp, synthetic construct
  source 1..75: mol_type = other DNA
acgctatcttcgctcatcaaccaggggaatgggacgtttgtctgggggcagaacaccattaacaccttcctcagc

SEQ ID NO: 233226 - DNA, 75 bp, synthetic construct
  source 1..75: mol_type = other DNA
tgctatctgtgctggtggatttcaccagcacaatcctgtcagttttatcggacggggcgttggtggcagtagctg

SEQ ID NO: 233227 - DNA, 75 bp, synthetic construct
  source 1..75: mol_type = other DNA
tctttatgcaagggtattccgtagtactgaattatctatggaaagagaaaatatattaaatatatttaatgacct

SEQ ID NO: 233228 - DNA, 75 bp, synthetic construct
  source 1..75: mol_type = other DNA
tgctctggcagatgggaggcttacattcgcgttggtggtgttcgccatcacctcggcttattcactaccgaagcg

SEQ ID NO: 233229 - DNA, 75 bp, synthetic construct
  source 1..75: mol_type = other DNA
tgtcttctccggtatcgaaatcgccgggccgttcgccgggcaaatgttcgcagaatggggtgcggaagttatctg

SEQ ID NO: 233230 - DNA, 75 bp, synthetic construct
  source 1..75: mol_type = other DNA
acatcaacggtatccgtgacgacaatcgcctatgcaatctgcgcttggttacgcagcgggaaaacgaccagaacc

SEQ ID NO: 233231 - DNA, 75 bp, synthetic construct
  source 1..75: mol_type = other DNA
ttcccgtttcccactgcttggcgagctgcaaagcattcttaagcaagccgtggaagaggcaaccgtcaaagcgcc

SEQ ID NO: 233232 - DNA, 75 bp, synthetic construct
  source 1..75: mol_type = other DNA
ccgtcgttgtgctgagcgtgccgagtacgacaaccttcacctatgcgcctgccagcgcgccgggcggctccgcga

SEQ ID NO: 233233 - DNA, 75 bp, synthetic construct
  source 1..75: mol_type = other DNA
tggtaaaggggactatacttgtggtggccaagaccaacggggagaatcaaaaggagatggtctatgggggccagg

SEQ ID NO: 233234 - DNA, 75 bp, synthetic construct
  source 1..75: mol_type = other DNA
gcagaatatgatgaatggggcaacctgctgaatgaagagaacccgcatcagctgcagcagcttatccgcctgccg

SEQ ID NO: 233235 - DNA, 75 bp, synthetic construct
  source 1..75: mol_type = other DNA
cgtcgctgatggcaaaaccacaggcagtattgtgggacagggagaaccaccagttgctgtatgttgtggcaaccc

SEQ ID NO: 233236 - DNA, 75 bp, synthetic construct
  source 1..75: mol_type = other DNA
tacgacccagcaaggcgacatgtacaccattgttcctgaagttacactgacacagtcttgcttgtgtcgggtaca

SEQ ID NO: 233237 - DNA, 75 bp, synthetic construct
  source 1..75: mol_type = other DNA
caaattcggctatatctatttcggttttaacgatgagggggtttacgaagtcacgcctgagtttgccagaatatt

SEQ ID NO: 233238 - DNA, 75 bp, synthetic construct
  source 1..75: mol_type = other DNA
gaaaaaattgacgatagcaaagaaacatataagtttcatcatgtcacttcgaaacctaaagaaagattcatttcg

SEQ ID NO: 233239 - DNA, 75 bp, synthetic construct
  source 1..75: mol_type = other DNA
accggaggccttgatcgaagaggagttgaagacgctacgctccagagtctccaatgcttaccacgatcacctttt

SEQ ID NO: 233240 - DNA, 75 bp, synthetic construct
  source 1..75: mol_type = other DNA
cccagatttccccggaattgaaaacttatctcgacaacatcgcagcgaagtacaaaccagatccgggggccctaa

SEQ ID NO: 233241 - DNA, 75 bp, synthetic construct
  source 1..75: mol_type = other DNA
cgtgattcatatgtccgagttgatagcatcggtagagtaatcataggtgatgatgttgaaatcggttgtaacaac

SEQ ID NO: 233242 - DNA, 75 bp, synthetic construct
  source 1..75: mol_type = other DNA
atggtgctatttggtggttttcagttttccgcaacctttaaaccggtggcagaagcggtaagtaaagcctatggc

SEQ ID NO: 233243 - DNA, 75 bp, synthetic construct
  source 1..75: mol_type = other DNA
gtaagtattacacatatatctatgaataataatgctctcagaaatattgatatagataggctttcatcagttact

SEQ ID NO: 233244 - DNA, 75 bp, synthetic construct
  source 1..75: mol_type = other DNA
ttctgacagtgacgttgtaagctcagtatctcgtgatattgactctgcgttatcgctcactgaagtcgatgatgg

SEQ ID NO: 233245 - DNA, 75 bp, synthetic construct
  source 1..75: mol_type = other DNA
atgaggcgcttcgcaggcgcatgtcgtttcgttttcaatcgtgctctggcacgtcagaatgagaatcatgaggtc

SEQ ID NO: 233246 - DNA, 75 bp, synthetic construct
  source 1..75: mol_type = other DNA
caatcgctactccatatgaccctaaatgggaatcatatttcgagcgcagacaggactatattctggaaaacgcaa

SEQ ID NO: 233247 - DNA, 75 bp, synthetic construct
  source 1..75: mol_type = other DNA
agaatgccgccgatcttagtgcaaagattaccggcagtggtgacctggccttcagcagccagaaaggtcagaccg

SEQ ID NO: 233248 - DNA, 75 bp, synthetic construct
  source 1..75: mol_type = other DNA
cgagaatgccgccgatctcagcgcaaagattaccggcagtggtgacctggcattcagcagccagaagggtcagac

SEQ ID NO: 233249 - DNA, 75 bp, synthetic construct
  source 1..75: mol_type = other DNA
tactataccgacatggtgacgggtgagcagaaacaaaccactatgtggatgcgccatgaaggtggtcataataaa

SEQ ID NO: 233250 - DNA, 75 bp, synthetic construct
  source 1..75: mol_type = other DNA
ggtcaggttatgtcgttacgggttcagttaacggaaaccgtgatgaattaattgatacaactcaggcaaggccaa

SEQ ID NO: 233251 - DNA, 75 bp, synthetic construct
  source 1..75: mol_type = other DNA
gattctgccaactggtctgaatgggcgcaggtctatacgtcaaaagattcaattcccggcgtcaatgccaaaggg

SEQ ID NO: 233252 - DNA, 75 bp, synthetic construct
  source 1..75: mol_type = other DNA
gatacagtattctcctaagcagggcggagcaaccgtatctggagactatatttatctggccacccctcaggttga

SEQ ID NO: 233253 - DNA, 75 bp, synthetic construct
  source 1..75: mol_type = other DNA
ggcgatgatggggttacacggcgcgcaactgctggatcgcttgctggagcctggcgatattgtcggtttttccta

SEQ ID NO: 233254 - DNA, 75 bp, synthetic construct
  source 1..75: mol_type = other DNA
agttttgccatgcatctgtattttaaccacgtgccaccgaaagtcgtccaggcctatatggggcatgaacgctat

SEQ ID NO: 233255 - DNA, 75 bp, synthetic construct
  source 1..75: mol_type = other DNA
atacggcacaggatgcaagcacaacgcaaaagggattagttcagctcagtagcgcaactaacagcgacagcgaaa

SEQ ID NO: 233256 - DNA, 75 bp, synthetic construct
  source 1..75: mol_type = other DNA
atgtctccaatggcggcaaaattcatgttaagggcaccagtcgtctgacttatacgcaggggaatgtaagcggcg

SEQ ID NO: 233257 - DNA, 75 bp, synthetic construct
  source 1..75: mol_type = other DNA
cgcaccccagattgtttgaatggaatatactcaatcacagcatcattagcaatagctgtttcgatattgatggtg

SEQ ID NO: 233258 - DNA, 75 bp, synthetic construct
  source 1..75: mol_type = other DNA
ttaaacaagcatatgaaataatgatgcaaagtggtttgccggtatattgtattgatgacaatacaatgtataaac

SEQ ID NO: 233259 - DNA, 75 bp, synthetic construct
  source 1..75: mol_type = other DNA
tgaatatcatttctgtttcgtcatcccgaactcactcgtcaattaagattgataaggaccgttatctctccggca

SEQ ID NO: 233260 - DNA, 75 bp, synthetic construct
  source 1..75: mol_type = other DNA
tggttagctatggatgataatgatattggtaacttacgaattacccaaaagcaaattgattttatcaatcgtgcc

SEQ ID NO: 233261 - DNA, 75 bp, synthetic construct
  source 1..75: mol_type = other DNA
tcgggtagcgatttaaatacagataactctaattcctggctggatgaagttatctatgaagacgtgattaataag

SEQ ID NO: 233262 - DNA, 75 bp, synthetic construct
  source 1..75: mol_type = other DNA
atgaacgttttaagacacgttaatgcgattaacatgggagtgtgcattctaattttggttattggatgtgcaaat

SEQ ID NO: 233263 - DNA, 75 bp, synthetic construct
  source 1..75: mol_type = other DNA
ttacactcaaaatttatacggtgagtataaagccactgttacaggcggcggagagggtatcgcaacgctgatccc

SEQ ID NO: 233264 - DNA, 75 bp, synthetic construct
  source 1..75: mol_type = other DNA
tataccgatgctaactacctcggtggtggtgacgtagatcaagactggtccgcgaacgtgggtgttaaatatacc

SEQ ID NO: 233265 - DNA, 75 bp, synthetic construct
  source 1..75: mol_type = other DNA
cagttacggtggagatcagtacctgtctgttaataacggtggtgaagttaatgccagtgagcaaattagtctggg

SEQ ID NO: 233266 - DNA, 75 bp, synthetic construct
  source 1..75: mol_type = other DNA
gtggcggacaaaacctcggctcaggttgtcctgcagatatcaaaaaatgagataacaggtaatggcgtcgatagc

SEQ ID NO: 233267 - DNA, 75 bp, synthetic construct
  source 1..75: mol_type = other DNA
cgacaataacgatctcacgacactaacagcaacagtcgctgatacagagggcaatgcgatagccaacactgaggt

SEQ ID NO: 233268 - DNA, 75 bp, synthetic construct
  source 1..75: mol_type = other DNA
aataacggtattgccatcactcaggccaatggcgaagcgcatgtcaccctcaaaggcaaaaaagcgggcacgcat

SEQ ID NO: 233269 - DNA, 75 bp, synthetic construct
  source 1..75: mol_type = other DNA
ctgcaggggcggtatatcactcaggatccgattgggctgaaggggggatggaatttttatcagtatccgttgaat

SEQ ID NO: 233270 - DNA, 75 bp, synthetic construct
  source 1..75: mol_type = other DNA
atgcagatcactcgccagcaatgtcagcagatagcgaacggttggcgcggtcagttagccatcgcggtagataat

SEQ ID NO: 233271 - DNA, 75 bp, synthetic construct
  source 1..75: mol_type = other DNA
atggattaatgagttcgggaactggggatgagatgggagcctctgtctctgattattttaaaaagatgcaacccc

SEQ ID NO: 233272 - DNA, 75 bp, synthetic construct
  source 1..75: mol_type = other DNA
gttgcacagtcataaaactcataagcgcaaggtgctggatgatattaatgctcgcttggtgagtcaggcgaccat

SEQ ID NO: 233273 - DNA, 75 bp, synthetic construct
  source 1..75: mol_type = other DNA
aattcatcaggccttgcctctccattcatgaagataagaaaatacttacatctgaatattgttggcagaacttga

SEQ ID NO: 233274 - DNA, 75 bp, synthetic construct
  source 1..75: mol_type = other DNA
tcaggaactaattgattgtggtgatattagtgctaaagatgcaaaaagcacacagaaagcctggaattgtcgtca

SEQ ID NO: 233275 - DNA, 75 bp, synthetic construct
  source 1..75: mol_type = other DNA
caaacaccttgtgagcgccatttgcaatgctcagcagactgcaaggattatgtgtgggcgaaaggcgatgctggt

SEQ ID NO: 233276 - DNA, 75 bp, synthetic construct
  source 1..75: mol_type = other DNA
ggatccaaccggttgagataaccgatcgcgcgacatttatccgccgggcctatctgcatcttgctggcgcggtag

SEQ ID NO: 233277 - DNA, 75 bp, synthetic construct
  source 1..75: mol_type = other DNA
gctgatgtgaatgtgctggtggccggaaataccgacaatatcggctacaaactgaaagccgctggctatgcccgc

SEQ ID NO: 233278 - DNA, 75 bp, synthetic construct
  source 1..75: mol_type = other DNA
ccagggatggagacaaagacagcaagtgattacctgccacagacaaattggtcaacaactcaattaccaccagga

SEQ ID NO: 233279 - DNA, 75 bp, synthetic construct
  source 1..75: mol_type = other DNA
cgggttgcccttactgtgtgcgtgcaaaagatctggctgagaaattgagcaatgaacacgatgattttcagtatc

SEQ ID NO: 233280 - DNA, 75 bp, synthetic construct
  source 1..75: mol_type = other DNA
caaaagccaaagaaaagtgccgactggcttgcgcacaatgataaaaaacttaaaaccctaaaaagccaattagcg

SEQ ID NO: 233281 - DNA, 75 bp, synthetic construct
  source 1..75: mol_type = other DNA
ggcaaaggctgggaatgagattagtatatcttcttccaatccctctcatgacgataatcggatacaggctctgct

SEQ ID NO: 233282 - DNA, 75 bp, synthetic construct
  source 1..75: mol_type = other DNA
aagagtacccggatgaagtactcaactttgatgaaagaagagccagaatacacgttattggtcgcgtgttctggt

SEQ ID NO: 233283 - DNA, 75 bp, synthetic construct
  source 1..75: mol_type = other DNA
agagggaagcggaagtacagaagattgatagcgattctcgcgttatcagtgtagcttttgcaaccgaaacacctg

SEQ ID NO: 233284 - DNA, 75 bp, synthetic construct
  source 1..75: mol_type = other DNA
tgtgatgaatcctctgtagaccgcacccgcattaataataagggtgcagtactattcaatcatgaccgagataaa

SEQ ID NO: 233285 - DNA, 75 bp, synthetic construct
  source 1..75: mol_type = other DNA
actaacaacgtgatcaccacgataaacctcattcgtgacatctcacaggctacacagaatgcaaagaacgaactg

SEQ ID NO: 233286 - DNA, 75 bp, synthetic construct
  source 1..75: mol_type = other DNA
attgcggttaccaacaatcagatacagacggtgggcgttaaccagatagagacggtgggcagtaaccagatcatt

SEQ ID NO: 233287 - DNA, 75 bp, synthetic construct
  source 1..75: mol_type = other DNA
ggaagatggacgtttactacagggggaatgtgtgtccttgaataccggcgcggcattgcgttctccgcacaatct

SEQ ID NO: 233288 - DNA, 75 bp, synthetic construct
  source 1..75: mol_type = other DNA
taaaagatattttgatattggggtttttcatgcgaatgaaaaatggatccgagaaaattttggtggcgctggtgg

SEQ ID NO: 233289 - DNA, 75 bp, synthetic construct
  source 1..75: mol_type = other DNA
aaaatttaactcttatccctaaagcttgcataaataatttcatgaaaatattagggtataagctaggtcaaaatt

SEQ ID NO: 233290 - DNA, 75 bp, synthetic construct
  source 1..75: mol_type = other DNA
cgagtcgtctgcgtattgtcaggacgggcggggagtttccgtcagaccgtgagagtctgcagtggatttgcgtga

SEQ ID NO: 233291 - DNA, 75 bp, synthetic construct
  source 1..75: mol_type = other DNA
cgacaacagtaccgttagctataacggtaactatggtagtgggacggacagcagtcaggtcggttatttcagccg

SEQ ID NO: 233292 - DNA, 75 bp, synthetic construct
  source 1..75: mol_type = other DNA
ggcaatgaattacacaagcgaagaaatcgaatgccatgcttcttttatcgtttatcatgcattcgtagagtgtaa

SEQ ID NO: 233293 - DNA, 75 bp, synthetic construct
  source 1..75: mol_type = other DNA
cacccgcatggataccatttgcatgcataaataacttcatgaaaatactaggttataagcttgggcatcattaca

SEQ ID NO: 233294 - DNA, 75 bp, synthetic construct
  source 1..75: mol_type = other DNA
agggcgacatgacgcagtatggcggtagcattgtccagggttcagccggggtacgcattggtgcccccaccggcg

SEQ ID NO: 233295 - DNA, 75 bp, synthetic construct
  source 1..75: mol_type = other DNA
ctgtacaaactgaaaattggcagcaaaatgcgttacaagcattaaggtctgataaagaggggttaactcctgaaa

SEQ ID NO: 233296 - DNA, 75 bp, synthetic construct
  source 1..75: mol_type = other DNA
gttcatatatctctgggagaatacatacgcagaagaaaaatagctcgagcagcggcactgttaaaaacatcgaca

SEQ ID NO: 233297 - DNA, 75 bp, synthetic construct
  source 1..75: mol_type = other DNA
gcagccgacctttgaaggaacgcgacctaccggaagatttccgacccgaagcgggttattagggctactcggggc

SEQ ID NO: 233298 - DNA, 75 bp, synthetic construct
  source 1..75: mol_type = other DNA
tacaaacgtggccctgcaaatgtatatgaatgatggtacaacggtcattacgccagacacagaaaccgggaatat

SEQ ID NO: 233299 - DNA, 75 bp, synthetic construct
  source 1..75: mol_type = other DNA
gggattaatgtgaaataccgttatgagttcacggatcacctgggcggcattgtcgcgctgagttatgcatcggtg

SEQ ID NO: 233300 - DNA, 75 bp, synthetic construct
  source 1..75: mol_type = other DNA
gtaaagcggatgctggcatattgaaagctcgacgccagcttaacgcccttaatcagttacaacacacgggtacag

SEQ ID NO: 233301 - DNA, 75 bp, synthetic construct
  source 1..75: mol_type = other DNA
aaatctcgagcgtcaggcgcgttcatttgagcgcgcccgtgacgctgtcagtaaagcggatgctggcatattgaa

SEQ ID NO: 233302 - DNA, 75 bp, synthetic construct
  source 1..75: mol_type = other DNA
gtactggcagtacgttgccgttatggatggcagaacacgcccggaacatgcgcggctgcacaatatggttttcag

SEQ ID NO: 233303 - DNA, 75 bp, synthetic construct
  source 1..75: mol_type = other DNA
cgggaactctgcgcggtcgacgaaccattttcggtgattgtgctggggaagaacagctctgtacatggcggcgct

SEQ ID NO: 233304 - DNA, 75 bp, synthetic construct
  source 1..75: mol_type = other DNA
gacgacgtttcagtgggcgaagtatgcgaaatttatgcgagctggcaagcaaatgaacgtatagccagggctcag

SEQ ID NO: 233305 - DNA, 75 bp, synthetic construct
  source 1..75: mol_type = other DNA
ccggatgaactggccgcaggctatgtgttgagttgccaggcactgccgctgaccagcgatgtggtggttgacttt

SEQ ID NO: 233306 - DNA, 75 bp, synthetic construct
  source 1..75: mol_type = other DNA
ctgctgctttcaaccacggatttatcaataagtctttacgtgaagttttcgatgttacgcgcatgattctgtcag

SEQ ID NO: 233307 - DNA, 75 bp, synthetic construct
  source 1..75: mol_type = other DNA
gcgtggaatcaccagaatataaggctgcgcaggtgtttttctcacaatcaccgaaacctcaggaggtttttgttg

SEQ ID NO: 233308 - DNA, 75 bp, synthetic construct
  source 1..75: mol_type = other DNA
cgtctgctttccaacgttgaacagtccatggatcagtccgtcacgaacggtctggtagcggctggcgtgtggaat

SEQ ID NO: 233309 - DNA, 75 bp, synthetic construct
  source 1..75: mol_type = other DNA
tgaagcgcgtaaggcgccggtgattcaggtagcaaccaaactggcgggggctatccacttcgctgatgtattaat

SEQ ID NO: 233310 - DNA, 75 bp, synthetic construct
  source 1..75: mol_type = other DNA
atgtcgttaacgttgacgtcatcatgtcaccggtagcggcaacggggcgaaacttcggtgcgctcctcattctgg

SEQ ID NO: 233311 - DNA, 75 bp, synthetic construct
  source 1..75: mol_type = other DNA
gctgatgatatcggcgatgactttggtgtagacagtcaggagtatgcggcggctgttatctggttctcccagcaa

SEQ ID NO: 233312 - DNA, 75 bp, synthetic construct
  source 1..75: mol_type = other DNA
gttacagaattatgtgcagaccaacctctataacctgctttataccagcaccacgaaagttccccagactgaagc

SEQ ID NO: 233313 - DNA, 75 bp, synthetic construct
  source 1..75: mol_type = other DNA
agcgaactgcttactacgttacaaagaaatggcatcagtattgaaaacatcgttaaaaccgactcagtcgtgaca

SEQ ID NO: 233314 - DNA, 75 bp, synthetic construct
  source 1..75: mol_type = other DNA
caccggatgatgaaggaggctgaacagaggggaacacgctggtaccaccccaaaatggggattttccaggtgatt

SEQ ID NO: 233315 - DNA, 75 bp, synthetic construct
  source 1..75: mol_type = other DNA
gtggatcacttttcatccgtcgttgacattacgcacatgcgcatgaatgttttcgaaatggaagggtttcttcgc

SEQ ID NO: 233316 - DNA, 75 bp, synthetic construct
  source 1..75: mol_type = other DNA
catccactggcgtctatggcggggccgttcagcgatgatacgttgcgcaattggccgtcattggtgcgcgaggac

SEQ ID NO: 233317 - DNA, 75 bp, synthetic construct
  source 1..75: mol_type = other DNA
tcagtcgtgacaatttataatcttgttctcaatgctgatttcttaactgtaattccttgtgatatgacatcacct

SEQ ID NO: 233318 - DNA, 75 bp, synthetic construct
  source 1..75: mol_type = other DNA
ataagaacgtataacggaagtcttgcaaatatggtgtggtggcaaagcgaaagaacattaaaaaattatgcaatc

SEQ ID NO: 233319 - DNA, 75 bp, synthetic construct
  source 1..75: mol_type = other DNA
cacggatatttccgcgaaaggacaggcatcagggaagaagaaagcggataaaaagggcgtgaattattttggtta

SEQ ID NO: 233320 - DNA, 75 bp, synthetic construct
  source 1..75: mol_type = other DNA
aaaataatctggtggcgcaggtatcaccggcgctggctggtattcatatcccatgggtgatgcagtcatcagaat

SEQ ID NO: 233321 - DNA, 75 bp, synthetic construct
  source 1..75: mol_type = other DNA
atttcagtctgacagcagaaggtaaggatatcacgaaggccataaaacgcggcctggcggaactgcgttacaccg

SEQ ID NO: 233322 - DNA, 75 bp, synthetic construct
  source 1..75: mol_type = other DNA
ataaaagcaattattgctcaagctaattatctgacgcaatgccatcaataccggaaatgtcttatctatggtctc

SEQ ID NO: 233323 - DNA, 75 bp, synthetic construct
  source 1..75: mol_type = other DNA
atcgtgctatgttgtactattatcaaggaggaggggctggtaaagatccatatttgatgaataatggaaaaatta

SEQ ID NO: 233324 - DNA, 75 bp, synthetic construct
  source 1..75: mol_type = other DNA
atgccatttattgccattatcgccattgttgtcatcgtcatcattctgaacaaaaccggggtgtccgacagcctc

SEQ ID NO: 233325 - DNA, 75 bp, synthetic construct
  source 1..75: mol_type = other DNA
ttcctgaataccatgtttccgctgaagggcgggatatcacgcgagtcctgcagcgctttctgattgatctgacac

SEQ ID NO: 233326 - DNA, 75 bp, synthetic construct
  source 1..75: mol_type = other DNA
agcctttttatgccaacaaggtttttcactagagaatgcattatatgcactcagcgctgtggggcattttacttt

SEQ ID NO: 233327 - DNA, 75 bp, synthetic construct
  source 1..75: mol_type = other DNA
atgtctagattagataaaagtaaagtgattaacagcgcattagagctgcttaatgaggtcggaatcgaaggttta

SEQ ID NO: 233328 - DNA, 75 bp, synthetic construct
  source 1..75: mol_type = other DNA
cagacgtgaccgcactgaaaacccgcgcgttcagcgatatcacactgggcgacctggtgaaaaccatcgccactg

SEQ ID NO: 233329 - DNA, 75 bp, synthetic construct
  source 1..75: mol_type = other DNA
atctgtcgctggccacggatatttctgcaaaggggaaagccagtggcaagaaaaaaggcgtcaattattttggtt

SEQ ID NO: 233330 - DNA, 75 bp, synthetic construct
  source 1..75: mol_type = other DNA
tttcgttcacctgggatctggttgtcgatattaaagctcctgccgcgaaatcagacaaaaaagcgcctgattact

SEQ ID NO: 233331 - DNA, 75 bp, synthetic construct
  source 1..75: mol_type = other DNA
aatggtatgccgatccttaacaagcaattgccgccggagcaggataaacgcgaaaatattattgatgtccctgtt

SEQ ID NO: 233332 - DNA, 75 bp, synthetic construct
  source 1..75: mol_type = other DNA
aagattgttgaaaaaaaaaccgcttccagatgaccgtgaaactcttttttggagtgtgtctcattctctaccagc

SEQ ID NO: 233333 - DNA, 75 bp, synthetic construct
  source 1..75: mol_type = other DNA
ccaatttcattctatgctgggtttttgggaaaagaataagaacttgttcacaagtaaaaaacttgcgccaatgat

SEQ ID NO: 233334 - DNA, 75 bp, synthetic construct
  source 1..75: mol_type = other DNA
taaaagttatcattcagacaacagcggttccggtggaggctcaagtggcggcggatttagcggcggtggcggttc

SEQ ID NO: 233335 - DNA, 75 bp, synthetic construct
  source 1..75: mol_type = other DNA
caatggtgttgatgagaattccgtgatcgatacgcaggggctgcatgcatatggtttgaatcgttatcgccttga

SEQ ID NO: 233336 - DNA, 75 bp, synthetic construct
  source 1..75: mol_type = other DNA
gtggcgagtgcgcaggaaattgcatggacgccggggagcagtcgtattgatggtcatcagggcgaaaatattacc

SEQ ID NO: 233337 - DNA, 75 bp, synthetic construct
  source 1..75: mol_type = other DNA
acaccacatattatacatttacacaatgtaaaaataaataataaggaatataaaggtcatggcatttcattatta

SEQ ID NO: 233338 - DNA, 75 bp, synthetic construct
  source 1..75: mol_type = other DNA
gcccagcatcctgttttggtgcggcgaagacatggaagcggcgggagaacctcagcgtataaaccgcaaagttaa

SEQ ID NO: 233339 - DNA, 75 bp, synthetic construct
  source 1..75: mol_type = other DNA
tcctgtgttaaacacgactttcccgttgttattcttcaacacaactgccttcgggttatcaaccagccctatttt

SEQ ID NO: 233340 - DNA, 75 bp, synthetic construct
  source 1..75: mol_type = other DNA
aatactaatggtgcttgggtcgcaagcgcaataaccggcaatggtcaggaatgggaagctatgcctgggagttat

SEQ ID NO: 233341 - DNA, 75 bp, synthetic construct
  source 1..75: mol_type = other DNA
cgggatgacctgctgaggctgcgcataattgctgccacggcgacggcgctggcacgctgggagccccggctgaaa

SEQ ID NO: 233342 - DNA, 75 bp, synthetic construct
  source 1..75: mol_type = other DNA
caggagaaggaagcgcctggctgacgcttgtcggggtgaataacgaaacacaggaaacgattcgacttgaggaga

SEQ ID NO: 233343 - DNA, 75 bp, synthetic construct
  source 1..75: mol_type = other DNA
tgggagcacatgcgggaaacggggaaggtcaagttctcctacgagacgttccgctcgcacgccaggcggcacatc

SEQ ID NO: 233344 - DNA, 75 bp, synthetic construct
  source 1..75: mol_type = other DNA
ttatatttacagtttcagcaaattcttatgcatataattcttataatgccggtgataatagccaggcaactgata

SEQ ID NO: 233345 - DNA, 75 bp, synthetic construct
  source 1..75: mol_type = other DNA
tcgaaaaggttcaggtgcacaaggccaaattaaaggatttgacttttagtaaaaatacatctggcattttagaac

SEQ ID NO: 233346 - DNA, 75 bp, synthetic construct
  source 1..75: mol_type = other DNA
tgattctccgcctagaagtatcaagggttttatctccaatgtgattaaggcaactgaatccgattttaatgtttc

SEQ ID NO: 233347 - DNA, 75 bp, synthetic construct
  source 1..75: mol_type = other DNA
tacggcacctggtgtttaacggctttgagctgataagccagcagttcagccgggaacggcagccgcatccgtccg

SEQ ID NO: 233348 - DNA, 75 bp, synthetic construct
  source 1..75: mol_type = other DNA
tgttcatactggtgcttatccagatcgtcaatcaggccatgatccgcgattacccgttcctggtacgggaaaatg

SEQ ID NO: 233349 - DNA, 75 bp, synthetic construct
  source 1..75: mol_type = other DNA
gaatgaatcactggcatatacagatcagcaggttaccaaaaataatgctgtaataaatcagaatattaataatgc

SEQ ID NO: 233350 - DNA, 75 bp, synthetic construct
  source 1..75: mol_type = other DNA
gctttcattggggtttttctgaccagagtcatttttcaacggtatttaagcaacgctttgggatgacgccaggcg

SEQ ID NO: 233351 - DNA, 75 bp, synthetic construct
  source 1..75: mol_type = other DNA
atggattatcacctatggggaggtaatactcactctgagtctgcatgggcaaaacgcttcccagagatgttgaaa

SEQ ID NO: 233352 - DNA, 75 bp, synthetic construct
  source 1..75: mol_type = other DNA
aaggaaagcaccgccgacgatctggcgcgcgatgcccgcttcgcagtgcgggatattctgggcaagccgcgtagc

SEQ ID NO: 233353 - DNA, 75 bp, synthetic construct
  source 1..75: mol_type = other DNA
ataactggtggtaaacccattccgttttctggtggtagacctgatttttcaacttgggcaaaagatacacctctt

SEQ ID NO: 233354 - DNA, 75 bp, synthetic construct
  source 1..75: mol_type = other DNA
atgaatggtgtggtgttgcgacgcaattgctcgcagcgtatattttgctatttgatgagtacaatgagaagaaag

SEQ ID NO: 233355 - DNA, 75 bp, synthetic construct
  source 1..75: mol_type = other DNA
tctgaccagagtcatttttcaacggtatttaagcaacgctttgggatgacgccaggcgctgatgaatcccctaat

SEQ ID NO: 233356 - DNA, 75 bp, synthetic construct
  source 1..75: mol_type = other DNA
cgttacgtttcatacgtcagcaaacagaggaatttgccaaaggcaatctgaccagtgcccgtatgaacgcatcta

SEQ ID NO: 233357 - DNA, 75 bp, synthetic construct
  source 1..75: mol_type = other DNA
atgcggtacggttcactggccggatggcgttattccgcctttctgatgcttccccgttttgccgatatttttcag

SEQ ID NO: 233358 - DNA, 75 bp, synthetic construct
  source 1..75: mol_type = other DNA
acctgaacctcccgcagcttgaccgggactacgactggaacgacaacggacagctaatccgcatcagcggcccgc

SEQ ID NO: 233359 - DNA, 75 bp, synthetic construct
  source 1..75: mol_type = other DNA
agcaccgtctggtgttctacacgcggatacagcacggtgagccgcaggtggagagccgctacctctatgacccgc

SEQ ID NO: 233360 - DNA, 75 bp, synthetic construct
  source 1..75: mol_type = other DNA
ctgggggaacagtccggggtttttagttttcacgtcaaaggggaaattgtgattagtgagtacggagaaaatcct

SEQ ID NO: 233361 - DNA, 75 bp, synthetic construct
  source 1..75: mol_type = other DNA
tcagtgctcgaagagttttgctatcttttaccccaaattagcagccctgattttcgtgacaaggactggggctca

SEQ ID NO: 233362 - DNA, 75 bp, synthetic construct
  source 1..75: mol_type = other DNA
cctgaagatgataagccaccgcaacaacctcatatcgctttgttttctgctcagatcatcgctaaaacggggatg

SEQ ID NO: 233363 - DNA, 75 bp, synthetic construct
  source 1..75: mol_type = other DNA
aaggcgtggatgacattaccaacaccgacctgcgccagaagatcgccgacgcactcaatcggctggccagcaaaa

SEQ ID NO: 233364 - DNA, 75 bp, synthetic construct
  source 1..75: mol_type = other DNA
cgcagtaaacagcaaaatcagcagacgtcttctgaacgtgaactggagatgtctaccgagattgcacgtctcaaa

SEQ ID NO: 233365 - DNA, 75 bp, synthetic construct
  source 1..75: mol_type = other DNA
aatcaagctcaattatttcgattgatcgggttgaagtatttgagaccttcccaaaaatcgaaaatcatgttggcg

SEQ ID NO: 233366 - DNA, 75 bp, synthetic construct
  source 1..75: mol_type = other DNA
cgacatgaccaacttctacacgatcaactatgaaagcgagcttttagatgaagtcaaagtgaccgaatcgaagag

SEQ ID NO: 233367 - DNA, 75 bp, synthetic construct
  source 1..75: mol_type = other DNA
agaaatgggctcaggatccgaagatgagcgactacctgcggcccaaaacgctgtttgctcccgagaactgcgtcg

SEQ ID NO: 233368 - DNA, 75 bp, synthetic construct
  source 1..75: mol_type = other DNA
tcgggtaaccaactcgacctatggcaaggggggacgaaccaaaacgacgctgggttatatccggggacgcctggc

SEQ ID NO: 233369 - DNA, 75 bp, synthetic construct
  source 1..75: mol_type = other DNA
aaagtggcgtgacagttaaaggctgtattcttaatggtgttattaagaaagctagcagttattatggatatgggt

SEQ ID NO: 233370 - DNA, 75 bp, synthetic construct
  source 1..75: mol_type = other DNA
gtaagccgaagaaacagaacatgccagccctgcccccaaccgaactcccccgcttccttacagtgttaaacaacg

SEQ ID NO: 233371 - DNA, 75 bp, synthetic construct
  source 1..75: mol_type = other DNA
gcaagccaaaaaaacagaatatgccagcattacccccttccgaactcccccgcttcctggttgctctaaacaatg

SEQ ID NO: 233372 - DNA, 75 bp, synthetic construct
  source 1..75: mol_type = other DNA
tgttgtaaagaaaattgatgaagctgattttgactttatatctagaggccagattccacctaatcctgcagaatt

SEQ ID NO: 233373 - DNA, 75 bp, synthetic construct
  source 1..75: mol_type = other DNA
aagtgtacctttatctgaaacgttttcgaaaaatgtgacgaaaaatattggttggaaaaaaacaaaaaatgttga

SEQ ID NO: 233374 - DNA, 75 bp, synthetic construct
  source 1..75: mol_type = other DNA
cattcctatttctgagttacttacccagaaagctactaaattagagggtttgagaaggaaagaacaatcagagcc

SEQ ID NO: 233375 - DNA, 75 bp, synthetic construct
  source 1..75: mol_type = other DNA
tgaagtccgacgagcatataaccgctccatatatttaactcaacgttttgagttgatggattggtggggctattt

SEQ ID NO: 233376 - DNA, 75 bp, synthetic construct
  source 1..75: mol_type = other DNA
atcgctctggacagtattttctcaatggtcgccgctaactggttccagctcaaaagtaaaagcgttacccctgat

SEQ ID NO: 233377 - DNA, 75 bp, synthetic construct
  source 1..75: mol_type = other DNA
aaacgtattggttttggcggaaaactagttgctcatggtcttcgctcaatagcaagtactgcaatgaatgaagca

SEQ ID NO: 233378 - DNA, 75 bp, synthetic construct
  source 1..75: mol_type = other DNA
atgagctgtcgattcgctacgggctgaccgagattgggccggtggacgtgtcgattggcattgccagctacccgc

SEQ ID NO: 233379 - DNA, 75 bp, synthetic construct
  source 1..75: mol_type = other DNA
cggcacttgctcacagtgataaaaatgaagttcgcagagcatacaatcgttcaacttacctagaacaacgtatag

SEQ ID NO: 233380 - DNA, 75 bp, synthetic construct
  source 1..75: mol_type = other DNA
atgccgtaaacactggtctgattgatgccaatccagcatcaggtattgggatggcttttgagaaacctaaaaagc

SEQ ID NO: 233381 - DNA, 75 bp, synthetic construct
  source 1..75: mol_type = other DNA
atttggtaattattgacacgccacctattttggccgtgaccgatgcggctattattggcagatatgcaggtacga

SEQ ID NO: 233382 - DNA, 75 bp, synthetic construct
  source 1..75: mol_type = other DNA
tagttgttagccgactctatttgtcatctgatagcaacacagaaataccaaaattaaaactgaaggtaaaggacg

SEQ ID NO: 233383 - DNA, 75 bp, synthetic construct
  source 1..75: mol_type = other DNA
aagacgccaaaagtttagaatttctaaataatcaacttccacaagtgcgtagtgatttagatatcgctgaaggta

SEQ ID NO: 233384 - DNA, 75 bp, synthetic construct
  source 1..75: mol_type = other DNA
tcaacacctatttatcaagcaaatgcgttggttcaagtagagcaaaaacagggaaatgcaatacttaatggctta

SEQ ID NO: 233385 - DNA, 75 bp, synthetic construct
  source 1..75: mol_type = other DNA
gttggcgaattacttgaagataaaaatatctcaatattagtcaatgaaattaaggctgaaccagggaccaaattt

SEQ ID NO: 233386 - DNA, 75 bp, synthetic construct
  source 1..75: mol_type = other DNA
atgattgtggcaataggcgtattcttaggcttactggtatctgtaggtttagttctattaaatgtatttctacga

SEQ ID NO: 233387 - DNA, 75 bp, synthetic construct
  source 1..75: mol_type = other DNA
agtatcaaacgatttgaacaaagtggtattgcaattaaaggatgtattttgaatggtgttgtgagaaaagcaagt

SEQ ID NO: 233388 - DNA, 75 bp, synthetic construct
  source 1..75: mol_type = other DNA
gggctcaagaatgattttaggtaaaacagtcgatgatttaaaccttcaaattagagcaaaacaagattactttcc

SEQ ID NO: 233389 - DNA, 75 bp, synthetic construct
  source 1..75: mol_type = other DNA
cagcatccctgtttcagaatggttagcgaagcagcaagccaaaaatgggcgattgaaaaaaaatgagtctgatac

SEQ ID NO: 233390 - DNA, 75 bp, synthetic construct
  source 1..75: mol_type = other DNA
tttatttacaactacttaatcgtcagcaggagctcaacatagcaaaatcaagtgcgataggcaatattagaatta

SEQ ID NO: 233391 - DNA, 75 bp, synthetic construct
  source 1..75: mol_type = other DNA
attatgatattgtagtgttggatactccacctattttagctgtgactgatgcagcagtcattggtcattatgtag

SEQ ID NO: 233392 - DNA, 75 bp, synthetic construct
  source 1..75: mol_type = other DNA
cgtggaccgaaatcgactacctgatggggccagccacctgcgtaccgctgtatcaacaactgaaagccgagttcc

SEQ ID NO: 233393 - DNA, 75 bp, synthetic construct
  source 1..75: mol_type = other DNA
aagcataccagttgctgaagcttatactaaaatcactgagcaatcaaagaaatggtctcgcaaagaaaacaaaat

SEQ ID NO: 233394 - DNA, 75 bp, synthetic construct
  source 1..75: mol_type = other DNA
atgaactggctttacttaaaaaggagctaaagtctcaccaggtaatactgtctgcgttggttggtcgtatgagct

SEQ ID NO: 233395 - DNA, 75 bp, synthetic construct
  source 1..75: mol_type = other DNA
taacctgaaagtaggaaaccaaaaaatacaaaacgttatggtctcacctaaaaataattcacagttccccttgcc

SEQ ID NO: 233396 - DNA, 75 bp, synthetic construct
  source 1..75: mol_type = other DNA
tgaaaacatgcttcgtatcatttacacgggcgaggatgttcctcatgatcgggagaggttgtactggctgaataa

SEQ ID NO: 233397 - DNA, 75 bp, synthetic construct
  source 1..75: mol_type = other DNA
tgggtaaaacccatctggctgttgctctcggagtgaaagtagcagatgcagggcatcgggtgttgttcatcccgc

SEQ ID NO: 233398 - DNA, 75 bp, synthetic construct
  source 1..75: mol_type = other DNA
gatgcagaggcattttattattcattgaaaggtcttcttgacgatcaacgcggtcttgaagagttacaaagaatg

SEQ ID NO: 233399 - DNA, 75 bp, synthetic construct
  source 1..75: mol_type = other DNA
ccatctgctgcaccactcaaccacgttgaatatcaaaggagaaagctatcggttgaaggaaaaaacgcagagctg

SEQ ID NO: 233400 - DNA, 75 bp, synthetic construct
  source 1..75: mol_type = other DNA
aatgggcctattattatcaaacccctggattaaatatcgcaccgcgttcacaacaggcactcgaatttagcgtcc

SEQ ID NO: 233401 - DNA, 75 bp, synthetic construct
  source 1..75: mol_type = other DNA
gccattaaatttaacgtcagatacaattaagacagatacagggaaaattccagctgcacagctagtccaacttgg

SEQ ID NO: 233402 - DNA, 75 bp, synthetic construct
  source 1..75: mol_type = other DNA
aaccacagacaccttcttatattcctgatgcctgtggcgtttttttacaaattccattccaagatggaacgaaga

SEQ ID NO: 233403 - DNA, 75 bp, synthetic construct
  source 1..75: mol_type = other DNA
atgaacatcaaacctattcgtacagagcaagattatgaagccgcgttgcgtgctgttgaacccatgttcgacaat

SEQ ID NO: 233404 - DNA, 75 bp, synthetic construct
  source 1..75: mol_type = other DNA
taactccagtcagctggaaattaatgacagtggttatgcgcttgttccagcagtaacgccctatcgctacaaccg

SEQ ID NO: 233405 - DNA, 75 bp, synthetic construct
  source 1..75: mol_type = other DNA
gtaattctggctcaacgagcatttgactcacgtactgtttctgaattggtaactaataccaatactattcgtgtt

SEQ ID NO: 233406 - DNA, 75 bp, synthetic construct
  source 1..75: mol_type = other DNA
tacattgaatcaagagctgtcgcaactgcaacctggcgatccgcaatataataaagtactgacgcaaaaaaatgc

SEQ ID NO: 233407 - DNA, 75 bp, synthetic construct
  source 1..75: mol_type = other DNA
atttatccaattcgaattttgcaggttgcagactacaaaactctattttccaggactgtaatatgtatagaacga

SEQ ID NO: 233408 - DNA, 75 bp, synthetic construct
  source 1..75: mol_type = other DNA
aaaaagtgataggcttgattcagaaaatgaaaagaatttatgatagtttaccatcaggaaaaatcacgaaggaaa

SEQ ID NO: 233409 - DNA, 75 bp, synthetic construct
  source 1..75: mol_type = other DNA
aaaaaacgaatgggaacaatgggccatgcgctatatcgccgtagtgggagggtgtgttttatttcccgataagat

SEQ ID NO: 233410 - DNA, 75 bp, synthetic construct
  source 1..75: mol_type = other DNA
ttgagccaatcaaagctcgtggagcgcttgagactgttcgtcgactggtgcaacgcataaacgagataatgattt

SEQ ID NO: 233411 - DNA, 75 bp, synthetic construct
  source 1..75: mol_type = other DNA
ccaacaccgaagttctgcgcgctaaagcgttagagaaggatctgacgctgcatgatggcgatggccttttcctga

SEQ ID NO: 233412 - DNA, 75 bp, synthetic construct
  source 1..75: mol_type = other DNA
agattgatcttgatgcaaaaatatgggttattccagcagaaagaatgaaggccaaaagagaacatatagttcctt

SEQ ID NO: 233413 - DNA, 75 bp, synthetic construct
  source 1..75: mol_type = other DNA
cgccccggacaaccgtggtcactacagccaaccggtggtggatttaccggaaaccaaagcctgggctgaaaaact

SEQ ID NO: 233414 - DNA, 75 bp, synthetic construct
  source 1..75: mol_type = other DNA
ttacatcccgcagcaagtgggcgagtttatgcggcttatggtggagtttatgtctgtacggcgttgatttggctg

SEQ ID NO: 233415 - DNA, 75 bp, synthetic construct
  source 1..75: mol_type = other DNA
ctggtcaaaagacgccgtggagcgacaaatgagccatcaggagcgtaatcacgttcgtgccgcgtatatccacaa

SEQ ID NO: 233416 - DNA, 75 bp, synthetic construct
  source 1..75: mol_type = other DNA
tttgttattttttttatcatcattcaatgaacagatagctgtagtcaatgtattattatgcaccacactgttaat

SEQ ID NO: 233417 - DNA, 75 bp, synthetic construct
  source 1..75: mol_type = other DNA
gcgatttggataacaggatcattcaactatctgtggccaagtgctattgcatttattggttattctctacttata

SEQ ID NO: 233418 - DNA, 75 bp, synthetic construct
  source 1..75: mol_type = other DNA
agatatttcacatggtcatcacgaacatggattgaatatgcattaataaatcttattaatcatttttatgcttgg

SEQ ID NO: 233419 - DNA, 75 bp, synthetic construct
  source 1..75: mol_type = other DNA
tatactccggaacgagagaagaggccatctggttaatgagtttattaaaacatgtgggtgaaacccccttaatac

SEQ ID NO: 233420 - DNA, 75 bp, synthetic construct
  source 1..75: mol_type = other DNA
gacattgtggtccatatatgttggctctttgctagacgaaagcttcaccgactacacctatggtaatagagtgtc

SEQ ID NO: 233421 - DNA, 75 bp, synthetic construct
  source 1..75: mol_type = other DNA
tccgcagaaaatggaatatttttgaaacatgtagatccaaactctcttcagccagggtcttatcatcgtgttatt

SEQ ID NO: 233422 - DNA, 75 bp, synthetic construct
  source 1..75: mol_type = other DNA
ttcccaattacaatgaggcgataagagaggaaccgatagactttctggacagatcgttttcctccagctcatggc

SEQ ID NO: 233423 - DNA, 75 bp, synthetic construct
  source 1..75: mol_type = other DNA
tgtcggttgcgatcgcgttgagcctggtaatgtgggcatcaaagtaaacaaacttggcgacgataaaggcgtcgg

SEQ ID NO: 233424 - DNA, 75 bp, synthetic construct
  source 1..75: mol_type = other DNA
tgtcattttttattttacctgttcatgccggtgtggtcatctatggtacgcgcattatttatccggaaaaaagca

SEQ ID NO: 233425 - DNA, 75 bp, synthetic construct
  source 1..75: mol_type = other DNA
cgcgcacggcgctcttgcaacaccgctggctcaaccgcctgcagaccgggctgttggtcctgaccatggtaggga

SEQ ID NO: 233426 - DNA, 75 bp, synthetic construct
  source 1..75: mol_type = other DNA
ttttatccaaatagacaagttggttctattgatggaggatgtgtactttttaaggataaaaatcactatgaactg

SEQ ID NO: 233427 - DNA, 75 bp, synthetic construct
  source 1..75: mol_type = other DNA
acgacaacgttaagcgtaacgtcgtcaacttcatccagtctctgcccgtcgaccaccgatcgccgctgattatcg

SEQ ID NO: 233428 - DNA, 75 bp, synthetic construct
  source 1..75: mol_type = other DNA
tttttatgaaagcccaacatcaacccacaatgacataatgggggcgggggaatgtcatatgcctatgaatatgat

SEQ ID NO: 233429 - DNA, 75 bp, synthetic construct
  source 1..75: mol_type = other DNA
acagtaaacaaagactgaacatcaatgttgctcaggtgcacatgcagaaggaaacggataatcgcctggcccgta

SEQ ID NO: 233430 - DNA, 75 bp, synthetic construct
  source 1..75: mol_type = other DNA
ttaccttcaataaagctttacatttcctataataaatcttctttaaataatttggtgttctcccgatttattgac

SEQ ID NO: 233431 - DNA, 75 bp, synthetic construct
  source 1..75: mol_type = other DNA
gtggttcctctttgctgacaatcattaatagcattgcagttacagatttactgggaatagtcccctatgaacttt

SEQ ID NO: 233432 - DNA, 75 bp, synthetic construct
  source 1..75: mol_type = other DNA
atcaactccaaaattgcccggcgatcgcgaaacgctgttctactataacatgcgcgaaattcctccagccccgga

SEQ ID NO: 233433 - DNA, 75 bp, synthetic construct
  source 1..75: mol_type = other DNA
gtctgaactgctggattcagcacttaaagacattcagtcagaaatgacacctatcggcattcaggtcatgagcct

SEQ ID NO: 233434 - DNA, 75 bp, synthetic construct
  source 1..75: mol_type = other DNA
cgggaatacgccgatcatcaaaaagcaatggacgcgcttgcagaaggtgaagtcgatatagtgttatcacattta

SEQ ID NO: 233435 - DNA, 75 bp, synthetic construct
  source 1..75: mol_type = other DNA
ttcaggagtaagagaggctgttgttgatggagttacggggtatttaattaataatcttgatgaaatgttggatat

SEQ ID NO: 233436 - DNA, 75 bp, synthetic construct
  source 1..75: mol_type = other DNA
cagtaaccagatcattaacgtgggttctgttcaggtggaaacgattggacttgttcgtgcgctgaccgtgggcgt

SEQ ID NO: 233437 - DNA, 75 bp, synthetic construct
  source 1..75: mol_type = other DNA
atggaagctaattttacttctggtgcaatccaacagtggaaagaaaaagatacaggtacggttaaacgcaacagt

SEQ ID NO: 233438 - DNA, 75 bp, synthetic construct
  source 1..75: mol_type = other DNA
gcgtggatgacattaccgacactgacctgcgccagaagatcgccgacgcactcaatcgactggccagcaaaatga

SEQ ID NO: 233439 - DNA, 75 bp, synthetic construct
  source 1..75: mol_type = other DNA
ataatgaaagtatcttactgcctccattttcgaataacgacattacattaaaaataaccacgcatcagaatatga

SEQ ID NO: 233440 - DNA, 75 bp, synthetic construct
  source 1..75: mol_type = other DNA
ggatgattacggcgcattgcgaatgaccaccctggactgtaacgggccgtgtcgtttacagccagtggaggcgaa

SEQ ID NO: 233441 - DNA, 75 bp, synthetic construct
  source 1..75: mol_type = other DNA
atgacatttattaaaggattgcccctgattctgttagctgtcagcctgggtagccacgctgccgtgcaacccgat

SEQ ID NO: 233442 - DNA, 75 bp, synthetic construct
  source 1..75: mol_type = other DNA
gtgaaactattcgtcaggcgctggcacaaaatcatcacaactgggctgcctgcgcgcggatgctggaaaccgacg

SEQ ID NO: 233443 - DNA, 75 bp, synthetic construct
  source 1..75: mol_type = other DNA
ggggagcatcagcgagcaatgaacatagcgctttcctatggggaacgtttgaatagtcactcgaaaaatcttaag

SEQ ID NO: 233444 - DNA, 75 bp, synthetic construct
  source 1..75: mol_type = other DNA
gggattttaaaatccaccttttctatagcgtcattgcataatgctgaagactatttgagcaagcatttgtcattg

SEQ ID NO: 233445 - DNA, 75 bp, synthetic construct
  source 1..75: mol_type = other DNA
ccaacacaaggtcagccaatctctaagagtgggtataacaacatcattagtgagattaaaaaatcatcattagaa

SEQ ID NO: 233446 - DNA, 75 bp, synthetic construct
  source 1..75: mol_type = other DNA
tatcttcggcattggcaaaagaattgcacaattacattaccagtgtccgtaggaagtttaagaatgccagaaagc

SEQ ID NO: 233447 - DNA, 75 bp, synthetic construct
  source 1..75: mol_type = other DNA
caagagatgctcagctagaaagaaaggtttattttaatgagaagatgcttaatttaaatgataatgatgaaaaag

SEQ ID NO: 233448 - DNA, 75 bp, synthetic construct
  source 1..75: mol_type = other DNA
atcttggcaaggcatttaaggttgctgatttagctataaaggttgagaaaattagggaaaaaagcattgagggat

SEQ ID NO: 233449 - DNA, 75 bp, synthetic construct
  source 1..75: mol_type = other DNA
ttcagcggacgggcacaaacgtgatctgccaggagtgccgaaacagtccggcgatgagaagggtattgatggttt

SEQ ID NO: 233450 - DNA, 75 bp, synthetic construct
  source 1..75: mol_type = other DNA
tgctggcagccctgcgtaacaacccagggctgaacaacgccaagctggcaggtcttatcggcatggacaccaaaa

SEQ ID NO: 233451 - DNA, 75 bp, synthetic construct
  source 1..75: mol_type = other DNA
cattttcttctaaaagaaaattatgatgttttggatggcgtagtggatgaggtcgattatcctgagtatacttat

SEQ ID NO: 233452 - DNA, 75 bp, synthetic construct
  source 1..75: mol_type = other DNA
ctgtgcaactctgacaggactaatccatagtgtaccattgttaatggttatccgttttattcttggtgttgtcga

SEQ ID NO: 233453 - DNA, 75 bp, synthetic construct
  source 1..75: mol_type = other DNA
gcaaggcacaggggggcggcctgatcaggcaatggacagcgcctggctcctcagcctgcgtgtgccacaggcgcc

SEQ ID NO: 233454 - DNA, 75 bp, synthetic construct
  source 1..75: mol_type = other DNA
cttcattctttgacattgaacaatatttattggggggcattgatagaaataataattatattaatgaaaatttca

SEQ ID NO: 233455 - DNA, 75 bp, synthetic construct
  source 1..75: mol_type = other DNA
tccaccatctgaatcaagcgataattcatagtggtcttgcctctggtatggatggggaaccaatcgatttggaaa

SEQ ID NO: 233456 - DNA, 75 bp, synthetic construct
  source 1..75: mol_type = other DNA
ggaacaacctgagaatttttggtattacaataatggtataactattgttgctgaatctataaaaaaatcgatggt

SEQ ID NO: 233457 - DNA, 75 bp, synthetic construct
  source 1..75: mol_type = other DNA
tccatgctgaaaagctggcgctgctggttcagggggttgatcccggcaaacaggccagggaagcagcagcgcagg

SEQ ID NO: 233458 - DNA, 75 bp, synthetic construct
  source 1..75: mol_type = other DNA
cagcagcgaccaacagaatttatccgtatccgctgggcgctgggcgctggaatattaccaggctggcgacgccga

SEQ ID NO: 233459 - DNA, 75 bp, synthetic construct
  source 1..75: mol_type = other DNA
agtcagattattaaacggttccgtcaatcttgactctctggcagagggggtcttccgctggtgccaggagagcga

SEQ ID NO: 233460 - DNA, 75 bp, synthetic construct
  source 1..75: mol_type = other DNA
cagcagcggccaaccgaatttatccgtatccgctgggcgctggaatattaccaggctggcgacgccgataacgaa

SEQ ID NO: 233461 - DNA, 75 bp, synthetic construct
  source 1..75: mol_type = other DNA
agcgtgaagggctaagcagaccgctggagccggcggaattctccgacggcactctgcgttttctgtgcctggcgg

SEQ ID NO: 233462 - DNA, 75 bp, synthetic construct
  source 1..75: mol_type = other DNA
atcagcattatttacctgtaacctatatcagacagtttaaaataacatctaaagatccacatatcgggaaagata

SEQ ID NO: 233463 - DNA, 75 bp, synthetic construct
  source 1..75: mol_type = other DNA
agggtttcgttctctgctgatgcagacccacactttgtggaaaattgaagcacaagagtggcgttttaccgcact

SEQ ID NO: 233464 - DNA, 75 bp, synthetic construct
  source 1..75: mol_type = other DNA
tgacaataataaagtagctaaaattaatcgtaaaaagattgaaaaagcaattatccactatgtagaaactagatg

SEQ ID NO: 233465 - DNA, 75 bp, synthetic construct
  source 1..75: mol_type = other DNA
gaaaaccctgcagcgcgaacaggaagtcaagcaacgtgaagcggaggccaacatgctgcgtgcagaagctgccgg

SEQ ID NO: 233466 - DNA, 75 bp, synthetic construct
  source 1..75: mol_type = other DNA
aactaaaaaaaagaaaaccttatgagcattctctactggttgcgcattatttgtacgggttttcaaagcggaaga

SEQ ID NO: 233467 - DNA, 75 bp, synthetic construct
  source 1..75: mol_type = other DNA
cagcttctgcaatataaaccatttggtgataaccattctccggtactgtggaactcgaagtatggtcatctcgat

SEQ ID NO: 233468 - DNA, 75 bp, synthetic construct
  source 1..75: mol_type = other DNA
agtagcaaaaattgaggacccttatgatctgaaacctcatcctttggtatccggattaaagcttcccagaacaaa

SEQ ID NO: 233469 - DNA, 75 bp, synthetic construct
  source 1..75: mol_type = other DNA
atgttctcaagaaatcatcctcatcgccagccgttcaatgccagaaactcaaggttttctgaaagctccattgat

SEQ ID NO: 233470 - DNA, 75 bp, synthetic construct
  source 1..75: mol_type = other DNA
gttaccgtttcaatgagcagacagcagcgaaagcaggtgtggcagcgagtgatggcgatgtgtcctacaacgtag

SEQ ID NO: 233471 - DNA, 75 bp, synthetic construct
  source 1..75: mol_type = other DNA
aagatgggactgtagaagttactaccaaggatggcactagtacatatcgtgtgtatgaccgggagtttcataacc

SEQ ID NO: 233472 - DNA, 75 bp, synthetic construct
  source 1..75: mol_type = other DNA
aaattcgtgagaatcacgaagagatgaagcgtgcagcagcacagagtgcagcgctggcggggcttttccagccgt

SEQ ID NO: 233473 - DNA, 75 bp, synthetic construct
  source 1..75: mol_type = other DNA
tcggaacgttacactgttcaggcaccttataaaacgggtgccgggattggcgtcctgaaattcaatatagagcat

SEQ ID NO: 233474 - DNA, 75 bp, synthetic construct
  source 1..75: mol_type = other DNA
ttgaagcattccatgaggccgaaaccagcctgactcacactgctttccgccgtaatcaatgggaggcgcgcccat

SEQ ID NO: 233475 - DNA, 75 bp, synthetic construct
  source 1..75: mol_type = other DNA
cagatttgcagagtgggctgtgggtgatttcaaccggcagaaggagacagtcctttgcaacaagttaaccgctgg

SEQ ID NO: 233476 - DNA, 75 bp, synthetic construct
  source 1..75: mol_type = other DNA
aacaatccggcagaagacccggatattgaatccattggttattacggctcaacgtggcgtaacagtgccgccacc

SEQ ID NO: 233477 - DNA, 75 bp, synthetic construct
  source 1..75: mol_type = other DNA
atggcgagcatcagcagctattacaccttttatctgatgcaaaaattcggattatctatccagaatgctcagctt

SEQ ID NO: 233478 - DNA, 75 bp, synthetic construct
  source 1..75: mol_type = other DNA
accgccagcatgtgcagcgcaccacctttgcgccgacgtcgatgtcgcaggtgatgaccgatcccagcggacagc

SEQ ID NO: 233479 - DNA, 75 bp, synthetic construct
  source 1..75: mol_type = other DNA
agcgccagattatggtgtggcgtgtggtttgccgtgcaggtatgatcctgttcgcaatcgcatgttatgccactg

SEQ ID NO: 233480 - DNA, 75 bp, synthetic construct
  source 1..75: mol_type = other DNA
cattttcttcaggaactgcccgttgtatttatgtccgagccggaaattgaattcgatgaagataatgaaaaaata

SEQ ID NO: 233481 - DNA, 75 bp, synthetic construct
  source 1..75: mol_type = other DNA
aggcgaaaacagggcgtatctggacgtatgtccgggatgatcgcaatgcgggttcgtcatctcctccggcggtct

SEQ ID NO: 233482 - DNA, 75 bp, synthetic construct
  source 1..75: mol_type = other DNA
gttgcctgtcatttcaagcgcatgcaccagaacatcgtcgacaaaatcgagtatctgaactgctcgcgcgaattt

SEQ ID NO: 233483 - DNA, 75 bp, synthetic construct
  source 1..75: mol_type = other DNA
tgctttcatctttggtgatcagaactcaggcttcctgggtgcaattaaagatgcattcgacgctatcgctgcagc

SEQ ID NO: 233484 - DNA, 75 bp, synthetic construct
  source 1..75: mol_type = other DNA
tactgataagcgcagcgcatcaggcaatcatacgcttgtcatcagttacatacccataaccttatcgatgtgttg

SEQ ID NO: 233485 - DNA, 75 bp, synthetic construct
  source 1..75: mol_type = other DNA
gtttggttgagatttcagagattcaggccgtttcgctgttaatggggagccgtctggagattggcgggaaatttt

SEQ ID NO: 233486 - DNA, 75 bp, synthetic construct
  source 1..75: mol_type = other DNA
tggactggctggaatactgaagtttacatcttccccaccttcaagcaaatgaagacctacgatgaaccgttcagt

SEQ ID NO: 233487 - DNA, 75 bp, synthetic construct
  source 1..75: mol_type = other DNA
tgattgagaaatataagaatgaatatttcataaatatcacaccaacttatctgtcacttaaaaatgatagaacat

SEQ ID NO: 233488 - DNA, 75 bp, synthetic construct
  source 1..75: mol_type = other DNA
ttgcggccgggcgtggagagcgctttctcgcctccgggggaaatacccataaattaagagaaaaatctgcagtag

SEQ ID NO: 233489 - DNA, 75 bp, synthetic construct
  source 1..75: mol_type = other DNA
agacggcaaccccaaaactgaatgaagtcagtatccgcctgtatccgatctacgcttacccgaaaaccactcagg

SEQ ID NO: 233490 - DNA, 75 bp, synthetic construct
  source 1..75: mol_type = other DNA
ttatgcgggcttatgatccaggtatcatgcaatttttactggatgattattttaattcattatttatttcattcg

SEQ ID NO: 233491 - DNA, 75 bp, synthetic construct
  source 1..75: mol_type = other DNA
cacgccaaaattatggtgggctgggcaggggagccgaaaggctcgccggtttccgtatgcgccggtagtgcaaac

SEQ ID NO: 233492 - DNA, 75 bp, synthetic construct
  source 1..75: mol_type = other DNA
agcttcacgccgctcctgagaatcgaaacagagaatggtgaacaggcgaaggcgcggcaccgtagcctggcggag

SEQ ID NO: 233493 - DNA, 75 bp, synthetic construct
  source 1..75: mol_type = other DNA
cgaaggcgcggcaccgtagcctggcggaggtgttgcaggaggacacgggtgtgacgctaccggcggagctggcgg

SEQ ID NO: 233494 - DNA, 75 bp, synthetic construct
  source 1..75: mol_type = other DNA
gtgcagcggggggatcctcttgggttgtctggtgagacactggttcttggttctgccacaacagtaacaggaaca

SEQ ID NO: 233495 - DNA, 75 bp, synthetic construct
  source 1..75: mol_type = other DNA
tccacaggacaataaccacctgacagggcgtcctgtaaacgggtttcatcataaaaaaaccaaccgtccggactg

SEQ ID NO: 233496 - DNA, 75 bp, synthetic construct
  source 1..75: mol_type = other DNA
actccgctttatatgtttattgttttctacacaataaagtgcggatgtgattactttggcttacttacatccctg

SEQ ID NO: 233497 - DNA, 75 bp, synthetic construct
  source 1..75: mol_type = other DNA
ttattcagtactcaatcgacaatccctataagtatggtgataacgattgcaatttgattgtactccgcattattg

SEQ ID NO: 233498 - DNA, 75 bp, synthetic construct
  source 1..75: mol_type = other DNA
aacaaccagacaagcaaggtgacgggaactgataccgaagaagtcgtcaaaaaacagagtattaaaataggtgat

SEQ ID NO: 233499 - DNA, 75 bp, synthetic construct
  source 1..75: mol_type = other DNA
cactggcgggctctgatgagtaatcgccgcagtgcgggctactatcgctggctggataagctggatgaattttac

SEQ ID NO: 233500 - DNA, 75 bp, synthetic construct
  source 1..75: mol_type = other DNA
taaacgacaactggcggagcaggctgaggaactggccatcctccaaaaggccgcgatatacttcgcgaagcgcct

SEQ ID NO: 233501 - DNA, 75 bp, synthetic construct
  source 1..75: mol_type = other DNA
atcgcgaaattagaagtaagatccattatctggcggtaaaaagaaattctgatttcgaacatgttaaaggactta

SEQ ID NO: 233502 - DNA, 75 bp, synthetic construct
  source 1..75: mol_type = other DNA
aggtggggatcattcgtgcgctgacggtgggtgtggcgtatcagacgacggtaggcggcattatgaatacctcgg

SEQ ID NO: 233503 - DNA, 75 bp, synthetic construct
  source 1..75: mol_type = other DNA
ttctattggatttgaaaagcaccaatctattttgaataatgctaccccgcatattggggcaaactttatactgaa

SEQ ID NO: 233504 - DNA, 75 bp, synthetic construct
  source 1..75: mol_type = other DNA
gctacagaacggctttggctttagccagagcaaatgttcagcaagtgaaaaacagcaggaggaacttaaccgggc

SEQ ID NO: 233505 - DNA, 75 bp, synthetic construct
  source 1..75: mol_type = other DNA
tcagtgtgagaatggcgatcatgtggagaacatgatgacagcgcggacaatgcagggaggcgctatccggttatg

SEQ ID NO: 233506 - DNA, 75 bp, synthetic construct
  source 1..75: mol_type = other DNA
agccgggcttaagtgacaacgtatccttttcaagaaaaatattaattggggagcaaaccatgataactgaacaga

SEQ ID NO: 233507 - DNA, 75 bp, synthetic construct
  source 1..75: mol_type = other DNA
aacgcttcgcggatgggactcatcaatcaccgacaagaagaggcgaagacgctgcaatcaattgccagaatgaac

SEQ ID NO: 233508 - DNA, 75 bp, synthetic construct
  source 1..75: mol_type = other DNA
cgctgggtgaaaaatcacttgcgtcttagcagtaaattcaatggattcctgactttttatctctacccggtgctc

SEQ ID NO: 233509 - DNA, 75 bp, synthetic construct
  source 1..75: mol_type = other DNA
ccgcctattctctggcagataaaccggcgttagcgccaggctttgcggctggacttgccgccaacatgatcggct

SEQ ID NO: 233510 - DNA, 75 bp, synthetic construct
  source 1..75: mol_type = other DNA
ggtagcggatactacccgcacgatgacggtgatttctgaacaagtgattaaagatcagggcgcaaccaaccttac

SEQ ID NO: 233511 - DNA, 75 bp, synthetic construct
  source 1..75: mol_type = other DNA
cgattatgttgatgaatttttttcaagtagcgataaaaatcttgtaagaagtaaagataataatcttgaagcatt

SEQ ID NO: 233512 - DNA, 75 bp, synthetic construct
  source 1..75: mol_type = other DNA
aaatattttgcatctaaggcagaaactgataatttaagaaaggagtcatatcctctgaaaagaaaatgtcccaca

SEQ ID NO: 233513 - DNA, 75 bp, synthetic construct
  source 1..75: mol_type = other DNA
atgttaaatccgcagatattcacaaaattacccttagccagcgcagatagtacgaacgtcgctcgaaacatcggt

SEQ ID NO: 233514 - DNA, 75 bp, synthetic construct
  source 1..75: mol_type = other DNA
gcacgcaggattaagaaagtttacgggagaaatgcaacagtaatttatcctcctgtagatgttaatcgattcact

SEQ ID NO: 233515 - DNA, 75 bp, synthetic construct
  source 1..75: mol_type = other DNA
ttgttgctgattggttagtaacttatgcaggatcggaaaaagttattgcagaatttataaaactgtttccccagt

SEQ ID NO: 233516 - DNA, 75 bp, synthetic construct
  source 1..75: mol_type = other DNA
tggtgattactggccggaatctcagcttacaaaagactgtgaacttattgtaaagatcttaaaagagttttttga

SEQ ID NO: 233517 - DNA, 75 bp, synthetic construct
  source 1..75: mol_type = other DNA
gattttacattatgaatgtgcaacattttgatttttttacagataatgagttttctaatctggaaagatatcaaa

SEQ ID NO: 233518 - DNA, 75 bp, synthetic construct
  source 1..75: mol_type = other DNA
atcaacctgattctgtgatgcttgagcatatgcaaaatgctaaagcttttgtttttgctgctgaagaagactttg

SEQ ID NO: 233519 - DNA, 75 bp, synthetic construct
  source 1..75: mol_type = other DNA
taaaatagaacctcaggattgcagggagaatgccatgcgattttctgttgaaatatttaaaaataatttgtcaaa

SEQ ID NO: 233520 - DNA, 75 bp, synthetic construct
  source 1..75: mol_type = other DNA
atataaagcattatctcaaagagcatgattttattgttcatatctggatatatactcctctgacaaaagttgagt

SEQ ID NO: 233521 - DNA, 75 bp, synthetic construct
  source 1..75: mol_type = other DNA
ttgtattttaacaataaggaccaaaacaacccaaatccattagcagctgctttcgatgaacttggtaaattaaaa

SEQ ID NO: 233522 - DNA, 75 bp, synthetic construct
  source 1..75: mol_type = other DNA
tgcttgctgacctgttacctaggttaacattacaaggatctagttattctaaggagtatgatattcgcaaattta

SEQ ID NO: 233523 - DNA, 75 bp, synthetic construct
  source 1..75: mol_type = other DNA
aaaactgactcctcattaagattgctggaggattcattagcattattgacgaaatttgagaataatctattttct

SEQ ID NO: 233524 - DNA, 75 bp, synthetic construct
  source 1..75: mol_type = other DNA
ttactgttaacactactaaccctataaataacaaagagtttctttgggttagttataatataaataattcaactg

SEQ ID NO: 233525 - DNA, 75 bp, synthetic construct
  source 1..75: mol_type = other DNA
gatatagtgaaaagtattcatagatttagatcagtcacacaggaaacattctatggtttggcaaaggatttagct

SEQ ID NO: 233526 - DNA, 75 bp, synthetic construct
  source 1..75: mol_type = other DNA
cccgtaggcctgataagccgcgtcagcggcgcatcaggcatcggttgtcgaatacaaccaacgggcgttttttat

SEQ ID NO: 233527 - DNA, 75 bp, synthetic construct
  source 1..75: mol_type = other DNA
taggttacagattcaaaaacttaatgaaatactttcattgcttgctgaatattcttttgatgacccacaaaaaaa

SEQ ID NO: 233528 - DNA, 75 bp, synthetic construct
  source 1..75: mol_type = other DNA
ctcttttacagcccggattatggcgacctcacttttaccctgaaagggatctgcttcagagctaaagcggaagag

SEQ ID NO: 233529 - DNA, 75 bp, synthetic construct
  source 1..75: mol_type = other DNA
ttgtgttataatgttacaaataattcccttaacacaccattaaatggaataagatggtttttttttaaaacaatg

SEQ ID NO: 233530 - DNA, 75 bp, synthetic construct
  source 1..75: mol_type = other DNA
cacctccggaatcgtagtgataaaactgtatcgtcacaaaagagacagatatacaaaaaactgggtgtccgaaat

SEQ ID NO: 233531 - DNA, 75 bp, synthetic construct
  source 1..75: mol_type = other DNA
atataaagagcgaaataaaagagcatagtattactgttcacctgtgggtatttgcatcgctgacaaaaattgagt

SEQ ID NO: 233532 - DNA, 75 bp, synthetic construct
  source 1..75: mol_type = other DNA
aattagaactcactgacgatgagttggattccatacctctatcacctgaagaccttgaggagaatacagggcatt

SEQ ID NO: 233533 - DNA, 75 bp, synthetic construct
  source 1..75: mol_type = other DNA
acaaactccgtcctctgtatatagcgctgaatgactatgttctggaggcaggaaaggtgcacgcagatgacactc

SEQ ID NO: 233534 - DNA, 75 bp, synthetic construct
  source 1..75: mol_type = other DNA
tacggattaaagcagagattgagcagactgaacatctgcgggaattgagatgtttatacaaaagaggtgggaaat

SEQ ID NO: 233535 - DNA, 75 bp, synthetic construct
  source 1..75: mol_type = other DNA
gtaaaacctgccactttcactttagcgggggctgctgcagttcttcctgccttcggtgacaacggctgtgtgccc

SEQ ID NO: 233536 - DNA, 75 bp, synthetic construct
  source 1..75: mol_type = other DNA
catatgattactcagagaaatatcttaaccctcttttctattcatacttttctctcttacaacataagcaagaaa

SEQ ID NO: 233537 - DNA, 75 bp, synthetic construct
  source 1..75: mol_type = other DNA
tgacaaactatcttgccaaaaccaaaaaaaatgtagatctctatagattatataacccacaattttctgtattcg

SEQ ID NO: 233538 - DNA, 75 bp, synthetic construct
  source 1..75: mol_type = other DNA
aagaagttaaaagagaatacaaggaacaagaaggaaatccagaaattaagtctaaacgcagagaacgccatcaag

SEQ ID NO: 233539 - DNA, 75 bp, synthetic construct
  source 1..75: mol_type = other DNA
ctggtagaggcggagaaatccgcgcaggccaatgtgattcgtcggcgtgaagaaaccgccgccacgcgttcgttg

SEQ ID NO: 233540 - DNA, 75 bp, synthetic construct
  source 1..75: mol_type = other DNA
ctggttgaggcggagaaatccgcgcaggccaatgtgattcgccgacgtgaagaaacggcagcgactgtaaccagg

SEQ ID NO: 233541 - DNA, 75 bp, synthetic construct
  source 1..75: mol_type = other DNA
agcactgtcgcattgagcctgactttaccgatgacgactcactattgtccctctacatcggagctgcttctcgtt

SEQ ID NO: 233542 - DNA, 63 bp, synthetic construct
  source 1..63: mol_type = other DNA
atgaagtatgtctttattgaaaaacatcaggctgagttcagcatcaaagcaatgtgccgcgtg

SEQ ID NO: 233543 - DNA, 75 bp, synthetic construct
  source 1..75: mol_type = other DNA
cgatgcaatactaacggtgcaggttccggcctggcatgtaggcgtgctgaaaatcgatggtgaaacgcaggcgct

SEQ ID NO: 233544 - DNA, 75 bp, synthetic construct
  source 1..75: mol_type = other DNA
gattacgctggatggtagcgaagttcccgacgtgctggcggattatttgcgccgctttcagcctgattgggtgga

SEQ ID NO: 233545 - DNA, 75 bp, synthetic construct
  source 1..75: mol_type = other DNA
ataatatcagctgtaaagtaagggctataattcagaccgacatatcggcaggctggatgcttggtgtgattgcat

SEQ ID NO: 233546 - DNA, 75 bp, synthetic construct
  source 1..75: mol_type = other DNA
cgtttctgtatttcacaggtattatggagaacctcctgtaaaatatatttcgttacataattgtgcttcaatctt

SEQ ID NO: 233547 - DNA, 75 bp, synthetic construct
  source 1..75: mol_type = other DNA
tgacgttatttcttatgaggttgtttttattatttatcttattgattttatatgcattttgtcgttcaatgaagt

SEQ ID NO: 233548 - DNA, 75 bp, synthetic construct
  source 1..75: mol_type = other DNA
gacctacattgtttagtgggcctggaggtgacaccatacaattattaaagacaaaacaatatcttgagaatattg

SEQ ID NO: 233549 - DNA, 75 bp, synthetic construct
  source 1..75: mol_type = other DNA
aatacttcggatatgattgattccttgcttctgttagctgaagaaaataataattcatggataaaagtcgactca

SEQ ID NO: 233550 - DNA, 75 bp, synthetic construct
  source 1..75: mol_type = other DNA
tttatttctgtatttcaccgctattatggcttcccgccagacagatatgtatccaggcaagggcttgattattga

SEQ ID NO: 233551 - DNA, 75 bp, synthetic construct
  source 1..75: mol_type = other DNA
gcttgagggtctgcttgatggcgaaaatatgaacgtgatgctgcgtggtgtctatctcacctcttcgcttcagcg

SEQ ID NO: 233552 - DNA, 75 bp, synthetic construct
  source 1..75: mol_type = other DNA
tccgggatgtttatggcgaaaacgcttggtgttgcaacacttgattacctgccgtggacgttttttaatttgagt

SEQ ID NO: 233553 - DNA, 75 bp, synthetic construct
  source 1..75: mol_type = other DNA
atttccctgcgccagcagtttaatctttccacccgcggtgccacgctggctggtgccaaaactatggctactcaa

SEQ ID NO: 233554 - DNA, 75 bp, synthetic construct
  source 1..75: mol_type = other DNA
ctggtcagtgcgcagcgcgacatgatgtcggcgcagctcacggcgctgggtttccgcgttgcgccatcctgcgcc

SEQ ID NO: 233555 - DNA, 75 bp, synthetic construct
  source 1..75: mol_type = other DNA
aaaagatgggctttaatccgcagactctccgcgaagtattgcaggcgtgtcagcaacaaggttgtgtagcaaata

SEQ ID NO: 233556 - DNA, 75 bp, synthetic construct
  source 1..75: mol_type = other DNA
cgttcccgtcgccgcctgacggttttctctgccacaggcggcgtggcagcactgctgctcatcaccggctggcat

SEQ ID NO: 233557 - DNA, 75 bp, synthetic construct
  source 1..75: mol_type = other DNA
atgtttcgcaggaagagttagcggccttatacaaggtagccaaagctcatgcattaatttcttggatggaaactc

SEQ ID NO: 233558 - DNA, 75 bp, synthetic construct
  source 1..75: mol_type = other DNA
tcacccgcggctggatgtattgctgaagaggcgagtgcctgaacgtattcagcgcctgcttctacgttctaccgg

SEQ ID NO: 233559 - DNA, 75 bp, synthetic construct
  source 1..75: mol_type = other DNA
aatacatggactcaaccacaaactattaatggcgatttgacggtaaccggaaacggctcatttaacgacgttcag

SEQ ID NO: 233560 - DNA, 75 bp, synthetic construct
  source 1..75: mol_type = other DNA
aaaaacgtctgcgtcttaactacaacggcataattgcattgttagtcgagggctttaaaacacttcgtcatgaga

SEQ ID NO: 233561 - DNA, 75 bp, synthetic construct
  source 1..75: mol_type = other DNA
acgataccacacgctataatgaagtcagtcagacatctcttctggaaaaaatatcgcgtctgatgctgcataact

SEQ ID NO: 233562 - DNA, 75 bp, synthetic construct
  source 1..75: mol_type = other DNA
agcataacgaaacggatgttgtgatggctgccgaatgggggcttcagcctccagattatgcacctaaagcacgaa

SEQ ID NO: 233563 - DNA, 75 bp, synthetic construct
  source 1..75: mol_type = other DNA
taagccacgcataaagaaagattattattacgataacggcacattacggaaatggcaactgctaggatttacatt

SEQ ID NO: 233564 - DNA, 75 bp, synthetic construct
  source 1..75: mol_type = other DNA
gccgctgaaatacgatcagtctgagtatgaaatggcaggcgcgctgcgcgaaagcccgtacccgatcgccaccgc

SEQ ID NO: 233565 - DNA, 75 bp, synthetic construct
  source 1..75: mol_type = other DNA
ttgtaaaaaatgacgatctgactgtggagttgatgcagtttattctggtgggtaaggaatatcgcctggaagctg

SEQ ID NO: 233566 - DNA, 75 bp, synthetic construct
  source 1..75: mol_type = other DNA
tcttgcggaaaaagatctgaataccgtagtgaaaaataacgaaacacacacggtaaaggcagatcggacgaaaac

SEQ ID NO: 233567 - DNA, 75 bp, synthetic construct
  source 1..75: mol_type = other DNA
aaggggagcgcggtgaacccggacctcaggggcctgcaggacagaaaggtgagcagggcctccgtgggctgcagg

SEQ ID NO: 233568 - DNA, 75 bp, synthetic construct
  source 1..75: mol_type = other DNA
agtgatgatgaaacgaaggcagccacaccgaaagctgtgaaggcggcaatggatgaggccagggcagcgaaacag

SEQ ID NO: 233569 - DNA, 75 bp, synthetic construct
  source 1..75: mol_type = other DNA
atgcccgcgtggcgatgaataccatcggttcctggcagaaccacgcgatttccctcggcctgccgccaaacaccc

SEQ ID NO: 233570 - DNA, 75 bp, synthetic construct
  source 1..75: mol_type = other DNA
aattcagggggcgctgcttgttgttgatgcctcactttcagcctgtgatggctcgctgctgatctgcgcgataga

SEQ ID NO: 233571 - DNA, 75 bp, synthetic construct
  source 1..75: mol_type = other DNA
tacagttctgcaccagctatattcggggtgatcacgtacatcattaatgatgccagaaatgcggagtttgatgac

SEQ ID NO: 233572 - DNA, 75 bp, synthetic construct
  source 1..75: mol_type = other DNA
acactggcgttaatgttacactgaataagaacattaatcttggaaacaaaggaagtgtgagcattggtaacacta

SEQ ID NO: 233573 - DNA, 75 bp, synthetic construct
  source 1..75: mol_type = other DNA
catgaaaagggtaatataacggacgcagaaatttattataaattattgtgcatttatgcgttcgaaaatcatgag

SEQ ID NO: 233574 - DNA, 75 bp, synthetic construct
  source 1..75: mol_type = other DNA
tgagtggctggataaagacatggtcagcacagcgagagtaaatcgtggattatgggttgatatttataaagaagc

SEQ ID NO: 233575 - DNA, 75 bp, synthetic construct
  source 1..75: mol_type = other DNA
acgagccctgatgcgatatttggcgtaatcacatacatcattaacgatgctcgttatggtgagtttgatgactac

SEQ ID NO: 233576 - DNA, 75 bp, synthetic construct
  source 1..75: mol_type = other DNA
cagccggggagcttcacgccgctcatccgggtcgagacagagaacggcgagcgggagaaagcgcagcgccgcagc

SEQ ID NO: 233577 - DNA, 75 bp, synthetic construct
  source 1..75: mol_type = other DNA
ggcgggagcgtgacctgacggggtggatgtcgctgtcgcgtaaaccggaggagacatggtacggctgggacggcg

SEQ ID NO: 233578 - DNA, 75 bp, synthetic construct
  source 1..75: mol_type = other DNA
gcaatttaaccatgatgacctagatgttttttctgaccaattagtagatatcctagaaataaaataccaattgct

SEQ ID NO: 233579 - DNA, 75 bp, synthetic construct
  source 1..75: mol_type = other DNA
agctgttgggcaaaattcttatgcaggaggtgatggaaactcagttgctttggggatttctaatagagcagaagg

SEQ ID NO: 233580 - DNA, 75 bp, synthetic construct
  source 1..75: mol_type = other DNA
acaggggatagtgaggatgatatactactatcactctaccctaaagataaattagagggaggcatagctaaaatc

SEQ ID NO: 233581 - DNA, 75 bp, synthetic construct
  source 1..75: mol_type = other DNA
gcagcgatgagcaaatgcaaaaattacgtgcggcatatataaaaatggctgatgtcattaataatagagatcgag

SEQ ID NO: 233582 - DNA, 75 bp, synthetic construct
  source 1..75: mol_type = other DNA
ccccgcagaacagtcagctgatttttatcgaccagcaaccccagatggctttcggggtgtgcagtccattgaccg

SEQ ID NO: 233583 - DNA, 75 bp, synthetic construct
  source 1..75: mol_type = other DNA
tatgactttggtaaaactaacaacgatatcaaactgcaaactgccgcccgtgacagctaccgctttaaattgatg

SEQ ID NO: 233584 - DNA, 75 bp, synthetic construct
  source 1..75: mol_type = other DNA
accaaaatgaatataaattgggtaaacgcagtctgaatgatctattaaccgtcgagcaagatgtctttcaggcgc

SEQ ID NO: 233585 - DNA, 75 bp, synthetic construct
  source 1..75: mol_type = other DNA
aatactggccaacgctcagtattcaggggggtaaaacgcgctaccagaccagcgaccgctcgtactgggacgacc

SEQ ID NO: 233586 - DNA, 75 bp, synthetic construct
  source 1..75: mol_type = other DNA
acgcccagacattgtgcactttcataatatctatcatcaattaaccccggccctcattaaggtggcccgcaattt

SEQ ID NO: 233587 - DNA, 75 bp, synthetic construct
  source 1..75: mol_type = other DNA
aggacgcgctcgcttgatccgcaggcaattattcgtcatccccaatatggcaatgtggcttgtatccctgaaccg

SEQ ID NO: 233588 - DNA, 75 bp, synthetic construct
  source 1..75: mol_type = other DNA
aatgtgccgtgtgctccgggtggcccgcagcggctggtatacatggtgtcagtggcgtacaaggataagcaagcg

SEQ ID NO: 233589 - DNA, 75 bp, synthetic construct
  source 1..75: mol_type = other DNA
accagaatatcttcaatggctattttgaagatcttaacgaagctggaaaagattcaacataccgaacgccggaga

SEQ ID NO: 233590 - DNA, 75 bp, synthetic construct
  source 1..75: mol_type = other DNA
atgacgggcaaagaggcaattattcattatctggagacgcacaagagcttctgtgcgccggacgttgctgtgaca

SEQ ID NO: 233591 - DNA, 75 bp, synthetic construct
  source 1..75: mol_type = other DNA
caaacagagatcgattatgatgttgcggttaaaggacgaactgtattaaacgatcctaatttaacccttgtagaa

SEQ ID NO: 233592 - DNA, 75 bp, synthetic construct
  source 1..75: mol_type = other DNA
agcgaccgctcgtactgggacgaccagttacagttgaacgtcaacgcgccgttgtatcagggcggcgcggtttcg

SEQ ID NO: 233593 - DNA, 75 bp, synthetic construct
  source 1..75: mol_type = other DNA
ggggctggaccggcgtctggcgggcgcactgctggcatcggatggaaccccttgcctggtgtggcagtcaccaca

SEQ ID NO: 233594 - DNA, 75 bp, synthetic construct
  source 1..75: mol_type = other DNA
accgactggctgtcaggctgtcactgataatcagccgcctggttgccggtgagacgctgaacatggcccgactgg

SEQ ID NO: 233595 - DNA, 75 bp, synthetic construct
  source 1..75: mol_type = other DNA
tcttatgaattattggcagacacatcaaaaattaaaacagcgtttaataatttccgtggctatgctggtagactt

SEQ ID NO: 233596 - DNA, 75 bp, synthetic construct
  source 1..75: mol_type = other DNA
gcaatggatagtcgtatggatatcattcctgattccgttattcaggattactatcaaaagctgctacacggcgat

SEQ ID NO: 233597 - DNA, 75 bp, synthetic construct
  source 1..75: mol_type = other DNA
agctgcttttttaattctccgtactgcattacgaataaagagagaaaggaaaaaaatcaaaaatggtgttttctc

SEQ ID NO: 233598 - DNA, 75 bp, synthetic construct
  source 1..75: mol_type = other DNA
gcattgataccagtttgttatcttctctgagcggagcttcttttggtcgcgattttgtagttccagttgaacaga

SEQ ID NO: 233599 - DNA, 75 bp, synthetic construct
  source 1..75: mol_type = other DNA
tgtgtcttttctgatttataacatttttcaggagctgcaactctccagcaaactggcagttcatgatgtgctgac

SEQ ID NO: 233600 - DNA, 75 bp, synthetic construct
  source 1..75: mol_type = other DNA
cgtaaacgttgcgcccgtatcttcggcagtaagcacgctgcggcgaatccgtcactggccgcttcactcgcattc

SEQ ID NO: 233601 - DNA, 75 bp, synthetic construct
  source 1..75: mol_type = other DNA
acatatggagccctgaagattctggaggaagaaagaaagatacaggcgggaaaaacacagggaggtggaagataa

SEQ ID NO: 233602 - DNA, 75 bp, synthetic construct
  source 1..75: mol_type = other DNA
gtgtcgtttcagtaacacttcttcttcgtcgggaaactaatgaaaaacttgttgctgctgcaaaagcagcaggac

SEQ ID NO: 233603 - DNA, 75 bp, synthetic construct
  source 1..75: mol_type = other DNA
gaatctatcaataaaagcataggggatttggaagcgacaattaaaaggatagatgaagatgaattaaagttaaga

SEQ ID NO: 233604 - DNA, 75 bp, synthetic construct
  source 1..75: mol_type = other DNA
gtgtaaagcgcacctattctatggtgggctgtgtgggggcaccgaaaggtgcgccgggttcctttgtagccggta

SEQ ID NO: 233605 - DNA, 75 bp, synthetic construct
  source 1..75: mol_type = other DNA
tttctcatcatctgtaacaactattcttgaaaatcagggaatttatactgactatatccccgtcagttgggctta

SEQ ID NO: 233606 - DNA, 75 bp, synthetic construct
  source 1..75: mol_type = other DNA
atgcacacttttgccagtctgatgtacgatgtttacctgtctttcggcctgttcaggaaaggggagcgacaagca

SEQ ID NO: 233607 - DNA, 75 bp, synthetic construct
  source 1..75: mol_type = other DNA
tagataattttgagtcagtccagttgccaaatgtgagtactacagaaatgtttaatacatcagttctgaaaccgg

SEQ ID NO: 233608 - DNA, 75 bp, synthetic construct
  source 1..75: mol_type = other DNA
agcctggcgtcgcccactccatcggtgactcattgacttaccgcgtggagacagactccgcggtaatgactccaa

SEQ ID NO: 233609 - DNA, 75 bp, synthetic construct
  source 1..75: mol_type = other DNA
ggctccagtggttacattgctcagcgttgatgatgcaatagcattgttacttgaagcttttacagcggatgttga

SEQ ID NO: 233610 - DNA, 75 bp, synthetic construct
  source 1..75: mol_type = other DNA
tggcgtcaaaaaactgaatacgcagatgaccaaaacgtctgcagcagtaaaatcaaatttttcatttgcagttaa

SEQ ID NO: 233611 - DNA, 75 bp, synthetic construct
  source 1..75: mol_type = other DNA
aacttcacatgataaaaatataaaatcatttgcagtacatactgctaatttactcattgaacgtttatcatatgt

SEQ ID NO: 233612 - DNA, 75 bp, synthetic construct
  source 1..75: mol_type = other DNA
ttagtgaacaacaaaaacgaacatttcatcctgtcatcgctcgtgtcattgagtatctttcacaacatgatctga

SEQ ID NO: 233613 - DNA, 75 bp, synthetic construct
  source 1..75: mol_type = other DNA
gcattaatgactggcattacaagcctatttggcggacgtcgctacaacggcggcgcggttaatggcggcaatatg

SEQ ID NO: 233614 - DNA, 75 bp, synthetic construct
  source 1..75: mol_type = other DNA
tgcttgagttgatgaccagagaaaacccgccacgtgtgcttaatcgtgagcgctgcgatgccgggttaacaagct

SEQ ID NO: 233615 - DNA, 75 bp, synthetic construct
  source 1..75: mol_type = other DNA
ttctgacaccgcgtgtactttcagatggttcaattgaggtcagtagcgcatttactaagaagacgctgaattcta

SEQ ID NO: 233616 - DNA, 75 bp, synthetic construct
  source 1..75: mol_type = other DNA
tgtgccagtgaacctgactcagactcaaaactatatctcaggaaggacgcagactacaaactcattaacatctgt

SEQ ID NO: 233617 - DNA, 75 bp, synthetic construct
  source 1..75: mol_type = other DNA
gcgggattgtccagatgggcgctgaatgggttaaacagcagttaattggtgaagccgcaaacgcagcagcaacag

SEQ ID NO: 233618 - DNA, 75 bp, synthetic construct
  source 1..75: mol_type = other DNA
actcaaagcgatggaaccagcaacggcagcaggccgcgcagaacttgagaaatacgttgatgccctactccgata

SEQ ID NO: 233619 - DNA, 75 bp, synthetic construct
  source 1..75: mol_type = other DNA
cccgccacgtgtgcttaatcgtgagcgctgcgatgccgggttaacaagcttcggttggtacacttctgcgccgtg

SEQ ID NO: 233620 - DNA, 75 bp, synthetic construct
  source 1..75: mol_type = other DNA
agaaactcttgtcaggggggcccgggccagctcctattttatggaaagcctgtatggtattgccacggtaaaaat

SEQ ID NO: 233621 - DNA, 75 bp, synthetic construct
  source 1..75: mol_type = other DNA
cttttttgtcgaaacagaatgatattgatttatcagggcttaatttaactacccaaccaccaggactgcaaaact

SEQ ID NO: 233622 - DNA, 75 bp, synthetic construct
  source 1..75: mol_type = other DNA
tggatgcgcgaattaaataaatggaaagaagaacgtatacttacaggtgaaatccatcgtccggaatgccgaaac

SEQ ID NO: 233623 - DNA, 75 bp, synthetic construct
  source 1..75: mol_type = other DNA
aacttaagcaataacaatttactgccaaccaatgacattgatcaactaatatcatcaaaacatctttggcatgta

SEQ ID NO: 233624 - DNA, 75 bp, synthetic construct
  source 1..75: mol_type = other DNA
aatacatccgatattggaactttattccccataataaaacagagcaaaaacttaaattttttaaatgtttctggg

SEQ ID NO: 233625 - DNA, 75 bp, synthetic construct
  source 1..75: mol_type = other DNA
aagaatgcatagtcacaggtgaacttcatcgtcaagaatgccgaaaagaagcggcagaaaggataaaccgtgctt

SEQ ID NO: 233626 - DNA, 75 bp, synthetic construct
  source 1..75: mol_type = other DNA
actgctggatctatcccataataaactaacaagtttacacaatgccttatttcccaacttgaatacgttacttat

SEQ ID NO: 233627 - DNA, 75 bp, synthetic construct
  source 1..75: mol_type = other DNA
gttggaaatagtgtttacctagcatataaagaaagtggtatggactcaatactagagtttgcaaatgcgagaagt

SEQ ID NO: 233628 - DNA, 75 bp, synthetic construct
  source 1..75: mol_type = other DNA
catgcttaataaagcgtgctctggagaaaaccctgttgatgttatctctttagaagataaagacacactcatcga

SEQ ID NO: 233629 - DNA, 75 bp, synthetic construct
  source 1..75: mol_type = other DNA
tagccgtgaaagtgcgcacattctggtggactcgcgctattacgcggatgtagaagcccgcacgcaaggttacca

SEQ ID NO: 233630 - DNA, 75 bp, synthetic construct
  source 1..75: mol_type = other DNA
taatttcattgcactggcgctgaaaattaaggaaggtgcgaataagcggggaaatacttctcggctgactcagtc

SEQ ID NO: 233631 - DNA, 75 bp, synthetic construct
  source 1..75: mol_type = other DNA
tcttctgtgatgaacatggccgcgtgcgggtgaaatttaactgggaccgttataacccgtcaaaccaggacagtt

SEQ ID NO: 233632 - DNA, 75 bp, synthetic construct
  source 1..75: mol_type = other DNA
tcatatcatcttcacctatagatgcagatagaatggattacttacttagagatagctacttctcaggcgttaaat

SEQ ID NO: 233633 - DNA, 75 bp, synthetic construct
  source 1..75: mol_type = other DNA
aataaaaatgaactcttactgctggatctatcccataataaactaacaagtttacacaatgacttattttcccaa

SEQ ID NO: 233634 - DNA, 75 bp, synthetic construct
  source 1..75: mol_type = other DNA
tatttccgtggtatgaaaaattaaatgattcaatatcgataattctatcatttatatatattatcttttgtacaa

SEQ ID NO: 233635 - DNA, 75 bp, synthetic construct
  source 1..75: mol_type = other DNA
atattattttaataatatttggcatgataattttggctatgcgttatacgactccaatcatcaatccctggcttt

SEQ ID NO: 233636 - DNA, 75 bp, synthetic construct
  source 1..75: mol_type = other DNA
cgattacctgataaagacaggtaatgagcagcacctgaaagaaaatgcagatggcaaccaagtactttcaaccaa

SEQ ID NO: 233637 - DNA, 75 bp, synthetic construct
  source 1..75: mol_type = other DNA
agataaaaatgcattgaacggcaggaatgttttgcaactggcgattttatcgcgcatgaaattatttctccgtcc

SEQ ID NO: 233638 - DNA, 75 bp, synthetic construct
  source 1..75: mol_type = other DNA
ggcacccagagttaattcacaaattcccttaccctcaggagtgcagggaaagctgaaatttcagaccgttaatga

SEQ ID NO: 233639 - DNA, 75 bp, synthetic construct
  source 1..75: mol_type = other DNA
acgataattacagatgttcagattaccgaacgaactaaaacctatgtcagagcagataatgctaccacttttcgg

SEQ ID NO: 233640 - DNA, 75 bp, synthetic construct
  source 1..75: mol_type = other DNA
cggtatttccactggcgggtggattacagcacaaaaaacaaaccggatacggtcagccagcgggatgccagcacg

SEQ ID NO: 233641 - DNA, 75 bp, synthetic construct
  source 1..75: mol_type = other DNA
ggcaatgaataaagtcatcacagatgtcggaccgggaaaactcaatctgggtggctgtgtcattgaggtgatggg

SEQ ID NO: 233642 - DNA, 75 bp, synthetic construct
  source 1..75: mol_type = other DNA
catttgaagttcactctgacggagtatatgtggataacgaattgtttcactatcatattaaaaatgcatgtaacc

SEQ ID NO: 233643 - DNA, 75 bp, synthetic construct
  source 1..75: mol_type = other DNA
agactgcactgaagaattggtcaaatggggtaagcgcgttgctgccgccaacagccgtaagcctgttaacaagct

SEQ ID NO: 233644 - DNA, 75 bp, synthetic construct
  source 1..75: mol_type = other DNA
tgagcttgggttcgctgagcgccgggaaagttatgctccatttgaattaactgacgggtggcaccgattcgacca

SEQ ID NO: 233645 - DNA, 75 bp, synthetic construct
  source 1..75: mol_type = other DNA
agctggcgcgccacaatattcaggtcaacggtattgcgccgggctatttcaaaacagaaatgactaaagcactgg

SEQ ID NO: 233646 - DNA, 75 bp, synthetic construct
  source 1..75: mol_type = other DNA
gacaagctgcacaagatgctaaaagcttggagtttctgaatcaacaattaccaaaggtaagaggtgaacttgata

SEQ ID NO: 233647 - DNA, 75 bp, synthetic construct
  source 1..75: mol_type = other DNA
tattcttaacggcgtaatgaaaaaagcaagtagttactatggttatggctacaatcattatgggtattcttattc

SEQ ID NO: 233648 - DNA, 75 bp, synthetic construct
  source 1..75: mol_type = other DNA
aggttgtatactcaatggtgttgtgaagaaggcaagtaactattattcatatggatatagtagttatggatattc

SEQ ID NO: 233649 - DNA, 75 bp, synthetic construct
  source 1..75: mol_type = other DNA
atattaaagtcagtaaactcattctgaaaaaaaatgatatagagaatgtaaaacttaaagttatcaatgaaaatg

SEQ ID NO: 233650 - DNA, 75 bp, synthetic construct
  source 1..75: mol_type = other DNA
cgacctaagctcttaaaacaacaccttgatcctattgagcaacgaggcgtattggaaactctacgccgtatcatt

SEQ ID NO: 233651 - DNA, 75 bp, synthetic construct
  source 1..75: mol_type = other DNA
gaatcgctcctttggcgaaaggaggcaagaaaaattggtatttcaggtatgcagtaccagtgagcaagaaaagaa

SEQ ID NO: 233652 - DNA, 75 bp, synthetic construct
  source 1..75: mol_type = other DNA
caaagcggtaaaaaagtacttttcatagatgcagatatgcgtaagggatatatccataaactgttcaatacagaa

SEQ ID NO: 233653 - DNA, 75 bp, synthetic construct
  source 1..75: mol_type = other DNA
tgttgctgatcaaggaaaagatacgggaatccttactctttctctaacaggagataatccaaagctgatagaaaa

SEQ ID NO: 233654 - DNA, 75 bp, synthetic construct
  source 1..75: mol_type = other DNA
gaggttagtataaaacgattcgagcatggtggagttatagtaaaaggatgcatattgaatggagtggtgaaaaaa

SEQ ID NO: 233655 - DNA, 75 bp, synthetic construct
  source 1..75: mol_type = other DNA
ttagtggtgttaattggtgtaattcttggaggggttgtatctgttggcttagttctcgttcgtgtgttcttacgt

SEQ ID NO: 233656 - DNA, 75 bp, synthetic construct
  source 1..75: mol_type = other DNA
cagtatatatgcaattactgaatcgtcagcaggaattaaatattgcaaaatcaagtgcaataggtaacgtacgca

SEQ ID NO: 233657 - DNA, 75 bp, synthetic construct
  source 1..75: mol_type = other DNA
cattcctgtttcagaggatttcgctgcaaaatcttctaagaaaaaacaatgggcaaaagtagggcatacggatat

SEQ ID NO: 233658 - DNA, 75 bp, synthetic construct
  source 1..75: mol_type = other DNA
aggttgcatactcaatggtgtggtaaaaaaagcaagtagttattacggttatggttataaccattatggctattc

SEQ ID NO: 233659 - DNA, 75 bp, synthetic construct
  source 1..75: mol_type = other DNA
tgctcgggggatcaacagcaatgtctacggtgatctgacatcgctttctgacgtcaaatattctctgcttcgtga

SEQ ID NO: 233660 - DNA, 75 bp, synthetic construct
  source 1..75: mol_type = other DNA
ttgattataaattcaaaggttatagactaatcagtgaagttattgcaataaaagacatgagcaataacagtacaa

SEQ ID NO: 233661 - DNA, 75 bp, synthetic construct
  source 1..75: mol_type = other DNA
acgccaatatatcaggccgatgctctaattcaggttgagcagaaacaagcaaacgctatacttagcaatcttagc

SEQ ID NO: 233662 - DNA, 75 bp, synthetic construct
  source 1..75: mol_type = other DNA
tcacaactgttcctgttctgctcggttcgggaaaaccgctattcggagtattaccccatgatatcgatttgacgc

SEQ ID NO: 233663 - DNA, 75 bp, synthetic construct
  source 1..75: mol_type = other DNA
ttcatgccgcacgccaagggaggctcttgctgaccttatggagaagaacgtgcaccgggtttatatcgatggcgg

SEQ ID NO: 233664 - DNA, 75 bp, synthetic construct
  source 1..75: mol_type = other DNA
ggacgaggcacctatgagaaggtgctgacttttgacgaatggccttatgatcggcccgtgctggtgctttcccgg

SEQ ID NO: 233665 - DNA, 75 bp, synthetic construct
  source 1..75: mol_type = other DNA
taattatatctagattgtatattgaaaatgccggtgatgaaattatcaactttgaaatcactgttgcagataata

SEQ ID NO: 233666 - DNA, 75 bp, synthetic construct
  source 1..75: mol_type = other DNA
ctgtttatcttcagttacttaatcgtcagcaagaattaaatatcgctaaatcgagcgcgataggaaatgttcgga

SEQ ID NO: 233667 - DNA, 75 bp, synthetic construct
  source 1..75: mol_type = other DNA
gcaactcctatctatcaagcaaatgctttaattcaagtagaacagaaacaagggaatgcaattttaagtagttta

SEQ ID NO: 233668 - DNA, 75 bp, synthetic construct
  source 1..75: mol_type = other DNA
gttaatggagaagaaaaagactttacaagaagaaaaagccaaactgaacaaacgcgtgagttctatgccttctac

SEQ ID NO: 233669 - DNA, 75 bp, synthetic construct
  source 1..75: mol_type = other DNA
gcaacaccggtctatcaagcaaatgcactaattcaaatagagcaaaagcaggggaatgcaatactgaatagtttg

SEQ ID NO: 233670 - DNA, 75 bp, synthetic construct
  source 1..75: mol_type = other DNA
aattagtaattgtcgatacgcctccaattttggctgttaccgatgcggcaataatcgggaaatatgctggaacaa

SEQ ID NO: 233671 - DNA, 75 bp, synthetic construct
  source 1..75: mol_type = other DNA
tgaactgaaagacatcgcagaaaaagcaacccgtgcgatgtcgctgtattccgctgctggcggacgtggtgtgca

SEQ ID NO: 233672 - DNA, 75 bp, synthetic construct
  source 1..75: mol_type = other DNA
caatccccgtggaccaaagacgccaacactggttacaccacaaacggtatcaggatttaatctccttgacatggc

SEQ ID NO: 233673 - DNA, 75 bp, synthetic construct
  source 1..75: mol_type = other DNA
tttgcacaggttgatcgccggatgacccgtattggtattgccgcagaaaagacgcgcgacgaaatggcacagatg

SEQ ID NO: 233674 - DNA, 75 bp, synthetic construct
  source 1..75: mol_type = other DNA
ccgctaagggcaatgggacaagcagataaaagagaagatcgcccaacaatgtatttccctcttgttgcccccgat

SEQ ID NO: 233675 - DNA, 75 bp, synthetic construct
  source 1..75: mol_type = other DNA
atcacatattagtgtacgcgaaagatcagtcaaaattcaaagtaaaaagacaaccactgtccctcaatgatctac

SEQ ID NO: 233676 - DNA, 75 bp, synthetic construct
  source 1..75: mol_type = other DNA
ttaaacacaatggcattaacgtattcgataacgaaggaaatatgcgttcattgccccttcttcttcaggagattg

SEQ ID NO: 233677 - DNA, 75 bp, synthetic construct
  source 1..75: mol_type = other DNA
tcattggtgatcatgattttagaaagcctatgagtgaaaacacggtaaacaaggctttaaggtctatgggctacg

SEQ ID NO: 233678 - DNA, 75 bp, synthetic construct
  source 1..75: mol_type = other DNA
atgattgtaatgatgttcaaagtttattgacacagggaaaccagttattggaaggggcgtatgatataacattaa

SEQ ID NO: 233679 - DNA, 75 bp, synthetic construct
  source 1..75: mol_type = other DNA
gatgcttaacaaagcgtgttctagaaaaaaaactgatgatgttgtctctttaaaatctaaaaacactctcattga

SEQ ID NO: 233680 - DNA, 75 bp, synthetic construct
  source 1..75: mol_type = other DNA
ccgcccgacggtatggacggatatcaagaactggtttaactctctggagaaaaagaacatcgctgacccgcgacc

SEQ ID NO: 233681 - DNA, 75 bp, synthetic construct
  source 1..75: mol_type = other DNA
cacaccgatgcagaaattatccgcctcagtgactgcgtgattgacgtccttctggacggtcacggaaaccctatc

SEQ ID NO: 233682 - DNA, 75 bp, synthetic construct
  source 1..75: mol_type = other DNA
acgaagttagccgtgaaactcacattgctcattttcattcgttcaagtgaacttaggtttgctcgttggtcagag

SEQ ID NO: 233683 - DNA, 75 bp, synthetic construct
  source 1..75: mol_type = other DNA
ttgggtagacggaatgccgtttgccgaatctgttcgtttcgcacagggatgttcgtcaatggcgctctcctgtga

SEQ ID NO: 233684 - DNA, 75 bp, synthetic construct
  source 1..75: mol_type = other DNA
ttataatgcgggatttcgcgaaacggaagtacaggagaaaaaaagacagaagtatgcaaaagaaattcaggcgat

SEQ ID NO: 233685 - DNA, 75 bp, synthetic construct
  source 1..75: mol_type = other DNA
taatgaaaaccatcggcagcacgcaggatgagaacatccgcacggccattgacagcgcactggatacccttaacg

SEQ ID NO: 233686 - DNA, 75 bp, synthetic construct
  source 1..75: mol_type = other DNA
ttttacaggcgcttgatgactacggtcagttactgaaaatcagtgaagaagtgaacgccgagccggatctggcag

SEQ ID NO: 233687 - DNA, 75 bp, synthetic construct
  source 1..75: mol_type = other DNA
tgccgtaaggtgattctggtacccggtgcacaaagcgcagaggcggcgcagaaggcggtttcaggtctggtgaat

SEQ ID NO: 233688 - DNA, 75 bp, synthetic construct
  source 1..75: mol_type = other DNA
cgatcatcacgctgatgggcgcaacgccactgaaatacgatcaatctgagtacgaaatggcaggcgcgctgcgtg

SEQ ID NO: 233689 - DNA, 75 bp, synthetic construct
  source 1..75: mol_type = other DNA
ccctgctgcagacccagcacggctgtgaaattctgaataagataataaatttaatcaacgcggatacggacgagg

SEQ ID NO: 233690 - DNA, 75 bp, synthetic construct
  source 1..75: mol_type = other DNA
gcgatgctgttgaacgtcagatgagccatcaggaacgtaacggtgtacgcgctgcgtatatccataaagccgaac

SEQ ID NO: 233691 - DNA, 75 bp, synthetic construct
  source 1..75: mol_type = other DNA
acgtcggcttatgctgcaatggtgggcagattttctggatgcaaacagggaggagtgtatcagtccgtttgaata

SEQ ID NO: 233692 - DNA, 75 bp, synthetic construct
  source 1..75: mol_type = other DNA
atgggcggcgacggcgtttattacagcgatatcagcggtgaaagtggctggtctgcgccgatcaaaaccaatgtt

SEQ ID NO: 233693 - DNA, 75 bp, synthetic construct
  source 1..75: mol_type = other DNA
tggggctcggaagtgatcctcgaaggagtcatcgaaagccgcaaacgcgagattgaagggccattcggtgagttt

SEQ ID NO: 233694 - DNA, 75 bp, synthetic construct
  source 1..75: mol_type = other DNA
tacgtatgaatggaacgaggcaaaaaaaaggatcgatgcagtcaaacgattctggttttcttcaataagatatgg

SEQ ID NO: 233695 - DNA, 75 bp, synthetic construct
  source 1..75: mol_type = other DNA
tcaagtccggcagaaagatcgagtctgttgtgttcacatatcttgtagagaatgaaacatatgatggaaaaaaaa

SEQ ID NO: 233696 - DNA, 75 bp, synthetic construct
  source 1..75: mol_type = other DNA
cgggagggttgcccggcgttcaatcgggacaatgatgcaacagaatggcttcgcaaacacggttataccagcgcg

SEQ ID NO: 233697 - DNA, 75 bp, synthetic construct
  source 1..75: mol_type = other DNA
ccagaacgcgcctgtaccagggaaatcggcgctgaaagccgtgcagttacggcttgatcagaacagcagcgatcc

SEQ ID NO: 233698 - DNA, 75 bp, synthetic construct
  source 1..75: mol_type = other DNA
cgtaacaatcaggtggtgaagcagtatatggcaaaacgctggagcgaaaagttccacggtcagcgcgatatccag

SEQ ID NO: 233699 - DNA, 75 bp, synthetic construct
  source 1..75: mol_type = other DNA
gttggataacgcaataaaatatgagaatgcagaaatgataaaactattattgaaatatggtgcaacatctgacaa

SEQ ID NO: 233700 - DNA, 75 bp, synthetic construct
  source 1..75: mol_type = other DNA
gcgcatggttagcccactgttttcagcgcccagaagagcgcccaacatggcatcttttgattccatctgatacag

SEQ ID NO: 233701 - DNA, 75 bp, synthetic construct
  source 1..75: mol_type = other DNA
actctggtatcattcggacttagataagggacacgcccgtgaatggtatctatcgaaatactaccctaagatcga

SEQ ID NO: 233702 - DNA, 75 bp, synthetic construct
  source 1..75: mol_type = other DNA
ttctcctcttctgcaatgattatctggatggcagtatgcctgggaatatccgccatgctgaaaatggcttttccg

SEQ ID NO: 233703 - DNA, 75 bp, synthetic construct
  source 1..75: mol_type = other DNA
attaattgcacaacgctgaatcagtcatcagaccgcgaccttaaagacgatattctcgttatcagcgacgcgacg

SEQ ID NO: 233704 - DNA, 75 bp, synthetic construct
  source 1..75: mol_type = other DNA
cgcgcatgaaattatttctccgtccaattcaattacaagaattacccgcagaagcgccggacacactcaagtttt

SEQ ID NO: 233705 - DNA, 75 bp, synthetic construct
  source 1..75: mol_type = other DNA
gggatgtgtataatagagtgagatttataacttctcgaatatggaaggggattcttggcaaggtggtgattatat

SEQ ID NO: 233706 - DNA, 75 bp, synthetic construct
  source 1..75: mol_type = other DNA
tttgatgggaaaggtcggttgttgctggttaattattactatgatttagagaatgttaatcagaaaagtacaatg

SEQ ID NO: 233707 - DNA, 75 bp, synthetic construct
  source 1..75: mol_type = other DNA
aaccatgtacggtattgccacgctggtctcactggtctggattatcctcaccatcatctgggctttcagagccag

SEQ ID NO: 233708 - DNA, 75 bp, synthetic construct
  source 1..75: mol_type = other DNA
ttctttactgggttgagtcaaatctggactccggaaaaaacattggtgatctaatttcatccacgggatattgtc

SEQ ID NO: 233709 - DNA, 75 bp, synthetic construct
  source 1..75: mol_type = other DNA
aaaaaatacgatgaaatcatatcactaaataataataatagattaacccatgaacaaatgtcatgtatttttatc

SEQ ID NO: 233710 - DNA, 75 bp, synthetic construct
  source 1..75: mol_type = other DNA
tgcctgaactgcttgaacgtattgaggcatatcatcagggccgtgaactgacgcggttggccgtcctgctgatgc

SEQ ID NO: 233711 - DNA, 75 bp, synthetic construct
  source 1..75: mol_type = other DNA
gaaactatcgctcgtgaatggcacgccagtaacaagcgctggagtgaagaccatcgatcacgcgttctacgctat

SEQ ID NO: 233712 - DNA, 75 bp, synthetic construct
  source 1..75: mol_type = other DNA
gggatacaaatatagctaaaattgaaacctttcatttggcggaggtcatcagaaacatagataacaagggggtac

SEQ ID NO: 233713 - DNA, 75 bp, synthetic construct
  source 1..75: mol_type = other DNA
tccggtaacagcgaattattgtttcccggcgatcacgatccgcgtaagccaatgagtgaaaacaccatcaacaag

SEQ ID NO: 233714 - DNA, 75 bp, synthetic construct
  source 1..75: mol_type = other DNA
gggcagcaaagccggacgaaaaatcctacaaactcgccgacgccaataacatgtttttgcttgttcaccctaacg

SEQ ID NO: 233715 - DNA, 75 bp, synthetic construct
  source 1..75: mol_type = other DNA
gggccaccttatatccaataccaagcagaagatacgaaagcgagaaatcagcgggttctctatgtattaggtgat

SEQ ID NO: 233716 - DNA, 75 bp, synthetic construct
  source 1..75: mol_type = other DNA
ttaggagttagcaaatcagaaactgagatatacgatgatgttatcttagggcatatactctgtgtggaagaaaca

SEQ ID NO: 233717 - DNA, 75 bp, synthetic construct
  source 1..75: mol_type = other DNA
ttaaagagagcctcgacattaaccccgttggtcgccgcgcgcgcgtgcagccgggcgtatgtaacctggcgatct

SEQ ID NO: 233718 - DNA, 75 bp, synthetic construct
  source 1..75: mol_type = other DNA
cgacgatgcctataaaaaaaatatagaggaaattaacccagaaagcattataaaaattgttgaaaaaaaatacaa

SEQ ID NO: 233719 - DNA, 75 bp, synthetic construct
  source 1..75: mol_type = other DNA
gggccacactacattcaatatcagtcagaagatagcaaagcccggaatcagagagtaaattatctcctgaaagat

SEQ ID NO: 233720 - DNA, 75 bp, synthetic construct
  source 1..75: mol_type = other DNA
agctttctgaagtgtggtctttgtttagtgatatgcctgatgatacaacacttaacgtcgatcttgctgcgcttt

SEQ ID NO: 233721 - DNA, 75 bp, synthetic construct
  source 1..75: mol_type = other DNA
gggaaactcgcgtgttaaactctcaggagataatcagattatacctgataatgtttcctggggattccggggtgg

SEQ ID NO: 233722 - DNA, 75 bp, synthetic construct
  source 1..75: mol_type = other DNA
tactatgccggttttggtattacccttgaacctgaatctgttcaatcttattacaatattttagattcgatctcg

SEQ ID NO: 233723 - DNA, 75 bp, synthetic construct
  source 1..75: mol_type = other DNA
caaggctcacgccgacgcactggcagcagaaacaaaacgcgctgacgaagccgaagcggcattggcggaagcaac

SEQ ID NO: 233724 - DNA, 75 bp, synthetic construct
  source 1..75: mol_type = other DNA
aagcggttatttctattccagttgtcccgcaggtgacaggcgtggtgatcgaagtgacggacaagaaaaatacgc

SEQ ID NO: 233725 - DNA, 75 bp, synthetic construct
  source 1..75: mol_type = other DNA
gacaggcgtttgcgctgctggaaggcgggaagttatggaaaatcaggatgcccctgccggcggcagaggctgatg

SEQ ID NO: 233726 - DNA, 75 bp, synthetic construct
  source 1..75: mol_type = other DNA
tccgtgagcgtctgcccggactggagcagattatcgcgaataaccagagtgttctcagcgaggaagatgtgccca

SEQ ID NO: 233727 - DNA, 75 bp, synthetic construct
  source 1..75: mol_type = other DNA
acacagaagcacacccagcgccttcaggacacgctgcgaccggaggttgcgcactatcttcagccgggcagtctg

SEQ ID NO: 233728 - DNA, 75 bp, synthetic construct
  source 1..75: mol_type = other DNA
caagggccatgggagccttacgtaagagatatagatcccactatcttacttaaagaaactgggacgaaaaaaata

SEQ ID NO: 233729 - DNA, 75 bp, synthetic construct
  source 1..75: mol_type = other DNA
aactagagtccctttatgataaagaaccttatcgggaactctggagctctattatggaagatggtgacttttcac

SEQ ID NO: 233730 - DNA, 75 bp, synthetic construct
  source 1..75: mol_type = other DNA
agtgggtgtttgacctggtggcggccctgtttggctcctacgatgcgcagaccggtgttcgccatatcaaggaag

SEQ ID NO: 233731 - DNA, 75 bp, synthetic construct
  source 1..75: mol_type = other DNA
ggcttccgtgtatcgtaccgccttgtcgaacaacgatattgcgatggctggtggtcagatcaccgaccagaacac

SEQ ID NO: 233732 - DNA, 75 bp, synthetic construct
  source 1..75: mol_type = other DNA
cagatcaccgaccagaacacggacggaaatatcacgctcagcggcaccacatcgcagcctgccagcatcgcaacg

SEQ ID NO: 233733 - DNA, 75 bp, synthetic construct
  source 1..75: mol_type = other DNA
ggatttcaaatatttttaactttttagtggaaggggtaaataaatcattagcatcgccaaaaaaatatgcattcg

SEQ ID NO: 233734 - DNA, 75 bp, synthetic construct
  source 1..75: mol_type = other DNA
cattgtttttgacccgaagggcgatgccgatctgatgaagcgcgtctgggctgaagcacaccgtgccggccgggg

SEQ ID NO: 233735 - DNA, 75 bp, synthetic construct
  source 1..75: mol_type = other DNA
gctgctgtatttgaagcattatttcatggcgacgatgaatttaatttcgatgcagatcccggtgcggtagtgatc

SEQ ID NO: 233736 - DNA, 75 bp, synthetic construct
  source 1..75: mol_type = other DNA
gcgttctttttatgtgtatataatactaagctaagttattctctttttgcaaaagagttgtcaactttaattaaa

SEQ ID NO: 233737 - DNA, 75 bp, synthetic construct
  source 1..75: mol_type = other DNA
tttaatgacttctgtctgtgtaatagcgttctttttatgtgtatataatactaagctaagttattctctttttgc

SEQ ID NO: 233738 - DNA, 75 bp, synthetic construct
  source 1..75: mol_type = other DNA
gtattccagtagtgtggggtatttctgccacagttgaacgtttcgacaatgccattgccaatgccggtcatcatg

SEQ ID NO: 233739 - DNA, 75 bp, synthetic construct
  source 1..75: mol_type = other DNA
ttcctcatttttggcgccatccgcttgcgggacgcgatggcgatcttgcggtatcgccgcaacatccgacgcctg

SEQ ID NO: 233740 - DNA, 75 bp, synthetic construct
  source 1..75: mol_type = other DNA
atatgctgggccgcgatcctcacgtggtggcgctggagcaatacctcaacgcggagaaattctacgatccgatcc

SEQ ID NO: 233741 - DNA, 75 bp, synthetic construct
  source 1..75: mol_type = other DNA
agttcaatgagctgatgggtgatgaatttatcccgcttattaacaaagggggcggcgccggcatgcaggtgacgg

SEQ ID NO: 233742 - DNA, 75 bp, synthetic construct
  source 1..75: mol_type = other DNA
aatttaacattatccaatactggcgtttctaatactttggtgggtgttttgactctttcaaataccagtattgat

SEQ ID NO: 233743 - DNA, 75 bp, synthetic construct
  source 1..75: mol_type = other DNA
actgattccctgacgccttctgaacgtgcctcgctgctcgtcgtactgaccagccttgaccgtcagcttggcgac

SEQ ID NO: 233744 - DNA, 75 bp, synthetic construct
  source 1..75: mol_type = other DNA
taccaggcagcactcaggaaaatgagatcgatctgcttcgtctggtcggcgagttatgggatcaccgtaagttta

SEQ ID NO: 233745 - DNA, 75 bp, synthetic construct
  source 1..75: mol_type = other DNA
taaaagcagccaaaggacgttatgttttctttctagattcagatgatgcaattcattcagagttactttatgatg

SEQ ID NO: 233746 - DNA, 75 bp, synthetic construct
  source 1..75: mol_type = other DNA
ccagtcgcagcatggcgtgacctgcaagaacggtgatacctggtatctggtaccgcaactggaacaggcatccgc

SEQ ID NO: 233747 - DNA, 75 bp, synthetic construct
  source 1..75: mol_type = other DNA
gttgaatggggaacggagagctgcggtgcattggctggtagcaccttattcctcgttggtgcgttagctatatct

SEQ ID NO: 233748 - DNA, 75 bp, synthetic construct
  source 1..75: mol_type = other DNA
ctgacggtagagggttcggatgtggtggctgaccgggatgtgtcactggcggcgggtaaccatgttgatgttctt

SEQ ID NO: 233749 - DNA, 75 bp, synthetic construct
  source 1..75: mol_type = other DNA
gaatggggatatcgcactctcgggcagagagttaagcaatcagagctggcagacggggacagagaatgaatatct

SEQ ID NO: 233750 - DNA, 75 bp, synthetic construct
  source 1..75: mol_type = other DNA
gcatcttctgaaccagcgggagggattttctgccacaacaacaacccggactaacccctcatccattcagggaat

SEQ ID NO: 233751 - DNA, 75 bp, synthetic construct
  source 1..75: mol_type = other DNA
ttcagggatttttctctgaaaacaacagtgatattcccgatgatgctttcgatattgaagatgctctttattatg

SEQ ID NO: 233752 - DNA, 75 bp, synthetic construct
  source 1..75: mol_type = other DNA
cacctttatcaaaagaaaaccttattgcattggcagagttgaaaaaaggaaaacttattaatgaagccaacgagc

SEQ ID NO: 233753 - DNA, 75 bp, synthetic construct
  source 1..75: mol_type = other DNA
gagctaaataacccccagccgaataaagtttatcatgtagatggtgataaaatttataaaactgatgctcaggca

SEQ ID NO: 233754 - DNA, 75 bp, synthetic construct
  source 1..75: mol_type = other DNA
tcgttagccagcaaaatggtgctgagcggagaaagtatcaccgcccagcaagcacagcaggccgggctggttagc

SEQ ID NO: 233755 - DNA, 75 bp, synthetic construct
  source 1..75: mol_type = other DNA
gtgtgaaaacctggggatactgaataccgatgatatcagtacgtctttttatgctaccgaacccaatacggacaa

SEQ ID NO: 233756 - DNA, 75 bp, synthetic construct
  source 1..75: mol_type = other DNA
atgaataaaggtaatagattacaacaattagaagatatgtgtcgtgatattattaaaattaatatgtggtatgaa

SEQ ID NO: 233757 - DNA, 75 bp, synthetic construct
  source 1..75: mol_type = other DNA
cggtgctcaggtcaacggcaacaggattatcgccgatgtgggccacgacctgctgataagcagccagcaggacac

SEQ ID NO: 233758 - DNA, 75 bp, synthetic construct
  source 1..75: mol_type = other DNA
gtaaaaaacaagaaagaagatatcacctggagttttgataaaactcagggcactggtgttattaatcttgaaaga

SEQ ID NO: 233759 - DNA, 75 bp, synthetic construct
  source 1..75: mol_type = other DNA
tctgtcttttccggaaatgtctatctggacaatcaatcagcactgaatataaatgatctctttacggggggggtt

SEQ ID NO: 233760 - DNA, 75 bp, synthetic construct
  source 1..75: mol_type = other DNA
caacttatagtataatcgacaggaataatcatccatcaggcaacagagacttccataatccgcgcttaaataaac

SEQ ID NO: 233761 - DNA, 75 bp, synthetic construct
  source 1..75: mol_type = other DNA
caataaccgacaatagaaatcaaaaagtttattttgataacatttcagatattatcaaaaatttttgtttgcata

SEQ ID NO: 233762 - DNA, 75 bp, synthetic construct
  source 1..75: mol_type = other DNA
ccaaatttatttaacattttaggctcacttgtagataaaaaatcagccgcaaatgatgacatcattaccaaaaag

SEQ ID NO: 233763 - DNA, 75 bp, synthetic construct
  source 1..75: mol_type = other DNA
gacaaaaatggaaacctgacaggcgttctcaatacccccatgattgacttctccagtctgtctcgagatggtcat

SEQ ID NO: 233764 - DNA, 75 bp, synthetic construct
  source 1..75: mol_type = other DNA
gtctgaagacagtcatatcaatgtttcttcatcttcagtcctgttctcagatgcatcgtcatttataaacagctc

SEQ ID NO: 233765 - DNA, 75 bp, synthetic construct
  source 1..75: mol_type = other DNA
gagacagagaacggcgagcgggagaaagcgcagcgccgcagcctggcggagaagttacagcaggaagggagcgaa

SEQ ID NO: 233766 - DNA, 75 bp, synthetic construct
  source 1..75: mol_type = other DNA
caataatctgacaccggagcaggttcaagaagggatgaatcgtatagctattggtgaagggccttcttgggggac

SEQ ID NO: 233767 - DNA, 75 bp, synthetic construct
  source 1..75: mol_type = other DNA
atagtgcccttactggtggtcttatagctgtatcagagttaagtaaaaaagttaaaggaaaaacaggcagaaaat

SEQ ID NO: 233768 - DNA, 75 bp, synthetic construct
  source 1..75: mol_type = other DNA
gtggatgtgggtaaatccttctcaggtaaggactggaaagtgacagcccgtgccggtctgggctaccagttcgac

SEQ ID NO: 233769 - DNA, 75 bp, synthetic construct
  source 1..75: mol_type = other DNA
tgattccggtgcctatatcgacctgattggtaagtatgttcatcatgataatgagtacacagcaacctttgccgg

SEQ ID NO: 233770 - DNA, 75 bp, synthetic construct
  source 1..75: mol_type = other DNA
acggtgaactgtatcgggcaacatacgatgccatacatggcccttcactgagtgaatgggagaaaataaatattg

SEQ ID NO: 233771 - DNA, 75 bp, synthetic construct
  source 1..75: mol_type = other DNA
acgggcagaggagattgcatctgctgtgggcctggaagatgccagtacgaccacaaagggagttgtcaagctcag

SEQ ID NO: 233772 - DNA, 75 bp, synthetic construct
  source 1..75: mol_type = other DNA
agcagagaacacatccggattttaatcccatcattccggatattggttttaccggagtgctcgaaattaaaattt

SEQ ID NO: 233773 - DNA, 75 bp, synthetic construct
  source 1..75: mol_type = other DNA
gcccatttaaggcagacacgaataaagcagatattataaaaaaccatctttttagatcattaaaaatcttcaagt

SEQ ID NO: 233774 - DNA, 75 bp, synthetic construct
  source 1..75: mol_type = other DNA
aaaacagcctttaaatcccgttctgactgcgttaggccgtcttccatccggtgaagatgggtttcccagttttag

SEQ ID NO: 233775 - DNA, 75 bp, synthetic construct
  source 1..75: mol_type = other DNA
gtccgcaaactgcttgctgctcttgtgggttcttctccggaaaccctggacacgctgaacgaactggcggaggcg

SEQ ID NO: 233776 - DNA, 75 bp, synthetic construct
  source 1..75: mol_type = other DNA
gaagattaccgccgtgaaagtgccaaccgcgataccgcaccgcgaccgctggggcttcaggatcgcctgagctgg

SEQ ID NO: 233777 - DNA, 75 bp, synthetic construct
  source 1..75: mol_type = other DNA
gcatctgcttatttttgcttatagagacaatttgaacaatagtgaatcaacttcacttaattggattgaaatatt

SEQ ID NO: 233778 - DNA, 75 bp, synthetic construct
  source 1..75: mol_type = other DNA
ggagaaaaagagtgtcgacagttcaacacggaacttatttatcaattgagaaaagtgtacggactgattggagag

SEQ ID NO: 233779 - DNA, 75 bp, synthetic construct
  source 1..75: mol_type = other DNA
tgtctattggcgcgcagactagtgacgaggtagaggagcagggtgacgttaatgatttcatttacaactttttga

SEQ ID NO: 233780 - DNA, 75 bp, synthetic construct
  source 1..75: mol_type = other DNA
ctcccccgtgatggcagatgtgcaggaagaaggcaagccgcagctgtggaaccataaacaaaatgatgctttagg

SEQ ID NO: 233781 - DNA, 75 bp, synthetic construct
  source 1..75: mol_type = other DNA
atggtagctaatcatcgctcgttgattacatacaagatgatggagacggtctgttacccggcaatggaagaagtg

SEQ ID NO: 233782 - DNA, 75 bp, synthetic construct
  source 1..75: mol_type = other DNA
tcgctgcgggaaaacctgacgatggggatgccggaagccagcgatgaagatatcgaacgcgcgttaaccctcagc

SEQ ID NO: 233783 - DNA, 75 bp, synthetic construct
  source 1..75: mol_type = other DNA
gttcgccggggtgatgatggcgatcctgtttgaattctgtatgcgcatggtgcgcacgcacctttccgatgtgat

SEQ ID NO: 233784 - DNA, 75 bp, synthetic construct
  source 1..75: mol_type = other DNA
agcgattggcaaactcaacattcaggctggtgagaaaatcgccattctcgggcgcaacggcgcgggtaaatcgac

SEQ ID NO: 233785 - DNA, 75 bp, synthetic construct
  source 1..75: mol_type = other DNA
gatcggcggttggctggtgctggtggttttactggcgctgcccttgctggtgatcccaggcctgctggtgcaacg

SEQ ID NO: 233786 - DNA, 75 bp, synthetic construct
  source 1..75: mol_type = other DNA
gccttttgtgcagaagcagaaaaacggactcaactacatgattcaggaaggcggatttggcctctctggcggtca

SEQ ID NO: 233787 - DNA, 75 bp, synthetic construct
  source 1..75: mol_type = other DNA
agtggaaccacaccaacgacgtggcctcgtccattagcatgaagcaacgctttctcaccgggttgctgcttacct

SEQ ID NO: 233788 - DNA, 75 bp, synthetic construct
  source 1..75: mol_type = other DNA
ccggtactacaggcacgttgcgcttgctgagaacggaaagcgacatcttgcctgtggatcgcgaaacgctatttg

SEQ ID NO: 233789 - DNA, 75 bp, synthetic construct
  source 1..75: mol_type = other DNA
tggcgatgcgttcagtatttaaactgttctggcgacccgaaggtttgcaaggcgatccgttggaggcttatcaac

SEQ ID NO: 233790 - DNA, 75 bp, synthetic construct
  source 1..75: mol_type = other DNA
aataaacccaagtttacccaccagcaattagcctcaagatttgatatctggactgaagcacaaaaagataatggt

SEQ ID NO: 233791 - DNA, 75 bp, synthetic construct
  source 1..75: mol_type = other DNA
aacgcccgctggcgcggctggcgaacgaaggaatgcgcgagtcagcggtacgcaacgctacgcttgtcgaagccg

SEQ ID NO: 233792 - DNA, 75 bp, synthetic construct
  source 1..75: mol_type = other DNA
ctttacaaacatcctactgaaaatgtatcttcagaagactttgatgcggtcatcaacgcttgccactcatactta

SEQ ID NO: 233793 - DNA, 75 bp, synthetic construct
  source 1..75: mol_type = other DNA
gaaacaaacatgtcaaaatttatatgccaaaagaaagcagatgctttcagacaattggcaaattataaattaatc

SEQ ID NO: 233794 - DNA, 75 bp, synthetic construct
  source 1..75: mol_type = other DNA
tcatgacaatatcagcgttcagttcagcggtgacgaagggctggaaaccacgcttaacgtcgcggatgtcgagga

SEQ ID NO: 233795 - DNA, 75 bp, synthetic construct
  source 1..75: mol_type = other DNA
gtcactggtatacaatcatatcattcatgaagataatctggttaaattactgcaaactaaaagtgctaacgaaac

SEQ ID NO: 233796 - DNA, 75 bp, synthetic construct
  source 1..75: mol_type = other DNA
gtagaaaacaattttgttcacggcttgtggctcaatgttaccagaaggctggaatacaactgacagagaatataa

SEQ ID NO: 233797 - DNA, 75 bp, synthetic construct
  source 1..75: mol_type = other DNA
tccgggaaaggatatcttacaagtaatatgtgaccatgctcgtagtctctgtggtagccagtattcagtaagcca

SEQ ID NO: 233798 - DNA, 75 bp, synthetic construct
  source 1..75: mol_type = other DNA
cttcactatggctcgttcttttaaagccgtagccaatggcaaaatttatatcggtaaaattgacactgacccggt

SEQ ID NO: 233799 - DNA, 75 bp, synthetic construct
  source 1..75: mol_type = other DNA
gatgcggtgggcaggcttaaggcacagacggatgccgcaggcaggacaacagagtacagcccggatgtggtgacg

SEQ ID NO: 233800 - DNA, 75 bp, synthetic construct
  source 1..75: mol_type = other DNA
cattagtatcagaccagggaaatagtgtagccgcaaaaaaggttctgctcaccctgtgggattatatgtctacgc

SEQ ID NO: 233801 - DNA, 75 bp, synthetic construct
  source 1..75: mol_type = other DNA
ttggcgtaatcacccgccgcgacaatcatgacaatatcagcgttcagttcagcggtgacgaagggctggaaacta

SEQ ID NO: 233802 - DNA, 75 bp, synthetic construct
  source 1..75: mol_type = other DNA
cgtgctgaacagcgtttccagaatcagtggaatcacaccaacgacgtggcctcgtccatcagtatgaagcaacgt

SEQ ID NO: 233803 - DNA, 75 bp, synthetic construct
  source 1..75: mol_type = other DNA
atgaaaaaaaatgcccagtccgtggaagcctggctggaggcgatgatcgccgtggcgcgttattaccgcctcgat

SEQ ID NO: 233804 - DNA, 75 bp, synthetic construct
  source 1..75: mol_type = other DNA
agacatgaactcaagaaagaacaggacgtagttgaagttcgtcttcggtcttacttggcaggaagacataatttg

SEQ ID NO: 233805 - DNA, 75 bp, synthetic construct
  source 1..75: mol_type = other DNA
cctgactttccagaaccatacggactgcccgttgacggacttcgggggaaaacgagtatttttagtcatcctgtt

SEQ ID NO: 233806 - DNA, 75 bp, synthetic construct
  source 1..75: mol_type = other DNA
atctaaaaaagctgaaagccttagctcaggaaaaattacgattggaacaaaagaaaaagtaatcattattaatga

SEQ ID NO: 233807 - DNA, 75 bp, synthetic construct
  source 1..75: mol_type = other DNA
agcttcagggggctgatacccaaatcagcgccagcttgctcaccaacagcgggcgcgtgcagggcgacagcggcc

SEQ ID NO: 233808 - DNA, 75 bp, synthetic construct
  source 1..75: mol_type = other DNA
ttcaggggaatcttgtaattccatttgtgattaatgggcatttcacaccatacaatactatttcgttgcaggtca

SEQ ID NO: 233809 - DNA, 75 bp, synthetic construct
  source 1..75: mol_type = other DNA
accattccttattcgctaaatatgacgataggtagtgaacgacgttattccttggccacaaatgggaatggtttg

SEQ ID NO: 233810 - DNA, 75 bp, synthetic construct
  source 1..75: mol_type = other DNA
ctgaccacaaaacaaaggatttggcgattcatgccatctatccgagcaagcgccatgtgtcgttgaaagttcgcc

SEQ ID NO: 233811 - DNA, 75 bp, synthetic construct
  source 1..75: mol_type = other DNA
agaaatgactaaaaacgcgaggcggcgtaatcggtttatccccgctggcgcggggaactcgcaaaaaggcgggtc

SEQ ID NO: 233812 - DNA, 75 bp, synthetic construct
  source 1..75: mol_type = other DNA
aataaagaagctctatatattggtgattccaatgcagggcattacggtccatttgtagatgaaatgggtcgcagg

SEQ ID NO: 233813 - DNA, 75 bp, synthetic construct
  source 1..75: mol_type = other DNA
gaacaaaatttgcataaaatttttgcctatttatcagtggaaaagaagaaatatcaggtattagcaaaagtgaca

SEQ ID NO: 233814 - DNA, 75 bp, synthetic construct
  source 1..75: mol_type = other DNA
cccgcaaagaaattacaaaagcactcgaagatgccagtggcgaatatgccgaggctctgcgctgggtgcttgggg

SEQ ID NO: 233815 - DNA, 75 bp, synthetic construct
  source 1..75: mol_type = other DNA
ccgccggcaccacgggccatgaaaaagctcggcgtcagcgtcagatcctcggtgatgcaaagccgcgcctgaaaa

SEQ ID NO: 233816 - DNA, 75 bp, synthetic construct
  source 1..75: mol_type = other DNA
cccgcaaagaaatcaccaaagccctggaatcagccgagggtgagtatgcaagcgcacttcgttgggtgcttgggg

SEQ ID NO: 233817 - DNA, 75 bp, synthetic construct
  source 1..75: mol_type = other DNA
gtttcatcgagcatctgagcatgagcttcgacgacacgcagccgtgggatctcatgcataggagcactacggctt

SEQ ID NO: 233818 - DNA, 75 bp, synthetic construct
  source 1..75: mol_type = other DNA
aaaccaggcgcaatggcgcgctctcgaacttgagcgaaacgccagtgctcaggcagcagctgattttctggcgcg

SEQ ID NO: 233819 - DNA, 75 bp, synthetic construct
  source 1..75: mol_type = other DNA
gttcctggggtcgttaagcgcggatcagcaaatcagatggctaaatacatggtcagcgaaaacgaaattcgccga

SEQ ID NO: 233820 - DNA, 75 bp, synthetic construct
  source 1..75: mol_type = other DNA
ctctatgacgacggaaagggtatcgcgcaaaatttttccctcgctgcattctggtacctaaaaagcgcccggcaa

SEQ ID NO: 233821 - DNA, 75 bp, synthetic construct
  source 1..75: mol_type = other DNA
cttgaagaccgtatttatggctggggggatgagattgaaagtaacgctgttgagtatttcatccacgctctacgt

SEQ ID NO: 233822 - DNA, 75 bp, synthetic construct
  source 1..75: mol_type = other DNA
atttgaaatgagcgagctactggcccggatccgcgcagtcattcgaagaaacactggcaatggaaaccctgtcct

SEQ ID NO: 233823 - DNA, 75 bp, synthetic construct
  source 1..75: mol_type = other DNA
caggcattcaacttcaatcgattcaatcaggttgcagaacatgccaacagtcttaactccctgatcgacaccagc

SEQ ID NO: 233824 - DNA, 75 bp, synthetic construct
  source 1..75: mol_type = other DNA
gctgcctgatttactcagtgaaattctcgacgaatccgctgccgcgttatttagccagatgccggaatgtatggc

SEQ ID NO: 233825 - DNA, 75 bp, synthetic construct
  source 1..75: mol_type = other DNA
aaaaaatcaacgatgcccaggcttggtatgaacaagtcgttgatacagagatctgccctttgctcgccgaatatt

SEQ ID NO: 233826 - DNA, 75 bp, synthetic construct
  source 1..75: mol_type = other DNA
tgatgagttaaagtcccttgagtccggaaattatgaatacctgaattttgagaaaaacgaatcccagacgataac

SEQ ID NO: 233827 - DNA, 75 bp, synthetic construct
  source 1..75: mol_type = other DNA
attgcagaggtggctaggcttaatgctttagataatcgtaatgcaaggatagaatttataacaaagcctatttca

SEQ ID NO: 233828 - DNA, 75 bp, synthetic construct
  source 1..75: mol_type = other DNA
aatatgactggggaagaaaaattagctgcacaatgttacaaaaacatgggtagtagctactcaaatctcggaaat

SEQ ID NO: 233829 - DNA, 75 bp, synthetic construct
  source 1..75: mol_type = other DNA
tgaaaatacctggtttcgcacaccagatgaggttgtgacacatcactattgcggaaaagaagactgttttcgtta

SEQ ID NO: 233830 - DNA, 75 bp, synthetic construct
  source 1..75: mol_type = other DNA
gatgttctgggtggaccgtgtttctccggatgacggagggagttgttatctctggctcaaccgggggcaaccacc

SEQ ID NO: 233831 - DNA, 75 bp, synthetic construct
  source 1..75: mol_type = other DNA
aaacatctttatgaacaagcatttgacgagggaagaaatttgcttttggaaatttacaatggaatattggcaact

SEQ ID NO: 233832 - DNA, 75 bp, synthetic construct
  source 1..75: mol_type = other DNA
ctctgcaaggatatcatgctttacgaatacggcgttaaaccctacaatgtgggctcattatgctaacaacagaac

SEQ ID NO: 233833 - DNA, 75 bp, synthetic construct
  source 1..75: mol_type = other DNA
atagacacaacaacaatataaaagaattattaaaaaatgcagaaggaaagaacgtggaaaatgttctttccagac

SEQ ID NO: 233834 - DNA, 75 bp, synthetic construct
  source 1..75: mol_type = other DNA
gagcgttcaatgatgaaattctttctatagccagcaatgaagaaagttctggttataaaaacaagcttagcaatg

SEQ ID NO: 233835 - DNA, 75 bp, synthetic construct
  source 1..75: mol_type = other DNA
gtattattacagtctgcagatattgatagtataagattgtctgacttcagtattaatgatgctattaaatattta

SEQ ID NO: 233836 - DNA, 75 bp, synthetic construct
  source 1..75: mol_type = other DNA
agggagaagatcttataactatggcaaagatattggttctgtaccgttcctttcagatgaagaagttagaaaaaa

SEQ ID NO: 233837 - DNA, 75 bp, synthetic construct
  source 1..75: mol_type = other DNA
ctaaaattatagatataaaatcctttttatatgatattgtatatagagatcaacctaatagctcattccctcccc

SEQ ID NO: 233838 - DNA, 75 bp, synthetic construct
  source 1..75: mol_type = other DNA
cgtatattggtccacttgatcaagcaggttttgtatcagatacgaaaaatatcttggaaaaaattgtgggtgtta

SEQ ID NO: 233839 - DNA, 75 bp, synthetic construct
  source 1..75: mol_type = other DNA
ttttttgataaaataataacaatacacaatattattaaacaacctggagtttatattcaacctgtattttatatt

SEQ ID NO: 233840 - DNA, 75 bp, synthetic construct
  source 1..75: mol_type = other DNA
gagaaaaaaaacaaaatatctccagagttaattgataaattaaaatcaaacatagataaatatcaagagctaagt

SEQ ID NO: 233841 - DNA, 75 bp, synthetic construct
  source 1..75: mol_type = other DNA
aatatcataaaaacgataatatagaacaacacacaaaaaaaacaagaagcaagaggagaataaaaacggcttcaa

SEQ ID NO: 233842 - DNA, 75 bp, synthetic construct
  source 1..75: mol_type = other DNA
tgggggattcgacagccaacacataacctcttcatatacaatgataatgactacccagaaacaattgatatttca

SEQ ID NO: 233843 - DNA, 75 bp, synthetic construct
  source 1..75: mol_type = other DNA
agataaactggctagatcgtttgaatataatttattgaagtcacaaataaaaatccaggattcagtcatgaatta

SEQ ID NO: 233844 - DNA, 75 bp, synthetic construct
  source 1..75: mol_type = other DNA
tatatttttaataaaattcttcgtgagattgcatttgagaatgcaaaacatgacctggttgcctcgttaaataaa

SEQ ID NO: 233845 - DNA, 75 bp, synthetic construct
  source 1..75: mol_type = other DNA
actaattcgttcagtctctcagtatttaaatctaaatagaattgaagttatttcaacctcagtttatcaggaaga

SEQ ID NO: 233846 - DNA, 75 bp, synthetic construct
  source 1..75: mol_type = other DNA
caaaacccaacttacatggagtaattaaaaaagttgatttgaacacaaatgaagcggaaattaaaataaaagagg

SEQ ID NO: 233847 - DNA, 75 bp, synthetic construct
  source 1..75: mol_type = other DNA
cgctgaatatatcggcataagaaactggcttgctggcattcgcatcaaaggagacgcaggagaacaaaacgatga

SEQ ID NO: 233848 - DNA, 75 bp, synthetic construct
  source 1..75: mol_type = other DNA
tcatcgccgcagccaatccggctaccgtgctggcactactggatgaacgggaaagaaaccagcaatacatcaaaa

SEQ ID NO: 233849 - DNA, 75 bp, synthetic construct
  source 1..75: mol_type = other DNA
gctaaagatgcaaaaagcacacagaaagcctggaattgtcgtcactccagacagtcaaacgataaaaaaagatag

SEQ ID NO: 233850 - DNA, 75 bp, synthetic construct
  source 1..75: mol_type = other DNA
acacgccggcgcgaaaaattcacctgtaccactgcgaccatcgcggcctgccgctggcccttatcagcacggaag

SEQ ID NO: 233851 - DNA, 75 bp, synthetic construct
  source 1..75: mol_type = other DNA
gttacgaatacagatcctctggggttagaagtttttcctagaccattccccttgccaattccatggcccaaaagc

SEQ ID NO: 233852 - DNA, 75 bp, synthetic construct
  source 1..75: mol_type = other DNA
atgcgctaattcatcgtgacgttgttggatatattcccatttgcagaattgaaggagcgcatcctgaaagcggtt

SEQ ID NO: 233853 - DNA, 75 bp, synthetic construct
  source 1..75: mol_type = other DNA
aagataggtaattctaaaaacgtattttttaatacatatataaatattaaaaaagcaaacctagtagttacaatt

SEQ ID NO: 233854 - DNA, 75 bp, synthetic construct
  source 1..75: mol_type = other DNA
gaattttttttggagccacaaaatatctgaaagcaagcttgaagttttaaaaagcaatgccagaaaaaattatgg

SEQ ID NO: 233855 - DNA, 75 bp, synthetic construct
  source 1..75: mol_type = other DNA
aaaaaaggtggagaaatctatatccatcggggggaatgggatgcttatgccattcatttggctcaaattgccccg

SEQ ID NO: 233856 - DNA, 75 bp, synthetic construct
  source 1..75: mol_type = other DNA
tgcatacacctggtgataaacgatgtgaagacgttatcaaatggaccggctttgatggacagaacaacgcagaga

SEQ ID NO: 233857 - DNA, 75 bp, synthetic construct
  source 1..75: mol_type = other DNA
tgtgaaagatattgatgaattcgttacctgctgtttcaccgaacagggttgtaaagattacctggcagtcaatgg

SEQ ID NO: 233858 - DNA, 75 bp, synthetic construct
  source 1..75: mol_type = other DNA
gtcactttttctgccgctcctgcaagtctcactggcgatcgccccgctccaggtatatttaccgcgacagcaacg

SEQ ID NO: 233859 - DNA, 75 bp, synthetic construct
  source 1..75: mol_type = other DNA
gacttttgctggaaagttaattattcctgaaactctcgtggcaaaattgtacggaaccataagccgtgacactcc

SEQ ID NO: 233860 - DNA, 75 bp, synthetic construct
  source 1..75: mol_type = other DNA
atgaacaagtatattataccatggtgctttattgtttttatcttctcctttagtggcgcaacatttgcggcccca

SEQ ID NO: 233861 - DNA, 75 bp, synthetic construct
  source 1..75: mol_type = other DNA
aaatcgcctttttgctgtaattgagacgcggaccgtgagcggaaataaactgcaggttgcagagttgtgggatcg

SEQ ID NO: 233862 - DNA, 75 bp, synthetic construct
  source 1..75: mol_type = other DNA
ggcttacttttaaagtatcaactcttccggatgtcagtcgatttaaaaatgctcgttttttatttgagagaatac

SEQ ID NO: 233863 - DNA, 75 bp, synthetic construct
  source 1..75: mol_type = other DNA
acaaacagcaaaggccaggttgtttacgacctgattatacctcatcgtgaaaaccatctggtacttgatatagca

SEQ ID NO: 233864 - DNA, 75 bp, synthetic construct
  source 1..75: mol_type = other DNA
tgatgctttaagctttgctggtgttcactcaaatttgaattattataatcttaatccgaatctcgatgtgggtat

SEQ ID NO: 233865 - DNA, 75 bp, synthetic construct
  source 1..75: mol_type = other DNA
atgaacaagaatattatacgatggtggatggcggttcttattatctcttttagtggcacaatactagctgcgcct

SEQ ID NO: 233866 - DNA, 75 bp, synthetic construct
  source 1..75: mol_type = other DNA
ttttctgccgcacctgcaagcctcactggagctcgccctgcgccaggaacatttaccgcgactgcaaccataaca

SEQ ID NO: 233867 - DNA, 75 bp, synthetic construct
  source 1..75: mol_type = other DNA
accacttttctctgcgatagctttaatatatatttatactgccacagtaaagtttttgaaatatttacaagagat

SEQ ID NO: 233868 - DNA, 75 bp, synthetic construct
  source 1..75: mol_type = other DNA
atgctaataatcccggtgggaacacaaagtataattgcggtcgaaaggaggcattaaacatttccagtggcgcta

SEQ ID NO: 233869 - DNA, 75 bp, synthetic construct
  source 1..75: mol_type = other DNA
ttgattttagtactattccagcctcagatttttcatctgttgtcgggagtgctgtgtcagcgcataaaatcacca

SEQ ID NO: 233870 - DNA, 75 bp, synthetic construct
  source 1..75: mol_type = other DNA
gcgctgaccctgagtgccgcgccacttggctgttttttgctactgcgccgtatgagcctgatcggtgatgcactg

SEQ ID NO: 233871 - DNA, 75 bp, synthetic construct
  source 1..75: mol_type = other DNA
atggataacgctgtattaaatagcgagcttattgccacgaaggcggggaatattaccgtctatagctatgatggt

SEQ ID NO: 233872 - DNA, 75 bp, synthetic construct
  source 1..75: mol_type = other DNA
gtgataccacctttacctacgccaaatacgcttaccggacctggcggcactaccacaatcgtgaaggattggtta

SEQ ID NO: 233873 - DNA, 75 bp, synthetic construct
  source 1..75: mol_type = other DNA
cagttcaggaagtgaaagcggtagcggttgagctactcaaacagggcaaggggctgacgctgtaccgtgacgcct

SEQ ID NO: 233874 - DNA, 75 bp, synthetic construct
  source 1..75: mol_type = other DNA
aagactaccgcttcctcggcgatgcggcgtttgatacccgttatgtgtccaactatgtgctgaatcagaccggga

SEQ ID NO: 233875 - DNA, 75 bp, synthetic construct
  source 1..75: mol_type = other DNA
gcccttcagaccaccaaaacagtgctctccggcgtgcaggccggccaggcggctgaggcggctaacctgacggcc

SEQ ID NO: 233876 - DNA, 75 bp, synthetic construct
  source 1..75: mol_type = other DNA
gtcaggcggggctggccgggggagacagtcctgcacggtttattgcaccgggccgcaaatatccgcagccgtatg

SEQ ID NO: 233877 - DNA, 75 bp, synthetic construct
  source 1..75: mol_type = other DNA
attttatcctggcgtttttcctgtcactaactgcctccgttgcctatgcaggtggactcgacaccgcaacaaata

SEQ ID NO: 233878 - DNA, 75 bp, synthetic construct
  source 1..75: mol_type = other DNA
actgcgccgtcagaatgttcaaaagaacatctactgaacggtcccgattctcgtcttttcttaccggagcgaagc

SEQ ID NO: 233879 - DNA, 75 bp, synthetic construct
  source 1..75: mol_type = other DNA
cggaaaattattaaacctgagacagcccgccatctggtaatcctcacgcataacctctttttcttccaggaaatt

SEQ ID NO: 233880 - DNA, 75 bp, synthetic construct
  source 1..75: mol_type = other DNA
atgacaaaaacattaacccaacaaggtgcatttcgtaaagaacgcaaggcattacaacgcgcaatagctaacggt

SEQ ID NO: 233881 - DNA, 75 bp, synthetic construct
  source 1..75: mol_type = other DNA
gatgatgataaaaatggattcatgacagcggttcatgggctcgatgccacgaaggggcttgatctcattttgcat

SEQ ID NO: 233882 - DNA, 75 bp, synthetic construct
  source 1..75: mol_type = other DNA
tgctgaaattgttggggtaacccaagggatggtaagccatgttattactggacgggcgaaacttacgggggggga

SEQ ID NO: 233883 - DNA, 75 bp, synthetic construct
  source 1..75: mol_type = other DNA
cacctttgccgatactgctgcgggtggtttagcccccgtagaactgactgcccagaccactgcgattgaaagcat

SEQ ID NO: 233884 - DNA, 75 bp, synthetic construct
  source 1..75: mol_type = other DNA
atgccgaaattgacgacgatcgctggtatcagcgtcatgacggcggcgttttgctgccggtggagttgttggacg

SEQ ID NO: 233885 - DNA, 75 bp, synthetic construct
  source 1..75: mol_type = other DNA
gggagcgtgacctgacggggtggatgtcgctgtcgcgtaaaccggaggtgacgtggtatggctgggacggagaca

SEQ ID NO: 233886 - DNA, 75 bp, synthetic construct
  source 1..75: mol_type = other DNA
gtgataccttgtaccgttttgatggtgctatctggcgggcaatcagcgattcagctgtgaaaagtgatttagcag

SEQ ID NO: 233887 - DNA, 75 bp, synthetic construct
  source 1..75: mol_type = other DNA
ccagcgtttcacgggtggcgctggtcgatgccactccgccggtggtggccattaatccggtggcgaccgataacg

SEQ ID NO: 233888 - DNA, 75 bp, synthetic construct
  source 1..75: mol_type = other DNA
ctgccgccgcgatggggaatctgcctgacggcgcggtggcgattaccgcttctgtgacggatctcagcggcaata

SEQ ID NO: 233889 - DNA, 75 bp, synthetic construct
  source 1..75: mol_type = other DNA
gcgttcgagcattataacgaatggcatccgcatagtgcgttgggttatcgctctccgcgagaatatcgacgtcag

SEQ ID NO: 233890 - DNA, 75 bp, synthetic construct
  source 1..75: mol_type = other DNA
ttctcagacgagccgatgactggaaggacggccgccgcagccgtcacacggatgatacggatgtgcttcgccgta

SEQ ID NO: 233891 - DNA, 75 bp, synthetic construct
  source 1..75: mol_type = other DNA
atgcgtgatgttcagaatgcctttgatgccgcccttgtgggggtggacagcacgattgttgaagtgatggggatc

SEQ ID NO: 233892 - DNA, 75 bp, synthetic construct
  source 1..75: mol_type = other DNA
ggttggcggcggagttggggggcattttgcgtatacttatgtagtggatgttgataatccagaatcatcgataga

SEQ ID NO: 233893 - DNA, 75 bp, synthetic construct
  source 1..75: mol_type = other DNA
ttgcggggagcgggctttcgtaatcttgccctggtggagtggctgacctacggcagcggctatcttgcgggcatg

SEQ ID NO: 233894 - DNA, 75 bp, synthetic construct
  source 1..75: mol_type = other DNA
gttccgatggctttgagttcggttgcgatgatggcgaaaaactgcgtgttacgttcgccctggactgttgcgatc

SEQ ID NO: 233895 - DNA, 75 bp, synthetic construct
  source 1..75: mol_type = other DNA
atgagtaatgaccgcatgaccgtagtgccagattttcttggcgaactggatgccggcgtgttcatgaacaaaatc

SEQ ID NO: 233896 - DNA, 75 bp, synthetic construct
  source 1..75: mol_type = other DNA
cgttgtacttaccagatgccgatttttcaaactccagaccgaagcggatgttgtcgcgaatttccgcattcaggc

SEQ ID NO: 233897 - DNA, 75 bp, synthetic construct
  source 1..75: mol_type = other DNA
acactggataacgaaattacatgctggcgggaatacccagaatgactttggtgcttctgtgggggttggttatca

SEQ ID NO: 233898 - DNA, 75 bp, synthetic construct
  source 1..75: mol_type = other DNA
gtattgggaacaaaagtactgtttcatcaaaaaatagcgtggccctcgggagtaattctgtagcaagtgaggata

SEQ ID NO: 233899 - DNA, 75 bp, synthetic construct
  source 1..75: mol_type = other DNA
cactacaataaccaagtcagcgatatgtatccggatgcttacgggcagatagtaaccctgctgaatatcaccagt

SEQ ID NO: 233900 - DNA, 75 bp, synthetic construct
  source 1..75: mol_type = other DNA
tagcaaaacagaagcttaaaaacagtaaagatccggcagagcgtgaaaaggcacagcagaaatatgatgcattgc

SEQ ID NO: 233901 - DNA, 75 bp, synthetic construct
  source 1..75: mol_type = other DNA
agtgtcgttcgtcatgggaaactggttctatgggtagtatcgctcagtctagttaactgtttgtttctttttaga

SEQ ID NO: 233902 - DNA, 75 bp, synthetic construct
  source 1..75: mol_type = other DNA
aaaacgccgctcctgatctggcgtctgacgctgtatacggttatcgcgtttttctggctgcaccgtgtccgggga

SEQ ID NO: 233903 - DNA, 75 bp, synthetic construct
  source 1..75: mol_type = other DNA
gtacgcgcctgtttgcgcggtcgctccatccgccggcgtattaatcatcccgatcgcttgaattacccaatgaaa

SEQ ID NO: 233904 - DNA, 75 bp, synthetic construct
  source 1..75: mol_type = other DNA
gctacggcggttcactcaatcagtatggctcctacagcaccgcgcaaatttcctgtgccatgccctacacctacg

SEQ ID NO: 233905 - DNA, 75 bp, synthetic construct
  source 1..75: mol_type = other DNA
atattgagaatttagaagatgaatcttattatgaagatgatagtgagcaacatccgccaagtgatgtgattgcct

SEQ ID NO: 233906 - DNA, 75 bp, synthetic construct
  source 1..75: mol_type = other DNA
gtggtctgctttcttgtcgcctaagtttattgagttataccggtacgccaaccgccgctggtgtagctcagcagg

SEQ ID NO: 233907 - DNA, 72 bp, synthetic construct
  source 1..72: mol_type = other DNA
atgcgttcggtaatgcgcttgccgggcagacggtcagcgtgttggcagacaacggtgcaacggtcgctttga

SEQ ID NO: 233908 - DNA, 75 bp, synthetic construct
  source 1..75: mol_type = other DNA
ctatgctcgccttgccgccgtgaccacgcgctatttgcaggatttgcaacagcaacgggcgttgcaacctgcggt

SEQ ID NO: 233909 - DNA, 75 bp, synthetic construct
  source 1..75: mol_type = other DNA
cgtttgattcctgtataaatgaaccggaagatcagtttggcctgatgctgcttgcctgtagcgccttgctggcag

SEQ ID NO: 233910 - DNA, 75 bp, synthetic construct
  source 1..75: mol_type = other DNA
tctttttgaaggacagggtgaaatgccagcaccaccctggggttcggtatatctcgaaaaagataatctgttgat

SEQ ID NO: 233911 - DNA, 75 bp, synthetic construct
  source 1..75: mol_type = other DNA
cggtgaatttactcagacagggcgtattgctgccggcgcttatgactacacgctgggacgtggtacgggagctaa

SEQ ID NO: 233912 - DNA, 75 bp, synthetic construct
  source 1..75: mol_type = other DNA
cgggcgtggtgctttgaacctgatgccggtgaagggcttaaccgttatatccgcaagtcaggcatcctcagagca

SEQ ID NO: 233913 - DNA, 75 bp, synthetic construct
  source 1..75: mol_type = other DNA
caggtgatttgttttatattcccgcgctcaatgcattagatgttaatgggtttgttctggctcgttacattgaat

SEQ ID NO: 233914 - DNA, 75 bp, synthetic construct
  source 1..75: mol_type = other DNA
ctgcttttctattaataccagcagaatcagcttctcatgaaattgacacaaaagcgggagctttgcagaaaacgc

SEQ ID NO: 233915 - DNA, 75 bp, synthetic construct
  source 1..75: mol_type = other DNA
aaggtctggcgaaaggtgtattaccggttcgctaccagggaggagcgggaaggaaaggtgagcacgaacctgatt

SEQ ID NO: 233916 - DNA, 75 bp, synthetic construct
  source 1..75: mol_type = other DNA
ttttcgccagatgagtttgtgcatgttaatatttctggcgttggtgaataaagttagtgaaaacaataagcaacg

SEQ ID NO: 233917 - DNA, 75 bp, synthetic construct
  source 1..75: mol_type = other DNA
accttcgatggcactactgatatttcgttgacaccagagaacattggcgcgctgtcactatccggaggcacatta

SEQ ID NO: 233918 - DNA, 75 bp, synthetic construct
  source 1..75: mol_type = other DNA
tattgaaggcggagcatttccagtatgcgttcttgtggaggaggggctttctgttgttgtccctacaacggatta

SEQ ID NO: 233919 - DNA, 75 bp, synthetic construct
  source 1..75: mol_type = other DNA
tcggtaatggactcaatgtaactggtggcatcaatggtagcttgaacggcaatgcatctacggctacaaagttac

SEQ ID NO: 233920 - DNA, 75 bp, synthetic construct
  source 1..75: mol_type = other DNA
ccgatattatcgcgggcctgagaaaaaagggaacatcgctggctgaggtttcccgcagggccgggctggcgtctt

SEQ ID NO: 233921 - DNA, 75 bp, synthetic construct
  source 1..75: mol_type = other DNA
ccgctcatccgcatcgaaacagacaacggtgaacgggagaaagcgcagtgccgcagcctggcggagaagatacag

SEQ ID NO: 233922 - DNA, 75 bp, synthetic construct
  source 1..75: mol_type = other DNA
aaaaaagagtttttggattttatctgtcacaaatgtcagttggtgcgtattgtgacggacgatattgatgaggca

SEQ ID NO: 233923 - DNA, 75 bp, synthetic construct
  source 1..75: mol_type = other DNA
atccgatctcagagatagacccacaagggttaaatccgttaattcttagtgttgtagcactgatgagttgcggtt

SEQ ID NO: 233924 - DNA, 75 bp, synthetic construct
  source 1..75: mol_type = other DNA
gagttacggtacaggctcattaaatattacggataagggttacgtcacgagttcaatcgtcgccattgtaggata

SEQ ID NO: 233925 - DNA, 75 bp, synthetic construct
  source 1..75: mol_type = other DNA
cgaccatcgcggcctgccgctggcgcttgtcagcacgaaggggcaacagaatggtgcgcagaatacgatgaatgg

SEQ ID NO: 233926 - DNA, 75 bp, synthetic construct
  source 1..75: mol_type = other DNA
tatcagccggggagcttcacaccactcatcagagttgaaactgccaccggtgaactggccagaacacagcgccgc

SEQ ID NO: 233927 - DNA, 75 bp, synthetic construct
  source 1..75: mol_type = other DNA
ctttcaaaaggaagtgaaaagcttgatgatgctgccaagcaatcaatattacgtgcttttaacgactatcctaaa

SEQ ID NO: 233928 - DNA, 75 bp, synthetic construct
  source 1..75: mol_type = other DNA
agcacgcaacttctgtcagcgcactaccttcacgttctgcactgaacagcctgtcataacctgtgaacgcatccg

SEQ ID NO: 233929 - DNA, 75 bp, synthetic construct
  source 1..75: mol_type = other DNA
acgttctgcactgaacagcctgtcataacctgtgaacgcatccgcctgcaggataccccggaaggggcggaggtg

SEQ ID NO: 233930 - DNA, 75 bp, synthetic construct
  source 1..75: mol_type = other DNA
tacaacgcaccaaagcgtctatccagatgaaggccagcagcatgggtctttaccgctgtgggaaattaaccatcg

SEQ ID NO: 233931 - DNA, 75 bp, synthetic construct
  source 1..75: mol_type = other DNA
gcactggcaggtctggatgcacaacatctgcaactgttggttcatagcggctcgcgggggggtgcccctattaag

SEQ ID NO: 233932 - DNA, 75 bp, synthetic construct
  source 1..75: mol_type = other DNA
ggctgcggtatggcgctatggcaaacagatattctcgctcgcaaatacaacgccgataagtttgaaaagcgatta

SEQ ID NO: 233933 - DNA, 75 bp, synthetic construct
  source 1..75: mol_type = other DNA
attaacaccatcgccaccgacgatattctgaacgccgccgaggcgggcaatccgctaaccatcagcggcagtagc

SEQ ID NO: 233934 - DNA, 75 bp, synthetic construct
  source 1..75: mol_type = other DNA
tgaacggtaaaaactacaccaccacgctggacgcctccggtaactggagcgtgggtattccggcggcggatgtca

SEQ ID NO: 233935 - DNA, 75 bp, synthetic construct
  source 1..75: mol_type = other DNA
cggcctggcgtacagcgccaccaccgatagttccggcaactggagcgttaccgtgcctgcttcggcggtcggcgc

SEQ ID NO: 233936 - DNA, 75 bp, synthetic construct
  source 1..75: mol_type = other DNA
cgggatcggcgctgaccatcagcggcaccaccacggcggaagccgggcagacggtgactgtgacgctaaacggcg

SEQ ID NO: 233937 - DNA, 75 bp, synthetic construct
  source 1..75: mol_type = other DNA
tcgtgatagacgccaacctgccaggtctgcgcgtcgataccgtagcaggcgatgatgtggtcaatattatcgagc

SEQ ID NO: 233938 - DNA, 75 bp, synthetic construct
  source 1..75: mol_type = other DNA
tccggcaactggagcgtcggcgttccggcggcggatgtcacggcgctgggcagcggcccgcaaactgttaccgcc

SEQ ID NO: 233939 - DNA, 75 bp, synthetic construct
  source 1..75: mol_type = other DNA
gtcgacaccgtggcgggcgatgatgtggttaacagcatcgagcacggtcaggcactggtgataaccggtagcagc

SEQ ID NO: 233940 - DNA, 75 bp, synthetic construct
  source 1..75: mol_type = other DNA
agctggacaactacgctacccaccgccgatctcagcgcgttacgtgacggcgacgccacggtacaggccagtgtc

SEQ ID NO: 233941 - DNA, 75 bp, synthetic construct
  source 1..75: mol_type = other DNA
ggatgccacgccgccggtggtgaccattaatccggtggcgacagataacgttattaacacgccggaacataccca

SEQ ID NO: 233942 - DNA, 75 bp, synthetic construct
  source 1..75: mol_type = other DNA
gcattccggcggcggatgtcacggcgctggcgaccggtagccagaccatcaccgccagcctgagcgatcgcgcgg

SEQ ID NO: 233943 - DNA, 75 bp, synthetic construct
  source 1..75: mol_type = other DNA
taacgccagcgaaaaaggcgcggatctgcaaatttccggcaccagtaatcagccagcaggcaccacgattacgct

SEQ ID NO: 233944 - DNA, 75 bp, synthetic construct
  source 1..75: mol_type = other DNA
ccgccgcgatgggaaatctgcctgacggcgcggtggcgattaccgcttctgtgacggatctcagcggtaacactg

SEQ ID NO: 233945 - DNA, 75 bp, synthetic construct
  source 1..75: mol_type = other DNA
tgcgccaacggtcaccatcgccacggtgcgggtgacgatattatcaacaacgccgagcagcttgccgggcagacc

SEQ ID NO: 233946 - DNA, 75 bp, synthetic construct
  source 1..75: mol_type = other DNA
cccctgtacaggagcaggcaggtctgacgtttcgtctggagacctttgaatggctggtgcaccaggggcttaacg

SEQ ID NO: 233947 - DNA, 75 bp, synthetic construct
  source 1..75: mol_type = other DNA
attgcttacgtacattatatccgacagaacgatggaacccgctgggccatcaagtgcaaacttatcggcaatcaa

SEQ ID NO: 233948 - DNA, 75 bp, synthetic construct
  source 1..75: mol_type = other DNA
gcccggcgtgcggtatgactatgacaactatctgtcaaaccacaatatctccccgcgctttatgacggaatggga

SEQ ID NO: 233949 - DNA, 75 bp, synthetic construct
  source 1..75: mol_type = other DNA
ccatcaactgcatcacgaagaacgctatcgatctggagcgggcccgcaagattgtccgggtgagcaaggtctggc

SEQ ID NO: 233950 - DNA, 75 bp, synthetic construct
  source 1..75: mol_type = other DNA
cgatatagcgacaattagtgaacactcatccttgcaggatttactccatcttgataaagaacgcctgatcgatgt

SEQ ID NO: 233951 - DNA, 75 bp, synthetic construct
  source 1..75: mol_type = other DNA
gagcgacggacgagattacccgggaggtgtttgatgagttccgggagctgtcggcggagaacgttgtcggggatg

SEQ ID NO: 233952 - DNA, 75 bp, synthetic construct
  source 1..75: mol_type = other DNA
gatgacgcagggtgagttaaaacgacttgcggaacggcaactgacgaaatgggcaaagcatgttggtaacgggat

SEQ ID NO: 233953 - DNA, 75 bp, synthetic construct
  source 1..75: mol_type = other DNA
gccgcaggaagaggagtatgcgcatccgcgctggtatatcacggtgccggattcggctgacctggtgtatctgat

SEQ ID NO: 233954 - DNA, 75 bp, synthetic construct
  source 1..75: mol_type = other DNA
tatatcttttacagttataagacctcgtcgattagaactatttaaaacattatttgatgaattaaaaaacaatcc

SEQ ID NO: 233955 - DNA, 75 bp, synthetic construct
  source 1..75: mol_type = other DNA
gtttgcaatgatggccagaaaatttggtaaacaacttattgtagctgtaagtgaaaaggatgccataaaattaaa

SEQ ID NO: 233956 - DNA, 75 bp, synthetic construct
  source 1..75: mol_type = other DNA
tcagatgcagagagaaatgatcatgccgtctcctttatcagggatgcaatgaatagtgaagagcatataattatt

SEQ ID NO: 233957 - DNA, 75 bp, synthetic construct
  source 1..75: mol_type = other DNA
ttgttcgccgcgctgaccacgctgtgcatgttgtcactgatctccgcgttttatcaggccgataaagttgccgtc

SEQ ID NO: 233958 - DNA, 75 bp, synthetic construct
  source 1..75: mol_type = other DNA
gtggcagatggtcactgtgtccaggctgatacgtgatcgccgtttgttgggcgagcatgaacgttacaacggtga

SEQ ID NO: 233959 - DNA, 75 bp, synthetic construct
  source 1..75: mol_type = other DNA
aaccgttttcattgcctccgttacatctggtactgatatgtggtcgcttgccattagccgtaccaaaatacttga

SEQ ID NO: 233960 - DNA, 75 bp, synthetic construct
  source 1..75: mol_type = other DNA
gagaaggtctatggtgaacatggtcgaggattcattcatgtgcaccacataaagcccttgcatacgattggtgaa

SEQ ID NO: 233961 - DNA, 75 bp, synthetic construct
  source 1..75: mol_type = other DNA
tcacgatctggcaaaaaaagcggaacaacacctgaacgagatcaagaaggaattggagccgtatcaattcaacca

SEQ ID NO: 233962 - DNA, 75 bp, synthetic construct
  source 1..75: mol_type = other DNA
agggcgacatgacgcagtatggcagtagcattgtccagggttcagccggggtgcgcattggtgcccccaccggcg

SEQ ID NO: 233963 - DNA, 75 bp, synthetic construct
  source 1..75: mol_type = other DNA
actaacggctgaaaatgaaggaatgccacaaatcaattttaataacagcgagcctctaagccagattgattatag

SEQ ID NO: 233964 - DNA, 75 bp, synthetic construct
  source 1..75: mol_type = other DNA
ggctggctgttgagcttctatgctgcagtctatggtgtcacgcttttgttcttgagttggcgtcttcgcaaaacg

SEQ ID NO: 233965 - DNA, 75 bp, synthetic construct
  source 1..75: mol_type = other DNA
gtcccctttgacatcggtggagcaaacagttacggagccagactcttcctggctggatgtcttactgacaatagg

SEQ ID NO: 233966 - DNA, 75 bp, synthetic construct
  source 1..75: mol_type = other DNA
ggatatggtgcgctttgtcatgctatgtaatagcggggcgcaagtgggatacattacccagcgtgaaatggtcga

SEQ ID NO: 233967 - DNA, 75 bp, synthetic construct
  source 1..75: mol_type = other DNA
catgcgactgaccgggatgctgtaccggaatccggatcttgctgagcgggaagacctcgtgcaggggaactgccg

SEQ ID NO: 233968 - DNA, 75 bp, synthetic construct
  source 1..75: mol_type = other DNA
tgaaagatgacggcggcgtggatatcaaaggttccgtggacgttcaggggcgcgaaggcagcatcgaagtggtgg

SEQ ID NO: 233969 - DNA, 75 bp, synthetic construct
  source 1..75: mol_type = other DNA
ctcgatttaattaccgatggattcgcctcaaaaatctgcatcccggaatctacgttggcatggtattcgacagga

SEQ ID NO: 233970 - DNA, 75 bp, synthetic construct
  source 1..75: mol_type = other DNA
actctataatcttttctgtgacaaaattcatagtggtgaaattccaacatttggaaagccaagagtaatggattt

SEQ ID NO: 233971 - DNA, 75 bp, synthetic construct
  source 1..75: mol_type = other DNA
ggctgagaatgccagaggccccaaaggtgataccggaccgaaaggtgatacgggtcctcgaggggaaacaggtcc

SEQ ID NO: 233972 - DNA, 75 bp, synthetic construct
  source 1..75: mol_type = other DNA
gtgcatgaaccctgggcgctggcgattgccgggcgaatacatgccctatggggcgctgacgcgtctgtggtcgcc

SEQ ID NO: 233973 - DNA, 75 bp, synthetic construct
  source 1..75: mol_type = other DNA
catggatattgctatgcgcaaggctggcaactctccggtaactccggatggtttatccacggtatgcgctgattc

SEQ ID NO: 233974 - DNA, 75 bp, synthetic construct
  source 1..75: mol_type = other DNA
aggcgataaaggtgatccgggagtagcaggtccagcaggtccggcggggccacagggaccgaagggagacactgg

SEQ ID NO: 233975 - DNA, 75 bp, synthetic construct
  source 1..75: mol_type = other DNA
tgatacagatatcatatctggtgaagagagatttcgattaaattataatggtgttattgcactgttagttgaagg

SEQ ID NO: 233976 - DNA, 75 bp, synthetic construct
  source 1..75: mol_type = other DNA
tggatggttttctgaaaggtaaatgcatcccacgagatctaaaggttaacgaaacaaacgctgaatatctggtgc

SEQ ID NO: 233977 - DNA, 75 bp, synthetic construct
  source 1..75: mol_type = other DNA
actattgccgcatcagcatccggctttaatgatggaagtaccacgctgacaataccagcatcaacgacatacctt

SEQ ID NO: 233978 - DNA, 75 bp, synthetic construct
  source 1..75: mol_type = other DNA
gccaagcagacttctggacagttttgtttaacggagtaacagagatcgtaaaaatgatcttttctataatcatgg

SEQ ID NO: 233979 - DNA, 75 bp, synthetic construct
  source 1..75: mol_type = other DNA
ccagagtcattgccagagatttatttacatagagtcagttacccgcttcgcgacctctttctgcgctatctccgg

SEQ ID NO: 233980 - DNA, 75 bp, synthetic construct
  source 1..75: mol_type = other DNA
ccagaaaagttgctgcaaattgtccgcgaggcggtaggcagctcggcacttttcgccgcccgttttcgcgaatgc

SEQ ID NO: 233981 - DNA, 75 bp, synthetic construct
  source 1..75: mol_type = other DNA
tgaggatgttgctgatgcagcggcttatgaagaatgcgtaaaaagagcggaatatttcgccgcccagcttcgcaa

SEQ ID NO: 233982 - DNA, 75 bp, synthetic construct
  source 1..75: mol_type = other DNA
tatattaactggatgcgtgagtaccgatcaacaaaaaataaagacgtcattgcaattgatggaaaaacgctccgg

SEQ ID NO: 233983 - DNA, 75 bp, synthetic construct
  source 1..75: mol_type = other DNA
agagtttagaccgtctgtcacgtcaggatattgatattgcttctgagctattacgccgtatcttaagggctggtg

SEQ ID NO: 233984 - DNA, 75 bp, synthetic construct
  source 1..75: mol_type = other DNA
tgaaaggtggcttaggtgactttttaaccgctatcgagaaagggcttgttaaagctggtgatacgctcttgatag

SEQ ID NO: 233985 - DNA, 75 bp, synthetic construct
  source 1..75: mol_type = other DNA
acttaatgatgaagtaatatatatcaatggtgatgggagtactagtcgggatttttgttatatcgataatgcggt

SEQ ID NO: 233986 - DNA, 75 bp, synthetic construct
  source 1..75: mol_type = other DNA
atacattctgcatcaggcagctttgggatctgttcctcgatcaatcaaggatccgataggaactaatgaaaacaa

SEQ ID NO: 233987 - DNA, 75 bp, synthetic construct
  source 1..75: mol_type = other DNA
aaaccggcaagagacatgagcaggattatcgtcttatctggaaatcggagggcaccggtgatgagtctggcagat

SEQ ID NO: 233988 - DNA, 75 bp, synthetic construct
  source 1..75: mol_type = other DNA
gccgatggaactctactacaaaccggcgaacaagttcgtggccgggtttatcggctcgccgaagatgaatttcct

SEQ ID NO: 233989 - DNA, 75 bp, synthetic construct
  source 1..75: mol_type = other DNA
gtcgttgaaaagggtggcgagtggctaataaaaaataacgattcctcaattgaatttcaaattggtaatttatca

SEQ ID NO: 233990 - DNA, 75 bp, synthetic construct
  source 1..75: mol_type = other DNA
taataaaaaataatgattcctcaattgaatttcaaattggcaatcaaggaactggggaagcgactattcgcgagg

SEQ ID NO: 233991 - DNA, 75 bp, synthetic construct
  source 1..75: mol_type = other DNA
ctcatcctgagtactaccttgaccaagatttatcttttcgtgatttaggtgtgagtggattcactggtaagcact

SEQ ID NO: 233992 - DNA, 75 bp, synthetic construct
  source 1..75: mol_type = other DNA
tgccgcgctgggctagtcgtctaactctggagattaccggagtgcgagttgagcgattgcaggccattacccttg

SEQ ID NO: 233993 - DNA, 75 bp, synthetic construct
  source 1..75: mol_type = other DNA
caccacggtatccgtgcagtactacacagcggtgccaccgatacttgagcgcacgaactgcctggcgacgttgcc

SEQ ID NO: 233994 - DNA, 75 bp, synthetic construct
  source 1..75: mol_type = other DNA
ggacatcagcgaaatcttgatgaagtccagcaaaacgttacacctgaagcatggcaaaaatttacaatgatcgaa

SEQ ID NO: 233995 - DNA, 75 bp, synthetic construct
  source 1..75: mol_type = other DNA
ggttttaattctgatgttgttgaagcagcattggctcacattgataaaaatgaagtacgaagagcgtataatcgc

SEQ ID NO: 233996 - DNA, 75 bp, synthetic construct
  source 1..75: mol_type = other DNA
tctggtgataaagaacttgatgcgttgctaccgaaaaaaatggcagcagtgtatcagttagacttatctgatgcg

SEQ ID NO: 233997 - DNA, 75 bp, synthetic construct
  source 1..75: mol_type = other DNA
ggacttagccgcagcggcaaaacagcgtttatcaccgcgatggttaatcagttgctcaatattcatgccggagca

SEQ ID NO: 233998 - DNA, 75 bp, synthetic construct
  source 1..75: mol_type = other DNA
tgtggcgtaagcactgccgatgtagtagaggtgcaatcggatacaccggataaagcaatctacgaagcgaattga

SEQ ID NO: 233999 - DNA, 75 bp, synthetic construct
  source 1..75: mol_type = other DNA
cgccagagcgggtcagtaagtcccctttgacatcggtggagcaaacagttacggagccagactcttcctggctgg

SEQ ID NO: 234000 - DNA, 75 bp, synthetic construct
  source 1..75: mol_type = other DNA
ataattttgcccgtaatgccgaggggcaggataacacaagaaatatccttgatcctaagacatttttggaatttt

SEQ ID NO: 234001 - DNA, 75 bp, synthetic construct
  source 1..75: mol_type = other DNA
acagtggtacagactacttctattcccgagggcatagagagagtaaacttaaatttggtatcagtgctagtggta

SEQ ID NO: 234002 - DNA, 75 bp, synthetic construct
  source 1..75: mol_type = other DNA
ttcaacattagttgttatctgtttagaaagtgcaggttcgttagttgagcttggattatttgttaataggaagtc

SEQ ID NO: 234003 - DNA, 75 bp, synthetic construct
  source 1..75: mol_type = other DNA
tatataatgttgcagttggtgatagaacaacgttaaatgaattatctggttacatttatgatgagcttaatttaa

SEQ ID NO: 234004 - DNA, 75 bp, synthetic construct
  source 1..75: mol_type = other DNA
cagccaaactgcgaatgctgctttgaagagaattgggtatgaaggtaggttagtagctcatgggttgcgttcgat

SEQ ID NO: 234005 - DNA, 75 bp, synthetic construct
  source 1..75: mol_type = other DNA
aaatgatcatgctgtaaagaatttctcaggaaaagaaagtgcatgggggccttctgtaattgaaaaattattagc

SEQ ID NO: 234006 - DNA, 75 bp, synthetic construct
  source 1..75: mol_type = other DNA
cgctatcactcattcaaaaaatggatgataatggccgttttagttctaaatctgaattatgtatatacggtaaaa

SEQ ID NO: 234007 - DNA, 75 bp, synthetic construct
  source 1..75: mol_type = other DNA
tcgtttttggtaaccgataatcagggcgatcaacgcggtattctttccgccaacgatatcaccgatgacaccacg

SEQ ID NO: 234008 - DNA, 75 bp, synthetic construct
  source 1..75: mol_type = other DNA
attagcggcattgttgttgtcgtgcttggtatgtggctgctgtcatcctcaccggtgagcatgggcattctggtt

SEQ ID NO: 234009 - DNA, 75 bp, synthetic construct
  source 1..75: mol_type = other DNA
atcctaattttaatagagttgggattgttaatttgttaaatgagtcaaaatggatgtttcttcaattaactggtg

SEQ ID NO: 234010 - DNA, 75 bp, synthetic construct
  source 1..75: mol_type = other DNA
ataaattaatgcaaattttagctataagttacattttattgtcaatgatgacatcttttcatttcttgttattag

SEQ ID NO: 234011 - DNA, 75 bp, synthetic construct
  source 1..75: mol_type = other DNA
cgtgctcggattccttggactgttgttcggtatgaaagatcccgtacgtagcgtgcccaatgaacatcgtggctc

SEQ ID NO: 234012 - DNA, 75 bp, synthetic construct
  source 1..75: mol_type = other DNA
aaaacccgatcgatcagctgaaggttgtcggtcgtccctatgaccgcatcgacggaccgctgaaaactaccggca

SEQ ID NO: 234013 - DNA, 75 bp, synthetic construct
  source 1..75: mol_type = other DNA
tctgtttatgctggtttacggtattacagctgcggtaggtaatattcttggtgggaaacttaccgacagcatggg

SEQ ID NO: 234014 - DNA, 75 bp, synthetic construct
  source 1..75: mol_type = other DNA
aaatatttctatatgggaagcgtgtttgttacggattaattcataaagaaatgcatttgggtgttagcttgaaga

SEQ ID NO: 234015 - DNA, 75 bp, synthetic construct
  source 1..75: mol_type = other DNA
ataaaaaaacctgctggtgaggcaggttcttttatttactacagtgacgctaacttgctgattgtgcaacatttc

SEQ ID NO: 234016 - DNA, 75 bp, synthetic construct
  source 1..75: mol_type = other DNA
tgtggtaactgtatgacgcgcctgcgtctgggtgtacatgacagttcactggttgatcccaatatcaaaacgctg

SEQ ID NO: 234017 - DNA, 75 bp, synthetic construct
  source 1..75: mol_type = other DNA
gatgtcagcgaagaatggtcacaggttgactacttatccggtcccaccttgcaggtcttacgcccccgccagtcg

SEQ ID NO: 234018 - DNA, 75 bp, synthetic construct
  source 1..75: mol_type = other DNA
tggcactggttgccaccactctgtttctgagcgcctgcgatgacagaagtgatgaactgaaggccatcagcaaat

SEQ ID NO: 234019 - DNA, 75 bp, synthetic construct
  source 1..75: mol_type = other DNA
atgttattgtgccaggaggtgcaggataaggggctgtatcgatatgctttggcaattgcgcgtgccgcagaggga

SEQ ID NO: 234020 - DNA, 75 bp, synthetic construct
  source 1..75: mol_type = other DNA
tatggttttgctgacgtgctgtctttagatcacgtcggactcgaccccagccgtattgctgctcaggtggtgacg

SEQ ID NO: 234021 - DNA, 75 bp, synthetic construct
  source 1..75: mol_type = other DNA
cggcgtggacgttcattctgacagctataactctgtgttgggtgaggccggtacgcgcgtgggttatgacttcgc

SEQ ID NO: 234022 - DNA, 75 bp, synthetic construct
  source 1..75: mol_type = other DNA
aaaatgatattgcaatttattatttgtttcgtcagatgagtttgtgcatgttaatattgctagcgctggtgaata

SEQ ID NO: 234023 - DNA, 75 bp, synthetic construct
  source 1..75: mol_type = other DNA
gagcctgtggcgtatatggttggcacgcaacttctggaaaacatgacacaggcgattgcgtacaaagcggataca

SEQ ID NO: 234024 - DNA, 75 bp, synthetic construct
  source 1..75: mol_type = other DNA
gcagtaatgtgaattattcattatcacttagccgcgattttgatatcgggccattaaaaaacgtctccacttctc

SEQ ID NO: 234025 - DNA, 75 bp, synthetic construct
  source 1..75: mol_type = other DNA
acaatactggctatagctactacaatgattcagatgaagactttagaaaactatttaatttactcaggtctgaac

SEQ ID NO: 234026 - DNA, 75 bp, synthetic construct
  source 1..75: mol_type = other DNA
gaccgaaagcaacgtaccacggcaatatcgataagcccgcagtcacctgtacgcctaatccgcaacgtaatgaca

SEQ ID NO: 234027 - DNA, 75 bp, synthetic construct
  source 1..75: mol_type = other DNA
tgcaaattcaaaatacattgaaaaaaaaataagtgaaagatgcatgactttaaatcattatgatccggagaatga

SEQ ID NO: 234028 - DNA, 75 bp, synthetic construct
  source 1..75: mol_type = other DNA
aaaaaaaggaaaggcaaaatcttaatatatcagctgtattattcaatttgtttatttgtaatatctttagtacct

SEQ ID NO: 234029 - DNA, 75 bp, synthetic construct
  source 1..75: mol_type = other DNA
acctaaagaaattgaaagcggtattatgcgtagatgtaaaacactcaaccactacgaccctcaaaatggggcgat

SEQ ID NO: 234030 - DNA, 75 bp, synthetic construct
  source 1..75: mol_type = other DNA
tctgtgcccgctgcgatggaaatggatgatgactttgacagcgcgtttgaacacggaaaagctgtcggctggaac

SEQ ID NO: 234031 - DNA, 75 bp, synthetic construct
  source 1..75: mol_type = other DNA
ttcggcgcggagatgcaacgattaagcctggtaatgatattgagcaggcaactcactggatgccgctaccggaac

SEQ ID NO: 234032 - DNA, 75 bp, synthetic construct
  source 1..75: mol_type = other DNA
agccacatgtggtacagcgaaatcagtgaatacctcatcagcaagggtaaaacgttcgccactccagcttgggta

SEQ ID NO: 234033 - DNA, 75 bp, synthetic construct
  source 1..75: mol_type = other DNA
gccacgaacgcttcagaggcggccacctcagcccgcgatgcggaggcctcaaaagacgcggcaaaatcatcagaa

SEQ ID NO: 234034 - DNA, 75 bp, synthetic construct
  source 1..75: mol_type = other DNA
gccacgaaagcttcagaggcggcgacctcagcccgagatgcggaggcctcaaaagacgcggcaaaatcatcagaa

SEQ ID NO: 234035 - DNA, 75 bp, synthetic construct
  source 1..75: mol_type = other DNA
gccacgaaagcttcagaggcggctacctcagcccgtgatgcggaggcctcaaaagacgcggcaaaatcatcagaa

SEQ ID NO: 234036 - DNA, 75 bp, synthetic construct
  source 1..75: mol_type = other DNA
gtgcagcttcctcggcaacggcggcagtaaattccgctacggcggcaaaaacgtccgagacgaacgccaggtcat

SEQ ID NO: 234037 - DNA, 75 bp, synthetic construct
  source 1..75: mol_type = other DNA
gccacgaaggcttcagaggcggcaacctcagcccgagatgcggaggcctcaaaagacgcggcaaaatcatcagaa

SEQ ID NO: 234038 - DNA, 75 bp, synthetic construct
  source 1..75: mol_type = other DNA
gccacgaaagcttcagaggcggcaacctcagcccgggatgcggaggcctcaaaagacgcggcaaaatcatcagaa

SEQ ID NO: 234039 - DNA, 75 bp, synthetic construct
  source 1..75: mol_type = other DNA
gtgcagcttcctcggcaacggcggcaggaaattccgccacggcggcaaaaacgtccgagacgaaggccaggtcat

SEQ ID NO: 234040 - DNA, 75 bp, synthetic construct
  source 1..75: mol_type = other DNA
gctgccttattagaaccgaatgacacgttaaaggtagtcgatcatggttcggatgataccgttaatgccctgaat

SEQ ID NO: 234041 - DNA, 75 bp, synthetic construct
  source 1..75: mol_type = other DNA
atgacaaaagagcagatgaccgaacgtttgcaggaactggcagtgatcctggggcgtgaagcagatatttcaggt

SEQ ID NO: 234042 - DNA, 75 bp, synthetic construct
  source 1..75: mol_type = other DNA
ctgaaggtactgatattatcatgtactcaccacatggtggagataatcagaatttcatttatgaaaatggaaata

SEQ ID NO: 234043 - DNA, 75 bp, synthetic construct
  source 1..75: mol_type = other DNA
tgttcaaaagcgaaagcgctttcgcattttctcacctaaagcggcaaacctcctctgtcttagctggaaaaacga

SEQ ID NO: 234044 - DNA, 75 bp, synthetic construct
  source 1..75: mol_type = other DNA
atggctaagagagcggatgcactcactaaagcggacagcgctgtccgccttcaatcagcaaataaacaagatggt

SEQ ID NO: 234045 - DNA, 75 bp, synthetic construct
  source 1..75: mol_type = other DNA
ttgctgaactgaccggcggtgacagcctgaaatccaacatccagctggtgttcaacaacgccattctggcgagcg

SEQ ID NO: 234046 - DNA, 75 bp, synthetic construct
  source 1..75: mol_type = other DNA
atctttctccattaaacaaagagccttggtattacaaacaggtttgatttatatcttatcaagcaataaaaatga

SEQ ID NO: 234047 - DNA, 75 bp, synthetic construct
  source 1..75: mol_type = other DNA
ttttaccggtgaaccggactcgcttgcgccgacattgttgaaattgactgacaccggtggcaacggcgggatggc

SEQ ID NO: 234048 - DNA, 75 bp, synthetic construct
  source 1..75: mol_type = other DNA
aatatcgatatcaccggttgtgccgctggtattactggcgcggacgtcctttttagcggcgaggctgacaccctt

SEQ ID NO: 234049 - DNA, 75 bp, synthetic construct
  source 1..75: mol_type = other DNA
tcagcgccgtgtgcgggctgtgccgtgcctccatcttagccgggctggcgttgatgcaagggtacgcttcgccgc

SEQ ID NO: 234050 - DNA, 75 bp, synthetic construct
  source 1..75: mol_type = other DNA
agccgtgcgcgtcgggctgcggctttccttgcgcccttgcatccctgcaggcccggcaaagatggaggcacggca

SEQ ID NO: 234051 - DNA, 75 bp, synthetic construct
  source 1..75: mol_type = other DNA
tatgtggcctcagcgtcgtgtgcgggctgtgccgtgcctccatcttagccgggctggcagggatgcaagggtacg

SEQ ID NO: 234052 - DNA, 75 bp, synthetic construct
  source 1..75: mol_type = other DNA
atcaacgcgacggaacacgcccaggcgcagatcatcagcggctccgccacgggtgcggcaaccggtagcaccgtg

SEQ ID NO: 234053 - DNA, 75 bp, synthetic construct
  source 1..75: mol_type = other DNA
acattaccgttagcggcgcgaacagtgccggaacgcaaaccagcattacccatccgctgacagttgatctcacca

SEQ ID NO: 234054 - DNA, 75 bp, synthetic construct
  source 1..75: mol_type = other DNA
aacgacggacgatattattaacgccgcagaagcaggcagcgcgcaaactatcagcggccaggtaaccggtgcggc

SEQ ID NO: 234055 - DNA, 75 bp, synthetic construct
  source 1..75: mol_type = other DNA
ggggaacgggccagagcggtggtgatggccgcccaggaaagcccacagggaatgctgcgcgtcagcgcgccggta

SEQ ID NO: 234056 - DNA, 75 bp, synthetic construct
  source 1..75: mol_type = other DNA
gccgtcgaatggcagcgctggaagagcgcctcggcgtgaggcttattcagcgaactacgcggcgtctggccctga

SEQ ID NO: 234057 - DNA, 75 bp, synthetic construct
  source 1..75: mol_type = other DNA
acgaagttagccgtaaagctgacattgctcattttcattcgttccagtgaactcagattcgcaagatggtcggaa

SEQ ID NO: 234058 - DNA, 75 bp, synthetic construct
  source 1..75: mol_type = other DNA
ctccggttttgccaacgggactatctggctgattggtatcgccatgtttatctcacgtgcggtgatcaaaactgg

SEQ ID NO: 234059 - DNA, 75 bp, synthetic construct
  source 1..75: mol_type = other DNA
ataaattcatttcactatataaacagggcagaccttttcagatgagtatggggcatttctctaagtatctcggta

SEQ ID NO: 234060 - DNA, 75 bp, synthetic construct
  source 1..75: mol_type = other DNA
aattacatacccaggctgatattttagttgccagttcgcagtggctggcccgccatccgcaggtgaaggccattg

SEQ ID NO: 234061 - DNA, 75 bp, synthetic construct
  source 1..75: mol_type = other DNA
accgtcacactcaacggtcataactacagcgctaccaccgacgcggcgggcaactggaccttaaccgtgccggtg

SEQ ID NO: 234062 - DNA, 75 bp, synthetic construct
  source 1..75: mol_type = other DNA
ggcacatggagccttggcgttccggcagcagacgtgggcaactggcctgcgggtacggtgaatatcacggtaagc

SEQ ID NO: 234063 - DNA, 75 bp, synthetic construct
  source 1..75: mol_type = other DNA
tgcaggccgatggtagctggagcgtgggcgtcacggcggcgcaggttagcgcctggcctgcggggacggttaata

SEQ ID NO: 234064 - DNA, 75 bp, synthetic construct
  source 1..75: mol_type = other DNA
agtactcaggtagacaacaacggtcactggagtgtctcgttacccacgcaaagtgcaggtgaacatacctggtca

SEQ ID NO: 234065 - DNA, 75 bp, synthetic construct
  source 1..75: mol_type = other DNA
cacggtttccgtgacgattggcacgaccacttacaccaccgtgctggacgccaacggcaactggagcatcggcgt

SEQ ID NO: 234066 - DNA, 75 bp, synthetic construct
  source 1..75: mol_type = other DNA
cgatgatgtgattaacagcattgagcacactcaggcgttggtgatcaccggtagcagtagcggactggcggcggg

SEQ ID NO: 234067 - DNA, 75 bp, synthetic construct
  source 1..75: mol_type = other DNA
gcggtggcgaccgacgatattatcaacgctgccgaagcgggcaatgcgcaaaccatcagcggccaggtaacgggc

SEQ ID NO: 234068 - DNA, 75 bp, synthetic construct
  source 1..75: mol_type = other DNA
tcgtctcgcgcctgaccggcatcccggtcaacgagttgacggtggaagagcgcgaaaagctgctgcacttggaac

SEQ ID NO: 234069 - DNA, 75 bp, synthetic construct
  source 1..75: mol_type = other DNA
gttgcaggaaggagtattaccgtaaatcagtctcagttagacaaacaagtacctaatatacaagatttagtacag

SEQ ID NO: 234070 - DNA, 75 bp, synthetic construct
  source 1..75: mol_type = other DNA
atgcagtggatgaaaattcttagacgtatttttttatggcttatccttttttggatttttgtgatttttattttt

SEQ ID NO: 234071 - DNA, 75 bp, synthetic construct
  source 1..75: mol_type = other DNA
cggttaacctgaacggtaaaaactacaccaccacgctggacgcttccggtaactggagcgtcggcattccggcgg

SEQ ID NO: 234072 - DNA, 75 bp, synthetic construct
  source 1..75: mol_type = other DNA
tgatgccaccgcgccgcttgtgaccatcaacactatcgccagcgacgatatccttaacgtgagcgaagcgggcgc

SEQ ID NO: 234073 - DNA, 75 bp, synthetic construct
  source 1..75: mol_type = other DNA
gccgatgccgtgcggttgtcgcgcgcgggcctgcgcgaaggcgacaagccggtggcgactttcctgttccttggg

SEQ ID NO: 234074 - DNA, 75 bp, synthetic construct
  source 1..75: mol_type = other DNA
gagggccgctttcctccgcgctgccactttggccgcaatagctgcgcctggcttttgtccgatgtgctctggtgg

SEQ ID NO: 234075 - DNA, 75 bp, synthetic construct
  source 1..75: mol_type = other DNA
atcccttaaccaatatatttaacagaaattatttttttaatgaactgacagttcaatcagcatcagccaaaaaaa

SEQ ID NO: 234076 - DNA, 75 bp, synthetic construct
  source 1..75: mol_type = other DNA
ccccgacggcccgtggcagcaattgtattcacgcttccctgccagtactggtccctggtgttccacaaccggtgg

SEQ ID NO: 234077 - DNA, 75 bp, synthetic construct
  source 1..75: mol_type = other DNA
atgttgtcttgtcgttgactctgcttaatgcacatgtcgggacggctggacctgagcaggtcagtatgcatattt

SEQ ID NO: 234078 - DNA, 75 bp, synthetic construct
  source 1..75: mol_type = other DNA
caacaccagaacaacgccgcaccattctcgcagaatatggcattaagtttgatcgccgtattcgtgaaagtgaat

SEQ ID NO: 234079 - DNA, 75 bp, synthetic construct
  source 1..75: mol_type = other DNA
ttgtttgtgcttttcgtcaacaaagccgatcttgctaccggtattgtcactatcaacatcactaagctggctgaa

SEQ ID NO: 234080 - DNA, 75 bp, synthetic construct
  source 1..75: mol_type = other DNA
cgccagtgccgtgccgccgctgtatgcgcaaatcgcccgccagcaacaggttccggcagaactgctctatgcggt

SEQ ID NO: 234081 - DNA, 75 bp, synthetic construct
  source 1..75: mol_type = other DNA
agtggcaaacatctcccgtggccgtggacgctcaatatcaaaggtaccggctaccgctacgccagccgggagcag

SEQ ID NO: 234082 - DNA, 75 bp, synthetic construct
  source 1..75: mol_type = other DNA
tttcaatttataatcttaaagataattatatattaagaaatttattgtttactgctgggttattaatgataattg

SEQ ID NO: 234083 - DNA, 75 bp, synthetic construct
  source 1..75: mol_type = other DNA
acaagccttaatatataataatataccatattataatgaaatatatggcaatagccaatttgcacatttgcaagg

SEQ ID NO: 234084 - DNA, 75 bp, synthetic construct
  source 1..75: mol_type = other DNA
tatggacaagctacgagccgagcaagaagaacgcctacgcgctattgaggacggcattctacaacccggtgaggc

SEQ ID NO: 234085 - DNA, 75 bp, synthetic construct
  source 1..75: mol_type = other DNA
aaggcgaacccggctggtaccaggttgcgctaagcgtgaggcctcattttaaatttatgggggcaaattttgagc

SEQ ID NO: 234086 - DNA, 75 bp, synthetic construct
  source 1..75: mol_type = other DNA
ttgatgaacccacacgcggcattgatgttggcgcaaaaacagatgtctatcagctggtgggaaaaatggcacaac

SEQ ID NO: 234087 - DNA, 75 bp, synthetic construct
  source 1..75: mol_type = other DNA
aaaaagagagcgccagtgtgaaagagatgatcctgcaactggcgatcaaagtcagcgatgccgaactccctatta

SEQ ID NO: 234088 - DNA, 75 bp, synthetic construct
  source 1..75: mol_type = other DNA
gtggtggcgttagataacgtgaattaccgagtctatcgcaataaagtaaatgtgcttattggtgaaaacggtgcg

SEQ ID NO: 234089 - DNA, 75 bp, synthetic construct
  source 1..75: mol_type = other DNA
aacacctcgatgagagaaagcttatgttgcagtggtgggctgattatcttgatgaaacaactaagagaagaattg

SEQ ID NO: 234090 - DNA, 75 bp, synthetic construct
  source 1..75: mol_type = other DNA
ttagtatccctgctagtaataccactaaagatccaggccttactaattctcagattatcaggatggctaacttgg

SEQ ID NO: 234091 - DNA, 75 bp, synthetic construct
  source 1..75: mol_type = other DNA
ggcgctatgtactggatgcactggcaaacgagcctgccgtaagcgatattttattacgtgattacagtgagttaa

SEQ ID NO: 234092 - DNA, 75 bp, synthetic construct
  source 1..75: mol_type = other DNA
cttgatgctaagggtaatcaggccacctggtcagcggaaggcgatgtctcttccagtgacgatctctatacctga

SEQ ID NO: 234093 - DNA, 75 bp, synthetic construct
  source 1..75: mol_type = other DNA
aagatgtattctcagcgtagggaggagttgaaaactattctgtcgacaggggcggattttgtaccagtggttggc

SEQ ID NO: 234094 - DNA, 75 bp, synthetic construct
  source 1..75: mol_type = other DNA
tggtaatgagatccgggtatgggataacgattatgataaccacccggataagacttctgtttccagcgccgtagc

SEQ ID NO: 234095 - DNA, 75 bp, synthetic construct
  source 1..75: mol_type = other DNA
atttttaatgatgtagatggtaaacaaaaagcaacttgcactatcagagtgttaatactaaaaacatttcacgat

SEQ ID NO: 234096 - DNA, 75 bp, synthetic construct
  source 1..75: mol_type = other DNA
cggcccttacggatgcccggaaaaccttagcgtacgattttttccgaattctgcgggctcccctatctcatctgc

SEQ ID NO: 234097 - DNA, 75 bp, synthetic construct
  source 1..75: mol_type = other DNA
gtcattatgagagctacaatttacacattgccgagttaaccaatgaaaatggtcaggtggtttggaaagcctcat

SEQ ID NO: 234098 - DNA, 75 bp, synthetic construct
  source 1..75: mol_type = other DNA
tgagcaatcatatccagctcaggagcatctccttttacaactttgtatgcgtgttaccaaaaaacttactgataa

SEQ ID NO: 234099 - DNA, 75 bp, synthetic construct
  source 1..75: mol_type = other DNA
gccggtgagaaagcgaagcgggacccggcagcactgaatcaggcccgcgcagagcttgaggcagcaggaaaaccg

SEQ ID NO: 234100 - DNA, 75 bp, synthetic construct
  source 1..75: mol_type = other DNA
caaagagattttgtcagagtatggtattcatgaacaggaaggttttgtagctccttcacaagaaccacaagatgt

SEQ ID NO: 234101 - DNA, 75 bp, synthetic construct
  source 1..75: mol_type = other DNA
tttgccggcaggggcgggtttgatgtcaccaccggacagcatacgcaactgaacggtgcggtgattgcgtccacg

SEQ ID NO: 234102 - DNA, 75 bp, synthetic construct
  source 1..75: mol_type = other DNA
gtttaaaaagttacaatcgattttataaggttgaagctattgtgtacatagaaggccgccttttagaacaacaaa

SEQ ID NO: 234103 - DNA, 75 bp, synthetic construct
  source 1..75: mol_type = other DNA
cgatgtctgatatcgtcaatgcagtgacccgagtgacagatattatggcagaaattgctgctgcatccgatgaac

SEQ ID NO: 234104 - DNA, 75 bp, synthetic construct
  source 1..75: mol_type = other DNA
tctaaggaaattggtgccatcattaatgttatcgatggtattgcgtttcagactaacattctcgcccttaacgcg

SEQ ID NO: 234105 - DNA, 75 bp, synthetic construct
  source 1..75: mol_type = other DNA
ggaatcagggctgtgctataaccggttccggtattacgagccggaaaccggaatgtacctggtgagtgatccgct

SEQ ID NO: 234106 - DNA, 75 bp, synthetic construct
  source 1..75: mol_type = other DNA
gcagtgatgaacgggattcggaaggggaacccttgcggcgcggcgatgtatacatcgctaacgtgccttactctt

SEQ ID NO: 234107 - DNA, 75 bp, synthetic construct
  source 1..75: mol_type = other DNA
cattgcagcgatattttattgtttcacttccatgataaaaatactctttgaatttatcacatggatatttagcat

SEQ ID NO: 234108 - DNA, 75 bp, synthetic construct
  source 1..75: mol_type = other DNA
tgcgcaagccaaaccgaaaggaatcaccgttcaggatgtgaagcatctggcgttgaaagagtgtttaacgtccca

SEQ ID NO: 234109 - DNA, 75 bp, synthetic construct
  source 1..75: mol_type = other DNA
caaacctgctgatgattgcaacatcggctattgcccccctgcaggatgccgttgatctggatatggcaacggaag

SEQ ID NO: 234110 - DNA, 75 bp, synthetic construct
  source 1..75: mol_type = other DNA
ggaaaggctgatgtatatcttcgttcagcaataggatcaggaaaaatagattatgttggaataagtagaaatgtg

SEQ ID NO: 234111 - DNA, 75 bp, synthetic construct
  source 1..75: mol_type = other DNA
agctcattattcaaagtattctcaccgcataatgatattaaaattaaaattgtaggttgcaaagaaaatgtatta

SEQ ID NO: 234112 - DNA, 75 bp, synthetic construct
  source 1..75: mol_type = other DNA
tgccctacaaggccatactttcgcttccaacgcccttggctggatactggatcgtggagaagaccccaactataa

SEQ ID NO: 234113 - DNA, 75 bp, synthetic construct
  source 1..75: mol_type = other DNA
gccagagctgcgccactgatgcagtcactgtatgactggatacagactcagatgaaaaccctgtcgcgtcactcg

SEQ ID NO: 234114 - DNA, 75 bp, synthetic construct
  source 1..75: mol_type = other DNA
atttttgtggagccggaggaaacagaccagacggttcagatgaggcgcttacggcgaaagcgttcgtgtacgccc

SEQ ID NO: 234115 - DNA, 75 bp, synthetic construct
  source 1..75: mol_type = other DNA
gaaatcctgatggtgggtgaacgcctttatactgacaacttcaaggtgatggagaccctgctggcggtggccttc

SEQ ID NO: 234116 - DNA, 75 bp, synthetic construct
  source 1..75: mol_type = other DNA
gtatgactgacctgcgcgaggttaacctgaaaaagctgacctttccggccagaacaaggctagactgcgccgtta

SEQ ID NO: 234117 - DNA, 75 bp, synthetic construct
  source 1..75: mol_type = other DNA
aaaaatatctttcaataatttttgatccagcgttctatataaatagaaatcggttgaatttgccttctgaactgt

SEQ ID NO: 234118 - DNA, 75 bp, synthetic construct
  source 1..75: mol_type = other DNA
agcccttgtaacaggacaacgtcgcgaagacataacgaatatgcggttcagtgatatttatgatgatcgtctcca

SEQ ID NO: 234119 - DNA, 75 bp, synthetic construct
  source 1..75: mol_type = other DNA
tgtgtgaatcaaaaaatgttaataatgttcctgggttgcttttagctctacaaaatggacatgataatgtaattg

SEQ ID NO: 234120 - DNA, 75 bp, synthetic construct
  source 1..75: mol_type = other DNA
tttgaagagttccgcaagcaggggatctttaaaaagcgcgacccacaagggcaccacgttgcttataaagctttc

SEQ ID NO: 234121 - DNA, 75 bp, synthetic construct
  source 1..75: mol_type = other DNA
cgccatgtgcttggcgtcatagcagactggccggtcaaccgggtcagcgaactgcttccgtggcgcatagcactg

SEQ ID NO: 234122 - DNA, 75 bp, synthetic construct
  source 1..75: mol_type = other DNA
gaatccagtaaacgagatgtgcggattgaaggcgcgggtatcttagggggtatgaactatcgggtcagcgaaggg

SEQ ID NO: 234123 - DNA, 75 bp, synthetic construct
  source 1..75: mol_type = other DNA
tgctggcggggatcctgttctgccaggcatcgtgggcgttttgtacatcttcggtcagtttctccatcagccccg

SEQ ID NO: 234124 - DNA, 75 bp, synthetic construct
  source 1..75: mol_type = other DNA
cacgccgcatccggcaatatgcaccgatgccggatgcctacatcaacgcccccattatcttcaactccagctcat

SEQ ID NO: 234125 - DNA, 75 bp, synthetic construct
  source 1..75: mol_type = other DNA
aaactgatgcagtggaaacggcaattccggacaacgaaaaaaccgaatgcaaagtggaagtcgaaccatctgtag

SEQ ID NO: 234126 - DNA, 75 bp, synthetic construct
  source 1..75: mol_type = other DNA
aaggagaacactgacggcaatcagcatcacgatagcgataatgaaactggcgagacggcagatcactcaattaag

SEQ ID NO: 234127 - DNA, 75 bp, synthetic construct
  source 1..75: mol_type = other DNA
accgggtactgccgcaccggttgcgctcactttcctgaatgccgccggaacgaaaaccggaaaagtcttcccgac

SEQ ID NO: 234128 - DNA, 75 bp, synthetic construct
  source 1..75: mol_type = other DNA
aaggcggggcaattaatgtgcgttattttatgccgcattcttgccatcgtgcgctggcgataaccggtgctattg

SEQ ID NO: 234129 - DNA, 75 bp, synthetic construct
  source 1..75: mol_type = other DNA
gaaaccacaaaaagtggtatgcaaacaaccgatctgtcgcgtttttcaaaaaaatatgcacaactaccaggaact

SEQ ID NO: 234130 - DNA, 75 bp, synthetic construct
  source 1..75: mol_type = other DNA
accctgaagataactggtgcgacattttacgtaaacgctttgtaaagcaacaccgcgaaatgtttgaggcagcga

SEQ ID NO: 234131 - DNA, 75 bp, synthetic construct
  source 1..75: mol_type = other DNA
tgactgaaggaacgcatgaaaaagttctgatgatagatggacgctatattgttatcggaagctggaactggttgt

SEQ ID NO: 234132 - DNA, 75 bp, synthetic construct
  source 1..75: mol_type = other DNA
attgttcttcatattgaacaggaaaaacgcaataactggtgcagggattttgtcaggtatgatgataacggagaa

SEQ ID NO: 234133 - DNA, 75 bp, synthetic construct
  source 1..75: mol_type = other DNA
aagaaatgaattgtatattcatttttttaggttggtaagtgagttatctccaatttgttttttggcagagaatgt

SEQ ID NO: 234134 - DNA, 75 bp, synthetic construct
  source 1..75: mol_type = other DNA
taaagcatatatgcaaagaattgcaagatgagaatatagcgatttttgctggggcaggaatgtcagcaggcgcag

SEQ ID NO: 234135 - DNA, 75 bp, synthetic construct
  source 1..75: mol_type = other DNA
accgcagatgaacgtctgaaagacatttttgccgaagatgcttcctgtatatcaggaaaaattacgaaacatcat

SEQ ID NO: 234136 - DNA, 75 bp, synthetic construct
  source 1..75: mol_type = other DNA
ggggcggcatcttcaggtattgtcacaggttcagtgggaagaacagaccggattgctgcgttactatgataatcg

SEQ ID NO: 234137 - DNA, 75 bp, synthetic construct
  source 1..75: mol_type = other DNA
gggagatgctggaaacacacgcgttacagcactttctgaatttgccagatgatgattcacgctggctacaggcaa

SEQ ID NO: 234138 - DNA, 75 bp, synthetic construct
  source 1..75: mol_type = other DNA
caccaccgcttacacccctgccgggcagttacagagccagcacctgaacagcctgcagtatgaccgcgattacac

SEQ ID NO: 234139 - DNA, 75 bp, synthetic construct
  source 1..75: mol_type = other DNA
ttcgtgatgtgactccattacccgtaacagcgctggtttattctcattaccatgtggatcacattggcgatagtc

SEQ ID NO: 234140 - DNA, 75 bp, synthetic construct
  source 1..75: mol_type = other DNA
ttagcttctgtgttaatggctttggttgcagagttagaaccagaggaaatccagagggcattaaagctacttagt

SEQ ID NO: 234141 - DNA, 75 bp, synthetic construct
  source 1..75: mol_type = other DNA
ctgcgcgtgttcttgcagtggatttgttccctgaccagcttaccgtgacccgttcacagccgcttatgaacgctt

SEQ ID NO: 234142 - DNA, 75 bp, synthetic construct
  source 1..75: mol_type = other DNA
atccttgaaaaagaaacgctggcccccttcctttcatggctggaccctgcgcgtgttcttgcagtggatttgttc

SEQ ID NO: 234143 - DNA, 75 bp, synthetic construct
  source 1..75: mol_type = other DNA
atgactaatccaatcaatatgaataatttttctcaaagtttaaatataacaaccgcaacgggtgatgaagtcgtt

SEQ ID NO: 234144 - DNA, 75 bp, synthetic construct
  source 1..75: mol_type = other DNA
ggaaatttgtttgactatgggccggaacccatagaattgatgaaggcgataaacagtggctttttcgatggacgt

SEQ ID NO: 234145 - DNA, 75 bp, synthetic construct
  source 1..75: mol_type = other DNA
gatacgccgcgtcttactttgttgatatcccctcttacattcgacctgctggggcggcatcttcaggtattgtca

SEQ ID NO: 234146 - DNA, 75 bp, synthetic construct
  source 1..75: mol_type = other DNA
tcaacgccagtttcttaatgatcttcgggatacgacaattaaagtcagaaaagaagaaagttttggtaaatttat

SEQ ID NO: 234147 - DNA, 75 bp, synthetic construct
  source 1..75: mol_type = other DNA
atttgcagttatttctgttattttttatggtattaacataagatatgtgccgttatatagtgtcatagcttttgt

SEQ ID NO: 234148 - DNA, 75 bp, synthetic construct
  source 1..75: mol_type = other DNA
gaaaaactggcttgaaaaaaataaaaaatttactctatcaacaatgattatttttttgatcggaaatatcaaagc

SEQ ID NO: 234149 - DNA, 75 bp, synthetic construct
  source 1..75: mol_type = other DNA
gtggcggagcaaagagcctccgaagccaaagcggccgcagatgcgaaaacaaaagttttagccgaaacggcacaa

SEQ ID NO: 234150 - DNA, 75 bp, synthetic construct
  source 1..75: mol_type = other DNA
agtccatatcaccccgggtattatttatgacgatttgcgcaagggcgaggatatcggcatggtcaaatctgaccg

SEQ ID NO: 234151 - DNA, 75 bp, synthetic construct
  source 1..75: mol_type = other DNA
catttagtcttgacgttgacaccggcagttatgcgaatgtgcgccgttttctcaatcaggggcagctacctccgc

SEQ ID NO: 234152 - DNA, 75 bp, synthetic construct
  source 1..75: mol_type = other DNA
atgttttatcccgcctatatccatagcgatcccgacggtagcgccagcggctttttccctgatgttccaggctgt

SEQ ID NO: 234153 - DNA, 75 bp, synthetic construct
  source 1..75: mol_type = other DNA
ctttttccctgatgttccaggctgttattttgctggtgatacacttgatgacgcattccaggatgcgcgaagcgc

SEQ ID NO: 234154 - DNA, 75 bp, synthetic construct
  source 1..75: mol_type = other DNA
tattcttaacaactggggacgacccgtagggtatcgggtttataaataccaccctgcaaatatgcgcggattcag

SEQ ID NO: 234155 - DNA, 75 bp, synthetic construct
  source 1..75: mol_type = other DNA
cattagcatcagatgaaaataataaagattcggcaaaaaaagtgttgttaacgctttgggattatatgtcgacgc

SEQ ID NO: 234156 - DNA, 75 bp, synthetic construct
  source 1..75: mol_type = other DNA
aatccagaaaagtatccgaattatccaatatatatacacgcagataaattaaaaaatgagataaagagtagttat

SEQ ID NO: 234157 - DNA, 75 bp, synthetic construct
  source 1..75: mol_type = other DNA
caatttaccccagtacaattgacctttttttgggattatttttatttatcaatagttgctcagttcgtcagacga

SEQ ID NO: 234158 - DNA, 75 bp, synthetic construct
  source 1..75: mol_type = other DNA
gaccgtgttatgcggtctggctgtcttcgtttgtcactgctcagccccaaatcattgctgcccaacgtagcaaca

SEQ ID NO: 234159 - DNA, 75 bp, synthetic construct
  source 1..75: mol_type = other DNA
atgccagtgaaacccagccgctgggctatgcctccggggcttatgcatggcagttgactgacaacgctaaattta

SEQ ID NO: 234160 - DNA, 75 bp, synthetic construct
  source 1..75: mol_type = other DNA
gcaaggccgaaattgatgaaaaccgcaagctggacctggtatttgataccgatccggccagtgataaaggaggca

SEQ ID NO: 234161 - DNA, 75 bp, synthetic construct
  source 1..75: mol_type = other DNA
tgaccatgccattcctcgacatgggatggtttgatggacgtctctggtgtgccagtgattatggcatctgggtgc

SEQ ID NO: 234162 - DNA, 75 bp, synthetic construct
  source 1..75: mol_type = other DNA
gcccgctcaggtttcgcggcctcaccctgcaactcccgccagccgtgtgcgtcaggctgcggcttcccttgcgcc

SEQ ID NO: 234163 - DNA, 75 bp, synthetic construct
  source 1..75: mol_type = other DNA
gccatcggcgaccagtgggttgtcacctctggcttgcaggctggcgatcgggtgatcgtttccggtttgcaacgc

SEQ ID NO: 234164 - DNA, 75 bp, synthetic construct
  source 1..75: mol_type = other DNA
ctggcaggcgaattattttttgataagaaaaacgcaggtaaactattgttctggacaaataagtctggtcactat

SEQ ID NO: 234165 - DNA, 75 bp, synthetic construct
  source 1..75: mol_type = other DNA
tgtgttaacgaactgaaatatggtttgtcgagtaataatgaatatgacctgtttaaaaatagagaaacctcactg

SEQ ID NO: 234166 - DNA, 66 bp, synthetic construct
  source 1..66: mol_type = other DNA
ttaaatggagagccggatgcgctgaaaggtgcacgtccggttcggggaggagaggcagggaaatag

SEQ ID NO: 234167 - DNA, 75 bp, synthetic construct
  source 1..75: mol_type = other DNA
cgccggaagccggggaagctattccagtattgcccgtgactacaatggcacatacagcgcccagcgccaggaact

SEQ ID NO: 234168 - DNA, 75 bp, synthetic construct
  source 1..75: mol_type = other DNA
ggctggcgctgcgttccgcactgcgtgatggtgaaatttttacccagcttgtgagagggccagttgctggtctga

SEQ ID NO: 234169 - DNA, 75 bp, synthetic construct
  source 1..75: mol_type = other DNA
cgccgggagtcgcggcagctattccagtattgcccgtgactataacggcacctacagcgcacaacgtcaggaact

SEQ ID NO: 234170 - DNA, 75 bp, synthetic construct
  source 1..75: mol_type = other DNA
ggattttacagttgatcatgaacttggtggtatggatgcaaatacattttcccttgatttctcgtggagagcatg

SEQ ID NO: 234171 - DNA, 75 bp, synthetic construct
  source 1..75: mol_type = other DNA
aaccgttgccgccgcggcgatggatgcattacaggtagacgaatggtactcccgcgtacgccgtgccgcaccgtg

SEQ ID NO: 234172 - DNA, 75 bp, synthetic construct
  source 1..75: mol_type = other DNA
aagttgagtctaacaactaatcaatcagcctttaaagtggagctgatggatttgatccgctatctttggatgtgt

SEQ ID NO: 234173 - DNA, 75 bp, synthetic construct
  source 1..75: mol_type = other DNA
tgtgattggctacaactcatcaagtcttgtgatgaaattaaaaaaatatttgctatgtaagcctactactttttt

SEQ ID NO: 234174 - DNA, 75 bp, synthetic construct
  source 1..75: mol_type = other DNA
tgctttgctttatttttcgtaataacataacattaaatgattctttgccacgcgcactaataaaatgttgcatcg

SEQ ID NO: 234175 - DNA, 75 bp, synthetic construct
  source 1..75: mol_type = other DNA
cggaagaactgattaaagcagtgcgcttttatgaacaggtaaagcgtgagaatccatctgttgaaaccggagcat

SEQ ID NO: 234176 - DNA, 75 bp, synthetic construct
  source 1..75: mol_type = other DNA
gaaattaagccacaaaacaaaacgatagatgcgcatcttgcacagttaatttcatctaatttatccccacaggta

SEQ ID NO: 234177 - DNA, 75 bp, synthetic construct
  source 1..75: mol_type = other DNA
ccagacccgctttgatttctactggcctgcactggctcacctgggcgaacaggctatccttaacaaggagattta

SEQ ID NO: 234178 - DNA, 75 bp, synthetic construct
  source 1..75: mol_type = other DNA
gtttctctcattccttcgttgagcattgttttgtgattggtcttgtcagcgttcgtgccgacttgacctatcagc

SEQ ID NO: 234179 - DNA, 75 bp, synthetic construct
  source 1..75: mol_type = other DNA
agagaacttattatgtagaattacagataaaatcatatgcgtaagtaaatatgagtatgaacaagggctattggc

SEQ ID NO: 234180 - DNA, 75 bp, synthetic construct
  source 1..75: mol_type = other DNA
aaatccgccagtcgaaaccggagcatggagagacgctgttgactgggtgctcaaagaggcttgccaggctgtaaa

SEQ ID NO: 234181 - DNA, 75 bp, synthetic construct
  source 1..75: mol_type = other DNA
actttcgcaggtgctgatggcatcaacctatccgacaaacgttgctcaagcagtgcaatggtcgcacgataatcc

SEQ ID NO: 234182 - DNA, 75 bp, synthetic construct
  source 1..75: mol_type = other DNA
gctggaagcagatccagttgcttatattttcaaacatccggccgggaaattattctgggctttaacggatgaaag

SEQ ID NO: 234183 - DNA, 75 bp, synthetic construct
  source 1..75: mol_type = other DNA
atagttggataagctgtagtgagcgaatgccggataccaaaacagccgttcttgttgccgtggagtttgacagga

SEQ ID NO: 234184 - DNA, 75 bp, synthetic construct
  source 1..75: mol_type = other DNA
tattcgagcgatatggaatagccccaaacgatagctctaccacaattcaggcactgcgaatcgcgctggatggca

SEQ ID NO: 234185 - DNA, 75 bp, synthetic construct
  source 1..75: mol_type = other DNA
tgcagggcgtatcagagtcatttattaaagctttgcaacatactcagactaagcatgcggaaattataaaaaaac

SEQ ID NO: 234186 - DNA, 75 bp, synthetic construct
  source 1..75: mol_type = other DNA
gtgctgccagcgcagcatctgcccaaccgcagcgacacgccggtgatcaaaatcagcgccaaatggctgagagaa

SEQ ID NO: 234187 - DNA, 75 bp, synthetic construct
  source 1..75: mol_type = other DNA
ggtaggcactgttttaggcgtggcgctgtttcgcggcgtaccggttggcccgcttattgccgcgggtctggtttc

SEQ ID NO: 234188 - DNA, 75 bp, synthetic construct
  source 1..75: mol_type = other DNA
ggtgggcacggttttaggcgtggcgctttttcgcggtgtgccagtcggtccgcttattgccgccggtctggtatc

SEQ ID NO: 234189 - DNA, 75 bp, synthetic construct
  source 1..75: mol_type = other DNA
tttttttttccatcgagagtaaaaaaagaacctaaagcttatttaaatggcgacgctaacaaaattaaaaaaatt

SEQ ID NO: 234190 - DNA, 75 bp, synthetic construct
  source 1..75: mol_type = other DNA
tcactttacctgggaactctgatgcaggtgtgaaagatgccattacttatgccgaagatgttttttttaatacta

SEQ ID NO: 234191 - DNA, 75 bp, synthetic construct
  source 1..75: mol_type = other DNA
gttcggcagataacattggtggtgtgtattacagaccgcttcagaaactgattaatggcacctggtataacgtgg

SEQ ID NO: 234192 - DNA, 75 bp, synthetic construct
  source 1..75: mol_type = other DNA
gtggcggagcaaagagccgccgccgctaaagccgctgcagatgcgaaagcaaaaaccttagcccagcatgaagcg

SEQ ID NO: 234193 - DNA, 75 bp, synthetic construct
  source 1..75: mol_type = other DNA
tgatgaggctcgccaagctttaacgaaggtagccaatacggcaattgctcttcagggtgtttctgaatcgtttat

SEQ ID NO: 234194 - DNA, 75 bp, synthetic construct
  source 1..75: mol_type = other DNA
gaggtaaaaacatctgcgaaaacaatagacacgcatcttgcgcaattaattgcatcgaatttgtcaccacagata

SEQ ID NO: 234195 - DNA, 75 bp, synthetic construct
  source 1..75: mol_type = other DNA
ggtaatggtttcctggcttggcgggcgcggcgtgaccttaatgggtaaccaaccgcaactggtcgccggattgtt

SEQ ID NO: 234196 - DNA, 75 bp, synthetic construct
  source 1..75: mol_type = other DNA
cgcgacttagtaaaagctggcgctcttattctggcagaaattgaacgtattgaccgcgccgctggcattggcgtg

SEQ ID NO: 234197 - DNA, 75 bp, synthetic construct
  source 1..75: mol_type = other DNA
cggatggatttctgaaaggtaaatgcatcccacgagatttgaaggttaacgaaacaaacgctgaatatcttgtcc

SEQ ID NO: 234198 - DNA, 75 bp, synthetic construct
  source 1..75: mol_type = other DNA
gcttagcggcgatctgtttagcaggcactggggtgatgatggcgagtggatgcttgggattgttggtggctacag

SEQ ID NO: 234199 - DNA, 75 bp, synthetic construct
  source 1..75: mol_type = other DNA
gatatccatctatgaggaaattggtggctttggtattaccgcgaagcagttcacggaagatctgaaagtccttgg

SEQ ID NO: 234200 - DNA, 75 bp, synthetic construct
  source 1..75: mol_type = other DNA
aggctacatgtctgcagcatttgtggaatatcgaagggaagatgactttttaatgttacttgcaaatttgatggg

SEQ ID NO: 234201 - DNA, 75 bp, synthetic construct
  source 1..75: mol_type = other DNA
tcaactaagaacactaacaaagtccaacaattaggatttaataataaacagttagattcagttttatttttagat

SEQ ID NO: 234202 - DNA, 75 bp, synthetic construct
  source 1..75: mol_type = other DNA
cccgctttgatcacatcatttttgatactgccccaactggccacactattcgccttcttcagcttcccggagcct

SEQ ID NO: 234203 - DNA, 75 bp, synthetic construct
  source 1..75: mol_type = other DNA
gctgagacgacgccggtactggaagcagcgaacctgcaacaggatttacgccgtgccggaattaccccctgggcg

SEQ ID NO: 234204 - DNA, 75 bp, synthetic construct
  source 1..75: mol_type = other DNA
tcgctggcaaaacgcggtcataaagtccatctgacgacgtccgatccggcagcacatctgtcttatacgctggat

SEQ ID NO: 234205 - DNA, 75 bp, synthetic construct
  source 1..75: mol_type = other DNA
gctgtacttttagttttgtcggacgtaattattaatggggggttttcgcaagctctaatacaaaaaaaagataga

SEQ ID NO: 234206 - DNA, 75 bp, synthetic construct
  source 1..75: mol_type = other DNA
tcaggggagaaggcgctgagctgaggactgatgactggataagtatccggggaggaaaaggaatatttatcagtg

SEQ ID NO: 234207 - DNA, 75 bp, synthetic construct
  source 1..75: mol_type = other DNA
gtatgggatttgcccccctctctatcgatccatccggaatgttgtcctcttctcgctcattacagaccttctgtt

SEQ ID NO: 234208 - DNA, 75 bp, synthetic construct
  source 1..75: mol_type = other DNA
gcgccgtcacgacagggttactgacccgggcccgggcggcgggttgtacgaccctggtggtttctgtggatgcgg

SEQ ID NO: 234209 - DNA, 75 bp, synthetic construct
  source 1..75: mol_type = other DNA
aagccagctgttgcaaaccctgcgcaaccacgacggacgctatcttattctctactcttccgctgccgccaccct

SEQ ID NO: 234210 - DNA, 75 bp, synthetic construct
  source 1..75: mol_type = other DNA
ctcaattatcatattccggtcatatgttctcatataatgagaatatcctggggacaaggggggaggctgtaagag

SEQ ID NO: 234211 - DNA, 75 bp, synthetic construct
  source 1..75: mol_type = other DNA
gattgccaggaagatgggggataaaggtcattttaccactccgatgatgcagcttcaggaccaggaacgtaccaa

SEQ ID NO: 234212 - DNA, 75 bp, synthetic construct
  source 1..75: mol_type = other DNA
tatgggcattgatttcgcgaaggtggatatcagccagatgcggttgagccttgcgggcgtggaaaccaaacatac

SEQ ID NO: 234213 - DNA, 75 bp, synthetic construct
  source 1..75: mol_type = other DNA
tgctggggcgtgccagcatgatactggggtatgacatcaccgcaggcaacagccagctgaatgtctatgtgaaga

SEQ ID NO: 234214 - DNA, 75 bp, synthetic construct
  source 1..75: mol_type = other DNA
agctgggcccagtacagctggtttaagaacaccgttaacggcgaaggtctgagcggtgagaagtatgattcagaa

SEQ ID NO: 234215 - DNA, 75 bp, synthetic construct
  source 1..75: mol_type = other DNA
ccgcgagagccaatgattaactcatacgataactccatcacctatgttgatcattttattgacacggtaatcgac

SEQ ID NO: 234216 - DNA, 75 bp, synthetic construct
  source 1..75: mol_type = other DNA
cgccggagcagttccgcgtgccgatgatggtctggatgtcagataaatatctggaaaatccggccaatgcgcagg

SEQ ID NO: 234217 - DNA, 75 bp, synthetic construct
  source 1..75: mol_type = other DNA
gcaaaatctcgacgacacctatgtgattttcattattggtgaaaccacgcgttgggatcatatggggatgctggg

SEQ ID NO: 234218 - DNA, 75 bp, synthetic construct
  source 1..75: mol_type = other DNA
ttgcagattggaacgcgcaaattgaagcgaatgggggatcaatgacccggcaagcggttactcccaaaatgcgag

SEQ ID NO: 234219 - DNA, 75 bp, synthetic construct
  source 1..75: mol_type = other DNA
cacaaactgccaggaagaagcgtttatcgcgttcgttcaggcccctgagatggaatttagtgaagagttcttgcg

SEQ ID NO: 234220 - DNA, 75 bp, synthetic construct
  source 1..75: mol_type = other DNA
acagacccggcaggtaaccgcctgcccgacccggagctgcacccggacagcaccctcagcatgtggccggataac

SEQ ID NO: 234221 - DNA, 75 bp, synthetic construct
  source 1..75: mol_type = other DNA
gctggaacgaaacctattatcgttcaacgatgattattggtctggcacctgaagggaaggtaagagtctggctgg

SEQ ID NO: 234222 - DNA, 75 bp, synthetic construct
  source 1..75: mol_type = other DNA
acgccggaaaatccggaacatgggaatgttccgggccataccggtaacgacaggccgccgctggatcagcccacc

SEQ ID NO: 234223 - DNA, 75 bp, synthetic construct
  source 1..75: mol_type = other DNA
ccggtggtgttaaatctcgatcacggactgcattttgaatcggtggtgcaagcgttgcggctgggattcagctcg

SEQ ID NO: 234224 - DNA, 75 bp, synthetic construct
  source 1..75: mol_type = other DNA
taccgcgcaaactgggcaaggtgctggcctacgactttcaccatcgttttgcgctcgatacgcaacagctgcgtg

SEQ ID NO: 234225 - DNA, 75 bp, synthetic construct
  source 1..75: mol_type = other DNA
aagacccggcagtaaacgccattgctcacgccattctgggtggcgcagtagcggcaatgcagggtaataatgttg

SEQ ID NO: 234226 - DNA, 75 bp, synthetic construct
  source 1..75: mol_type = other DNA
gctgccggcctggccggtggtctggtgggagattcgggagcttcagcggtagccggcgcacagtcaggtaagacg

SEQ ID NO: 234227 - DNA, 75 bp, synthetic construct
  source 1..75: mol_type = other DNA
ttcgggatatgaagcttgctgcgggtgagccgccggcaagacgcggttatcccgcttcagttttcgatagtttgc

SEQ ID NO: 234228 - DNA, 75 bp, synthetic construct
  source 1..75: mol_type = other DNA
cgccgaccactggagcggtggttatgccagccggttagccagtactcttcttttgaaaacaccctgcagggaatg

SEQ ID NO: 234229 - DNA, 75 bp, synthetic construct
  source 1..75: mol_type = other DNA
ttgccgccatgctggcggatgaaacctggatgtccggtgccgaatgtctggcacacggatttgctgaccaggtga

SEQ ID NO: 234230 - DNA, 75 bp, synthetic construct
  source 1..75: mol_type = other DNA
agaaactgaagtcgcaaaaacgtcactcaacacgtaccgtgccgtcatcaaaaatattctgagcataatcggtga

SEQ ID NO: 234231 - DNA, 75 bp, synthetic construct
  source 1..75: mol_type = other DNA
cgggctggaaatgggcgcggatgattacatctgcaaaccgttcaccccgcgggtggtggtcgcacgactgaaagc

SEQ ID NO: 234232 - DNA, 75 bp, synthetic construct
  source 1..75: mol_type = other DNA
taaaggacaggtgcaggcgttcatggtatgcctgcgatcaatgccaaacgtgtttaccggatcatgcgccagaat

SEQ ID NO: 234233 - DNA, 75 bp, synthetic construct
  source 1..75: mol_type = other DNA
acgcagctctggaaccgtgggtgctgttcaccagaatcaactcagcgaaaccccgccacagaaaagcggccattg

SEQ ID NO: 234234 - DNA, 75 bp, synthetic construct
  source 1..75: mol_type = other DNA
aaatagaagaagtattgctggatgacaaaaaacaattcatgcaggaattacaacatctctcaatagataagcctg

SEQ ID NO: 234235 - DNA, 75 bp, synthetic construct
  source 1..75: mol_type = other DNA
tattttgaatcaaccggtgcagacagtgaagccgcattagaacaattacatgcggactttatctcagcagggctg

SEQ ID NO: 234236 - DNA, 75 bp, synthetic construct
  source 1..75: mol_type = other DNA
tgcatcgattttattcagtggcacaactgttgcaactaagaatactgtattggctcttcaagggtccgcatcagg

SEQ ID NO: 234237 - DNA, 75 bp, synthetic construct
  source 1..75: mol_type = other DNA
aaatttgatgaactggcactaaggaatatgtttgctgggatcgttgctaataagctcggcctaggcttttcaaca

SEQ ID NO: 234238 - DNA, 75 bp, synthetic construct
  source 1..75: mol_type = other DNA
atcttgatttgatgggaaaccgtaataaatcaaaagaacagttggaaaaagaggaatttagtatcctcctgaaga

SEQ ID NO: 234239 - DNA, 75 bp, synthetic construct
  source 1..75: mol_type = other DNA
gaaaaaataaaaactctgatttatcagatgaacaagataatgacattcaagaataccactcaggtatcaacccct

SEQ ID NO: 234240 - DNA, 75 bp, synthetic construct
  source 1..75: mol_type = other DNA
acatcatcaatttttacatcaatgccctctcagataaagattgaatacccgcgtaatgtatcagagaacaaggaa

SEQ ID NO: 234241 - DNA, 75 bp, synthetic construct
  source 1..75: mol_type = other DNA
tctcaaagcgcctctgtaaaaacgaaattgagcgaggcatttgatgccatcgtctgtgttccaagcgccggcaag

SEQ ID NO: 234242 - DNA, 75 bp, synthetic construct
  source 1..75: mol_type = other DNA
ttgagggagatacttccgtacgtgactcgtatatggcgggcgtggtggatggaatggttcgagcgaatccggatg

SEQ ID NO: 234243 - DNA, 75 bp, synthetic construct
  source 1..75: mol_type = other DNA
atggattttataacggaaccatttttcaccgcgtgataagcggttttatggtgcaaggcggtggctatgagtccg

SEQ ID NO: 234244 - DNA, 75 bp, synthetic construct
  source 1..75: mol_type = other DNA
ttgaaaccaacgggagagcagttaaccatacagatcagtgatgcctttcttggttcggttttgaatgcctctggt

SEQ ID NO: 234245 - DNA, 75 bp, synthetic construct
  source 1..75: mol_type = other DNA
ttgggcatggcactacgtgaaaccgtgttccccagcaatattaactttgcggcaatcaccactattgttggcggt

SEQ ID NO: 234246 - DNA, 75 bp, synthetic construct
  source 1..75: mol_type = other DNA
ataggtaataaaaaaataacaatacaaaaaataaataattcccaattaaaaatcgatggtgccgttccctataat

SEQ ID NO: 234247 - DNA, 75 bp, synthetic construct
  source 1..75: mol_type = other DNA
tcaactttattataccaactttggtagggacatttttttcaggaaaaactctttcaaaggaacaaaaagaaaaat

SEQ ID NO: 234248 - DNA, 75 bp, synthetic construct
  source 1..75: mol_type = other DNA
aaatgttgcagacacagggataactgatcgtgtcaatgacataataaatgacagattctggagtgatgggaaaaa

SEQ ID NO: 234249 - DNA, 75 bp, synthetic construct
  source 1..75: mol_type = other DNA
cggcggatgtgcgtggaacggtggagatatccatctatgaagaaattggcggcttcggtattaccgcgaagcagt

SEQ ID NO: 234250 - DNA, 75 bp, synthetic construct
  source 1..75: mol_type = other DNA
tatgaaaattatcgggaacaggcaattcgtgcctccggaaaatttgttatcgagaactatgcttcagcatataaa

SEQ ID NO: 234251 - DNA, 75 bp, synthetic construct
  source 1..75: mol_type = other DNA
accatcatctcatttaagctctggtgaagcgtgctacatggcaacacttgcttttatccttacatatatatcgga

SEQ ID NO: 234252 - DNA, 75 bp, synthetic construct
  source 1..75: mol_type = other DNA
aaaaacagcactattacagtggaagagttaatgggtgaaccattaattattagtaaaggacgctatgaattaagc

SEQ ID NO: 234253 - DNA, 75 bp, synthetic construct
  source 1..75: mol_type = other DNA
gtcattgtaacaacgggcggtttatatccttctgacaatagttctctaagcaaagcatatacagctagcgcagtc

SEQ ID NO: 234254 - DNA, 75 bp, synthetic construct
  source 1..75: mol_type = other DNA
tttaatcaggctgttgagtatttaaaacaagattcacaaatgaaagaaactatagattttttatcaagctctgaa

SEQ ID NO: 234255 - DNA, 75 bp, synthetic construct
  source 1..75: mol_type = other DNA
gaactggccgccaccgtactggtgaccttctttttactacgtcttctatcgctgtttggccgccgcagctggcgt

SEQ ID NO: 234256 - DNA, 75 bp, synthetic construct
  source 1..75: mol_type = other DNA
catgggttttatttcctctaaatgcaatatcagtcataccctttttcatattaaatgataattttgtaatatgtg

SEQ ID NO: 234257 - DNA, 75 bp, synthetic construct
  source 1..75: mol_type = other DNA
tgatgacagaattattatcgctggttcattatctaaagcgtttggctctcatggtggatttattgcatgcaatta

SEQ ID NO: 234258 - DNA, 75 bp, synthetic construct
  source 1..75: mol_type = other DNA
cgggcctgatgaaagccaagtaaaaataattgaagcagccaatgaaatattaaatcagatggtgaaaaatgccta

SEQ ID NO: 234259 - DNA, 75 bp, synthetic construct
  source 1..75: mol_type = other DNA
tccgtcagagtaatggcgcgaattgaatcgaaacgcacaggagattttttacatatgccggaaaccattaaagga

SEQ ID NO: 234260 - DNA, 75 bp, synthetic construct
  source 1..75: mol_type = other DNA
tattgcgctggccacatacgggaatattttttctgttacccgccaggccattattaacgatgacctgacccagtt

SEQ ID NO: 234261 - DNA, 75 bp, synthetic construct
  source 1..75: mol_type = other DNA
tgctccgcatcttcgcgattcgtctgaaagaactagatgacctgtatgagaagtacatgaagggacggattcgta

SEQ ID NO: 234262 - DNA, 75 bp, synthetic construct
  source 1..75: mol_type = other DNA
actggttatccctgcatcgtcgtcttgcggaagatggtctgtacctgtctcagatggacggaaaatttctggtga

SEQ ID NO: 234263 - DNA, 75 bp, synthetic construct
  source 1..75: mol_type = other DNA
agatttatgacagtgtacgtcatacgctgaaatcactcggccttgccgaccatcagtatgtctctgccgtgcata

SEQ ID NO: 234264 - DNA, 75 bp, synthetic construct
  source 1..75: mol_type = other DNA
cgccaaacgccggtatatgggcagaggctggctatcagaaagggaataagatggagtcaccagtgacaggaactg

SEQ ID NO: 234265 - DNA, 75 bp, synthetic construct
  source 1..75: mol_type = other DNA
gacatctacaggtattaaagtagttgatttcgcagctgatcccacgcagtttcaaaacaatgcgcagttcagtct

SEQ ID NO: 234266 - DNA, 75 bp, synthetic construct
  source 1..75: mol_type = other DNA
tgtgcttagtctggggctgaatcattaccgcgataacgccatcacctacaaagcgcagcgcgataaaaaagtcag

SEQ ID NO: 234267 - DNA, 75 bp, synthetic construct
  source 1..75: mol_type = other DNA
ggtatcttaaatattgaaaacaaatcaccattttttgttacatttgcaaatttaataactgacaaagaaagttta

SEQ ID NO: 234268 - DNA, 75 bp, synthetic construct
  source 1..75: mol_type = other DNA
tatatctatctatgaggagattggcggcttcggggttactgcaaagcagttcgcggaagacctgaaagcccttgg

SEQ ID NO: 234269 - DNA, 75 bp, synthetic construct
  source 1..75: mol_type = other DNA
catatcggttttgatcgcggaggacatggcagtgtgggcagttattctctgggcggctatgccagttgggaacat

SEQ ID NO: 234270 - DNA, 75 bp, synthetic construct
  source 1..75: mol_type = other DNA
ttgccgacctgacggctgccagccggggcagtgtctggcttaacagcaataattcctgtgcaggcaccagcaact

SEQ ID NO: 234271 - DNA, 75 bp, synthetic construct
  source 1..75: mol_type = other DNA
atcactgtcagagcacattgatggagttcagtcatacagcttgatatcaggacttgccgatgctttacatgttga

SEQ ID NO: 234272 - DNA, 75 bp, synthetic construct
  source 1..75: mol_type = other DNA
ggggcattcgcgattgaaaatggtttgatcactgcaacgtcaccggttactcgcgtgcgtatccgcaacgtcaat

SEQ ID NO: 234273 - DNA, 75 bp, synthetic construct
  source 1..75: mol_type = other DNA
ctgtcagggtatcatctatcggtaagacctttatggatatgaccaggcggcctgattactgtggtggtgaggagc

SEQ ID NO: 234274 - DNA, 75 bp, synthetic construct
  source 1..75: mol_type = other DNA
ccgctgcaggggcgatatatcactcaggatccgattggactgaaggggggatggaacctgtatggatatcaattg

SEQ ID NO: 234275 - DNA, 75 bp, synthetic construct
  source 1..75: mol_type = other DNA
agccagcaactggcgtacgaacaacttcgtattgcgcgggaaacgctgaaaaattatcaacagtcctatgctttc

SEQ ID NO: 234276 - DNA, 75 bp, synthetic construct
  source 1..75: mol_type = other DNA
cagcctgtctgcgcacaccgcaaccatgctgccggttattctggccgtcggtaaaggtattccgggcgtaccaat

SEQ ID NO: 234277 - DNA, 75 bp, synthetic construct
  source 1..75: mol_type = other DNA
tcgcgtcgatagacgaatcgatctactgaaacttcaaggttataagcagcagcttggctacgatcacgctttgtt

SEQ ID NO: 234278 - DNA, 75 bp, synthetic construct
  source 1..75: mol_type = other DNA
ccgagagtacggtgaattttatttatcaccatcgccggactgccggggacgctgtattacgggagttaacgccat

SEQ ID NO: 234279 - DNA, 75 bp, synthetic construct
  source 1..75: mol_type = other DNA
atgatgattttacaacccatggggcgaaaaggtcgcgcccccgctcatgtccgtccgtggacacctgaagaagat

SEQ ID NO: 234280 - DNA, 75 bp, synthetic construct
  source 1..75: mol_type = other DNA
acggtcgtctctatctctccggtacatcacagcgggacagctactattctctgaatgccagttggaacggttcat

SEQ ID NO: 234281 - DNA, 75 bp, synthetic construct
  source 1..75: mol_type = other DNA
tatttggcatttcacgcggaatagacaaacagggggctttattacttgagcaggatggaataataaaaccctgga

SEQ ID NO: 234282 - DNA, 75 bp, synthetic construct
  source 1..75: mol_type = other DNA
cccggcctgtggaggtgttctgaaagaaatgggggaaacaatctcagagcaactggatatcattaataccgccgg

SEQ ID NO: 234283 - DNA, 75 bp, synthetic construct
  source 1..75: mol_type = other DNA
tttggctgctatcgataaagcactgtctcaggttgactcgttgcgttctaacctaggtgcaattcaaaaccgttt

SEQ ID NO: 234284 - DNA, 75 bp, synthetic construct
  source 1..75: mol_type = other DNA
tttctacgcagaaaacagaagatcctttggctgctatcgataaagcactgtctcaggttgactcgttgcgttcta

SEQ ID NO: 234285 - DNA, 75 bp, synthetic construct
  source 1..75: mol_type = other DNA
gtggcgattcagaacgctgccaagaaaacaggaagcacgttagttgttaacggtgcaacttacgatgttagtgca

SEQ ID NO: 234286 - DNA, 75 bp, synthetic construct
  source 1..75: mol_type = other DNA
atgatacaggcggcaagtatcggtactggttacatcgctgatgcggcaattaccaatctaaaactggcctccggc

SEQ ID NO: 234287 - DNA, 75 bp, synthetic construct
  source 1..75: mol_type = other DNA
ataacgactaccccatgatatccgggtatacccggtttatgatcaacccggaaacccgggtcatcgctgtcgatc

SEQ ID NO: 234288 - DNA, 75 bp, synthetic construct
  source 1..75: mol_type = other DNA
atctactgctgattaacctctctcagcgtttcgatgttaaccggcttgagcaactgcccctgcggcagttgctta

SEQ ID NO: 234289 - DNA, 75 bp, synthetic construct
  source 1..75: mol_type = other DNA
acctttccgggcattgcggtttgcgtagaaccggaatcggtcgaggcgctggtggcggggattcgtcaggcgctc

SEQ ID NO: 234290 - DNA, 75 bp, synthetic construct
  source 1..75: mol_type = other DNA
tgctgttgatagcagggctgtttgtatcatctctaagttatgcagaaaacaaggagatgccttcttatgaagaag

SEQ ID NO: 234291 - DNA, 75 bp, synthetic construct
  source 1..75: mol_type = other DNA
atgagtgacagcctgaatacggcatataaaaacagcggtcataaaatcagcttcgtttttgagcgtgatcctgac

SEQ ID NO: 234292 - DNA, 75 bp, synthetic construct
  source 1..75: mol_type = other DNA
tgatcaggaggttaagacaaaagtttatgatgaactgcataacgcccggggcattgacttcatctgggaaaatct

SEQ ID NO: 234293 - DNA, 75 bp, synthetic construct
  source 1..75: mol_type = other DNA
ccctggcgctggacactttccgccctcaaaatacggcatgacgccttactggacacgctggagcaggccctgaca

SEQ ID NO: 234294 - DNA, 75 bp, synthetic construct
  source 1..75: mol_type = other DNA
catagtgatatggaaatggtggcgaccgctcccgatccgttgattgtacgagatttgattaagaaattcaatccc

SEQ ID NO: 234295 - DNA, 75 bp, synthetic construct
  source 1..75: mol_type = other DNA
ccaacccgcccagggggactaaagccattgtgctcccgcttaacgggcgcaccagtcatagcgtggtgattgcca

SEQ ID NO: 234296 - DNA, 75 bp, synthetic construct
  source 1..75: mol_type = other DNA
gaaaaaatggcgctgcagcgtggactgaccaatttgcaatttttcccgctgcaatcgtatgacgctttacccgcg

SEQ ID NO: 234297 - DNA, 75 bp, synthetic construct
  source 1..75: mol_type = other DNA
ggacgccatgctggggctgggccttgccggaaaaggcaaaggcggcaaagtggcacagctggcaacggcgttcga

SEQ ID NO: 234298 - DNA, 75 bp, synthetic construct
  source 1..75: mol_type = other DNA
tagtaataaaagttccaagtaaaaagggaaaaatgctaacaaccctcattgaagaggcaattgcggagaattcaa

SEQ ID NO: 234299 - DNA, 75 bp, synthetic construct
  source 1..75: mol_type = other DNA
gaaaacaccagcacagaacttctgcctacaacatttcttaaagataatccttgaggaaataggccctgtaaaatc

SEQ ID NO: 234300 - DNA, 75 bp, synthetic construct
  source 1..75: mol_type = other DNA
acataaagaacacatggatgatcctctattccatctaatccgaagcaatactttgaaacccacacctgtatatgc

SEQ ID NO: 234301 - DNA, 75 bp, synthetic construct
  source 1..75: mol_type = other DNA
aatagtagcactgtggattatgcaaaaaggctttctgataactggtcacactcagtatcagtaggaagatatttt

SEQ ID NO: 234302 - DNA, 75 bp, synthetic construct
  source 1..75: mol_type = other DNA
gatactgaaatactacaggtttcccatgatatatctgtaatcataactcgttttaattcaatgacaggaaatggt

SEQ ID NO: 234303 - DNA, 75 bp, synthetic construct
  source 1..75: mol_type = other DNA
gcacgcccacccgttatagcggataacttcggggcactgaaagaggctgtaaaacgtactcatgcgggaatgggg

SEQ ID NO: 234304 - DNA, 75 bp, synthetic construct
  source 1..75: mol_type = other DNA
tgacgggcgtggtggacggcttcgggcggacgctgactttccaccgggcggcggagggtgacgtggcgggcgcgg

SEQ ID NO: 234305 - DNA, 75 bp, synthetic construct
  source 1..75: mol_type = other DNA
atattaactacggtactcactataacagcacactattcggtgggtatcagtttagtaaaaattattttaacttat

SEQ ID NO: 234306 - DNA, 75 bp, synthetic construct
  source 1..75: mol_type = other DNA
tcccggctgaactggtggggctgctggacaggctggagggggaaatccgggcaaactgcgtgagcagtgaaagcc

SEQ ID NO: 234307 - DNA, 75 bp, synthetic construct
  source 1..75: mol_type = other DNA
agtcagtccattacgtatgacctgtacgggaaaggacatgcagtccagagactggctgaggtgctgaagacagct

SEQ ID NO: 234308 - DNA, 75 bp, synthetic construct
  source 1..75: mol_type = other DNA
acgaaacttttggtcgctatgacccgacatactatattcgtgatcaaggggtggttggggcaggtgcgggattta

SEQ ID NO: 234309 - DNA, 75 bp, synthetic construct
  source 1..75: mol_type = other DNA
tgtttctccggatgacgggggcagttgttatctctggctgaaccgtgggcaaccacccgcagttaaccggcgacg

SEQ ID NO: 234310 - DNA, 75 bp, synthetic construct
  source 1..75: mol_type = other DNA
ccccggcagaatgttatctcttgacgagggtggaataaccgaaggtatggcgttcagactgccggaatcgactct

SEQ ID NO: 234311 - DNA, 75 bp, synthetic construct
  source 1..75: mol_type = other DNA
ttttgaacatatcagtaattcagcgtggcgtgtggcaaccagtgatatctcacagcaatacagattcagttatat

SEQ ID NO: 234312 - DNA, 75 bp, synthetic construct
  source 1..75: mol_type = other DNA
cagaaaccaacgcgaaaaacagcgagacagccgcaaagacgagcgaaaccaacgcaaagtccagccagacggcag

SEQ ID NO: 234313 - DNA, 75 bp, synthetic construct
  source 1..75: mol_type = other DNA
ccaggaccacagttgtttattctggaagatgtgaccggcgcaggtaaaacagaagcggcgcttatcctggcgcac

SEQ ID NO: 234314 - DNA, 75 bp, synthetic construct
  source 1..75: mol_type = other DNA
ccaggatgttgacctggtggggaaagcgcgaacgccagcaacttctggaagattttgtattgaccacaaacaaaa

SEQ ID NO: 234315 - DNA, 75 bp, synthetic construct
  source 1..75: mol_type = other DNA
gagaaataaaaaatcagattatcgatggtaccttcgaatatgcaaaatacttccccaactcccaaaagctggagt

SEQ ID NO: 234316 - DNA, 75 bp, synthetic construct
  source 1..75: mol_type = other DNA
tatttctatgggagggtgtaataaatatgtggcaacaacccagaggaaaatcatttcaggcttccgttgtggcgc

SEQ ID NO: 234317 - DNA, 75 bp, synthetic construct
  source 1..75: mol_type = other DNA
gcaatgattcagtatgcgccgaaaaaaggtggtataactgaagcgggagattatatttaccttgcaacaccacaa

SEQ ID NO: 234318 - DNA, 75 bp, synthetic construct
  source 1..75: mol_type = other DNA
ttcaactttgtaaactcagggatatatattcatggtaatacaactcctaagtccaccaacaacaatctaggcgat

SEQ ID NO: 234319 - DNA, 75 bp, synthetic construct
  source 1..75: mol_type = other DNA
aataataaatgtggtccgacgactttaacaattgaaggttgtcttttttattggaaattcttagaaacaacctgt

SEQ ID NO: 234320 - DNA, 75 bp, synthetic construct
  source 1..75: mol_type = other DNA
ccacgctccagctgctgccggagtgggagcaatatctggcgctgccggaatgcggaattgccgccaccacaacgg

SEQ ID NO: 234321 - DNA, 75 bp, synthetic construct
  source 1..75: mol_type = other DNA
aacccacgtcaccagcaggctcttttgcgcatggtgttttgcctgagcgcaggaaagaatgtcatccgacatcag

SEQ ID NO: 234322 - DNA, 75 bp, synthetic construct
  source 1..75: mol_type = other DNA
tagcaaaaaaacaatactggacattatttgcaactaagttgctactcaaaagagcgttccctggtattatatatt

SEQ ID NO: 234323 - DNA, 75 bp, synthetic construct
  source 1..75: mol_type = other DNA
atttgcaactaagttgctactcaaaagagcgttccctggtattatatatttgaagcaaaaagtttatgaaaacca

SEQ ID NO: 234324 - DNA, 75 bp, synthetic construct
  source 1..75: mol_type = other DNA
taaaaaagatatagatatgtataataaagaaaaagcaaaggggaatactgaagtttcccctccagtgaaaccaga

SEQ ID NO: 234325 - DNA, 75 bp, synthetic construct
  source 1..75: mol_type = other DNA
tatggatacactggttcttcatcgggagaatcacgatctggttcttgacggatattcaaaaccgaacgattttac

SEQ ID NO: 234326 - DNA, 75 bp, synthetic construct
  source 1..75: mol_type = other DNA
cccgcagtgggcgccaagttcaaatttaatcaataacagtctgccacgcctgaatgaaggcgtgcgtttgtggcg

SEQ ID NO: 234327 - DNA, 75 bp, synthetic construct
  source 1..75: mol_type = other DNA
ttgatgatgataaggaatattttcctggtgatgatgatggtggtgatggtggtgatggtggtggcggtggtgatt

SEQ ID NO: 234328 - DNA, 75 bp, synthetic construct
  source 1..75: mol_type = other DNA
aaaaatacctgtttgccggacttgcagggactctgcttccattcctgattgcacttgttctgacagtcgtcatgt

SEQ ID NO: 234329 - DNA, 75 bp, synthetic construct
  source 1..75: mol_type = other DNA
tggttcaggtttccctggcattcactgcgggctataacctgcgttttgtgtttattctgcaaaacagggaacagt

SEQ ID NO: 234330 - DNA, 75 bp, synthetic construct
  source 1..75: mol_type = other DNA
tctggaaaactatcaaggcagtttagtcaccaaatatgccacgcagctgttgatgctaaccggagtgcgcacaat

SEQ ID NO: 234331 - DNA, 75 bp, synthetic construct
  source 1..75: mol_type = other DNA
gatccggatgaagttgtcaaaatgctggggatgtatatcccttatctatgtgcctttgctttttatcccttcttt

SEQ ID NO: 234332 - DNA, 75 bp, synthetic construct
  source 1..75: mol_type = other DNA
atacggtgagtacagcagaagtgggggccagagtggcgcaatcgctgggtgtcccacgcgagcagattattacgc

SEQ ID NO: 234333 - DNA, 75 bp, synthetic construct
  source 1..75: mol_type = other DNA
caactgcggggcgatttccccggcgatgcactcaatcgtcagcgcgaagcctttatggctcgctggattgcatga

SEQ ID NO: 234334 - DNA, 75 bp, synthetic construct
  source 1..75: mol_type = other DNA
atgaaactcgaacattgggcaattccgatcacttcattggacggtatgttactcggcgtagagctggaaacccgt

SEQ ID NO: 234335 - DNA, 75 bp, synthetic construct
  source 1..75: mol_type = other DNA
tggctgggtgagaagcaagataatcgacgcttatcagatctgattgagcagtggcatgatctatatggtcgaaca

SEQ ID NO: 234336 - DNA, 75 bp, synthetic construct
  source 1..75: mol_type = other DNA
cctgacagcctccggctggctgggaagttttatactggtgaaaatcgcctcactaccgactgacaacctgcaatg

SEQ ID NO: 234337 - DNA, 75 bp, synthetic construct
  source 1..75: mol_type = other DNA
agctgctgaccaaagcgaagatgtgtctcgattatggcctgatgaatgggcaacttgagggccgcaaccctattg

SEQ ID NO: 234338 - DNA, 75 bp, synthetic construct
  source 1..75: mol_type = other DNA
tgggtgatcatcgagtctggccactacgacgccatacagcttcctgacggcacccttcgcaaacaccctcgcagt

SEQ ID NO: 234339 - DNA, 75 bp, synthetic construct
  source 1..75: mol_type = other DNA
ccgtgctggtggctgagttccggcaggtacgcaacccggcgttccatcgccgattcttcgcattactcaatctcg

SEQ ID NO: 234340 - DNA, 75 bp, synthetic construct
  source 1..75: mol_type = other DNA
gacagatggtgcgtatggtttcgacttggcgtccttcctctcatgggtgaacacgcagtcagacgaaggtccgct

SEQ ID NO: 234341 - DNA, 75 bp, synthetic construct
  source 1..75: mol_type = other DNA
cactggtgatacctctggtctgattaagctgattgatgataataaccatactgattactcaactataggcgactc

SEQ ID NO: 234342 - DNA, 75 bp, synthetic construct
  source 1..75: mol_type = other DNA
atggactggtctgtatcgacattaatgaagatggggacgggaagtccgtaaagaacaagcattcagtccgacttg

SEQ ID NO: 234343 - DNA, 75 bp, synthetic construct
  source 1..75: mol_type = other DNA
cggcgtggtgacacgctgaccattaatggtgagacattctgggtggatcgtgtttctccggatgacgggggtagc

SEQ ID NO: 234344 - DNA, 75 bp, synthetic construct
  source 1..75: mol_type = other DNA
cgttcagcagcgtctggtggatctgatggctaaatttcgtcaacagcagtcgcgcacattattagtgacgaatat

SEQ ID NO: 234345 - DNA, 75 bp, synthetic construct
  source 1..75: mol_type = other DNA
atgctgtacgccccgacacgaagcggtaaaggtgtctcgatcgttatgcctaacggcatctggtataccgaatcg

SEQ ID NO: 234346 - DNA, 75 bp, synthetic construct
  source 1..75: mol_type = other DNA
tgggtgatcgtcgagtctggtcactatgacgctattcagcttcctgacggaacacttcgcaaacatccccgcagt

SEQ ID NO: 234347 - DNA, 75 bp, synthetic construct
  source 1..75: mol_type = other DNA
aacgattgttgaagtgatggggctctgtgcgcagttcacctcgggggcacagtgtggcagcgaagttcagggggt

SEQ ID NO: 234348 - DNA, 75 bp, synthetic construct
  source 1..75: mol_type = other DNA
ggcgatcacgcctcgcgaacgagaactgctgtctggtttcgttgattacctgtgcgaatcagttggtcgggaaca

SEQ ID NO: 234349 - DNA, 75 bp, synthetic construct
  source 1..75: mol_type = other DNA
gcaggaaacgccgtctcatttcgtattgcgaccttaccatgtcggggtggtgaaaaggtggtattaaggttgtaa

SEQ ID NO: 234350 - DNA, 75 bp, synthetic construct
  source 1..75: mol_type = other DNA
atgcgtgattttcagaatgtctttgatgctgccctttccggggtggacagtacgattgttgaagtgatgggcatc

SEQ ID NO: 234351 - DNA, 75 bp, synthetic construct
  source 1..75: mol_type = other DNA
atgaactatgcgataagcttaaaactcgtataaaaacagcccaacaaacccaactgcaccttgcagacgcactca

SEQ ID NO: 234352 - DNA, 75 bp, synthetic construct
  source 1..75: mol_type = other DNA
atggcaactaggaaagaaaaagagttgggcgaattttgggaaagaaccactttctcatctttatgtgatgaagaa

SEQ ID NO: 234353 - DNA, 75 bp, synthetic construct
  source 1..75: mol_type = other DNA
attggtgggaaaaagagcgtattaatcgtaaagcatcatcaatatgcccatatgctagttcatacagatgtcctc

SEQ ID NO: 234354 - DNA, 75 bp, synthetic construct
  source 1..75: mol_type = other DNA
tgtgcgcattaagcccgcagccaggttgggcagagcgcgatatggcagaactgtggcaatgctgcatggctgtca

SEQ ID NO: 234355 - DNA, 75 bp, synthetic construct
  source 1..75: mol_type = other DNA
tccgcggcacgtattcttggcggagttatcatccagcctgcgctggagtattacaatgtatatttagagcgcatt

SEQ ID NO: 234356 - DNA, 75 bp, synthetic construct
  source 1..75: mol_type = other DNA
attattataacaacgagcggatcagcctgaaattaaaaggcctgagtccggtagaataccgaactcaggccctga

SEQ ID NO: 234357 - DNA, 75 bp, synthetic construct
  source 1..75: mol_type = other DNA
gcattaatattttggcgtcgtttttttaaacaagatattaagtataaaataatacatgatatagggtatatttat

SEQ ID NO: 234358 - DNA, 75 bp, synthetic construct
  source 1..75: mol_type = other DNA
aacttattatcagtttgcgatgttctaagagcctacattcaatccgcccagcaaacccaactgcaccttgcagac

SEQ ID NO: 234359 - DNA, 75 bp, synthetic construct
  source 1..75: mol_type = other DNA
gatgtgccgcgcattgagctatttagccgcagcgcggcgccgggctgggatcactgggggaatcagtgcgccacc

SEQ ID NO: 234360 - DNA, 75 bp, synthetic construct
  source 1..75: mol_type = other DNA
ttgctacccgaggcgccgggctggaacgaaagcacgccgggattaagcaggttgtctacagcccgctcggcgcgc

SEQ ID NO: 234361 - DNA, 75 bp, synthetic construct
  source 1..75: mol_type = other DNA
caggcgtgggcaggcaccggttttggccacctggcgataccgcgtgtgggtcaggaggtgattgtggacttcctc

SEQ ID NO: 234362 - DNA, 75 bp, synthetic construct
  source 1..75: mol_type = other DNA
actgactttattgtcatcgagaaatgtcaagcctgtttcaggattgtggcggtggttattgcgtcgttgtattgt

SEQ ID NO: 234363 - DNA, 75 bp, synthetic construct
  source 1..75: mol_type = other DNA
tccatcgctttctttactggggtgtgattattcgcgacgtgcccttcctgccccacccgatctctcactgttaga

SEQ ID NO: 234364 - DNA, 75 bp, synthetic construct
  source 1..75: mol_type = other DNA
ggtgccagtgcgcaaagccagcgtaactatcacatttcggcgctggtgtttatcagcatgattattgttgcagcg

SEQ ID NO: 234365 - DNA, 75 bp, synthetic construct
  source 1..75: mol_type = other DNA
acgtcccacagccagaagaggaactgaccagtacaacacatttgctggaaaatattttatctcatcaggctagta

SEQ ID NO: 234366 - DNA, 75 bp, synthetic construct
  source 1..75: mol_type = other DNA
aaggtgcgtacagcagcaaaggcgagccttgcagcacataagccattgtcggcaccgacaacgctgaaggcaggg

SEQ ID NO: 234367 - DNA, 75 bp, synthetic construct
  source 1..75: mol_type = other DNA
cgcattatcaacaaagctcagaagcagaaaaaatagcacaatctattattctgaatggaattcggtgtcagattc

SEQ ID NO: 234368 - DNA, 75 bp, synthetic construct
  source 1..75: mol_type = other DNA
aacctcgttgctgcgaacaccatgtttgtgacccgccttcatgaacgtctggggcagacgcaatacgtcgatgca

SEQ ID NO: 234369 - DNA, 75 bp, synthetic construct
  source 1..75: mol_type = other DNA
cgtgctggcaggcgatgattctgcaacagacaaacttattgttcagggcaataccagcggtaaaacctttgttac

SEQ ID NO: 234370 - DNA, 75 bp, synthetic construct
  source 1..75: mol_type = other DNA
gctgccgttatggctgatacgggagttcttgatttacagggcagttccctggtttcaaaacaatacgcagccctg

SEQ ID NO: 234371 - DNA, 75 bp, synthetic construct
  source 1..75: mol_type = other DNA
gcaaaagagatcaaagggctgatcgaagagtcagtcaatcgtgtccagcagggttcgaaactggtgaataacgcc

SEQ ID NO: 234372 - DNA, 75 bp, synthetic construct
  source 1..75: mol_type = other DNA
acataaccgctggcgtgacggttctggtcaactgaaaactcaaagtaatcgttatgtgattcaactggggggtga

SEQ ID NO: 234373 - DNA, 75 bp, synthetic construct
  source 1..75: mol_type = other DNA
aaagggcacaacaaaatggatgacggtaaatcacgtgaattcagtccgtttgtggaagtaaactggttgcacaat

SEQ ID NO: 234374 - DNA, 75 bp, synthetic construct
  source 1..75: mol_type = other DNA
aatgctgttccgcaattacggtaaatacctggctgaatacgacgggaaaaccgcaatggaatctggaatgaagaa

SEQ ID NO: 234375 - DNA, 75 bp, synthetic construct
  source 1..75: mol_type = other DNA
gtaacccgtaccagacgcgccacacattcgccaccagacacattagccagggtgtaaaccttttctggcttgccg

SEQ ID NO: 234376 - DNA, 75 bp, synthetic construct
  source 1..75: mol_type = other DNA
cttctgtcgttggtgtgataaaaggaaccaaaacaaaagctggtaccagaaaagttgaattaaacaatgaagcta

SEQ ID NO: 234377 - DNA, 75 bp, synthetic construct
  source 1..75: mol_type = other DNA
ttgacggagaaaccctggggaacatttattcttgcttctactttcgaagatgacaaaacagcggcagaaacccac

SEQ ID NO: 234378 - DNA, 75 bp, synthetic construct
  source 1..75: mol_type = other DNA
tttgatgtgcacatggatgatgagtttgcccgtcagcagggtttccctggccgtattgctcatggcttattaggg

SEQ ID NO: 234379 - DNA, 75 bp, synthetic construct
  source 1..75: mol_type = other DNA
atgtaaaccagatacgccgtgaccgtcgtaagcgtgcagcaagaaccgtattgacggggatgtgttattcagtcg

SEQ ID NO: 234380 - DNA, 75 bp, synthetic construct
  source 1..75: mol_type = other DNA
ggcataaaggaccggagatgcttttcaggcactatggctcatatctgaaggaatatgatggacaaacaagcttga

SEQ ID NO: 234381 - DNA, 75 bp, synthetic construct
  source 1..75: mol_type = other DNA
acaataaatcctgtcacgctagtcagcgccagccggtatcacgtattggacaacacaccaggcagtgatgattac

SEQ ID NO: 234382 - DNA, 75 bp, synthetic construct
  source 1..75: mol_type = other DNA
tggcagctcttcaggcacaaaagccctacacggcgctaaaaagcgacttcatattcagcgatccgaaaactcgcg

SEQ ID NO: 234383 - DNA, 75 bp, synthetic construct
  source 1..75: mol_type = other DNA
attcgctacacggcatatcagccagggggcaaatttattctggcttgccggtcaaatgggacacaaaggaccaga

SEQ ID NO: 234384 - DNA, 75 bp, synthetic construct
  source 1..75: mol_type = other DNA
tcgtcattatgggcgttacttgagtgattatgacaaccacagctcaacaacgctcacaagtaattgcaaaaagta

SEQ ID NO: 234385 - DNA, 75 bp, synthetic construct
  source 1..75: mol_type = other DNA
tacgccgagcgtacactcggcgaaattcataataagatcgaaaggggaacattcatttatgcagaatattttccc

SEQ ID NO: 234386 - DNA, 75 bp, synthetic construct
  source 1..75: mol_type = other DNA
ttgacagcaactcccccgtgatggcagatgtgcaggaagaaggcaagccgcagctgtggaaccataaacaaaatg

SEQ ID NO: 234387 - DNA, 75 bp, synthetic construct
  source 1..75: mol_type = other DNA
ttgcggcctattcgcaagggagacaaggttcgcgttctgccaaagcgtgggtccactaagaaaggtgatcaacgg

SEQ ID NO: 234388 - DNA, 75 bp, synthetic construct
  source 1..75: mol_type = other DNA
cgaaatggggaaggaagtcgaaggtctcgaattccctcaatgtttttcccaatcttcatagataaggaaacgggt

SEQ ID NO: 234389 - DNA, 75 bp, synthetic construct
  source 1..75: mol_type = other DNA
attgctggatacagttgttgtcgagactcagactgtagcgctgaacgatcttgtcgttatagctgaatttcgtga

SEQ ID NO: 234390 - DNA, 75 bp, synthetic construct
  source 1..75: mol_type = other DNA
tgcgaaagttttgcatcagctacagctaaaaggagcgcaacgggacaagttgcacaatgttctgagtgaaggaga

SEQ ID NO: 234391 - DNA, 75 bp, synthetic construct
  source 1..75: mol_type = other DNA
cgcgaaataaaaagactgggttgcgttcagtttattaccttcagtcaggtattcgacaaaagatcaagagcggtg

SEQ ID NO: 234392 - DNA, 75 bp, synthetic construct
  source 1..75: mol_type = other DNA
tttcacactgacctacgaagcagagaaggcgattagccataatctagcctatgcccgcattgctgcgttgctgtg

SEQ ID NO: 234393 - DNA, 75 bp, synthetic construct
  source 1..75: mol_type = other DNA
tacagcttgatttagggggagaatccccaggttatctggaaaaagataaacaccagaagaaaagagcaggttcta

SEQ ID NO: 234394 - DNA, 75 bp, synthetic construct
  source 1..75: mol_type = other DNA
ctcaatgactcttatgttgaaagaaatgtccaaccttatcatgatgagggaaataaatagttttcataatgaggc

SEQ ID NO: 234395 - DNA, 75 bp, synthetic construct
  source 1..75: mol_type = other DNA
taccagaaatggcacttcccgaaagctataactatatccacaagtcgggaacttgcatgaagcgccaagccctat

SEQ ID NO: 234396 - DNA, 75 bp, synthetic construct
  source 1..75: mol_type = other DNA
ccctgcggtgattgccgtgggtgtaataagtattttcaggttttggatgaagtaggatatggactggacagacct

SEQ ID NO: 234397 - DNA, 75 bp, synthetic construct
  source 1..75: mol_type = other DNA
ttaagaaagagtttagtattggccccagagattatatcaaagaatatctacacaataaaatctcctgtatggcgg

SEQ ID NO: 234398 - DNA, 75 bp, synthetic construct
  source 1..75: mol_type = other DNA
tgctgaataataatactacaacgattcgtgaactggccgcaagtgtttatttacaggaggactatcttaagcgga

SEQ ID NO: 234399 - DNA, 75 bp, synthetic construct
  source 1..75: mol_type = other DNA
tttatcttcggttctctggtcggaccgaaaatggataccttatttgatggcgcaggtttatctttggtttcaggg

SEQ ID NO: 234400 - DNA, 75 bp, synthetic construct
  source 1..75: mol_type = other DNA
gaaaaagaaaaggcagacgcatttatcaagcaatatgacgagcgccagcaatcatttaatcagggcgttgaaaag

SEQ ID NO: 234401 - DNA, 75 bp, synthetic construct
  source 1..75: mol_type = other DNA
aatcaccttgccctgtgtggtgcaaattgcctggattcgcttaaaaaattcccgccatcaccgtctgagtgaatc

SEQ ID NO: 234402 - DNA, 75 bp, synthetic construct
  source 1..75: mol_type = other DNA
ccaaatcatctatatcggctctgcgtaatgttcttgaaatcgttgatgtgccacaaccaccacatctcttacatg

SEQ ID NO: 234403 - DNA, 75 bp, synthetic construct
  source 1..75: mol_type = other DNA
tctatctccggtagtcacaaggcggaaattaatgccgcaattgattcgctggatgccgaaggcagtaccaatggc

SEQ ID NO: 234404 - DNA, 75 bp, synthetic construct
  source 1..75: mol_type = other DNA
atctcggggacaaattgagatgtctttaacgatagaggatggaacaggaaatagtcagtcaaattacaattataa

SEQ ID NO: 234405 - DNA, 75 bp, synthetic construct
  source 1..75: mol_type = other DNA
ctgttgagggaatgacaaattcattaactgatttctttacaactggtgaggctggttggactaattttgtaaaat

SEQ ID NO: 234406 - DNA, 75 bp, synthetic construct
  source 1..75: mol_type = other DNA
atagttaatgctcgacacccggcaggacgagtgcgtgaacgtgtaactccgttaacaacgtcaggaacagcaacg

SEQ ID NO: 234407 - DNA, 75 bp, synthetic construct
  source 1..75: mol_type = other DNA
caccatcggataaagccgcatgggaaaatattcaaaatgcgacaaatggtaaagatttatctggtggtggaaata

SEQ ID NO: 234408 - DNA, 75 bp, synthetic construct
  source 1..75: mol_type = other DNA
ggtataaagttgattctatcggtgagcttgtgaaatactttagacaggccactaggattgatcaaataaatttta

SEQ ID NO: 234409 - DNA, 75 bp, synthetic construct
  source 1..75: mol_type = other DNA
atgttaccgtgcacgacctttatgcgcactatcccgatttttttattgatatccccgtgagcaggcattactgcg

SEQ ID NO: 234410 - DNA, 75 bp, synthetic construct
  source 1..75: mol_type = other DNA
ggaattgcaccctacaggcatttcaggtctgctcggaattaactcgcagggtaggtaaaacatcgacggttaatt

SEQ ID NO: 234411 - DNA, 75 bp, synthetic construct
  source 1..75: mol_type = other DNA
gtaggtaaaacatcgacggttaatttgcgtaaatcctctggactgacaacgaaactcagtagattgacgctgggt

SEQ ID NO: 234412 - DNA, 75 bp, synthetic construct
  source 1..75: mol_type = other DNA
aataaataaagagttggatagcaatagaaaatcatacaataatgaaatttttaacaatttctcttttgataagtc

SEQ ID NO: 234413 - DNA, 75 bp, synthetic construct
  source 1..75: mol_type = other DNA
tatgaagcatataactcagagaagcaatattttaccagagaggactatacgtatgattacgaccttttaaatgca

SEQ ID NO: 234414 - DNA, 75 bp, synthetic construct
  source 1..75: mol_type = other DNA
aggcgcagctattgcaactgctttttcagcaattatagttaacattcttgatgtgatatctattaagaaaaaagc

SEQ ID NO: 234415 - DNA, 75 bp, synthetic construct
  source 1..75: mol_type = other DNA
cgcttgggcacaggatatcagcccggatactctcgttgttactgctaaccgttttgaacagccgcgcagcactgt

SEQ ID NO: 234416 - DNA, 75 bp, synthetic construct
  source 1..75: mol_type = other DNA
atttattggtaaattatttggatatgaaggaacaaatgcgaataacatcgttcgtgtctttcttattgagccaag

SEQ ID NO: 234417 - DNA, 75 bp, synthetic construct
  source 1..75: mol_type = other DNA
tggtactttctatgtttcggggccaccggtttatgttgacctggtcgttaatgctgcgaaattaatggagcaaaa

SEQ ID NO: 234418 - DNA, 75 bp, synthetic construct
  source 1..75: mol_type = other DNA
aacaattaagactgccatatcctattgaccaggccagtagtgcgcctaatgttttcaaaacattcttcagagcat

SEQ ID NO: 234419 - DNA, 75 bp, synthetic construct
  source 1..75: mol_type = other DNA
gcgctaacagcgtgtggtgacaacaaccaccgctgcgcctgttggtatcctcagcaggaggtcattagtgtctga

SEQ ID NO: 234420 - DNA, 75 bp, synthetic construct
  source 1..75: mol_type = other DNA
ttgctatgcggcaggtgcacagtgtgaaaacgtcccggcgctaacagcgtgtggtgacaacaaccaccgctgcgc

SEQ ID NO: 234421 - DNA, 75 bp, synthetic construct
  source 1..75: mol_type = other DNA
aatatctaaagaattgcttttattagctgttgatagacagattgagtgggcgaaaaaacattttataacaaaaga

SEQ ID NO: 234422 - DNA, 75 bp, synthetic construct
  source 1..75: mol_type = other DNA
tgccagtcatgtgttggtgttaattgatggcgtacgcctgaatctggcggggggtgagtggttctgccgacctta

SEQ ID NO: 234423 - DNA, 75 bp, synthetic construct
  source 1..75: mol_type = other DNA
cgaggcaatgatggtgcgaattgccgatgttggtaacggcaactacagctacattgataccctctctgaagcgca

SEQ ID NO: 234424 - DNA, 75 bp, synthetic construct
  source 1..75: mol_type = other DNA
gcggtgaaattgtcggtctggtgggagaatccggctcgggtaaatcagtcaccgcaatgctgattatgcgtctgc

SEQ ID NO: 234425 - DNA, 75 bp, synthetic construct
  source 1..75: mol_type = other DNA
cagtttgatggttctgcggacatttcgatcccaacaattacgtccagaggacgtgttactgcgctcaccggaaca

SEQ ID NO: 234426 - DNA, 75 bp, synthetic construct
  source 1..75: mol_type = other DNA
gttggacgccttgtaaacactcgaattttcacttcatcaggtacgtacaccccgacaccaggaactaaacgaatc

SEQ ID NO: 234427 - DNA, 75 bp, synthetic construct
  source 1..75: mol_type = other DNA
tctctgacaaccagaacgcgaaaggcagtcgtgaaggcgggctggaggtaatgacgggactgctggcggcaaatc

SEQ ID NO: 234428 - DNA, 75 bp, synthetic construct
  source 1..75: mol_type = other DNA
ctaaagctgctgcagacgcgaaagccttagcccagcaagaagtgcaacaatattcagataaacagactttgcagg

SEQ ID NO: 234429 - DNA, 75 bp, synthetic construct
  source 1..75: mol_type = other DNA
aaacgcaaaataccctgagtaatcagggtattaaacgcggaaaagtaaaggttgagcgctttacattttccattc

SEQ ID NO: 234430 - DNA, 75 bp, synthetic construct
  source 1..75: mol_type = other DNA
tcacttccactgaagttattccgggaaaaggtgcgttagttcgtgcagagtttgctgctcatatcggtattcgtg

SEQ ID NO: 234431 - DNA, 75 bp, synthetic construct
  source 1..75: mol_type = other DNA
aactgacggggtgcctgatggagataaggctaacacatcaaatacaccggagttgattcatgaaaatcaagcatg

SEQ ID NO: 234432 - DNA, 75 bp, synthetic construct
  source 1..75: mol_type = other DNA
agggcgtgcaataggggcttggccgtctcaaatacacaaatgggcaaatgaatacaatggtcgagtaccgacggg

SEQ ID NO: 234433 - DNA, 75 bp, synthetic construct
  source 1..75: mol_type = other DNA
ataaaggaattttacaatcaccattaaaaaacaccaagcaacttttattaattaatggtaaatatcatgaggcca

SEQ ID NO: 234434 - DNA, 75 bp, synthetic construct
  source 1..75: mol_type = other DNA
cgctctgtgcaggcgcgctgctggccgcagcaccgttcgcccaggcgaaagaactgaaatcgataggcgtaacgg

SEQ ID NO: 234435 - DNA, 75 bp, synthetic construct
  source 1..75: mol_type = other DNA
gcgcgaaatacgagatctacaaattaattaaccaactcgtccagcagggtattgccgttattgtcatctcttccg

SEQ ID NO: 234436 - DNA, 75 bp, synthetic construct
  source 1..75: mol_type = other DNA
atgctggaaacgcgccgggcatccgtcatgtatttttcagagcacggtctggagtatgatccgacaaaagaacat

SEQ ID NO: 234437 - DNA, 75 bp, synthetic construct
  source 1..75: mol_type = other DNA
aggacggttgtggcgcacgtcttcggtgaacgcactctggccacactggagcgtattctgagcctgctgtcggcc

SEQ ID NO: 234438 - DNA, 75 bp, synthetic construct
  source 1..75: mol_type = other DNA
atggataaccagatcctgtcgttgtacgccaaaggcctgacaaccgtaagcgtacagcctgaaccgtctggtcag

SEQ ID NO: 234439 - DNA, 75 bp, synthetic construct
  source 1..75: mol_type = other DNA
cagtggtattaggtgttgatatcacttgccaaatcgctctgggtaccactgctaccggtgatcctacccgcgaat

SEQ ID NO: 234440 - DNA, 75 bp, synthetic construct
  source 1..75: mol_type = other DNA
atgcagtatgatacaaacatcagtcgtagttttgaagttgattgccaagataagcaatggcctggagaaaatagg

SEQ ID NO: 234441 - DNA, 75 bp, synthetic construct
  source 1..75: mol_type = other DNA
actgggagcctattgctctggcgacacaatccagtctcaacaagctgggcatcaatgtgaagctggaaaagctgg

SEQ ID NO: 234442 - DNA, 75 bp, synthetic construct
  source 1..75: mol_type = other DNA
cggtctttcgagaactacaagatgctattcttgagttgagcaataacgatattgaaaaaatcatatccggtgatt

SEQ ID NO: 234443 - DNA, 75 bp, synthetic construct
  source 1..75: mol_type = other DNA
ctgcgtgatgtctttctttgccatgcttgggatgaccgacaaggtattgccaaagagttacacgatttgctcgaa

SEQ ID NO: 234444 - DNA, 75 bp, synthetic construct
  source 1..75: mol_type = other DNA
cctgctgcgtgatggttatccgcagggagaactgaaggtgtcgcgtatcagtgaggcgatttccggtgcgaacgg

SEQ ID NO: 234445 - DNA, 75 bp, synthetic construct
  source 1..75: mol_type = other DNA
caggcgcggtcggtaacgctgacgacggtacggcattaatcctggtcacgccggttaatggtctgccgtcttccg

SEQ ID NO: 234446 - DNA, 75 bp, synthetic construct
  source 1..75: mol_type = other DNA
ctgcaattgattcgctggatgcagaaggcagtaccaatggcggtgccgggctggagatggcttatcagcaggcag

SEQ ID NO: 234447 - DNA, 75 bp, synthetic construct
  source 1..75: mol_type = other DNA
ggcgaacaacccgaaaggagcggagtcagtggagcgaaggagcggggccaaggggaacgcggaacagccacacat

SEQ ID NO: 234448 - DNA, 75 bp, synthetic construct
  source 1..75: mol_type = other DNA
accgggagatctcccctctgaccatctgccagtgtcggagatggcccgcaccgggaagacgaggagtcatagccg

SEQ ID NO: 234449 - DNA, 75 bp, synthetic construct
  source 1..75: mol_type = other DNA
cacgaagagatccgccggatttcctcacccatgatcgccgcgcgtatggggcgtgaccgttctaagcccctgcgt

SEQ ID NO: 234450 - DNA, 75 bp, synthetic construct
  source 1..75: mol_type = other DNA
cagggcaaaatctatcaggcaattattcaacttgtcagtgacagtaatccagtggatgaagtcgaaaaaaagtaa

SEQ ID NO: 234451 - DNA, 75 bp, synthetic construct
  source 1..75: mol_type = other DNA
gctctacgttatctttcatctggccctggaaacagcaatgcgacagggggaaatcctcacattacgctgggaaca

SEQ ID NO: 234452 - DNA, 75 bp, synthetic construct
  source 1..75: mol_type = other DNA
gatgttcaatcgctttctttagatgcagatgacatcaaatctatggtgataaaagcagtcactaaagggagattt

SEQ ID NO: 234453 - DNA, 75 bp, synthetic construct
  source 1..75: mol_type = other DNA
agggctggtgaacttacccctgtctggatccctgacctgactcatgaagctatgcgggatttaatcagagcccgt

SEQ ID NO: 234454 - DNA, 75 bp, synthetic construct
  source 1..75: mol_type = other DNA
ccgtggacttctgcgtgggcgcagaagggcttcgccatgtgccgggcgatgtcattgaaatctgtgatgatgact

SEQ ID NO: 234455 - DNA, 75 bp, synthetic construct
  source 1..75: mol_type = other DNA
atcagagtaaagacggtaatatctggctgcgcagttatgggggaagcctggactccttctccagtggcaaactga

SEQ ID NO: 234456 - DNA, 75 bp, synthetic construct
  source 1..75: mol_type = other DNA
ctggatggatgttttgacaccggttcactgactgccattatcggagcgaatggcacaggtaagtccaccttgctt

SEQ ID NO: 234457 - DNA, 75 bp, synthetic construct
  source 1..75: mol_type = other DNA
acccgtatgggaaacgctgttattgcgggaatcacggttgcctcgaaaccatcgccagtgtggacagtattcttg

SEQ ID NO: 234458 - DNA, 75 bp, synthetic construct
  source 1..75: mol_type = other DNA
acaaccggaagcgcacgatcgaattaaatttaacgacgacctgtacagagagactaacttcgccgtgcgctttcg

SEQ ID NO: 234459 - DNA, 75 bp, synthetic construct
  source 1..75: mol_type = other DNA
gatatgtgggaactcctccccgtgatggcgaggacagaaagattcaaggtggtccgctttatttagatatcattg

SEQ ID NO: 234460 - DNA, 75 bp, synthetic construct
  source 1..75: mol_type = other DNA
atttcaatcctttacattacaggtttagtcctgacaattgtgggcctgagtatttttaataaattaaaatatcga

SEQ ID NO: 234461 - DNA, 75 bp, synthetic construct
  source 1..75: mol_type = other DNA
tgatacccatacagactccattacacatggcagtgcagttctggtcccattggtgatcgcgcttactgaagactt

SEQ ID NO: 234462 - DNA, 75 bp, synthetic construct
  source 1..75: mol_type = other DNA
ataccttcatcagaaataaatgcatcaattgtggatggtcagcatagaatagaaggattaaaaaaagcaatcgaa

SEQ ID NO: 234463 - DNA, 75 bp, synthetic construct
  source 1..75: mol_type = other DNA
gccgggcatccgtactgtcgctggacagcgagttactgcgcaatctactcggacaggtcgatccgggggaattac

SEQ ID NO: 234464 - DNA, 75 bp, synthetic construct
  source 1..75: mol_type = other DNA
tctttaccactgtgaccaccggggactgccgcaggcgctcatcagcccggaaggggaaacggcgtggtgcgggga

SEQ ID NO: 234465 - DNA, 75 bp, synthetic construct
  source 1..75: mol_type = other DNA
cggaaaatggcattgtacatcgcatgccgttctacgaggatgtaaaagagatgccgctcggcgaggctctggagc

SEQ ID NO: 234466 - DNA, 75 bp, synthetic construct
  source 1..75: mol_type = other DNA
cggcgttagtgttacaggtcgtgattggcgggattatgctttggttaccgccagggcgttgggtcgctgaaaaag

SEQ ID NO: 234467 - DNA, 75 bp, synthetic construct
  source 1..75: mol_type = other DNA
tagtctcggtattgccattgtcgaagagcagcttcagcaactgcgtgaacagggtctggtgatgaatctgcaaca

SEQ ID NO: 234468 - DNA, 75 bp, synthetic construct
  source 1..75: mol_type = other DNA
atgccgggccgcacgccgggccatcgcaccccgctttggcaacaacggctgcgcgccagtcagttgctggaaatc

SEQ ID NO: 234469 - DNA, 75 bp, synthetic construct
  source 1..75: mol_type = other DNA
aaagcagcggctgctgcactcgcaaaatctgatcctgatcgttacggcaatatcatcaagcagcagggggggcaa

SEQ ID NO: 234470 - DNA, 75 bp, synthetic construct
  source 1..75: mol_type = other DNA
cagcaggccattcgccagcgggcgattgtctatgtcggtctggatgcgctgtccgatgcagagattgccgccgct

SEQ ID NO: 234471 - DNA, 75 bp, synthetic construct
  source 1..75: mol_type = other DNA
atatattaaatgcgatccaatttgctcacggtgattttaatagacagcttaaatataaagttttagaacatcgtt

SEQ ID NO: 234472 - DNA, 75 bp, synthetic construct
  source 1..75: mol_type = other DNA
tatcggacaaaacaaacatcgacatgaatgtcgcgtggttgtataagacgtttgagaataatgccaacgctcgaa

SEQ ID NO: 234473 - DNA, 75 bp, synthetic construct
  source 1..75: mol_type = other DNA
tcaggatctggcctacggatttaccggaccaatagcgggcctgctgacgccgtttatcggctatcagcaggtctt

SEQ ID NO: 234474 - DNA, 75 bp, synthetic construct
  source 1..75: mol_type = other DNA
atgttgcagataatgttatttttgatacatacgcgttataaatatcaaaaacacaaaccagataaatatcttggt

SEQ ID NO: 234475 - DNA, 75 bp, synthetic construct
  source 1..75: mol_type = other DNA
tactggaatgaagaaacggaattcctgattgagagttggttgacgttccctgcatatccgtatggctggtttaaa

SEQ ID NO: 234476 - DNA, 75 bp, synthetic construct
  source 1..75: mol_type = other DNA
atgattttaaatcaatagcatctgattttcacgttacgctggtaagtgatggggagcgcttgagtggggcacgtc

SEQ ID NO: 234477 - DNA, 75 bp, synthetic construct
  source 1..75: mol_type = other DNA
cggggtatccaacgaccagcaatatgtgggtgatcggcaaaagcaaagcccaggatgcgaaagcaatcatggtaa

SEQ ID NO: 234478 - DNA, 75 bp, synthetic construct
  source 1..75: mol_type = other DNA
tacaggacgtcatgctgggagcggtagaacaccgcttcggcagcgaccttcctgcgtctccagtggagtgcctga

SEQ ID NO: 234479 - DNA, 75 bp, synthetic construct
  source 1..75: mol_type = other DNA
aggggggatggaatttttatcagtatccgttgaatccagttacgaatacagatcctctggggttagaagtttttc

SEQ ID NO: 234480 - DNA, 75 bp, synthetic construct
  source 1..75: mol_type = other DNA
ggagcttcacaccactcatcagggtcgaaactgccaccggtgaactggccagaacgcagcgccgcagcctggcgg

SEQ ID NO: 234481 - DNA, 75 bp, synthetic construct
  source 1..75: mol_type = other DNA
attaatgccggattccaggaggtttccagtggtggcagtgctaccagcaccactattaatgccgggttccaggct

SEQ ID NO: 234482 - DNA, 75 bp, synthetic construct
  source 1..75: mol_type = other DNA
attatcatggtgataaagttaccatcccatcttgccgtattgccagtgagcaagcgattgtggcattgaaacgcg

SEQ ID NO: 234483 - DNA, 75 bp, synthetic construct
  source 1..75: mol_type = other DNA
tgggccgatttagcctgggttgcagaaaacgttttaaccttgccggagttacagacatttgttgaaaaaaacgta

SEQ ID NO: 234484 - DNA, 75 bp, synthetic construct
  source 1..75: mol_type = other DNA
ggtagtgctgtagacaccaccattgaggaggggcttcagactgttctcaatggcggaaatgtctccgggactcac

SEQ ID NO: 234485 - DNA, 75 bp, synthetic construct
  source 1..75: mol_type = other DNA
caccaccattgaggggggactgcagactgttttcggtggcggaagtgtctccgggactctcattaataacgggga

SEQ ID NO: 234486 - DNA, 75 bp, synthetic construct
  source 1..75: mol_type = other DNA
cagcgctataagcacgactatcaatgatggggcacagataattttcaatggtggtaccgcttcaacgacaaccat

SEQ ID NO: 234487 - DNA, 75 bp, synthetic construct
  source 1..75: mol_type = other DNA
aatggtttacagaaaatcttcgttccgattcagaggagtataaggatgggatttatgacgattttcgtcgttttg

SEQ ID NO: 234488 - DNA, 75 bp, synthetic construct
  source 1..75: mol_type = other DNA
tgaaacaaacgttaatcgtcagttttgtcggcgactcgagtaccgcgcaggttgagctgcagaagtcgaaaaatg

SEQ ID NO: 234489 - DNA, 75 bp, synthetic construct
  source 1..75: mol_type = other DNA
gcttatgccacagctgaacggtgtggatgcggctaaagcccccgccgtggtgaatatcatttctgtttcgtcatc

SEQ ID NO: 234490 - DNA, 75 bp, synthetic construct
  source 1..75: mol_type = other DNA
caaccgccacactaacttttattgcgcatgatgcagcaggtaatcctgttatcgggctggtgctttcgacgcgtc

SEQ ID NO: 234491 - DNA, 75 bp, synthetic construct
  source 1..75: mol_type = other DNA
aatctctttcgagatcgaaggccatagctatagcgatgctgattggtctaagatcatgcacattgcagatcaact

SEQ ID NO: 234492 - DNA, 75 bp, synthetic construct
  source 1..75: mol_type = other DNA
aatggcaacccactaaaagataaagaaatcaccttctctgtgccaaatgacgtcgcaagtcggttctcgattagc

SEQ ID NO: 234493 - DNA, 75 bp, synthetic construct
  source 1..75: mol_type = other DNA
ataccgtcacgtttgcggtattaagcggatcggcaacttccttcaacaatcaaaacaccgcaaaaacggatgtta

SEQ ID NO: 234494 - DNA, 75 bp, synthetic construct
  source 1..75: mol_type = other DNA
tttatcaaacgtcaccagtggtggcaggcgtgcgaccagctcacccgctgggtgtatgtcaatggtacaaaaaat

SEQ ID NO: 234495 - DNA, 75 bp, synthetic construct
  source 1..75: mol_type = other DNA
tactcgacatcctgtgcattctgatccaacacttcaggtgcgagccagccacggtaccggtgacagattttacct

SEQ ID NO: 234496 - DNA, 75 bp, synthetic construct
  source 1..75: mol_type = other DNA
acatgatgtctgggataaaacaggtttatctgagggtgttcgtcatccgtttacatacataatggaagcctgtga

SEQ ID NO: 234497 - DNA, 75 bp, synthetic construct
  source 1..75: mol_type = other DNA
ggaaatattcccgctggactgttccctggcacagcgaatgtctgtatgacacggggatggtctgctccggggtgt

SEQ ID NO: 234498 - DNA, 75 bp, synthetic construct
  source 1..75: mol_type = other DNA
aaggtgtgtgaagcaacagccaccgcagaaggtgtatgacgcggtggtgtcatttgccttcaacgtgggaacggg

SEQ ID NO: 234499 - DNA, 75 bp, synthetic construct
  source 1..75: mol_type = other DNA
catttgccttcaacgtggggacaggtaatgcctgcagctccacgctggtgaaattgctcaatcagcggcgctggg

SEQ ID NO: 234500 - DNA, 75 bp, synthetic construct
  source 1..75: mol_type = other DNA
atatcggttttgccaaacagacctaccagattgataccgggctgagtaatgaagcttatgcgctgggagcaggca

SEQ ID NO: 234501 - DNA, 75 bp, synthetic construct
  source 1..75: mol_type = other DNA
tgtgcgtaaggccaccaatggtgtgaaacatgtggtgccgatggatgttatcgagagactaccggaactgatgca

SEQ ID NO: 234502 - DNA, 75 bp, synthetic construct
  source 1..75: mol_type = other DNA
gtttgcatcctggctgaatgcgttctcaggtggcagccagtaccgtcccggcgcggtggatatcacaccggaatc

SEQ ID NO: 234503 - DNA, 75 bp, synthetic construct
  source 1..75: mol_type = other DNA
cggaatggatgtgtcgccgtgggagggcgtggctgacgcaacgatcgaaggtggtactcttggtgctgtgatggg

SEQ ID NO: 234504 - DNA, 75 bp, synthetic construct
  source 1..75: mol_type = other DNA
tgcgctgaacacgccaatgagtgaaggctatgatgatcccgcagtctggctgacgaaggggatgaattttgtcgg

SEQ ID NO: 234505 - DNA, 75 bp, synthetic construct
  source 1..75: mol_type = other DNA
aggaatcaccggaagtgcaggcgggtgaatttctggcacatatggcggagaaacagccgaataaattcgtggcgg

SEQ ID NO: 234506 - DNA, 75 bp, synthetic construct
  source 1..75: mol_type = other DNA
gatgctgacctgatggaacagccagcattcatgcgtgacccgcgattccgtggttttacgggggatgatacagaa

SEQ ID NO: 234507 - DNA, 75 bp, synthetic construct
  source 1..75: mol_type = other DNA
gaaaacttcatgggggcgcagatttaccaggagaacatgccatttggcacaccgaaaccggacagccaactgggc

SEQ ID NO: 234508 - DNA, 75 bp, synthetic construct
  source 1..75: mol_type = other DNA
ttatatggcggaagaactcttccacgggaaggcggaaaacgacctgaacgtgatgaaggagcgctacgttcagcc

SEQ ID NO: 234509 - DNA, 75 bp, synthetic construct
  source 1..75: mol_type = other DNA
cgaagcgacaggcggtgatggatgagctgaaggcgaagccgcgtcctgaactgcttgaggaataccgaaaactca

SEQ ID NO: 234510 - DNA, 75 bp, synthetic construct
  source 1..75: mol_type = other DNA
tggttccattcactggataattattttggtcgttatgatgtttccactgacgggaagatcacgtcaggtggcgac

SEQ ID NO: 234511 - DNA, 75 bp, synthetic construct
  source 1..75: mol_type = other DNA
cctctttttctcggaaagccgggatgagttactgaaaaaggcgaaagcatatttcgatgaacaaggctccagaga

SEQ ID NO: 234512 - DNA, 75 bp, synthetic construct
  source 1..75: mol_type = other DNA
tgatggcgttgtatcgcagtgaaattcccaccagaacaagccgtaacatgcagaaatggatcagcattgttaaaa

SEQ ID NO: 234513 - DNA, 75 bp, synthetic construct
  source 1..75: mol_type = other DNA
gccgacagaactgaacgatgtcagacttgttcgcgagaccatccgtacgctgggccagcgtgtgcgtgatgggta

SEQ ID NO: 234514 - DNA, 75 bp, synthetic construct
  source 1..75: mol_type = other DNA
ctgctgatgaactggctgatggcgtgatggagtctctgcgatttgatgcgcatgagctgctgattatccaccttc

SEQ ID NO: 234515 - DNA, 75 bp, synthetic construct
  source 1..75: mol_type = other DNA
tgctttcatccttgctggcactggaacgactgttccgtgacgatttgcaggacggcagtcttgaacaattgatgt

SEQ ID NO: 234516 - DNA, 75 bp, synthetic construct
  source 1..75: mol_type = other DNA
gaaaggcgagaatcagtatgccgttgaaatggataatcctgcgttctctgaagatgtggcaacggaaaccattaa

SEQ ID NO: 234517 - DNA, 75 bp, synthetic construct
  source 1..75: mol_type = other DNA
cgcgcggcgtcgagtacaacatggcgcagaatgctgtttatcgtgtgtgtggcggcaagctctacaaaggcgaaa

SEQ ID NO: 234518 - DNA, 75 bp, synthetic construct
  source 1..75: mol_type = other DNA
gccagcgcgagcattgagaaaatactacgctcctacactgctgatgaactggctgatggtgtgatggaatcgctg

SEQ ID NO: 234519 - DNA, 75 bp, synthetic construct
  source 1..75: mol_type = other DNA
cgcgccatgtcctagtgtatgacgcatcttcaagcgctaatggtccgcaatggtgtgtgctgaaaacaggcctgt

SEQ ID NO: 234520 - DNA, 75 bp, synthetic construct
  source 1..75: mol_type = other DNA
aagtgggtggagagtgtaaagagcatccgcacaagtgtggcgggaatgctggaaggaaaagtgactgccggacgg

SEQ ID NO: 234521 - DNA, 75 bp, synthetic construct
  source 1..75: mol_type = other DNA
ggtgatgcgatgattcaaagcccggtaaaaacaggggcgcgtattttaaatgagttcagccgtatggggctgccg

SEQ ID NO: 234522 - DNA, 75 bp, synthetic construct
  source 1..75: mol_type = other DNA
atgtgaaagagcgtaacctcgtcattatgaaatcgatgttcgggggcaaggccggtgagtactggagtattcctc

SEQ ID NO: 234523 - DNA, 75 bp, synthetic construct
  source 1..75: mol_type = other DNA
ggagaacatgccgtttggtacaccaaaaccggacagccagctgggaagacgttcaacgccagaagcgtacaaggc

SEQ ID NO: 234524 - DNA, 75 bp, synthetic construct
  source 1..75: mol_type = other DNA
agatgcgtgagatttcccgtgaggagcagcgtaacgccaccaaccgcgatcgtaccgggccagaacgccgcaagg

SEQ ID NO: 234525 - DNA, 75 bp, synthetic construct
  source 1..75: mol_type = other DNA
cttgctgagtggatggaaggcagaatgcccgcccgttacgcggacacatggcaactgttacgcacgctgccaccc

SEQ ID NO: 234526 - DNA, 75 bp, synthetic construct
  source 1..75: mol_type = other DNA
gcgatcatttcattgtggctaacgcgattgtttactccttcggtaacgatatttatagctacgaaacaggcgcac

SEQ ID NO: 234527 - DNA, 75 bp, synthetic construct
  source 1..75: mol_type = other DNA
gtgccgcaaaacctgatgccgtactggtcaaaaatgaagagaaaaatgccagtgagacgggctcgatttattctt

SEQ ID NO: 234528 - DNA, 75 bp, synthetic construct
  source 1..75: mol_type = other DNA
atttgtgaaagatgaaatcggctttagttacaacggctactaccgttctggttggggaacagcctctcatggttc

SEQ ID NO: 234529 - DNA, 75 bp, synthetic construct
  source 1..75: mol_type = other DNA
actggataaggccattcagcagcagttcgcaaaaaaactgaaaaaatgcagtgaaaatcctcatatagcctctgc

SEQ ID NO: 234530 - DNA, 75 bp, synthetic construct
  source 1..75: mol_type = other DNA
tacaaaataaaacttcgcgcatcaggttttcgtctggtctatcaggtgattgatgacatgttaattattgcggtt

SEQ ID NO: 234531 - DNA, 75 bp, synthetic construct
  source 1..75: mol_type = other DNA
aaagaacacggtattattctgggccgtagcaggcttcccgaaaaaagtaaccgcggccgaccacgacacaactga

SEQ ID NO: 234532 - DNA, 75 bp, synthetic construct
  source 1..75: mol_type = other DNA
aagatgcactgaaagaatggcaaaaactggataaggcaattcagcagcagtttgctaaaaagctaaagaagtgca

SEQ ID NO: 234533 - DNA, 75 bp, synthetic construct
  source 1..75: mol_type = other DNA
tagtgataagtctgcggtagacgacttacgttacgcccttagctatctggctaaacaggatcagaaagaacacgg

SEQ ID NO: 234534 - DNA, 75 bp, synthetic construct
  source 1..75: mol_type = other DNA
aaaactacgaggattaaaagattgctacaaaataaaacttcgcgcatcaggttttcgtctggtctatcaggtgat

SEQ ID NO: 234535 - DNA, 75 bp, synthetic construct
  source 1..75: mol_type = other DNA
actggataagaccattcaacaacagtttgtgaaaaaactaaaaaaatgcagcgaaaatcctcatataccgtcggc

SEQ ID NO: 234536 - DNA, 75 bp, synthetic construct
  source 1..75: mol_type = other DNA
aagatgcgctgaaagagtggcaaaaactggacaaaactattcagcaacagtttgcgaaaaagctaaaaaagtgct

SEQ ID NO: 234537 - DNA, 75 bp, synthetic construct
  source 1..75: mol_type = other DNA
tgggtaatggaatatacaccagacaaagggcttcatattcattttgtcggctacctggatgggcaacgtcacaag

SEQ ID NO: 234538 - DNA, 75 bp, synthetic construct
  source 1..75: mol_type = other DNA
gaacaatattgaatacatgcactacgaagcggagctggtggtagttattggcaagcaggcgcgtaacgtcagcga

SEQ ID NO: 234539 - DNA, 75 bp, synthetic construct
  source 1..75: mol_type = other DNA
agaagcgcgctgcaaagacaactggatgaagacttactatattttaataaagaaaaagccgctgactggcttcat

SEQ ID NO: 234540 - DNA, 75 bp, synthetic construct
  source 1..75: mol_type = other DNA
ccggaagtgcaggcgggtgaatttctggcgcatatggcagagaaacagccgaataaattcgtggcggcatgggag

SEQ ID NO: 234541 - DNA, 75 bp, synthetic construct
  source 1..75: mol_type = other DNA
ggtgatgtattgccaacaatgggtaaaggtttcgcccagtccgtccggggaacaggggaaatggcccgtggactc

SEQ ID NO: 234542 - DNA, 75 bp, synthetic construct
  source 1..75: mol_type = other DNA
cgaggcacagcgaagaccgttaaaagcggcattgtcagaaatgccacggaacagggcgtaattaacggggcacag

SEQ ID NO: 234543 - DNA, 75 bp, synthetic construct
  source 1..75: mol_type = other DNA
tggcgcaacagtcggcgatggtgaaatcggttgagcgggatatgaaaattgccgtggatcggtttaaccgcgagt

SEQ ID NO: 234544 - DNA, 75 bp, synthetic construct
  source 1..75: mol_type = other DNA
ccgtaaggcacctgagcacaacacagataacacctgggcttatccgacgaatgcggaactggatggcggtattcg

SEQ ID NO: 234545 - DNA, 75 bp, synthetic construct
  source 1..75: mol_type = other DNA
atgaaaggtgtcggcaaagatttccgaaacgccgactatatcgactatctgccagcgaatatgttggctacaccc

SEQ ID NO: 234546 - DNA, 75 bp, synthetic construct
  source 1..75: mol_type = other DNA
tagcacgcccgtcatgattaaactcatctctgcggcatttaccttaggatttgcttatgctgcatggaacgtcgg

SEQ ID NO: 234547 - DNA, 75 bp, synthetic construct
  source 1..75: mol_type = other DNA
gcgattggtggtgcactgtatctgtctgatgtggacatgtccggtaacggtgaggcggtggctgaacaggagcct

SEQ ID NO: 234548 - DNA, 75 bp, synthetic construct
  source 1..75: mol_type = other DNA
acgacaaacgtgttttgtggaagcgagtcgggcgcatcaggaaaaatgtcggcttcaaattgcgcgttatcacga

SEQ ID NO: 234549 - DNA, 75 bp, synthetic construct
  source 1..75: mol_type = other DNA
aacatggcgagacttcatcgtctgctttggttcatcgacgattgaatatttttccctgacaggtgcaaccaccgt

SEQ ID NO: 234550 - DNA, 75 bp, synthetic construct
  source 1..75: mol_type = other DNA
atggcaagggaggatatggacactcgcattgctgaatatggtcgtttctttgttatcacagaaacggacaaaaca

SEQ ID NO: 234551 - DNA, 75 bp, synthetic construct
  source 1..75: mol_type = other DNA
tacaatgctgatgatcttataaaacctgatgaagaaaatcctgacgactacctgctatttctcactactggagag

SEQ ID NO: 234552 - DNA, 75 bp, synthetic construct
  source 1..75: mol_type = other DNA
gtccggagattctggaccagtatacagccggtcaaaatgactggatggagattgatcagtctgcggtatggccga

SEQ ID NO: 234553 - DNA, 75 bp, synthetic construct
  source 1..75: mol_type = other DNA
tgccttccgctctgtgctacgtgaagctgcgtatgacatagaagcagaaagtgacccatataagaggcagctgat

SEQ ID NO: 234554 - DNA, 75 bp, synthetic construct
  source 1..75: mol_type = other DNA
gtagaaatctacagctggctggcttgtggcgcgggtttcattgatgttagcttatgccaaaacctggcatcttaa

SEQ ID NO: 234555 - DNA, 75 bp, synthetic construct
  source 1..75: mol_type = other DNA
aattgagtttctccgcatatgttattctttgctaggggaaaagaaacgattagtttacgcttatgatgaattaca

SEQ ID NO: 234556 - DNA, 75 bp, synthetic construct
  source 1..75: mol_type = other DNA
gctcgaaaagatagagtctgatgaattcaaaacagcgctaaaacatgcatggacttccaaccaagagttcgcata

SEQ ID NO: 234557 - DNA, 75 bp, synthetic construct
  source 1..75: mol_type = other DNA
ctatagcggattcaccctcaccccgtcggcgcaatccccgcgtctgctggaactcaccttcaccgaacagacgac

SEQ ID NO: 234558 - DNA, 75 bp, synthetic construct
  source 1..75: mol_type = other DNA
gcgctgaaggtgcgctgttgatcaatgcggtgggtgtcgatgatgtgaagcaagcggatgagatggtgaagctgg

SEQ ID NO: 234559 - DNA, 75 bp, synthetic construct
  source 1..75: mol_type = other DNA
caaacagttcctcgagcaggttgccgagtggcccgtgcaggcgctggagtacaaatcgtttctgcgtttccgtgt

SEQ ID NO: 234560 - DNA, 75 bp, synthetic construct
  source 1..75: mol_type = other DNA
aacattgcccgtctttatgaaaatagactatccgtaaagaatatagaacgtctaggtaacacaaataaaattcgg

SEQ ID NO: 234561 - DNA, 75 bp, synthetic construct
  source 1..75: mol_type = other DNA
ctaaaagatgtctttaatattacaagccattcttcagaaataaagagccacccttcatatttccttctcatgatg

SEQ ID NO: 234562 - DNA, 75 bp, synthetic construct
  source 1..75: mol_type = other DNA
acaaatctttcctgcgtttccgtgtgggcaaaattcttgacgacttgtgtgcaaatcagctgcaaccactgctgt

SEQ ID NO: 234563 - DNA, 75 bp, synthetic construct
  source 1..75: mol_type = other DNA
gacaccagccatggccgttttgcatgggaagtacgtcaggaacgcgatcaactttttgttggtgatgacgccatc

SEQ ID NO: 234564 - DNA, 75 bp, synthetic construct
  source 1..75: mol_type = other DNA
cagcaagccgcgcggcaggtggtcagttaagcgagaaaaaatcgtcttccttggcgcaggttcagcgggatgcgg

SEQ ID NO: 234565 - DNA, 75 bp, synthetic construct
  source 1..75: mol_type = other DNA
aattaaaaaaacttctaaaaaagaaagcaataaaattgattgcttttaagcacgatattgatcttgattcagcta

SEQ ID NO: 234566 - DNA, 75 bp, synthetic construct
  source 1..75: mol_type = other DNA
tttgtgcaagtctggttgccgccagagctggcgaagcaggttaaagaaatggctaaaccatatcagaataaaaat

SEQ ID NO: 234567 - DNA, 75 bp, synthetic construct
  source 1..75: mol_type = other DNA
tggtcgatcgctttggtctgctcaccgacaagatgccgaatctgctgccttttcagaccaaactggtgcagaagc

SEQ ID NO: 234568 - DNA, 75 bp, synthetic construct
  source 1..75: mol_type = other DNA
tgcttccggcgcgtcacgtatcaccgatgagatgctgatgtcagcaagtgaaacgcttgctcagtattcgccgct

SEQ ID NO: 234569 - DNA, 75 bp, synthetic construct
  source 1..75: mol_type = other DNA
aaaaacgcgatgccgctgttgaaccgctatcgtaatgaaatttgctcctttaatgatgacattcagggcaccgca

SEQ ID NO: 234570 - DNA, 75 bp, synthetic construct
  source 1..75: mol_type = other DNA
gtactgcgtacgctctcacagttagagtggctgattaataagctaatggcccgtccgatgacaggcaaacagcgt

SEQ ID NO: 234571 - DNA, 75 bp, synthetic construct
  source 1..75: mol_type = other DNA
ccgagtttaatgccagtgatgcacgttatctgcatccttcctggttgctgaagcgtctgcaaaaagcgtatccag

SEQ ID NO: 234572 - DNA, 75 bp, synthetic construct
  source 1..75: mol_type = other DNA
ttgtttatggcgtcaatcaggatcaacttcgtgcggaacaccgcatcgtttctaacgcttcctgtaccacgaatt

SEQ ID NO: 234573 - DNA, 75 bp, synthetic construct
  source 1..75: mol_type = other DNA
aagaatggcagcgtatcgcaccggcattacgcacatgcagccaggtaacgatcgatatggcatacgccgtactgg

SEQ ID NO: 234574 - DNA, 75 bp, synthetic construct
  source 1..75: mol_type = other DNA
tttatcgacagccgttgaactgggtaaatggccagacggtgttgccttgacggaagaacaaaaagagaactgtct

SEQ ID NO: 234575 - DNA, 75 bp, synthetic construct
  source 1..75: mol_type = other DNA
ggaactgaaagcagaatgtggtgccgttgatatgcgtagtgtggcaaagctgatcagcgatttggcaacgcaact

SEQ ID NO: 234576 - DNA, 75 bp, synthetic construct
  source 1..75: mol_type = other DNA
gttggtggagtctcacaagtttttacttacaatagtgttattaacggttttcactattactggcaaggaacacct

SEQ ID NO: 234577 - DNA, 75 bp, synthetic construct
  source 1..75: mol_type = other DNA
catttaaccgatgtcccctggcgacaggcgctacaaaccgtagtgaaaagcgccgggttgataacgcgtcaggag

SEQ ID NO: 234578 - DNA, 75 bp, synthetic construct
  source 1..75: mol_type = other DNA
aaacagggaagcgagatcccgtatcaggtttccagtggtgaaagcggcgcgacgtcggtggaatttaaagaggcc

SEQ ID NO: 234579 - DNA, 75 bp, synthetic construct
  source 1..75: mol_type = other DNA
ttaaatgcagggcaaggtactattgcctttaatagctctgctgcacaagctaatatcagctcttcggtgataagt

SEQ ID NO: 234580 - DNA, 75 bp, synthetic construct
  source 1..75: mol_type = other DNA
aaaagattaggcaagagcgaatattttattattactaaaagttctccagtacgtgcaatccttaatgactttgct

SEQ ID NO: 234581 - DNA, 75 bp, synthetic construct
  source 1..75: mol_type = other DNA
tcactattactggcaagggactcctggttcggcctttatagtggcaatgaaaaagacaggtgttacacaggattt

SEQ ID NO: 234582 - DNA, 75 bp, synthetic construct
  source 1..75: mol_type = other DNA
ccatcgctgatggtgcaaaaaggcatcgccggaacttactgcaaaacgccgtttgctgattcctatgcattcatc

SEQ ID NO: 234583 - DNA, 75 bp, synthetic construct
  source 1..75: mol_type = other DNA
ctgctgatgaactggctgatggtgtgatggaatcgctgcggtttgatgctcatgagttgctgattatccaccttc

SEQ ID NO: 234584 - DNA, 75 bp, synthetic construct
  source 1..75: mol_type = other DNA
atggccaactggtcgagtatcgttatgatggcacggttaaagcagtctcaaactggcctacagacagcggattca

SEQ ID NO: 234585 - DNA, 75 bp, synthetic construct
  source 1..75: mol_type = other DNA
gtcgttacatctaacagatgttccctggaagcaggcactacaaactgtagtgaaaagcgccggactgataacgcg

SEQ ID NO: 234586 - DNA, 75 bp, synthetic construct
  source 1..75: mol_type = other DNA
cgcgcggcgtcgagtacaacatggcgcagagtgctgtttatcgcgtgtgtggtggcaagctgtacaaaggagaaa

SEQ ID NO: 234587 - DNA, 75 bp, synthetic construct
  source 1..75: mol_type = other DNA
tcctcgtgtacgacgcatcttcaagcgccaatggtccgcaatggtgtgtgttgaaaacaggcctgtatgacgatg

SEQ ID NO: 234588 - DNA, 75 bp, synthetic construct
  source 1..75: mol_type = other DNA
gagttcgtttgttacttgatattcaggatggcaatcaatcgactagccaaagcaatattcaggataccggcagtc

SEQ ID NO: 234589 - DNA, 75 bp, synthetic construct
  source 1..75: mol_type = other DNA
aagttgatgaatctgccagcgccgaatcctgaagcgccgcgtgaaggcgtagtggtacccccggtaccggatcag

SEQ ID NO: 234590 - DNA, 75 bp, synthetic construct
  source 1..75: mol_type = other DNA
aaagcacctcaaacaaactgatcgcatttcgcatgatgcgttacgccattgccgcaatgcaaaatcaccttgatg

SEQ ID NO: 234591 - DNA, 75 bp, synthetic construct
  source 1..75: mol_type = other DNA
caaaaccatgctggatgccggagtctctcttgaggacgttctgcgatttaccagcctgacggttgaagaccttgc

SEQ ID NO: 234592 - DNA, 75 bp, synthetic construct
  source 1..75: mol_type = other DNA
cggtcgcgaccgctttactccgcacccggatctgcgccgtgaactgatgcgtcagcgcggctatttcgcttacgc

SEQ ID NO: 234593 - DNA, 75 bp, synthetic construct
  source 1..75: mol_type = other DNA
aactcaccttcaccgaacagacgaccaaacagtttctcgaacaggttgccgaatggcccgtgcaggcgctggagt

SEQ ID NO: 234594 - DNA, 75 bp, synthetic construct
  source 1..75: mol_type = other DNA
ttgatgctgcccaggcgcttagctattcggcatttgctggtcgtgttcagcagagcgatgaccagcatcaccttg

SEQ ID NO: 234595 - DNA, 75 bp, synthetic construct
  source 1..75: mol_type = other DNA
aacgttctgatgtgaatggcgtatctcgcggcgtcgagtacaacatggcgcagaacgctgtatatcgcgtgtgtg

SEQ ID NO: 234596 - DNA, 75 bp, synthetic construct
  source 1..75: mol_type = other DNA
tgaagggattagggaaaagtgcggttaatgctgattatatagaccaacttccagtcaatcttttagctacgccca

SEQ ID NO: 234597 - DNA, 75 bp, synthetic construct
  source 1..75: mol_type = other DNA
tggctcacttcccagcacaggcaaaggtgctgtagaaagaaacggcaacctgtttgataacagtgtaaagatttc

SEQ ID NO: 234598 - DNA, 75 bp, synthetic construct
  source 1..75: mol_type = other DNA
ccatcgctgatggtgcagaaaggcattgccggaacttactgcaaaacgccgtttgctgattcctatgcgtttatc

SEQ ID NO: 234599 - DNA, 75 bp, synthetic construct
  source 1..75: mol_type = other DNA
aaacgccgactatatcgactatctgccagtgaatatgttggctacacccaaagaaatcctgaacagcagcggata

SEQ ID NO: 234600 - DNA, 75 bp, synthetic construct
  source 1..75: mol_type = other DNA
ttcatggtttatcactgaccttgaagacgaatcgcatcctgaccgctacagcgcacaatatcgtgccgagtctca

SEQ ID NO: 234601 - DNA, 75 bp, synthetic construct
  source 1..75: mol_type = other DNA
ctaaacaggatcagaaagaacacggtattattctgtgtcgtatcaggcttcccgaaaaaagtaaccggggccgac

SEQ ID NO: 234602 - DNA, 75 bp, synthetic construct
  source 1..75: mol_type = other DNA
aaagcctcggatgaatggctgactggcaagatgtcgccgggggcgcagcgggcgctgaatacaccgatgactgaa

SEQ ID NO: 234603 - DNA, 75 bp, synthetic construct
  source 1..75: mol_type = other DNA
cagtcggcgatggtgaaatcggtagagcgggatatgaaggttgccgtggatcgctttaaccgcgagtacaacaaa

SEQ ID NO: 234604 - DNA, 75 bp, synthetic construct
  source 1..75: mol_type = other DNA
gtggtgactgacggcgaacgtattctggggcttggtgaccagggcatcggcggggtggggattccgatcgggaaa

SEQ ID NO: 234605 - DNA, 75 bp, synthetic construct
  source 1..75: mol_type = other DNA
gctgccggtaatgttgttggtggtgtgcttggtgcattcagcccgattggcagtgagacgtcggaaacactgtcc

SEQ ID NO: 234606 - DNA, 75 bp, synthetic construct
  source 1..75: mol_type = other DNA
tgctgtgggagcgggttatctgcttggctcgcttaatcggagtgtggcgggtgaggatgatgacggggttaactg

SEQ ID NO: 234607 - DNA, 75 bp, synthetic construct
  source 1..75: mol_type = other DNA
agggagttgcgttttattcccgtaagggcgtgacccgcacacctgaaggcaatctgatttcggatgttaaccgca

SEQ ID NO: 234608 - DNA, 75 bp, synthetic construct
  source 1..75: mol_type = other DNA
tccgcgctctggtggcgatcgcgctgccttttgtcactcagatctgggaaatctacatcttgatcttcttcctgc

SEQ ID NO: 234609 - DNA, 75 bp, synthetic construct
  source 1..75: mol_type = other DNA
tggcctggggtcaggcattttcctgaaggattacatcacgctggttgtgctctgggcactgctgggggtgggcta

SEQ ID NO: 234610 - DNA, 75 bp, synthetic construct
  source 1..75: mol_type = other DNA
ctttagaaacaacgattcttacgtcgaaagcatactacacagaaactattgaactcgacgcgacccatttaagcg

SEQ ID NO: 234611 - DNA, 75 bp, synthetic construct
  source 1..75: mol_type = other DNA
gcatcagcccggcgtatacccttccggtggtgctggatgtcgggacgaacaaccaacagctgcttaatgatccgc

SEQ ID NO: 234612 - DNA, 75 bp, synthetic construct
  source 1..75: mol_type = other DNA
cggagcagatgagaatactggcagaacggttgtcgtataaccgtccggccctgtgtggccaggtcgtggttatgc

SEQ ID NO: 234613 - DNA, 75 bp, synthetic construct
  source 1..75: mol_type = other DNA
ttgcgcctggcatgaagagcgcgctgtttgttccggatcagcttgtcgctggcacgctccagctggtgactgaca

SEQ ID NO: 234614 - DNA, 75 bp, synthetic construct
  source 1..75: mol_type = other DNA
aaaatcaacccgaaaatgccggacggcggttcggggatgaccaacgcggaagcgacggaaatcatgcagcgtgtg

SEQ ID NO: 234615 - DNA, 75 bp, synthetic construct
  source 1..75: mol_type = other DNA
gtggcagcgggcgacctgaccgcttcacgtgctgccggtaatgttgttggtggtgtgcttggggcattcagtcct

SEQ ID NO: 234616 - DNA, 75 bp, synthetic construct
  source 1..75: mol_type = other DNA
gcaatggagcatgtagtcacgccagcggaatatcagacgattattaagaccgtgctgaaaacccgtgacagtgat

SEQ ID NO: 234617 - DNA, 75 bp, synthetic construct
  source 1..75: mol_type = other DNA
ctttactggagcgccttcgctggaagaatctgaatgttccgcagaaaatcgcgcttgccgctgtgggagcaggtt

SEQ ID NO: 234618 - DNA, 75 bp, synthetic construct
  source 1..75: mol_type = other DNA
aaacgaatagaaattaacaaggtggcttctgtatatggaacaaaaggggggatgaacaaagctaatagcctggat

SEQ ID NO: 234619 - DNA, 75 bp, synthetic construct
  source 1..75: mol_type = other DNA
aactgaaagggctggataacttatccgcactggttgtggtgaaagacagccgttccgccatgtcagccgtatacg

SEQ ID NO: 234620 - DNA, 75 bp, synthetic construct
  source 1..75: mol_type = other DNA
tccgcacaagcgtggcgggaatgctggaaggaaaagtgactgccggacggcttgctgagtggatggagggaagaa

SEQ ID NO: 234621 - DNA, 75 bp, synthetic construct
  source 1..75: mol_type = other DNA
atacacgaacaagctgtatgacattgcgtttgagaccatctacatggtgacgaagaacagagacgcgctactgag

SEQ ID NO: 234622 - DNA, 75 bp, synthetic construct
  source 1..75: mol_type = other DNA
ctgaaagggctcgataacttatccgccctggctgtggtgaaagacagccggtctgccatgtctgccgtatacgcc

SEQ ID NO: 234623 - DNA, 75 bp, synthetic construct
  source 1..75: mol_type = other DNA
atccgcaatcgcaaaaatgaagtaggtaacgccttcctgaaactggtacaggataatccagacaaggattactgg

SEQ ID NO: 234624 - DNA, 75 bp, synthetic construct
  source 1..75: mol_type = other DNA
gaaaaatagatgacagcaataacgcctatatggctgaagaactcttccacgggaaggcggaaaacgacctgaacg

SEQ ID NO: 234625 - DNA, 75 bp, synthetic construct
  source 1..75: mol_type = other DNA
tgacccgcgcctgatgcgtgcgatgaagaacatggggccggaaaccagtaacgccgtaatccgtacgctggggaa

SEQ ID NO: 234626 - DNA, 75 bp, synthetic construct
  source 1..75: mol_type = other DNA
aaccgatcaggcatgggaagtgttcgaaaaactggaagactgctatttcagccagggaaaaacaacacaaaccga

SEQ ID NO: 234627 - DNA, 75 bp, synthetic construct
  source 1..75: mol_type = other DNA
tggcgaatctggtacacaatcccacgccgggaacgcgcatgttcagcgtctctgacgggcggcagactcagcttt

SEQ ID NO: 234628 - DNA, 75 bp, synthetic construct
  source 1..75: mol_type = other DNA
cgttggcgcaggatatgatcctcgccgccattcctgcggtcggctttgcgatggtgttcaacgttcccgttcggg

SEQ ID NO: 234629 - DNA, 75 bp, synthetic construct
  source 1..75: mol_type = other DNA
ggcgctgttgcgggcttttcgacagacgcgggaaaccgaagaaccgattgctcaccgtctggcgctggcgcagcg

SEQ ID NO: 234630 - DNA, 75 bp, synthetic construct
  source 1..75: mol_type = other DNA
tcagcatgaagattctttccagaagcaagggctacagcgccgttgcttctgctgcctatcgtgccggagaaaaaa

SEQ ID NO: 234631 - DNA, 75 bp, synthetic construct
  source 1..75: mol_type = other DNA
tactggccgttaacgctgattctgctggtgatgatctggctgccgctgagcggcaacctgctgttgttgctgatg

SEQ ID NO: 234632 - DNA, 75 bp, synthetic construct
  source 1..75: mol_type = other DNA
atgctggacaaacgcaccgcactttccggcggcgcggtggaccgccagttgcagccggtgttgcagggggaagcg

SEQ ID NO: 234633 - DNA, 75 bp, synthetic construct
  source 1..75: mol_type = other DNA
gcgaacagaatcgcctgattaacaggcttaacctggaaatacaggtttcccgcgacgaactcaggaacagtgagc

SEQ ID NO: 234634 - DNA, 75 bp, synthetic construct
  source 1..75: mol_type = other DNA
ctggcgaacgccggttatcaggaagagatagaccatcgttcatacgagcgacaggggcttgagaaaacgcctggt

SEQ ID NO: 234635 - DNA, 75 bp, synthetic construct
  source 1..75: mol_type = other DNA
agctctcagagcccagttgcttaaacgtgaagaggaattgcgccggaaggaacaggaagatactgaacgtagtcg

SEQ ID NO: 234636 - DNA, 75 bp, synthetic construct
  source 1..75: mol_type = other DNA
gttgatggtgtcagtcgctgcactgtggctggcaccggttcatcactacgctctgctggcagtgtgcttttttac

SEQ ID NO: 234637 - DNA, 75 bp, synthetic construct
  source 1..75: mol_type = other DNA
ttccgctgattagcgcctttgccgcccactggtggggctggcaggccgcgatgctgacaccggggataatcagca

SEQ ID NO: 234638 - DNA, 75 bp, synthetic construct
  source 1..75: mol_type = other DNA
gagcaaaagtacataatccatcttatgtacgcagtatccttaactatttaattaatcaacgttatctgcctctga

SEQ ID NO: 234639 - DNA, 75 bp, synthetic construct
  source 1..75: mol_type = other DNA
gtgttgatttaatgcgtgacaggagtggttatatctgtgaccgaagcgaaatcggtcaacatccaccactgcaac

SEQ ID NO: 234640 - DNA, 75 bp, synthetic construct
  source 1..75: mol_type = other DNA
gatgcttgctgctctggtcatcagtggagttgttgcctggaatgtacacggcagccgccagtacgatgctggtta

SEQ ID NO: 234641 - DNA, 75 bp, synthetic construct
  source 1..75: mol_type = other DNA
gaccaggcgcgcaatgatgctcttgatgctgccgctagcgctggccggttgcagcaacaactctttgccatccgt

SEQ ID NO: 234642 - DNA, 75 bp, synthetic construct
  source 1..75: mol_type = other DNA
gcagtcgtcagtacgacgccgggtatgcgcaggcgaaggaagaccgcaaagctgaagatgagatagttcgtcagc

SEQ ID NO: 234643 - DNA, 75 bp, synthetic construct
  source 1..75: mol_type = other DNA
tatcactggaagcagagccgatagcagtaagcgacgacatggcttacgcattccatcatgcactgtcagattcat

SEQ ID NO: 234644 - DNA, 75 bp, synthetic construct
  source 1..75: mol_type = other DNA
actggaaacagttgattatcattgtggtgcttgttgttctggtcatatcaggagttgttgcctggaatgtacacg

SEQ ID NO: 234645 - DNA, 75 bp, synthetic construct
  source 1..75: mol_type = other DNA
atgcttgaagaaagcaaccgagtttacaacgcaacagcagctgaggctgaaaagtatcggattgcaggagaatcc

SEQ ID NO: 234646 - DNA, 75 bp, synthetic construct
  source 1..75: mol_type = other DNA
ccgcgttcaccataggttttctcaaaatcaaagccacaacacttactgtcacgaacggtgcaatagtgatccaca

SEQ ID NO: 234647 - DNA, 75 bp, synthetic construct
  source 1..75: mol_type = other DNA
cccgcacgccgtatggctgaccttctgaatattgagcttcctgacaacgcaacttcgtacatactgcatgacatc

SEQ ID NO: 234648 - DNA, 75 bp, synthetic construct
  source 1..75: mol_type = other DNA
cgtgacaggagtggttatatctgtgaccgaagcgaaatcggccaacatccaccactgcaacgtgtttattcctct

SEQ ID NO: 234649 - DNA, 75 bp, synthetic construct
  source 1..75: mol_type = other DNA
atgatctgggcattcgtaaaagcatactggaaacagttgcttatcgtggcgatgcttgctgttcttgccacatca

SEQ ID NO: 234650 - DNA, 75 bp, synthetic construct
  source 1..75: mol_type = other DNA
ctttcagtcaccttttgcctggtcagcagaagagcttggtttttctgcggaaaacaaagggcttgaggcattaat

SEQ ID NO: 234651 - DNA, 75 bp, synthetic construct
  source 1..75: mol_type = other DNA
gaacggctttaatgtcacgaacggtgcaatagtgatccacacccaacgcctgaaatcagatccagggggtaatct

SEQ ID NO: 234652 - DNA, 75 bp, synthetic construct
  source 1..75: mol_type = other DNA
gctactgcgcgtcgctttgcccgcacgccggaacagatggctggtgtcgctgttttggtggggatggtggcagtg

SEQ ID NO: 234653 - DNA, 75 bp, synthetic construct
  source 1..75: mol_type = other DNA
atgacgattagcccggatctggcgtttgttgatggtgtgaaattacagcgagtgaaattgttgttgatgctggtg

SEQ ID NO: 234654 - DNA, 75 bp, synthetic construct
  source 1..75: mol_type = other DNA
tacttcgttgctgattattcctgctgctactgcacgtcgctttgcccgcacgccggaacagatggcaggtgtcgc

SEQ ID NO: 234655 - DNA, 75 bp, synthetic construct
  source 1..75: mol_type = other DNA
cggaagatatctgggatcgctgcgcatatgtgctgtcagtaaaaatgcaggacccgcagtttgccgggcagacca

SEQ ID NO: 234656 - DNA, 75 bp, synthetic construct
  source 1..75: mol_type = other DNA
tcacgtttacgttgctctgccaccgctctaccgtattgatctgggtaaagaggtctattacgcgctgacagaaga

SEQ ID NO: 234657 - DNA, 75 bp, synthetic construct
  source 1..75: mol_type = other DNA
cgctggcgatactgaagcggtggactgggcgctactgtggctgccggaaggcggtgaactgctgaccgaaagcta

SEQ ID NO: 234658 - DNA, 75 bp, synthetic construct
  source 1..75: mol_type = other DNA
ggcatataggcatcagggaaaaggggtggagtttattatgtgatttattgaaacacgaagacatggcttcattcg

SEQ ID NO: 234659 - DNA, 75 bp, synthetic construct
  source 1..75: mol_type = other DNA
atatcatctatttcctgcaacatggtcactggaaggtaaatgatcgtagtcaccagatggagaaagtatggtttt

SEQ ID NO: 234660 - DNA, 75 bp, synthetic construct
  source 1..75: mol_type = other DNA
cggaatctcattggttaggtgactttgaactattgcttttagataattcgggagaacttgataaccagtctcaag

SEQ ID NO: 234661 - DNA, 75 bp, synthetic construct
  source 1..75: mol_type = other DNA
aaaataccagaaaataaaatggaagtgttcgaagattatgcaactgaagaaattagtgcgttttccaatatagaa

SEQ ID NO: 234662 - DNA, 75 bp, synthetic construct
  source 1..75: mol_type = other DNA
tgtgttttcaaaaatagacttttataaacagtgtggtgtgattaacccacaaaatgccaacacggcttattttgg

SEQ ID NO: 234663 - DNA, 75 bp, synthetic construct
  source 1..75: mol_type = other DNA
tcaagaatataatagtttcgccaagaatactactaacacgtttatctttacaattataccagacaataaccatgt

SEQ ID NO: 234664 - DNA, 75 bp, synthetic construct
  source 1..75: mol_type = other DNA
gtcgaacttgaccataaaacagtattgtcctttctgaatgacgtgaataacagactgcctgatatgttctgtatt

SEQ ID NO: 234665 - DNA, 75 bp, synthetic construct
  source 1..75: mol_type = other DNA
tgtcgataactcagacagctatctgcgtcagccgcaccgcgtaatggagctacacaacgacggcacctacgtcga

SEQ ID NO: 234666 - DNA, 75 bp, synthetic construct
  source 1..75: mol_type = other DNA
acaaatcttttctgcgttttcgggtaggcaaaattctcgacgatctgtgtgcgaatcagctgcaaccgctgctgt

SEQ ID NO: 234667 - DNA, 75 bp, synthetic construct
  source 1..75: mol_type = other DNA
tccaaatgctggactggaaaaccttaaccacggatgttgccgcgggtgtggggattgaaaactgggcgcttggtg

SEQ ID NO: 234668 - DNA, 75 bp, synthetic construct
  source 1..75: mol_type = other DNA
ctacctggatgggcaacgtcacaagaaatcttatcggatatccaggcaactgggagatatctggaggcggatcac

SEQ ID NO: 234669 - DNA, 75 bp, synthetic construct
  source 1..75: mol_type = other DNA
tataaaattaaacttcgtgcatctggctacagacttgtatatcaagtcattgatgagaaagtcgttttactcgtt

SEQ ID NO: 234670 - DNA, 75 bp, synthetic construct
  source 1..75: mol_type = other DNA
aaagacttcgaagaaggcgtgtggttgagcgagctttccgatgccattgaaaccagcaaaggcattctttctgtg

SEQ ID NO: 234671 - DNA, 75 bp, synthetic construct
  source 1..75: mol_type = other DNA
aaatctgtatcctcgcggatgcggactctgatggtctgcacattgccacgctgctctgcgctttgtttgtaaaac

SEQ ID NO: 234672 - DNA, 75 bp, synthetic construct
  source 1..75: mol_type = other DNA
ccgaacagcgctggtgctatcaggacggtctgaatgattacctggcggaagcggtaaacggtttaccgacgctgc

SEQ ID NO: 234673 - DNA, 75 bp, synthetic construct
  source 1..75: mol_type = other DNA
gctgttttataaaaaacaaaaccttaatttagcgtacggacattccgtacaggcatgggttttgtgtgaagaact

SEQ ID NO: 234674 - DNA, 75 bp, synthetic construct
  source 1..75: mol_type = other DNA
aacgagatgagtggttggtttgacctgaccttaaatcagcgtgtttataatcaggacggtagaacggcaaatgcg

SEQ ID NO: 234675 - DNA, 75 bp, synthetic construct
  source 1..75: mol_type = other DNA
agatctgtatcctggcggatgctgactccgatggtctgcacattgccacgctgctctgcgctttgtttgtaaaac

SEQ ID NO: 234676 - DNA, 75 bp, synthetic construct
  source 1..75: mol_type = other DNA
gtcagggcctgttggacgcgatgcgtgagttctgtgaataccgcaacattctgccgcgcggcgtgaagctgtcgg

SEQ ID NO: 234677 - DNA, 75 bp, synthetic construct
  source 1..75: mol_type = other DNA
tcaccatttactggggcgggcgtgaagagcagcatctttatgatctctccgagcttgaggcgctttcgcttaagc

SEQ ID NO: 234678 - DNA, 75 bp, synthetic construct
  source 1..75: mol_type = other DNA
ccgcgaagcagcaaaacttgatcccgccaactatatggtgcatagggccagaagcatgctggcgcaactacgggc

SEQ ID NO: 234679 - DNA, 75 bp, synthetic construct
  source 1..75: mol_type = other DNA
agagcaggaggaaaaatcacaggcgaaaggtgatgaaaaaacagcgccgtcaccggatgacaaaatccgctttga

SEQ ID NO: 234680 - DNA, 75 bp, synthetic construct
  source 1..75: mol_type = other DNA
gcgtgggaagtgttcgaaaaactggaagactgctatttcagccagtgcaagaaaaatactggcaaacaagagaag

SEQ ID NO: 234681 - DNA, 75 bp, synthetic construct
  source 1..75: mol_type = other DNA
ggaaagcacttctttaaagctgttggtgatgaactcagaaatttgcgactagttttaaacgagtcgcaaaatgag

SEQ ID NO: 234682 - DNA, 75 bp, synthetic construct
  source 1..75: mol_type = other DNA
gagcttgaggcgctttcgctgaagcatcctggcctgcaagtggtgccggtggttgaacaaccggaagcgggctgg

SEQ ID NO: 234683 - DNA, 75 bp, synthetic construct
  source 1..75: mol_type = other DNA
aatggcagcggcagatgctgttcttaacgcggattattctgagctggcgaagtcaccgaaatttcagcagacctt

SEQ ID NO: 234684 - DNA, 75 bp, synthetic construct
  source 1..75: mol_type = other DNA
tgccgtatgctgaccagcagaagatgtatgaccggatgacggaggttgcgcagtaccacgcagagctgaagagtc

SEQ ID NO: 234685 - DNA, 75 bp, synthetic construct
  source 1..75: mol_type = other DNA
tccgtaaaactggcggaaaaatagatgacagcaataacgcctatatggctgaagaactcttccacgggaaggcgg

SEQ ID NO: 234686 - DNA, 75 bp, synthetic construct
  source 1..75: mol_type = other DNA
ggatgatgacggggttaactggtatgacaaggtgccgtctcatgtgaaagagcgtaacctcgtcattatgaaatc

SEQ ID NO: 234687 - DNA, 75 bp, synthetic construct
  source 1..75: mol_type = other DNA
aatccagacaaggattactggcaggtattcaccaatgagcgaccggacaccatgcgtgcgattgcagagcgtgtt

SEQ ID NO: 234688 - DNA, 75 bp, synthetic construct
  source 1..75: mol_type = other DNA
aggcgaccgatacaaaagggaatcctgtcattgttgcaattcatacccatgtgaaaggcgatggatttgcagaga

SEQ ID NO: 234689 - DNA, 75 bp, synthetic construct
  source 1..75: mol_type = other DNA
ccgggtggaaaactcccttcagaaagagagctgggagagttgctgggcattaaacgtatgacgctgcgccaggcg

SEQ ID NO: 234690 - DNA, 75 bp, synthetic construct
  source 1..75: mol_type = other DNA
cgaagtttcactggcctaccgcaaaattgagtgggaacacgtcaaatcaggcacctctggtgccgatgactggcg

SEQ ID NO: 234691 - DNA, 75 bp, synthetic construct
  source 1..75: mol_type = other DNA
tatctctatctcagcccggaacggctggcgaacgaggggatttttactcagcaggaactgtatgatgaactgctc

SEQ ID NO: 234692 - DNA, 75 bp, synthetic construct
  source 1..75: mol_type = other DNA
ctggatagcgctttacgttcaggtcgccatatcggcctcgacgaactggacaatcatgctttcctgatggatttt

SEQ ID NO: 234693 - DNA, 75 bp, synthetic construct
  source 1..75: mol_type = other DNA
tttaattgatgaaatagaacttcaccttcatcctaagtggcagcaggaagttatcctgaacctgcgcagtgtatt

SEQ ID NO: 234694 - DNA, 75 bp, synthetic construct
  source 1..75: mol_type = other DNA
ccgcctgacgctaaaggactttcgccgtttctctcttcttgaaatcaaattcgaagaagatctgacagtcattat

SEQ ID NO: 234695 - DNA, 75 bp, synthetic construct
  source 1..75: mol_type = other DNA
aaagctgttccgttgctgtacaacgctctggcttccggtgaaatgctgccgaccactgaacttcactggtggcgc

SEQ ID NO: 234696 - DNA, 75 bp, synthetic construct
  source 1..75: mol_type = other DNA
taccgtggcggccgttatccctatgttccctggcatatcggcttataccgcaatgatttcggcggtaaaaatcag

SEQ ID NO: 234697 - DNA, 75 bp, synthetic construct
  source 1..75: mol_type = other DNA
cgttacgctggtgtgcgctgcttggcgcgattggtcatggttcacgaatgatcttaatgaccagcgggctgaata

SEQ ID NO: 234698 - DNA, 75 bp, synthetic construct
  source 1..75: mol_type = other DNA
aaaaacaacacaaaccgaacagcagccgcagattcagccacaattcacagccgaggaaatcatcctcctttgcta

SEQ ID NO: 234699 - DNA, 75 bp, synthetic construct
  source 1..75: mol_type = other DNA
aatttacggtcgcccatccctcatgccatctgctgaccaatatcgcggtggtggagcgtttcttgccggtgcggt

SEQ ID NO: 234700 - DNA, 75 bp, synthetic construct
  source 1..75: mol_type = other DNA
tttcaacgtttttctaaactgttacctttcagaattgattttgcctacaggaaagacacgcccagtttcggtcat

SEQ ID NO: 234701 - DNA, 75 bp, synthetic construct
  source 1..75: mol_type = other DNA
cactagtgcaggatatgatcctcgcggcaattcctgcagtcggctttgcgatggtattcaatgtgccggttcggg

SEQ ID NO: 234702 - DNA, 75 bp, synthetic construct
  source 1..75: mol_type = other DNA
ggaaatccaaaaggtcttactggtgcgttatggcgacggacatcggttggatttactaattttgcatgggtgaat

SEQ ID NO: 234703 - DNA, 75 bp, synthetic construct
  source 1..75: mol_type = other DNA
cgccaaaggcggtaaaggcagcatatgaccttgctaatggcaaatacaccgcacaggatgcaacaacagcacaaa

SEQ ID NO: 234704 - DNA, 75 bp, synthetic construct
  source 1..75: mol_type = other DNA
gcgatatgaatatttaccatcgtcatcttagcccggatggcagcggcccggcgttattcagcctggcgaatatgg

SEQ ID NO: 234705 - DNA, 75 bp, synthetic construct
  source 1..75: mol_type = other DNA
aagtggagcatctgattattctaaatacagtgttaacacttcttctgcaggcgctcatacgcactctgtatcggg

SEQ ID NO: 234706 - DNA, 75 bp, synthetic construct
  source 1..75: mol_type = other DNA
ggcagcaacggtaagtttttctgcccaggcgtcagtaacgcccgatcgtacccggctgattttcaatgaaagcga

SEQ ID NO: 234707 - DNA, 75 bp, synthetic construct
  source 1..75: mol_type = other DNA
acgagcagtcacgacgtcacccggacgcctcgctgaccgcaaaaggctttgttcaactcagtagcgccaccaaca

SEQ ID NO: 234708 - DNA, 75 bp, synthetic construct
  source 1..75: mol_type = other DNA
gctaacgctcaggagcatgaggctgctcgtccgtcgccgcaacaccagtaccaaccgccttatgcgtctgcgcag

SEQ ID NO: 234709 - DNA, 75 bp, synthetic construct
  source 1..75: mol_type = other DNA
atgatgcaggatttgcgtctgatattaatcattgttggcgcgatcgccataatcgctttactggtacatggtttc

SEQ ID NO: 234710 - DNA, 75 bp, synthetic construct
  source 1..75: mol_type = other DNA
cgggcatggaactttgaacctgacggcggagctgagcttaacctttatatccggcagtacagcattataaagcag

SEQ ID NO: 234711 - DNA, 75 bp, synthetic construct
  source 1..75: mol_type = other DNA
aggatttcactactccgggtgtcactatctttatgcaggtaccgtcttacggtgacgagctgcagaacttcaagc

SEQ ID NO: 234712 - DNA, 75 bp, synthetic construct
  source 1..75: mol_type = other DNA
cagcaccgcaaccggcacaacaggctttccagcctgcagaacctgtagcggcaccacagcctgagcctgtagcgg

SEQ ID NO: 234713 - DNA, 75 bp, synthetic construct
  source 1..75: mol_type = other DNA
cgccgtatgatgactccgcagaaactgcgcgagtatcaggacatcatccgcgaagtgaaagacgctaacgtctga

SEQ ID NO: 234714 - DNA, 75 bp, synthetic construct
  source 1..75: mol_type = other DNA
gctatgaatcttctcgtggtgatgctgttaacgttgttacagagaatagccagatggttgtaaaccacggcgttg

SEQ ID NO: 234715 - DNA, 75 bp, synthetic construct
  source 1..75: mol_type = other DNA
caccacaagctcaaaattcgcggcctgcaaagtccggtggatgtgctgaccttcgaaggccgcgaacaactgagt

SEQ ID NO: 234716 - DNA, 75 bp, synthetic construct
  source 1..75: mol_type = other DNA
tttaactgtgataaagagcaggaaatagaggtcaggttactacatcagagcattgatatggttgagggtggtgta

SEQ ID NO: 234717 - DNA, 75 bp, synthetic construct
  source 1..75: mol_type = other DNA
ccgcccggcgcttatcccacgtcccgtaatggccggcacgctcccggcgcgggtcaccagcacggtgaagaacga

SEQ ID NO: 234718 - DNA, 75 bp, synthetic construct
  source 1..75: mol_type = other DNA
ggcagatctgtcatcgcagattgcgttgttgcaacagagcgtaaaagatctgaaccaggctgcgatcctgctaag

SEQ ID NO: 234719 - DNA, 75 bp, synthetic construct
  source 1..75: mol_type = other DNA
attaccggctttaagcatctctcatcgtcacaggacgaagcccgttacgaagtgcgccttgaaccccgtatggcg

SEQ ID NO: 234720 - DNA, 75 bp, synthetic construct
  source 1..75: mol_type = other DNA
gtgaccgcagctatgaactgacgttcacggcgataccctactcagaacgctacggctaccgcccggcgtttatcc

SEQ ID NO: 234721 - DNA, 75 bp, synthetic construct
  source 1..75: mol_type = other DNA
actgatttccaggaaacactcactgatatctatgcggaatatatcgctaaacacaatgttgcattccagcgtact

SEQ ID NO: 234722 - DNA, 75 bp, synthetic construct
  source 1..75: mol_type = other DNA
ttcccagcttgtcgaaagcaacgaatctctgttcaacaaagaaacctctcgtttctcttctgaacacaacgttac

SEQ ID NO: 234723 - DNA, 75 bp, synthetic construct
  source 1..75: mol_type = other DNA
tgttcaaggcaaacgtaagccaggcactgattttcaggaaacactcactgatatctatgctgactatgttgctaa

SEQ ID NO: 234724 - DNA, 75 bp, synthetic construct
  source 1..75: mol_type = other DNA
cggtcaggacttcgtgtttaacctcaaaagcgcatacccggcccgcgaacaggtgatgcagtatggcgaggacga

SEQ ID NO: 234725 - DNA, 75 bp, synthetic construct
  source 1..75: mol_type = other DNA
ccgacgcccggctgaaaatcgaagttatcgaattttacgacgaccagagcggctatgagcgcgggctgacgctgc

SEQ ID NO: 234726 - DNA, 75 bp, synthetic construct
  source 1..75: mol_type = other DNA
gttttctgtaagccggaagccttctccgcaattcgattctctgctggtatggcaaacgcattccagtatgtaagc

SEQ ID NO: 234727 - DNA, 75 bp, synthetic construct
  source 1..75: mol_type = other DNA
ccgtcgtgtacctcctcaccgacggacgtccgactgacgacacaaccgcagaagtgaagcgctggaaggatcact

SEQ ID NO: 234728 - DNA, 75 bp, synthetic construct
  source 1..75: mol_type = other DNA
tgccggacgggtcgtgaaccggattgggtggatgcggtttactgcctgcaatcgcagtgggaaaagcctgttcgg

SEQ ID NO: 234729 - DNA, 75 bp, synthetic construct
  source 1..75: mol_type = other DNA
agatccagaaccgtaacggcgaccatgagaaaagctatgttcgtatactcgtcagcgattgtgagaaaaatgctt

SEQ ID NO: 234730 - DNA, 75 bp, synthetic construct
  source 1..75: mol_type = other DNA
tcaatgcccgttggcagacaaccatagtcgatcagtggaataaggcttttgcggggcggtacccgtttaaagcca

SEQ ID NO: 234731 - DNA, 75 bp, synthetic construct
  source 1..75: mol_type = other DNA
gcgtctacgcggtgtcatgttcagccctgaactgaccgttgccggagcggtaccaaacacatgccccgacacacc

SEQ ID NO: 234732 - DNA, 75 bp, synthetic construct
  source 1..75: mol_type = other DNA
tcagtgaagatgccgtttcagaacatttgcgctttcgctatgggcgtcgctggcagcgtaaggtacgacttctgc

SEQ ID NO: 234733 - DNA, 75 bp, synthetic construct
  source 1..75: mol_type = other DNA
gggtggtttcctctcttcgggcatggaatatgtgcacgagctgaaccctaacgcggtgatgcgcgcttttggtca

SEQ ID NO: 234734 - DNA, 75 bp, synthetic construct
  source 1..75: mol_type = other DNA
agcaaatgtggtttattctggaaagcctgccacagatgccgttggggagacttcacgaagccggtaagatgctga

SEQ ID NO: 234735 - DNA, 75 bp, synthetic construct
  source 1..75: mol_type = other DNA
agaaggtgaaatgactgttgaataccccttacaaggcgagattatctggtgtgatgatatcggcgtgacctgccg

SEQ ID NO: 234736 - DNA, 75 bp, synthetic construct
  source 1..75: mol_type = other DNA
tttgaagacggtggggtttacgactacaacggcgaaaatcactacagtgtcaggagctgcgtggaggttgctcca

SEQ ID NO: 234737 - DNA, 75 bp, synthetic construct
  source 1..75: mol_type = other DNA
gaccgatgacgctattgccacattgcgctttgcgccgaagccgtttaacgcaccgatggtgcaactgtatgacgc

SEQ ID NO: 234738 - DNA, 75 bp, synthetic construct
  source 1..75: mol_type = other DNA
aaagtgaagcccgcgccattcttaaagccgattttagcgagctgaaagagaagcaaattaaagatctgctcgaca

SEQ ID NO: 234739 - DNA, 75 bp, synthetic construct
  source 1..75: mol_type = other DNA
atgtcgactcgtaccccttcatcatcttcatcccgcctgatgctgaccatcgggctttgttttttggtcgctctg

SEQ ID NO: 234740 - DNA, 75 bp, synthetic construct
  source 1..75: mol_type = other DNA
ttgaatccctgccggatggcacgtttacccgcaggcaggctcaggttgccgcagcgcagtatcagaatgtggcga

SEQ ID NO: 234741 - DNA, 75 bp, synthetic construct
  source 1..75: mol_type = other DNA
atgtggtttacagtatcgatggtggctttgaagcctggcagcgtcagtttcccgcagaggtggcttacggcgcgt

SEQ ID NO: 234742 - DNA, 75 bp, synthetic construct
  source 1..75: mol_type = other DNA
ttgccgacgcgcaccagaagttgcaggaaaaagaggcggtgctggtcgatattcgcgatccacagagtttcgcta

SEQ ID NO: 234743 - DNA, 75 bp, synthetic construct
  source 1..75: mol_type = other DNA
atgccgggctgtacatcacgtttattgcccgaaggccctttttcgcgcgaacaggcggttgccgttacaacagct

SEQ ID NO: 234744 - DNA, 75 bp, synthetic construct
  source 1..75: mol_type = other DNA
agtccctgtccgatggttcatttacccgtgaacaggcggaagcagtggcggcacagtatcagaatgtgacgattg

SEQ ID NO: 234745 - DNA, 75 bp, synthetic construct
  source 1..75: mol_type = other DNA
tggcgggtatggaattttgagccgggtggtgagtacctgatgaaccgttatatccgggactacggcatccgtaaa

SEQ ID NO: 234746 - DNA, 75 bp, synthetic construct
  source 1..75: mol_type = other DNA
caaatgggctggatattcagcgccggaatactcggtttgctacccggcgcgttggttggcggaatgctggcggac

SEQ ID NO: 234747 - DNA, 75 bp, synthetic construct
  source 1..75: mol_type = other DNA
cgcagatccgcgcaacaggtgtgggaacagccgtggcggtagggcgtctgggggctatgagcggtccgttactgg

SEQ ID NO: 234748 - DNA, 75 bp, synthetic construct
  source 1..75: mol_type = other DNA
caggcggcaggggtgatgtttgccctgcaaatgggtgcggcaagcgggacgttaatgttgggcgcattgatggat

SEQ ID NO: 234749 - DNA, 75 bp, synthetic construct
  source 1..75: mol_type = other DNA
tttaaccaacgacacattgggcgcgtttatgcgtgataacgacttcgatacgccagtcatggtgatgtgttacca

SEQ ID NO: 234750 - DNA, 75 bp, synthetic construct
  source 1..75: mol_type = other DNA
agctctattgaagaaacactgccggatctgtatgcggaatatatcgctaaacacaatgttgcattccagcgcact

SEQ ID NO: 234751 - DNA, 75 bp, synthetic construct
  source 1..75: mol_type = other DNA
gggtattcttgttgctgggttggcggtgtttattttgatgagtcggagatcaagaatgcagccgtgtgccgatgc

SEQ ID NO: 234752 - DNA, 75 bp, synthetic construct
  source 1..75: mol_type = other DNA
ttcgatgggggcgaaaagctttatcgtccgtgggctgggaaatgaagagtcgttctgttcgtgcagccacggtgc

SEQ ID NO: 234753 - DNA, 75 bp, synthetic construct
  source 1..75: mol_type = other DNA
aactgacccggttaaaagagatagacggacgttctctcatgatccacatcggcggtgacaaccatcacgaccacc

SEQ ID NO: 234754 - DNA, 75 bp, synthetic construct
  source 1..75: mol_type = other DNA
ctgctgttcactccagagcttcactctttacccgaaggcattcatggctttcatgtacacgagaacggaaactgt

SEQ ID NO: 234755 - DNA, 75 bp, synthetic construct
  source 1..75: mol_type = other DNA
aatggctgggtgagtaatgagtccagtccgttgcagtcctccctgctggtcagtgaacgcatggcattcaagctg

SEQ ID NO: 234756 - DNA, 75 bp, synthetic construct
  source 1..75: mol_type = other DNA
tccaacacgctacaaatcgctcttcagacgcgtatcaaacttttctggcgaccgaaagctctggaaaaaaacacc

SEQ ID NO: 234757 - DNA, 75 bp, synthetic construct
  source 1..75: mol_type = other DNA
gaccgtcctgacgacccaagagctactggtcttctcatcacaggttaagagcatggatgtatccaatcatccaga

SEQ ID NO: 234758 - DNA, 75 bp, synthetic construct
  source 1..75: mol_type = other DNA
gtctgatcagcgtcctttttcagaaaaatcgacacgtgagcatatccagtcggcctatcagctttactcgggata

SEQ ID NO: 234759 - DNA, 75 bp, synthetic construct
  source 1..75: mol_type = other DNA
gggctgtaacaccgctcggggtttcggcgaagacatcaaacatcttggtaattccatctcccgcgctgccagcta

SEQ ID NO: 234760 - DNA, 75 bp, synthetic construct
  source 1..75: mol_type = other DNA
atgcggttgtggtgcggcctgcaggctgcaccatcacttattcaggtcagagatgatgaaactatcgttcttgtt

SEQ ID NO: 234761 - DNA, 75 bp, synthetic construct
  source 1..75: mol_type = other DNA
ttacttgcgcagaagccaacgaaatggcaaaaactgacagcgcacaggttgcagaaattgttgcggtaatgggta

SEQ ID NO: 234762 - DNA, 75 bp, synthetic construct
  source 1..75: mol_type = other DNA
tggtcgtctggtttccggcgaatggcgcaagttgaacatcggtacggtcgttatcgccgtggcgctggtgacctt

SEQ ID NO: 234763 - DNA, 75 bp, synthetic construct
  source 1..75: mol_type = other DNA
gcgggcggtaaaaccggtttgacggctatcaccgttggcgtgctgttcctgctgattctgttcctctctccgctc

SEQ ID NO: 234764 - DNA, 75 bp, synthetic construct
  source 1..75: mol_type = other DNA
cattgacaacggtactgtcgttactggcagcaacggtaagtttttctacccaggcgtcagtaacgcccgatcgta

SEQ ID NO: 234765 - DNA, 75 bp, synthetic construct
  source 1..75: mol_type = other DNA
taccgggtggggctggccattggttactgggagccgatggcgctgacggatgtgacacgctccccttactgcatg

SEQ ID NO: 234766 - DNA, 75 bp, synthetic construct
  source 1..75: mol_type = other DNA
gggcagtatgtacccgtttaacggctatgtttctaacgaattcagtgcgttacagacgtcactgttactcagtga

SEQ ID NO: 234767 - DNA, 75 bp, synthetic construct
  source 1..75: mol_type = other DNA
atgaaaaagatattactcatgttgagcctgctattttttgctaccgcaggctattgtgaagtttcggatacgtta

SEQ ID NO: 234768 - DNA, 75 bp, synthetic construct
  source 1..75: mol_type = other DNA
tggtgtttctgctggccggccatgtttccggcgcatccgctgatgcggcctgtgaggggcgttttgtaaacccga

SEQ ID NO: 234769 - DNA, 75 bp, synthetic construct
  source 1..75: mol_type = other DNA
caccgccagggcatgattatggaaaccatcggtaaggacagtgccgtctgtaacgaatatccgtctcccatactt

SEQ ID NO: 234770 - DNA, 75 bp, synthetic construct
  source 1..75: mol_type = other DNA
gtggtgacctggatatcgcttatctttctgaaattgaccccacctggacggacagcagcctgaccaccattctca

SEQ ID NO: 234771 - DNA, 75 bp, synthetic construct
  source 1..75: mol_type = other DNA
aacttacgaagcattacgtgtttgccatgcggtacgtaaagagccagatattattacccgccaacggatgattgc

SEQ ID NO: 234772 - DNA, 75 bp, synthetic construct
  source 1..75: mol_type = other DNA
cgtcaacgactatggcgcacggatgccgctgtattttaaatgtggcggcgatacctgccaggtggatgtagagca

SEQ ID NO: 234773 - DNA, 75 bp, synthetic construct
  source 1..75: mol_type = other DNA
cccaaagaacgctggcgttaccagatggtgaacatgtatccggacagcgggcagtgccatccgttcgggcgcagt

SEQ ID NO: 234774 - DNA, 75 bp, synthetic construct
  source 1..75: mol_type = other DNA
atgattaacttccacaggtttttgctaactttgactacaaagggattctggagaaaaaatgaaaaagatattact

SEQ ID NO: 234775 - DNA, 75 bp, synthetic construct
  source 1..75: mol_type = other DNA
aaagtgagtcagggaaaggtaccggatacggcaaacccgtcaataccgatccagttttgcccggccccgcccccc

SEQ ID NO: 234776 - DNA, 75 bp, synthetic construct
  source 1..75: mol_type = other DNA
tgaccccacctggacggacagcagcctgaccaccattctcaatccggaagctgtcatctttgccaatccgatagc

SEQ ID NO: 234777 - DNA, 75 bp, synthetic construct
  source 1..75: mol_type = other DNA
gctaagtgagccgccggactggtcgttccagaacccgcgcgtgattatccgccatcaggatggcagggcatcagc

SEQ ID NO: 234778 - DNA, 75 bp, synthetic construct
  source 1..75: mol_type = other DNA
ccctggcgtacaacagcgccaccggcacgccgtttacgggactgccggagggcattcagcggttttctctggggt

SEQ ID NO: 234779 - DNA, 75 bp, synthetic construct
  source 1..75: mol_type = other DNA
gatttacttgacggggtcgacaacggcctccggtacctgctggactgtaaagccgaatggaatcaaattctggac

SEQ ID NO: 234780 - DNA, 75 bp, synthetic construct
  source 1..75: mol_type = other DNA
atcggggtgggtgagtcaccagggcgagtatgcgctgaaaaacgtcaacgggttaggtttcactgagcggatcac

SEQ ID NO: 234781 - DNA, 75 bp, synthetic construct
  source 1..75: mol_type = other DNA
ccgcccagctgggtcgctggcgccgtggtcgaacttaaagccccggcgaactaccagatcaccacggcggccgga

SEQ ID NO: 234782 - DNA, 75 bp, synthetic construct
  source 1..75: mol_type = other DNA
agtgtcgattatgacctcgtcattgcgtcctataccccgggtcaggaggcggtgcctggcgagggtggcagtgca

SEQ ID NO: 234783 - DNA, 75 bp, synthetic construct
  source 1..75: mol_type = other DNA
gacgaccaggctattgggctggtaacggaggatttagacacccttaaaacgccgggtatttactttcagccagcg

SEQ ID NO: 234784 - DNA, 75 bp, synthetic construct
  source 1..75: mol_type = other DNA
cagtacggatttagggacgaaaacaaccagttcgtttgattacgggacaaaaacggtcagcacgtttaaccacgg

SEQ ID NO: 234785 - DNA, 75 bp, synthetic construct
  source 1..75: mol_type = other DNA
ggcaccgccggtacaggggatgccggtacagactgccctgcgcaccctgcacggcgtcatcaccggctttaaaca

SEQ ID NO: 234786 - DNA, 75 bp, synthetic construct
  source 1..75: mol_type = other DNA
cagacgataaagggcaagccggacggacgagcggtactctcgtatgaacaggacggtattaaatcgcacgctcac

SEQ ID NO: 234787 - DNA, 75 bp, synthetic construct
  source 1..75: mol_type = other DNA
ggcgcacacaaccacgcaattacggtcaatgctgagggcaatgcagaaaacaccgtaaaaaacaccgcatttaat

SEQ ID NO: 234788 - DNA, 75 bp, synthetic construct
  source 1..75: mol_type = other DNA
aaaccgttctcaccgatacgggtgcaaaaaaattagctcaggcagccgcgccagatggtaagcctgtccgcctga

SEQ ID NO: 234789 - DNA, 75 bp, synthetic construct
  source 1..75: mol_type = other DNA
caggcagtccccccggcggaatggccgttatgtttgttgcggccagacagtgacgtgcggatatatcccattccg

SEQ ID NO: 234790 - DNA, 75 bp, synthetic construct
  source 1..75: mol_type = other DNA
gatgtccgcatggctggcaagtacgctctttgctctggtggttggtgcactggctgacaccatcggctttagccc

SEQ ID NO: 234791 - DNA, 75 bp, synthetic construct
  source 1..75: mol_type = other DNA
gatgtccgcatggctggcaagtacgctgtttgcgctggttgtcggtgcactggctgacaccatcggcttcagccc

SEQ ID NO: 234792 - DNA, 75 bp, synthetic construct
  source 1..75: mol_type = other DNA
ctgcgtattgagcaaggcgatcatgtaattatgttcctgacggacaaaaagtttattaccgacgtcgaacgtctc

SEQ ID NO: 234793 - DNA, 75 bp, synthetic construct
  source 1..75: mol_type = other DNA
gggctgtaacaccgctcgcggttttggtgaagacattaaacatctcggtaattccatctcccgcgctgccagcta

SEQ ID NO: 234794 - DNA, 75 bp, synthetic construct
  source 1..75: mol_type = other DNA
ttttgcttgccagcacgctgcttacgggctgtaacaccgctcgcggtttcggcgaagatatcaaacatctcggca

SEQ ID NO: 234795 - DNA, 75 bp, synthetic construct
  source 1..75: mol_type = other DNA
aaacccaacaccctgcaaatcgcgctgcaaacgcgtatcaagttgttctggcgaccaaaggcgctggaaaacacc

SEQ ID NO: 234796 - DNA, 75 bp, synthetic construct
  source 1..75: mol_type = other DNA
tattacgcttgcctacgacacggcaacgggtgtgccctttacaggcttaccggagggctggctgcggctttccgt

SEQ ID NO: 234797 - DNA, 75 bp, synthetic construct
  source 1..75: mol_type = other DNA
tgtcagattactgcacctgaatataaagaaattttctaccagtacgacgacgccacataccccggcgacgctgct

SEQ ID NO: 234798 - DNA, 75 bp, synthetic construct
  source 1..75: mol_type = other DNA
agggtggacgagtaagccaggggtttacgcgcttaaaaacattaatggcctcggttttacagagcgttttgatct

SEQ ID NO: 234799 - DNA, 75 bp, synthetic construct
  source 1..75: mol_type = other DNA
ttattggagcagtggtacgtggaaatgatgtcataatcgccaatgacaatttacgcattgagcagggcgatcacg

SEQ ID NO: 234800 - DNA, 75 bp, synthetic construct
  source 1..75: mol_type = other DNA
aaactggttcaactcgacagaggtaggtggtacttccagcgggagtgggcttgatatggcgcagacctcgccaga

SEQ ID NO: 234801 - DNA, 75 bp, synthetic construct
  source 1..75: mol_type = other DNA
tcacggtcagacgggtgctgagcagcggcgcaacagacacaaaatggccgggttttacggcgagaaccgtgctgg

SEQ ID NO: 234802 - DNA, 75 bp, synthetic construct
  source 1..75: mol_type = other DNA
agacggtgaaatgaccgttgaatatccttcacaaggcgagattatctggtgtgatgatataggagtgacctgccg

SEQ ID NO: 234803 - DNA, 75 bp, synthetic construct
  source 1..75: mol_type = other DNA
attttgccttctgcactgcgtattgctttgccggcatacagcaacgaagtgatcctgatgctgcactctactgcg

SEQ ID NO: 234804 - DNA, 75 bp, synthetic construct
  source 1..75: mol_type = other DNA
gaatgtaacggtttttatgatattccgcgtccccgcccggtgcagccggttcgtcgcaaatgcagccaggaatgt

SEQ ID NO: 234805 - DNA, 75 bp, synthetic construct
  source 1..75: mol_type = other DNA
gatttcgaatctattcgtgcggttgttcgcccggcctatatttgggaccaatataaccagacaggtgttgaactg

SEQ ID NO: 234806 - DNA, 75 bp, synthetic construct
  source 1..75: mol_type = other DNA
gatcctgatgctgcactctactgcgctggcatttaccgctacggtgccggatctgctgaaaattgcccgtgatat

SEQ ID NO: 234807 - DNA, 75 bp, synthetic construct
  source 1..75: mol_type = other DNA
gtgatcgaaatcttacatgaatactggaaaccactgctgtggaccgatggttatcgttttaccggcgtggcgatc

SEQ ID NO: 234808 - DNA, 75 bp, synthetic construct
  source 1..75: mol_type = other DNA
aagccgccagagcctacggtttctcaacctttaaaatgtatcgctgcattattttgccttctgcgctgcgtattg

SEQ ID NO: 234809 - DNA, 75 bp, synthetic construct
  source 1..75: mol_type = other DNA
tgcggaagtggatgacgaaatgtgcaaacagggaatgccccgttttgtgatggcttatatcgatatccggctggg

SEQ ID NO: 234810 - DNA, 75 bp, synthetic construct
  source 1..75: mol_type = other DNA
cctccatggtttattttctgcgtgatgcggtcgatgccggtgtgctgacggaccgtaacggtttttatgatattc

SEQ ID NO: 234811 - DNA, 75 bp, synthetic construct
  source 1..75: mol_type = other DNA
ttcacaccattgacgctacccagccgctggatgccgtcatggacgcaattcgtaccaccgtgaccaattgggtta

SEQ ID NO: 234812 - DNA, 75 bp, synthetic construct
  source 1..75: mol_type = other DNA
tggcttatatcgatatccggctggggcgttttatttgcagttcaagcgcctggaatatcaccgaccatgtactgc

SEQ ID NO: 234813 - DNA, 75 bp, synthetic construct
  source 1..75: mol_type = other DNA
aaagtgtgttctggtttaacgtactggaagtacctccaaaacccgatgcagcaaaagcagcaaatcaaagcctgc

SEQ ID NO: 234814 - DNA, 75 bp, synthetic construct
  source 1..75: mol_type = other DNA
ctggagatgataacgctgaaccaggcagtattactgtcccctttaccgctacgccgccagtatcacgtattgatg

SEQ ID NO: 234815 - DNA, 75 bp, synthetic construct
  source 1..75: mol_type = other DNA
caacgccgccacgtatcaaccatttaccgccttcggcattgccgctgtgctctatttaattatctcttatgtcct

SEQ ID NO: 234816 - DNA, 75 bp, synthetic construct
  source 1..75: mol_type = other DNA
ctgctccattacgtcccggatctgcgccgcaagatgctgctggccacactgtggaataccggtgcgcgcattaat

SEQ ID NO: 234817 - DNA, 75 bp, synthetic construct
  source 1..75: mol_type = other DNA
accggcctacttgctggcctcggaagtgagtgcccttcttttctatatgccggatcagcgtcaccatatgctgtt

SEQ ID NO: 234818 - DNA, 75 bp, synthetic construct
  source 1..75: mol_type = other DNA
acgtcccagaggctccttgatacccggaaaggcggtaaatcctgctccggctggctgtgggcttacgtcagcgga

SEQ ID NO: 234819 - DNA, 75 bp, synthetic construct
  source 1..75: mol_type = other DNA
tccgaaggcgcaaattacaccaccgggcagtcgttaattgtcgatggtggttttatgctggcgaatccgcagttt
